United States Patent Application Publication US 2004/0214272 A1 - sequence listing, part 39

SEQ ID NO: 162329 - DNA, 531 bp, Zea mays
  Clone ID: MRT4577_79620C.1
ggcggccgcccttttttttttggagtgtggccgcacagcgaacgggcctcgcaggcctcgtgctttcagctcatgtattacagtattccctatggcccgtgtcaagcacgcacgcactatataaaatacacttatatacatacatgacgtgtactacgacaacgacgaagaagaatgaacagctagcagacgtaccggcggccgattcacaagtgtacagaaaacgatcgactccactccaactatacatatcctactatggcttttgctacaacccgatggatcagaaggcatgcatgcatgtacaggcaggcatggccatggcgatgcctgcaggctgcaaacgaatttgatcagatggctgacaccttggggacggcgacggggtacctatcgatgtcgttcatccaggggttgccccgcttctccttggccgggttcaccgaccggagcgccttccacacggcgctgttgcacttgaatccggagccgaaggcgatctgcaggtgcggtcgccctttttgatccggc

SEQ ID NO: 162330 - DNA, 226 bp, Zea mays
  Clone ID: MRT4577_79621C.1
cttaacggccgcctttttttttttttttttacttgattagggggctaaacactgagacgttttaaagttaaacacggctgtggcagaaacattgaagtgttcaaaaaaacacatcgagtgccatgctatgttttcagggaactcagggcaagctaacagggtaattactatccgtgggcggctcttggccagacttttcctggccttggtcttggcctgcgcggcc

SEQ ID NO: 162331 - DNA, 410 bp, Zea mays
  Clone ID: MRT4577_79622C.1
gaaaaacaatgaaattatgaaacaatggggtgctgatttggcccgagagatgcagcaaaacgctccgagccaggcccgggggaaacatgattcatttccgtctctgggcggccaggctcaacggaagctggcccgagcgggcaggctgcttcgagaaacaaccaatcacgccgtatgtgcttgggattgattacctgcatgtaatgacccgagttcgtacacacacatacaactcagttatatttctcaccttcagcctgcatacgtggagatccagagagcgagcttctctgctcgacgaggctggctcgcgccatacgctttttagtacaccaaccaatcatgtggaagggggcgaccgctgttgtaagcccctccggccttgccaacccaggagaagggggacgtcc

SEQ ID NO: 162332 - DNA, 237 bp, Zea mays
  Clone ID: MRT4577_79623C.1
ggataattctggaaagctaacttcaacgtatagcagttcttagtgctgtcgatacaattagcaaacatccagcctttgatacagactacaaaattacgtggtccaatcatggacatgctataagcattgagtactctgcaacttctgctctgctgggagattcatatcgattcgggaagcgaactactcaggcacttctatacgatgagaggaatgcacgctgctagatactacttg

SEQ ID NO: 162333 - DNA, 238 bp, Zea mays
  Clone ID: MRT4577_79624C.1
gtcgagtcatttgctgaaatcttgacatgaagggaggatgcatcctcaacatgcatgcatgctgtgctatttaaagatggaaacggattgaactagtttcaaaaggcagatggaatggtttcatggccatgatttgcatcttcatactagctttatttacattgcccatgttcagtttgtcggagaccataaacacatgggatcaccaagttatcttacccttgattggtttcctttt

SEQ ID NO: 162334 - DNA, 535 bp, Zea mays
  Clone ID: MRT4577_79626C.1
ccggccgggatctcatctacaggtagtgatgcatgcagcgtacacatgcacgcgcccgagccgcgtagccctgctgcggaggctcagcgtactgcccgcaatcctctcccctcgcttcttcatgcaggatcttgtgtcgaagaccctccaccgagacagactatcaccgtcgacgcggaatcctctgacaccattgacaatgtcaaggctaaaattccggacaaagagggcatccctcctgaccatgagagtcttatcttcccccgaaagcatcttgatgaatgacgcacacttgctgactacaacatccagaatgagtctagccttcatttggggctgcgccttatgggaggaatgcagatctttgtcaagaccttgactggcaagacaatcacccttgatgcggaggcctcacacaccattgacaatgtgcaggctaagatccaggacaaagagggcatccctcctgaacagaaacgggttatcttcgccggcaagcatcttgaggacggacgcacacttgctgactacaact

SEQ ID NO: 162335 - DNA, 269 bp, Zea mays
  Clone ID: MRT4577_79627C.1
gtataaaaacggcatattctttattttgcatactttaatttcagaacaaaatgaagaaaataaaataaaccacaatacacaacatccaatcctgctgtcaagagtagagagggaatggggcttgacacccttagtttactgcttcaacacaaggaaagaatgaagaaaaaaacactagacaccagcagggggagccaggtgggacaggggcactcgaggctgcagtgggagcccatggggacactatacaagggcacaagttttccaac

SEQ ID NO: 162336 - DNA, 363 bp, Zea mays
  Clone ID: MRT4577_79628C.1
caatgccgtggagcggccgcggttcaagggccgtttcatcaaggaggaggacgacgagggcgagctccggcctacacagcctgcctccttcagtttgcttcttccatcatcgccagcctcgtccccgtgtgtatcactgcatggcaaaagaactcgatagctagctgcgatacgtacatgtatcttgtaaaacagtaaccaggaaaaaaaaagaaattgctacagccatggtctgggatttcgaggtccattgatgggaggcatctttgatgactcattgctttctccgtaacaagggctcattgttactcgttgttggtctcttccctttgcgttgagcttgtgtcctatactcctatcaca

SEQ ID NO: 162337 - DNA, 164 bp, Zea mays
  Clone ID: MRT4577_79629C.1
tcttttatacgtgcgctaagagctcgtacgcgggggggcgattgatcacatcagcggtagccgcacctaggtcgaataggctgcgcacctggagacggcggcgaggccggtaaagccctcgcctgactcagcttcatcgtcctggacaacattcgagtgtcact

SEQ ID NO: 162338 - DNA, 431 bp, Zea mays
  Clone ID: MRT4577_7962C.1
gattgggaaaggatattccttattgttatttaaccatgcatatcattccaggctgggcttataaacaggaacaaggttggggatgcgaaaacaaagggcctctatgggacgaccaaggttctatcttttcaattgtctgtgggctattccgacttgaaatgatgagctgtagggccacattatgaccactgccaaacgactccggtccaggagtaaagggtttctcccatgagcttcagtcatggcttggactcacttgtgcttacacgggagcaagcaggcagagggttaaacacctccccctgcgcatgatcaatcccggaaatatagggccgaaccctgtcatcatgccctctttccatactttgaggcatatacttcggggttcgatcattgtcaaacgctgtagctgtgcgaaattgaaagaagtt

SEQ ID NO: 162339 - DNA, 3862 bp, Zea mays
  Clone ID: MRT4577_79630C.1
gcatgctttctgatacatgtaattccaaaattctcaagcagaaggtagagtcattggaagcaaaactcgaggagcatatgtcatcagctgacgaattcactgagactttgcagtcagagaggatggttatagagcataaacttaaaacagcagacggggaaatattaaaactgacaaacaaggtgagcctgctccatagggagatcgagcaggagagattgctgtcagaagagtacgaacagaaatgccaaaagctggaagctcagttgtcaagagatagccgcgacgcaaagctctggcggcttgcaaattcgaatggagatctgaaggttaagaaggagaaagagctcgctaacgcagctgggaagctcgcagagtgccagaagacgaggtgatggagtcgagttctttcactcagaggagagagagagagcgcgagggtgcgtgtccagtgtccttgtgcgttcgctcttgtgatgcccggcattctccgtgcactcgttcaatcccgcccactcccagggtcaatctcaatcccctgaagcctcttcaagaggtaagtatgattacagccaagaaattgaagtggcaagatccttgaatggcaagcaagcagcaggggtcaatttgaataatattaataaagagcatggtcaatcaatagaacaatatgtatcctccaatgttagagatgaagagatcaaggagaccttggagagtttgaacaacaaactttctgatgcgcttttgaccatcagagcaaaggaggacttggtgaaggagcatgctaaagtcacggaagaggctgttgcaggctgggaacaagctgaagctgaagctactacactgaaggggctacttgaagcttcttgtcagaagaatgcttctctccaggatcaagtctgccacctagatgaggccctcaaggaatgcgtcaggcaactgcggctggcaagggaagaacaagaggacaaaatccgtgaaatagtttccaaaactctggtgccacagtctgaaaaccctgagctccaaaagcatatcggagagctaagaaagcgactggaagtgaccagattagaagcgtcatcttccatgttattacaacatgatctacaagaaaggcttcaggcaattgagagagagaacttgggccttaaggccaagggtcaggcaattgagagagagaatttagatctcaaggccaaacttcttgtgcagtccaatgatctgaagatactaatgttggaaagagatctgagcaaccaagcagcggagacagcaagtaaacaacacttggaaggtgttaaaaagattgccagggttgaggcagaatgccgcaggctacagcatctaatgcggaaagcaacactgatcaataattctagatcagcacaaaacaattgctgcatggaatcactgactgacagccagtccgaccatggggagcatatggtgggtgttgataatgatctgcaaaattctgactcatgggcattagctttgattgctgagcttgatcagttcaagaatggcaaggatggttcaagaaatattgtgaacaatcctgttgagattgacataatggatgatttccttgagatggaaaggttagctgcattgcctgaatcagacggcacaagctctaactttgaaatggaaacagattctgacaaggccgtcgcaagaagcagctccttgaaaatcaaaagtgaagaattgcaaaacaaggtcgccaatttgcaggaaaagtttgaagcaattgcaagcgagaaaagggagcttgagatggcacttatggaggttaggaatcagcttgacatttcctgcgatgcgctagtggcggcaacgaacaggctggtcgaaatgcagatgcagttggaatcagcaaatgactccaaactttccgctttgagcctgcttgatggtttggactctgagaggaaggctttggagttgcagttggagtccaaatctgtagaagttgaggagttacttatggctgtaacttcattggaggaaaacaccgagcagaaagagttggagtcacagttagaactgatgtcagcacaagctacagagcttcgcctgactgtggcatcactggaagagagagttcaggctgaaagaaatatttctatgcagcagaaagaaaatgcagaagctatgttgagtactaaagaagaactggaagcacagctgtgttcagcaaccactgaaatggggaaactgcgtgacatggtcaaagcactagagaatgaggtcaaaacggagaaggcactgcatgaagaactaacagcacatatacagataaaggttgaagcagctgttgatgcagttaaagaaccattggaagcacaactgtgttcaacaaatactgaagcagagaagctaagagatgttgtcaaagcacttgaggatcaagtagaaaaagagaaggcattgtgcgaagagcttgcagcaaaggtagagttgaaaactaaagcagcaagaactgctgaggctgttcaagaatccttggaggcacaactgtcttcagcaaatgctgaaatacagaaactggaagagatcacgaaacaactacagagtgagttagaaaaggagaagacacttcatgaggagttctcagcacagttagagatgaagattgaagcggagagagctcgttctatggagtctgctaaagaatcattagaggaacaattccagttagtgaactcagaaacagcaaaactacgtgacacggtgcatgcgcttgagcacgatgtggaaaaggagaaggtattttctgcagagctccagatgcagctagaagctctagaggctgtaaagaaggtgttggagtcagaagcggagtcagcgcatcaggatgccaaaattctcagccagaaggtggagtcattggaagcaaaactcacggagcatatgttggtaaccgacgaattcactgccaatgtagagtctttgcagtcagataggattgcaatggagcataaacttaaaacagcagatagggaactcataaaattgacaaacaaggtgagcttgctccatagggagatcgagcaggagagattgatgtcagaagagtacgaacagaaatgccaaaagctggaggatcaactgtcgagagatagccgtgacgcaaagctctggcgactcgcaaactcgaatggagatctgaaggttaagaaggagaaagagctcgctaacgcagctgggaagctcgcagagtgccagaagacaattgcttctctggagcgccaaatcaaatcactgacagacctcgacggcgtcgtgctggagcctgaaaggcttgaatccagcagggacatgccattgccactggacttcagaaacagtgatgctgaatttgctatgtttacggatgatttatacgactttgaccttccaaacgacagcaaaagcttcttctctccactcccgtcgatccagacctcgtctccgccctcggagatgtcagtattcgcaggggggctctcgactcttagcagttacaggagcaaaagagcaagtagaaggtgatgaaaaactaggctgcgcccagatgtcgtactaacaaatagttcatggatgctgccatatgtaggtaggtaggtcgatgtacattacaggaactgattgttagatttgtgtgatgaacatcccttccagcaagcgcagttttttttagcgtgcttgatgaggtcttaggtcttactgtgtcagtgacggttagtgtggtacaaaatgtgaactcggttatctgcgtgtgtttccagttacaggaaagtgcagaggaagtgcatattcaatgctcaagtgatgtttaaaaaaaaaaagggcggccgctcgcgatctagaa

SEQ ID NO: 162340 - DNA, 388 bp, Zea mays
  Clone ID: MRT4577_79631C.1
attcggctcgagggatgatgctctgcgatttttgagtgaagttgttatgccagctaatcaggactcctttcattcttttttatttgttgtgaactagttcaaaaatgaagtagtgtgcgacacatattctagaacagcgttcgtaggccgatttcgtgggttgttgattgatgcatactctggggctgcttctgctctgctgactgacacaaacacaatggaaagatagcagcgagggatcgggagttgcataccaccaatatctcatgttcggttgatcagatgtgtaggtggcaatgcaacaatgatagaccggcgtgcagcatctggaagctctaggtgcccgttaattaataccaaacctgtacctgcacgcataccacattat

SEQ ID NO: 162341 - DNA, 718 bp, Zea mays
  unsure (1)..(718): unsure at all n locations
  Clone ID: MRT4577_79632C.1
aattcggcacgagggcgctctcctccccttccgttctcctctctctctctctctctctctgctctgccgtccagtgagcagtgagctggccgggcaccgggcgttgccgcttttccgatcccacctgtgccccgctgtcctactgaccaaaagcggagttagggaggtagatgagagagaccctgtgagctgatggagtcgagttctttcactcagaggagagagagagagagaactccattgtccttgtgcgttcgctcttgtgatgcccggcattctccgtgcactcgttcaatcccgcccactcccagctgtctctccaatgccaagtgctgttgatctctcggacctccacatggtacggtggtagccccaaagagggagagagcagaagaaccacttttcatcttttgagcggtccatggttatggatcgtgcgggctggctctggaggcgcaggtcgtcggataagatcccagggggcagtgacagctctctgtccgtgtcgtcacattccgagcggtgctctgatgatcagggtcaatctcaatcccctgaagcctcttcaagaagtaagtatgattacagccaagaaattgaagtggcaagatccttgaatggcaagcaagcagcaggggtcaatttgaataatattaataaagagcatggtcaatcaatagaacagtatgtatcctncaatgttagagatgaagagatc

SEQ ID NO: 162342 - DNA, 306 bp, Zea mays
  Clone ID: MRT4577_79633C.1
gagcgagcccaagcgccttctccgcaccagggaagccccacccaccagaagccaagatgtccagcaagcgggccaaagccaagaccaccaagaagcggccacagcgggccacatccgatgtcttcgcaatgtttgaccagtcccagatccaggagtttaaggaggctttcaacatgattgaccagaaccgtgatggcttcattgacaaggaggacctgcacgacatgctggcctcgctggggaagagacccacagacgaatacctggagggcatgatgagcgaggccccggggcccatcaacttca

SEQ ID NO: 162343 - DNA, 2607 bp, Zea mays
  Clone ID: MRT4577_79634C.1
agagagtaccagaggaaaaagacacagcacacagcacacagcagcaggtggtggtgtggtggcctgcgggtttgctttgcttgtcgatttgagccgccccgcgcgggaaggggagggaactcagggaagggaggaccaagaacactgcccctgcacctgcagcagcatgcaggaagacgccaatggcgccgcctagtattccgaccgtatctacggtacgtactacgtactagtatactgctcgtaccagtactgccactgctccatttccttgcgaagggaaaaaaagaagaagaagagcggctttggatcctcgcatttatcgctcgctcccatgaggcacaccaccatcggtccgtgtcactccatcgcacgcatcgccgccactccgctcggcccgacgcccgagaagcattcgaggaaggaaggaaggaaggagatccgattccaaccaagccgggagctgagagctcccccaccggccccgccgcacctgcagccgctcgcttcggcttcgctcaggctcagcagctgtgtgtgcgtctgcctgtggtgtggactccccctcacatggcgagggcggaggagagccgcaccccgcagctgtctccccattccaatgccgagtgttgatctctcagcaaggagggagaaagcagaaggaccggttttgatcttctgagcggttcatggttatggatcgcgcgggttggctctggaggcgcaagtcatcggacaagagccccgggggcagtgacagctctctgtccgtgtcgtcacattccgagcagtgctctgatgatcagggtcaatatcaatcccctgaagccttttcaagaagtaagtatgattacagccaagaaactggagtagcaagatccttgaatggcaagctagcagcaggggtcaatatgaacaattttaatccagagcatggtcaatcatttgaacaacatatatcctccaatgttggagatgaaagagatcaaggagaccttgggagagtttgaaactacaactttctgctgcactttcgaccatcagagcaaaagaagacttggtgaagcagcatgctaaagtcacagaagaggctgttgcaggttgggaacaagctgaagctgaagttactactctgaaggggctacttgaagcttcttgtcggaagaatgcttctctccaggatcaagtcagccacatggatgaggccctcaaggaatgcgtcaggcaactgcggctggcaagggaagaacaagaggacaaagtccgtgaaatcgtttcgaattctctggtcccgcagtctgaaaaccctgagctccaaaaccatatcgcggagctaaaaaagcggctggaagtgaccagattagaagcgtcatcttccatgatattacagcatgatctacatgaaaggcttcgggcgattgagagagagaacttggaccttaaggccaagcatcaggcaattgagaaagagaatatagatctcaaggccaaactgcttgtacagtccaaggacctgaagatactgatgttggaaagagatctgagcaaccaagtagcagagacagcaagtaaacaacacttggaaagtgttaaaaagattgccagggttgaggcagaatgccgcaggctacagcatctaacgcggaaaacaacactgatcaataattctagatccacacaaaacaattgctgcatggaatcactgactgacagccagtccgaccatggggagcatatggtgggtgttgataatgatctgcaaaattccgattcatgggcattagctttgattgctgagcttgatcagttcaagaatggcaaggatggttcaagaaatattgtgaacaatcctgttgagattgacataatggatgatttccttgagatggaaaggttagctgcattgcccgaatcagatggcacaagctctaactttgaaatggaaacagattctgacaaggctgtcacaagaaacagctccttgaaggtcaaaaatgaagaactgcaaaacaaggtcgcagatttgcaggaaaagtttgaagcaattgcatgcgagaaaagggagcttgagctggtgcttgtggaagttagagatcagcttgagatttcctgcgatgcgctagtggtggcaaagaacaggctggttgaaatgcagatgcagttggactcagcaaatgattccaaactttctgctttggatgatgtggagcgtttagactctgagaggaaggctttggaattgcagttggagtccaaatctgtagaagtcgaggagctactcatggctgtagcttcattagagggaaatgcagagcagaaagagttggagtcgcaattagaactgatgtcagcacaagctacagaacttcgcctgactgtggcatcactggaagagagagttcaggctgagagagatctttttgtgcagcagaaacaaaacgcagaagccatgttgaatgctaaagaagaactggaagcacagctgtgttcagcaaacactaaaatggggaaactgcgtgacattatcaaagcactagagaatgaagtaaaaaaaaaaaaaaagggcagccgctcgcgatctagaactagactagttctagatcgcga

SEQ ID NO: 162344 - DNA, 215 bp, Zea mays
  Clone ID: MRT4577_79635C.1
cgctccttggtggtgtccaactttacggcgacaaggggacagctgcctttttttcttgtctacatggatgggcctttacactcactaactttgcgaagaggtattcatctaaattcggagtgggtggatctcagatgatgggaaggctatggggcgagaatttctttgaccctgccacaaagaaatggaccacccacaacacaaggactcctacc

SEQ ID NO: 162345 - DNA, 508 bp, Zea mays
  Clone ID: MRT4577_79636C.1
ctaagaaaatggaaccgttttcattaagaggcaagagggccaagttcccttaccaggggaaatggcccttcgccacactgaacaacccagggtcatcctaattttggggaaacgggaaaccttaaaccccaatttaaattcggtcccaaatttggtaccaacccaaagggcaaattaaatattcaacggttggcattcgccaaggccctggcccaggcccacttttgccaaacccaatgggggggcaaactaagggccccatggaccaatatatcgtgttaccaaactaaaatcccctgtcccctcaggaattatccaagcttttacccaaccatattgtttgcccctggaggaatgggtgctttctggatcccaagaataaaggccatcccagtttttttgaaagaaaggcctccaggccccttttttcctggggtgaaaactcaaggttcccctgggataaccatgtacttggaacctacaaaaaaaaaaccagttggggaaaaat

SEQ ID NO: 162346 - DNA, 468 bp, Zea mays
  Clone ID: MRT4577_79637C.1
agaagccttaaaacccataaatttgtcatcgggtgattggggtgtgattggtctaagtgaatcaaacgaatgttttgtttcactctgttctctcaagttttagtaaggcggggacgatcatgtgtgttctgtgaagggtttgaaagacaagcacgatcatgcgccctaagaacacgtgagtcttcaaagtacacaagttttcacatttccaaggaacacgggccccaacaagctgtgaaaagggcaggattccagcgactgggatgggcaccacttcacaacatttggcaacatttttggccgccttcgggctcattatactcctggagttcaggccttgggacatgtgaaccacactttccattttgcgcttcacgcgcaggcgggaagaagagcttaccatcctgttaggtggtctgtggttgagaaccattcccccttgtgggttcggagaccttttccctttga

SEQ ID NO: 162347 - DNA, 210 bp, Zea mays
  Clone ID: MRT4577_79638C.1
gcgactcctacggcacgacacccatgcacacggggaggaacagatatgggggggataatgtgaagaggggtggctatttgagcaaatacttctgaacaaagactagtgctaaccaagggacaaagcacataaagtatacgaagagtgactattgcttgtgattaccaatccaagccacgcgaaaaggcataataggaggatacatgaggc

SEQ ID NO: 162348 - DNA, 323 bp, Zea mays
  Clone ID: MRT4577_79639C.1
gccttcacatggtggtatggtgatgcctaagatggacggggcgcttgtagattacgggttttccggaatgtatctcatctagcaagcgtccctacaggagggaacgaggcactatgcagcttggggctaccgaaacacataaggcaagcattagaggggctgcaggcgcactctggttagagaggatatcaacgcctaaaacgagcgtgccggcatccatgaacagccttgcttgaccactagtcaaacccgtgctcgaccagagcttcacctccatgtgagcgactcagctaggggctagctggtgctctgcgccaaccaac

SEQ ID NO: 162349 - DNA, 297 bp, Zea mays
  Clone ID: MRT4577_7963C.1
gcgcagaaaaaggaagcagcagctttgatcgggtggagtttattgctcactgatagtcgagtacctgttcaatcgaagttacaggagcgcacgtacacactgaagactttgcggtccgagacgatgtctaggagagccgcaccgttgttgctcgcgtgccttgtcgccgtgacagagggggctctggctgactgcgcgctgcttccgctagttcgttgagagcggcgcgagctcgaaaggcactagttacgacgtgggcgtctggcggcgaccgttcggatctggagcacgtctgtc

SEQ ID NO: 162350 - DNA, 548 bp, Zea mays
  Clone ID: MRT4577_79640C.1
ttttctttttttttttttttttttttttttttttttttttttttttttttttttggtttattgttttgccttttaacattccatcttaacccttacaagaggcccacactaccccccttttgggaaaaccccccccgccccggggggggggggggcgcccaacccaaaaaagaccagcgggggacaaaaaccgaaaaacagagggggggggcgggaaggaacaggcccaaaccccggccccacccccccggaaggccagccccggaaccacaccagccggccagccccagcgggattaccccatagccgaagggccccagggggagccacctcccacgacaacggagaccgggaaaagagggggcagcaaggcccgctccaaggcatatcaacaaaaaaggggcccgcccttgcagggaaaggacccatgcagagcaacaggggcaccacggggggggccgcccaaaaacggggggcccccccagaaccccgcggccccctgaaaaaactgagcccttttcatcggccgactgggattaataaaaagg

SEQ ID NO: 162351 - DNA, 178 bp, Zea mays
  unsure (1)..(178): unsure at all n locations
  Clone ID: MRT4577_79641C.1
gggaggtagtganaataaataanaatanggggtgtgttagtgtatggtaattggaatgagnacaatntaaatnntttaangaggatnnattggagggnaagtntggtggnagnagnngnggtaattnnagttnnaatagngtatatttaagttgttggagttaaaaagttngtagttg

SEQ ID NO: 162352 - DNA, 119 bp, Zea mays
  unsure (1)..(119): unsure at all n locations
  Clone ID: MRT4577_79642C.1
attccggaccgggtactgaaagccgtgttttttcnttccctatcagtagagtacgtcattagagcttaggcgtcaatccatggtccatcagctgtttacctagtgtcgaaattacgtta

SEQ ID NO: 162353 - DNA, 479 bp, Zea mays
  Clone ID: MRT4577_79643C.1
cttcagtatgggagtatataaaacggggaaattaagcctgcttaagggttactttcctgggttgggtagatttaaaaacttaagcataacgagttttaaacaaactctttggcctaaatgatcatcattgacgacatttgttaaaccagaccggttctgtgatagaaaatttaaggatataactttataaaccaaaaaaaaaaaaacatgataacatgagtgtgcttatggggggtttgtagtaggtaaagacagaaaaccaaagtgtacgcaaatacggggtcgtatccgaaaacacgaccttattttttctaaactttgaccaaaaccacctatcccacttggctttgccttctaaacttttttctctctttcccacccaaaaaagggaaaatgaaatggacaaatggccgttatcacggtttggaaacggagggagcgtttttaacggtgaccaacgatgagccattaccgttagc

SEQ ID NO: 162354 - DNA, 302 bp, Zea mays
  Clone ID: MRT4577_79644C.1
gcgagtcaatctcaatcgtggtctgttcagtggaagacagagtcctcttcgcgctctcactggcaagctgagggctctccagaagctgatgaccgcttgtaaaaggctgatgatctctctctttaagtccatcccgtccatgtttcaccacccgccggaagccctgagcgacatgatttctccggcgccgactctgccttcgtcgtctccctccgccgccgtcataccgttgatggacctctcggtgacgcggcgcgaggacctagtagagcatttgatgcactcttcctttactgtgggct

SEQ ID NO: 162355 - DNA, 238 bp, Zea mays
  Clone ID: MRT4577_79645C.1
aaggggaaccaaacaagccaagccccttgaatttaaacactcactacatgtctacacgcgtgcatgaagtcagggtctgttcccacagaccaccaacttaatcttacactcgaggccaccagggaaaacgggtggagtacaacacacacatttccaggggggcgggtagtggaattcacctaaggataaacctagcaagcgcccttttcaacggcggtaacataggggccgggacaaa

SEQ ID NO: 162356 - DNA, 781 bp, Zea mays
  Clone ID: MRT4577_79646C.1
caggtgctggagctgagaagatcccttgagacccgggaaggaggggcaaaggcgaatggccaaaattcagacgcgaagaacaatccgcatagtaataataagctcgtcaagcacaacgctggctccactgggagcagcatcgctgcactgccaggcaccaacggacagggtgaagacgatggtgactgcaatgggcatgacatgaggaacgccgcagccgacggggcagcgaaggagctggcctcgctgaaggagagcagcaaggcggtggaggaggagctgaaggagctgcacgagcggtactcggcgattagcctgaggctcgcggaagtggagggcgagcggcagcagctcgtgatgaccgttcggtcgctgaagaactccctccttgcggtgactgatgcagctccacccaaattgttgtagctaaaaggatttagacgataggtttgtccgtgacgtggtttgtccgtcagagtcacagtacacagcatgtagatctcgtcacagtaaaatgtgcagtaatatagccataggttgtaatagttgtcatcccctctctacagtgtcagtgtgtcgtgctgtataatttccgtgacgtcattgtgttgtgaagtaaggaaaatgagaaggaaaagagtggtctttcagtttaatctcagaaacgcttgcgttgtgttccaagttcctgggtgtacagttaaaagcttgttgggttatttccaatacacatagattggatgagaatgaaaaaagttaagaagaagtttaacttgtttgg

SEQ ID NO: 162357 - DNA, 890 bp, Zea mays
  Clone ID: MRT4577_79647C.1
gccggccgggtcacacaccgccacagagctgcaggtctatgcccacttcgtgcaaccgatcgagggtcgctgcttctctggccggccggccggggagatcgacatgagaaggaaagccgtgttcgcggtggggaagaagaagaagaacggaggcacggcggcggcgttgcggacgggcaggaggccgttccagcatatggctctggcacggctcagggagctcaagaagatcgtccctgacgcccaggacgccgccgacgtggacgtgctgctccgccggacggccgactacatctgcgccctcgagctcaagctgaccgtcctgcggagggtatcagccatctacggggtgtgatgcttcctttgtctgtcgcgctggcagcctggcaccttcgtcgtcgtccagtcctacgtacgtgctccactccgtcggtcgtcgtccacgcacgatgatgaaaggttttgaggtcaaaacctgctgcggttgtgaggggccggacgaggggagaagatttctcgcatgctcatctcttggttgttgctcctacgggagttagtttggatccaatatgtgttgtgcatatggcagttaattagtttgcaggtgaggccaagccattgttatagtcagtggtgtttagtttagcctgttggcttgaagaacaaggatccctagagtctgcttttattcagtttatggagttgttcatgttcgctttttttcctttttaaaggtcccacgagtgaactagttattgctcatgtagtaatgccctgtctccgttctcgaatatttgtcgcatgttagtttattttttaaattaaaccgcgataaataaaaaaaacggagcgagtaatatactatttggatgcaacgatctccaccttcg

SEQ ID NO: 162358 - DNA, 539 bp, Zea mays
  unsure (1)..(539): unsure at all n locations
  Clone ID: MRT4577_79649C.1
cgcaaaactccacacaccttcctgaatagtagccactagcttcagctgctccccgaggggtcgatcgagctcctcagccttcctcacgcatagctagaaccggctagctcaatcaacaccacaaccgatggagtttgacctgctgaattacagcccggaagcgcagcttgagctgatgaccacgatgctccagctggagcagctaactgcgctcgacggccatcagtttccgacgatggcgcctgtctcgccgccgatatccccgatgcaaacccatcatgcaggtcacagcttgtcgcctccgccacacatgtcggcgacgacgacgaccaccaccaccgggtacccagagcagtacacgccggcggcggccgtgtacggcgccaccgctaccggcctcgagcacctccaggactacgtgctgtccccgccgggcggcgactgcggcggcgcggcggcggcgcacgcggggttcgacgtcgccgacgtcggcggacgcgatgcgggaggcgatcttncacatcgccgcgctgcagccg

SEQ ID NO: 162359 - DNA, 290 bp, Zea mays
  Clone ID: MRT4577_7964C.1
aatgcatacaaacagtggccttactaacgagggaaggggcagaaatcgaggcccactgacttgacaagcgatgacccgcttcgaccccattagtgcagcgaccggacgcctcatttagtgagaccacacaggctcgctacatagggccaagggggggatatactgggggcacactgttgtggaaaacccagcagagtacgtgctaacggctaataagaagaacgctcatctagctcaccacataaggagagcacctggatccgatagaggcaaggcactttgcgaatgct

SEQ ID NO: 162360 - DNA, 858 bp, Zea mays
  unsure (1)..(858): unsure at all n locations
  Clone ID: MRT4577_79650C.1
tcgaggcggcgggccggactcacgccaccacacagagctgcaggtctagcaacacttcgtaaatcttagctagtttgcaaccgatcgagagtcgctgcttctccggccggccggggagatcgacatgagaaggaaagccgtgttcgccgtagggaagaagaagaagaacaagaacggaggcacggcggcggcgttgcggacgggcaggaggccgtcccagcatatggctctggcacggctcagggagctgaagaagatcgtccctgacgcccaggacgccgccgacgtggacgtgctgctccgccggacggccgactacatctgcgccctcgagctcaagttgaccgtcctgcggagggtctcagccatctacggggtgtgatgcttcgtttgtctgtcgcgctggcaccttcgtcgtcgtccagtcctacctacgtacgtgctccactccgtcggtcgtcctccacgcacgatgatgaaaggttttgaggtcaaaacctgctgcggttgtacattcaccggacatcacggaggagggggagatgatttctcgcctgctcatctcttggttgtgcccctcagcagcagtagtagtatggttgttgctcctatgggagttagttgggatccaatatgtgttgtgcatatggcagttaattagtttgcaggtgaggccaagccattgttacagtcagtggtgtttagtttagcctgttggcttgaagaacaggatccctagagtttgctttattcagtttatggagttgttcatgttcgcttttttttctttttaaaggtccacgagtgaactagttatttgctcagtagtaatatcctgtctccgntctcaatatttat

SEQ ID NO: 162361 - DNA, 771 bp, Zea mays
  unsure (1)..(771): unsure at all n locations
  Clone ID: MRT4577_79651C.1
ngaactcactcatcacgctccacctccaccacccccatccatccatccatcagagaagagagagagagacagagagagaggagccatggccaaggaggtgagcgaggagccggagcacgccgcgccggcgcacaaggactactccgacccgccgccggcgccgctcttcgacatgggggagctccggatgtggtccttctaccgggccatcatcgccgagttcgccgccacgctgctcttcctctacatcaccgtcgccaccgtcatcggctacaaggtgcagtcggcggccgacccgtgcggcggcgtcggcgtgctcggcatcgcctgggccttcggcggcatgatcttcgtcctcgtctactgcaccgccggcatctcgggcggccacatcaacccggccgtcaccttcgggctcctcctggcgcgcaaggtgtcgctgctacgcgcggtgatgtacatcgtggcgcagtgcgcgggcggcatcgtgggcgccggcatcgtcaagggcatcatgaaggacgcgtaccaggccaacggcggcggcgccaacatggtggcctccggcttctcccgcggcaccgcgctgggggcggagatcgtcggcaccttcgtgctcgtctacaccgtcttctccgccaccgaccccaagcgcagcgcccgcgactcgcacgtaccccgtgctggcgccgctccccatcgggattcgcgggtcttcctggggcacctccgccaccatccccaatcaccgggtaacccgcatcaaccccg

SEQ ID NO: 162362 - DNA, 614 bp, Zea mays
  unsure (1)..(614): unsure at all n locations
  Clone ID: MRT4577_79652C.1
ggtacccccgnggtccggccgggagccgctggcttatctccagcgcacgcgcatctcctggccgcgccgctcaacgcagggagaaaatcccaccgccccagcctgtcttcttcccctcgcgcgcagcccgcccctccatggctcatctctgcgcacgccgaaactccctccagctcggcctctggctgcctgcgcgcgctccctccctgcttctccctccctctcacgttctctttcctgcgcgcgcccgaccagagctccctcaagcttcctagttcgctcggccacggacgtcaattgtcctcctctgctcgttcgtctctgcaaccgtgttcccggctccgcagtttttctacgggctctctctcccacggccgagttcccatctcactgccctctgctcggcgcccagctcggatcttgtccagtgccgcgccgtgctccttccgtgcgcctggctagtcccagctctgtccgagccgnctgcgctcgcctgctcgcccctgcgcgctcctctgtcggcgcccacctccctggccgagcgcctttcccagcctcgaagctcccattgcgngccctgctcctcttggtgcaaccacgttcctctaccggcc

SEQ ID NO: 162363 - DNA, 248 bp, Zea mays
  Clone ID: MRT4577_79653C.1
ccttgtccttccccactttctccttccttcttctccttcccgctcccctcgcccaaccaccggtccgtgtctttattaaaccgagcctaactccacccaatccttccgggcctcccggctccacttttaagacaccgaactcacacttacccttcgccttccttgctctcgacctttcttcgccgcccccgatgccttcctttcccttttcttcttcttctacttctgctttcccgaccccgaccgca

SEQ ID NO: 162364 - DNA, 358 bp, Zea mays
  Clone ID: MRT4577_79654C.1
aacacctgtagacacgaccgagtcccgtgcccacgccgccacgcgagatcgggaaatccatggggcctcatctccctctccatccccatccgctgggtactcgatctaaaccctaatcaatatagttcgcaccagatcgatcgcgtgtcaggtgaaatctgaaacgatttgaacgatcagaacgaacaacgatttagcttcagctcctgagatccagcagcaatggatcgcgtcccgcgtccaagcgcggctaccactacgaccaggactccccaacgtgccggtccaagcagcgcttcgaccggcgcagcggcggccagaatgctaactcgagctaccaccggcgcggcccccccgg

SEQ ID NO: 162365 - DNA, 351 bp, Zea mays
  Clone ID: MRT4577_79655C.1
gggaacatcaccgtgtagtgtacgtacatatctacgctagctactactactactgagtgtggaaaccttgtggttcacatgaaacgaaagaatacgctgcaaaaatgtactagcgaaaagaaagaggaaaggggacaagtacatgtacaatacgacgctgcttccctccctccggcggccatttctgcatcatcgtcgtcgagattcctggtgcggtgcggtgcggtgcggtgctgtgcgtcgtggcgtgcgtgcgtacggatcgtcatgtcggcctgctgcttccgcggctggaggacgaggacgagccggagtggccgctgccccccagcttcctgctgatgctgtgga

SEQ ID NO: 162366 - DNA, 487 bp, Zea mays
  Clone ID: MRT4577_79656C.1
agaactccgcatgcggggtcgggcacgctaatggcacacttgctccttttttacacgtgagcgtattacatgttgcactcattgagcggccctttgtcacattactatcggccaccgtcaaggcatgatgtgcacactctacctcctcttcacattgctacgagacgcctaattatcccgatatgcactgggcgcctccatcaggtgcttcgtcaggatatgttgcaaaccatctcaaaagacgttgcatcaagcttctgatcaataggagccactcctactctatcgtatatgattagtccggactctatctcttattgcgtggccacatatacacacgcatcatacgtatctcttccacacttacttgcaggacatgtagtctctcaaagggccaacattctgctgcatacaacataagcgaccaaatcgctgtactgtagaataagccttctagtttgtgatgcaccccgtggtcgaataagac

SEQ ID NO: 162367 - DNA, 593 bp, Zea mays
  Clone ID: MRT4577_79657C.1
aattcggcacgaggctcatcccttctcttccctctctcttctctctaccacgaccgcgccaaggatcaagcgcacgcgacgcccgacgcccgacgccccgactggctcgacccgccagcgcccaggaagacccgacgccgccaacgcccaggaagactcgaccgaaccctaacttcttgccgccgccacctcctcttactcgcatgccaccgtcgctcccctgggcgcaaacccgctgtcgctcagcccggcgcacgggatcgggcggtccggggacgccggcagtacacacccgtcgtcggtttccgcaggtggcgcgccctgatgtcacgcggcatgtgcccgatccgctgtcgctgtcgctgtaactgtttccaagattttgctctgcgagcttgctggatcctctgaccgcttccgcgggacgagttcccgaatatccattttttattattctttactacctttttctgctgactccattttttctcttaaaaaaaaagagctctactatttaaacaagcggcgcgtacaaatcgagcactgaaccttgtgagcccaggttcatttcttacgagactaaatatgcactg

SEQ ID NO: 162368 - DNA, 1836 bp, Zea mays
  Clone ID: MRT4577_79658C.1
gggtacctcgaggccggccagcccgggaactgttttcatccggtcctcccccgctcgtgagttgtgaaccggacccatcccaaatcccaattccttgtcgagctcctcgaaactaccaccgccccctcgtttttttcacagcttcacccgacgaacacggcaccacgagccccgcacggccgcaacccacccagatttagactctcccaccgcggctgcatatctctcccccccccgcactccggtcgtcccattaccctctggcattggttgtcgatttcttcgttcgtgcttgcttgcgtaaactatttaaaaaaatgaaggcaaatatgggcacaaaagctcgtccaccatctgctgatgcagaaaaaggggagattggcgaaatagatacaagggctccaattcaatctgttaaagctgcagtgagtttatttggtgaggtccgcttttcatctgacaaatcagctgaaagaaagcccaaggctcctcaaacagagagggttttagccaaggagacagagttgcacatggcccagaaagagttgaataaatacaaggaacagctcagtaatgctgagacaacgagagtacaggctctctctgagctagagaaagctaaaaaaactgttgaggagctaacagccaagctggatctgattaacaagtccaaacagttggccatccaggcaacagaggatgcaaagactcaaatcaagcagcttgaaggtggcagcacaagtgaaggtctaggaacagatggtgctctgaagcaggaactggaaagtgcaagggagcagtatgctgttgctttggcagaccttgatgcagcaaaacaagagcttagaaagctcaagaaggattttgaaacatctttggatatgaggttgtctgctgcccagcaggaagaggaatcactgcatacaactgaagccaacatagaaaaagctaaccaacttcgtagtgagattgccgaaattcaagaatcccttatgcatgttaaggcagctaccgtgcaagcacacgaagaagaggcacaaatccttgctgagaaggatgttgctaggaccacgtataaacaagctttggaagaaacacagaagaaattgttgtctttgaggaatgattttgaccctgctgcttatgatagtctgaaagaaaaactagaacaaaccaattctgaggttgcatctatgcaaaaaaagatagaagatgctcgggctcaggatttagagtctgttgctgttgtcagcacagagttggatgatgctaaggaaatgttgcaaaaagtagcagaggaggaaagttctcttcgaagtttggtggaatcactgaaagtggaattggaagctgtaaaacaggagcacaaccagctcaaagagaaagacacagaaactgaatccattgtcggagatttacatgtcaagcttcagaaatgtaaatctgtgctggaggctgctgtggctgctgaatcaaaagctacgtcagcttctgatgacctgatgctggcccttcagcaactgtccgcggagtcaaacaatgcattgcaagaagctgagataatgcagaagagtgcggcggagctaagagaggaagccaaaaaggctcgggctgaactagcagaagccgaacaaaagttgcagttgacgttaaaggaagcagaagaggctaaagcagctgaagcaatggcccttgaccggatcaagcagctctcggatagagcaagtgctgctagagcatcaacttcagagtctggagcaattatcgcaatttctaaagaggagtttgtatctctcagccgaaaggtcgaggagtcagagaagttgagtgagatga

SEQ ID NO: 162369 - DNA, 1293 bp, Zea mays
  Clone ID: MRT4577_79659C.1
cgaggccggccggggatttttcttctctcgtggctccgacgctcctttctttctcggaggcgacagctcgaactcgaatccctcatccagcctggcgctggcgtcgccggtcgccgccgctcgattgcctccgcctgaatatcccttgccccataaggcctgaccttgaaagcctcgcctcttgatcccggcggcggcggaggggagggcgatgccgaagcggacgacacacacctactcgagcgaggacgcactgccggagggccccgagtccgaccttttcgtatactactgcaagcactgcgcctcacatgtcctcatcaccgatacccaattgcagaaaatgcccaagcgaaagactgacagagcacatgttttagacaaggctaagcatctttcaaggctaaatgttaaggaggcaggaaaagtaatgttgaaacgtggtgaaggaaagcttgaaaagcagtttcgcatgagctgtgtgggatgtgacctttttgtttgttaccgatcagaagaggatctggaggttgcccctttcatatacgttattgacggagcactgagttcagttgctgctgagacaaatccacatgatgctcctgtacctccttgcatcacacaactggaaggtggacttgtccaagtagccattgaagtggaagaccgggcacaacgttcagcaataacaagagtgaatgctgatgacgttcgagtaacggtagctgcccttgctgctcgaggggaagctaacagtgagttgctagaatttatgggcaaggttcttggcctaagattgactcagatgacccttcaaagaggatggaataacaaatcgaagcttctaattgttgaggatttgtctgcacggcaagtgtatgagaagctcctagaagctgtacaaccttaggcacccgagcgatggagcaatgtggtatgcagtatgcgtctggatattctctttcgagggcataggagaaggtttccatctatattgtgcaacaagtggagcagaacgtgtcgagacgaggtcgaaacatggctcaaatgtataactagaccatagcagtatccggttcattgtttctgtcgtgactcagatattgtatcctgtggtctcaagggaggtggttttgtgatttccacattctgatccagactgtttttgtggccacgacgcgtgctcgtgttatttatttgcaaaataaatagatatatataaaatgtgcgagcatgcgtaaaaaaaaaaaaaaaaaaaaaaaaaaaaaaaaaaaaaaaaaaagattttaaaaa

SEQ ID NO: 162370 - DNA, 429 bp, Zea mays
  Clone ID: MRT4577_7965C.1
aaaacaccaaatgggcttttttttttattaagggacagagcacaagtctaaagggtttaaagttctggaactttggggttgaaacttgaacaaaaacgtaaaaatgaactaaggggagaatttaccaatacaaactcatcaggggaaacaaaaacggccacacagcccaagctaacctttttaagcatttcacgcaaaagggggggacttcaagtcccaacaggaatgtcaaacctgtttttttcccgttctggggttacttccctaacaccaaacgcttaaaaagaggggggattatggactccttaataatccaactaaacaacgttttttataaccagtattcggtttgtatatgcaagctttataaacattgccattttccatgtgcttcggagcagaaaaaaaagctccgagctcttttaaaaa

SEQ ID NO: 162371 - DNA, 950 bp, Zea mays
  Clone ID: MRT4577_79660C.1
tgggtacccgggccttcccctcggcgtccccccccccccccccccccccccccccccccccccccccccccccccccctgggacgacgaaaactcaaattagacataatcgatacatagtcagtcgattcctcttagtttgtctacatcagttgacaaccatgatagatagttattagttactcctaattagttatccccacataaataaatagaagttagggagttcataggagggcaacaggagcgagcttccctgagggtatgcatccatcatcttaacacagcgaaggggtagctatgtcttgggtcgtggccccatccatacagaaacaacaaatcacttgttcacgctgagaaggtcgatcgaggggagagaaagaaggggaggagtgccatgtcaaggaacccctggtggagctccaggaagctgcgttctacctcgtgcgtcgcgacatggcggtcctggatcacgtgcgccgcggcgagaacgacgcccagctccaccacccgtagtggccgtcgtacaatgtcgctcccttaggagatgactggatctcgtcgtctgtcatgccgtcctctgccattagcggattgtccgggcagggggacgaacatggcatgcctggatccagggtctatcacagccggggtgcgcgcggagggcgtttgttaggcacaatgacttgcctttttcattggtgcatggatcggggccaacatttacctttttcccaaactctccttcactatcatcagcatcgattgatagaatctaacatggagaataccaatgtggtcagtctattccctactaaaattagcaattacagtaacatatagtagcgcctttaagatctctcttcatccatcagatacttctcgatcttaatagcagattttggtagcaatacactgtcagatttcttctatgaataaagcaattttggc

SEQ ID NO: 162372 - DNA, 1210 bp, Zea mays
  Clone ID: MRT4577_79661C.1
cccacgcgtccgccccccacgcgtccgcaatgttcgaaattgtggagtcaacacttatgcagaatcttagcctggcaccaagatcagttgccatttccaatgttcaattcagccaaggaaaccctctaacattcatagtgagtatttttccggccagtggaacgagcttcaatcgctcagaagtcataagaatcatttctcctctggtcaaccaaacttataaagccccacccaattttggaccatacagcttcatagcgaacacatactttacagttcccagcaataagaagccctcgatgggcaaggctgcaataattggaatatcaattgggggtgttgtccttattcttggccttgttgcagtagcaacatatgctctacgacagaaaaggatagccaaggaggcagtagagcgaactacaaatcctttcgcatcatggggagctggtgggacagacaacggagatgcaccacaattgaagggtgcaagatactttccattcgaggaactgaaaaaatgcaccaataatttctcagaaactcaggagatagggtctggaggatatgggaaggtgtacaaaggaagacttgcaaacgggcaaatagctgcaataaaacgtgcacagcaagggtccatgcaaggtgcagctgaattcaagaatgagatagaactgctgtccagggttcatcacaagaacctagtgagcctagtgggtttctgctacgaacaaggggaacagatgttggtttatgaatatattccttatgggacactaagggagaacttgatgggtaaaagaggagtgaacttagattggaagaaccgcctcaggattgccattggctcagcaaaaggtctagcatacctccatgaacttgctgatccaccaatcatacacagagatatcaaatcaaccaatatccttttggatgaaagtctcaatgctaaggttgccgattttggtctttcaaaacttgtgtctgacacacaaaagggtcatgtttctacccaagtgaagggaacattgggctatttggatcctgagtattacatgacgcaacagctctctgagaagagtgatgtctacagctttggagttgtcctgctagaactagtaactgctagccagcccatagagaaaggcaggtatattgtccgtgagatcaggacagcaatagatcaatatgatcaaaaatactatggctt

SEQ ID NO: 162373 - DNA, 491 bp, Zea mays
  Clone ID: MRT4577_79662C.1
atgagacagtcacatgcatatcctcatgctgcggcgtgcataggcacactgtttaaaatggcaaacacactccaacgtgacggggggcggcggagccctggtaccctattgagtgttataacggacaggcatcagaaaacacgctgaatgcgtccgtcaaccatataaaaatcggggggcacatgcgtgtctaatgcttcggacggcgcgcggggctaggagggcaccgtgtcccccgcccccacccggagcctattgaacaacctgacgggcaacacgaccctgcccttgaccccctgggcggactagaccttgccaaactctacaccctcgtttatgatattcgaggagaggccttatccgtggaggctaccggcggggcataacatgagctgactgcgtgcacgcgccgtgcctctacgcgggaatccacagcttcggccactgcggactcatccataacccgaatggcgcccagaagctaccacggg

SEQ ID NO: 162374 - DNA, 282 bp, Zea mays
  Clone ID: MRT4577_79663C.1
cacaagacgatgatcacaattgacggcatacaaggcctgtggtgcagattgaactgttacacattgccagccagtttgttacactcgctagcttgcggcctcaagaacagtcgtgaagaatttttgagaacgaaccttttatcgcatctgaaactcccctaggcttaaaaataaaagcggttgctttgaaagaagaaaattccataacacctaaaattgattcttgggatcctccaaataaaacatgtctttcaaaacgtgtaggatctcatattgggacac

SEQ ID NO: 162375 - DNA, 128 bp, Zea mays
  Clone ID: MRT4577_79664C.1
tcgtttatacgtagccagaacacaaatagtggtgtttatataatgtggggggctctcacaagaatgaataaaggacggaaaatgaggatatccattggaaaaaatgctgctgataaaaagacacacga

SEQ ID NO: 162376 - DNA, 289 bp, Zea mays
  Clone ID: MRT4577_79665C.1
ctttgtctgattttgtgcttgaaaaaaaacaaaaaaaaaaaaaccaaaacacaaaaaaaaaaaaaaaaaaaaaaagaaaagggaaaaacaaaaaaaaaaaaagggaaaacacctcaaacgccttaagtcccactatcctacgaacctaatccaccacccacttccctcgagaatttcccacccaaccgttcgtttccccgccccacattgctcccctcgcaaataaccttcccggccatttactccccccctcccgtactatacatcctcccatttactcggtccccca

SEQ ID NO: 162377 - DNA, 569 bp, Zea mays
  unsure (1)..(569): unsure at all n locations
  Clone ID: MRT4577_79666C.1
ccggccggacgctgaaacccaccacacccgcaaacaatggcgctcgcacccaaattcgcaggccaaaagctcgcctcctccatccaacccaaagccgtccacaccctcgagctctacctcgactacgtctgccccttctccgccaaaatgtacaaaaccctcttcaccacccccctccgcaccaccctcctctcaacctacagcacaagcctcgtcaccatattccgccagcaaatccaaccctggcacccgtcctcgacactcgtccacgaagccgcatacgccgtgcaacgcgtcgattccagtaaattctacgacttctcggagaagctgtttgagcagcaaaaggacttttttgatgttagtctggtgaatgagacgcggaatcagacgtataggcgactggccaagatagcggtgagtgtaggggtggatgagggaaaggtgtatgggttattggagattagcgataagccgggtgaggatggaagtttgaattcngggaatggggtgacggacgatgtcaaggtgcaggtcaaggcgaatcgcatgacgggggtgcatgtgac

SEQ ID NO: 162378 - DNA, 316 bp, Zea mays
  Clone ID: MRT4577_79667C.1
gcgagaaagcaaacacaacaccaggaataatacgaattacagacaaaccttaacgaacaacacgggtgagcccaccagtagccaaccactgctgtctagaaaaacggcccacccgaacatatatacactggatgcccaccactgggcctcagaagtcgaacactaagagtaacctgaagcgagccacaccgcatacaacaaatggaagacaggattgttagtccgctgggacgcaccacatgtgggcgtgattatgaaagccatctccattgatggactgagctacaaaccaagacaaactcacagagaccggcct

SEQ ID NO: 162379 - DNA, 361 bp, Zea mays
  Clone ID: MRT4577_79668C.1
ccgcccgtcctttttttttgggggttttttgaaagggtctgacgttttttcccacactgggaccatgcggaacagcacatcacaccacagtcagattgggatctagataacaccaaaatgggccaggacaagaacagacacgacacgacgccaacatctcggtccaattattcgttctcccatcagtaccaccactagaataaggagatagagcatattgagcgtggcaatggcatgctatgccatggaccatgggactcggttgactgtctgactgactcgaacaaatcacaaactgacactgctagaatattgtactagagcttaagataaaagagtcctctcgaacccatgacggcct

SEQ ID NO: 162380 - DNA, 200 bp, Zea mays
  Clone ID: MRT4577_79669C.1
cacaacattgatggtgccctctttcagatttctttttagctgcattccaattataaagggtttgggtttgatttatatttccaaccataaataataagttacatttccagattctattaaaataaaaaattaataatacctggctgactctctatacaatccaagcttacttactcgatcattcaactatattaattttt

SEQ ID NO: 162381 - DNA, 315 bp, Zea mays
  Clone ID: MRT4577_7966C.1
acttgtacggcttttgtttttgtttttggatccgcaccatgatcgaatcattgtcggcacaatatagttcacagatagagtgtaccctgcgataacgtgacctgtgtacacaactatacaatgcacgtgacttaatctgaatttgctaacgtgcatcattcctatctgccataatcgattcttcagagatgtcatcactgagctattacacatacttccactgtgcgactgatgcattctttaagatgatcctgattgaggatactcttaaagagtccatcaaacacaccacccatgattgctactgacttcttg

SEQ ID NO: 162382 - DNA, 242 bp, Zea mays
  Clone ID: MRT4577_79670C.1
tgcgtcctggccttatgtgcactcccggataatatctagcctacacatctatcatgcaactctgggggggttgtggagcacattggaggctctctactatacctctctgctcatcttcctgtctgttctgacgatctggttgcacaaatactgcatgagccagattgaaccacctctaagatagtttcccactgaggaagcaactgcgtatgacaccatggagcacgcttagatgcctaacc

SEQ ID NO: 162383 - DNA, 263 bp, Zea mays
  Clone ID: MRT4577_79671C.1
caatcacctaatgctcataaggtactctgtggatatctccttggacaaaactgtcgtcagtaacgatgtcttcagagatcctgctcttaaacgcaaggcccgacgggacgccaaggtcaagtttgaagagagatacaagatcggcaagaacaagtggttcttccagaaactgcggttttagatgctttgtctcgatcattagaaattatgtagagaagcggaaaaaatcgagtgccgcaagatccagacccctacggccgggg

SEQ ID NO: 162384 - DNA, 414 bp, Zea mays
  unsure (1)..(414): unsure at all n locations
  Clone ID: MRT4577_79672C.1
ctcgacaccgccccgcccccggccacttgagccagaaccccactcgcccccccccccccccggccatgcgatctgcttaacagagcttctggtcacggttctgttatactacgcgttaacagtgtatgtataaatgtcatcttcctgtaaatctccgtggtgtgaggtgctgggggggtggtgattccgaagagagtgatgctcctgttatgtgctactagctagctagtgctgttgctgtttgagtacagtgtagtctactactattaagggttgtcgtttggactgttngtctattgggacagaataatgtngaagtgcgtgttaaagcccctcgatttgacatgtttgtcgccttgtcgnnctnagtgtgttcctgcgtgtgctcgttcgctgcggtggttttgcgtgctt

SEQ ID NO: 162385 - DNA, 308 bp, Zea mays
  Clone ID: MRT4577_79673C.1
agaagcaattgctccttcccaaattatgcattccagcagtacattccactgcaatatacaacaggatgtttctcttccaccatctaatccaacattaaatttaaagtctgtatcttggcctcgaggcattgctctgcaaggtattagttcctacaaaaattcgcaattcccaataggaaaagggagccgtccttttggcaactgccctattacctactacctacatatacagctcaaactgctggtctccttggaaaaaaaacacctatctgagcaccccacgcgtccgtccacgcgtccgcccacgc

SEQ ID NO: 162386 - DNA, 925 bp, Zea mays
  Clone ID: MRT4577_79674C.1
gttgctacctatgctcatgattactttattcaatggatcaagaaaccaacatcggtgtgcatgttcctcaaacacatttaggctaaaaactttgatgcacaaaactttggttttttgatttgagctattggtgttcaatttggataagtaagtcacacatttgtgtacaccttaggtcttctatctttgatgtctgaggaagtcacatggaacatggtggctatgaccacctttaaagagacatgggacattttgaagaacatcctgatctcttttgccacacccatacttgtgtagtgcagatatgggtcgacctcgccgtcactgcttacttcagtaagatcaaaggttatgcctatgaccttgctattattgacacttctcctcaagatgatggggtgatcacctaccttttggctagtcttagtccatattatgacttgtttgccacctcaatgatcaccaaaagtgaggcacccactctcgatgatgtttatgctcatctactgtcctatgaggcctagcaacttcaacatcaatctaaattgcacctcaacatcggggcttctgccaattttgctaagcatggtggttattttgggcatgactgttctcatggtcgttgtggtcatgcctaggcccactcatgtatggaagggaccctgggaagtaggttggaggttagtggtttaaaatccgatgaatgatatgcttgttgtcaattgatcttttgtgactagaacaataactaggtgatggtacgcccccccccccctaggatatgttataacatcaatatgatgaggctaactctatcccttttgcataacatttatcttttgttgggtttacatttaattattcaatgcctaatttgcatgaaaaaaaaaaaaaaaaaaaaaaaaaaaaaacccccaccccacac

SEQ ID NO: 162387 - DNA, 969 bp, Zea mays
  Clone ID: MRT4577_79675C.1
ggacttgtggctgaatttcttggtcctaggacacggggatgacaaagtttgcaagaagttcatagtgtaccagtctgtgctttggagttgtgagcattttgtttttttttgtctttactaagcctgttaaatactaaaatattttgtgtcgaatgactgttttgcgctatttggtgcagattggtttcttgtatcttcggtatggtgcagacccaaaggttctttggatgtggtatgagccctatttgagggatgatgaggagttctcccccggatctaatggccggaagacaaccatgggtgtttatgtgccggctggtatacttggaatgtgttacttaatttaaaaaattaccaaaccccctgggttataatccatgatgggtttaactgaataaaaaaaatctgagtaggcttggattattttggggcatggattgtgaaatagatttaattttaatccatgttaatctagatctggattggtgcaaacaaacaaggcttagtttattagttctcgagatccagtcatgtgggagtcttcggtactggctgtacctttttaattgtgaacgtgactgaaatgtttctagcaatctagcaaaatcaatgtttttataattatgtcgtataaaagagcttcgcatttgctcgaattctgtgacaggagatagattcgagcacgctggagcacagttgtaaaaattcagaaagcatgacaaagtgaattatttatacctttatgtgtgtaactaagctgatgccgtgtcaagctgcatataccttttggtttcatgaagattgaggcctccttttctgcatacggaagcgcttggttgtaacaaatccatctggtaacagcttcactgtagctccggtgatgataaagaaaaaaaacctagttcctacttttttaatcgctttcacaacagctactctgccccgttgaaattactgtctttttctcct

SEQ ID NO: 162388 - DNA, 187 bp, Zea mays
  Clone ID: MRT4577_79676C.1
gtgatgccaactaattttcattgtgtcaccaacacagcaaagcaggcagttccactaacagtataaccccaggtgacgttctgtgcaacccgaacacaaattcattgcagcatactcgtttgtaatgaacgcggggcctccaaagcaagggcggtacaaaccaaaacctaatgaaccgatttttttt

SEQ ID NO: 162389 - DNA, 262 bp, Zea mays
  Clone ID: MRT4577_79677C.1
gcgcattctatacaccactctgttcaagacggcacatcataagtggatacatctgcatgaagatataccaacatgtcttcctctcacaattactctgactcaatgccttctacagacatctaatggagccgcaagccattagttcctacggagagcagatggcgaacatctcttgcgctctatccgcagtgcataacatccatgcctgcgaatagcacggcgaatccttcgccgacaggagcgggtaccgactaatccagta

SEQ ID NO: 162390 - DNA, 1515 bp, Zea mays
  Clone ID: MRT4577_79678C.1
gaggctggccgggatccattcttatgatcaaaccaaacatacccactatagccgtcgccaatacccgataagactcggcaaatcagctggacacatagcacatctatcccgcttccgtctcccgctccagtcgccatggcggaagccctcgtgggcctccgcgtcgctgccctcgccgtcccgcaggctaggagccaccgcagacggcttctccccgctgcgcgcctcgctgcgttccggcgcgaccggctgagcactgcccgcgcggccgtcgcagggccaccggaggtggacgaggacgattccatgagtatcgacaacttgcatcgtttcttcgacctcaacgtcggaaagtgggacggctcattctaccaattcgacgcgcacgggagggttcttcaggagattagcacgcggctgtccgtgagcacgtacggggaggacaacctcatcagcctccttcaatcgttgtacattaagcaagcatcctctgcaatatcaatcgtggacgaagaggattctgaacctgaatgggtggaatacaaaatcaaagagacgaacatattcactgtggacaaatatcagcagatagggttctttcctgaagaaaaggcatttgctctgaggtatcagactgctggaatgctggagactgttcttcgggttggcacgcttggagaagatgatactggtgaagaatctcccaaaaacctgaagataccttctcgcaagccatctattgtatgtgaaaattgtctttactcccttgaaggcaatggtcgaatgagggctttccacataatggatccaaagggagtgcttgacacacttcttatttttcatgagaagaggcagggatctgaattggcacaatcatttaaacactattcagtttgtaccaagagtgccagcagtgataggataagtacagtacttggaagatgggaggggcattctgtgactaagaggagtggggtgtatggagcaacacttgctgaagcagatacagctgttgttctcaaaatgggctctaatggccaattgattcaggatactttatcaactaaaatcggaactggtacaacaacaacggtcaactggacaggatcagcaaatgaaaacttgcttcagtttgatggaggatatgaaataacattgctacctggtgggatgtacatgggatatccatcagacattagcaaatctatttcccaattagattcttttcatttagagttttgttggatggaatcacctggaaagaggcagcggcttgtccgaacttacgatgcagctggtttggctgtttcatcgacctatttttttgaaaccaaagtttgagtcatagcttctacaaaatgtattgcaacggttttgtaagtcatacagtaatctcactatttgtgtccttcggtgcatgatatttgagtatatattgtcagatctttctatatccaaaacccagtaattcttgaacagaaaaagtaagtataggacggccgctctagaggatcc

SEQ ID NO: 162391 - DNA, 195 bp, Zea mays
  Clone ID: MRT4577_79679C.1
gaaacatccaaagcacatccgtgttccgagttcggagactaaacgcgattaagagtactggtagcctagttacagttggatctgagcgatgggggaggagcaggtggtggcgccaaagccggaggccgccgccgccgccacgtcggtggagctgacggggttcgttatgggcgcggaggacgccgagcgcgccgc

SEQ ID NO: 162392 - DNA, 325 bp, Zea mays
  Clone ID: MRT4577_7967C.1
gtttttgtttgtgttaaatggcgttacttttatagagagagaaccacagggacagggctggtacaagacacaatgcatggggggtgagagatcccaggcgattcccaagtcaggtgcatagcagcagatgccaccagggacagttttcgtggtggcgtgatagaatcaactgactgagagagctatctgatgacactactgcccaaggattggcgacactcgctgtatagtaaacattgataccgtggtgacgaggtacatactcgatgagacaaacatacaattacatacaggcgagagacctcaacatctggttcaacgcatg

SEQ ID NO: 162393 - DNA, 246 bp, Zea mays
  Clone ID: MRT4577_79680C.1
accttttttttgtttgttggcaaccaaaaagtcttaggtcccggacttttccaaagagaatcaatggcctggaggggccttgattgctccaaaagcattgcatcaacctcataaccggaagtaatcctcttggggaataggtgactgaattatggccacctcaccctcccaattattgggagacgcccagttctttgcaaatcataaagagggggcaatacattaatcataaccgttcggatccat

SEQ ID NO: 162394 - DNA, 393 bp, Zea mays
  Clone ID: MRT4577_79681C.1
cgccgtggccggcgcccgagcccgcgaccgggtcacgcccgcgccgccgtgaccggcgtccgcgccggggactggccgtgtcctctccgagaccgagcgtcgcgcgcctatgccgccggccggacctgcgcctgcgcccgcaccgtgccgccgccgagcgcggtcgtgccgaggagcgctcgcgccctgtccacgccggctgggccgtggccgagccaccaggatcgctccagccgaggagccgcgcccgtggaggaccgccgtggtccgtcggggctcgccgaggccgaccggccggtggccagccgcgccggggccagccgcgcccacgagccggtggccagccgcgcccgcgcgccggtggctggatgcgccaggctgctgcggccagcg

SEQ ID NO: 162395 - DNA, 213 bp, Zea mays
  Clone ID: MRT4577_79682C.1
gtcccacaagtttttttgccggcttgtttagttattttaaagcgggggaaaaaattaactttgaccggctggtgggtaccaagcaccaaacggcgagggcgatagcggcgttcccgccgcgggagcgggttccttgtgtgcgccttatatttgccctcctttttctgatgtgctctccgctccccagggacacccgggcggtggaactcgggc

SEQ ID NO: 162396 - DNA, 760 bp, Zea mays
  Clone ID: MRT4577_79683C.1
ccggttacctcgaggccggccggggtttactctcctctggtcggcttctttgcttcggcagggcgagcggcgacgccctcttcgtcggggaccttcgccggcgacgagaatccaacctgataatccggaagatacatgtgccagatgtgtcgatcacagagatagtaaagctctcgaactgggtgtaagagatgataacatgtctgattttgaggagccctttaaaatttctgggatgtggcaatgctccatttgcacgcatgaaaatactacatatagttcatcttgtgagctatgtggtgtgcttcatgatctctcactgtatttcaatgatatcagtgaagacgaagatggagacacaagtattctggagtatccatccttgcaagatctctttttacaccacctagtgcaaagtcaaagactattgttttctctcatgatttcaaagacagaagaaatacaacagggaataagcaagctacaatggatgctctacataagacattcatgactcgcaaaaagcgccacattaacatagtgcctttcaagtttgatacaccatctcctgatgacatggtcactacaggattaaaatcatccagaaactttagaaaagttgacacagaggttctagttaaggattctgttggcgtgactggaaaggagatgatgaataatgatattcttctaactgaaaagaatacaagcatggacccaagtgcatttagtacagttggatgatggtggaactagtagc

SEQ ID NO: 162397 - DNA, 955 bp, Zea mays
  Clone ID: MRT4577_79684C.1
cggacgcgtgggtgccgccctcgcccgccttcaacaccggcagccgcaccacaaattcctccccacgcgttgccttctccccaccaacggcgcccttccccaacggctgcgaacgctaacgcgcttccccaatcgttgctccttcgaccaggtgcttcggtagaaggacgtcgcctagagccatcccatctctgagcatcgtggtctccccgatgtggatggggaaagaatataggttgcccaatatctacaaagctgaacacaccctatcatctgcaccagcaagcagcctagcagcagtcctcacccatcagcaattcagcatgcatctggaagactacgtgtgtctacgtctgctactgctgccgaggtgtctactctcttaggatcaggggaaaatgattgaaagaatggaaggatctatgaattgtcaatgtcctcagaagaatggataactcatgtgtttcagtgtggacctcatccttttcgattccaccagctacttgaatttgaccaactaaaggagagctaccacagacgtctcataggccacaatgaacgtcgaaggaggccgcctcctggacctcttgtatcacactacggtcgtcttgctgcgttgtttggtggtgacaaaagctaattttaccttatgtcattgaatatcttcatctgatgcatactatgaacatcatgaagtcactaccaggggtgagaatgttcctgccccatttatgatatttgagtccactggatccctagatattctgagagagggatgcttataaaggatttgcgggcttcatacgactttttttgtttttggatgcttatagggaacgacatgacatagaaggcatgtgtaaatttatctcatgcctatattatttataatgatttcctttggcattatatcagcttatttgattgttgttccttttaactgcgaatgctactc

SEQ ID NO: 162398 - DNA, 858 bp, Zea mays
  unsure (1)..(858): unsure at all n locations
  Clone ID: MRT4577_79685C.1
attgggtacctcgaggccggccgccgcgggctgccaaacatcgcctgaggttgaacggaaccaggagggggaagctcaacaggcgccagtcttctggacagcttgtccctcctgctgccatttacaccagtacgaccactcctacgagtcgcaaacgctgctttgccctagctgccgccggccgtttgttgccactgcaatgtccacgcagccgcccatcgtgccaggcacagacatgtattactgctcctgggggttcttcccaatgggtttccctggtggtcctgcattcgctgaaccactcaattccccgcagcagcaggcacctgctgctctaggattttatccaatggggccatacttgccattaccgagcctaagtggcattgtggaaggggaaggcaataaggcagttgatgctggcactggcattcctgtcatcccaacagtggcagcaccagcaccagcatcatcgccagcgccaacagcggcaacaccagtggagttcttacatgtgaaggttggggcaaagaagcgagggcggcccaaaggcagcaagaacaaaaaagctgtggttgagataaattagggctatggaatgacacatgtgaaagttggggcaaagaagcgaggatgccctgactgcctgaaggcagcaagaacaagaaagtggtgattgagatcgattaggggtatggcatgctgattgctgcatcattcgacatctgcatcagttgtaaactacattgngtatggggatgggggatggggtcttttcttgcttgcagatgacttgggcactgtaaagatggtcgagggntagagcttcacctcgatagttggtcaagaatcagagct

SEQ ID NO: 162399 - DNA, 1069 bp, Zea mays
  Clone ID: MRT4577_79686C.1
cattgggtacctcgaggccggccgggccacacccggaccccggtctgcgtttgtccctgcgggctgcggccctgcctcttctcttctcccgttcccctcgccgcgtgagctctctctctctctctctctcctctgtggtgacgactgggcgcccgcacccctggcagccgccgccgcccagtccccgtcgggcccttcggcaggtcttcttcggccccttcgccggcgacgagccgcaccaggcgtacatgtgtacacccagcccaggcccttaactgcgcccgcccctgcgactggttttcctgctggtttctgtggatttggctgccggaggattggtgcagcctttaggatcacggtagattcgctgtgaaatccgaagggtgctcaggtcatgttgggggaccagcgcatgatactgggcttagactcggcaacctcatcaagcactgcccctgatttgacccgcgctgaagaggatccttctgtgagcaggagctgcgtgatcgaccgcctgcaggtggggtgggcgcagaagggaggacaggtggagggtctggtgaattgttatagcaagaagaagaacaagaccggcagtggttcgaggaatcttgcagccagagcctggtcctccgagatggagggttctgatgagggtggagaagtcaacacgggcgacctcatcggcgggatcggcagggagttggccatttcatgcctgctccgtcttccccggtcttactattatgatgtggcatgtgttaatcgatctttctactcccttgtgaggtttggggagctttacaggttgaggcgtgaggctgggatcgtcgagcagatgatctactgctcatgcaatgttctcgagtgggaaggttttgatccgcgccgccaacggtggttcagcatcccttccatgcctcccatagaatgcttcacacttgctgataagaatccctggccgtgggcaccaacatcctcgtctttgggaagaaggtggaagcccatgttgtgctgaggtatagccttctcactaactcttggactacaggagagatgatgaacacac

SEQ ID NO: 162400 - DNA, 639 bp, Zea mays
  Clone ID: MRT4577_79687C.1
gtgacgcaggcgccgcaatgcagggctccaggaccaaatctggctccgctgaggcgaagggcaacggcaagccggacaaggagaagaagggtggcggcggcacgccgccaactcccaaggacagcagaccgcgcaagccggctgtgcccaaggcgagcgccgccagccatggcacgacgcgcgcggccgacaagtcccccgggtcggggtcggaccgcaaggcgcccacgcccaaggccgcctcccgcctcgccacgcctcccgagaagcaaggggggaagcccgcgaagccgccgcaggagcagcaggcagcgaagcctcctcaggagctgcaggcgcagcttgccgtggtccgagaagagctcgtgaaggccaaggagcagctggtggagaacgagaaggaaaagggcagagtccttgcggagctggagcgtgccaagcaggcggctgatgaggccaatgccaagctgcaggaggcgcttgatgcgcagaggagggccgaggacgcgcaggaggctgacaaactccctgccggcgagtcggaccaagcaagcatgcacagccagcaggaggctgatgttactgcgctgcgatcggcagtggagcagcttgagaagccaggtatgagctggccgacgc

SEQ ID NO: 162401 - DNA, 1532 bp, Zea mays
  unsure (1)..(1532): unsure at all n locations
  Clone ID: MRT4577_79688C.1
tcactgggtggtggtcgtggccgcacccaggtggatttgcgacaagaacactggcgaatttctcgccgtggtggggaagtcgccatgggaccgcttcagttcgtgggcagcatggtcatcgccatattcttcattaagaagtgtgccataacatttgctttcctgtcctatttctcttgcatcgagtagattcgagcttggctccaccggcaagagcgtcgtcacgggcaggaggcgccggcggcactgttcgttgagaggaaggagatggaaggagatgcgaccggtgtcgttgatcttgtagcaaacggattggattagaaacccgaatacccacttagtaattgctaataaaattttgatcaacttattaaaagcaatgctcagccataaccatttttcttggtaagccttacacagtgcaaccacttgctcttcttctggtagatcctcaacaaacagcggacctttctctggagctttaacaatctcatcagctgtgcctatcatcattaacttttggccatctttcactcccaaagtagaccaatctgcatcatccttcaataatccacccttcaccataattttttggcgttcaggtggcacaccagttagtgtgtatagctgactcttcaaaacaatcggaggctggctagtgtcaatctctatgcctggaaagacctccttctgccatttcacgtttacggcagacccgaaacccgacaaatacccgacccagcggttgcgggtaagcgtaaagattttgaaccacgagtgcacccgcacccaatccgaagtttcgcgagtgtgggtgtcatggtgtgggttcctccgcacgataatgatggtccacgccccagttgtcaccgtctcgttcgtcattctacttcttttctctctcccctcatgtctccacctccgcgccacctcattctcgatagagggcgtaagagcatgcgcctcctccctgtattcgtctgacaccagccccgacattgcctaatttttttgactagggttagttcttcaatttgaaagactaaccttaggcaaagtgtggcacagttagccacgaaccaaacagacccttagtttttatatctatattcaaatagatgatgaatctagacatatatgtaaaacacatacattaattattgtatgaatccactaaatacccaaaacaaaattttattttggaacggagtgagtatatatttttctagtcntagagatagttgacgattacgctgaggttaaactgtacagttatgtcagtcttctatctctaatattctgggccttttgaaatacaagcatgatagtgaaatgatgagagaaaattgtaaaggtcgagccccacttgtctgacgtctttctgctcttttgctacgtgtccaggaaaactcttgttctgcaaaaacatgaatcctaatattgtcttcattgcaagcatattttcttaaggtgccatccctgtctcccacggatcatcagaacgaataaatatatgaaggttttcccccccn

SEQ ID NO: 162402 - DNA, 332 bp, Zea mays
  Clone ID: MRT4577_79689C.1
catttacatgcttcatctcaactgaggctttcttggtttttttccggtcacctaaaaaaccaagatgccttaatcttatacagaacaattccaaactacctacaggggggagtgctatcaaaagagaaatagaaagcaactttttcatctatccataaacaagagagatgtaagcacttaatagctagctagtactataccaccattcaacaaaggatttccgtttcttatcactcgctctatagatccgcactgctttgaaagatctaagacactttgagggaacattaataaaaaaacgatcgacagcacgacgagccatccggaaacct

SEQ ID NO: 162403 - DNA, 221 bp, Zea mays
  Clone ID: MRT4577_7968C.1
ctctatggcacataaggcggcgcagtgtgcaacgcacctgctacgacggatccaccgtccatctgatgcaacagagcactggtgggtggtctgccacgcaagacgacacatggatatgacagtgatacatgtgcatcctatgaatgctgacacaacgatcaccacaagctaacttgaccaactaaatagacgcgcacgaagttcgaaagagaggcatacaa

SEQ ID NO: 162404 - DNA, 226 bp, Zea mays
  Clone ID: MRT4577_79690C.1
gaccggggccgccccaccacaagcccagggtggtaataaaagaacaagcggagcacaagcacggcaacagagaacagtgacgcaccagcgcagggatcaaatgccgcagcatacgctagagagaatgggaaggcgaacacgaaggggacaggaggctccacaccacaggctgccgcaaacaaagaagggaccaaagagaccgacaaagcgccttacgaggggaccc

SEQ ID NO: 162405 - DNA, 179 bp, Zea mays
  Clone ID: MRT4577_79691C.1
aagcacgggcggactcgatgcaacttgcagagaaccagtcctctcgctttctcaacgagattcgactagcttacatacgattgattcgggagctcgaggagagagaggagaggagaggcagtgatgccgctggcagagtagaccccgtagcgccgaaagcaacagatttcttctccacg

SEQ ID NO: 162406 - DNA, 259 bp, Zea mays
  unsure (1)..(259): unsure at all n locations
  Clone ID: MRT4577_79692C.1
gatccgcttcttattacaacggatccacgggcgctgctctcgccgagcgctccttcactgctcgagcaggaggctcaacgcggttgaagagcctgtcttcctcaagccggccgaacctgtagacgccatggacataggggcctccttgccgtcgccgcagctactgctatggtccaccaggaacctacctcgcgggagcatcttgtgngactccgcctggcggtggagctgctgcatcacgagcgccgcgtcgacgcct

SEQ ID NO: 162407 - DNA, 380 bp, Zea mays
  Clone ID: MRT4577_79693C.1
ggggcggaccacacgcgtccgaacctggtgctgggcttaaggggaggaatgttaattttcttgaaaacattgactggcaggacaataactttggaggtggggggctccgccaccattgataatgtgaaggccaaaatccaggacagggagggtttccccccggaccagaagcggttgatttttgccggaaagcagttgaaggatggtcgaaccttggttgactccaacatccaaaaggggagcaccttccatttggggctccgcctgaggggcggattgcaaatttttgtgaagaccttgactggcaaaaccataaccttggaggtggagagctttagaaccatcaacaacgggaaggctaaaatccaggcaagggaggg

SEQ ID NO: 162408 - DNA, 300 bp, Zea mays
  Clone ID: MRT4577_79694C.1
cttggaaaaaaccagggggggtacaaaggaaaatatttgggtttggacagggaacacgggtgggaaaacaaacgggggaccggggggccaaaccccctacgggcggaagccacgggaaaacaaacgattttatttcaaacaaagcgtggcagatataagaagaccattcttcagcagggcccgaacccgcgctggtaggccgtacctgccggggggtccgaccgaggtgttccttgaatgagagcaatataaggctggtgacaccattgtaggtcccactagaaggggggtaaggagggg

SEQ ID NO: 162409 - DNA, 1487 bp, Zea mays
  Clone ID: MRT4577_79695C.1
cattgggacctggagccggcgagtctctccccacacaccgcgcagctagctgtcaccggagcaagaaggaagaaaaaccagcggcaccgatcgatcgacgacacgcgcgcgatcgaggtgaggagcgaaagaaaaggtggccttttcgaagccgccggacggagtgtagcgctagctagctccccaggccggagaggaggatggtgggacgaggagcggcgacggccctcgtgtgggcggcggtggtggcggtcgcgacggtggtgtcgcgggcgcagcagctgcaggtggggttctacgacacgctgtgcccggcggcggagatcatcgtgcaggaggaggtgagcaaggcggcgtccggcaaccccggcgtcgccgcgggcctcctgcgcctccacttccacgactgcttcgtcagggggtgcgacgcgtcggtgctgctggactcgtcggcgggcaaccaggcggagaaggacgcggcgcccaacgccagcctgcgcgggttcgaggtcatcgacagcgccaagacgcggctggagcaggcctgcttcggcgtcgtctcctgcgccgacgtcctcgccttcgccgcccgcgacgccctcgcgctggtcgggggcgacgcgtaccaggtgccggcggggcggagggacggcaacgtctcctcggcgcaggaggcgggcgcgaacctgccgccgccgacggcgagcgcgagccagctgacgcaggcgttcggcgccaaggggctgagccaggccgagatggtggcgctgtcgggggcgcacacggtgggcgcggcgcgctgcagctccttcgcgccccgcctctactcgtacgggcccagcggcgcggggcaggacccgtccatggaccccgcgtacctggcggcgctggcgcagcaagtgcccgccgcaggggaccggcgccgccgacccgcccctccccatggaccccgtcacgcccaccgccttcgacaccaactactacgccaacctggtcgccaggcgcggcctgctcgcctccgaccaggcgctgctcgccgacccggccaccgccgcgcaggtgctcgcctacaccaacagccccgccaccttccagaccgacttcgtcgccgccatcatcaagatgggtgccatacaggtgctcaccggcacagccggcaccgtccggaccaactgcagggtggctagctagctcatccatgatttacgtctacctgtagactcatgtgcttatataaaatcatacgacgaaactgtacgtacggcgtagagtggtgtggcggggtccaatgattcagattgtacgtacgtgtccatcgatccaactgtagttgtgtacgcagtacagtacgtgctagctacggatcagttgcttatatatagcttgtgcgtttttttacacttttttttttggtccttttggtttatacatatttattagcagatacggatcgaatacaaatattaaaaatggttcgttcttttttt

SEQ ID NO: 162410 - DNA, 530 bp, Zea mays
  Clone ID: MRT4577_79696C.1
ttgcggtttttttttttttttttttttttttttttttttttttttttttttttttttttttttttttttttttttttttttttaaggggggaaaaaaaaaaaagcccctggcctttcgggttttaaaaaaaacccttttccttgggcaaaccaaaaaaggctttatgggcgggacccccaatttccccgggggggaattccccctttcccggggtccgaaaataggcccccaaaaagaaacccttcccccttgggaaataagggaccctcccccctttttttcccggggggaaaaacccccccccggggccttacccccccgggcccaataatagaacaacggccccctggggggaaagcccggccccttaaaaccaccccaccttttttaaaacccctaaaccccggttttttgccccttggccaaataaggggccccccggaaaaggcaaggagggggcctaaaaaccgggaaaataggggtagggggccgggggccgggcccaaaagggggggggaaaaaaccccgg

SEQ ID NO: 162411 - DNA, 1512 bp, Zea mays
  Clone ID: MRT4577_79697C.1
cacactccaccacacaccgcgcagctagctgtcaccggatcgagcaagaaggaagaaaaatcagcggcaccgataatcgatcgacgacactcgcgcgaggtgggaagcgaaataaaaggtggccttttcgaagccgccggacggagtgtagtgtagcgctagctccgcaggccggagaggaggacgatggtggggcgacgcacaggaggaggaggaggagcggcgacggccctcgtgtgggcggtggtggcggtcgcggcggcggtgtcgcgggcgcagcagcagcagcagctgctgcaggtggggttctacgacacgctgtgccccgcggcggagatcatcgtgcaggaggaggtgagcaaggcggcgtccggcaaccccggcgtcgccgcgggcctcctgcgcctccacttccacgactgcttcgtcagggggtgcgacgcgtcggtgctgctggactcgtcggcgggcaaccaggcggagaaggacgcggcgcccaacgccagcctgcgcgggttcgaggtcatcgacagcgccaagacgcggctggagcaggcctgcttcggcgtcgtctcctgcgccgacgtcctcgccttcgccgcccgcgacgccctcgcgctggtcgggggcgacgcgtaccaggtgccggcggggcggagggacggcaacgtctcctcggcgcaggaggcgggcgcgaacctgccgccgccgacggcgagcgcgagccagctgacgcaggcgttcggcgccaaggggctgagccaggccgagatggtggcgctgtcgggggcgcacacggtgggcgcggcgcgctgcagctccttcgcgccccgcctctactcgtacgggcccagcggcgcggggcaggacccgtccatggaccccgcgtacctggcggcgctggcgcagcagtgcccgccgcaggggaccggcgccgccgacccgcccctccccatggaccccgtcacgcccaccgccttcgacaccaactactacgccaacctggtcgccaggcgcggcctgctcgcctccgaccaggcgctgctcgccgacccggccaccgccgcgcaggtgctcgcctacaccaacagccccgccaccttccagaccgacttcgtcgccgccatgatcaagatgggtgccatacaggtgctcaccggcacagccggcaccgtccggaccaactgcagggtggctagctagctagctcatccatgagaatgtacctgtagactcatgtgcttaaaatcatacgacgaaactgtacgtacggcgtagagtggtgtggcggggtccaatgattcagattgtacgtacgtgtccatcgatccaactgtagttgtgtacgcagtacagtacgtgctagctacggatcagttgcttatatatagcttgtgcgtttttttacactttcttttgtccttttggtttataatttttattaagatatacaaatatttctcttcagattcggatcgaatacaaatattaaaaatggttcgttcttttttt

SEQ ID NO: 162412 - DNA, 443 bp, Zea mays
  Clone ID: MRT4577_79698C.1
ggccaggaaaaatctctagcagggtcccaggaaaaaacagcccgggcaggtacataaaaaagcttaagggaaaggggggggaaaggaccatactggaacacacaccagccctattcggaattttgggggaggcattcccgtttaggagcatgagcgggcaaaatcacaacaacgggggggggagtcagtttccttggggaacaacaggggaaaacacacggggcatttactttgggcctcaaatacaacagccaaaaaaaaaaccccccggggggacccctacaggggggaattaggagtttggggcattggggggctctttggctgcccccgatttaacaccggggggtccatataggaaggggacgaagacaacggggatgttataaaagcttccccttcgggacgcttttttaaaaaacttgtttgctgcttcccggggg

SEQ ID NO: 162413 - DNA, 604 bp, Zea mays
  Clone ID: MRT4577_79699C.1
ggccgctcttcctggggttgtttctccgtgtgacgtgtggcctttgagatcaactctcctgtaccagcgtaggccgcatgagtggggggcgggctcccgcggtcctgctcggcggagtggcctctctgctcctgtcttttgtttggatgccggcgctgctgcctgtggcctcccgccttttgttgctaccccgagtcttgctgaccatggcctctggaagccctccgacccagccctcgccggcctcggattccggctctggctacgttccgggctcggtctctgcagcctttgttacttgccccaacgagaaggtcgccaaggagatcgccagggccgtggtggagaagcgcctagcagcctgcgtcaacctcatccctcagattacatccatctatgagtggaaagggaagatcgaggaagacagtgaggtgctgatgatgattaaaacccaaagttccttggtcccagctttgacagattttgttcgttctgtgcacccttacgaagtggccgaggtaattgcattgcctgtggaacaggggaactttccgtacctgcagtgggtgcgccaggtcacagagtcagtttctgactctatcac

SEQ ID NO: 162414 - DNA, 484 bp, Zea mays
  Clone ID: MRT4577_7969C.1
ctccacgtaaactgggcccgtcttttcctgaaagagaaaccatcaaaaaaatcgccaggggtggctggcttagctaaaaataggcatgatcttctagtctagggctacgaccaggggggcagccccgcagcaaaagcagctaaggcattctgttcggggatatatttatcccaaaagcgagcgaggaaaggggccggagagaaaaaaaaaccgaaaatttaatgaatcgatcggacggggggggttggcactactgctaccaagtttccatcgccgtcttccatttcgtttttgccctttgcctcctttaaataaaaagggcgacacaagcaacccgggatggatggatggatgcatggacggccgggccccggcaacaacaataaattgcaagctaggaggcagccatgcatggattggaattggatgggacgaccatcgtccatgcagccgccggaggccggaactgcagcgcctgcgtacc

SEQ ID NO: 162415 - DNA, 902 bp, Zea mays
  Clone ID: MRT4577_796C.1
ttgggtacctcgaggccggccgggccttcccttcctaaaagaggcttttcacgcgcgacgtcttctgcgcccccgccgcccaagactcgtcaccaacccgcagcgagcctcctccactgacgccccctatcttcccctcgctgcagctctctcgttgaagagctgcacccccagtcagtgctcagcccgccgaaggatcggtctccttggcggcctccccgcggtgctcctccccgccctcctctctcttttcctcgctgcagccacggatcttggtggcagggacgccacatcatttcccagaattcaaacggcgcggaagagcacatacgctcgttccttgttcttactcccgttcatccgtttctcccccatctctctctcatttgtttccttcgacgacgaataggcgagtgcagccgcccttctccaggttttcacctgcgacgagcatccaccaagtacgcccgcctccttctgccccccttcctgctgtgcgaagccgagcaccccggactctaatttgatcttctggctggaaattcacgttgacggtggcgagtagggcttctaccatcggtagcctcatctcaaggagcaaaattcttccatgatccctttaaaccggaggacaagcctgcccagggctgggatggactactttgatgcaaggcggaagcctcataatgttggtaaaatcattgcagccctggtcctcacaacactctgtatatttgttctgaagcaatctcctggttttggtggcaatagtgtgttttctcgccatgaacatggggttacccacgtcttagtaacaggaggagctggttatattggttcacatgctgctttaaagctcttaaaggataactatcgagttactatcgggggataatctatct

SEQ ID NO: 162416 - DNA, 146 bp, Zea mays
  Clone ID: MRT4577_79700C.1
gaataaaataggacgaaaatagccgccggggtccatgaactacatgtacaggcttaagaaaatgagtcttttttgaaagggaaaatgcaagcaacactaggaatctactgcgactgaaaaaggatcttacggatcgattacgccag

SEQ ID NO: 162417 - DNA, 623 bp, Zea mays
  unsure (1)..(623): unsure at all n locations
  Clone ID: MRT4577_79701C.1
ccggccgggcgttgcccgtctcaaccccggccagtccatctccgtctacgagcttccccgcatgaaccttctcgacaagacctccatcaagatcgatggtgttgtggactttgactgggctcccgctacccccaaacgtgacggcgtcaaggaatacgagcagcttttctgttactggactcctgaaattggcagcaaccccgccaaggttggattgatgagcgttccctcaaaagaggttgttcgatctctcaacctcttcagtgtcagcgatgccaagcttcactggcaatccgacgctgcctacatttgtgtcaaggttgaccgacactcaaagtccaagaagtctcaagccacaactcttgagatcttccgagtcaaggagaagggtgtccctggttgaggtcgttgacaccatcaaggataccgtcatcaactttgcttgggaacccaagggtgaccgattcgccatcatctccacaaccgagcctgtaggcgtcactgccgtcgctcccaagactgccgtctctttcttctgccccgagaaggncaagaagggccagcaagtgggtaactttaagcacctccgaacactcgacaagaagaacagcaacgccatttac

SEQ ID NO: 162418 - DNA, 409 bp, Zea mays
  Clone ID: MRT4577_79702C.1
aaaaaaaaagcggtttttccccggtttttaaaaaaaaaagatgtgggcccggaaattccggcccgggacccgggggggtgccaccttttcctatagggaggaatattaaaggttggggaaaacatggaaaaggcgggttcctggggaaaattggtaaccggtaaaaattcaacaaaaaataacagccggaataaaaaagggaaaagcccggggggcccaaggggggggccaaccaacataaattggggtgcaggcactggccggttttcagagagaaaacccggggggccaactgaataaaaaaaaccgccaaagcgcggggggggggggtttgagtattgggccccaggggggttttttttttaaccagggaaaggggaaaaagttgatggcccttaaccgggtggcc

SEQ ID NO: 162419 - DNA, 319 bp, Zea mays
  Clone ID: MRT4577_79703C.1
atcccgaaataagacatataaggggacgcttattttaaaatctaggcgggtaaaaacagcatgttatacttcatatgcatatatattgcgcggcctgccccaaattattcagcgcatgaagatcctcgccacaactagattcctacctaggcttctagatgctgacgatgacacctgccccttaacactgatgtgatcaacgaccaccatgaatgtgccgatccccattggccccacctcaaccaccagctttgtatgatacacacggtcacccccaaccacctttttgtaagccccagaaccttgcgccttccatttc

SEQ ID NO: 162420 - DNA, 549 bp, Zea mays
  Clone ID: MRT4577_79704C.1
attcaccggccccgtacgcctgaagccctacaggctcccgccgccccgctccccctcccgctcccaaaccctaacccctccgccacccatcgccgccaccgcggctcccctctcttcctcctcgccgcgacgtcccgtccccgccctctccaccgcgcccgcaaccttcctccattagatttcgaggggtctcggaaggatggcgttcctgcagaaggtcgggaatgccctcaagcgatccgcgggctccggctcggcgatgctccaggcggtccggtccatgtcctccgccaaggtcttcgtcggaggcatctcgtacggcaccgatgaccagagcctcgcggatgcgttttccaattacggccaagtcgtggaatccaaggtgatcatggaccgtgaatctgggaggtcaagggggtttggtttcgtgacctacacttcggcagaggaggctggagctgccatcaccggaatggatgggaaggatctgcagggtcggatagtgagggtgagctatgctcatgaccgtggtagtcgtccaagttttgg

SEQ ID NO: 162421 - DNA, 346 bp, Zea mays
  unsure (1)..(346): unsure at all n locations
  Clone ID: MRT4577_79705C.1
acgcgtgcgccaattgtcacttgctcttcctccaacaagtttatcattgccggncgtaatccctctttaggccgtgtattatcatggcggtgagaacaccaccaccacacctgttccaccataaaaggacgagatcatgatggcacctcgccccggtcggtacggagtacccaagtcacagatgccactgtactgaggtaggttcacggccagaacgagtactaccagttcatgaggagaagcacataagcacaagcgcacctcgggaggccgaaccatctcaccggctccttcgactctacgagaaaacgatgcaaaaatgaccctgagcacgcgcaccgtcaca

SEQ ID NO: 162422 - DNA, 405 bp, Zea mays
  Clone ID: MRT4577_79706C.1
tttaaaaccctggtaaattcaattaaattaattgatcgaaaacccccgggggagttcaaacaaccaacacgggggaaccttctgtgggggttcaaacacccggcgaggtggaacgtgtttttagaattaaaagcacagtttttgccaacatttaattaaaaaaccaattcaggtaatccgcccgaggttggaaaaaaacccgtttgttggcaaatgaatgggaaggatccacaactcttggggacgtttataaagcattattttttcctttttttggccgcattttgggggggggggctttccaatttaaacttgcccccctggggcacacaaacaaaaaaaaacctttgttttaactttaaggggaaaaaaaaaagctcaccccttgtttggtttaaacagggt

SEQ ID NO: 162423 - DNA, 244 bp, Zea mays
  Clone ID: MRT4577_79707C.1
gttcaaatgctgcgctacagagcaaggagcgcctaaacctgccaaccactgtaacaatccagccagggcccctgcaagcttggggcaccacttgcacatccgcctggcatgaccaccattcccaccctgctcatatattatggagcccggccacctcaaaaccataatccgactctttcacactacaatactgcttgctccggcctggctactttacggacactcagagcctatcccaattaga

SEQ ID NO: 162424 - DNA, 318 bp, Zea mays
  Clone ID: MRT4577_79708C.1
acggactcttgagacgcctgattgggacggtaaccaaactggaatacacgctccttcagatgaatcactgaagacacgctctatgctaatggacttgatggatcactacatatcccacgattcatggtaccaacgccttgtgatgcctgccgccttatcatccggcgggtgatctctgaccccgcttgccaacgagctcggaccctgattgtggcacatgcagtgattactctgtctcttctttgatgattcttcgcgattctctgcgtggccgcattcactttggttcctttcctgtcaggctgctatgtagcatgt

SEQ ID NO: 162425 - DNA, 201 bp, Zea mays
  Clone ID: MRT4577_79709C.1
ggaaagggcatgattttccaccggggggaaaaaaaaaacgagaacgaaaaagcgcccagggaaaactgcctttttcgaaaccaaactcgtttttggtttgattagataccttttccccttgcacctttaccttttcccaaacctttttctccccgttttacaccaagaaccatacctcttgcttcttgaccgggaggtcct

SEQ ID NO: 162426 - DNA, 1568 bp, Zea mays
  Clone ID: MRT4577_7970C.1
ggcacgagattttttgccgcttcggaggcaccttcgaacaaagcccaaaagcagccagcgcaccgcatgtcctcgtcttcggcgcaccagaaggcgtcgccgccgatagaggaggaagcgacggagcacggacccttccccatcgaacagctacaggcatctggaatagctgcacttgatgtgaaaaaactcaaagatgctggtctctgcacagtggaatctgtagcatactctccaaggaaagaccttttgcaaattaaagggattagtgaagccaaagtcgacaagataattgaagcagcttccaagttggttccactcggatttactagtgctagccaacttcatgcacagagacttgagatcatccagcttacaactggatctagagagcttgatcaaattttggacggtggaatagaaacaggatctatcacagagatgtatggtgaatttcgctccgggaagactcagttgtgccacactctctgtgtcacatgtcagctcccattggaccaaggtggtggtgaaggaaaggctttgtatattgatgcagagggtacattcaggcctcaaagaattctccagatagcagacaggtttggcttgaatggcgctgatgtactagagaatgtggcttatgccagagcatataacactgatcatcaatcaagacttttgctagaagcagcctccatgatggtagagaccaggtttgctctcatggttgtggatagtgctacagccctttacagaactgatttctctggtagaggggagctatcagcaaggcagatgcatctggcgaagtttcttaggagccttcaaaagttagcagatgagtttggagtggcagtggtaatcacgaaccaagtagtggctcaagtggatggtgctgcaatgtttgctgggccacagatcaagcccattggagggaacatcatggctcatgcttccacaactaggctctttcttcgcaagggaagaggggaggagcggatctgcaaagtaatcagctctccctgcctggctgaagctgaagcaaggtttcagatatcatctgagggtgtcactgatgtcaaggactgaaagcatcctcatttgcagtccacagcataacttgccaattcagacgaatctctgatctgctgcactcgtgtcggtcccttgtacaatcaaaataccagtacaggcttccagaatgcgaatgcaaatccgttggagtgtggcactgtcatcctgttgtctttaggtaccatctaaagttggcattgttgtaaagtggtagagcgcaaggctctactttgtagccgtggattcgagccctatggtgggcgttatttaatttttttggcgaaaaagcctttaattgagttgtttaggtgatatgaataactctttaggtcatggagttcgactccatgggagtttaagctgggttaaaaaaaattatggtcacgatctttttcacatgggctactgtaacatctcgtctactcctgaaccgatgttaagctttttaggactatagatcatcttcatatatcaacaaaaaaaaaaaaaaaaaa

SEQ ID NO: 162427 - DNA, 544 bp, Zea mays
  Clone ID: MRT4577_79710C.1
aaaaaaaaaaaaaaaaaaaaaaaaaaaaaaaaaaaaaaaaaaaaaaaaaaaaaaaaaaaaaaaaaaaaaaaaaaaaaaaaaaaaaaaaaaaaaaaaaaaaaaaaaaaaaaaaaggggaggccgttttgggggacccaattttacttgggcgggcgtgctcgttgttccctttttttttggtggcctccttacctgccgttccctggcctttttgtttggcccccgtttttccctgggtaggcccgggggtttccccttttttttgccgggtgaaccttttcccctttcccctttttgccgttttcccgattggccccttcccccgcccttttccaaccttttgcccccccttggtggcgtttgtcccccgctttgcccctcctctttacgccggggtgcggcccgtgtttcgccctttttcccctgtttttttgccagttccttggccccggccccttgccctttttagccttcttttccccctttttttccggtttttccctttttttttctaactggggggttacttttcggttccgttttt

SEQ ID NO: 162428 - DNA, 358 bp, Zea mays
  Clone ID: MRT4577_79711C.1
ggacaatgacatttatggtgttgcttcacatggtcatccaggacattgcctttacaggacccggctacctagggggcgagtggaaaattataccgaatattgcctcgaaaaggagcaaactcggtagcaacacaggggctttgatacagcagatagaggcttcacatgggggcacccccctgcgcaatgtagggccaggaaatcggctggtgcaggcccaaaaaagccagctgttgctggaggatctgcagcactaagaccaagagaaccagctccaggtgcagcggctggtggaacattacatatccgccccacaggaacttcacctgcttgctctggggggaggtcttcggccacg

SEQ ID NO: 162429 - DNA, 1058 bp, Zea mays
  Clone ID: MRT4577_79712C.1
cacgcgtctgaacaagctggtggtaggcgtctcactatccaccaccgcgccgctccggtttaatttctcctcgaccggccagcgcaattctgtggctcgatcgatcggtcggtcgtaaggcaagtgagcaagctatatatatatataggagattcttcgagcgagctagtagcgagatgggttccgccgtcctcttttactgcatctgcatcgccgtcgtcgtcgcattgtcgtcgtccatggtcgccgtcggggccgccgccccgggggaaacccccaagttcatctcggggctgtgcccggtgcggttcgaccacacgcgcgggatcagcgcggtggccagcagctgcaaggaccgcccgctgccgtcgccggagcgctgctgcggggcgctcaagacctacgcgtgcccctacagcgagctcatcaacgaaaaacgcccaacaacggctgcgccagcgagatgttctacgtcatcatgacacgcggcaggctgcggccgggcctcttctcgcagctgtgcgtcgaaggcccgctgggcctccagtgctgatcaacaccggcctgctgccgcccaccgcccggaatatatctatctctccttggaaacctacatcagacgatgccccagcgcgtgccgctgatttgatgcaagtatgcggttttcatttgtaaatcggagtcgacccatactacgcgacgcccagtatcaattttcacttgtaatgaaaaattacacatgtactcatttgttgtacacaaacaaacaaaaaacgttagaatataagaggatgtttctcaatcgatcgttagacagaacgaatactcagattcctcagctcgtgttatttctatgccaggtgctccttcactttcggggtcgcctttttcaaatttggatgattggagagctctcgtagtaaattatttacattatccaagtgttaaagttgaaaagtgtgttcggcggagtgcattcaagtttgtgttgcacaatgatgagttatatataaggaatatcgaagaggtgttataaaaaaaaaaaaaaaaaagcggcc

SEQ ID NO: 162430 - DNA, 422 bp, Zea mays
  Clone ID: MRT4577_79713C.1
gctagcagccacatatgcggagaccgtcacaatactaagagctcggtaattacctgaactggacgaagttcctgtaaatcccatctgaacaaagtgtgcctgtacacacctgggctacatgacaagcgcgttcttggcagcaactgtggtgctacaatggaggatgctgcgtatgtgaggagcatggatgaaattgaaccttaagttcgtggatcagacagccttgggacgcctggcctcatgatggatgattgggcataaatgttgctggaaacgaagaatcagggagattggagaggagaaggggcacctaaaggctgatcaaggcaccttgaatgggagcaaaatgcacactatgcacgattgccacttgatatgaatgcctaatcatgcatgtctctatgcataatgcacccatgaac

SEQ ID NO: 162431 - DNA, 1032 bp, Zea mays
  Clone ID: MRT4577_79714C.1
attggtacctcgagccggcgggataagggcttggaaaatgggattacccgtctgccgtcggcataacataatcgtcgtcgcgtgcagtccccattcccttttccagtggtctgttgctcgcgcttcgtccagcttccccggaagaggtagcacggcaagggcagaggatgagtgaccccaagtacgcctacccctaccccgcgcaaggttactaccaggggccgtaccagggcccgccggtgatggcgccgccacagtacgccgcgccgccgcccagaagggagccgagcttcctggaaggctgcctggccgcgctgtgctgctgctgcttgatcgacgagtgctgctgcgacccgtccatcatcttcgtcagctagactagacgaggaagaacctattggtatatataatatgtatgtatccagttgtactcttagctttattcctgcaaccttcaagctcgagatgatctgtatctcggtcgagttggtgtgtatcaactatcatctgtcatggtattgcttctaatttgctgctgaatcgagaacatattcgccgttgaaaaaaaaaaaaaaaaaaaaaacaaaaagcggctgcgcctgggaagggaaccatttaccttcaccagtcaccactgcggttgagctttttgaaaagaaggcgaggtgactactgggtggatagagaagaggagcacaagcacagaccggatgcttctcaccttcttccacttgcagtcggcagtcgcaagccacaaccgaaagccccgtgtgtcccgtcaccggaatatatgcgaatccggcgccttttcagtcagacacgtgaattcgggaggaaatggctctaggcgcagccggcgggggaggctgtgatcggaggagggccgggccggggatggagacgaccattttcttgcgcatgcgtgtgagtttgagggctgctaggcggctagctatgatctcggcctcgggtgggtctagcccgaagacaactcgtttgactcttggatggatggatggacggaggatggtg

SEQ ID NO: 162432 - DNA, 1192 bp, Zea mays
  Clone ID: MRT4577_79715C.1
actccttagggcgattgggatcctcgaggccggccgggatcatatattcgttcacagatcgattcgcaggcgggtggtcggcgtctcactatccaccaccgcgccgctccggtttaatttctcctcgaccggccagcgcaattctgtgcctcgatcgatcggtcgtaaggcaagtgagcaagctatatatatatatatatatatatatatataggagattcttcgagcgagctagtagcgagatgggttccgccgtcctcttttactgcatctgcatcgccgccgtcgtcgcattgtcgtcgtccatggtcgccgtcgggtccgccgccccgggggaaacccccaagttcatctcggcgagcgcccttgagtgctccgctaacgtaacggaaatagcaaaggcgcgcaagctgatcgatgtccatggccacgggctgtgcccggtgcggttcgaccacacgcgcgggatcagcgcggtggccagcagctgcaaggaccgcccgctgccgtcgccggagcgctgctgcggggcgctcaaggcctacgcgtgcccctacagcgagctcatcaacgacaacgccaacaacggctgcgccagcgagatgttctacgtcatcatgacacgcggcaggctgcggccgggcctcttctcgcagctgtgcgtcgaaggcccgctgggcctccagtgctgatcaacactggcctgctgccgcccaccgcccggaatctatctatctatctatctccttggaaacatatatcagacgatgccccagcgcgtgccgctgatttgatgcaagtatgcggttttcatttgtaaatcggagtcgatccatactaagcgatacaggaacaccctgtatcaattttcacttgtgatgaaattgcacatgtactcatttgttgtacacacatacacacacacaaaaaacgttagaatataagaggatatatgttggtcaatcgaccgttagacaaaatgaatactcagattcctcagctcgtgtttctatgccaggtgctccttcactttcggggtcgcctttttcaaatttggatgatcggagagctctcgtagtatatttatttacattatccaagtgttaaagttgaaaagtgtgttcggcggagcgcattcaagtttgtgttgcacaatgatgagttatatataaggaaaaaaaaaaaaaaaaaa

SEQ ID NO: 162433 - DNA, 842 bp, Zea mays
  Clone ID: MRT4577_79716C.1
ctgtgcggcgctcgaggcggccggttcaaaaaggaacctcgcttccctcccttccacgcgaccgatcggcgacggtgcgccatgtcgatgctggacaccttcttcagcaagggcggcggcggcggcttccgcggcgccaagtgcaagacgctgctgaagctgtcgatcccgcggataaagctgctgcggaaccggcgggagctgcagctgcgccagatgcgccgggacatcgccaagctcctagaggccggccaggaggccactgcccggatcagggtggagcacatcatccgggaggagaacatgatggccgcgcaggagatcctcgagctcttctgcgagctcatcgcggatcgcctgcccatcatcgaggcccaaaagttcgcccctctgaccgaattcgattttacaactcgtaattgcggtcgctatttgtttgttaatatgcctacggatgttgcaatcgaaactagctgtagatttactgcccgtcttgatatggcaaactgtgctggacccgcagctcgcttgggatttccagtggcttgttggcatttacttctgttggacaagaactctcgagatgtttttttgttgttgttgttgtgctgtgcttgatgtgttgagacgaccactttagcactggatcattgtaatctcccgtaagtggtcagccggttgctaattttttggctcaacatggtgtgccactggtacccccaccgtttttttgaactttacaacgggagatatctatagtgtttttttttacagtgggttagttttccccagcgagcagccacctagtagtctttactccactgctatagtggattatgact

SEQ ID NO: 162434 - DNA, 570 bp, Zea mays
  Clone ID: MRT4577_79717C.1
cattgggtacctcgggccggccggacgcacctgctccttacccgtctgccgtcggcataacataatcgtcgtcgcgtgcagtccccattcccttttccagtggtctgttgctcgcgcttcgtccagcttccccggaagaggtagcacggcaagggcagaggatgagtgaccccaagtacgcctacccctaccccgcgcaaggttactaccaggggccgtaccagggcccgccggtgatggcgccgccgcagtacgccgcgccgccgcccagaagggagccgagcttcctggaaggctgcctggccgcgctgtgctgctgctgcttgatcgacgagtgctgctgcgacccgtccatcatcttcgtcagctagactagatgatctgtatctagtggtatatatataatatgtatgtatccagttgtactcttagctttattcctgcaaccttcaagctcgagatgatctgtatctcggtcgagttggtgtgtatgtgtcatctgtatcaactatcatcctgtcattgtattgcttctaaaaaaaaaaaaaaaaaagcggcctagggccggcc

SEQ ID NO: 162435 - DNA, 466 bp, Zea mays
  Clone ID: MRT4577_79718C.1
attcggagttcgagggacgagtcaccgcgtgcgtgggcgattcgcaggcgggtggtcggcgtttcactatccaccaccgcgccgctccggtttaatttctcctcgaccggccagcgcaattctgtgcctcgatcgatcggtcgtaaggcaagtgagcaagctatatatatatatatatatatatatatatatatatatatatatataggagattcttcgagcgagctactaccgagatgggttccggcgtcctcttttactgcatctgcatcgccgccgccttcgcattgtcgtcggacatggtcgccgccaggtccgccgtcccgggggaaacccccaagttcatctcagcgagcgcacttgagtgctccggtaacgtaaccgaaatagcaaaggcgcgcaagctgatcgatgtccatggacacaggctgtgcccactgcggctcgaccacacgcgcagcatcag

SEQ ID NO: 162436 - DNA, 1322 bp, Zea mays
  Clone ID: MRT4577_79719C.1
cattccggccggcgagggcggccgggagtggtctgttgctcgcgcttcgtccagcttccccggaagaggtagcacggcaagggcacagcctcgttgaccccaagtacggttgcccgtacctcgcgcttcgtccagcttccccggaagaggtagcccggcaagggcagaggatgactgaccccaagtacgcctacccctaccctgcgcaaggttactaccaggggccgtaccagggcctgtccgggatgggcccgcccgaggagtgcggctccgccccctccatggtctccgtcatccaggcaagccgcctgggcgcccattggtgtatctgatttgtatgtatccagttgtactctccgctcattatcttcatccttctagatcagatgattcggaacctctggcaaatttataattttttgttatctgtattatatatctacctgttattgcattaatcttcattcgcgagatgatctagatcttcgttcgagttggtgtgtatgaataaaaaaaaaaaaatatcctcctaaaaaaaaaaaaaaatcaaagttgcgacacgactctcggcaacggatatctcggctctcgcatcgatgaagaacgtagcaaaatgcgatacctggtgtgaattgcagaatcccgcgaaccatcgagtttttgaacgcaagttgcgcccgaagccttctggcggagggcacgtctgcctgggcgtcacgcagccagcacctgctccattacccgcgtctgccgtcggcataacataatcgtcgtcgcgtgcagtcccccattccctttccagtggtgactggtgagtggtctctctctgtgctcgcgcttcgtccagcttccccggccggaagaggtagcacggcaagggcagaggatgagtgaccccaagtacgcctacccctaccctgcgcaaggttactaccaggggccgtaccagggcccgccggtgatggcgccgccacagtacgccgcgccgccgcccagaagggagccgagcttcctggaaggctgcctggccgcgctgtgctgctgctgcttgatcgacgagtgctgctgcgacccgtccatcatcttcgtcagctagactagacgaggaagaacctattggtatatataatatgtatgtatccagttgtactcttagctttattcctgcaaccttcaagctcgagatgatctgtatctcggtcgagttggtgtgtatgtgtcatctgtatcaactatcatcctgtcattgtattgcttctaatttgctgctgaatcgagaacatattcgccgttgaaaaaaaaaaaaaaaaaagcggccccta

SEQ ID NO: 162437 - DNA, 899 bp, Zea mays
  Clone ID: MRT4577_7971C.1
acgattttcacgtctatgccgatgctgggactgtgttttccatgaagagcacgtttgacaagtcaccccgcagtggacccaaggcttttgtcagcgagtatgcagtttggaaaactgacgccggtagaggaactctcctggctgcattggcagaagcggctttccttactggactggaggggaacagtgatgctgttgagatggcttgccatgctccactattcgtaaacgatgatatcgagaaaaagtggaacccagacgtcatcgtcttcaacacctggcagcattacgggactcctagctactggatgcagaagcttttccgcgagtccagtggcgccatggttcatccgacgacgacgatcagttctggcagctctgctgattctctagcagcgtctgcaattacctggaaggattcagagaataatgactcgttcctaagagtaaagattgtaaactttggatctgatgctattagagttgcaatctccacagctggacttcaagcgactagttctagatcgcgatcgaccgctactgttctcacatcaaccgctgtgatggacgaaaactctttcagtaacccaaacaaggtcaagccggtcaagagccagctattcgacgcaggagcgcatatgcaagtcacgctgtctcctcactcattaacaactttcgaccttgctctggctacgtcgaaacttgtcacgttgtctgatgcctgaactgtgatgcacatttgtctgtatttgaggagatgtcagtgtagtgtaaagagttgtgtgctgatgatgaactgaacaaaaatgacactgcgatccacgtttttatctatttggaggtgtccctttcaaagaaaaatttatgtggagataatgccaccgcaattcctctttttc

SEQ ID NO: 162438 - DNA, 1134 bp, Zea mays
  Clone ID: MRT4577_79720C.1
gcacgagcagactcctataggcgattgggaccctcgaggccggccgggatcatatattcgttcacagaatcgattcgcaggcgggtgggtcggcgtctcactatccaccaccgcgccgctccggtttaatttctcctcgaccggccagcgcaattctgtggctcgatcgatcgatcggtcataaggcaagtgagcaagctatatatatataggagattattcgagcgagctagcgagatgggttccgccgtcctcttttactgcatctgcatcgccgtcgtcgtcgcattgtcgtcgtccatggtcgccgtcgggtccgccgccccgggggaaccccccaagttcatctcggcgagcgcccttgagtgctccgctaacgtaacggaaatagcaaaggcgcgcaagctgatcgatgtccatggccacgggctgtgcccggtgcggttcgaccacacgcgcgggatcagcgcggtggccagcagctgcaaggaccgcccgctgccgtcgccggagcgctgctgcggggcgctcaagacctacgcgtgcccctacagcgagctcatcaacgacaacgccaacaacggctgcgccagcgagatgttctacgtcatcatgacacgcggcaggctgcggccgggcctcttctcgcagctgtgcgtcgaaggcccgctgggcctccagtgctgatcaacaccggcctgctgccgcccacctcccggaatctatctatctatctatctccttggaaacctatatcagacgatgccccagcgcgtgccgctgatttgatgcaagtatgcggttttaatttgtaaatcggagtcgatccatactgagcgatacaggaacaccctgtatcaattttcacttgtgatgaaattgcacatgtactcatttgttgtacacacatacacacacacaaaaaaacgttagaatataagaggatatatgtttctcaatcgaccgttagacaaaatgaatactcagattcctcagctcgtgtttctatgccaggtgctccttcactttcggggtcgcctttttcaaatttggatgatcggagagctctcgtagtatatattatttaaaaaaaaaaaaaaaaaaaagcggcctataggagtcgtatacgcgcgt

SEQ ID NO: 162439 - DNA, 335 bp, Zea mays
  Clone ID: MRT4577_79721C.1
cgttaataattttcctttttttttttttttttttgggaaacgggggagctaaattcatgctcgggattggcccattgtaaacattactaacaacattaggggggcgggcttggggtcaaaaacacaaatgggcaacaacaacaacgaacacgaaacgaaacatacggacacgggacgaccacagacgaagataaaccccctttaaactagggggaacacgggtgcaaaagcgaacaagataactaggccttaagggaccccaccgctcaattcctccagttcccgtcgttgttgccaaaaccccccccccggtttgcaccaccgtatcccccacc

SEQ ID NO: 162440 - DNA, 642 bp, Zea mays
  unsure (1)..(642): unsure at all n locations
  Clone ID: MRT4577_79722C.1
tatgttattagtctgtcctagctanaaaaaaaaaaaaaaaaaaaaaaaaaaaaaaaaaaaaaaaaaaaaaaaaaaaaaaaaaaaaaaaaaaaaaaaaaaaaaaaaaaaaaaaaaaaaaaaaaaaaaaaaaaaaaagggaaaaaaaaaaaaaaaaaaaaaaaaaaaggggggggccgtttttgggggaccccagcttttccgtccccgggggctgggcggggttattgcttttttttttgggggccccctaaattaaattccttgggcccgggttttaccaccttgggggcggggaaaaaccctggggttcccccatttaattcccttgggaaaaatcccctttttccccggtggggtaattagaaaagggccccccccggttcccttttccaaacttttgccccccttaatgggaaatgggccccccccttttaggggcctttaagccgggggggggggggggtttccccccagggggccctttactttggcagggcccttagccccggttttttgggttttttcccttttttttttgccccgtttgggggttttccccggaaagttttaaatggggggctccctttgggggtcccatttagggtttttcgggcccttgcccccaaaaaatttatttggggg

SEQ ID NO: 162441 - DNA, 1239 bp, Zea mays
  Clone ID: MRT4577_79723C.1
atggcgtccgagatgagcaaaaacgtgaaggccctcgacgagcaggaggtcacctcgcagcactcacgcgcccagaccagcgacgctgccgaggagcagcagcagcaacagcaggcggtggacccgctggcgcggcagtcgtccattatgtcgctgacgctggaggagctgcagaactcgctgtgcgagccgggccgcaacttcggatccatgaacatggacgagttcatggccaacatatggaacgccgaggagttccaggccgccacagccggctgcaacaaggagggcgcggagcgtgagccggtgcccgtggcgacgacgacgggcacaggtgagaacggaggaggaggaggaagtgggaggggactggttcggcagggttcgttcgcgctgccgccgccgctgtcccggaagacggtggaggaggtctgggccgagatcagccagggcccggcggacttccaggccagcgcggcgccgcagcccgtggcgcagccccaggcggcgagcggcggcggcgtcgcggccagcgggcggcaggcgacgctgggcgagatgacgctggaggacttcctcgtgaaggccggcgtcgtgcggggcgccttcgccggccacggccacggcgtcggcatggtcccggccggcccgatgggcatgcagcacaacgcggctcctcccatgatgtaccaggtggcggcagcggcggcgccgccgcccggcgctgtatacccggtgatgggcgacggcatggggtaccacggcggcgggtaccccgggggcgtggcggtggtgccgcccccgccgccgtctcagtgcgtggcggccgccgccagcccggggtcgtcggacgggatgagcgccatgacgcaggcggagatgatgaactgcattggcaacggaggggtggtccgcaacggcggcggcggcgcgcggaagcgcgacttccccgaggacgggtgcaccgagaagaccgtggagcgacggcagcgccgcatgatcaagaaccgcgagtccgcggcccggtcacgcgcccggaagcaggcgtataccgtggagcttgaggctgagctgaaccatctcaaggaggagaacgagcgcctcagagcagaggagaggacgattctgctgtcgaagaaaaagatgctggtggagaagatgatggagcaggcaagggagaatgtgagcgccaagaaggtcggtcccggactgcgccggtggggcagcgccatgtggtga

SEQ ID NO: 162442 - DNA, 205 bp, Zea mays
  Clone ID: MRT4577_79724C.1
aagcaaggtgccggttgtacaatctctgatcagtgtcttttcagcactttgagcatttacttggctcatttagtcttccttttgtagcgcatggttgggaggaaaaagtgcatgcatcattccttcactcttctctttttcccgcccccccctcccttcgcacataggcatttggtttgcttccatctttttttatgcagtgcct

SEQ ID NO: 162443 - DNA, 1287 bp, Zea mays
  Clone ID: MRT4577_79725C.1
atggcgtccgagatgaccaagaacgtgaaggccctcgacgagcaggaggtcacctcgcagcactcacgcgcccagaccagcgacgctgccgaggagcagcagcagcaacagcaggcggtggacccgctggcgcggcagtcgtccattatgtcgctgacgctggaggagctgcagaactcgctgtgcgagccgggccgcaacttcggatccatgaacatggacgagttcatggccaacatatggaacgccgaggagttccaggccgccacagccggctgcaacaaggagggcgcggagcgtgagccggtgcccgtggcgacgacgacgggcacaggtgagaacggaggaggaggaggaagtgggaggggactggttcggcagggttcgttcgcgctgccgccgccgctgtcccggaagacggtggaggaggtctgggccgagatcagccagggcccggcggacttccaggccagcgcggcgccgcagcccgtggcgcagccccaggcggcgagcggcggcggcggcgtcgcggccagcgggcggcaggcgacgctgggcgagatgacgctggaggacttcctcgtgaaggccggcgtcgtgcggggcgccttcgccggccacggccacggcgtcggcatggtcccggccggcccgatgggcatgcagcacaacgcggctcctcccatgatgtaccaggtggcggcagcggcggcgccgccgcccggcgctgtatacccggtgatgggcgacggcatggggtaccacggcggcgggtaccccgggggcgtggcggtggtgccgcccccgccgccgtctcagtgcgtggcggccgccgccagcccggggtcgtcggacgggatgagcgccatgacgcaggcggagatgatgaactgcattggcaacggaggggtggtccgcaacggcggcggcggcgcgcggaagcgcgacttccccgaggacgggtgcaccgagaagaccgtggagcgacggcagcgccgcatgatcaagaaccgcgagtccgcggcccggtcacgcgcccggaagcagactcggtctcggtctgctcctggaatgatgccgatgctggtgcaggcgtataccgtggagcttgaggctgagctgaaccatctcaaggaggagaacgagcgcctcagagcagaggagaggacgattctgctgtcgaagaaaaagatgctggtggagaagatgatggagcaggcaagggagaatgtgagcgccaagaaggtcggtcccggactgcgccggtggggcagcgccatgtggtga

SEQ ID NO: 162444 - DNA, 136 bp, Zea mays
  Clone ID: MRT4577_79726C.1
tgggacggccgcccggcaggttctctgatggaggacgtctaggacatcttatctgtatatatgctgggaggctcccataacattggtcgtgatcgtgtttgtggagctgtgctgtgataggggctgtttatttttt

SEQ ID NO: 162445 - DNA, 408 bp, Zea mays
  unsure (1)..(408): unsure at all n locations
  Clone ID: MRT4577_79727C.1
ttttttttttttttttttttttttgggactttattttttttttttttgttttttatttttttttttttggggggcaaaagattttttttttggggccaaaaacctttttttttagcctgggaaggtataaccggtgaaaaccccaaaaactaggaccttggcccgggggggccccctttttttttttaaaaaaaaattttttccaaaaaaggggtcacaaaaatttcggccaaaaaaaaaagggctccgggaagataaccggttttttccccccccaaacaaatataaatctttcccaggaaaccccggctttgttgggaaaacccaaaaacaaggggccccgggaaagaaacttttttccccaaacaactaaaaacacngggcgcctaggggggtgttggggtttcc

SEQ ID NO: 162446 - DNA, 668 bp, Zea mays
  Clone ID: MRT4577_79728C.1
agcgctcttaccgtgagcaacagctccatacaaggaggcacagagctacgagcagagagccgcaagggcgaccagaacaatcggcctacttgtgctgcacgctatttgtacatgtggtgctagcggaggacgtggcgcttgatgctgacagggtcgtataggacctctgaggccgccataccttgcatgaaggatagctccaatatgggagaatgcatctcttacaccatgtaggcggggacaggcacttgcaggaagtgatagtacctttatcgggatcgttgagagaacagtcggcagccctatcttagacgcgccgtcggcacatgccataagagcgcagccaggtgcagcagctggcgctacctctgatcaaccaagcagcatctggtaaaagtgtgtcgctagtatcagctacaacattagcttctatacagcctgctgtatacagtgcaccctgctgcttatcggccgaagccagtatgacgattgagccagctagcttctggctactgtcagcggcacgcaacatctttcattgaaccgatgggacgtactgaaccacgctggttaattgcaggagtatatgctactagcatgtactacgatagctgcagcataccgggcttccttcttgacacagcaacagttgctgagtttctaccagc

SEQ ID NO: 162447 - DNA, 468 bp, Zea mays
  Clone ID: MRT4577_79729C.1
ggccgtgagccccgcggccggctccagtcccggcaagccgccgcgcctggtgggaggccccatggccgccagcgtggaggaggcgggggtgcggcgtgcactggactttgccgtcgcgcgagtacaacaaagccagcaacgacatgtaccacagccgcgcgctgcaggtggtgcgcgcccgcaagcagatcgtagctggggtgaactacttcttggacgtggagctgggccgaaccacgtgtaccaagacccagcccaacttggacaactgccccttccatgaccagccacatctgaaaaggaaagcattctgctctttccagatctacgctgtgccttggcagggcacaatgaccttgtcgaaatccacctgtcaggacgcctaggggtctgtaccgggctggcctgtgcctatcacctcttatgcacaccacccaccccctgtattcccacccctggactggtggc

SEQ ID NO: 162448 - DNA, 223 bp, Zea mays
  Clone ID: MRT4577_7972C.1
agaacattatgagtatcattagggtctttggacttacaaaaacaatagccgactcacccacttgtattgattccccgcacgcccccgctgacttcttacctataataatgaacaatgcgggggcggccgtaatcaatgaattatcaccaacggagtataaatcatgtcatgtaagggaaaaaactaaacatcggtacacacacgcatggccatggggatagat

SEQ ID NO: 162449 - DNA, 460 bp, Zea mays
  Clone ID: MRT4577_79730C.1
aagaaagatgagatctatttgcttctgcacaatagccctcacgaacctcatcttgtcagccattcccattcctcctgacagttcatcaaagaagggactaatgcttttctgatgcatgcaagttccaattttggagacagggactgccgtgggaatcatcaggtctcatgtttcgaacaagtattgactcatgagctatgaattctcggggaagacggtctggatgaacttcaagaaacgctccgagtaaaaccgggggttgacggcagagatggagacagagtcatattgcatggacttgacagcgtgctcgattttctttgacttgttgtactcttgcaatatgtcaatgatgcccaggtaaagcacgacatcgtacacctcgcgaaatgatttgcttccgtcttcctttggagatttgctctgcccttgcaggcatgttaacttctagctggatctg

SEQ ID NO: 162450 - DNA, 266 bp, Zea mays
  Clone ID: MRT4577_79731C.1
ggttggggctgatgttctgttttttttttttttttattctttattttggaataccaaaggcgaggggtctacctttttgggccaaggaaaaaggcagggttattacctacctccacacccccctaaatattgggtccgtaccgggacgaaaaaaaaaagacctcccgggtgaaaaaaacaacccccccggaaccaaacgaaaatgggcgggttgcggaactaaaaaaaccccgcgataagtgggggggccccccgggcaagtaaaa

SEQ ID NO: 162451 - DNA, 156 bp, Zea mays
  Clone ID: MRT4577_79732C.1
taaatgtctgttgaatagaattattaataatttaatagtaggaaaaaggagtgtcagagagagactcaaagatgtgtgagagaacatggaagatggctgtttcatgtgagacaggactggaggaagttatgaatagggatcagatgggggagtgag

SEQ ID NO: 162452 - DNA, 331 bp, Zea mays
  unsure (1)..(331): unsure at all n locations
  Clone ID: MRT4577_79733C.1
gcggatcaagcatcgaatgatcggagcctatccattggccgagggcatcatcatgctccggcggcgacctgttctccatgcggcatgctggtggcgggggccnnnnnnnnggngnnncnnnnnaanancntnaatatcgtnnactagcaggaggtcgccggcgcggcggccgagctcctgcacncnnnntncgtgtacggtaagctcgacnacaagccggccgggcagtacgtcnagaaagccgaggggnncctnaaggnntttcatctcggtacacgccacccagcaagatcagcctgcggcggcaccaggcgacgactcggcgcccaat

SEQ ID NO: 162453 - DNA, 375 bp, Zea mays
  unsure (1)..(375): unsure at all n locations
  Clone ID: MRT4577_79734C.1
gcgtttggacgcgtggggttgccaaagaattccctcccctagccggggccaccgctaggagctcgaccagatcgccgncactaagcccttcgccaagctcgccgtcaaggcaacaaccatcgccgacatcccgcgcctctgcttccagtggtggtggtgaaggggagaaattcgtgagatctgttccggatcaggcgtgcgagctcgggaatcaggggtttcacacatctgtatccgaggccggggttttcatagcagcagcagccgccgattcggccgcattcgatccttccccgtcaatgacaagttctttgacaggggaatcgccaaagctgcggacctgtcccggtgtgcggagcggctctggttgtgatg

SEQ ID NO: 162454 - DNA, 362 bp, Zea mays
  Clone ID: MRT4577_79735C.1
gtatgacaccacccatatttctttattcttattaaaattcgggcccaaaaaaatcccccaaatcccctacctaggtacgacgtatacccccctacatacaaatgcctgcacctttaatgcaccctcatatatattttattgggcaaacccaaatcaaaattattcctgcaaaatccaaattactaccccatgcatgcaaagcctattcccgccgatcacgggcaaaaagggacttggtagatgctcttgcccccacaggcatgggtcttcatttccggggggcttttggtacccctaggggcatccaaggtccgtacacaccaaccccacccccgtgcttaaagagaaagccctggtaaagt

SEQ ID NO: 162455 - DNA, 683 bp, Zea mays
  Clone ID: MRT4577_79736C.1
ttccgggacgaccctcgcttcacttgtcacggactcgcgtccacaaaccacaaccagctcactcaagaacaaagaacccaacccatggcttctcccaagccgctcctcctgctcgccacctcgttcctgagctgcggcctcctggtggccgccgactacgccccagcgagctgcagctgcgctccccggccggcagcgtcctcgcgtgcaagagcggctgcgaggccttccgcaccgacgagctgtgctgccgcaacatgtacaacagcccgcacacctgccgcgcctccaagtactcggagttcttcaagcgcgagtgcccgcaggccttcacctacgcgcacgacagcccctcgctcacccacgagtgcgccgcgccgcgcgagctcaaagtcatcttctgccactagagctcggagctcggagggttgggcgcgcgcccgtgcgccgccgccgccaacaagtgtcgctagtagaggtagtaggatttgcggtgcgtgtgttgtctagtgtgtgctggaatagctgtggctgtgttcccgtcgtgtctgtggcctgtgtaggctgtctgtagtatactgggttgttggatgtatgcgttctggccgcaagactgatgtgatgctgttgctgcttactacagtttgcagtctgaaataaaaaacttgtttgatgagcactgc

SEQ ID NO: 162456 - DNA, 1253 bp, Zea mays
  Clone ID: MRT4577_79737C.1
ggtaaggaagcgcttgaggcccgcgaccctcgcttcacttgtcacggactcgcgtccacaaaccacaaccagctcactcaagaacaaagaacccaacccatggcttctcccaagccgctcctcctgctcgccacctcgttcctgagctgcggcctcctggtggccgccgactacgccccaatgaccctgaccgtggtgaacaactgcccctacccggtgtggccgggcatccaggccaactccgggcacgacgtcctggagggcggcggcttcttcctcccgccgctctcccacaagtccttcccggcgccggcccacccctggtccggccgcatctgggcgcgcacgggctgcgcgggcgccggcgcgcagctccactgcgccacgggcgactgcggcgggcggctccagtgcggcgggctcggcggcgcggcgcccgcgacgctggcgcaggtgaacctccaccacggcaacgaccagacctcgtacggcgtgagcgtggtggacggcttcaacgtgggcctgtccgtgaccccgcacgagggccgcggcaactgccccgtcctcgcctgccgcaagaacctcaccgagacctgccccggcgagctgcagctgcgctccccggccggcagcgtcctcgcgtgcaagagcggctgcgaggccttccgcaccgacgagctgtgctgccgcaacatgtacaacagcccgcacacctgccgcgcctccaagtactcggagttcttcaagcgagagtgcccgcaggccttcacctacgcgcacgacagcccctcgctcacccacgagtgcgccgcgccgcgcgagctcaaggtcatcttctgccactagagctcggagggctgggctgggctgggcgcgccgcgcccgcccgtgcgccgccgccgccaacaagtgtcgctagtagaggtagtaggatttgcggtgcgtgtgttgtctagtgtgtgctggaatagctgtgggcctgtgggctgtggctgtgttcccgtcgtgtctgtggcggtgtggcctgtgtaggctgtctgtactctgtagtatactgggttgttggatgcatgcgttctggccgcaagactgatgtcatgctgttgctgcttactacagtttgcagtctgaaataaaaacttgtttgatgagcacaaaaaaaaaaaaaaaaaaaaaaaaaaaaaaaaatgacaaaaaaaaaaaaatcggcccgtcgacccgggaattaattccggaccggtacctgcgggcca

SEQ ID NO: 162457 - DNA, 172 bp, Zea mays
  Clone ID: MRT4577_79738C.1
acaagcttttttttttttttttttttttattgttcttttcttttttcttgaagatacaccgagcacttcgtgttcccccatattattgaggcccacggggggcctcgaatacatgggcggacacccagtgcgccggtgatccttcggaacccaaagcggacccatacggaca

SEQ ID NO: 162458 - DNA, 1165 bp, Zea mays
  Clone ID: MRT4577_79739C.1
gtgtgttttttttttttttttttttttttttttttttttttttttttttagtgctcatcaaacaagtttttatttcagactgcaaactgtagtaagcagcaacagcatgacatcagtcttgcggccagaacgcatacatccaacaacccagtatactacagacagcctacacaggccacagacacgacgggaacacagccacagctattccagcacacactagacaacacacgcaccgcaaatcctactacctctactagcgacacttgttgacggcggcggcgccctccgagctccgagctctagtggcagaagatgaccttgagctcgcgcggcgcggcgcactcgtgggtgagcgaggggctgtcgtgcgcgtaggtgaaggcctgcgggcactctcgcttgaagaactccgagtacttggaggcgcggcaggtgtgcgggctgttgtacatgttgcggcagcacagctcgtcggtgcggaaggcctcgcagccgctcttgcacgcgaggacgctgccggccggggagcgcagctgcagctcgccggggcaggtctcggtgaggttcttgcggcaggcgaggacggggcagttgccgcggccctcgtgcggggtcacggacaggcccacgttgaagccgtccaccacgctcacgccgtacgaggtctggtcgttgccgtggtggaggttcacctgcgccagcgtcgcgggcgccgcgccgccgagcccgccgcactggagccgcccgccgcagtcgcccgtggcgcagtggagctgcgcgccggcgcccgcgcagcccgtgcgcgcccagatgcggccggaccaggggtgggccggcgccgggaaggacttgtgggagagcggcgggaggaagaagccgccgccctccaggacgtcgtgcccggagttggcctggatgcccggccacaccgggtaggggcagttgttcaccacggtcagggtcattggggcgtagtcggcggccaccaggaggccgcagctcaggaacgaggtggcgagcaggaggagcggcttgggagaagccatgggttgggttctttgttcttgagtgagctggttgtggtttgtggacgcgagtccgctcgagccgaattccgagcttacgtacgcgtgcatgcgacgtcatagctcttctatagtgt

SEQ ID NO: 162459 - DNA, 253 bp, Zea mays
  Clone ID: MRT4577_7973C.1
atcctcttctccaacgacggtggcatggatgcccacgtcccaacattgtaggtgcaattcccaggtcatactcatcctctccgatggtgcagggtgcggcacatgtgtcgcccccatccacttcatctattgactattccatcatgttcacatcctccctaactcccctctcccgtggctccacctcatcgtcttctcacctaccagggcttatcctctccctgctatgaattccgaaccctaccccatttat

SEQ ID NO: 162460 - DNA, 855 bp, Zea mays
  Clone ID: MRT4577_79740C.1
cctcgaggccggccggggtgtccttttcccggttataatcaaaacttgggtcgcagatacctatataagaatgtgaccctgagtctgttcgttgtcgaatcttatgcgcatcatacactaattagagcggggtaacaccacatccctcacctgattgcaccgatacagagatactcaaaggcatatcaacgaaataatcttccaccatggcagtttcggacgcaccagagtcaaaatgcgatgttctaattattggtgctggcccagcaggtctgatgcttgctacttggatggcaagatgtggcatcgacgctcgcatagtcgataagcgaggcaccaagatttactctggacaggcagatgggctgcaattgcggagtctggaaatctttgacagttttggattcgccgatagagcgtggaaggaggcgaatcatttgatagagttttgcatgtggaaccccggtgaagacggtgtcatacgtcggtccgaccaaatcccagatgttgttcctggaatctcccgattcaaggagattgttctccactagggccgtatcgagcgattcttcctcgatcacatcaagaagcactcgaaggataccctacgtgtagaagcgtggcgtgcttcccgaatcgctccatatcgaccaagaccaagtaaacgaccactcaccggacaactatcccatcaccgtgcagctgcggtatctgactgaagaggaggccatgcccgcccagagcaagggctccagcatcaatgacggccttttccggagcatctggcaaatgatgatacccaagatttaatcgcaaatagcagacagaaagacggtagcacagagactggagggc

SEQ ID NO: 162461 - DNA, 646 bp, Zea mays
  Clone ID: MRT4577_79741C.1
gccggccggctcgggaaaacgaagaaacccacgccctccgtcgcgcggctgctgctggtgcggagaggaggcggcggggaaggaaaacggcgtcgcaactcccccgcccgcctcgaaccgacatgttgccgcgcacgcactcccaccaggcgcggcggcgctccggcctgggcccgcagctctgcgccgcagcggccgcgctcctgctgctcctctccctcgccgtcctccactcgcgcctctcctcatcgtcctcctcccgcttccccacatccgcatcccgctcccgcccctccacgcccgcggccgactccaactcctccgctctcctcgccgacgaggaggacgaggacgtggccgccgcgctcgacccgctgctcaccgtcaccaccaccgccgccgagggcgattctctcgccaaccccgacgacgaccgcatcgatgagctcgacgtgttggacgaggacgccgcgggcgcccacgaggctgactccgcctccgcctctacggtgggggccgccacgcccctcgtatgggaccacgtcaccggcgccgctcgcctgccgttccgcctccccgcctccgtcgaatccctgcccgcggggtctgccgcgatctgactcccccgagccggatcgccgccgca

SEQ ID NO: 162462 - DNA, 322 bp, Zea mays
  Clone ID: MRT4577_79742C.1
aattcccgttcgacccatcgtcgttaaaaccaccaagcaacttatatttcaaccacaacattctcgggaggatcttcttggcgctgccttttctatccacattatcttattttctaatttacatcttcttattgtctattttaccttttactacaaatttctataacttttattatatattattatacaatattttatataacctaattattatattttttaaaaaaataaaattattctacctttttatagatccaacttactacctttcattcacgtatatttttttatattttacctatttaatttatgccttattttt

SEQ ID NO: 162463 - DNA, 543 bp, Zea mays
  Clone ID: MRT4577_79743C.1
gcctggccaaaaaaaaaaaaaaaaaaaaaaaaaaaaaaaaaaaaaaaaaaaaaaaaaaaaaaaaaaaaaaaaaaaaaaaaaaaaaaaaaaaaaaaaaaaaaaaaaaaaaaaaaaacccgcccccccttccccaggcccaggcccaggccctttagcaggggttttgggggtggccccccttagggaccccgggttattgggggccaaagccgaaataggggggttaagccttttttacctaacccccttgtaattgaagggccccggggggcttggaatccctagggggatcaaccgccaggggggggttgcctaacccgttgagttgaaaacggggctgttttccccctccgttaagcaaccgttcctcccccgcctgttggggttccaacccgggtggggggggttccccgcccacgggcaaagcccggggggggggagggcccctataacccccgtttcttacctcttgggggagggcttcccttacggggcccccctgacccaccccttttttggggcaacctggacctgggggggctt

SEQ ID NO: 162464 - DNA, 687 bp, Zea mays
  Clone ID: MRT4577_79744C.1
atgcccgatgagtggaggagtacattagtaccaatcttcaagaacaagggagatattcaaagttgtaccaactatcgagggattaagcccatgagccacactatgaagctatgggagagagttattgagcatcgtctgagagaaatgaccaccatgaaccaatttggatttatgcatggaaggtcaaccatggaagcaattttcttaatgaggcaggtcatggagcgatataaggagcagaaaaaggacttgcatagggtttttatcgacttggaaaatgcctatgataatgataaagtacctaggaatctcatgtggtgggcattggataagcataaagtcccaacaaagtatgttacgctcatcaaggacatgtatgacaaggctgtgactagtgtccaaacaactgatggtgatactaatgttttcccgattaacataggactacatcaaggttcagctttgagcccttatctatttgccttagtgatagatgaggtcacgagggatatacaaggagatatcccttggtgtatgcttttcgctgacgatatagttctagtagatgaaagccgtgaaggagtaaatagaaagctagagttatggtgtcagaccctagagtcaaaaggatttataattagcaggaccaaaaccaagtatatgatatgtgactggtactacaattag

SEQ ID NO: 162465 - DNA, 507 bp, Zea mays
  Clone ID: MRT4577_79745C.1
gcacgagggccagaagaaggaagggaagaaggacaaatctggcaagaaatctaggtctgaggaagaccctagttcttcaaaaacagagaacgacaggatgacaaatgggcaagagtcaacagatgccaagaaaaagtctaccagaagtgaacggcggaagcgtcgcaagtctgagctaaggccatccagtgatcgattagaggcatatggaaagataaattcaaagcgtcacaagagccattgaccttctgagattcatcaaagtacatctggggaattttgctgttctttttatgcattggacaggtgaaagtcttagatttagctgtccttgcttctattttgggagatgcaaaactagtgttgccctagtagaaacatctgttgtcttagagttttgcagacattgtgttgtgcgcctccttttaattttaattgttttttttgtagaccatatatataatataatttccctgcaatttttcttgtcaaaaaaaaaaaaaaaaa

SEQ ID NO: 162466 - DNA, 246 bp, Zea mays
  Clone ID: MRT4577_79746C.1
agcgccggccagccggtctccaatcctgcaatccctccaatatccaataggggatgaggtgcagcgagcaagtccaataacctacagtgcttggaatttgtggaaggagagatgctggcgaatctttgataacagactttgctttgtactggatgagaaggcagagcacctgccaggctccaatcctgcgtcagcgttcctgcctccctggctccctgccgtctactcgtctccaagaatcatgct

SEQ ID NO: 162467 - DNA, 183 bp, Zea mays
  Clone ID: MRT4577_79747C.1
tcggtgagaaataagatagggttccaatgccctttttccaccggccaccacttgtcaagcgaaagcggtgagtgatggattgtagtgttttaaatttcctgtccctattccttatatgattgtcattttttatttttaatataattctattatatatttttattcttaatttttcctttttca

SEQ ID NO: 162468 - DNA, 553 bp, Zea mays
  Clone ID: MRT4577_79748C.1
gctcaaacctttcccccttctcccaattccctccgtcggcctgtcgctccatcccgtacgacgacaccatgagggagtgcatttcgatccacatcggccaggccggcatccaggtacgctgaacgcgtggtgggagctggactgcctggagcatgtgattcacgctgacggccacatgcccctggacaagatgatagaggggggctacgaccgttccagcgccttcgtgaggatgagggaggccgccggcctgagccccacgttcggttccatcggcaaggaggtctttttctttttggacccgaccacgcgcgcgaaccccgagcgcgatgaccgggctcgccggggcggagagcaaggagatccccgtcatggacaccatcaccgagatcgtcctcaccccctccggcaccaagatcctgttccgcacccccgatgggaccgggcgcgccttccctgacaccgacttccagctcgagcccgagggagaccacgaggtcgaggacgccgccgtacgctgacgcgccgcgcaactggatcctgctccaggtag

SEQ ID NO: 162469 - DNA, 390 bp, Zea mays
  unsure (1)..(390): unsure at all n locations
  Clone ID: MRT4577_79749C.1
gatgtcatgcactaacatttcgangttagccttcntcctcctggtcctcagcatcatgattcattttcagaaggaanagtcaaatgtcatcgatgctaaagcgtccgttcctggtacctccttctacatcaccaagttggtcgcctccggcaatgtcaagacatacagcacgaatgctgtgcatgaggcatgtgcatctgcttgcggctgctctgggaagcatacaatcctcatacccaagggcgacttccttgtcggacaactcaacttcacaggcccttgcaaggtctacgtgaccatccaagtggatggcaatctgctggcgaccactgacctaatccattacaatgaccatggtaattggatctagattctactcgtggataacct

SEQ ID NO: 162470 - DNA, 269 bp, Zea mays
  Clone ID: MRT4577_7974C.1
gagctttgatgatgaacacctacgtaagctcggaattcggctcgaggaatgattttgctgtggtgctttttcaaacatgatgctgccacgagacccgaacttatgtatggccaaacatgttaacatattttgtatgtcatgggctgttccagaaacattctgaaatacacggttccttctaaaaaaaaaaaaaaaaaaaaaaaaaaaaaaaaaaaaaaaaaaaaaaaaaaaaaaaatggaaagccaacaaaaaaaaaaataaggggcgg

SEQ ID NO: 162471 - DNA, 185 bp, Zea mays
  unsure (1)..(185): unsure at all n locations
  Clone ID: MRT4577_79750C.1
aatttccgggtcgaacgagctcacnattcggcggccgcccttaatttttttttttgggggaaattttaaggggacgttggcgttaacaccagccaaatgtaatatgccactggaagggagtgcatttccacaaattacctagaaactctgctcatgcagagaggcccggaagcacaggaatgaaa

SEQ ID NO: 162472 - DNA, 663 bp, Zea mays
  Clone ID: MRT4577_79751C.1
cgggcgataacagaaacttatatcgaagcattatgcttcttcctgctacgtccacttactatagtttcattatatacttactatcaaggaatatcacaaggtgattgttctttatggataaactcgtgctgctagaaagataacatggaataaattttcactacatagataacctgaaggaatagtgggctttcctgtttaggctcaaaaatgcagtctgttagttccctggagaataagcacaatcaatgaagctatataggaagatcacatgtaatgtaataaaaatttcagtacatggataacctgaagaaatagtgggctttcctgtttaggctcaataatgtaatctgttagttccctggagaataagcacaagctgtgaagctaaaaaaaatgtactaatctggaagttccctggataataagaagtgatgtcatatataggaatatcagattaagctttttgccaagcaaaaaaagttgagatgtttgagggttgaaactgacataattggcaatccattgaccaaaattgttactgccagtttctctgcaacatttgcacagaacgtgcaaatatctttatcgaggactgaaccgttgctatttgatgagcaattacattaccatttagaggttacccttacctcctgatatatg

SEQ ID NO: 162473 - DNA, 856 bp, Zea mays
  unsure (1)..(856): unsure at all n locations
  Clone ID: MRT4577_79752C.1
ggctggccgggcaagccgtgggcttgtggatcagagggtcagcgctgcgtactgcttcataccatgggcgatctaatctggcgcgtccagagtaaatcggacggcggagatcacatgtggacgttgcaccgaggtgaaattgtaaaatagcccctctattcccaatgtatcaacccgcagtccatcgtgtgttgaggagagttagtatgactgtatgagtcttggaaactttacaagttagccccagtgctcttctgtattcctgtgcgcaatccagagagctgctaattggataaaaatatagaaaatgagtttttgtattaaaacaattatataaacttgtttaaatcataataaatccatttaattcctttttgatccattccaattgcattaattttgttttaatatttttatcactaggtaattatgtttattcatgaaacatagactaaaattattcatttagcttaatctaaatcaaccacttaataacttcagaaaatcatgactcgataaccgtgactccgaatttagtgattcttgttcctacgatctcgttacgatgcgtagaatattattgtgcagtatgaactcatgtttggtgtgatgttaatttcccctgtatcatgtttgtttgtgttgttgcgagtagacaagcaagccactgagaaccccggtgttcagtaggtggataattctgagcaagagttcgnttgaggcacgttgtgcctgtaatacccaacttgggaaaatanagaaaggataaatcctcatgagcaatgtcttttcattcataagagttattaggaaacataattaaagtgaataattgctcaataaaagtacatcatgc

SEQ ID NO: 162474 - DNA, 335 bp, Zea mays
  Clone ID: MRT4577_79753C.1
gggcgggcccaaaattttttataaagcaaggagatttaaaagggccccaaaaacaaactacaagctttaaaaaagcaacaaaagttcaaaaaaaaaaaaacacattggtggacctgtatgagcacttaaccaggttgtaaacttttaacctgaatcccaagggagttaaaccaattggggggggagaaaaaaaaagggggaaccttttccacggaaatttccagggtcctttattctcccacctgaacagttttttgttaagcaacaagctcaacaataaagggaattggtaagtccaacggcaaattatttgggatgggggggaaggtcaaaaa

SEQ ID NO: 162475 - DNA, 227 bp, Zea mays
  Clone ID: MRT4577_79754C.1
ggcagacgtgatcaattgaggctcgcattgcgcttggtgggcccactgcggcccgcaggggggccttgctggagcgcgctgttgtcagatgatatgcagggactcactgctgtgcagtaccgctagaatgcggctggtgctgaccgagtccaacatgagcacccgtacgaacgtcatgcttgctaggccggcttttgaggccctggccaagcccgggatggcccatg

SEQ ID NO: 162476 - DNA, 277 bp, Zea mays
  Clone ID: MRT4577_79755C.1
attctttttttttttttttttttttttttttgggggtttttttttaggttttttgagggggcaccacaacatattgatcgctgaccggtaaccacccgggcgtttttacattaataacccaacgggccctataaatttaatacgaatcgggtttgccatacaccgattcacgtacaccttgaccccgaacgggggggtacacttaacaatattggtttacttggtgggcataaacaacaagcttttctgtgggggccataaacctcaatgggcttcc

SEQ ID NO: 162477 - DNA, 390 bp, Zea mays
  Clone ID: MRT4577_79756C.1
acggacggatctactattacacaaccaacattttttcttaactatccaattcacatatcagcatgctctattccacatcgaagtcggcttatccttacttagccattccaactttacatttcctatccatatatctacaatgcgtactctgatctcacatacacaatttatcataaaatcccattatacaatcaaattaaacatcacaattctaaccctactccaataactaatgatgtcaaatctaccgatcttgaaagctactactattacttgtatgaatcttctttaaaccaccacttattgacttcattcgaatactgaatgccacccacatcatgaattgacctcagtatctacctgttattaatgatttttactaactcttct

SEQ ID NO: 162478 - DNA, 269 bp, Zea mays
  Clone ID: MRT4577_79757C.1
cccacgcgtccgggacgcgtgggctccctggcagctactgggcagagcccctgaacgctgctacacatctcctcaaccgcctcccctcgaaggcggcgagccatctcaccgccacttcgccctgtatggcacaaccctctcctatgaccacatttgtgtgtttggttgggcgtactatcccaacacttgcgccaccgctccccataagccatctcctcgttccgcccggctcctcttaatcgggtactcccctgaccacaaggggtatc

SEQ ID NO: 162479 - DNA, 468 bp, Zea mays
  Clone ID: MRT4577_79758C.1
tttgggctgctttatgtgcttgtctaaatacgactaatcagtcgaggctacccacaccccttaaccaaagaccctcgaggattagtccacgctgaggcgtataaaacgtaacggcagtcccacctagaaattatccatttcagaggaagtcgccgaagttctaaaaggcccttagaccacctttatgcgtccgcctaattgaaactcggagcctcggaagcgtattgaccgtaattaatctcatcgggaggggatctagcattataacgtagcttaaaggcctccgctagcgcgtaataccagcgatcaagtagtatggttccggcatctacccgcaaaaccgcaaggcatcgagacattactattcctgaaagactgaaaacaactcgactcccggtacttaactgcgtatgacgaggtacgttacttaccccagcggcccgtcgcctgctatcgagacgtcgccgc

SEQ ID NO: 162480 - DNA, 869 bp, Zea mays
  Clone ID: MRT4577_79759C.1
ttgggtacctcgaggccggccgggggcacggaggacaaaagcaaattgacaccttctccgttcccgacgactcccgtgagcgtggagaggcgactaggcgaggccatggcctccggcatcggctccggccagcagcaacccccaggttcagcagttagattggatgccctagcagcgccggcggcagatgctgacccgggagccgtcggcgacaagctcgtcttcgaagcgccgcctcagcccgtgagggaggactacgtccagaacgccgtcaagtttctctcccaccccaaggtcaggggctcccccgtcgtctacaggcgatccttcctcgagaagaagggccttagcaccgaggagatcgacgaggccttccgaagggttcctgatcctcaacccagcactacggctaccacttctccgcagcagcaggtcaacagccagaatcaatccgtcggggtgcaagcttatgcgccagcacaacctgtgcacccagcaaacgctggccctgtcgtccttccaacgcagcccaggtttagctggtaccaagcattcctggctgcagggctcttgcttggttttggtgctagcgctgctgtctttatcaagaaactgttccttcctaggctcaagtcttggatccgcaatgttgtagcagaaggtaatggcactgaaggcaaccagcttaagcctaggattgatgatgaaacggctgatgctgtaaaggcttctgcttcggctgtttctgctattgccaaacaaaccaacaactgcttgcttcaaaggatgaagcagaagagagatactagtgacgttgacacaagctctagattcccaagccaaggagttaaaatccttgaccccgatca

SEQ ID NO: 162481 - DNA, 1038 bp, Zea mays
  Clone ID: MRT4577_7975C.1
atggagcaatataaacgagtagacggcccatcaggccggctcggccccatcctcgttaagactgtctccacgcgaccacgctgcagagctggactcggctatctcgggtccgccccctacggcctctctctccctcgcctgcttccggcttcccactcccactgtcccacgccgcctcccgcttcccttcgcgctcgctggcggcttgagcgtctaccggcggcctgcttggtctccaccaccgtcacggacacacggctccaggttcagggatatcctgggaaattctattgtccaagaatgaatagcatgaacaaaccagcttatgcagccatatgcactcactcacccaataaaccagttctcatttttgtgtcatcacgtcgacagacaagacttacagctcttgatatcattcagcttgcagcatcagatgaaaaaacaaggcagttcctgagcattgaagacaactccctagacatggttctttcacaggtttctgacagtaatttgaggcatactctgcaatttggcataggtctgcatcatgctggtttaaatgacagagacagatccttggttgaggagcttttttcaaacaataagattcagctagagggatcactgctcgtggagtcgaggcatagaatgataaattctcagggtgacctacgcaaagttctcatgtgcatctacggttggggcatctatgtcttcttcgaccgcactgatgaggtccgcaccttcaagtgcagtcgcgccatggtcagggccctcgcctgctcggccgcttcgctaatggctgcattgagctgtgttgaggagttcatcaacgccaggttacgcgacgcctctattacccacccttgcctccctaatgtgtctgctctaatggggaatggggaattggctactatgctctccacggcagatctatgcgagtgcgcaacctggaaatatccacttctgattgccaagaagcgatgtgaatctcacgaactcgacatgcctgaatgtagggacatgtcaatgtggtag

SEQ ID NO: 162482 - DNA, 872 bp, Zea mays
  Clone ID: MRT4577_79760C.1
tagtttggaactgaactgggaatcgggaggccgaggacaaaagcaaattgacaccttctccgttcccgacgactcccgtgagcgtggagcggcgactaggcgaggccatggcctccggcatcggctccggccagcagcaacccccagttagattggatgccctagcagcgccggcggcagatgctgacccgggagccgtcggcgacaagctcgtcttcgaagcgccgcctcagcccgtgagggaggactacgtccagaacgccgtcaagtttctctcccaccccaaggtcaggggctcccccgtcgtctacaggcgatccttcctcgagaagaagggccttagcaccgaggagatcgacgaggccttccgaagggttcctgatcctcaacccagcactacggctaccacttctccgcagcagcaggtcaacagccagaatcaatccgtcggggtgcaagcttatgcgccagcacaacctgtgcacccagcaaacgctggccctgtcgtccttccaacgcagcccaggtttagctggtaccaagcattcctggctgcagggctcttgcttggttttggtgctagcgctgctgtctttatcaagaaactgttccttcctaggctcaagtcttggatccgcaatgttgtagcagaaggtaatggcactgaaggcaaccagcttaagcctaggattgatgatgaaacggccgatgctgtaaaggcttctgcttcggctgtttctgctattgccaaaacaaaccaacaactgcttgcttcaaaggatgaagaaaagaagatactagtgacgttgacacaagctctagattccccagccaaggagttaaaatccttggacccatatcatcggtcatac

SEQ ID NO: 162483 - DNA, 2714 bp, Zea mays
  unsure (1)..(2714): unsure at all n locations
  Clone ID: MRT4577_79761C.1
ccggccgggttgtagtgtggctagtggaagaagaggaactcttgtggtgtgctgcgggtgctcatcacctcgcttctctagaggccttcctgttcttgctcatggtcatgttgctagtgtcttgcatagtgtgtaatcttagtgaactgtgttgcttgtgtgtgtgtgtgtgttgtgtgcattggttcgtgtgcgtagttatgcagccgtgtcttttttctctcttcaatgaaaatgaaagctctcctgcatgtccgaggaacaactgaccattaactaataaggttataatagctgagctttaaaagatacggcattcctttcaaactaactacatagaggctcatattcttgacaaagctagttcttttagtatatattggttattacttcttctcagtatacatgttgctcaatctccaaatacatgtatttgtgatatgtacatattttgttctatggtgttctttattgatcagtcatcagttgaaaggtattcagctctaccatggtgtaaccgatttctataatcctgtggaacttctagctaaaatgctaaatatatgaacctgcattattgataaatatcttacattatttgagttcttgacaacacacgcatctataactgtaattcataacatcagctgnttttgttgtcttccatttagcttataagttntcactgaaagcatgtggcctactataacttgaactactagcctgattgtatctgtgtgcttttagcagccgctgccagcttggaactgaactgggaatgacgaggccgaggacaaaagcaaattcacaagcaaattgacaccgtctccgttcccgaccgttgccgtgcgcgtagaagcaaattgacaccttctccgttcccgacgactcccgtgagcgtggagaggcgactaggcgaggccatggcctccggcatcggctccggccagcagcaacccccagcgccggcggcagatgctgacccgggagccgtcggcgacaagctcgtcttcgaagcgccgcctcagcccgtgagggaggactacgtccagaacgccgtcaagtttctctcccaccccaaggtcaggggctcccccgtcgtctacaggcgatccttcctcgagaagaagggccttagcaccgaggagatcgacgaggccttccgaagggttcctgatcctcaacccagcactacggctaccacttctccgcagcagcaggtcaacagccagaatcaatccgtcggggtgcaagcttatgcgccagcacaacctgtgcacccagcaaacgctggccctgtcgtccttccaacgcagcccaggtttagctggtaccaagcattcctggctgcagggctcttgcttggttttggtgctagcgctgctgtctttatcaagaaactgttccttcctaggctcaagtcttggatccgcaatgttgtagcagaaggtaatggcactgaaggcaaccagcttaagcctaggattgatgatgaaacggctgatgctgtaaaggcttctgcttcggctgtttctgctattgccaaaacaaaccaacaactgcttgcttcaaaggatgaagaaaagaagatactagtgacgttgacacaagctctagattcccaagccaaggagttaaaatccttgaccgattcaatcggtcataccagggaacccataaatattaccagggatgataggttttctcagtaccgcccactggaagaccatgcccctactgttataaggaatggggcaattaacagttcatggagagcctctcagcaaactaacatgtatggtgtgtcaaatggcgactttggttccgtgaggtcttcatttgcgccagcacctgctgaacctacagctggatcattttcaagatcctatggcgagcagccgatgtccactgcacaacgaagcgataggtcttctggcagtaagccatgggagatgcagcagtattcacaacagaggcctggttatggatccaactcccagttgagtgatgatggatcatactctgatgcccaggacagctatgctccttcctatcaccagaatggaaaggcccctgattttcaagcggatgaacctaggcctttgacttacaacactggggttgaggaaagaccgccaccgcagcgccgctgggtgccccctcagcctccaggtgttgcgatgccagaagcagcagctgccatacgtcaaccaaaggcccttccaaagcagccctccagcgatgcctctgaggcagctggtgagatgcaggtgaatggttcaagtgcatcggatgctgtgactgaggttcctgttaatggtgctactgcaagcgatgctggacgcagtgagatccaagaacaatcagtggcggcctaagtgaaaccaagaccagctaagaactgggaagcaatctaagagagattcaggatctctagtacatctggggggtttgtcatacatctctgaataacgtctgtatcagaacagcggggcaaccacgccgatgggtacccgtaataatgcaataagtagcagatagtttctgcatttagattaatgctacttgtacacaggagaacatatcaataatatttttttggctgttcgattgagggtgcttaaaaaaaaaaaaaaaaaaaaaaaaaaaaaaaaaaaaaaaaaaaaaaaaaaaaaaaaaaaaaaaaaaaaaaaaaaaaaacccccccccccccc

SEQ ID NO: 162484 - DNA, 929 bp, Zea mays
  Clone ID: MRT4577_79762C.1
cattgggtacctcgaggccggccgggccgggactcagtggtgcccacagctaaagccttgtgcaaaattatcattaagctgtcatcaatcatcatggctgccattacggcaggtctgctggtactcctcgctgctgccgtcgccgctccggcgcacgccacggactacacggtcggcgactcgtccgggtggagcagcggcgtggactacgccacctgggcgagcggcaagaccttcgctgctggggacaacctagtgttccagtacagcgcgatgcacacggtggtggaggtgagctccgcggactacggcgcgtgctcggccagcaactccatccagtcctacagcgaccagaacaccaagatcgcgctcacagcgcccggcacgcgctacttcatctgcggcaccccgggccactgcggcaacggcatgaagctcgccgtcacggtcgccgctgggaccgccaccaccaccccggcgtcatccccgcccgccgctgactcgcctccagagacagccacgccgtccgggtctacgcccacggcaacgacgtcgccgtcggcgcccacgacgaagcccacctcgagcagcactggcgctgcctgcggtggggaggcccggctcgctatgggcgttttggcctgggccgcgggcctcgccgggctcgccctgatgggttaggcaagaggcagtgctgtttccgttccatgcttttcctgttgcaggcttttgtggcccgttgtgtttaatctgaattcacgtctatggtctatgctcgattctggcttgttcgagactcccgctgtatacatgtacggctatccttgaatccttcatgctggacctgtcccagcggtctgcaatatgtcatagataacgatatgctatggctatttaatcgttcgaaaaaaaaaaaaaaaaaagcggcc

SEQ ID NO: 162485 - DNA, 1967 bp, Zea mays
  Clone ID: MRT4577_79763C.1
acaaagcaaatgacaccttctccgttcccgacgactcccgtgagcgtggagaggcgactaggcgaggccatggcctccggcatcggctccggccagcagcaacccccaggtaccttccgcgtcctcctcttgctgctcgattggattccaatttttagaccgaccaaactagaattaggtaggttcagcagtgagaggggatgccctagcagcgccggcggcagatgctgacccgggagccgtcggcgacaagctcgtcttcgaagcgccgcctcagcccgtgagggaggactacgtccagaacgccgtcaagtttctctcccaccccaaggtcaggggctcccccgtcgtctacaggcgatccttcctcgagaagaagggccttagcaccgaggagatcgacgaggccttccgaagggttcctgatcctcaacccagcactacggctaccacttctccgcagcagcaggtcaacagccagaatcaatccgtcggggtgcaagcttatgcgccagcacaacctgtgcacccagcaaacgctggccctgtcgtccttccaacgcagcccaggtttagctggtaccaagcattcctggctgcagggctcttgcttggttttggtgctagcgctgctgtctttatcaagaaactgttccttcctaggctcaagtcttggatccgcaatgttgtagcagaaggtaatggcactgaaggcaaccagcttaagcctaggattgatgatgaaacggccgatgctgtaaaggcttctgcttcggctgtttctgctattgccaaaacaaaccaacaactgcttgcttcaaaggatgaagaaaagaagatactagtgacgttgacacaagctctagattcccaagccaaggagttaaaatccttgaccgaatcaatcggtcataccagggaacccataaatattaccagggatgataggttttctcagcaccgcccactggaagaccatgtccctcctgttacgaggaatggggcaattaacagttcatggagatcttctcagcaaactaacatgtatggtgtgtcacatggtgactttggttccgcagcaaggtctgcttcattcgtgccagcacctgctgaacctacagctggatcattttcaagatcttgtgccgagacgtccaccgctgcacaacgagcggataggtcctctggcggtaagccatgggagatgcagcagtattcgcagcagaggcctggttatggatccaactcccagttgaatgatgatggatcatactctgatgcccaggacagctatgctccttcctattaccagaatggaaaggcccctgattttcaatcagatgaacctaggtctttgacctacaacactgggattgaggagagaccgccgccgcctcagcgccgctgggtgccccctcagcctccaggtgttgcgatgccagaagcagctgctgctatacgtcaaccaaaggtccctccaaagcagccctccagcgatgcctctcgggcagctggagagatgcaggtgaatggtgcttcaagtgcatcaccggatgctgtgactgaggttcctgttaatagtgctaccacaagtgatgctggacacagcgagatcgaagaacaaccagtggccgtctaagtgaaaaaccgagaccagccaagaactgggaagcaatctaagagagatttggggtttctggtacatactggggtttgtcatacatttctgaataacatgtgtcagaacagcatgacgacaacatgtcaataagtagcagatagtttctgtatttagagtaatgctacttgtacacaggagaatgtcaagcattatctatggctgttcgatcgagggtgcttaaaggttgtgaattgttgtcttttattttgtttgcattttgctgttcgcttcttacctcgacgttcccctaaaagttttaaactttaaggaagggcggccgctttaa

SEQ ID NO: 162486 - DNA, 483 bp, Zea mays
  Clone ID: MRT4577_79764C.1
ttttttttttttttttttttttttttttttttttttttttttttttttttttttttttttttttttttttttgggcacaaaaaaagagttcatttgcccaaaatacatacaaaagatttacaggccttcacaaaaaaaaaaacattttccagggcaaaaaaaaatgcccccccccccccacaaaagatcacattaaacagaccctaatgcttttttaacgggcgggcatataaaaacagcattttattcgggggggggggtcccccatgggcacatttccacgaagatgggcccccatgccctccaagcagaacttggagcagcagcagatagcctcgagggaacactcacaggttttgaaacaacaaaagcagcaccccccaatgaacaggcttgcatttaggcagccctttttctaaaggggcttttgaaaaagaatgtaataggacatttcctgccactgggagggataaacaacccggt

SEQ ID NO: 162487 - DNA, 745 bp, Zea mays
  Clone ID: MRT4577_79765C.1
atcataattggtcatcatgaaaacatcgttgtgctatgattcagaaggaaatgagtgatcgtaattccccctttaatctctttctaaccaaacaggtcctcaccgctgcagtcgacatacccggccctttgttatttggtattgaatttggattgcgtagatttaattagtttttttcttccattttgattcgttaccagctagttttggtcctagttccattttgaccgttgggcgtgtcagcgttggtcgtggtgggcgtcgtcgttgcggcgggcgtagacgtggacgtctccggggtggtgggggcggcctcggcggcgaccgtgacggcgagcttcatgccgttgccgcagtgtcccggggcgccgcagatgaagtagcgcgtgccgggcgccgtaagcgcgaccttggtgttctggtcgctgtaggactggatggagttgctggccgagcaggcgctgtagtccgcggagctcacctccgccaccgtgtgcatcgcgctgtactggaacactaggttgtccccagcagcgaaggttttgccgctcgcccaggtggcgtagtccacgccgctggcccacccggacgagtcgccgaccacgtagtccgtggcgtgcgccggagcggcgacggcagcgaggagtgccagtactaccagacctgccgccataatggcagccatgatggttgaggacagcttaatcgatcaagaacacggacagctgagtcccggcccggccgg

SEQ ID NO: 162488 - DNA, 407 bp, Zea mays
  Clone ID: MRT4577_79766C.1
gccactcgtcagacgaaatgacaatcatccactttcaacacgagctgcatataatggatgggtgagtattgagcatggagctggaagcagcattggacaatatgcctttgccaagttcagacaatgggagctcaccgacatataccatgtgtgcaaacaatgtctagtcttatgggaataggggcaacacgctgtgactggtaatgcgtgtgcaactactgtagcgaggaacgctgtgcatatcttgcatattgcaacatgggccgaactgataaagaatttgatgttgacgctgtagtgttatagattgctgatagactattcagttgcaagatatgttactgactgttctagctccttcctcaaggctgcggtttgagttctttcgattctgcattgtatatgct

SEQ ID NO: 162489 - DNA, 379 bp, Zea mays
  Clone ID: MRT4577_79767C.1
aatccccgggatccggagtgacaacggatcagaatgcaagaaccttcaagtataagagtaccttgaggaggaagacatcaagtatgagttctctgccccctacactccacaacagaatggcttagtggagaggaagaataggacgcttatcgacatggcaagaactatgctgggagaatacaagacgctggagtgtttttggtcggaagctatgaatacaacttgtcatgctataaattgactatcttcatcgcctcctcaagaagacggtatacgagctcctaatggggaacaaacctaatgtttcttactttcttgtatttgggagcatatgctacattttgattaagaaatgtatacattcaaagtttgctactaa

SEQ ID NO: 162490 - DNA, 641 bp, Zea mays
  unsure (1)..(641): unsure at all n locations
  Clone ID: MRT4577_79768C.1
gcgactcggtgtggtctgctgctggctactgcgcggctgcgcctagccggcccacgcggagacgctctctcttgcttcggctctcgattccggggagcggttctgtctgccggaccgggacctctgacgctccacctgagtttgggacctttgtatgctcctccgtgacggcagcattgttctgcttgtctaccgagttttaatttttgttccccccattcatgagatttcgtgaggggattgggcaggcgcgtggggacagacaggatcacgcctggcgggcgctagtccgcgatccgcatttctgaatcccggcgccttgccgtcgtcatggtcaggccaggcatcaagtttctaacaatttgaagtatcccgaaatgggcgcaagagataacggggaggggagagatgagaagagggggactggatcagattatgtacctgctagagactccttttcatcacaaggtgagtctcgggttccaaagaggctcggtaaaaaggagtcaaaagataatagcccccgaacgaccaaaagcagcgccagccgtcaagctcaaaacaagctgcaacataaaggattaaacaatgtacagaacaagcctcagaaacaaaaaaaaacagntagtgctgctaaagct

SEQ ID NO: 162491 - DNA, 263 bp, Zea mays
  Clone ID: MRT4577_79769C.1
cgatacactgctcattgcgggggacagggctgaccacctagagctgttcattgcaaatatgagcatgcgacacattacaatggcccagggtcatgtggcataaataatcaggcttggctgatttacagggtatccaggggccggaactttggatccgctctatcgtcgaccacattagcacatacatgtcctttacacatctttggttggtctcatgcaccggataatcttaccagggagcatcaatatcttacccattcttg

SEQ ID NO: 162492 - DNA, 681 bp, Zea mays
  Clone ID: MRT4577_7976C.1
cccccccttttttgttggtaatggcattaattattatatataatatataatataataatagctcctgtatgatctcctttcatgtaaatcaacaaaatttggctggtggatacacagaatggtacaaggggcctatcctttggatagttggcaagggagcaagcatcaagaaagcttgcacactgctgaaagaattgcctgtacacacaacaaaaagaaccaaagaaagtgtagagctatatcctactcgaatgaacaaaagatcactgtgtaaccccctaccctaagctctactcactgtactcatttgaacttctggatgagttacatcatggaaatcttgcgacttctccatttctcttgcaatctgaatgtcactggggatgaaatactcactgaaggcctttgcggcaaaatgaggaatcatcccaacaacagttaccgcaagcagcagtgcccagaacagcccagttcccatcactttgtagattgcccaaaaaccaggcatgattggtatggaatctatgatcatgacacaaatccatgtcgcagcaatgctaccccatattgccgcatgcgtaatccagttccatctgatgacatccattgccaggtgaatattgacaagaataacaacggatagtgtccataggtctccgaggctggaaccatcaattatac

SEQ ID NO: 162493 - DNA, 309 bp, Zea mays
  Clone ID: MRT4577_79770C.1
aagattctataaatgttctttttttttttctgggatgcctctttccttaaacaccaaactttttttttgaaccatatcttatgggacatcccaaacagggaaccggcggggatggttcggggttttatccctttttgggtggggggggcgggttgggggaatttccccaatttgttgaattagtaagaggggccaatggcaggcgcaaccccccaggggatcgggcccaactgtggccgtttgaacatggtcccggggatcccaccacctggctggctgtttggccccattttttggtgctgtgggtta

SEQ ID NO: 162494 - DNA, 253 bp, Zea mays
  unsure (1)..(253): unsure at all n locations
  Clone ID: MRT4577_79771C.1
aatatatctgaacgccggagcctgcagagactaagccgcttttatcgtttctcatgcgggcgcgccaaccgagtgtgtgnaactgctacgacgagttcaaaaagagtnntttttaacccccttcattaaccctctccttattctctcttgacaatgacatatacgccctccgcaactaaatatcaataaatgacaatggtgatacccatcaataacccagcataggatagaaaacacatactcttaactaccc

SEQ ID NO: 162495 - DNA, 481 bp, Zea mays
  Clone ID: MRT4577_79772C.1
aatccctcctattcgtcttctttcattctcttcaccactttctgcctcgtccaccagatcctctcagaaccaaaatactgtcatgtactccaccggtagcggtgcacgtgggaaggacaggaatgtcgctgacggttgtactgtcattgaggacacgtacaacttggttgctaaccccgtgaaggtcggactcctgttcccctccgtgcgcatcgaggacttcttggatatcgtccgctacgcgcagcgtgactccaccttcgcccccgtttacctcttgcctgtactctaatacctcgcctgtgcttgtctgtagctcggtggatgtgctgtctgcggcaaccacagaagtcatgttattcctcatcacgtacttctgggaatataatggacgttcattatcttcgactaggtgtgtagcacggactcgtaccaatctgctctcggttcttgtgctccacaatatcaaccctgttctgct

SEQ ID NO: 162496 - DNA, 1639 bp, Zea mays
  Clone ID: MRT4577_79773C.1
ttattcggcacgaggagcaaattggagaaaataaatgcttcacgtaagcttaccgggacggaaaataagaagccgatgctcaccaaatcaaactcttcactgtcaagacaagctttgaatgtgattggtgataagaaggaagcggttaaatcaaaggtgaagccagctattaccaggtctacaccttcatcaccaaccagtgtctattctttacctgcgtcgttcgacagattctctaatgatctgaaacagaggaacagagtaaaaggagcagagaaagcttcatcttctaggctttccttgttagaaaaggctgcttctgttttgaaggctactagtgccgggagaaagccctctgctgccaattcgatcagtagctctgtgttaagtattggatcagggccaaaggccttgagaagaagctgggaaggaaacacggatattaaaggaaaaggcaattcagaatcaaagacagccaaacctgacaagaagtctgataacaagatgccaatgactcctagacgaaaatcaccagtggaccagaaggtgccacctaaagatgatagccagaaagctgctaggaagagcaccccaagtgctccctcagatgacgctgacaaagcagctaagaagcatattcctactgtaaagagaacatctggggtcttagggaactcgaatgttacaaatctagtgaagattcctcccagcagcagaaaactagcagatattagcacttcatggacatcactcccgccatcacttgccaagctaggaaaggagcttctcaggtacagggaatcagcacaaatagctgctgttgaagccatgcaagaagcttccgctgcagagagcttgctcagatgtttgagctcgtacgcggaggtgagctccacggcagaagagcagaacccgcagccagccgtagagcagttcctcaccctccacgccgcgctctcgcgcgccacggtgatcaccgacaccctcgccaagtctgccacatctgcagcctcgccagattgctcgccagccagcgacgctgggacggtgtgttccgctaccgacgaggaggccgctgccatcacggccgagcgccggcgccgagctacgtcctgggtgagcgccgctctcgccacggacctgccgccttcggcatctacagcctcaaaccggcccccgccaccgtgtcctcgccgctggccgtggtcgtcgtggacgagcccgcgaagctggctatttgctaaaatccatggaggagacaatcgataatattgcttccgcaatagttcgaaagatcaagcgctgctgagtagggctgggcaaaaaacccgtaacccgaaacccgaacccggaatacccgaacccgaacccgaaatacccgaaacccgaattttgtttgggaatttcgggtagcaacttgcaaaacccgaaattatttcgggtaattcgggtatcacaatcgggtacccgaaatacccgaactttcatgtgtcatgtactcatgtcatgcttaataattaatttgtacatctataattatgtaagtgtgcataacttgggattgtagattgcttgtgttttatatgtccatgtatatcattattccaaactatatttttatactaatttaatagggtgt

SEQ ID NO: 162497 - DNA, 350 bp, Zea mays
  Clone ID: MRT4577_79774C.1
gccttcgatgtcgacctgcgaccatggagacctccgactttgcgtatcaattcctcgcgcggtctcatgttcgttcgatttcctaaagcctatgtgatccgttcatggcgattatttctccctcctctccggcgttcgtccctatgcctctctctccattcgcaaggttgcccaaaagttaatctattcatttttggctaatattataggttggccaaacgcttggaacaatggaactattgcaaatttcttttttaaaaaaaaaaaaaaaaaaaaaaaaaaaaaaaaaaaaaaaaaaaaataaaaaataaaaaaaaaaaaaaaaaaaaaaaataaaaaaaaaaaaataa

SEQ ID NO: 162498 - DNA, 278 bp, Zea mays
  Clone ID: MRT4577_79775C.1
cggacgcgtgggcggacgcgtgggcggacgcgtgggcggacgcgtggggaaaatatggtcaaggatccaggtcttgccgggcttgtgctaacggacatggactcataaggaagtatgggctgaacctttgtagacagtgcttcagggaatatgcatccgagattggatttaagaagcttgactgagaagcttctgcttggaagaagttaagtgttttaaaagttgtaaaaccatctaccaaaatgattcatcattaaaaataaaacttcttttttacc

SEQ ID NO: 162499 - DNA, 212 bp, Zea mays
  Clone ID: MRT4577_79776C.1
agaggtgggttggcttctcctccgccttccggttcgggtctcggggttcaggggcggtctccggggcgtctgctaaggcggtggataggttccgagatgagctgcgtcggatggggagtagcgactgcttcgggggcgcaccactccggggacccggaccaccactcgctccacagccgcgttccgcacctccgcccaagacccctcaggag

SEQ ID NO: 162500 - DNA, 244 bp, Zea mays
  Clone ID: MRT4577_79777C.1
ccaccgaggcggtgaggatttacccccgcctgcctgcggagcgggagcgggagcggtggcgacaatgtccttcaacggcaagcccaccccacagtccgcggcggccagtgccgccggcgtcggcggcccgccgaagatgtaccagcgacccatctaccggccgcagcaggcgcccgcgaagtggcggcgcggggggcggccgtgccctgttagctgatgctgccgcttttgctggacgctccct

SEQ ID NO: 162501 - DNA, 999 bp, Zea mays
  Clone ID: MRT4577_79778C.1
cattggctcgctcgaggccggccgggagccttatccaacgaacgcaaggccgagcagaggcagaggcagaggcagttcctctcatggaggcgtccttgctcgtggctcccaagccttccatgcccaggaccatcttctccgccaggcgagccggtcggagttggaggtgcctcgtcgtcgctgccaccatcaagcaacaactcggcacacggtcagaaagtgtggacgtcgatgcgccggtcgagcacctagcgccgccttcgaaggcgacgacgggagctcgcggcggcctgctcgccgccgtggcgacgacaacgagcagctgcacggcagtgttaccgtgtcacgccttatcaggcgccggagcggtggaatcgggaccgtggtggtggacgtcgccgctggacaccctgtaccgcgcggcggcggtgctgggcgacctggacccggcgacggcgcgggcggtggcgggcgtggcggggccggtgctgtcggcgttcggcttcctgttcatcctgcggatcgtcatgtcgtggtacccgaggctccccgtgacggagttcccgtacgtagtggcgtacgcgcccacggagccgttcctcgccgtcacgcgcagggtcatcccgccgctcggcggcgtcgatgtcacgcccgtcgtctggttcggcctcgtcagcttcgccagcgagatcctcgtcgggccacagggcctgctcgttctcctctcgcagcagcgctagcgaccactgcgtttctgcttccattccttcgatgaacaaattagtagtcatttttacaatggcacacttcgtgccatatccatttgattttaagatgattttaggttgtcttcagctatcgtgcccttaattatatattggtacgctattcctatatatttcgcatgcctaaattttagaagaaaataattattgtaccaccaattagtataaataatttatcattttatggcttaaaaaaaaaaaaaaaaggccccta

SEQ ID NO: 162502 - DNA, 411 bp, Zea mays
  unsure (1)..(411): unsure at all n locations
  Clone ID: MRT4577_79779C.1
tacggccgccagtgtgctgngaatcgcccttaagcagtggtaacaacgcagagtactttnttttttttttttttttttttttgncgagaagaacaaatgccatgcatagagccaatgaaagggaagctaaccaagcctgtctttcttcctccccatcattctccaggcaatcttcctctccagctacaattggggcagacaaagcaggtgctctcaatgagcgaccacgccttccttttctctctctgatctattggagctaggttggtgcagcctttcgacgttcgaaccggccaaccttctgtgttcttttgtttgtcatagaaactggctgcttgtgcctagacaaacatagctcatcctttgggagaagctatagtacccagcgtactctgcgtgggtaccaccgat

SEQ ID NO: 162503 - DNA, 374 bp, Zea mays
  Clone ID: MRT4577_7977C.1
gcgcgctcaaataaaaaaaccacatatacatatttattctgactgcaataatcctacatcggagtgctgatctccttgtgagataacgttactcccaactttgaccttgccattgctcctattatatatcttgtataaatgtaatgatagttactcacaaacctattactagtcagcttaattcttgatcacctaacatgtatacgtattcaccgtctcattatgtaaccaacgtatcaaaaaattgtctactaacagactgttctatcgttgttactacaataggacagttcaaatctagctacaccagggtgctctattattcctttaaatttttaaatttcaagccactttttaataaaataataataaat

SEQ ID NO: 162504 - DNA, 595 bp, Zea mays
  Clone ID: MRT4577_79780C.1
gccggccgggcctgctatcataggaacctcccttacccccatagaccccatcgcccgccctacttcctcacatggccttctccctgctagcgctgctgcttatcccgctaaacctgattcattacttcttcatttcaattcacaatatgtgaatctcttctgccggttcttctctgtccttgatgactacttcctggcaattcatcgtctccaaaaaggtgctacaacagcaaacgattgctcgcgagcccttctacttgacagaacttttatgccacatatcagcccagtccaattccatagggcaaaccggaaatctctcgcttcgattatatacataactacccttcagctactacagacttctctattgtaccgccacagaagtcccctttaacagcggtttctcttgatgctagtttgttctcctggaaccgatacacaattctccgtaccaattacgggaagaaggaaggcaatctatgtatcatgagactacaacccaacttgacgagagttttgcgaagctcctcacgcacccgacccatggtctataccagcagatcatgattctcttcaatctttctgagaggag

SEQ ID NO: 162505 - DNA, 476 bp, Zea mays
  Clone ID: MRT4577_79781C.1
aagcacaggcaaccaattgttgaaggggtattgggaaaaacaacactgggcatctgcacaaaagggaaattaaaaacagccatagtatacaccgggcttgaaaatgccaagataaacactttaaagaaaaaggggcagcaaaacaataagcaatcgaccagtcttggcgactggaataaaaattgtcccaagtccaattgggccttctccaaatggaactggaaaaaaatctccttcaaaaaactggtctccaaggaaccctcaaaaaaagatacctcaccttccaaattcgttgttagggccaccaagcttgggggtccatatggagcctgaacctttgcaggggcaaagaaaatcgaccataactgggacccccactcaggggcccccccggggtcaggcaccatagaactatcaaggctggaagtatccaccaaaaactttaaaaacatttgtttaaaaaagggttttgcaaa

SEQ ID NO: 162506 - DNA, 279 bp, Zea mays
  unsure (1)..(279): unsure at all n locations
  Clone ID: MRT4577_79782C.1
ctnnnttnnnttttttttttttttttttttttttttggggttgggaaaaaaacaaaaaattcggacagaacgcgctatcgggttcactttcacttacaggttttacacatgccaaaatgcctaccggaatttttttttgggaccagatttggggggcgggccccccgggaagaatggtttggttggttcacattccccaccaggtggactgggccgggttctttttggtccccgcccggtgggggggggggttcgggagggaaacgggggggggttttt

SEQ ID NO: 162507 - DNA, 486 bp, Zea mays
  Clone ID: MRT4577_79783C.1
ctcatataggactcctgtttctccatgagttcttataggaagcaaaattagagtcagaatcatgtggtttctgcattgactttccagacctgttggtggaagggtgtttttcacaaatatgaagatagccttctcagcactgagcttgattatcttcctaacaacacacacgaattgtccaactgtaagatctgcagggacgaggtacctgcaaagtgatggccatcagaaaatcagaacagcttacggctgcaactcgcttttgatgtgtgcaataatgctttaatgcagtagcatttcttttcgtacagaacggtaacatggctccttcagtcctatatgaaactaaaatcaccttttgtaattgtagaccacaaaacatggaaaccataatagatatttaactcagcatggaacgatggaaattggtgcatttttgatagatgaatgcaacaaggttcaatgctatgcattatgttcattttc

SEQ ID NO: 162508 - DNA, 403 bp, Zea mays
  Clone ID: MRT4577_79784C.1
cgaagttcatcttcctgtagaaaaagtagattctatcatatctgagtggatgggctattttcttctgtttgagtctatgttagattctgtcctttatgcaaagaacaaatacttggcaaaaggaggctcggtctaccctgacatttgcactatcagccttgtagcagtgagtgatgtgaataaacatgctgatagaattgctttttgggatgatgtctatggcttcaagatgtcctgcatgaagaaagcagttattccagaagctgttgtggaagttttagatccgaagactcttatttcagaaccttgtggtattaagcatatagattgccatacgacgtctatctcagatttggaattttcatcagattttaccctgaaaatcacaaggacatccatgtgc

SEQ ID NO: 162509 - DNA, 435 bp, Zea mays
  Clone ID: MRT4577_79785C.1
caggaaaaagctctctattacaacaaaagggaagatatatttttacagcacaagggtaattaaataatgaaaataaaagggcgcaaaatctaaaactgaccaacgtaaaaaaccaaccaaaggcaggggagagggggaggtgattaacctaactcttgaaaagaaaaaagttcaggaacctgtgaagggtcacattgacagctttttttttacctgagaaaaaattgaaccaaaggcaaccttaacaaaaaaaaagggaaaaatattgaatttaaggaaaaattgaggagctagatcactgggccaccaaaggaagaccttagacattgggaaagcccggaaacggtatcgcaaactggtcgaaggactaatccgaaaaaaaaaaggcgggcctaaaaaatcaaactggggggaggggcgctagacgggggggtt

SEQ ID NO: 162510 - DNA, 764 bp, Zea mays
  Clone ID: MRT4577_79786C.1
agtccccacgttaggttttcagtcttatttacagtgctgtaagccgtgtttaacagatgggtactgcttgtttcctcagcttgagtgccctgcgccgctgctgctgctgctgccgccgccgccgccgcagccaccaattctgcttctgccaccaaagagctgctgcgctggctgttgtgttgctaaggtgccatagagcatggaagccgtagaaggtgctacgtaggcatggaataaaagatactatcgtcctgttatattcagatggttgcttgaacttgcttgactcaatgcttgagtggtacctcttcactatggggtctctctctccccctgtgtgtggttatgtatttgttgtcataaagatgattttgactccagctaatctggtgtctgcgctattggcttccctttagcgccacacgtttgttgtatggataattttttttgagccaatgtttcgccacgctttgccgctgtttcaaacaggcaccacctgaagacattctgatgtgcttgtgatgcttaactaggaatacagtgccaggtaccaagctgattgaaacggcaaggtatctgaaaggttgggtgatgatgaggccttatgccaagcgtgccattctgttggtgctcgaatgcgtgcggtctacaggtaagcgattttaagggcatgtacaacggccatgtacaattggttttctttgtacaagagacatttaagaaactgtatcatacagtggagagttcttaaaatcagtcatatc

SEQ ID NO: 162511 - DNA, 155 bp, Zea mays
  Clone ID: MRT4577_79787C.1
ctgaaaagaaaaggccgcatcgatttattgcgaagtacaggcccgctccttaagccttcgcacggaaggggaacaaactgtgctaatacagatcttcccctccatgccctcgctctaccaccatcagagaccgttgtcggaggacgtcgtggatg

SEQ ID NO: 162512 - DNA, 327 bp, Zea mays
  Clone ID: MRT4577_79788C.1
ctactggggttttttctttttcattttttttttttttttaagggcaccaccaaacaaatccagtggaaaaaaaaagcggggaacaaaaaccgggccaacagttcttccgacacctaaaaaaaggggggcaaacaaagggaacaccagggggacccacacctaatcaaaagggggaacgggcccaaaaaccgtgaccgaaagcaacggtacccccaccctatagatcggataaataactcggcccaagcccggaaggcaccacacaaaaatcccctaaccccgtaaccccaaccccccattccggcaacaacaccccccggcccaccc

SEQ ID NO: 162513 - DNA, 2160 bp, Zea mays
  Clone ID: MRT4577_7978C.1
gctacccaagccactctcccccgtttctaggcttcacagcctcgccaacaactcccgtcctccacttgcccttctccgccaacagactgtccccggccgctgccattgccgattgctcacatccgcgttcgtgttcgcatccgcatcagggtcacctgcgccggcgagccatttgaaagggaggagtagcagactctcagaggtggacatgacgctgttgtgcgtgccgctggtggggcggacggtggaggagatgattacagacgcggcggcggccgccgccaccggcggcgacatggtcgagatccggcttgacttcatccaggggttccgcccgcgtgagcacctaccgcccctgctccgcggctgcccactcccggccctcgtcacctatcgacctgtctgggaaggaggccaatatgaaggtgatgacaccacaagatttgagacactacgtttagcaatggaattaggtgtagactatgttgatattgaattgaaggttgcagacaaatttatgagctttattgctggccataagccagagaaatgtaaacttattgtttcttcacataattatgaatatactccatcatgtgaggaaattacaaatcttgtcgctagtatacaagcagttggagctgatatagtgaaagttgcaacaaccgccaaggacattgtcgatgtatcacggatgttccaagtgatggtacactgccaagtgcctatgattggactcgtaatgagtgaaaaaggtttaatgtcaagagtgttagcgcccaagtttggtggatatcttacatttgggatactgaatgctacaaagacatcagcttctggacaaccaacagttgaggacttactggacatttacaacataaagtgtattgggcctgatacaaagattcttggtcttatagccaacccagtaaaacagagcaagagcccaattttacacaataaatgtcttcagtccattggatataatgctgtttatcttccacttcttggagataatcttgctagttttctggagacatactcatctcctgacttttcaggatttagttgctcacttcctttcaaagtagatgctgtacagtgttgtgatgaacatgatccagttgctaagtcaataggagccataaacactataattagaagaccagatggcaaattagtggggtacaatacggactacattggagctatatctgctattgaggatggcattggaggtccagggtcaaaggatgctgtcatctcaccattggctggtaggcttattgttgttgtaggagctgggggtgctggtaaggcaattgcttatggggcaaaggagaagggtgcgagggtagttatagcaaatcgcacctatgagaaggctgtacgtcttgccaatgcaattggtggtcaggccctgagattagaagacctggaaactttcagacctgaagaagggatgatccttgctaatgcaacatcattggggatgtacccaaatgttgatggtactcctattccaaagaaagccttgggtttctatgatgtggtatttgatgccgtatatgccccaaaagttactcggcttcttcgagaagcagaagaatgtggagttaaagttgttagtggtgtggaaatgtttattagacaagccatgggtcaatttgagcatttcaccggtggtatagaagctcctgaaagcctgatgcgtgagatagcagcaaaatacacctagcaggctaatggcgaaaacctatctttgatgaatatttgcccaaagattttctcgggctgagtgaataaatgttttgcagttatcatgtttgctgttatgttagatttagccgacttgtcacctgcacactgtaagattatgttgccatgctatagtgttcttgtacctgcaatagaagagttgcaagaataaagagtcagcttagaaccaacgttatgatgaccaagggggaaaatatgcatcaaacaatgattcagttggcagttggttcagtgctgatcatggcggttatactgtcctgcataatttcattgtacggttccgatggcatatttctttttttggaaaaaggaaaatttattgataactcagaataatatcaagattatactgttacaaataaagaggctcaattggatgat

SEQ ID NO: 162514 - DNA, 144 bp, Zea mays
  Clone ID: MRT4577_79790C.1
cagatcagcacggcagcgtagaggcggcagaacaagagatggatgtctgggtgccgcttgagtgccgccttgagcatgccctgcccctggcggggctgaggctgacgctcccgctgcacatatggcccgcgctgccctccgggt

SEQ ID NO: 162515 - DNA, 416 bp, Zea mays
  Clone ID: MRT4577_79791C.1
cggccgctcgagccggcgggcggcttccattcccactgctcggattgctttccccacctccaccgccaccagaccagatagcaagcaaccgacccctcctcgctggtacgcgcgtctctcctctcttccccaatcaacccggccttattaggttgattggttaagcaactggatgcggcgcccgattgttttgatttatttaaccttgcatatcgcagcgcccccatggatcaataatttccctgatggctgtattgtactgtactaccgcttcagtattcgcagggaaggagaagatggagcctggccagagcgggactgagcaggcctctccacgcgggaacgattgcgaggacccgcacgcccactttgtctgtatacgccgccgctcccgctccccttttcccccgcgcccc

SEQ ID NO: 162516 - DNA, 195 bp, Zea mays
  Clone ID: MRT4577_79792C.1
ctgcttttattttccgggcaacaatggccacggtagcggttttcaccatggttgtggggggcatagcggcagtggcagcaacatttcctttgtcggcagtgggcctgtgtgcagcagcagcgtcggaaggtactgttttatcgatgatggtggcatctgcggctgtgggatctgacccataagatgtggcaactt

SEQ ID NO: 162517 - DNA, 272 bp, Zea mays
  Clone ID: MRT4577_79793C.1
aaagcaaacgtgccatctctgttaatttaattaacaacccgcggcgcgaggagaggcgcgtatcgtgtgctcttctctttcctttcttacttgactgattcgctcggctcgtttcgctcgtggtgaggcgggtgatatcacttcactgacgggctgtagttctgttactccacagaattatgtcacaacgcagaacatatcatgtgaacgaaaggccaacaaaaggccaccaaccataaaaaggccgctttgctgtcgttttatcataggct

SEQ ID NO: 162518 - DNA, 226 bp, Zea mays
  Clone ID: MRT4577_79794C.1
gagctcacatgacggcggccgcccttggcttttctgggggagcccttatcaggaagagggcggactatcccgtcagctattgcacaacacgaggcgctgcggcctctccctctaactgcagctcctgctcctcaccacaggtacccgacgggttctcgaacctggcccagcctgcgcgagacacgcacttcactaggcagagcctccccatcctgcatctcaccag

SEQ ID NO: 162519 - DNA, 1005 bp, Zea mays
  Clone ID: MRT4577_79795C.1
gagcatatgtaggagatgtttggctctcctctgaccaatactttagcacttccgaaatcgcaatatagaaaagaaagtgaatcatatctcacaagaacattctgcggtttgatatcacggtggcagatgccaatgcagttatgtatataagcaagcgctcggcatatctgatacgtgtacagtttgacataaatgaggggcatccgctgattcattcgattgtactgccttgcaatcctgtttactgtctctggaacaaactcaagaacaaggttgagataaagctcatccctttcagttgttgaaaagaagtaatgcttaagaccgatgatgttaggatggtcaagcatatgcatgatttgcagctctctgttcttataacgcttatcttgaagaaccttttttatggcaacaatttcccctgtttctcggcattttgcctgatacacaaccccaaaagaaccagttccaaccacatgttcagcgatgtatgtgacagactgtttaggcaggccgttgcgcccgtgaacagtagtcgctattacatgaccagcttcattactagaactatcagtcacatctgaacttgaccacatctccctttcatcatctgtgtcgggcttggcatccctcagtcgcattcccagcatctccctacccaggaactccaccgagttggctgcccccttgaatccattagctggcctcgaggagctcccaacaccagcatgcctttgtccagaatacgccatacctcagaccgaaacctcgcagagaagagatcgacgaggagctcttgcagcagatcgaaccgcaggctcttcacggcctgacggttccagcagcagctccggcctcgtgctggggtttatcccgttgtgtggtggtaggggagggagggaggagtcaggactctggagcaaagctggtggtgcgagcgagcgagtgaggctgaggctgaggccatgagagggaggggctggagcgagtgcctcgtgccgaatt

SEQ ID NO: 162520 - DNA, 182 bp, Zea mays
  Clone ID: MRT4577_79796C.1
gggcttttggtagctacttgggccagaagagagagcgccccgggatagatattgggcataagaagggccgaatcaaaccccggagggcccataccaaagtgggccgggaacaacaaattcttcggacccggttcttcgaacgcaccccccttgaaggccggaagatccgccacttccaaccc

SEQ ID NO: 162521 - DNA, 1729 bp, Zea mays
  Clone ID: MRT4577_79797C.1
gccctcactcgctccagtctctccctctcatggcctcagcctcagcctcactcgctcgctcgcaccaccagctttgctccagagtcctgactcctcctagccttctcctccctctctcccctaccaccacacaacgggataaaccccagcacgaggccggagctgctgctggaaccgtcaggccgtgaagagcctgcggttcgatctgctgcaagagctcctcgtcgatctcttcttctctgtgaggtttcggtctgagttaccacattgctggagtggaggtatggcgtattctggacaaaggcatgctggtgttgggagctcctcgaggccagcgaatggattcaagggggcagccaactcggtggagttcctgggtagggagatgctgggaatgcgactgagggatgccaagcccgacacagatgatgaaagggagatgtggtcaagttcagatgtgactgatagttctagtaatgaagctggtcatgtaatagcgactactgttcacgggcgcaacggcctgcctaaacagtctgtcacatacatcgctgaacatgtggttggaactggttcttttggggttgtgtatcaggcaaaatgccgagaaacaggggaaattgttgccataaaaaaggttcttcaagataagcgttataagaacagagagctgcaaatcatgcatatgcttgaccatcctaacatcatcggtcttaagcattacttcttttcaacaactgaaagggatgagctttatctcaaccttgttcttgagtttgttccagagacagtaaacaggattgcaaggcagtacaatcgaatgaatcagcggatgcccctcatttatgtcaaactgtacacgtatcaggtctgccttgactagatatgccgagcgcttgcttatatacataactgcattggcatctgccaccgtgatatcaaaccgcagaatgttcttgtgagatatgattttttttcttttctataatgatttttgttgctttacatgtatcattcgcatttgttggatgttttgttgctgggatggtatgataacgccatagaatagcaattggtttttacaagtgggactgaatttttagatcatgtgtagcccgatgtcataattattggtagtttcacccaacatctacggcactagcagtttgaaattggaaatgtcaatccacgtgtgcattatttagtttcatatataggtgctatcccatgtgcatcattttattcctaggctgcacatatcatattttataccctgtgtatgctgtttttcttgtcaatggtatcttactatcttctcttgtggaacatttcgtcatcatctgttcttttataacaaggctggacaaaaaaccatgctcccagttccacagatgtcaattggttctgtacatcccactagtgcgtaaatgctaaactaattcaaaatttatttgagcaaactgtgagcctcggaaaggagcatggaagatcaatgcaactagctagcttgttaacccaccatgactccataaccgcatagattagagattgtttgaagaagcaggagaaactgaaactcaattgtagagtatgtacgaaacgaggtttccataattgccttctttttgtctcctttgaatgctgaggtagctactggttagctacttgacctttttttacctcgggatagcagattcatatttatgatgagtgaatgcttttgctaata

SEQ ID NO: 162522 - DNA, 440 bp, Zea mays
  Clone ID: MRT4577_79798C.1
ccaaaaaacctcgtgtttggggcgggggatccaaaataagaggggcccccaaaaggttgccagtttaagttttgccgggcccaaaaaaacgggggggtttgttttacagggactagcacggggccaacaaccctttgttaactaaaaccctttgaatcctggccaacaaaaatggaaagaggggctttttcccaaattccagtcttttgtaaaaggaacctgctccaaataaactttcgggcaaataacagttttttgtcctttaaaaataaagcttttttgggcctgtaccttttgtttggaaagctcacaacaatctgctttggggtcaaattaggccatttggcccccccccgtaaggatctgcccccttataaacgatcttcgccatgggtatgattggggccctttctttgtttggaaaggggcttttcctggcc

SEQ ID NO: 162523 - DNA, 435 bp, Zea mays
  unsure (1)..(435): unsure at all n locations
  Clone ID: MRT4577_79799C.1
aatacgacgtactataaggaaagctggcacgctcacgcaagcaccgatcctgaatagcgggcgcgatccacgcgttcgatatagctcttttttgtaccaacattggcagccaaactattttatctccggaagctccttgacctttcagaaaatgctgttaaggcgaccattttcccgaaatagctcgaagctaggatagctccaccttatgcccccttacctgacaccagcggtgtctgcggaatgagaaaacccaatttttcaaccctacaggatccaacaggaagtcgcagctgtcatctcacctttatcagcctagtgcctacaacagtcatcaggcctataacgacaggtgccttaggcgcattgattggcacaaaacatcaggncacagcaactacaacaactgagcgcgagaaaaccgtgctgcctact

SEQ ID NO: 162524 - DNA, 533 bp, Zea mays
  Clone ID: MRT4577_7979C.1
gccggccgggtccggaacgacaattacctttccctatctccctgaactgtctcctctcctctccatgcctgatgacgcccgcgacgtaaactcacccgcacagcaccgacattggcgacgcacaatgtaactatgatgatcactgctctgccgcagcgacaatgtgatccggttcttatgttctaggcatctggatccagaggagctgcaccaacgatcaagctctgtctggtgccacgagagtaccaactctgagcatctgtgtgccgaaggctgcctctgcagcaatcgatgctccagctgagaaaaatgcgtccacgtatccactccacaagttccacacacttcgaagatgtcgaggattaccttaccgacctctcccagtcaactgcctgtagagactctatctatgatgcatacgcacctattctgtgcactttcatcatatgattgatctgactccgtccgtcatatcaatactgacactattattgcgctaataaactaaaaagaatgcccctattgccgctttg

SEQ ID NO: 162525 - DNA, 660 bp, Zea mays
  unsure (1)..(660): unsure at all n locations
  Clone ID: MRT4577_797C.1
catactgttaaaatgaataaagacctgtagtactagtcatgcacatagatgttgtatttgtgtattagtgaaaggagccttttttatatatttatataggctgcggcaacataatggtgagttaaaaggtggtgcaaaagcttcctctgccggcaggccttggaatctcgcatgccttgttgaaggatttgccaacagaagtgaaggttagtagtaactatctgttttctggcttacagcttcacactttggatggttcttcaattaatagactaggtatgtgtccgtgtgttgtcacgaggtgggagaccgtggggagcgacgcctaggctacaaatatatttttgtttatttctaaacaccaagatacgtgtggtccggtggttagtcccaaatttctagaacagagaggtgtgggttcgagtgctcgtttttgcactgtttttgtcactctttaggttgtgcgtacaactttcttagctatttagcctgngattgctaaatttacttgtaattggatgctgggactattctttatgttcgttcgggttttcagttaattgtgctatgtttaccttaccaagttaccatactaaccccgcagcaacttgactgcctgtcatgtgtcctggcgtataccaactagttcatctatctttt

SEQ ID NO: 162526 - DNA, 743 bp, Zea mays
  Clone ID: MRT4577_79800C.1
cctcgagtttttttttttttttttttttttttttttttttttttttttttttttttttttttttttttttttttttttttttttaacaaaaaaaaacgacaaacgggtaaaagggggaaacataacaaaaaaacccgatttattgccgggccagggggacaaccgaaaacgggccaaaaacctcgaacaaaagggaaaattaagctatcacggggggcttagctggggaaaaaaaaaaggggaagcaggggaggggacccttaaccgaccccctccattttggtttcaccaggggggccctaaaggggggggatttaagcctttgcctaaaaagggtggcccttatggaggctaaaaccgagtttgagcatgggggggacccggttgccaaaggggggggggccatccaggctgaacccggggggcaggaaagcattctcgaacaggagcatcacgagacccttggggggcttggcatttttggcagcctcggcccgcttggggggctcaaccaggaaaggggtctcgggggggacccccattggttttttgcccgacatggacccccccatgctcgagcccctaagggccggggccttaaggaacccctccaggggggggggccagccatactcgccagacacaagggagcccggggaggccccaacgggatcaaacccccccccctttttaattttggcacccaaaacctcctgggggaccttgaacagcccctaaaactt

SEQ ID NO: 162527 - DNA, 1036 bp, Zea mays
  Clone ID: MRT4577_79801C.1
cattgggacccctcgagccggggaggccggaaaggcaattattgcctctctttcttgctcgccacagcttcgtcaaagacacgcggaaaagaagaggaagggggaggcgactcgaccgaggcccggtttcgatctctggtcctccgattgcgtccagatctaccagcaatggcatcatcttcggacccatggatgaaggaatacaatgaagcatccagacttgctgatgacatcagttccatgattgccgacagagggtctcttccacaatcaggcccagaaattatgcggcatacttcagccattcggagaaaaataactattcttggtactagactggatagcttggagtcattgcttggcagaattcctccaaagtcaatcactgacaaggagatgcataaacgccaagacatgctttccagtttgaagtctaaagccaagcagatggcgacaagtttcaacatgtcaaacttcgctaacagggaggatctgcttggtcaaagtaaaaagccagatgacatgagcagagttgctgggttagataaccaaggaattgttggccttcagaggcaaattatgaaaggatgaccttgaagatcatgttgatgttacaaattcacgtcttcagcgtgtgcaaaagaggcttgcaattctgaacaagcgcaccaaaggtggctgctcatgcacgtgcctgctcctatctgtcgttgccattgtgattcttgcagtcatcgtttggcttctcgtcaagtatctgtaaagaaaagaaagaagcagccggctaccctgcggacctctctcgaaatgctcacctgcagccttcgcttgaaaggttccttctgtgttactccataaaatgtgcagccctttaaaattaatatgtatacacggtggtttcatcttcccttcatgagtggaatggttatggctatgtacattacatagaatttggtacgtacatgatcatcatctgcatgactgcattttgtatatggcgtttgtcagtttgcatgacagggtgttgaattatccc

SEQ ID NO: 162528 - DNA, 1244 bp, Zea mays
  Clone ID: MRT4577_79802C.1
atgtgggtacccctccgaggtctcggccgaaaaaaaaaaaaaaaaaaaaaaaaaaaaaaaaaaaaaaaatggggacctcgagacgcggccggccgggaaaaaaattactcgcctctctttcttgctcgccaccgccagtggccagaggcccagagcttcgtcaaagacacgccgaaaagagggggaggcgactcggccgaggtccggttccgaactccggtcctccgatttgcgcgtccggatctaccagccatggcatcatcttcggacccgtggatgaaggagtacaatgaagcatccagacttgctgatgacatcagttccatgattgctgatagagggtcccttccacaatcaggcccagaaattatgcggcatacttcagccatccggagaaaaataactattcttgggactagactggatagcttggagtcgttgcttggcagaattcctccaaagtcaatcactgacaaggagatgcataagcgccaagacatgttttccagtttgaagtctaaagcaaagcagatggcgacaagtttcaacatgtcaaactttgctaacagggaggatctgcttggtcagagtaaaaaggcagatgacatgagcagagttgctgggttagataaccaagggattgttgtccttcagaggcaaattatgaaagagcaagatgagggtcttgagaaactggaagagacagtgctgagcacaaagcatattgcattagcagtcaatgaagaacttaccctgcacacaagattgatagatgaccttgaagatcatgttgatgttacaaattcacgtcttcagcgcgtgcaaaagaggcttgcaattctgagcaagcgcaccaaaggtggctgctcatgtatgtgcctgcttctatctgttgtcgccatcgtgattcttgcagtcatagtttggcttctcgtcaagtatctgtaaaggaaagaaagaagcagccggcctaccctgcagacctcactcgaaatgacccttatgtgtgtgcagccttcgcttaaaaagtcccttctgtgttactaccattgaaatgtgcatccctttgaaaataatatatatacggtggtttcatcttccctttcgtgagtggaatggttatggagtaatgtacattacatcgaatttgacacatacatgatcatcatctacatcttgtgtatggtgtttgtcagtttgcagtgacaagtgtggatttattctgtgccgtaagcacttcatcc

SEQ ID NO: 162529 - DNA, 209 bp, Zea mays
  Clone ID: MRT4577_79803C.1
cgcacccaacccaatgaaccacttccatggactcgagcggtacgacgcgggggttcgtggtgggtgccatgatgaccgccgctctttggtttcttctcaagatcaaacaggcatgctgaaaacatgaagatgaccgcgtatacacggatgacgccatggaacacaaggctgcccatcataaagaagacgctgcatatgattacgaccaa

SEQ ID NO: 162530 - DNA, 1151 bp, Zea mays
  Clone ID: MRT4577_79804C.1
catcgaggccgctggccgggggccgggggtctaattacttgcctctcgctcgccaacaccagtgcgagaggtccagagcttcgtcaaagacacgccgaaaagggggaggcgactcggccgaggtccggttccgaactccggtcctccgatttgcgcgtccggatctaccagccatggcatcatcttcggacccgtggatgaaggagtacaatgaagcatccagacttgctgatgacatcagttccatgattgctgatagagggtcccttccacaatcaggcccagaaattatgcggcatacttcagccatccggagaaaaataactattcttgggactagactggatagcttggagtcgttgcttggcagaattcctccaaagtcaatcactgacaaggagatgcataagcgccaagacatgttttccagtttgaagtctaaagcaaagcagatggcgacaagtttcaacatgtcaaactttgctaacagggaggatctgcttggtcagagtaaaaaggcagatgacatgagcagagttgctgggttagataaccaagggattgttgtccttcagaggcaaattatgaaagagcaagatgagggtctcgagaaactggaagagacagtgctgagcacgaagcatattgcattagcagtcaatgaagaacttaccctgcacacaagattgatagatgaccttgaagatcatgttgatgttacaaattcacgtcttcagcgtgtgcaaaagaggcttgcaattctgaacaagcgcaccaaaggtggttgctcatgcacgtgcctgctcctatctgtcgttgccattgtgattcttgcagtcattgtttggcttctcgtcaagtatctataaagaaaagaaagaagcagccggctaccctgcggacctctctcgaaatgctcacctgcagccttcgcttgaaaagttccttctgtgttactccataaaatgtgcagccctttaaaattaatatgtatacacggtggtttcatcttcccttccatgagtggaatggttatggctatgtacattacatagaatttggtacgtacatgatcatcatctgcatgactgcattttgtgtatggcgtttgtcagttcgcaaaaaaaaaaaaaaaaaaggcccctagggcc

SEQ ID NO: 162531 - DNA, 1308 bp, Zea mays
  Clone ID: MRT4577_79805C.1
agctttcatcggccccctccatccgccggatccgcccgccactccccgacatcccggctacccgccgcccaacgccgccgccccgagatcccaccaccttgacgtcgcccccgcccccacctgcgaggccgccaccgccatcctagcgtcgtcccagctaacgacgtggtgggctccgccgttcctttacccgcgtcgggtacagcttcgtcaaagacacgcggaaaagaagaggaagggggaggcgactcgaccgaggcccggtttcaatctccggtcctccgattgcgtccagatctaccagcaatggcatcatcttcggacccatggatgaaggaatacaatgaagcatccagacttgctgatgacatcagttccatgattgccgacagagggtctcttccacagtcaggcccagaaattatgcggcatacttcagccattcggagaaaaataactattcttgggactagactggatagcttggagtcattgcttggcagaattcctccaaagtcaatcactgacaaggagatgcataaacgccaagacatgctttccagtttgaagtctaaagccaagcagatggcgacaagtttcaacatgtcaaacttcactaacagggaggatctgcttggtcaaagtaaaaagccagatgacatgagcagagttgctgggttagataaccaaggaattgttggccttcagaggcaaattatgaaagagcaagatgagggtctcgagaagctggaagagacagtgctgagcacgaagcatattgcattagcagtcaatgaagaacttaccctgcacacaagattgatagatgaccttgaagatcatgttgatgttacaaattcacgtcttcagcgtgtgcaaaagaggcttgcaattctgaacaagcgcaccaaaggtggctgctcatgcacgtgcctgctcctatctgtcgttgccattgtgattcttgcagtcatcgtttggcttctcgtcaagtatctgtaaagaaaagaaagaagcagccggctaccctgcggacctctctcgaaatgctcacctgcagccttcgcttgaaaagttccttctgtgttactccataaaatgtgcagccctttaaaattaatatgtatacacggtggtttcatcttcccttccatgagtggaatggttatggctatgtacattacatagaatttggtacgtacatgatcatcatctgcatgactgcattttgtgtatggcgtttgtcagtttgcaatgacagggtgttgatttattctgtaccgtaaaaaaaaaaaaaaaaaagcggcc

SEQ ID NO: 162532 - DNA, 132 bp, Zea mays
  Clone ID: MRT4577_79806C.1
ctgaactacctccggcccaacatcaggcgcggcaacatctcctacgacgaggaggatctcatgatcatccgcctccacaggctcctcggcaacaggtggtcgctgattgcaggcaggctgcctggccgaaca

SEQ ID NO: 162533 - DNA, 717 bp, Zea mays
  Clone ID: MRT4577_79807C.1
cctgccgggaacctcaaagtcaaagccgtgccatcatagcagctgcgaaatacaatttgatcgctgcacagctgccaaaactcaactcaagtagcagttcagtgctgagcgccccttgaggctgaacgcgcattactactaccccgcacaaggatgtcgctccgcaccactccagagacccgctttgatagcttaaacgtctacaccacttcgtacaagaagatcggcgaccatgaaatcgaagtcaatatccttgttcccaaaggaatctcgcctgggaagtatccgttgatggtcaaatggcacggtggaggtctaacaacaggaacagcactgtacccccaatggttctctgcttatatgatcccgctcattatacgcaacaaagcgatcgccgtcgttccaaactaccggctgacgccagatcacactggtgatgagatcctcgaagacattgcttccctgggagactggcttaccgcttcgctgcccacgtaccttgcatccaaggactcttccatcgagcccgacttttcccggatcctagtaacaggcgattctgccggtggctggatggcgctccaatcagtcctttctctaccagaaaagacattccgtgcttgtttcatccagtatcccgtggtgaatgccattccgtactcgccgaatgatactatcttaggtggcccttttccaccaaaaaagaacctggacgac

SEQ ID NO: 162534 - DNA, 589 bp, Zea mays
  Clone ID: MRT4577_79808C.1
cgcattctaataacgagctcatatatagcatgctcagttgctcacacatactctcatgctactggaagcttgatctatgcagaaagaagcagggcaaaaatgaaaagaagtcgaaaacacaacccgccacgactcgcacggtcgcatggccaaatctaagcagagacctcacctgcactccacgcctgcctcggcagctcggcgcggggtgctcttccggcggctcccgtgatgccggaagccgctccgcttcgcggcctcgtcgtccttctcctcctcggtcgccgggtcgcagccgcgcttgggctgctgttgccgccgccgccgcctcttcttcttccctccgctctccggcgagaccacggccggcttcgcgtcctccatgggctcggccttggcagcgtcgtcctcctcgtcgtcggtgtcgtcagccgtgtggtgcttctgcggccgccccctcctcttgtaggctggcgtcacggtcacggcctcctcctcgccgccgctgccggcgtcagcatcctcgctgtggttagcttgcgacgtcggccgtttagccttccctccccttggcctgcccatccttccc

SEQ ID NO: 162535 - DNA, 294 bp, Zea mays
  Clone ID: MRT4577_79809C.1
cccacgcgtccgcccacgcgtgcgatgaggcggacatacgcagcaagccaagcatatacggatttaaatccgcacaccctatggtatctcggcgcggctgctatggcaagcggcagtcctgacgaaggggaatgcgcgcctaccgccggaagtgaaccgggtgctctacgtgcggaacctgtcgctcaacatttcgtgcgacgagatgtactacattttcggcaagcacagtgcgatccagtggatccgtctgggcaacgccaaggacacgcacaggaccgcttacgttgtcta

SEQ ID NO: 162536 - DNA, 1146 bp, Zea mays
  unsure (1)..(1146): unsure at all n locations
  Clone ID: MRT4577_7980C.1
tcttgccaatgcaattggtggtcaggccctnganatagaagacctggaaactttcagacctgaagaagggatgatccttgctaatgcaacatcattggggatgtacccaaatgttgatggtactcctattccaaaggtgtccacacacctttccttctctttcacacatacataattggagactgtttttttaatctaaaaatggttgatctttgagatctgatgtttttcttgtccgtgtttgtcttacaagaataaatagtaatagccttccattataaatagtaatatcctctgaatgcataaatcatgaatggtaactgcaaacataaaattcttcttgctaatcttatcaagaactcaagatcatttaaatttagttggaggaattttttagagagaacccgtgaggaaaacattgcaaatacatctaatgaagcaggtgcagtaacctagtaacaaatctgaataacagattgttttatctaaaggtctgagtttgtgtaacatgcaatctatgcttatactgttttcacataagttaggaccttgtttattcttcctcccttactccaaaattgacacaaacattactacattagtacaacttgatgccgaagtgtgtttgatcatacagaaagccttgggtttctatgatgtggtatttgatgccgtatatgccccaaaagttactcggcttcttcgagaagcagaagaatgtggagttaaagttgttagtggtgtggaaatgtttattagacaagccatgggtcaatttgagcatttcaccggtggtatagaagctcctgaaagcctgatgcgtgagatagcagcaaaatacacctagcaggctaatggcgaaaacctatctttgatgaatatttgcccaaagattttctcgggctgagtgaataaatgttttgcagttatcatgtttgctgttatgttagatttagccgacttgtcacctgcacactgtaagattatgttgccatgctatagtgttcttgtacctgcaatagaagagttgcaagaataaagagtcagcttagaaccaacgttatgatgaccaagggggaaaatatgcatcaaacaatgattcagttggcagttggttcagtgctgatcatggcggttatactgtcc

SEQ ID NO: 162537 - DNA, 258 bp, Zea mays
  unsure (1)..(258): unsure at all n locations
  Clone ID: MRT4577_79810C.1
tcgcggacgcgtgggctcaccgaaccctaaaccctgaccaccggccttccccggaggtccgtcggttcgtgtgggactctaggcgtcgtctgagcccncttcagggctatccgccgatgaagtctgaaaccctttacccctttccctccctttcccgggggagggggaaactatccgaggatgccaatcacgtcagagtggggcacgatgaggatcatgatcaagggaggcctgtggaagaacacggatgacgagatc

SEQ ID NO: 162538 - DNA, 369 bp, Zea mays
  Clone ID: MRT4577_79811C.1
acaagcttttttttttttttttttttttttttttttttatttttttttttttttttttttttttttttttttttttttttttttttttttttttttttttttttttttttttttttttttttttttttttttttttttttggggggggtggttttttttttttttttttttttttttttcttttttcttttcttttttttttttttttggattattgagttttgccatctataatttttagtatatctgacaagagaactgattgaatatgtttcatacagcagtatagggttatttcaaaatttggtgtgggtgaaactactcactcgttgatatgtaattctgcttgctgtaggaacgttttttcct

SEQ ID NO: 162539 - DNA, 1247 bp, Zea mays
  Clone ID: MRT4577_79812C.1
cggccgggacctcccgcgttcctccaccacgcggctcccccaccccactcatcacactctcccaccgcacctcgccgccgcggggcaccgcgccataaagtgcgttcccggctgcacggacgtcgaggagcagctcgcaagtgtttcttggtgcgtcgatcggcaagatgatcaccggcacggacttctaccacgtcatgacggccatggtgccgttgtacgttgccatgatcctggcgtacggatccgtcaggtggtggcgcatcttcacgccggaccagtgctcggggatcaaccgcttcgtggcgctcttcgccgtgccgctgctgtccttccacttcatctccaccaacaacccctacaccatgaacatccggttcatcgccgccgacacgctgcagaagctgatcgtcctggcgctgctcactgcatggagctacctctcccgccggggctgcctcgagtggaccatcacgctcttctccctgtcgacgctgcccaacacgctggtgatgggcatcccgctgctcaagggcatgtacggcgacttctccggcagcctcatggtgcagatcgtggtgctccagtgcatcatctggtacacgctgatgctgttcatgttcgagtaccgcggcgccaggatcctcatcaccgagcagttccccgacacggcgggcgccatcgcctccatcgtggtggaccccgacgtggtgtcgctggacgggcgcaacgacgccatcgagacggaggccgaggtgaaggaggacggcaagatacacgtcaccgtgcggcgctccaacgcgtcgcgctcggacatctactcccggcggtccatggggttctccagcaccacgccgcggcccagcaacctgaccaacgccgagatctactcgctgcagtcgtcgaggaaccccacgccgcggggctccagcttcaaccacaccgacttctactccatggtcggccgcagctccaacttcgccgccggggacgcgttcggcctgcgcacgggcgccacgcccaggccgtccaactacgaggaggacccgcagggcaaggcgaacaagtacggccagtacccggcgcccaacccggccatggcggcgcagcccgccaagggcctcaagaaggcggccaatgggcaggccaagggcgaggacggcaaggacctacacatgttcgtgtggagctccagcgcgtcgcccgtgtccgacgtgttcggcaatggcgccgccgagtacaacgac

SEQ ID NO: 162540 - DNA, 337 bp, Zea mays
  Clone ID: MRT4577_79813C.1
gagatcacacctagcttctccgggggcgaagacgcactccaatggtaaagcgtgcgtgtgcaccctgctagtgtgcagtagttgtgctctatgttcatgatgcagctcacatcgcgctgggctggagtgtatttataagcagcctgacaggactgcttttatttctctactgcaggccacagaatacatcaactggtgaaagagatactgtgcatcctgagaagaactgctcgaggctcaccaaccgagacgctcaacatagaccaagtaactagcttgctggaggagcggataacgaggccgtgctacgccatgtagaagaacggcgaactggact

SEQ ID NO: 162541 - DNA, 667 bp, Zea mays
  Clone ID: MRT4577_79814C.1
attgggtacctcgaggccggccggggaacattgtttcggcgtccgtccctcacctcttgtactattgcttgctagtcgactccatccgagcatatgacatcctcctctacctcctcatcttctccttcggctgagtacgaccgaagaaaagcaaaaggaccaacaaggacacaacgtctcttgcatctgatcttataagatctcgactcaattcccgcgcttcaatccacatagcgactcaatactcgcggataatccaccgccaacaccataagttaaaagctcagcaacgtgacgcatcatcccatgctggcaacgtgtggatgcgcatatagccgagctccctgacgcgcgagctgccctgcgacatctctgtggtgaactcgcgcgccgaatacgtctcctcggagacgtactacatgacctacaagacagggacctggacgacgacttgcctctcgtacacgacctacatgtccgggacgacctcctccgcgctggtcatcacgacagccagatctaccaagacatgcgaggagatgacgcgctacctcgctcagcaactggcgacagctcacattcacttagcctgggatgccttgccgaacaacacactacactttgctgaacaactggtgcaacaccgcgatcttgcgcattcacagct

SEQ ID NO: 162542 - DNA, 270 bp, Zea mays
  Clone ID: MRT4577_79815C.1
ccggccgggagggattcactcgctgcgtgtcgactgatgatttttgtgcagggtggaactcctacttggcttgctgatgatactacgactttcaactgcgattgcctcgttcgacgactaccgaaataccactacaacatagatgttatggagacgagagcatattgcaagcagaatatcgatggaagctgcgattcaacctccggcgactcacgggggtgggcaacataagattgcagaagcgcgctcgtggttcgcctgtgctatgat

SEQ ID NO: 162543 - DNA, 816 bp, Zea mays
  unsure (1)..(816): unsure at all n locations
  Clone ID: MRT4577_79816C.1
cattgggaccctcgaggccggccgggctgcaccctcctctgcacagactgcactgcactatgccactcggagctgcattggcactgccactgctgcaccgctctgcctacgcacgccacgccttgaccggttccagttccgtacatggacgcgcccacggcgtcgtcgccgtcctcgtccttccccggcacgagcttcgtggtcctctccgtctccatcgtcggcatcctcgccacctcgctcctgctcctggcatactacctcgtcctcacccgctgcggcctcctcttcttctggcgcccgggcatgcacgacgacgacgacgacgtcgccgccgggccgggccaccgccgccacgtcgtcgtcaccgtgcacgacgagccaccacgccggagcggcatggaggaggcggccatccgccggatccccacgttccggtaccgccacggcagtacgcgcctcgtgctggcggcggaggccaagcaggccgcgtgcgccgtgtgcctcgccgacttccgcgacggcgagaggctccgcgtgctgccgccctgcctccacgccttccacatcgactgcatcgacgcctggctccagtccgccgccagctgcccgctctgcagggccgccgtctccgaccccgccgcccttgcccttcgctgccacanccacctcgacgtcccgcttccgcgcgccgccacggacgacgtcgccgttgatgttgttagtagtagtcctactcctacctccgcagacgccgccggggaaacagaggctgtgccttctcatgagaccgcgcaccggaacagtagctgccgc

SEQ ID NO: 162544 - DNA, 751 bp, Zea mays
  Clone ID: MRT4577_79817C.1
gggtacctcgaggccggccgggtatcctcacacacttttgtttgcacatacaaatcctatccccatcaaaatgtccaacccccgtgttttcttcgacgtcagcattggcggccagcccgctggcaggatcgtcatggagctctacgcagacaaggtccccaagactgctgagaacttccgcgccctctgcaccggtgagaagggtaccggcaagtctggaaaacccctccactacgagggctccgtcttccaccgcgtcatcccccagttcatgcttcagggtggtgacttcacccgcggcaacggcaccggtggtgagagcatctacggcgagaagtttgaggacgagaacttcaacctaaggcacactggaccgggtgttctctccatggccaacgctggacctggtaccaacggtagccagttcttcatctgcactgtcaagacttcatggctggacggcaagcacgtcgtcttcggccaggttgtcgagggcatggacgttgtccaggctgttgagaaggttggctctcaaactggcaagaccagcaaggaagtcaagattgagaagtccggtcagctgtaaatgcttggcctagctgccaagtctgactttgggtgatgcgagcggatcgacgatgacgatgattgacgatatcaacaagtcaatgagcggcactggtcagtcgtagtaccaaactgggaaatgatatagactcttgggcgtgatgtttctcccaaaaaagcggcc

SEQ ID NO: 162545 - DNA, 278 bp, Zea mays
  Clone ID: MRT4577_79818C.1
cgagagggacttgaacccaatgatggcccagatgccgatgagctctctgcagacgcctggaatgaacactgcgccccctgagcagataaatcagcccgcactgagacgcacaggcctctactgcaaccagctctcatccactgaccttctcaaaacagaagcagatggaacccagcagctgcaacaggttcaggcgtctgctgacggccagggtacagtgaatctggcaggcggggacccttacctgaaccagcctggtccactgggaactcaaaagc

SEQ ID NO: 162546 - DNA, 556 bp, Zea mays
  Clone ID: MRT4577_79819C.1
ccaaaaaaataggcttgcttaaaaaaaataggcttgcttaaaagggcatgatcatcaaatcttcagggggggcaggatttcaggacttcattccaaaataatcagaggcaaaaacattccatgtttttttttttttcctcaaggccctcaatgggtccacaatttggccagttccttgtccaaaatactggaaattaatgtctccacacctgacttgcagagaattaaaaaaaaaaaacccaattttgtatcaccatgacttcaataccagaggtcgaaggcaataagcccgggtatgcaatcttattggtgttcctaaaatttccaattcatatgaggggatttcagatggacccccccagctcttttgttactccgaaaactccaaaaaacaccttattcatggagttgggagttatttacccgccactgccaccggttataaaaaacattttaaactttggagcaaacctgctccacccaaagttttgaagtaaagctgctctggggtggagcaaacccttgccaaacccccccatagttggcccctttctca

SEQ ID NO: 162547 - DNA, 507 bp, Zea mays
  unsure (1)..(507): unsure at all n locations
  Clone ID: MRT4577_7981C.1
cgcgcgtnccgtacaaggtggccatcccgctgcgaaaggtgaggncggtgcggcccagcgagaacaagcaccggccggagcagaagtacgtgcggctcgccaccaccgacggattcgagttctggttcatggggttcgtcagctacgacaagtcgctgcagcacctggagcgggccgtcgcgtacgcgcagcaggcgcaatgacggcagccgccgccgccgcagtagctgacggcggggtagtgtcttggtttgtgtagctgggctagttggttctggacttgtgtttgtgtatgcgtacttgcgtaggctgcaacatgtccttgtacatctggggggatcggtggcctcgtggactaaccagctggttctcgggttggccagaggcgatcgatcggggcgtctgatctttttgggcgattggggaagacggaaaattcatcacgagtttgaaacagagagtggttgtgtgacagtggcgaaaccgccaccaatatccattcttttc

SEQ ID NO: 162548 - DNA, 531 bp, Zea mays
  Clone ID: MRT4577_79820C.1
cggaaccgggcccactggggggaaaaacccagcgggtagaaaaccccacgttcccacaggaaatcggccctttctggccccgaccccaacgcaaaaaagggtccgggaccccttgcaacaaacccgggggaagaaaaaaaaaacatcccccccgctggggccaggggtccccaaagttcggggttcaaataacaaagcagggcaccagggagcagtcttgaagggaaaagagatggaaaattcaccaaaaaaactaggcgggggcaaacaaggcattcccccccacaggaagaccctcgtccttccggacggggatgcatgtctaaacacacccggggaagcttaaaacctgctcttgaacgggagggccctgatgaccacctgggggaaaatggcaaccagggcggccccaataaaggggccaacccaaaagaaccaagggccgctccacgcatgaccccggttgaaaatgaaggcggccccaaggctcctaaccgggttgaccccggggccggtaatggggatggggga

SEQ ID NO: 162549 - DNA, 223 bp, Zea mays
  Clone ID: MRT4577_79821C.1
gtcagcgagcgagaggggatcgggacggccggggaccattccgagcgaatcggccgcgcctactctgacgacccctacacatgacagccaacacttaccatgccaacactatgatattgttacgaatcctgatgaactccaaggctagtgacttgaacactgatctgcccagaatatggtaacagaatgacactgccaagggggatatctgtgacgctatgga

SEQ ID NO: 162550 - DNA, 482 bp, Zea mays
  Clone ID: MRT4577_79822C.1
cggacgcgtgggtggaggaaagcctgtgcgccgtggagaagcgcgggcgggtgcacgtcatcaccctcaccggcgcgggggagcaccgcctcagcccggccctgctctccgccctccgctccgcggtcgcagccgcccgccgcgcctcccccggtgcgctcgtcctggccggcgagggcaagttcttcagcaacggctacgacctcgcgtgggcgcgcgcggggccggccccggcgccggagcaccgcctctccacgatgcgcgccgcgttccgcggcctcgtcgccgacctgctcgcgctccccgtgccaacggtcgcggccgtcacgggccacgcagcgggcgctggctgcgcgctcgcgctggcgcacgacgccgtcgccatgcgcgcctcccgcgggttcctctacatgagcgaggtcgacgccgggatcaagatcgtcgattttgtcggcgagctggttcggcagaaggtccccgac

SEQ ID NO: 162551 - DNA, 642 bp, Zea mays
  Clone ID: MRT4577_79823C.1
tgttcaccaacttcaatatggattataagcaagaaacacctgaattgtatttcacatctgtgaagcaatggaatttccagcttcaacgcatctcaacaaccattgaatgccggcgtgctgttttccccccatattgcagaaacttgtgatgcagaagccgtgtttgtggaatggatcgaagagaccgtgctatcttttcgccaggaagtttaatcctgaagcactcaataacctactgaagctatttacaagttatacatctgtttgagcctatgagtcctacctgattctttgccttgggctttctaatcccacatttttttctgtttatatgtaaattgggaagcccgtatttattgggatctgggcctaaagatatcggtacaactgcaacagctgtgatggcttggagtacagtcctgggtaaatggccacaacaatgtttatagaatgacactgccctgagtgtaatttgtcgtgttcaatgtatgtctccatagtcttccagccaactcctaactcattagttctctattcttggagaacagtttttttttgtcagaatgttatatgatccattttttgtagacacagagattacaacagatgtaccacaaatgcagtcttaattttgtcactatt

SEQ ID NO: 162552 - DNA, 745 bp, Zea mays
  Clone ID: MRT4577_79824C.1
ccggccgggaaaaaaaaaaaccggccgggatccttcttctcagacactctcccctcaatctcagagccctccctccctccacatcatcacaatggcttctcgcaacctctccaaggccctccgtggccctgcccgccagctggcttcggctccccgtgttcagcagcgaacttttgtatctgctgctcgcgctgctgtccgtgccggtgctgttgcccgacccgttgcttctggtcctatccagcagcagatccgtggtgtcaagaccatggactttgccggccacaaggaggacgtctatgagcgtgccgactggccccaagagaagctccttgagtacttcaagaacgacactctggccctcattggttacggctctcagggtcacggccagggtcttaacctccgtgacaacggcctcaacgttattgttggtgtccgaaagaacggaaagtcctggaaggacgctgagcaggatggctgggttgccggcaagaacctgttcgatgtcgacgaggccatcggccgtggtaccattgtcatgaaccttctctccgatgctgcccagtctgagacctggcccgccatcaagccccagctcgtcaagggcaagaccctttacttctcccacggtttctcccccgtcttcaaggacctcaccaaggtcgaggttcccaccgacatcgacgtcatcctctgtgcccccaagggctctggccgaaccgtccgatccctcttccgggga

SEQ ID NO: 162553 - DNA, 231 bp, Zea mays
  Clone ID: MRT4577_79825C.1
tataggggaagagaagagatgattttttgttgacatgtaaagatgaaccttcagaagttcagatatgctagtacataacataggcttaagagaaagccaatcgccaccggcatctttagtaagtggtggtggtggtgacctttacgtacatccaaagtaagtacatcactctaatactctactagttacacaccatacacagctagttatacgcgtaaccccaatcgtacg

SEQ ID NO: 162554 - DNA, 544 bp, Zea mays
  Clone ID: MRT4577_79826C.1
ccggccgggaacatccacgatgtccgccgtccgattcacccgcgctgccacgcgcgctaccgcccagcttcgcgctcccgcccagcgccgatttgccagcacacagaacgagttcatcaaggagcgccagcacatcaaggagcacgctgctggtaccactgaactctggaagaagtctccctctacggtgtcgccccctgccttatcgccgccggtgccaacgcctactggctctggagcgagcactgggagcactggtctcacatgcctcctctggaggagcgcaccgagtacccttaccagaacatccgtaccaagaactaccagtggggtaacggagacaagactctcttctggaacgacgaggtcaactaccacaacaaggataagacctccgaagtatgatctgttgatagttcatacgtcagacaattgctggaccacctttttatggactgctccctctggagatgcctcgtacatgttccctagactcgaattgaccgattgttgaagcaaaaaaaaaaaaaaaaaacccgcggcc

SEQ ID NO: 162555 - DNA, 373 bp, Zea mays
  Clone ID: MRT4577_79827C.1
aatagaatgatgttgagtaggtcagtagaaaaacaataattatcctctagggatgagcaaacacataacagaaaccattactaaccaagtaaaattacatgagagtacacatcaaacctgttaacattcaaggcattagaacctccatctggaatccagattctggatggtcatgtacatcaatggtcagcattccatcaaatttactagagatgtcatttgtttgtttaacatcattactgtcctttgcacgtccagaaaccttcacagttgtcgtatatccacaatgcttgacaatcaccaccccgagtgttgaagaatcctggatgcatataaagagaggcatgcaatatccatagcacccgtttgacag

SEQ ID NO: 162556 - DNA, 469 bp, Zea mays
  Clone ID: MRT4577_79828C.1
cccgggaaaatgggcccaaattaaaaaggggttaacccccaaaaagggggaaaaaccataaaaagggggggaaaaaaaccgggggggggaaaaaaaatggggcgaaccccctagaaaataaaacggccgggacggaaaaaaaaaggccgggagcaaaaagctctgcttaattctctccccaaccgtaaaagggggacggggggcaaaaaaaaaaggggggggtccctagggggggagaaggggccttttataataataattcccatagggggcttattttgggggggggggaaggaaaaaacccttccatggacccaaaccacaaaaggggggcggggggcaggcaaatgggaggcccaattttgggccgtaaacggagaacaagaccgacccaaaaggcccaaaaaacggaaagaaggggggtatgggaggaatcgtttttaaaaaaaaagggggcggcggcctgggg

SEQ ID NO: 162557 - DNA, 658 bp, Zea mays
  Clone ID: MRT4577_79829C.1
ctggccgggaacttgcgtagagagttgtgcgcagagaatccctaagcaaactaacagggtagagggagaggataggagaggagaggagaggttggatctggaacacccatggcttcgatgaagctgtacggagcagtgatgacgtggaacgctgacgaggtgctctacgccgctctcggaggcaggctgacactacaacagcgggccgatgagctactctgccgtggaggagaacatcacgccgctgctcacgcagatcatgattcgtgccacgcgcactcataacgagctcgacgagaacggtcttaggatcacgagagctcacctccgtcgctcataagaggatcaacgttccatgataatggcggagagctctatgccgagagcgtcgacgaccgagggctctgtgccatcgggcagtccgagtccctccgttacaaggtactcgatggtcttgcacgtcctaatgattgctacggtggtcttaaccatcgtccagagagtggtgcctgagaaccttaagaggctgaagaaggtgctataggtgtacaaggcacgcctgacctagtgcaagtaccttgctggagactctctcaggctcgccgacctgaaccatgctgtgtgtcactctgtggctgttcgctacgccctacgcatg

SEQ ID NO: 162558 - DNA, 542 bp, Zea mays
  unsure (1)..(542): unsure at all n locations
  Clone ID: MRT4577_7982C.1
ggtaccttatttcagtttatttgtgatatcaaaataataatttactctcataactttccaccataatcgaacttatataatctacttatataatctaggagagcaaaacaaatagggtctaaatatccactagctagcaaaccgagtgtttgaaactaggcttgatacacacgaatgaatattcacatggttagaacgattcttctggatctcgcctgccccatggcgccctgccacggaacgcacagatgctcctggtcagtgcttggcagctccacgcttgcgcggcctgggtcgagccgaagacgcacctggacccttgcgaggtttcctagaccgagccttctttgcctcgtaacctatagctttcaggtcctcgcatatctcctgcctccctagaaggagcccaggaactatctccctctggaaatttctcatgcccctccctctctttagcttgatccgacatgctggcccttccttgaaaggtggggtcacggtgacggattgcccgtcatctttggcctnctctgaatccaaca

SEQ ID NO: 162559 - DNA, 489 bp, Zea mays
  unsure (1)..(489): unsure at all n locations
  Clone ID: MRT4577_79830C.1
cctcgnagccggccgggttcatatatctggttagaggagctgctatatattgtgatccctgctatgtgctatctatcaaggcattgcgtgattatgtaaccagtctcgctttcatggtatcacagaccgtcgctcctgcgacctacctttctgctgcttccacatacacgctatctcctgctcgtcatggttgacacagatgctgctcgcctcgccagggagctacgagaaaaagcagcagctgacgcagaggccgaacgtgcacggcaagctgaaatcatattccatctttaaccaaatcattctattctaacagtttggttgagttctggtctccatttccatgctgctggaatgtgttgtgaagtattcgctttttgacatgtataaacatcttctctctgctgtcagtggcccgatggaccgatggaccgattctattctaacaaagaacagattgtacccaaaaaaaaaaaaaaaaaagcggcc

SEQ ID NO: 162560 - DNA, 1580 bp, Zea mays
  unsure (1)..(1580): unsure at all n locations
  Clone ID: MRT4577_79831C.1
ctgtaagtagtagaaattttggggcagcaacagcaagcatgctcacatgatgcttgtgaattatggtcagcatggtttctgtgacagagctaatcatgaaaactgggggtcgacctgattgattctcagacgccatcaattataggtttgtgttaagtaaactagtttattaggcgcgaagttcaaatgncttttaacaaggggcataaccccgccccccattaccaagatacgtaagcctaatcctggatcaattaggctttttttgagttcttgtggacctactccattaaaccgaatctggtcggcatggtatacctaataaccacaagaaaatctaaacaaaaacatttagcccagctgtaaaaggagaggcgttgtaatttccaagtttctgatctttgtagtgttgcttcgtggatggatatctgtctactctcatgccgggcggcaccagcagagttacccaccaagcagcagcggtcgccgtgcgtgccacgcctctctctctctctctcttaccgggaagcaagcaaccgcctccgccgcgccgtctcgggctcgcttggtgcagatcgggacccgccgcccggccgacgggacggatcccgccttgcatcaagtgaatcggagccggcgcagcgatacagcgaccgaccgccgccgtccgccacctgcgctgctcttgagtacccccatgccgtggcctgcttgttgcgtgtttttttggttttctgatacggatcgtgcgcgtgtgttgtggttctgtcttgtgtgacgccgtgggaattattagtcgtcgtggtggtaggtggtgggggtctctgctccagattaaacaacccggatctggatctgacgcgtggtttccgtagtttaatcggacgtagtctgggtgactacgttctggtggtttaccatgatccatccctatagccgctagactatgctagtctgctttaatttccatctgcaattttcttctgttcatcaatcatcagtggagtgtctgtggtggtgtcagggaggcaggcggcttggattttgcctgtggggttgtagggcggtcatgttgatgcagccctgtcctgggtcacgggggaaaccatgccaggctggactgaaccgcagagagattaattgatttgactgcctttctgctcaattcaattgtaatcaatgcacatgttgcttaatttcacatttctgctcaattcaattcaattggaaaggctactagtttttcaggccaggcagttttccgagaagtttaagtgttcatggaatcatcacggcttcatttgatcgtaccgactcgatcaaacgacgttgcacgcgttgtgctgtgctttgtaacaaaaagtaaatctgtatgatgctctcgatcttctctagcacacgctcgatggctatgcttctgtctgtgtccaactgtccatgtctgtatatggatgggaaatgtaacaggtgggttgttttgctgtgaacaactttaccttgtctgaaatggtgtctgtactgtattactttcctgatgaacgaatataaccatgtgagaggggtggtgatgttagcagcag

SEQ ID NO: 162561 - DNA, 686 bp, Zea mays
  Clone ID: MRT4577_79832C.1
ttgggtccctcgaggccggccgggccgggctttctcatcagtggagtggagtgtctgtggtggtgtcagggaggcaggcggcttggatttgcctgtggggttgtaggccggtcatgttgatgtagcccctgtcctgggtcacgggggaaaccatgccaggctggactgaactgcagagaggttaattgatttgactgcctttcttgctagggatgtatatagtactactacgagctttgtaaggtagtagaaattatggggcagcaacagcaagcatgctcacatgatgcttgtgaattatggtcagcatggtttctgtgacagatgctaatcatgaaaactggggtcgacctgattgattctcagacgccatcaattataggtttgtgttaagtaaactagttttttttcaacaaggggcataaccccgcaccttattaccaagatacgtaagcctaatcctggatcaattaggctactgatttgggcttcgccttttttttgaattcttgtggacctactccatgtctgtatatggatgggaaatgtacaggttgtttgctgtgaacaactttgccttgtctgaaatggtgtctgtactgtaatactttcctgatgaacgaatataaccatgtgaggtgtggtgatgttggacaaaaaaaaaaaaaaaaaaggcccctagggcc

SEQ ID NO: 162562 - DNA, 1620 bp, Zea mays
  Clone ID: MRT4577_79833C.1
caacagcagaaagcaaaagaggaatctgcagctcagaggctgaacaaaataaaattggatcaggagaatcgtgtgcatacattgtggaaggaagtggaccattgtgtcaaaatggcagaattaattgaatacaatttagaggatgtagatgcagcaattttggctgtgcgtgtttctcttgcaaatgaaatgagttgggaagctcttactcgcatgattaaagaggaaagaaaggctggaaacccagtagcaggacttatcgacaaactaaattttgaaagaaattgtatcactctactcttgagcaataatcttgatgacatggatgaggatgaaaaaactgcacctgtggagaaggtagaggttgatatagcactttctgcacatgcaaatgcaagacggtggtatgaaatgaagaagaaacaggaaagtaaacaagagaagactatcacagctcatgataaggcgtttaaagcagctgagaagaagacacgccttcagcttgctcaggaaaaaacagtagccgcaatcactcatatgcgcaaagttcactggtttgagaaattcaattggttcatcagcagtgaaaactacttgataatcagtggccgagatgctcaacaaaacgagttgattgtgaagcgctatatgtccaaaggagatctgtatgtgcatgccgagttgcatggagcttccagtactataatcaagaatcacaaacctgacactcctattccaccattaacattaaaccaagcaggatgcttcactgtttgccacagcaaagcatgggattcaaaaattgttacaagtgcttggtgggtgtatccacatcaagttagcaagacagctcctactggcgagtaccttactgttggtagttttatgatccgtggcaagaaaaattttcttccacctcacccccttgttatgggctttggtatactcttccgtttggacgagagctccctagcatctcatttgaatgaaaggagggttaggggtgaagatgaggccctccatgaaatggaagcagagtctcgcaagaagcaaagtaaccctgaatctgatgaagatattggtagtgaaggtgcaaataaggaaactcatgaagatgaatcaaacgggcaaactacaaacattcaacaaaacaatgatcttgagcttcctgatctgtctagcaacattggtactgccaactcatctgaactccttcctgaaatccaagctgaggaaaccttggacaatggaagttccattcttaaggaagaaacaatcgaagcttctgtttcatctcaacttgatgatctgctagataagactctttgccttggccctgcaaaggtgtcaggtaaaagctctctgcttaccagcatcccttcaagtttagcagaagatgatgatgatcttgaagtgaaaaggccaactataagagacaaaccatacatatcgaaagcagagagaagaaaattgaagaagggccaagttaatgatgaaactgctactgattctcaaaatggtgaagctgtagaaacaccaggtacatcaaagcaagaaaagggaaaggcagagacaaaggctactgattctaaagcaagtcagccagatacttcacagcag

SEQ ID NO: 162563 - DNA, 1692 bp, Zea mays
  Clone ID: MRT4577_79834C.1
ctacgagcttgtaaggtagtagaaattatggggcagcaacagcaagcatgctcacatgatgcttgtgaattatgatgatcatggtttctgtgacagatgctaatcatgaaaactggggtcgacctgattgattctcagatgccatcaattataggtttgtgttaagtaaactagtttttttttaacaaggaccaaggggcataaccccgccccccctattaccaagataagtaagcctaatcctggatcaattcgactactggtttgggcttcgccttttttttgaattcttgtggacctactccattaaaccgaatctgggtcggcgtggtatacctaattattaggcgggaagggatatgcacacgaagttcaaatgcaaccacaggaaaatctaaacaaaacacccccccgttttttttttgcttagtgttgctggattaacaggtcgcggcaaactagtactagtgtttataactttcttgcgtcatctaggcgattggatttctggccctatacctacgtgaataaggtgtcgaacaatgtaatcaatgcacatgttgcttaatttcacatttctgctcgattcaattcaattggaaggctactagtttttaggccagccagtttccgagaagttagggtgcgtttggttgtgggacagtcaggatagagacgtcacgttcctctaatccaattttgagggacactgaagacaacactgggataatgtgcgccaccaccagctccgcccggttatccacctcgcctctctctctctctctctttccgggaagcaagcttccgcctccgccgcgccgtctcgtgttcgcttggtgctgatcgggacccgccgcccggccctcgggtcgtttcccgccttgcatcatgttaggcggagctggcgcagcgtgacggcgaccgacccccgcccctagccgccacccatgaccttaatttccaaccccaattctcttccgttctggtggtggtgtcagggaggcaggcggcttggattttcctgcgggggtgtagggcggtcatgttgatgcagccccggtccttggtcacgggggaaaccatgccaggctggactgaactgcagagagattaattgatttgactgcctttgttgctagggatgtatacccctacgagctctgtaaggtagtagaaattatggggcagcaacagcaagcatgctcacatgatgcttgtgaattatggtcagcatggtttctgtgacagatgctaatcatgaaaactggggtcgacctgattgattctcagacgccatcaattataggtttgtgttaagtaaactagttttttttaacaaggggcataaccccgcaccttattaccaagatacgtaagcctaatcctggaatcatcacggcttcatttgatcgtaccgactcgatcaaacgacgttgtacgcattgtgctgtgctttgtaacaaattgaatctgtatgatgctcgatcttctttagcacgtatatgtgtccggacctactccatgtctgtatatggatgggaaatgtacaggttgtttgctgtgaacaactttgccttgtctgaaatggtgtctgtactgtaatactttcctgatgaacgaatataaccatgttaggtgtggtgatgttagcggaaaaaaaaaaaaaaaaaaaaaaaaaaaaaaaaaaaaaaa

SEQ ID NO: 162564 - DNA, 259 bp, Zea mays
  Clone ID: MRT4577_79835C.1
tatagtgagtcgtattaaagtgcgcgggagcccaggcgtggcaacagagagtacactcctcggtcgacgcggaggccccgttcctgaaggtcccgtcagctgccggcccgtctgccgggctgcagataggagttggtcatggcgtcgaagcacacccgtgaacgagctgacggacgtgtagaaggacggctcgacatcagacactgtaggtcatgatggtgaggacatgtttaattggcacaccagacgtatgggagga

SEQ ID NO: 162565 - DNA, 201 bp, Zea mays
  Clone ID: MRT4577_79836C.1
gagaatggtaacaaacccaggcagaagtttatgatcacaaacgtatgtcacgcattaacatgtgttcctttaatttatagcaaatcatgcaatatacaaaaccacagaaaaagggggggaacaaggtcaaatcatgttctcagccatgaacgcccatctgctttattaacaccttacacggaattcccaagggtgagaggc

SEQ ID NO: 162566 - DNA, 294 bp, Zea mays
  Clone ID: MRT4577_79837C.1
gctcctatacagcggacggcctcctctttttttttttttatcacataaaggacactggggcaggtggtttttaaggtgcagggctaaaactgcacatggagctgcagatcatttctcgactcgatcgaactggttagatattgatcattctaagaacctaaattttaacaatataataatgctcgtgaggttctctatatcttccaccctgttgctcttgaacattttgtatccaaattgtctcataaaaatcatgccatctaaaccttatggaattgaaatcacttgtttcat

SEQ ID NO: 162567 - DNA, 265 bp, Zea mays
  Clone ID: MRT4577_79838C.1
ggcgcaccttcttgaataccggagtacgttttgaccgtgaaacaccgatgaatgtacatccaccgtagccaaggtctactcattcactaacacttaataacaaacttgcctgagcgtgcaggaactactcagggtagctaaatcaggggctgaccgagacgacattctcatcacgaaaatccgagttttttattaacccaatcccgtcgccaatgtaaattgaatccatcttccgcgggttagttctattccacaacgccaagaa

SEQ ID NO: 162568 - DNA, 484 bp, Zea mays
  Clone ID: MRT4577_79839C.1
gaacgattcgaggccgccagcgccgaagggaagctcctgttaccgttcgggatggggcggcgcaagtgtctcggagagaccatggcgctgcggactctagggctggtgctggggactctgatccagtgcttcgactgggccactgttggaggggaccccaaagttgacatgaccgaagcgtccgggctcactctcccgagggctgttccgctggaggccatgtgcaaaccgcgccaagccatgcttgatgtccttcagaacctgtgagtgcccttgcggaccgaagaagttgatgagcatcattatcaaatgttgccacgttgttgccttgctatcgttatacgtagggcaatgtttaatccctacaagatctctctctccccccaataaacatgttcgtgcgttgtaatacaacatatcacttgtattgtcggttgtaatatgattcagagtgaaattctatatgtcactggatctgaacaag

SEQ ID NO: 162569 - DNA, 2276 bp, Zea mays
  unsure (1)..(2276): unsure at all n locations
  Clone ID: MRT4577_7983C.1
ggtagatttgacggctctccgtccccaagcccacctcgctccttgcatgcatatgcagcagcagtcacaggtaagcagatcccctagagaagattagactaacgagaggtatcaatccctatctccatccccatctcccactacccatgcggccatgcatcagtaaatcaaaatcatagcaggtgaaaaaaaagagagcatgtgagccgagagagaaacaggaaaggagcaggaaaaaaaaagagagaagaagccgcaggggctggcctgacggtacggacagccgcctgcctccagcagtatccagccgcgaaagaattgagaagatccagaccgagctcgacgaggggaggcgcgacaaagaagtatcgccgccacggaaagatggaggatctgaagaagttttatccttctttctggaagcagtctagcagttcacgaagtagcttgcactcgatctgtgagcataagctgatggatttgggttcgaggcgcaatcaaacccaagaagtttccaccaatttcaataaacgcaaacagttctccgaatctgtggaactgacttcagatgttaggacttcagtttggagaaaatccgatgcttatcacggagtgattgacttggagaagccatcgatttctggtgatgcgattgaagctattggttgttctggctttggcaaccctgccaaccaaaatggcaagtctcaggatggttcatgctgtatttcaccagagaacacctcacttgcagagtcgcttcagtcgtgtagagactggaacatatcgcgtgtaagcgttgttggatctagtgacactccggattgccagtcccctatcaaaacaagtaacaatgaagcaagacattcactgtttgacctgaatgttcctcaagaagaaagtctttttatgtcttctactctggttccttcttcttcaacgtattgtggaattttttcagacaaccgtagagaaacttctgagaaagagcatatcgctggtatcagatcaatgaaaggatcttccatcactgtggtcacccccaactcagttgcagacagttcaagggatgtggtaactgaatcgccagttcaaccgaagtttctttttgaccttaatgtgtcacttgaaaacaccgacatgccatcagaaatctgtgattatagagataaggatgtaaataatggtgtaagtaaaggaacagcaccccgtcattctttctccaataaaaatggtctgcatgcagaaacgtccaccaaacatgtggttcttggacatgatagtgtattggcacacaagcaggatgacagtcacgtgcttctcacagtcccgacagctaatggtatcgataaagctcactcgccacagcctggaaccattaacaaggagtttttagaccctggatctcctcttcttgataacaatttccatccaagacttgggacatcccacaatggagcatcagatattcaggagttaagcatgcttcaatgtaaggtcgacgatggtggcaccacagctgatactgcagctagaacccttctttccatgtttcagcatagttctgaatgtgttgctcatcgccctggaagcagcaaccagacagcagctcagaaggtggacgacgagcctcagccttcgttggactcgttcgagaaaaccgtgttggattcagaggagaccaaagatgacgggcaatccgtcagcgtgaccccacctttcaaggaagggccagcgtgtcggatcaagctaaagagagggaggggcatgagaaatttccagagggagatagttcctgggctccttctagggaggcaggagatatgcgaggacctgaaagctataggttacgaggcaaagaaggctcggtctaggaaacctcgcaagggtccaggtgcgtcttcggctcgacccaggccgcgcaagcgtggagctgccaagcactgaccaggagcatctgtgcgttccgtggcagggcgccatggggcaggcgagatccagaaagaggagagagttcgttctaaccatgtgaatattcattcgcgtgtatcaagcctagtttcaaactcccggtttgctagtggatatttagttggggggatattctaattctttcaccttttctctgatatatattatatcggatctgtagccttcgcagcatcaatgagcccctatttgttntgctctcctagattatataagtagattatataagttcgattatgggggaaagtatgagagtaaatattattttgatatcacaaataaactga

SEQ ID NO: 162570 - DNA, 111 bp, Zea mays
  Clone ID: MRT4577_79840C.1
cccacctcaggcgctataaggcatatgtagaaaacaacgatggaaccagacgactggacttgacggacgaagtagactttggtaactcagagagcctaagaggacgtgttg

SEQ ID NO: 162571 - DNA, 325 bp, Zea mays
  unsure (1)..(325): unsure at all n locations
  Clone ID: MRT4577_79841C.1
gtagcgaggggatggtgatagattttttcatctatctttttgctatcaatcattcaagcaaaggtcgagcaactgttcaccgttcaaaacctgagctaccggtgcgcgctctctttttcctctattcgcgttgtcggcaaggctccactcgatggcaaaacccacgcgtccgagcaggcaggacgtggcggcggctactgcaccaaagacgatgccgtcgtccgttttcgccgccgcactgctgctcctagccgcggcggcgtgccaggccagcccttactaccctntggngctngggtcctaccgttncncttgtcccctggct

SEQ ID NO: 162572 - DNA, 453 bp, Zea mays
  Clone ID: MRT4577_79842C.1
atcgattcattccacccccgatctcctccgatcgaaccaccgggccagcatgggggagtatcgtgacgtcagcagacatgttgtaaggcctaccccacggtgaactaggactacctcaaggcgcctgactaggctaagcgaaagctccgcggtgtcatctctgagaacaattgcgccccgctcctgctccgcctcgcatggtactccgcggccaccttcgatgcgaccaccacaaacgtgaggccctgcataaccttgatgaatccccccgagcacttgcacggatgcaacacagaaatgaaattagacgtcttgatgtgctcgaccattttggagaacattgccatcctatacgacacagatgccaaccatgtatctgacatggagatacacaagatgctctctgcacctgagtgaccacagcccacccctgaccttctaacatgacctgaa

SEQ ID NO: 162573 - DNA, 343 bp, Zea mays
  Clone ID: MRT4577_79843C.1
agagtaggcgtgctttcgtcgtccgtgccggtgcgtggcgcgctgcttaactccgagcttccgtggcttcgttgttagctgttagctccacagtccacagctccacacacacgtccagctgcactgcaccaatggtcgccgtcgagttccagtcccgactgtcgctcccgccgacgaggctgctgctggtgctgcacctggcagtggaggctgctcagctgaccgccgtcgaaacccccaaccaagatagcgctgctccggcggtccacacctacgtctgccccgctaatgacgcacggacgccgccaggcccagactttattatagtttccccccccccccc

SEQ ID NO: 162574 - DNA, 406 bp, Zea mays
  Clone ID: MRT4577_79844C.1
tcgcaccgccagtttgtcccgcttatacgctactggatagggtctctgcccgggcagtcacctggcgccatcgcaagctccctgcaaacgtcatatccagcactccatctggccgccactcctgcgacactgcggtctaccgatgcaacgtcccggatctccgcgtcgtcaccctagactcacttctcgtccttaacgacgacccaccgaagtccattgttctcgtggagggcgtgccacacaaaatccctgggcagactcgaggacctctagcgctgcctagggaccctgagggggaccctcaccggtgccggcgtgactggggtctcctaccttgacaggtttgtttcgaacctgggcgatttccccacattgtctccgctgaaggagatggatggcagcatgc

SEQ ID NO: 162575 - DNA, 452 bp, Zea mays
  Clone ID: MRT4577_79845C.1
ggtaccaagggccgtggcctcgtcgtcacgtcgtgggcgccgcagtggatgtgctcaaccaccccgctacaggcgtattcgtcacccactgcgggtggaactcgacgctggaggcgatcgcggcgggggtgccgatgctgtgttggccactggcgggcgcggacagaggatgaacaaggtgtttataaccgaggacatgggcgtcgggatggagatggagggctacatgacaggtctcatcaaagctgaagaaattgagggaaaactgaggttagcgttggagtccgaggaggggacgaggcttaagaaacgagcgctgcaactgaagaaagagacggaggaagcgatggaggacggtggctcgtcggaagcggcatttctccgatcttgtcagatgttgcaaatgttagaagctgattggttacccgcatcagtctagtatgattgtatcg

SEQ ID NO: 162576 - DNA, 391 bp, Zea mays
  unsure (1)..(391): unsure at all n locations
  Clone ID: MRT4577_79846C.1
tcactataaggaaagctgcctcgcctgcccgttccggaccggactggccggcccgccccatcgcgttcgcggacgcgtgggcgcgcgcgcccctctcgggtgtgggccgcgcgcgcgcgctgaccaggtctccaccatcaccagagtggcggggctctctcctatcgcggcgcgcgacgggcgcgatgggaggaggggagatcgtgtagttgagtgaagcgtgctcggcgccagccgccgtgcaccgctggcccgccggactagcaggaggaggaggactgcaggagcgccttgtctacgggcccgtgctcccgggtctggcgcgctagtaccccatcacgcccggccgactnggcctnatctacgaggatgtctggctccgtgccgagga

SEQ ID NO: 162577 - DNA, 413 bp, Zea mays
  Clone ID: MRT4577_79847C.1
gcacgagggacttcagtccttgaaacggcacaagacggggatgaggacagagacaatcatgtctccatggttgccgctcgttcggaggtccccagcaccgtggtggagcttttgtggagttcttgatgcgtttgcaggcggtgaagactgacaaggactcatcctaatctggtatcagcttttgtttacacagatttccagatgtcgtcagtccacacgggagtattaggccttctaaaatttcaaaaaaaaaaactaatgctcaccccattctgctacccacaatgttcctcagggcctgaggttttatccacaatgtgcagtggctttgaccatttgtttttttctctctctcattactttccttcattttagaagctttggacttccaactatagggtattgctccaaac

SEQ ID NO: 162578 - DNA, 484 bp, Zea mays
  Clone ID: MRT4577_79848C.1
aaacccccaatctttttcgatacaatcccttttggtacaaaccccccaccaaataaggcccaacggggggggggggggggcagatcaacttcaagcggggttgggtacagtcccagcaaatcatcatttttgcctaaaagggggcaagggggtagagagctgccgtatagccgcttgcgcataaaaaatgggagggaaaaaaatgcccccggggagcccgcatgaaagggaggcccctcggcctcctttcctgggtataggagggggcccataataaaaggggtgcaaaaaactgcctcgagaacataagctttttccaaaaatctccacagatgaaagccgcagcaggaacacggccggggagctacatgaaagcacctggacctcctttccgggtagggggtctctcataggtgggggttattttctcgaccaacccggtcatggggcttgaacatttagggaccattgcaaggggggtcat

SEQ ID NO: 162579 - DNA, 161 bp, Zea mays
  Clone ID: MRT4577_79849C.1
gaaaaagcacactgaaatgtttctaggccgggttaccatcaggatgtacgcttaccatagacaccaagtttactgtgggaccacctaccttacttataaaaaaatctttaagatacacacctcggcatttgaggccaaaaaactttagttggtcatagtcc

SEQ ID NO: 162580 - DNA, 824 bp, Zea mays
  Clone ID: MRT4577_7984C.1
ccccaagtccacctcgctccttgcatgcatatgcagcagcagtcacaggtaagcagatcccctagagaagattagactaacgagaggtatcaatccctatctccatccccatctcccactacccatgcggccatgcatcagtaaatcaaaatcatagcaggtgaaaaaaaagagagcatgtgagccgagagagaaacaggaaaggagcaggaaaaaaaaagagagaagaagccgcaggggctggcctgacggtacggacagccgcctgcctccagcagtatccagccgcgaaagaattgagaagatccagaccgagctcgacgaggggaggcgcgacaaagaagtatcgccgccacggaaagagcttttcccgttgcttcggtagctaaaggagtggttgttctccacggggacaatagaaaaatgatatggagatttggttgcttgtccaattaagatggaggatctgaagaagttttatccttctttctggaagcagtctagcagttcacgaagtagcttgcactcgatctgtgagcataagctgatggatttgggttcgaggcgcaatcaaacccaagaagtttccaccaatttcaataaacgcaaacagttctccgaatctgtggaactgacttcagatgttaggacttcagtttggagaaaatccgatgcttatcacggagtgattgacttggagaagccatcgatttctggtgatgcgattgaagctattggttgttctggctttggcaaccctgccaaccaaaatggcaagtctcaggatggttcatgctgtatttcaccagagacacctcacttgc

SEQ ID NO: 162581 - DNA, 470 bp, Zea mays
  Clone ID: MRT4577_79850C.1
gggtacaagcaaccgcggggtagagctcccccggcggtgagcttgcgggctcccatgcactgtgtgtgctgcgcgtatagatcagggacgtcacatgggacagctagccatcgaccatggatacacggttcatttctgagaaaacttcgaaatggtagctaacatagagatggcaaactttaactgtgcaggagcgatcggtatgaaaatagactagtacgtgcctttgaggctgaacgagcacacgccatgattgtgttcaagacctatatgtgggagaatataataacgggcgaatgtgttttagaaacaggaatggattctattgcaaaatactacaaacgaactatagctccataatgtgaggaataccttgcttaacaaagcggtgggagacttaattgatgacaagttatatgtcctttggaattgcataagtctgcaatgagcatgttgcacttacgcaccct

SEQ ID NO: 162582 - DNA, 123 bp, Zea mays
  Clone ID: MRT4577_79851C.1
cacccatctattggatacaaaaagaatgaggtctatttttggatatatgcaccccatataccaattggaagttacaggaagaggatgtgcagcatatcgaaatacaatcattcaatacctgct

SEQ ID NO: 162583 - DNA, 388 bp, Zea mays
  Clone ID: MRT4577_79852C.1
tccgctcctcgattcacgcgtcgaccgatacttacggagaggatcattaccatggcacattgccatgctatccgcacataactcagaggtagcaggggaaacattgccatagctatcaacacactacaagcttacacattcaccgaacagagagcacaaaggatgcaaatcttagccacccactgattcagggcagatcagcactatcgccaatccagattatagcctagcacattagaacggcaacctttttttgcataagacaagctgtaatggctaattcacttaaatcccctaaccatccctctttattcatcatattcacttagacaaccctggcattacacatcccaagcttttacactccacgttgtctgtcctgataaat

SEQ ID NO: 162584 - DNA, 284 bp, Zea mays
  Clone ID: MRT4577_79853C.1
agtacgcccttttttttttttttttttttttttttttaaatctcctttttagtacctcgggctcttgatggacgcaccagcgtatgcaccaggaatgggcacggctgcgtactgcacctcaccaggcgccatgggtgcatgctggctgatgctctccgagtgacctggtggtggtgtcgtagatgcccgcgaggacatggatgagcttgagcgcgatgagttggatgagtgtgaccgcgatggccggggggcaggcatgggtgcgggagcacgagaaaccaacg

SEQ ID NO: 162585 - DNA, 636 bp, Zea mays
  Clone ID: MRT4577_79854C.1
cattgggtacctcgaggccggccggggtgactgctctattctttaccttctcctcgaatacatcctccagcggtgcaccctacactcccgtgctgcgacatatagacgcacaggtcgactcgaaggaaggaggaaagctacatatcggacgatcacctgccagaggatatctctggagtgcaagagtacccagaacaaaataaaccgacagtccttcttctcctagctccgcgacgacctgatcgagaacgctacgacctctccccgatctgagaaacaaagccaccgctcatcctcatctccagccgctggaatttctaagagaaccgaagagcccgagtctcgctactgttacagagggccctctttgctcgtctcaccatgttcaacagtccaatgccgcattttctgaaactcacacgtgaacctagcaaatgtcggaactgatgccaaaattccaggactagaagcgcactcttatgcacttgcttgagaacgaacttgtgccactgagcgagaactcattgcaacagctaaagaaatgcatcacatgtgctttgtgatacgatacacaaaaaacgagacctgttatcatgaaacaagaggatgacttccgcagaacggagccactgctga

SEQ ID NO: 162586 - DNA, 174 bp, Zea mays
  Clone ID: MRT4577_79855C.1
aaataaatataaaataaaaaaaaaaaaaaagggcagccgatctaaaagataacaaacttacatgcgcgtgcgtgcaaaaaaaatagatcgttcgttggcgtcacctaataacaagtctaatggccgtctattttacaatcggcgtgactgttaaaaccttgacgttacccaact

SEQ ID NO: 162587 - DNA, 638 bp, Zea mays
  Clone ID: MRT4577_79856C.1
ctccctcactcatccattgcaatgcttgctccctgctgaccattgtgcagtctgaacatccagcatggctgcaagttgactcccctcctctgtcttcgagaacgccttggagccaccttctcctcccatcccaatgaactgataccactcttttccagggatgctcgacagtgcaagtgaatgattgatcgacatcagctgattgcgtactgtgaggtcctgcttgatagtgtcaaggagaagtatagcaccctttgaagacattcttcgtgcatgctcaggaagcacattgtgctccccccatgtgtacgtcttgctatcgaggccaaggccatggtgtactgggatcacattcacatgaatgtcacagcgacctggctgtggaggagctgatggtctctgaggacttggcattcatggaacacctgcaaggatgtacaatccaacagcaactttgagcttgaccttgattttgagaccatcaatgactcctttcctcgtccattccatgatcaaccccatcaaaaatggagtgcaaatccctaaccgacacctgatctccaagtagtaccactacaaggagagattgttccattgctgaacttcctcaaggatcataactaacgaggaacgacgat

SEQ ID NO: 162588 - DNA, 155 bp, Zea mays
  Clone ID: MRT4577_79857C.1
ttgggacctctcacacggccgccctgggggggtttttttttccttaggatttaacttacaataaagcctgacggggggaacagcacccatcgatccggagtccatgctgggtgaagcatgggtctaggtgggagccgagggtgaacacagggcta

SEQ ID NO: 162589 - DNA, 545 bp, Zea mays
  Clone ID: MRT4577_79858C.1
atctgttcagctctgcgctttcagatacgatggagctgactcttgcccgagaccgagagattgctaattccccataccgaccaccgaacgaccttcacgacggactcgttctctttctaaggcgtcgagcgcgatggtttgataggaaacgaggaacaggaggcagtgcttctccctctgcatcggaatagtcgacatgctaatctccaacgacgtgatgagaactttactggctcaagcacgcgatcccgtctgatggccaaatgcctgcagacataagcgtcgcacatcgcaatgatgccttcctgaccttcatctcacagactgctgctgtgaggcacactccccgcgcaatcttctcttatctagaacccactgcgatcaaggagtggcgcactgtgacgaaacgccagctcttccacactgagcagatcatctccgtgaaggtggatgccactaacaagttcacacgtgctctctacacaattgccaaggagagaggtgatctggggcctgaccgcatccgtcagattgctgacaacatg

SEQ ID NO: 162590 - DNA, 216 bp, Zea mays
  Clone ID: MRT4577_79859C.1
cccaattccacctccttcgcatagatcagaatcagatgcgcctcccctccacttcgcatggattgcttgcgggctcttcgcttgcccttccccaacttttcagcttcattcactagctgacatccacacaatccgtgctttgccttttccgctcccccccggatcaatcccaatctcgtttccttcttcctgataaaacagcaacacctttccgca

SEQ ID NO: 162591 - DNA, 289 bp, Zea mays
  Clone ID: MRT4577_7985C.1
ggcaactgtgtgaattttacattatttggagcctcatctgtgtcaggctataacattctatcctcatctgtaaaacttccccgtccattattccttgcactataacaactgtcaacacaccaactattaggaagttagtattttgctattgatcactgaataaacatcagagtattttaaataacagttctctagaaagaactgttataattaaaatgagtctgaaagatgaactctcgtattaatgccctatatttgatggcactttatagttcataaaattaatttc

SEQ ID NO: 162592 - DNA, 290 bp, Zea mays
  Clone ID: MRT4577_79860C.1
aggaggcaaaggcgggtttccatctttatatagtacttaaacattctttttatacattaagccgatcggatccattccaaatacacacagaccgttcatttcacacttcatcacacagttcacgtacacatggctcaaatttcgtacacgcttaactgtttacgataaaccggccgcgtaactagaccacgcgaccggccggcccggctctcggtctatacctaaacaagtaaacccaaaaccgggccgcttatgttcttacacacaccttaagtttctatccaagcccc

SEQ ID NO: 162593 - DNA, 509 bp, Zea mays
  Clone ID: MRT4577_79861C.1
ggccgcttttttttttttttttttcgagtgtatagagatagatgtcacaatataatcagagtacttattacatagtggaagtcctacaaaataaattataaatataaaacgaactaaagtccatccttggcgccacaaagtcgactgggagacgccacctagatcaaatcgaactcctcgttgtgtggcctcctcttgaaccacctgatcatctcccacaagcgagcagagcagagttcagatgacggagggtggcggctttgcggtgatgccgcagaacggcgaggaattctccggccatggctcgcccagtcgactggagagtgcctagcccgcgttcgggtatccctcacgaacaccccaaaccacacgccgagagctgggcggcggtgtggtcgaaatccccacatggcggcatgatccccttccccgtggcgaggtcaatcctcctccccggatctcggcgatgccaagcgatggtgacctggttttaagcccctcccggccgg

SEQ ID NO: 162594 - DNA, 356 bp, Zea mays
  Clone ID: MRT4577_79862C.1
ttttctagggagctcttggagatgctcttattcctattggtacggagtaatatgtatattgtgcaattaaaatggcctttatatggtattgaacatttcccacaataatctgtaatctttccatgaattgttttcctatatgtggtattattaattggcagtgctcctagacactgcacatccatttcctgtgaaattactaaaagattgccgggaagtggcaatgggactgttactgatgaaattttatgagaattattgatttcgaagtaacttctttctggacttttttgccagccaacattgttttccatagaaaatggtttttgaatattcatggcaaaattttatggttt

SEQ ID NO: 162595 - DNA, 586 bp, Zea mays
  Clone ID: MRT4577_79863C.1
aattcggcacgaggcacagtcccacctcgccctcgtgccctcccgatgacgtcctctctgcctccaaccaccctctctcccacctcgcccacctgccctcccgatgaggtaccctctgcctttgatttcgttggactgtgcccgaccccagtctcggccgcgtccaccggtgtggcctcacccacggtcgcctccccgatccggggagccccgccgacatccccactgccgcgcccttgccggcctccccgctgctgcccctcgcatcggcgtcgtccgtcgtcgacgcgtccgggtcctcctccccggcctctgcccaccctgcccacgtccaccggcatggcctcaccctctgtcgcctccccaatccggtcgagccccatcgacatccccaccgccgcgccattgctggcctcccctccgtggcgcctcgcggcggcaccgtccgccgtcgacgcgtccgggtccaggccaggtagaggaaagccgcgaaacccatgagggtcacgaggaaccccgatcccccgaagccgatgccgagggctgggccgacggatacgaagggcgaaggagagtaaaagggagc

SEQ ID NO: 162596 - DNA, 385 bp, Zea mays
  Clone ID: MRT4577_79864C.1
ggaaaaaggaccccccacaaaaaaaagggagggaaaagggaaaatgccagggacaacactttaaagggttttccaacccaaccaaaacgggtttcaaggccccaccccaaaaaaaaggggggaaaccaaggccttgccaggcaaaatcccttacggggggcccccaaatttttcgggcaaaagtcataaaacgggtacaagggtggcacccaaaaaaacaggttccaaaaaaaattggataagggtattcgacaggggaaaaacctaccttctagtttttaggcacaaaaagccggctttactgccccttacttaaaacccccttgggcccctccctaattttttaaaaaggggccttccaaatgtcaaagggccataggggcaa

SEQ ID NO: 162597 - DNA, 244 bp, Zea mays
  Clone ID: MRT4577_79865C.1
agcgtgcttcatggcgatttgaggatcggagtcatacggtcagattgcaatggggataccagcctatacaatcctgctggacactatggacacaacgaggcacagcatgcgatgtccaggaccactgcatatactctagacttcgacagcccctatagcaatgacactccgatgcaccatgtgaggcagaagctgatgcatgcgtatcaaatctacgatcagaatccatagtacccagtcattg

SEQ ID NO: 162598 - DNA, 1132 bp, Zea mays
  Clone ID: MRT4577_79866C.1
tagacgtccaaagagtagaaacatcagacactgatacagccactgaaagaagacatgggtagtgaacaaaaaaaaaaaaaaaaaaaaaaaaaaaaaaaaaaacaaaaaaaaaaaaaaaaaaaaaaaaaaacggacgagttaccagaccaagccgcagcaggaatttctcagatgtctaaagccaagcttcctcacgtcgagacggattcttccggcgacgacgatgggccgaagccaaggctagtgttccgtagacgcatgcgcacaccagttaagctgctcggtggccggaaagtctcggacgtcctgctatggaggaacaggaacctgtcagcggggatcctcgcgggggcgacgctggtctggttcctgttcgacgtggcggagtacaacgtggtgacgctcctttgccacgtcgcgctgctcgggatggtcctgctcttcgtctggtccaacgccgcgcctctccttgacaggccgcctccacagatcccggaggtgatcgtttctgaacacgcgttcagagaagctgcgcggaccacccattacagactggctcactttgtatccgtcctctacgacgttgcgtgcgggaaggatctcaagaagttcctcatggtgattggttctctgtggatactggcgatacttggagacacatgcagcttcacgacgctgttatatggcgggcttttgtgtgctctgactttaccggcgctgtacgagagatacgaagccgaggtggaccatcttgtggccaagggacgcgaagacctcaagaagttctacaggaaggttgactccaacgtgctcaacaagataccaagaggccctgtcaagacaaaagctctctgatcaagatgtgtgctttgtcaatttgccggtgcacgccggcagtccccgtacataaaagaaaaacagtaaccagtcaccagtccatctcaaatcagtttttatagtatcagattgtacgtgctaaactactactgcaatgatccaacatactttaccgtatcaacagtaaacaagcctaaaatttgaagtaatttattcgtaaaaaaataaataggtactgaaagattgtaagtgttgccaaaacggaaaagtggcgaataaaaatctgaggtccttt

SEQ ID NO: 162599 - DNA, 991 bp, Zea mays
  unsure (1)..(991): unsure at all n locations
  Clone ID: MRT4577_79867C.1
ccagctggttgagtcgagaagtctcatctttaacctctcgtctttccgctgcaggccgcctccacanatcccggaggtgatcgtttctgaacacgcgttcagagaagctgcgcggaccacccattacagactggctcactttgtatccgtcctctacgacgttgcgtgcgggaaggatctcaagaagttcctcatggtaaattcttgcttgcttgcttgcttgcttttgatcagtgccaattgccagatcctacgacagtaacattactgccacgcatagacttagagttcagctggcttgcagtttctgaaaactgaagcacggaaacaaagacctgtgttattacaatttcttcagcggcgcgcgtaaagcaaactcggccttccatctgattagacaaaatgcattaagcatgtgaattttacaaaatagcctttctgccacaacaaacaaaaaaactctgtcaacatccagctcagtgaattgactcaaatattgttttttcttcttctttctttgtcgatattgtaaggtgattggttctctgtggatactggcgatacttggagacacatgcagcttcacgacgctgttatatggcggtaagcatttattagatttaaagaggatgcagaaaatccatggaccgtgtgtactcgtatatttctgacggtttgccatggcttccctggctggctagggcttttgtgtgctctgactttaccggcgctgtacgagagatacgaagccgaggtggaccatcttgtggccaagggacgcgaagacctcaagaaattctacaggaaggttgactccaacgtgctcaacaagataccaagaggccctgtcaagacaaaggctctctgatcaagatgtgtgctttgtcaaattgccggtgcacgccggcagtcccgtacataaaagaaaaacagtaaccagtgtcaccagaccatctcaaatcagtttttatggtatctgattgtacgtgct

SEQ ID NO: 162600 - DNA, 374 bp, Zea mays
  Clone ID: MRT4577_79868C.1
agcaggggtaacaacgcagagtacttttttttttttttttttttttttttttttttggtttttttttttttttttttttttttttttttttttttttaacaaaaaaaccggacaaagggctatggggtgaacaggactggggacaacagcaaatgttccatgccccaaaggattaggagcgtggccatccaaatttgggtccgcctcctttaaaaaaaattacccaggggaataacaaacaagaggtttgggtaaaggagttgccgaaagactccttttaaacatgccagcctcgggcccgggggcggccggctcgggaggcgatggctctcagagggtctcgggctgggcgcccggcgttccggggctccccg

SEQ ID NO: 162601 - DNA, 2050 bp, Zea mays
  Clone ID: MRT4577_79869C.1
ccgggagagtctagcggacgccccccctccccagttcccacgagatcccgactcggacgaagctctcctcgccggccaccgtcgcggcagcttgctacgcacagggagtctgcggcgcgcgaggaatacagcgagggatggggtggggcacagtggtttacgagggcgcggtcgtcggctcgtcgctggtggggctcggctgggcggggctgtggttcctgaaccggcggctgtacaaggagtacgaggagcggcgggtgctggtgcagatcctcttcggcctcgtctttgccttctcctgcaacctcttcgagctcgttctcttcgagatcctgcccgtcctctccaagcacgcgcgcttcctcaactggcacctcgacctcttctgcctcatcctcctcctcgtcttcgtactcccctactaccactgctatcttctgctccgtaactcagggatgaggagggaccgggcgtggctcgtcgcggcgctctttctgctggtcttcctatacgggttctggcgcatggggattcacttccccatgccttcaccggagaagggtttctttacgatgccgcagttggtcagtaggattggggtgattggagttagtgtcatggctgttctttctggttttggtgccgtcaatctgccatatagttatctgtcgctattcatcagggaaattgatgaaacagacatcaaaaccttggaacgacagttgatgcaatccatcgagacatgtactgctaagaagaagaaaattattttgtcccagatggagatggagaggattcaaggatcagaggagaagttaaaggccagatcgtttctgaagcgtatagtgggaacagttgttagatctgtgcaggaagatcaaactgagcaggatataaaaaacttagaagcagaagtccaggcactggaagagctttccaaacagctgtttcttgagatatatgaacttcgtcaagctaagatagctgctgcgtattctcgaacttggagagggcatcttcagaatctacttggatatgctttatcagtctattgtgtttataagatgctcaagtccttgcagagtgtagtctttaaggagtcaggctctgttgatcctgtaacaatgtcaataacgattttcctgagacattttgacattggcattgatgttgcactgttatctcagtacatatctttgatgttcatcgggatgttggttgtcatatctgttcgaggtttcttggcaaatgttatgaagttcttcttcgctgtttctagagttgggagtgggtcgacaaccaatgttgtcctcttcctatcagagatcatgggaatgtacttcatatcttccattcttcttataagaaaaagcctggcaaatgaatatagggtgatcattactgatgtcttgggtggtgatatccaatttgacttctaccatcgctggtttgatgctatatttgtggctagtgcgttcctgtccttgcttcttatatctgcccaatacaccaccaggcaaacagacaagcatccgattgactgatgcatcttgcccacaatgtgtgcatgttgtctttttaaccactattcatccaaggttgacccattctttgtaccacagtttcccaaagcactgtttctccatacacttccatacacagttacaaaacataatacgtcagttaacttgaacaaagtctctattttgtaatatgtttcccgattgcattggtttatggtaaacagttcctccaacagcgactatctgagtcacgtctggtgatgcagtgacgggacacgggattcattgtaatgcagtctgcacgatactactttttgactaggacaattgtggaagcccatattaggaattgattatgactttgtaaaatagcttgaaactagtgtcgtagcaccgtagcacggtatgttggtgtatcttatatattattttggctgtttcatgtataacacacttcgcgacaactctgaatggtagatagatctgtttcttcattgacttcagaaaaaaaaaaaaaaaaagcggcc

SEQ ID NO: 162602 - DNA, 987 bp, Zea mays
  Clone ID: MRT4577_7986C.1
gcggcaggccatgatggtgacgttcgcgttggcgctgctcatgggcatcgccgtctacttccgcatctgggcccgccagtccagcgacccctccttcaccgccgacgaccgcgaggagctccggttcgcccccaattcctctccaccttccttcttttcaccgcctacggtttatagttttctttatcttattgagccatgaacagaaagaaaaatggaaggaatcaaagcggttttgctcggatttctgatcacgcgatgaacgatccaagtgtttcatctaatttctgaatttgatcaaccgatttcctgaactattcaccgagatgagattggagacttgctaaggaggcaatttgaacaagcaaacctagaagcgatggatgaatctgccgaatggaggatgaaatatgataaagaaatagagaaaaacaggcagttgcatgatgaactttcaaaggttaaggcctcattagctggtgcagccaggcatcttgagttgttgcagaaggataacgagttgcagaagcggcagaccgaatcactgaggcagcaatgcaattgcactctccattgaaaactaggcaaggttaagggcaaggaaggaatgccttttgtttgtccagcagcaccagagggaggaaaactagattgaggtctaggaattaggacgtacgaaaaggattgagaacatagctctggtagaccaagaccatagtgaccgtctgttataccaatggcgagctgcatatttccgtcccaagtgatcagttgcagtttcatgagtgccaatgcaaatcgcccaagtcaaaacgcaaaagatggcaccatggcagatatatagttcctgtttcagagcaaggattcagtttgtgggtaattttgcagtggcagtttgcattttccgagtacctgaccatctgtaaatatgcgttgtactcgggatcaaatttataacactttataacaacaaacaagttacagatc

SEQ ID NO: 162603 - DNA, 434 bp, Zea mays
  Clone ID: MRT4577_79870C.1
cccagctccgggaggtccggtcgaatgacacgcgccctgttctgacggacgcgacgcccctctcatttctttgtgtatagcgcgagtgcaccgactcggcgtttctctctttggtgctggttttttgtctcttcttttcatttcatctcctctcatttggattccctgcatattgatatcatttcacataccttgttggtgttgctgcttttttgctttggagattctgtgaatccttcatcagtgctcgaaactcgctgctggatttatcagacgttttctcgatctcctttcccccttcgtctttcttcctatggcgttgaggcgattggggtttgggggatcgagctgggtgttgccttgaaatggtaatagctttttagctggattagactaatagctacagcgaagtgttcaatataccactttacttc

SEQ ID NO: 162604 - DNA, 693 bp, Zea mays
  Clone ID: MRT4577_79871C.1
tgctcacacagagaggttaagcatcgatcacagtgtcttgttggtgttttgctttataagcaaattaaattgtgcaaataactagccaagtcggtgcaaaatttccaatgacgatggcatactcaaaggaagagttgtattacaatcctaaagagcttgttcggttccgagttgggtggctgaaatgagaattggattaccaatgcacttaagacatcaatattagtaaagagaattgaccaccagcacgtgcagtatatcagactagagagctgaatgattttatatgggaccttaccctctttttgctctttttattgtaccatattaactattctaaaattctaaacgtgagtcttgaaggggttaacaagccttgcttttccgcaggaagcaccatagtcatgggaagagaggaagaggataaggacagtggcagagactgacacagaaatagatataatacatgtgttgtatatttttatgtaataattgtgttttaatattttattgaataatttgtgttccgttcgtaacgcacgggtatctaactagtaatgtattaacccgggcggcgcctctcgtggagccaacttgacttgcgcatccgtacgcgttgatcgatctgttattgcggaacctgaactcagttgacttgccagctttttatatcgtgaggactgttaaaacctt

SEQ ID NO: 162605 - DNA, 363 bp, Zea mays
  unsure (1)..(363): unsure at all n locations
  Clone ID: MRT4577_79872C.1
gtttcccgattgcattggtttatggtaaacagttcctccacagcggctatctgagtcacgtctggtgatgcagtgacgggacacgggattcattgtaatgcagtctgcacgatactactttttgactaggacaattgtggaagcccatattaggaattgattatgactttgtaaaatagcttgaaactagtgtcgtagcaccgtagcacggtatgttggtgtatcttatatatttttttggctgtttcatgtnaaaaaaaaaaaaaaaaaaaaaaaaaaaaaaaaaaaaaaaaaaaaaaaaaaaaaaaaaaaaaaaaaaaaaaaaaaaaaaaaaaaaaaaaaaaaggggcggccggttttaaa

SEQ ID NO: 162606 - DNA, 542 bp, Zea mays
  Clone ID: MRT4577_79873C.1
ctcccatcaggctctgttgatcctgtaacaatgtcaataacgattttcctgagacattttgacattggcattgatgttgcactgttatctcaggtaagtatacaatagctgaaacaaatgcaaaatgaatctggaaattgcccgtatgtagtgtactctacataaataaatgcaatattgggttggcttgttttttcatcgctgacttcttctagttgtatatttattgaggttctgacctttgtcctacttctgccttgtacttgaagtacatatctttgatgttcatcgggatgttggttgtcatatctgttcgaggtttcctggcaaatgttatgaagttcttcttcgctgtttctagagttgggagtgggtcgacaaccaatgttgtccttttcctatcagagatcatgggaatgtacttcatatcttccattcttcttataagaaaaagcctggcaaatgaatatagggtgatcattactgatgtcttgggtggggatatccaatttgacttctaccatcgctgggttgatgctata

SEQ ID NO: 162607 - DNA, 1882 bp, Zea mays
  Clone ID: MRT4577_79874C.1
gccggccgggctgcgagcagtccgagaggcgagcgaccgaatcagcctgctctctcgctcgagaagcctcctccgctccgccgtccgcccctcgcctcaccagtccgcattccggcgcacacgcccattaaaataccgcgtccaatctccgccctgcgctcgtccctcatgcccgcctcgcggctcacagtgcgcgtgtgccaccatgctcggcgcggcgctccgcctccgcgtccgcgtgctccgccgccgccgctcccaccgcgggcgccgtcgaggcaggcggtctctcggtcgggtcggggatgacgacgacgacgagggaggccgggagccggtgctgctagtgtccgggatgggcggctccgtgctgcacgcgcgccgccggtccaactccaagttcgacctccgggtctgggtgcgcatcctcttcgccaacctcgacttcaagaagtacctctggtcgctctacaacgccgataccgggtatgtggagccgctggacgacgatgtggagattgtcgtgccggaggacgaccacggcctgtttgccatcgacattcttgatccttcctggtttgtagaacttctccatctgtctatggtgtatcacttccatgatatgattgatatgctcataaactgtggatatgagaaagggaccacactatttggatatggttatgattttcgccaaagcaacaggatagacaaagcgatggctggtttgagagcaaaacttgagacagctcataagacctctggagggaaaaaagttaatttaatctcacattctatgggtggattgctagtacgctgcttcatgtctatgaatcatgatgtattcactaagtatgtcaacaaatggatttgcattgcttgtccattccaaggtgcccccggatgcatcaatgattctctacttactggattgcaatttgtttatggttttgagagcttctttttcgtatctagatgggcaatgcaccaattgcttgtcgaatgcccatcaatctatgaaatgttaccgaatccagaattcaagtggaaggaaaaaccaattattcaggtttggcgtaagaaccctgaaaaggatggaactgtggagcttgttcaatatgaagcaactgattgtgtgtccttgttcgaagaagctttaaggaataatgagctcacgtataacggaaagaaagtagcactaccattcaatatgtcagtcttcaaatgggccaccaagactcgccaaatcctagacaatgctgaattaccagatactgtgagcttttacaatatatacgggacatcttatgaaactccatacgatgtatgctatggctcagaaagctctccgattggagatttgtcagaagtgtgtcacacagtgccgtcatacacttatgtggatggagattgcacggttcccatagaatcggcacgggctgatgggttctctgcgaaagaaagagttggcgtcaaggccgaccaccgtggcctgctgtccgatgagaacgtattcaagcttctcaagaaatggctcggtgtgagcgagaagaagtcagagtggcgttgcgtgtctaaatcctactccaaagtgggtaattgggttgccctgtagttcttcaggaagactgttattttggcctttcctcctgaagagaagatgaaacaaaattctggtgattgtattgtatgtctgcacgatgtaaatccctgcaagctgcacggaacaagggattagtgcccttgtacgatgtatcattgccaggcatttcttttgaagcctagggtcatatattcattgccccttccaactttggagcatagtaaaagaataatatgaaatcgatcataatttcagaaaaaaaaaaaaaaaaggccccta

SEQ ID NO: 162608 - DNA, 330 bp, Zea mays
  unsure (1)..(330): unsure at all n locations
  Clone ID: MRT4577_79875C.1
ccagcgcggcnaaagggaccggnnncnggaacagggcggggacggcggaccccgggcaacgancccgngagnngncgncganncnggcggcgagggcaanaancaacggcagccaacnagggcgacggaaccgccggagcgcgcgggcnacgnggaanccanccagcggcggcaaggcaagaacaagaaccaccagcgggaaggacgacgccgcagcgaaggagccgangcangggacgccagaagcgaccgaaaggacncgggaaccaagcnncncgaggagccggggaggaacagcgcggggggggcagncgccggccgcaaggagga

SEQ ID NO: 162609 - DNA, 1377 bp, Zea mays
  Clone ID: MRT4577_79876C.1
catctcggcccgggcggggaggctggatatcctctttccagttggtcattccattcagtgttgcctcctctctagatagtgccattagccatcctagccttcgccctagctcgacgagaagaaccacctcagcaaaagaaagctagctagtactctagctatatacatgataactagacaaggatcgtgaagtaattaatataatgacaaagtcgtcaggggcgctagatcttgctcggagcaccggagggtcgcttagcaaggaccaagtcaaatccgccgttgatcagtatgtgaagtaccacgacctccacggaggcgaacaagaatcaaggaagtcaaattacgctgatttggcaaacaagtactatgatcttgtcactggcttctacgaatatggatggggcgactcattccattttgctggcggatatccgggtgaaacttcccgtgaagccattaagcggcaccagcattttatggcactacaattggggctcaagaagggtatgaaggttctggacgtgggatgtggaattgggggacctttaatagaaattgccagattcagctcaacttcaataactggattgaccaacaatgactaccatgtctcaaggggcaaggagcacatcttttcagcaggtttgagtgagcaatgctgctccttgaagggggacttcatgaatatgccaatagctgataacacctttgatgcggcctatgcaatacaggctacatgttatgcaccggaggcacaaggtgtctatagtgaggtctaccgtgtgctgaaacctgggcagtattttgcactagatgaatggtgcttgaccgaccgattgatcccaacaacactagcatttgtccaccaagcctgaaattgagctcggtgatggactacctgacatccgtaccactcgccagtgtgtccaagctatgaaagatgcaggatttgaggtcgtttttgcaaaggatcttgctcaagattttccttgcccgtggtaccgggcgatggatcccacctacttttcatgggccgcaagcctatcaaggaagctgatatggtgaacggcggcgtcctttgagctgcaacattagtatggggttgtactcataagagctatgaatcatggccaacgtgttctgtgctgaggtgtgtttactgggttgtcttatgggttatgggttatgaatcatgttcccgcagtagcctgtatctgattgtgtgctgtgtactatgcactatctgaataaaaatgcagttttacgccttgtattaatcgcaccatttcttggcaacacgactttgatcggaccaatgtactgtctggatctgtcatacgagaattcatctataaaaactattctccatctcat

SEQ ID NO: 162610 - DNA, 344 bp, Zea mays
  unsure (1)..(344): unsure at all n locations
  Clone ID: MRT4577_79877C.1
aagcagtggtaacaacgcagaggactttntttttttttttttttttttttttttnnggggtttttgtttttttttttgtnnnnnnnnancccaaatccnnccatcctgttttgattaaccattgtactaactgtttttgttacaacattttttttaacccacaactttttggggcaaatgattagggggggggaaaaggggccttgattgacaaatttttttgtttccatgggggggggaacactgtattgtagataagggatgtaactttttttttttcattggggaggacactttggtttgtttgttggacatcccctttatataaagggcccactaggggg

SEQ ID NO: 162611 - DNA, 593 bp, Zea mays
  Clone ID: MRT4577_79878C.1
gcaggatttgaggtcgtttttgcaaaaaaaaaagctcaagtttttccttgcccgtggtaccgggtgatggatcccacctacttttcatgggctcacttccaatgcacacgcccaggacggatcgtcacccgtgcaattgtcaatacactagagttcctccgtattgccccagcaggcagcatgggagcctacaacgtcctgatgagtgcctctgatggccttctaaaaggtggccgggaaggtatcttcacagcgaccttcttcgtcctgggccgcaagcctctcaaggaagttgatatagtaagcctctcaaggaagttgatatagtgaacggcggcgtcctttgagctgcaagattagtatggggctgtactcataagagctatgaatcatggccaacgtgttctgtgctgaggtgtgtttactggattgtcttatgggttatggcccttgcgctgtgtgctggcctgctgggtcatgttcccgcagtagcctgtatctgcttgtcagcttgtgtgctgtgtactatgcactatctgaataaaaatgcagttttacgcaaaaaaaagaaaaaaaaacggacgcgtggggcc

SEQ ID NO: 162612 - DNA, 393 bp, Zea mays
  Clone ID: MRT4577_79879C.1
aggcgtaaaactgcatttttaggcagatagtgcatagtacacagcacacaatcagatacaggctactgcgggaacatgattcataacccataacccataagacaacccagtaaacacacctcagcacagaacacgttggccatgattcatagctcttatgagtacaaccccatactaatgttgcagctcaaaggacgccgccgttcaccatatcagcttccttgataggcttgcggcccaggacgaagaaggtcgctgtgaagataccttcccggccaccttttagaaggccatcagaggcactcatcaggacgttgtaggctcccatgctgcctgctggggcaatacggaggaactctagtgtattgacaattgcacgggtgacgatccgta

SEQ ID NO: 162613 - DNA, 786 bp, Zea mays
  Clone ID: MRT4577_7987C.1
attgggtccctcgaggccggccggggcttcatatcaggtcgacgatggtggcaccacagctgatattgcagctagaacccttctttccatgtttcagcatagttctgaatgtgttgctcatcgccctggaagcagcaaccagacagcagctcagaaggtggacgacgagcctcagccttcgttggactcgttcgagaaaaccgtgttggattcagaggagaccaaagatgacgggcgatccttcagcgtggcgccacctttcaaggaagggccagcgtgtcggatcaagctaaagagagggaggggcatgagaaatttccagagggagatagttcctgggctccttctagggaggcaggagatatgcgaggacctgaaagctataggttacgaggcaaagaaggctcggtctaggaaacctcgcaagggtccaggtgcgtcttcggctcgacccaggccgcgcaagcgtggagctgccaagcactgaccaggagcatctgtgcgttccgtggcagggcgccatggggcaggcgagatccagaagaggtcgttctaaccatgtgaatatccattcgtgtgtatcaagcctagtttcaaacacccggtttgctagtggatatttagttgggggggatattctaattctttcaccttttctctgatatatagttaggtgcccgtgcgttgcaacggcataaaaaatattcgataaaatgttagtgtacaaaaattacataaatgtgaacgccacatactatcactaaaaaaaaaaaaaaaaaagcggcc

SEQ ID NO: 162614 - DNA, 1686 bp, Zea mays
  Clone ID: MRT4577_79880C.1
gcgctagctagctgtcgtcttctccatcaagtagaaccagtagaggaagcaggagaatacaagctactgcccttagaaaaaaaaaaccctacgctagctagcatcctctttgccctgagaataaaaagctgctccgggcaacacaaggcattgcgctggctggttatcgacagcccattagccatcctagccgtcgccccctcgacgagaagaaccacctcaaaaccgaacagccgcaaaagaaagctgccagctactctagctatatatacatgataactagaccaggatcgtgaagtaattaatataatgacgaagtcgtcaggggcgctagaacttgctcggagcaccggagggtcgcttagcaaggaccaagtcaaatccgccgttgatcagtatgtgaagtaccacgacctccacggaggcgaacaagaatcaaggaagtcaaattacgctgatttggcaaacaagtactatgatcttgtcactggcttctacgaatatggatggggcgactcattccattttgctggcggatatccgggtgaaacttcccgtgaagccattaagcggcaccagcattttatggcactacaattggggctcaagaagggtatgaaggttctggacgtgggatgtggaattgggggacctttaatagaaattgccagattcagctcaacttcgataactggattgaccaacaatgactaccacatctcaaggggcaaggagcacattttttcagcaggtttgagtgagcaatgctgctccttgaagggggacttcatgaacatgccaatatctgataacacctttgatgcggcctatgcaatacaggctacatgtcatgcaccagaggcacaaggtgtctatagtgaggtctaccgtgtgctgaaacctgggcagtattttgcactggatgaatggtgcttgaccgaccgatttgatcccaacaacgctaagcatttgaccaccaaggctgagattgagcttggcgatggcctgcctgacatccgtaccactcgccagtgtgtccaagctatgaaagatgcaggattcgaggtcgtttttgcaaaggatcttgctcaagattttccttgcccatggtaccagacgatggatcctaactacttttcatggactaacttccaatgcacacgcccaggacggatcatcacccgtgcaattgtcaatacacttgagttcctccgtattgccccagcaggcagcgtgggagcctacaacgtcctgacgagtgcctctgatggccttctaaaaggtggtcgggaaggtatcttcacagcgtccttcttcgtcctgggccgcaagcctctcaaggaaactgaaatagtgaacggcggcaacctttgagctgcaacatgagtatgggactatggggtcgtacttataagagctatgaatcatggccaacgtgttacgtgctgaggtgtgcttaccggtttgtcttatggctcttgcgtgtgtgctgggtcatgttcccgcagtagcatactagcatgtatctgcttcttgtgtgttgtactatgaactatctgaataaatgctgtttacgcgttgtattaatcgcaccatttcttggcaaaaaaaaaaaaaaaaaaaaaaaaaaaaaaaaaaaaaaaaaaaaaaaaaaaaaaaaaaactcgagagggggcgccgtgtacc

SEQ ID NO: 162615 - DNA, 360 bp, Zea mays
  Clone ID: MRT4577_79881C.1
cgggtatccaattgcgccctggagcttgcttctttggtcgctggccgtagcctctgggtggccggaggggttgagctataagaagagatggtcggccaggaccatggcccggctatcggcatcgatctcggcacgacgtactcttgcgtcggcgtgtggcaggacgaccgcgtcgagatcattgtcaacgaccagggtaaccgaaccacgccctcgggggggggcgttaccgactccgagcgcctaatcggagatgcgggcaagagccaggatggcatgaacgctatcaacaccgttttttatgccaagggtcttatcgacacatacgttctgtggtgtgtattgtatagagtgatatat

SEQ ID NO: 162616 - DNA, 381 bp, Zea mays
  Clone ID: MRT4577_79882C.1
ttatcttccctgcccaaaaataattaaacgctcaacgagatggagacgtgtgaaatgaatagattttcttgctgctcaaaacaaacaaagaaaaggcaggacaagaaggcgaccattctcatcaacagggacgagctcggccacacgctacaacaagggcacctacaacaaggtctgcggcgggccgctcctcgggtcccgagtgagcgtccccatcaaggccatcaccaaggctcaagtgatgcgccccaagttgatccaccgggccgagctctaagcacctcgaaatgggaaaaacccgggcccaccccaacgtgaatctgcacgaggccatcccctttttgaccaggatctacttcgccaaggagcccgtgcggagcg

SEQ ID NO: 162617 - DNA, 793 bp, Zea mays
  Clone ID: MRT4577_79883C.1
ccggccgggacccggccgagaagaaataaaccaactgaacactcagttggaaggagctctgagaaaaaaaaagctgctccgggaagaacaaggctttgcagtgtcttgttttggagagcaaaggatcatcgtcaagtgatggccaagtcaggggcgctagaacttgctcggagcaccggagggtcgcttagcaaggaccaagtcaaatccgccgttgatcagtatgtcaaataccacgacctccatggaggcaaacaagaatcaaggaagtcaaattacaccgatttggcaaacaagtactatgatcttgtcactggcttttacgaatatggatggggcgactcattccatcttgctggcggatatccgggtgagacttcccgtgaagccattaagcggcaccagcattttttggcactacaattggggctcaagaagggtatgaaggttttggatgtgggatgtggaattgggggacctttaatagaaatcgccagattcagctcaacatcgataactggactgaacaacaatgactaccacatctcaaggggcaaggagctcattttttcagcaggtttgagtgagcaatgctgcttcttgaagggggacttcatggacatgccaatatctgataacacctttgatgcggcctatgcaatacaggctacatgtcatgcaccagatgcacaaggcgtctatagtgaggtctaccgtgtgctgaaacctgggcagtattttgcactggatggatggtgcttgaccgaccgatttgatccccacaacgccaagc

SEQ ID NO: 162618 - DNA, 351 bp, Zea mays
  Clone ID: MRT4577_79884C.1
ctcacgcgtccgcatccaccacgcacgacacctacccatacctataccataggctctgtgagtgaacttgtaagctgtagatgaggatgagccagcgagcacagcgaggtacacggagctagctcaacatatcacacggatagaagagcaagacgtccgacggcacctgtacctgcatagacatcgtgctggccattatgctgccgccggttgcacgaatgttcaaggcctgctgcctggtagagttctggatctgacttatgcttacattgttcggttacctaccgggcatcatatacgctcgatgggctatcaccaagttgtcggtcggcgcgttagcattgaatgcgc

SEQ ID NO: 162619 - DNA, 434 bp, Zea mays
  Clone ID: MRT4577_79885C.1
ccggggataccgcactccgagcggctgccaacttcaacgctgagatgcgatgctacaagtacacactctccgtccgcgacactcgcaccgtgcgactttccatggaggacaccgccggcgtcttgttgtctcttcctcgctgcggcctggtggtcctgacactttgactggcggacagctgcagtggagggcagcgcacatttgtggtccgacgactacgaccacgcgggagagcgctgcggcggccttaagaccatgaggctcgtcatccatagggtggcgctgctggacccggggagggagaccacgcatgacctcgtgcacgtcctacactgcctgaggtatgctggctacgcgctggaggagctggacgacgcctaccttgtcatcatcgacaaggacacgaacctgtacgccatccacgctccagggcg

SEQ ID NO: 162620 - DNA, 385 bp, Zea mays
  Clone ID: MRT4577_79886C.1
gaaaggccctgatagcacatccctaaccaagggttccatgggtcctttgctggatgcaccaacgcacccgacacacataggtgcatccatggatggatttactacctggtggctacaacaccgtgcgattgctaactgacactgcatccaactaaatttatcagcctgcacaaactacacacaggacctatcgaaatcctgactgcgtaaccgaattctatcaactacttctgactctgaacgaccatttttaaccagtgggcatgagctcttgaaagcctacgacttctaccatgattctacatggattcagcttgatgcacactccccatcttgatcgcggaaacagtcaaacattggtatagctatagttaacctaaacagg

SEQ ID NO: 162621 - DNA, 353 bp, Zea mays
  unsure (1)..(353): unsure at all n locations
  Clone ID: MRT4577_79887C.1
ggtcgcctgtgcccctctgccccttgtccgtcggcatgacaacagggtctaccccgggttaggacccctctcagagaaaacgaaattttaccaaggattacgttgccctggacgcagtgcaatgctataagctactacanatggagcactggtatctaaagaagaattcgagacgctttgtgactacttgactaaggatccatgctactgcaagaaacgaccagagaggtgttgttatatgttttttttgaccgnnttaacaacagcatnatgatgcagggncgcaataaccgtaacaaggttatggtttgttttattattaagcatattttggaaattattaaattgtttat

SEQ ID NO: 162622 - DNA, 601 bp, Zea mays
  Clone ID: MRT4577_79888C.1
cccacgcgtccgaattcttcaatctccatggagcgtggttcaaaatgaaatctctattacgaatgtgggcttcagttggcatgtggttttgtcgtgatccgttatttcattattacacgaacaggtggacgttgcgtatgtaccgttcatcgagaggtttcatatactctattccaatataaagaactatgacatcacaaagggcagacccaaccttcagaaattcatcgaggtagctcacgcggatggatttcaaattgactaggatttatatctgtaatacgttggttcactaacattgtttgagacggtccttttatcctgttgataatgcttcgttgatgagaaactttaactcacgggtcggtatgtctcaggaagtgaacaagatcgatgcgtacacacagactaaactggacccgcagtttttgcttgagcaaacaaagaagcggcttggggtagtttgacactccgtattttcttaattttgttctgccttgataccgatcgatctatatttgttcagctaaattcaaaacatttgaccaaccttcgtttttgaacctccagattgcttaaagcctgtgaccaaggacgagac

SEQ ID NO: 162623 - DNA, 376 bp, Zea mays
  unsure (1)..(376): unsure at all n locations
  Clone ID: MRT4577_79889C.1
ttttcaacccgaacttcattccaacctcggtcgtcggtacaatttattcatcaacttcaaccaancaaaacacaacttaccactacatatttctaactaccaatcctctaaacatacaccaagtttttccacaccaccagacaagcatctttattctccttcaccgtcatacaaacacaaattaaaacacacactcatttacttacctctaaactcaaacttacacacctttcaaattgccttttccgaaccaccattcaattaagccccctccaccatttattccactaaaacttttctgcaacctcccctcccttccctttataataatgaacctccttactactttcattaagtcattaaacttctctttacc

SEQ ID NO: 162624 - DNA, 1160 bp, Zea mays
  Clone ID: MRT4577_7988C.1
cggagtttcggacttggaggtgatctgacctgtgaagggctgagggcggaggatggtggcgggacgaggagggatgggtcggcggcaggagcggcaggccatgatggtgacgttcgcgttggcgctgctcatgggcatcgccgtctacttccgcatctgggcccgccagtccagcgacccctccttcaccgccgacgaccgcgaggagctccggaggcaatttgaacaagcaaacctagaggcgatggtttcggattcggaggtgatctgacctgtgaggggctgaggaggaggaggaggaggaggaggaggagggatggggcggcggcagaagcggcaggctttgatggcggcattcgcgttggcgctgctcatgggcaccgccgtctacttccgcatctgggcccgccagtccagcgacccctacttcaccgctgacgaccgcgaggagctccggaggcaatttgaacaagcaaacctagaagccatggatgaatctgccgaatggaggatgcaatatgacaaagaagtagagaaaaacaggcagttgcatgatgagctttcaaaggttaaggcctcattagctggcacagcccggcgtcttgagttgttgcagaaggataacgagttgcagaagaggcagactgaatcgctgaggcagcaatgcaattgcactctccattgaaagttatgcaagattaaggacatggaaggagtttttcagcttctttggcggattagctatttttttccaacaccaagggaggaaaaccagattgagttctaggaatgagaactggcatatgaaaatgattgagaacatatatagtgtatagaccatagtgttcgtcctttataccaatggtgagctgcacagttcatccaaagtgatcggtgggaacttcattggtgacaatgcaaagcgcagaagtcaaaacgtaaaagatggcgccatatggttataagctcctaatttctgagtgattttgcagtggcagtttgcatgagtacctgactatctgtagatatacattgtacccggggtgcaaaaagatggtgacaagtttgaaatctgggaccgtgccaatacttattggcaggaaacttaataatccatattgtattatcgataaaaacaaaaaaaaaaaataaaaggctag

SEQ ID NO: 162625 - DNA, 525 bp, Zea mays
  Clone ID: MRT4577_79890C.1
acacacgcacggacgcggggtgggcgaactggcgttttcattccgtgtggagattaactcacgcccatacacgactcgagacgggttgtgagcccgctttttcggccagcaagaccggctggggtcgtttgctaccacagcagagcgtataaattatactccaatgaacggcggggggggtagaagctccacactgcgggcgtgacatactacggacccggtgctggtagctagccggccggaaccgatccggaccgacgacgacgaggaacggggtttatacagctataagctccatttccatttggtttatttttatagggcggccggccgtcttcttctccgagatgatagatagatttgctcaagggtgtgtgtacgttttactttgacatggactcaaggcagcgggtgcttcgtgcccgtggcatactcctccagcctcctcagggcttggttgggagaacccggttggcccagctggctaaccatggggctgccgaagatccccccgggagggcccca

SEQ ID NO: 162626 - DNA, 425 bp, Zea mays
  Clone ID: MRT4577_79891C.1
tttccggaaggagggaactcctcctgggttggttgttgttagtagaagcttcgcccgcaacggttgatgacaactccggtttttactaccagttggttttaatgtggccggaaccttactggaggcagacaagcgctgggggctgaaggccgacaaccgggttttggccgggccgcgacttttacataacgggcttaaccgtccttaacgcaacaaccgaccctgaattgacggattgcagaaccaaagttctttacaaccttaacctgattaccggattcaaaggcctgaataagtcctggagcaacataaggtgcccaagcaccaacgggcaaagcagttggaaaaacgcctggagaaaggccggcgcctgttccggcctaagcaagaaggactacttgaggactgccctttctttccgtagc

SEQ ID NO: 162627 - DNA, 1764 bp, Zea mays
  Clone ID: MRT4577_79892C.1
caatgcaaatctggtctacaggagtgcatcacccagagaaactgttgtgccttttaatactggcaatgatgatgcagcagctgaatgctttagttctggcaacctttctcagccatctgaaatgccgggaagcaaccttatggtaaaaacaagctccagagctatctttcttgataacaagcacaatgaaatgtctttcgttctttaccttttcgatgattccatgagagcagccagtgagaactcacctcctccgaagctggtcaattgacagtgcagcatggcaataagagaaaatcaacatctaaggatgaatcaaaactcgtcccagtgaatattgccaaacccaaattaaaaaggtcttctggtagtgagaactccacagcaaagcctgagagtgccaaaaaggccaaacctgacgtaacatcaccaataggttctttatcagaacacaaaagaagtttaccccctgaaaagcataccaatgataggttgaacaaggagacggggaatgttagccgtgatgcttcacgagatagcagtcctgccatgaaaggaagaccttcagctcctggaaatttacagaggatagatcagagcccaaatttacctatcccaacaatgcattctgagggaacaaaaggaaatgctgttaaatcaagttcaaagaaaaaatcagataagatgcagaaaccatggcatggtattgatggtgactttggctcatgttattcacatggtgtagatcaccatgccaattttgatggctctgatgattcttccacaagaaaaaggagtagacatgagaatcctcttattgatgataaaatgcttaagcattcgaaggacactaatgctaatataaattccatgaatttaaccaaaagttccagagaaattgttgtgcctgatgaggtaactgcttttcctgaatctaatgaaagtaatggtgagccatcaaattcacaaagagataatgttgagaaatcaccttatggtaaaaaaaagctccagagagagctttctgatcttgagttgggtgaacttcgcgagacttctttggaaaatgatgatggaaggataaggaagcaatttgagagaaatagttcctccaagtcgcttgatgctaaactaactggtgtaaataacttctaccccagtataaatgacaggaagactcctgtaaccgtctttcatgataagaggaaaccttcacctcaagaatatggaaatagaggccatgtaaaccaggaagggtttcagaggaaggcagcagtgtacgcgtttgatgataataggcctcaacaaagagagaattttccagagagcctgcatttgccaaagattgataattcagattctgagaacataatgtatccagataggtcaggagaaaaaacaagcaaaagggaaactaggatgacacatggtggaatgctagagtatgctgatatccagaagaagaaaacaacctcaaggcttccacagaatggtactaataatgtcagagtgtctcgaatgcagaaatcaatatccccatcagataatgatgaaagaagtaggaacgactctttgattgagacaaagacaggtaggaagagaaggggcagttcttcagatgatgataatttgtttttctccaagtatgataaagatgctccggagcttaaagatccaataaaagatttcttacaatacatggattatgtgcaggagttcaatgagaagtatggggcttattcttatttgaatagtcagatagac

SEQ ID NO: 162628 - DNA, 661 bp, Zea mays
  Clone ID: MRT4577_79893C.1
atcttctgcccgcagcatttctcctctcatggaaggggattcagcagaggaggagctcatgacaagacggagcgtacggtacaacactgcccgatccctccggggggcaacttcgcctacaacatgcaggtcaaggaccagatcgggagctactactacttcccttctcttgcgttccataaggcggctggcgtttacagtggcatcagggtccttacccgcccgaggtatccccgtctccgttcaaccccgctggcggtgatttcaccatcttggccggtgactggttcaagctccaccacactgacttgatagggattctggacagtggtaacgaccttccgctccctgacgtgctccttatgaatgtccatggctcgaatggcaagaggttcacagtagaccaagggaaaacatatcgtgtttcgggtgacaaacgtgggcatctcgacctcggtgaacgtaaggatccgggccattccttgctcctgggggaggtggagggatcgctctccatgcagaacacctactcgatgctcgacatccagctagggcagtcctactcggtcctcgtgagggcggaccctgcaccccaggagtacacgatcgacgcctcgacgcgcttaaccaaccccgagtctcccgagaccgccatgctcca

SEQ ID NO: 162629 - DNA, 315 bp, Zea mays
  unsure (1)..(315): unsure at all n locations
  Clone ID: MRT4577_79894C.1
cccgtccgggaactcgagcaccggggcgccttcatccccaacccatttttatttcancgagcacaaagagcaccactggcgggtggggggacaccaaaaaacggcccaggagcccgtaccacaacgcacacgagcggatggcgcactacaagcgccagcgcgttcggtagaggaacgtgccatgctgagctctcatgccacatggccgagcagtgccttcactgaaaccgacactgccgagagcccaccacaccaccggagcatgcatccgaaaagccctccactcaccagagggctcagggacggcacccacag

SEQ ID NO: 162630 - DNA, 352 bp, Zea mays
  Clone ID: MRT4577_79895C.1
cttcttggtttttttttttttttgttttttttttttttacccccacggaaccggaggttctggttctctggggggggccctgggggggtgtaaacattttttcgggtttatgacctcgggcccaagtggaaaaaaaccgagaacctttggccgcaatgacgctttccttcccaggctaccgtctttaatgaacctgggggtagttttgcaaagctgtttgttctttcgttcgggaaaaaaggcttcgaggccaattgggttcaaaccgcaaaccgtggcacaaaacgaacataaaatggttttgtgccgagaacaaaaactactactggcttgagattcccgactcgggggg

SEQ ID NO: 162631 - DNA, 392 bp, Zea mays
  Clone ID: MRT4577_79896C.1
agccatgctgctgcagaagaggtttggagacaacacacagaggacacaacagggccattaaaccaacgaagcctcagccactattcatgacacacaaaccacagtatgtcattagacgacgacttccatatagaggtacaccataggggaccagacgacgcatttacccacgtgcagctgcatgttaaatgacccatggcttactgaccaccgtttaggcgtagcaccaggtggagagtgctctcctcctgggtgttgtagtcagctagggtgcggtcatcctacagctgcttgccagggaatatcacacgctgctggactgggggaatgccctttttgacctggatcttcggctttacgttgattacggtgttggagctctcaacctccag

SEQ ID NO: 162632 - DNA, 391 bp, Zea mays
  Clone ID: MRT4577_79897C.1
cgggataaatctcaaccaattttttggttttttttaggaaacacatgccggtttgggggccccattttcgggtccatctcatttgtaatctaaaagatggcccctccaacggtgggttgctgcctcgccagggcagggttcttcaaagagaaccggttgtttggcagcaattgttgctgctgtgggaaggccgcgccccatgggtttgcccctgccaatgggttaagtaactgttgtcgctgttgttggtccccaccagagttcgccttagttagttggttgaatggaagcagctgttgccagtgggcaacagggtttgccccagcttgctgggtttgggctggtgcaatttgttgcaacaatttttgttgccggtttttaggtgccttgg

SEQ ID NO: 162633 - DNA, 386 bp, Zea mays
  Clone ID: MRT4577_79898C.1
cacgttcccctctccgcccagtcctaccgcagcgcgttgctcagtaccccagccactgcccgctagcccccccccccggcacacacacacacccatgcctcgccggccttagcaccgcaggcgacgtccgcgcgtaacttccacgccttcatggggtcctcctccccatcactcgggggcagcaaggcgaccgatggggcacactgtccaactggactgccttgctccaggcctaaccgaagtcattcgcgggctgtggagtacttcacccactggtgcaatgggcacaaggccagaaggacgtggtctaaccacgcgatgcaacccaaggggataaaggaggctttaggggccgttttcgatgactagactgaagttcttgttag

SEQ ID NO: 162634 - DNA, 313 bp, Zea mays
  Clone ID: MRT4577_79899C.1
aaaaaaggatgaaagaggggcgcgatgacccttttagggcccggcaattttgatttattccaaacaagacacaacggcctttaagggaaatttaaaaaaaagacttggcaaccataagggggcagggaagcgatccacgatccacttcaatgtccaaagggagccagggatccaatctcactcagggcctgcaaatttggagaggggccacagtttcgggcattttcttccaccccgggacctggaccaggtccgggatgccctttaaggccgggagccggtttcttgttttcttgggaggggggattcccca

SEQ ID NO: 162635 - DNA, 504 bp, Zea mays
  Clone ID: MRT4577_7989C.1
cattgggtacctcgaggccggccggggccttcaccgcagcacgctggcacgctgcgcatatataaccagccgttgcctcctctcatgctcctcgtttccaaatgccgtctccgcaccgtcacgcacgcgaggccagactcagtctaagcagaccctagctgacgatattaggaaaaaaatgttgtccccaactccgaaccgaacgaaggagctctgccagccgtagagactgtccgatgtacagacagagacgcgtacgcagagggaactggcggacatgtcccgacatcgcgaagtgcgcgctataccgcaggtctgagtacgcgcgccggccggcgcgtcctgagcgacgggggcttcgaccgcgccagcagacagcgaacgccgctcgcggataatctcacgaccacgggccgacgatacagctgcctcgccacgcagcacgcacgcagacgacacatcagcatgacgagtgggtatccttcggaaatcgtcagagagaag

SEQ ID NO: 162636 - DNA, 488 bp, Zea mays
  Clone ID: MRT4577_798C.1
acgtcgctgccgcgtacgctgcatgctctctatcggccgcccgttgtctttttttttttttttttttttttttttttttggggtgttttttttctttttgtgtgttttttttttcgggggggaagaccgggactgtttcaaccaacccgccactttggattattagcccttttttcattcctttacaactcaaataaagaaacgtttcagcctttttttttttcctggggaccctgcaacgaacaaataacttaacgatgctttttggggcaaacaaagggattaagggtctacaagggctgaatcctttggatctgcgactcaatttgggcgtggttagctgaactattaaaagggggctcaatgaccaaacttttgatcttatgaagggactcaattgcaatatcagtaggggtcagcttaaaaacatcatcatgaccttggttacatgccaactttttcagagaaacccttacatttgcatttgc

SEQ ID NO: 162637 - DNA, 377 bp, Zea mays
  Clone ID: MRT4577_79900C.1
aaaaaaaaaaaaaaaatacaaaaaaaaaaaaaaaaaaaaaaaggcattaaaaaagggcggtccatacgcaacttaattttcaactcagcaaatcaaaaaaagtgggcgacatttctataattccttactctcaacaactcaaatgctgggatcttatgttttcaatttccggccttacttcattaatctgtgaacctttcttacttgaattaatccttactattcatttaacagtaacgattaacatatctgatatctttatgttcaccgaatttgttttccttgagtataaatatcaacgcctatatttttaaatttactgcctttgcctgtatttttaacggtgaacttttattgccctttttttaattacatat

SEQ ID NO: 162638 - DNA, 325 bp, Zea mays
  unsure (1)..(325): unsure at all n locations
  Clone ID: MRT4577_79901C.1
gtttattacagaagtggataaggccgttagatgggctagaaaccattatctgtcatcaacaactcttccttctatcaagggagacaagttagtcattccccatgagagtctggatatatcaattgagaggctgaaggaacatggtataacaactaagaaatcctctcaaaatctgaagggagggcaggttgcagttcgttccactaccgggtacccaaacggccacagggtaaaggagccccgccgggcagcaccacacaggtgatagacactgcaggtaatgccccacctgtggtgtctgaccgnggtgcgctattacctagct

SEQ ID NO: 162639 - DNA, 616 bp, Zea mays
  Clone ID: MRT4577_79902C.1
tctttaaatattaatagagctcctgcagagatctcagctggagagagagagatgatgtaatagtggcaggagaaagaataataacagaaaagaaacggacaataacaataaccggaacgcaatgtagaataacaagagtagtctctatctcctctcgttacttacctttgtcgtttaattaccgattacgatcgagattacatcatgcagaggtatgattatgagttactacatcaatgtgatctcgacgataacacatcaactttgccaatacaacacaaagatgcatgataaggacaatcagaatctataagacgattctcgtattaacctccaacttgataacgtccaaaacgaccacaatgagggtcgtaacctatgagacggttacttcttgggctgtcagaagagtgaactctgtcgcggcctagtgttaaaggaccttgacggaagtttaaattgtctcctaaccgtcgctggtggactacacctttttcttctcccactgggtactaatcctctcgagaagagcgttggagacgacctcgtatgtctcgatagtcctaggcaaggttactacatcgacctccgtagtggtgacattgaaagtaagcgg

SEQ ID NO: 162640 - DNA, 1122 bp, Zea mays
  Clone ID: MRT4577_79903C.1
gccagccctatttatcttttgtacgtacggtgtctgccaagccaagtgcgaaccgcaaccacccccgcgccgagcgagacgatggagacgacgggccgggccgcggcggcggcggcgtcgtgcacgactaccgccaggcgctgttcccacactacgagcggtggaggaaggagtacggccccatcttcacctactccatcggaagcatggtgttcctgcacgccagccggtccgacgtggtccgggacctctgcctcagcgtgtcgtcgctggacctcggcaagagctcctacatgaaggtcacgcaccggccgctcttcggcgacggcatcctcaagtccagcggcgaggcctgggcgcaccagcggaggctcatcgcgcccgagttcttcccggacaaggttaagggcatggtggacctcatggtcggctcggccacggcgctggtggcgtcgtggggggacaggacgggcggcggaggcgtggagctcaagatcgacgacgacatcagggcctactccgccgacgtcatctccaggacgtgcttcggcagcagctacgtcaagggcaagaggatcttcgcggcgatcagggagctgcagaaggcggtgtccaagcccaacctgctggcggagatgaccggcctcagcttcctcccgacgaggactaacagggaggcgtggaggctcaacagggtcgtgagggacctggtgctggacgtcgtcagggagggcggggacgacgacaggaacctactgaacgcgatgctccgcagcgcttcttcctccggtggctgcagcggcgaccgcgtggcggtggaggagttcgtcgtggacaactgcaagaacatctacttcgccggctacagaccacggcggtgaccgccgcctggtgcatgatgctcctggcgctgcacccggagtggcaggacctggtgcgcgacgaggtgcgccaggcatgcggcggcggcgacttcgcgtcccttcacaagatgaagaagctgacgatggtgatccaggagacgctgcggctgtacccggcagggcgcggtggtgtcaaggcaggcgctccgcgacgtgaccctcggcggcgtgcgcgtgccggcgggcgtcaacatctacg

SEQ ID NO: 162641 - DNA, 614 bp, Zea mays
  unsure (1)..(614): unsure at all n locations
  Clone ID: MRT4577_79904C.1
caanngcttttttttttttttatttttttattttatttttttttttttttttttttttcctttcctgtttttctttttttagggcttttttccttcccctggggggcgtttcttgtggattcccgccccccacccagggggggggaagggggggccccgccggccccggggggaaaatgggggccccccaccactccccccaacctaccagggcagaagcctaaaagggaaaacccggggggcctaaaggggcagccaacccacaataaaagcggggggcccaccggccgctttccaagcaaaaaacccggccggcccgccgcaaaaaagaatccgcccaccccccgggagaggccggttgcctaaggggaccccctccgcccccttgaaaaacaaactaccgccccccggccgttaggcgggggcagccgaatccccccccccaaaggggggaaaaccggtctccccagcatccggggaacacccaagaaaaaaccggggaaccaaacggccagagaagggcacccaccccaaaaaggccggggggcggccttttaaccaaggccccccccccccggccagaaatacaaaaaacccccaaaaagccccagggg

SEQ ID NO: 162642 - DNA, 435 bp, Zea mays
  Clone ID: MRT4577_79905C.1
ccccacccggtaacggtgacgactaggggactactactgctttcccagtgggagacctggaatactaagacacctgaccgtacgcctaccctatatcactacaatggtttttattgttccataccttgctgtattaggagtgtctagagccgccgtcctattccggcccagagcacggaacaacacaccagttatagaacctggattcaaactgagagtggattacgaagtcatggcaaggttatgttgcttaaggaccaggtgctcctattgcacgaagaaagggtcaataacattcggaaaaggtaaaggctgtaaagggcaagttaagatctgatatggatataaccttgtaagagggatgacaaattatccaatggaggactattattttgccaactttgtgttgttaaaagaaaccaacttgatcttttt

SEQ ID NO: 162643 - DNA, 351 bp, Zea mays
  Clone ID: MRT4577_79906C.1
tccgtaagcccagaaggcacaaccttccagccttggcaaactcgtggtccggcctgccggtgagctacaagtgcaagggaaagtcccggaatctgaaggcgcggcggaacttccgtttcttggggttcaggatcgacgacttggacttggaaatcaagggggaccgcctgggaaagccgaaccagggttacggcaacttcaccgacagcctccctgccaacaagtgccgttacgccttttacgacctcaacttaaccaccgtcgagatctgccaaaaaagcaagatctttttcttctcctggtcccctgatactgcacgcacccggatcaagatgctgtacgccacctcca

SEQ ID NO: 162644 - DNA, 804 bp, Zea mays
  unsure (1)..(804): unsure at all n locations
  Clone ID: MRT4577_79907C.1
ctggccgggcgaacgatgaaaccggccggaatccggcatcccgatcgtgtctctactctgcactcctcgattcgattcacccgacccagcaggcgggaaatggcgaacggtggggccgaggcatcgccgctgcggccccggcggcgcgccggctccagggacccgttcctcatcgtgtgccgcttcttcggcgtcgtcacggccgccgccgcgctgctctgcgtcgccgccaacgtcctctccgcggtctactccttccgcggtggcgctgacatcatcggcggcgtgttccggtgctacgcggtggtgttctccgtcttcgtcgccgttctcgagaccgagtgggcacccgtcatcaggctctggaagatatttgagtacttgccggcaaggggaatgctgcagatctttgttgctatcatgactaaggcgtacccaaatgttgagaggagcgagctgattttgatccaggagatcgctacctacatgcttcttgtgtgtggagctgtctacataatcgcaggtatactatggtcttggtgttttaaaacgttctaggcagcataaagcaacatcacaggagcaagcggccaagggatctggaggagctagagaagaggagagaggagcttgagtctctgttaactgctgagcggtcagagatggcctgatgtcgacctaccatctctcttctggtgtaattaagtgttttttttcattctctggtgatggttggtagcgtgcatactgctttgccgtgaccattttgtntcagcatggtgntttcagctgggttctagacat

SEQ ID NO: 162645 - DNA, 639 bp, Zea mays
  Clone ID: MRT4577_79908C.1
ccctgttatcctgagctatgtgagccttaccctcaataaaattagacaagcttttatgggcattaagctcgacattgtctcccttttggaagccaatgctctccttaatgccagggcgtctaccactatagagtatgcttctaacaaatttaaaattttcattctctatctcatgctcattaattttagcactaagttgagctatgtgatcattttgttgttcaattaaagttaggtgatcatggatagcatcaacattaatgtctctacatctagtacaaatagtaacatgatcaatactagatgtagagggtttgcaaacatttaattcatcaatcttagcatgtaacatgacattctcatttctaagattggaaatagaaacattgcaaacatcaaaatctttagccttagcaagcaatttttcattttcaattctaaggctagctagggaagcatttaactcatcaatcctagcaagtaaatcaacattatcatctctaggatttgaagttgaaacattgcaaacatgtgaatcaaccttagcatttaaactagcattttcattcctaaggttgtcaatcatctcacggcaagtgcttagctcactagataatttttcacatttctcaatttcta

SEQ ID NO: 162646 - DNA, 190 bp, Zea mays
  Clone ID: MRT4577_79909C.1
attcggctcgagagtatcgctgtgtgcttaacaggctgaccattaccatcgtgcacaatgtttctgggaagcggttgaagatggacgcacaggctgtgcatgctgttctgacggtggtaaatgggattgatttgtctttcatgcaggcgtggctcaacgaccacgcactgatattcagcagcaaccaacg

SEQ ID NO: 162647 - DNA, 336 bp, Zea mays
  Clone ID: MRT4577_7990C.1
gagtagctacaatgacagctttgatccatgctgtagaatgcacgtaaggaacactggtgcaagcatgctacatgcgtcaaaggaattacgctgaacagagaggcatgtacacatattaaatgtgtgaatcaagtgaatgaatactcgacgttacaatgataatgtacagcagattaaccacatcgcgtgtggctagaggtaattgacgggaggagctgcttgggtaatagacacggttttaaagggttcacataattggacgcacctagatgtttttatcactatagggtggtgattgtggaaaaaaagtaagtagtgagcgcattaggaattact

SEQ ID NO: 162648 - DNA, 1453 bp, Zea mays
  Clone ID: MRT4577_79910C.1
gccggccgggccgggaacgcgtctctctgtaaaccacagtccacagccccaagatcgccgcgctctctccaacatctcctgaccaaagcgaatccagcatcaccggggtccaggaggcagcatggctgacgaccagcagccgccggcgcaacggtactggttcccgtactggaccgcgcctgctcctcggccggtcgcccgcccgcagctgtcgaggcgggaaactcgcccggcaccgtcacctcctgcaacagcgtcgccgtcgcggcggccgtcgcatccgcaacaggcggcgacgccggcatccagaagcgctggcagtggtgtccctgatccacctgcccagccgcagcccacgcggctgtccagcaggccatcgccgtcgccttcccgcgctcagccactgtcgcccattagagagcccaacgctagggcgccggtgccgtcaccggcaccggttgccaaagagcacaagcagccttctcctcttcatcataccgagcatggtgttcctaagcaaaaagacatcaccgttccgcaagagaaaaccatccatgaaccgcttgtagcatccaagacacaaacaaagaccccagagaaagaaaaagacaaggaaaagggaaaggagaaggagaaggaaggcagccagctgcacaaggaaaaagataaggagaagaaagacaaggagaaggaaaaggaaaaagataaagagaaggaggatcataaagataagaaagacaaggatcacaaagagaagaaagaaaagaataaagagaaggaaggcagccagctacacaaggagctcaaggcgggtgtcgccgacatggtgcacacgctcagctcttcggcaccgtcatccgggggcggccacgagcgtgctggctctgcggcggcgggaacaacaatcatcacgctggccggcgagaacaagggcacgtccatgaaggtagacagcagcgccgtagcctacggcacggcggacgcggcgggcagcaaggagcgccgcggccacaagctcgacggcagcgtcatcgtgagcgggaaggagcaagctggggccggcaaagggctgacagctttcgtcaacagcaacgtgcaggtcatcaacaactcgctgctgctgcagagctcctgccacggcggcgacctgggggtgcacctcaagctgtccaccaaggccaagaagaaggacggcaaggaagccgggggcaatagtggctctgctgctgcgccaaaaaaatgatcaaccttcatccatatcgatggcgcgctgcatggctatcgagcagtgactaataattatttgttaagtatcaatcaaaacagagagttggacggacctggttagcgtcgattatttatatgtacaacatgtatgtgagttcgcaaaaattcgtgctgaatgatgcctgtaaaacctaacaagatgccaaaatgggctaatcaagcaacc

SEQ ID NO: 162649 - DNA, 309 bp, Zea mays
  Clone ID: MRT4577_79911C.1
ggccgggccggggtttagtccgcgagcgacgcccatggaggcgtagtaggaactgaagctgcgcatccgggcgcccgttaacgatgctctcattcgctacgatgcgctgcatcttgtcctcaggagccacctggtactactcaacaatgagagcttctcacggaacgacctgtcgtcttcttatcgacagagtcataacataaggcgcacccttagctttactataccctctgcaagagtactgcatcaaaatgtagaccaaatgtgtgagcccctcgaaaatcccaccaagggactggatcccctctg

SEQ ID NO: 162650 - DNA, 252 bp, Zea mays
  Clone ID: MRT4577_79912C.1
tcgatcgacggttgcgtgaaccgtctaggggggttcttgcactctgaagcggcttccagatctaaatatttatgctcacactagctgtggattcaaggccaaagggacaagaagtggatatgcattacttgcatgagatgttttaattcatgacaggaggaaaccaatacctggtgatagcatgtcttgaaatggagcaagggaaacatgcgaggtcgacactgttgcggaggaggagacttgtattattgg

SEQ ID NO: 162651 - DNA, 386 bp, Zea mays
  Clone ID: MRT4577_79913C.1
gcccggctccgcgtcgtagagttgttttcgctcgcctgcttatcctagatgacctgcaacaacgcgtccgtgggatctgcccgcatccacccaccggacatatatcaactgactaacatgaccggatctgagaacctctcgagcgcagtgatggaaactcacctctcagggacgcgctagcagacacgggaaagcccatagaaacaaagacggatgctcgcctacgacatcctagacagatccacctaccaggcacatacgatatgaaagctctcctgctggcgcatcggaacgactataccttatatattagacccgttaaccatatcatgatacaagttggagaagattgacaacgaggaaaccgagcccgctgcagaagcgct

SEQ ID NO: 162652 - DNA, 544 bp, Zea mays
  Clone ID: MRT4577_79914C.1
ttatgtcttttctttactatctctactagtaccctgtttttttgttgcccttttaagtatactgttttctttttttcacaaaaaggcacaaaccgcccgctgctccttattgatccctaaccctgagtcccccgccaggctcaatggagccactgacggcccccaagaaaacatacccttaaagctggggaacacctcaacccactagactacaacaacgttttcttctaaacccaacaactgggttccgagctcctacaaacgaaaccattcactgcccctgtatggtgctacaaaataccaaacaaaacattcctaagctacggacccggtatcttggcctgtcctctatccactggacaaaaatttaatggtctgacaaattcataccagcgcagggaccactttacaccagcacccaatgcccacaccttgttaaaaaaaaaatccccctggtatacgaacattttttttaaggcaacaatagcattttttagctcccacaatattacatcacgcgaccccatgaattccaaagctcaaa

SEQ ID NO: 162653 - DNA, 484 bp, Zea mays
  Clone ID: MRT4577_79915C.1
attcggttcgagggcaaaggtagtgcctgcggtttgcggaacgaagaaagcaactatcatgttgacatggggagacgatcttgagccaatagaccctatagtagaagcccagattacgcaagacccaatcagtgaatggttacagagttgaaacatggtgggtttaaacatgatctagagggcaggttatgagttgacccaacagaggcggcttatgtcggcaagacagagctgggatgccagatgatgccttatagtctattacagaaagcgctgacggagctgagtctattataaacatactagctctgagactatgagtagaatggggccggtctttgagaatctgcatttatcttaaaggccagggaacctctctgttctaagcgtatcataaacttgctcaaggtgtggcgtctccgacataatgaaccattacacacacgatgtaattagctaccggatctggtatgttgacacattt

SEQ ID NO: 162654 - DNA, 435 bp, Zea mays
  Clone ID: MRT4577_79916C.1
ttttgatgaatggatcgcgtgaggagcgtctaaagatactgtactatatctactacagataggaggtcaaaattcaccaagccatatagtgatctgcgtgaaggagaagcggcataagcacaacgggcaggaacagctaccggaaggacagtggccagaccggctgaggaagatacccacttgcggcggcgtgcagagccacggactagaacaggcggaacgcctgcaagtactccagcgctacgctagcctacaggggccagaccatagcactgatgcgcgtcagcaccaaaggaacctgatgcgaacaacatactacatgtccatgcgacggcaagcatagacgatgtgagcttgattaccacgtgttgatgacgacggcgaccatgggcatgtgcctgttcctggaccttcaggtggggtggcgaacgccga

SEQ ID NO: 162655 - DNA, 237 bp, Zea mays
  Clone ID: MRT4577_79917C.1
atgtgcttcatccgacgactgattgctcagcatgctgatgctctagctagatgatatgtgcctgatgcgcagcgcgtactgtagtcctcgcctgccccctcgggcgcttctggcagcgagcagtgtgttgtgctgcgttgtgtgggtgcagcacggcagcaggctagccatgtgccctgctgtgatgtgtcaccatccatctataataatcttatatctataccccaccttttgggt

SEQ ID NO: 162656 - DNA, 477 bp, Zea mays
  unsure (1)..(477): unsure at all n locations
  Clone ID: MRT4577_79918C.1
gcgttcggccgccatggctaccacgactgacctggggttcgaggccacggatctcctactgggcctgcaccggcgggggcatgaggaggggagccggcactgctcggctaggggaggagctcttcctccgcctccggcacgagggcttcggcgagaccttgacctgatactgaacctggagccaggggccgaggatcaggcggaggaggaggaggatgaccacggcgttgctgctgcccttgagatagaggaggaggccggtaacatgaagcaatcccctagccaaaacagcgactccgccgccggcccctgcgagctggctgacctcgtcgagaagccgtgcgccgnctaggcatgacgaggcgtggatacgacaccgaagcctttggttcttaagaacatcatgtacgatgcatcaccgacaagggcgctcgctatcgcaacggagactagtactaggcttgggatggctaccaa

SEQ ID NO: 162657 - DNA, 319 bp, Zea mays
  unsure (1)..(319): unsure at all n locations
  Clone ID: MRT4577_79919C.1
cttcttgctttgtttttgggcaagctggtgccagctgctcggtgttttctgtctgcttctttttgtgttccccttcccacgccgccccgggtcgcggctttgttttccctgcctgtggctggctccgactggcacggtcccgcccccctctttcccgccgggggtttccgctgtgttcccttctgctggcctccgccgggtgatgcccttccgctgccttttcctggtgctgccccctgtgtttctctttccccttgntttttttggcccctttaccccccttggctttccccctttcctcctttgggttcccccctgt

SEQ ID NO: 162658 - DNA, 436 bp, Zea mays
  Clone ID: MRT4577_7991C.1
ttattgggtacagggacacgaaacgataagagaacatacgtggcattgggacaactggctcatatgaagctgtacggaagctcaagagccaccgaacgaaacaacgggggcactcgacactgatacaagatgagtcctatctaccagagcgtggacaacaactttccctgcggtcaaccactggaaacgcgattacctcggacaagatccgtatggacaggcaaccagctctgctcgcactatgactaggacctctccgaatcaccatcaatactaatggtacgatgatcgctgacttcaggcacagtggctgatggaaggactactctaagaaacatgaagggggcatgattggagcaatggggcggatagccaacactgcgctacacagaactccagtctcttccaaggcctcctcagttcccggggtggctca

SEQ ID NO: 162659 - DNA, 213 bp, Zea mays
  Clone ID: MRT4577_79920C.1
gcccgccgaaagcggggcaggccacctcgcactcgcgcgcgggggggagaggcacaggcagcacaagctctccggcaggcccaagcaggagcaggcgccaccagacggcaccaggagcgccagcggcgacaccgcccgcagaaggcgacgacagcgccagcaggacgagcgaggaagccgcagacgcgagcgccaacgccagcaggggggggg

SEQ ID NO: 162660 - DNA, 478 bp, Zea mays
  Clone ID: MRT4577_79921C.1
cccctccccccccccccccccccccccttttggagttttggggcatcaaaattccggggtcctcctttccctttttttacaacctttttccttgttttacccggacatcagctcaaacaaaaaaaaaccaaagaagacgagaagctaatcctagtttttagaaaactaaacaacgaccccgttgccgggggaaacgggaacgggcaccggggaacgcggtcgccagggggctcggcccctgaaccgggcccggggggggggggggctcgccctcgtacgtaaccaccagaatggccgggtcgtcgggggcccgctccacgggcttcctcgccgggcatccccgcacagggctgcacttgtagtacccccgggggaaaggggagcccttgatgggctttgggccgtacttcctccacgagaactcgtccggggggatgtcggcgacctttaagctgatcgccggcactttgatgctcct

SEQ ID NO: 162661 - DNA, 265 bp, Zea mays
  Clone ID: MRT4577_79922C.1
gttgttcaaactgcaacggaggggagtccgggggtgtccgttggtcgcaaccggcacattcatggccggttgggtgatccacccctcaacataaactggtatcttcttgctcactggtaaatcggtgtctcgaactattttgtctggtagtcgcgatcggaggtgtcaaacgctctcgacacccagtgatcctaagaacaacatgggcagttgcgaccgaacggtctagagggctataccctcacaggctgttactgaggatttt

SEQ ID NO: 162662 - DNA, 1407 bp, Zea mays
  Clone ID: MRT4577_79923C.1
ctaagaacggcaagagccagctctgcctagcagcagcgcacagccacatccatggacgccagcccgaccccaccgctccccctccgcgccccaactcccagcattgacctccccgctggcaaggacagggccgacgcggcggctaacaaggccgcggctgtgttcgacctgcgccgggagcccaagatcccggagccattcctgtggccgcacgaagaggcgcggccgacctcggccgcggagctggaggtgccggtggtggacgtgggcgtgctgcgcaatggcgacggcgcggggctccgccgcgccgcggcgcaagtggcggcggcgtgcgcgacgcacgggttcttccaggtgtgcgggcacggcgtggacgcggcgctggggcgcgccgcgctggacggcgccagcgacttcttccggctgccgctggctgagaagcagcgggcccggcgcgtccccggcaccgtgtccgggtacacgagcgcgcacgccgaccggttcgcgtccaagctcccctggaaggagaccctgtccttcggcttccacgacggcgccgcggcgcccgtcgtcgtggactacttcaccggcaccctcggccaagatttcgagccagtggggcgggtgtaccagaggtactgcgaggagatgaaggagctgtcgctgacgatcatggagctgctggagctgagcctgggcgtggagcgcggctactaccgggagttcttcgaggacagccgctccatcatgcggtgcaactactacccgccgtgcccggtgccggagcgcacgctgggcacgggcccgcactgcgaccccacggcgctgaccatcctcctgcaggacgacgtcggcgggctggaggtcctggtggacggcgagtggcgccccgtccggcccgtcccaggcgccatggtcatcaacatcggcgacaccttcatggcgctgtccaacgggcggtacaagagctgcctgcaccgcgcggtggtgaaccggcggcaggagcggcaatcgctggccttcttcctgtgcccgcgcgaggaccgggtggtgcgcccgccggccagcgccgcgccgcggcagtacccggacttcacctgggccgacctcatgcgcttcacgcagcgccactaccgcgccgacacccgcacgctggacgccttcacccgctggctctcccacggcccggcggcggcggctccctgcacctaacgagccggccgtctctttcgccggggcccgcgcggggttcgcccacgtggtgatcaggtggcagacatgtggcccacgggccccgcgccgccttccccatttttggacgaccctactgctactactactagtgtacatatgcaaaaaaatacatatatatataggtactttctcttaatatatttatatataagc

SEQ ID NO: 162663 - DNA, 437 bp, Zea mays
  unsure (1)..(437): unsure at all n locations
  Clone ID: MRT4577_79925C.1
gagtgacancgattatggtcatctggtaccttgccccataccaaacaccacgaggggcgagagccctggaaagagaaaggaagacgccacctagaagcaaacgacacaagcgggaggccaccaaggcaggaggggcacacggcatggagagagaccggacgacaagccaggagccaagaagagcgcaaggagctgcaaacagaccctgacaccacgagcagagcagagaaccgaaggcgaagacatgccccactggcaggcgacacaaagggggccagaggaaagccaagaccacggcggagcatgcccagaaacaatccacgaaccagcagaaaagcccaaccaacgcccaaaggcggcaaagcgcgctagggagttacaaccaaacatcaacaccaacgggagcgaaggacacgacctcaggaaagaccacggga

SEQ ID NO: 162664 - DNA, 730 bp, Zea mays
  Clone ID: MRT4577_79926C.1
cattgggtacctcgaggccggccgggtcggcctcatttcactttcgagcgcagaaacgagagggcaggagcagccgcagtcccggcgatcccgccgccggtcgccctcatacttcctcgtcactgccttcgtttctctttccaacaatcaagatgagccgtggcggtagcgcgggtggtggtcaaagttctctgggttacctctttggaagcggtgagccccccaaaccagcagtggcaccagctgtaagtggtccacctggtggtggagggggtccacctggtgagaaaacacctggtggaaaggctggtgggaccaatcaaaatggtggtgggggttcccggccaaacaataaataccacaggggcgaagggcagaaaaacgggaaatttctttaggaacggcctttcaacaaaggccacgctggtcctgggggtgggtctttcctgggataactggttggtgggaaatggtggcgctcaccaaggtattaccccccactggcgccgcatggcttttcttaatcgtggacaggcggtggcatttcatgtggaaccaaaactcccctcccgcgtggggccctaagctgcggctagatttcaggggtaatcgtgtggctgaaccctcatcataaatcgtctctgtacccagcttctcgtttcgtttgcaccccggatgggatggtttggttggtgcccactggaaccaaaaaaaaaaaaaaaaagcgggc

SEQ ID NO: 162665 - DNA, 393 bp, Zea mays
  Clone ID: MRT4577_79927C.1
gtaaaaaagagggcctgatggtccctttttctcttccagtggtgcgtgcctctggctgaacggtcatcggcaagtgaaggatagtctacattaaaaactcgtatagctgtagacctaaccagcctactccccgagctctgaccaatcgacttttaatacagatggatgttacaccaattctagccagacaatctcgtgatctaagagttagtactcggacaagctcaaacctcgaacaatccataatagaacttgtccaaaagacaccctgcctgtgcaaaccatcttaggcaccagtagactgttcgataaccctggccagacagtttgaccaaacacatagggacatgtgcagaacgatacccttatggacaggactacggacggaccggc

SEQ ID NO: 162666 - DNA, 220 bp, Zea mays
  unsure (1)..(220): unsure at all n locations
  Clone ID: MRT4577_79928C.1
ggggtccccccgggctgtttgggttctgccccnggctgggggcgggcgggtgctccttctggtctccggcgcggggttcggtgccgtggtcttctctgtgtgggctgtggcctcctccggtgcgctccggcttcgctctccgtcgtgcttcgccgtggtctgtccgttgctcngggcgttccgcggcctcctcggggggggcggtgccctgggcgtcccc

SEQ ID NO: 162667 - DNA, 173 bp, Zea mays
  Clone ID: MRT4577_79929C.1
gcgcgacaggagagacatggtagcggatccagtaccgattcggatgagtcccggtccaggggctcactcctgaggccgcggaccagctcaagctactccgtaagatgatagactggcatccatggcgagttccaaatcacttcaaatgtcaggcgactgaagaccccagcccc

SEQ ID NO: 162668 - DNA, 482 bp, Zea mays
  Clone ID: MRT4577_7992C.1
ctcacttgcatttttggcacaccagaacagaagaagaaaaaaaaaacaggcacctgagcctgagaatggggaaacaccttgggttggcattgtgcaagggccaacccttctaatgccttggacctggttttgcttgggcctcccaacttggctcatattccaaggtcccttttccaggtaccttgggccaacgtcccttgtttttttcccgggccaatcggtcaaaaaatacctattaattaaggctgccttgaaaacacaaagcttggatttaattttgaatgctatacctatattcctgctggtttgcttccagggttcaacctggaattcgggaaaaaaccaggggggtggtaccacctacttcctgggccggtggaacaacttcgccggaacgggggccacccacgtttggttcccgccgccgtcgaattcgtgggccccgaaggggtacttgcccggccggttctacaacctgaacc

SEQ ID NO: 162669 - DNA, 181 bp, Zea mays
  Clone ID: MRT4577_79930C.1
tcgagccggccgcgacagtctcacccacaggcgtggcactgcccctgtccggctgttcattgcttttgcttgactggggctggtgctgtgggggtgcgggacctgaacatatgacacagagtgtgagattgttcctcctcaaatctgcctcggagaaccccgccagactatgccttacccc

SEQ ID NO: 162670 - DNA, 340 bp, Zea mays
  Clone ID: MRT4577_79931C.1
cggtgtggggggaaccacaatttttgccaacagtccaacacagaagagctcactgggtgccacaagtacgtaatgggtagtacaccactgatcacatataaggcgctcccattattattattccacgaggaccttgggatagttatcctaaactggcggtgaccgaactgccatgcgcccaacgaggtccagcgaccattcgtttcaggtcaccgccacagtgggatgatcccacacgcaacacgggccccagcggtgcgggagcttttccggaaaccgggcccaccctttctaaaatcgttcggatcagcgtggacaccatcagctttgccaatgactg

SEQ ID NO: 162671 - DNA, 666 bp, Zea mays
  Clone ID: MRT4577_79932C.1
atggtggaaccttgtttgatctctaatgtatttatcattataataggtgttgtttattcaaggcatactgtacaaatttattcctgtaatgatggtgatgatattagacaacacttggagtttgcaccaattgacacaaggagagctctatacaaggtgctttcttcgaactctgcatgggcatctaagatgggtagtgatatttgtgaatattacatggtggcgttgcacttgagttgtgcgccacagtctggctatcagcgaagtgatggatgcagtcccaattatagaagtccctcttggaaatgctctaaggagaagggttttgaggctgatggtgaaacttatcatgtgctggtgcagggatttgggaggcataggaaaagaaagggatgggaggttgtgttggatgaaatgcttgatttagaatttataccaaatactgccttttataataggctacttggtggcttgccgcttgcatattcttctgagtattggaataagaggctgcttcttacatacaaacctgaagaatcagaggaaattcttgagcctgctcctctcgaagaggaaatggcaccagttgaagatcttgttcttgtaccacctattaatgaagttgtttcacctcctcccaagactgaggtgtcccgatactggtga

SEQ ID NO: 162672 - DNA, 1468 bp, Zea mays
  Clone ID: MRT4577_79933C.1
agctcggaattcggctcgagcaaaagtcattgcagacttgcaagcttccctcccctactatcaggcgaatcatatccatccacttactacgctgctaggctgctacgtatgaacaaaatcctcctaattaagacgggcgtcgttggcttcaaatactggtctctcccctgtccaaaagtctctcgaatctccaccctggttccgcaccggttccagaattttctcccatttccagggtctccccgtttctgtccggcggttctgccgttccactgcttttgatttcggagtgtgagcttacatcttgctggacaataaagattggattttaagcgatttggggggtgcttgcctgatctccccctgcgaggtactgccgggggattggatttcggggaagttttggtggtttgatattcggcttggccggagcaggaatgacgatcgacatgtccattcccgggagctccgggctgctgaacgctgcggggaagagggacatgaagttcttcagcaacccctacgtgcttgcgctcacgggcgctgcaggaatcggtggattcctctttggctacgatacaggtgtcatatctggagcccttctgtatatccgcgatgattttccagcggtcaaggacaattacttcttacaggaaacgattgttagcatggccttagtcggagctatgattggagctgctgggggtggttggatcaatgatgcatacggtcgcaagaagtctactcttcttgctgatttgatgtttgctcttggctcacttgtcatgtgtgctgctgctggtccttacattctaattatcggaaggctcctcgttggtttgggtgtgggtgttgcatcagtcacagcaccggtatacattgctgaagctgctccttcagaaatcaggggaggtttggtgtcaactaatgtactcatgattaccggtggccaattcttctcctatcttatcaatcttggctttactgaggtgcctggaacatggcgctggatgcttggtgttgctgctgttcctgccattatacagtttgtgctgatgctattcctgccagaatctccgcgttggctttactggaaggatgagaaggcaaaagctattgccgtccttgagaggatctatgaatccgaccgcttggaggaagaggtagagctgcttgctacatcctccatgcatgaattccagtccaacaataccggaagctatctggatgtcttcaagtcgaaagaattgaggctagctttctttgctggggctggtcttcaggccttccagcaatttaccgggatcaacaccgtgatgtattacagccccacgatagtccagatggctggtttctcctccaacaggctggccttgctcctctccctgatcgtcgcggccatgaacgccgccggaaccatcgtcgggatctacctaatcgaccgttgcggccgccgactagaaagctc

SEQ ID NO: 162673 - DNA, 362 bp, Zea mays
  Clone ID: MRT4577_79934C.1
cggaggcgatgggaaggtgtggttcgctggtaagcgagtgcgcgggaagcttgcaatgtgggaggaagatgacatggggagcagtggcaagtgggactgggtggatggtcttcctggctatggtgatggtgtataccgtggatttgtgttcgatggcgggttcacagcgattccttgaaaacgaatcctagtctggtgggtgtccgctcaaattgcgccggtttactttgacccaggacatctacctatcttatctcatgcatgatgaaaactctagttgttgtacttgattattggaaaagatcagtaagctgtgtgtttcagacaataaaatgatgtagaccatactctatttacatatc

SEQ ID NO: 162674 - DNA, 114 bp, Zea mays
  Clone ID: MRT4577_79935C.1
cgctgcgtcttcattcactgccctgtcctggctacgtacccggccggccatcgttcgtcgtccaaaggctggattggaatgaatgaccccttttccccgtcttcggccgcggca

SEQ ID NO: 162675 - DNA, 2196 bp, Zea mays
  Clone ID: MRT4577_79936C.1
atggccagagtacgctcgactacaagggtgactcatgaaggagaggagaccgaggccaccaagacaactccaatttccgaagtcatgagacagtcgggtttagttatgacagagggaaccattgacgaaggtacacctgctgccgaagctgaacaggttgatattgaagaagaaaatgctgatgaagaagaggaggattatagcattttgatcccatcaaaacccaaccacctagattttgagaaatctactatgtctgaagccgatgtgcccatgatgatgaaactgggctactttggagaagccgaaaggaaacttgttcgttttgtcagagaagaaaccaccccagcgccgaaggatgatgaactgacccctaacgctatcgttaggctcggcatcttcatctgggccctccgaagccaagggatggacccagatgccgaagcattctgccgagtgcacgagttgcactaccaaacaaaggccagggcagacggtttacatgaaatttttggttgctacaattttgcgtatcacaaggatacgaaggctccagttctcagttatcgcaccaagtggccaaccagctggaagagtgaatggttttatatcaaggccgatgagaagaagagggggaaactgatgacgatggtcatgagcccgctgactttaagcttcggaatgaccatacccctgtgcaacatgcagttagggtcaccatgccaactggccgcagtagaattcagggtggtggctgaacaaatcagcaccagagacctggtgcaagaatacctggccaacaggacatctctgacgtcaagtgactgggcagccttcggtacccggccaaaacgaaggttaaaccgggtaatggacgctctaaaatttgaataccctgattatgagcggctcaacaagggtgccgaaggggcaaaaagaaaaaggatcgttagcgttctgagcagacaagctaccaggatggtgaaggaggatgagaaggttttgaagaagagaaaatccactcctgagccgaaggtgacagctttaaagaaaagaaaagctaaatccccagagccgaaggtgactgaagaggaagaagagactccctcaacacctccagctgctgaagtggcagaaattttaaaggtaatgactgaatctctacctatcaagttgctaagccctctgggaccggaactgacgaagctttttcagaagaaagaagaaccttcggctacacaaaaggaagatgggctgaagaagcgaagaattggtagcgtaatgcaagccattgaaaagacaccaccaccggcctcggcatctaagataacacctactgcaagcgccgaggccactgccgaagcaaacacatcggccgaagctgcagctgccaccgaagctgccaacttggaggccaccctatctggaattgataaattgatactggtgcctgacaaagggaaagatattgccgaagctgcttcggaagaagaaggtttcgatcttcggaacctggtcagacaagaactatctaaggccgaaatgaaggagctacaggaatatggcatttcctgtggctaccagccaggagccatgctctttggtggaatcgatgaagaggccttgggatgtgttcgcgaccgtaccagggcgaatgtaatcggcactctatcgaagagtgtcggttttctgaagcttgaagccgatattagcagctaccgacgacaacatatcgtcagtagtttgttttattccaactttaagagtatgctgctgagcaaagcactgcaaatgcagcaagacctcgaggataaaaagaacgaaattataattgaaggttcagagaacaagattaaagaatacgaagcttctcttgaaaagaaggatttcctacttcaagcaatggaaggcgaagttgaggcgcttgacgaagtaatagcggggcacgatgacttttgtgccctgctagcttcacgtggtacagctgcagcatttctgaaagctggttgtacgcacgcaaagatagtgaatagacctgccttcagcctatcttcgacagatttggttgatattcccgatgaagcccaaagcataggaagcagatctataatgcaaatatgggcgaagggtggtcaggatttggctggtgacgaggcccgaagcttacttaagccggatgatgatgtcgaagattaa

SEQ ID NO: 162676 - DNA, 313 bp, Zea mays
  Clone ID: MRT4577_79937C.1
tttttgtcaagtaccgcagacgatgtgttgattatcgtatggaatagacggcccaacgtccgcgtgcacgacccgcacacaggatcaactgcggcggcattgaattcggagaacaatccacaagcaatggaaagagagagaaaaaagcacgcggagtccctggggaaaaacaaccagctcagatggtaccaacacatgcaacaccgtccaaaggaactggcagcaccaccaggggtgagtcacacccaccaaaggagggcgctcgtgctagggcatatactcgtgggcttgctgtaagatgactgaagcactg

SEQ ID NO: 162677 - DNA, 152 bp, Zea mays
  Clone ID: MRT4577_79938C.1
tccgaattcccggccgcccacgcgtcgcataaaaagcctaagcgtggcagggtcattccctgaccaccttcaggcaaagggggagcgatttgcggggggagagagataaataaaaaacaaaacatagtacacacacaccatgctcgcgattg

SEQ ID NO: 162678 - DNA, 460 bp, Zea mays
  Clone ID: MRT4577_79939C.1
agggggagaaccccaatttttttcaaaaaccccgtgaatcaaaagggggcaggtgcccttaaatcattacagaaaataacagaaattttggggggccccaatctttgattttttacccccaaaaatcgatcccgttacaaaaacacttggggggtccagttggggataaatcctggggagagagagggttgcaaaccacgggtaacaatgccccaatttttaaattgtgggactggggcttgaccaccgggcaaaacccattcgaagacggggcgcccaccccaagggacccccccctttgcgggatggggattccaggggggttaagcccgcccttttccgggcattgaaaccaacccggcgtttgtaatttcccaaatcagttaaccggggaaggaagaaaaaaaaaagagggggattggggccttccacccgccagaaccggcctacttgggcacct

SEQ ID NO: 162679 - DNA, 346 bp, Zea mays
  Clone ID: MRT4577_7993C.1
gagcatattattcggcggccgcccttgatccctgccgggtgctggtgcagctcgtgcaggatctcgtgcattcggaacacagctggctgcgtgtccaccagcaccgttgccagggtgctaccgaggtcgataccaacatctttgtccgttctctggaacaccctgttgcatattgtcgctttcctggagagctccatattgggcaggttaaagaacggtcccaaaccggggccctggcctgtgcggaaggcagtggggttgcagtagaagcagaggccgtagttgacgcggcaaccaatgcccgtctagtcgccaatgaggatgtgccccttggtgaggtgtcagc

SEQ ID NO: 162680 - DNA, 1350 bp, Zea mays
  Clone ID: MRT4577_79940C.1
atggctgccgttttcatgcgacttccctttcttccgcccgatcgacacaccggccgctcccagagtggcaatggctacttgagaagatcaacaagctctccggcaaaagtttccactcagcaccagcttggggacaagctgttggttatggggagggaatgtcaccaatgccaaggaagatggaccagtggggaggtacaagaacctgaagaagggaagaagcctgaatatggcgtgatgaaggctcgagtgctcgacgcggtggaaggactagaaggccaaatcctagcaatggcgaatgcaagcaaacacttgcaaccttcaagcaaatcaggcaatgacagaaagtaccagggcacactggttgcttctccagcaaaggacatttcaccgaagtgtgcgaatcgcattgttccatcgaaacaactgatcttgggtggggattcaataggccatctggcatcgattctgattaaggtcgttgctctcgaggcagtcagaagagtttctaaagcaagataccctttcatatggaattctgttcaagcattgcaaatccttgtgtatcctccatttagttggatccaaagatgggcaccactcaaatttcttgtgcagggaattcagaaactatccatgccactgttgtttttgtcagtcacaacaacagtaagtgagctgtcctccaagcgtgatgatgaaccagataacaatacagaacattctgaaacaaatgaattggcatcaacttctggcacaagtgatgctgctgatggcacaaaggaaatcgtacaagagaactggcttgtgttacttttcagggagcttgagaagcaaggcatcactttacccgagagatttccaatgcaaatgatgaggtcatttgtcactgtagctcaagaaaactacccaaatcgtcttggagtattgtttgttgtccgccttcctccagttgtcagagttattgcacagacatttcttcaagttttgaaaccatctacaaagcagaagttacgttttgagggagattcatacaagaagacgttggcggagttcttgcaggccgtgccagcgtttctgggcggtaaatgcagctgcccacgatgtgagaagcctcgtaatagttcagtggtgcaggcaggggaagggagcaagaaccaggctcgcttggtcagcgttgatggcggatcacctgtcgtggacttcgacttcgatgaagaagagatcccatcaccttatagctgcgagaacgccatcagggctgcgataatctgcctgctgatggtgtgcatcttcatcgcgtttctggctgggatgaacgaccctgcatccgttccgcccagtgcctga

SEQ ID NO: 162681 - DNA, 329 bp, Zea mays
  Clone ID: MRT4577_79941C.1
attcggctcgagggcctcccggggcttgatggttaaccatttggtgacatcagcaaaaggtcggatgtgaccgaccaactgatgcgatgatcgatgcctatactaggatcgcaaaactgtatctacatggggacaccagtgaagcttggtatgcctgtgctatacatcggcttaaccaggccttctcggacgcaaataccggatgccacactaaaaggaaaggcgactaccaccgtcactcgattgaacatagcactgcaactaaaaagaaagctgcctcgaggctgtgactgatgggctatcaacgcaccacagtgtgtctgctccat

SEQ ID NO: 162682 - DNA, 2179 bp, Zea mays
  Clone ID: MRT4577_79942C.1
gtctctctctgttcttctgccccgatcggccgatcccacccacgcatatctctcggccgcgcccgcggtagtgttcgtgttcctcactcctcccgcttccttccccgacactacctcagctcagatccgcggcggtttcccggtccctggatctaaagcggccggtgagcaggcctccttccgccgacgcggaccacctggagggaatttatcctggagccgtcttcctcctcgcctcctctcgcggcgcggcgcggaggccggaatcacttggaggtctagctgtgtttggattgatttctttcttcgtttgtggtggctagaggcacctggtttgtttcttgccgaagcccgtggtacatgtgaacagcagggcctgtcttctgcttttgcttcttagcaatggcgaatgcaagcaaacacttgcaaccttcaagcaaatcaggcaatgacagaaagtaccagggcacacgcgtcccttcacgcgtcaaggacagcgtccggaagtgtgcgaatcacattgttccatcgaaacaactgatcttgggtggggattcaataggccatctggcatcgattctgattaaggtcgttgctctcgaggcagtcagaagagtttctaaagcaagataccctttcatatggaattctgttcaagcattgcaaatccttgtgtatcctccatttagttggatccaaagatgggcaccactcaaatttcttgtgcagggaattcagaaactttccatgccactgttgtttttgtcagtcacaacaacagtaagtgagctgtcttccaagcgtgatgatgaaccagataacaatacagaacattctgaaacaccttctgaaacaaatgaattgacatcaacttctggcacaagcgatgctgctgatggcacaaaggaaatcgtacaagagaactggcttgtgttacttttcagggagcttgagaagcaaggcatcactttacctgagaggtttactgaagatgaattacgcagattttatattgctgcaaatggcgacttttcaagtttactctcttcggttaagaagacaattcgttggagggaaatgtttcacatacttacactgcaagaacttgataaatggtctcacttagtcttttggcatggatttgacacaatgcttcggccttgtttagtaattcgtcttggacttgcatgctccagcataccaccttgtgatagaccccattttgggcaagcagtagtttctcaaattgaccatggtgttgtaaatttgaccaacggagaagattcaagaattaccgttttgctggattgccatgggatttccccattcagatttccaatgcaaatgatgaggtcatttgtcactgtagctcaagaaaactacccaaatcgtcttggactattgtttgttgtccgccttcgtccagttgttagagttattgcacagacatttcttcaagttttgaaaccatctacaaagcagaagttacgttttgagggagattcatacaagaagacgttggcggagttcttgcaggccgtgccagcgtttctgggcggtaaatgcagctgcccacgatgcgagaagcctcgtaatagttcagtggtgcaggcaggggaagggagcaagaaccagcctcgcttggtcagcgttgataccggatcacctgtcgtggacttcgacttcgatgaagaagagatcccatcaccttatagctgcgagaacgccatcagggctgcgataatcggcctgctgatggtgtgcatcttcatcgcgtttttggctgggatgaacgaccctgcatccgttccgcccagtgcctgagagctatggaatcgcctaatctcccatagtagagcttagattgtcagttgagtatatacacatatgtgttgctatttaggatgctactagggtgttgtaatccctggcagcttctttctcggttgtcgtcagatcgccatacagtgttctctcctaatgtgagcggagcagatgaataaatatcctgcgtgtggcaaatgttgttagcagttcaattagaccttcgatagtgcctttctttgcgtgcttgctgcagtagggcagtgtgatttctcgttagtgtacgtaaactcaaagttgtcaaccacaaggcaacaacacactgactctagtggtttcagctctttaatctttt

SEQ ID NO: 162683 - DNA, 2247 bp, Zea mays
  Clone ID: MRT4577_79943C.1
ctcgaggccggcggccgggggggaaatttcctcccagccgcgacctgtctctgtctgttcttctgccccgatcggccgatcccacccacgcatctctctccgcgcccgcggtagtgttcgtgttcctcactcctcccgcttccttccccgacactgcctcagctcagatccgcggcggtttcccggtccctggatctaaagcggccggtgagcaggcctcccctccttccgccgacgcggaccacctggagggaatttatcctggagccgtcttcctcctcgcctcctctcgcggcgcggcgcggaggccggaatcacttggaggtctagctgtgtgtggattgatttcttcgtttgtggtggctagaggcacctggtttgtttcttgccgaagcccgtggtacatgtgaacagcagggcctgtcttctgcttttgcttcttagcaatggcgaatgcaagcaaacacttgcaaccttcaagcaaatcaggcaatgacagaaagtaccagggcacactggttgcttctccagcaaaggacatttcaccgaagtgtgcgaatcgcattgttccatcgaaacaactgatcttgggtggggattcaataggccatctggcatcgattctgattaaggtcgttgctctcgaggcagtcagaagagtttctaaagcaagataccctttcatatggaattctgttcaagcattgcaaatccttgtgtatcctccatttagttggatccaaagatgggcaccactcaaatttcttgtgcagggaattcagaaactatccatgccactgttgtttttgtcagtcacaacaacagtaagtgagctgtcctccaagcgtgatgatgaaccagataacaatacagaacattctgaaacaaatgaattggcatcaacttctggcacaagtgatgctgctgatggcacaaaggaaatcgtacaccgggactggcttgtgttacttttgggcggctaggagaagcaaggcatcactttacccgagaggtttactgaagatgaattacgcagattttatgttgctgcaaatggtgacttttcaagtttactctcttcggttaagaagacaattcgttggagggaaacgtttcacatacttacactgcaagaacttgataaatggtctcacttagtcttttggcatggatttgacacgatgcttcggccttgtttagtaattcgtcttggacttgcatgctccagcataccaccttgtgatagaccccgttttgggcaagcagtaggtaactgtcaacactcaaatcaattccctgtaactcagttcacataaaatcggcgatagcaatatgactttgttgtgccccccttccctagtttgcttactgctgagaagtttctcaaattgaccatggtgttgtaaatttgaccaacaaagaagattcaagaattaccgttttgctggattgccatgggatttctccattcagatttccaatgcaaatgatgaggtcatttgtcactgtagctcaagaaaactacccaaatcgtcttggagtattgtttgttgtccgccttcctccagttgtcagagttattgcacagacatttcttcaagttttgaaaccatctacaaagcagaagttacgttttgagggagattcatacaagaagacgttggcggagttcttgcaggccgtgccagcgtttctgggcggtaaatgcagctgcccacgatgtgagaagcctcgtaatagttcagtggtgcaggcaggggaagggagcaagaaccaggctcgcttggtcagcgttgatggcggatcacctgtcgtggacttcgacttcgatgaagaagagatcccatcaccttatagctgcgagaacgccatcagggctgcgataatctgcctgctgatggtgtgcatcttcatcgcgtttctggctgggatgaacgaccctgcatccgttccgcccagtgcctgagagctatggaatcgcctagtctcccatagtagagcttagattgtcagttgagtatatacacatctgtgttgctatttaggatgctactagggtgttgtattccctggcagcttctttctcggttgtcgtcagatcgccttctctcctaatgtgagcggagcagatgaataaatatcctgtgtgtggcaaatgttggttagcagttcaattagcccttcgatagtgtcaaaaaaaaaaaaaagaaaaaaaaaatattataacccaaaagtaaaatagccaac

SEQ ID NO: 162684 - DNA, 244 bp, Zea mays
  Clone ID: MRT4577_79944C.1
aacaattcatcccaatacacttcgaaccaagtaaagttagcataaccgaactagaccttatttgatcacgctaacaagaccttatttgatcacggttgactggctgacacagaggcaccacggatactggaatttgatatgtacaacaatacacagcacaaatgatttttggcataaaggtattgctacaggcattgcatggctgctacctataaatcctggcatgagttttggacagtggggg

SEQ ID NO: 162685 - DNA, 251 bp, Zea mays
  Clone ID: MRT4577_79945C.1
cccacgcgtccgctattatatttgccttcatcgaccgtagtgaggctgggttcgtgtcgcccattatccggctgcttcctgttgcgcttcgccttctatacctttccaaacagggtagtatggcagctaccgccgaggtctctagcacctttgctgaaaatcataggggagtgactgtgatgtactcacttatgtcgctggcgtatgccgtgtcaggtcatctgcttaaggttcaggaccttcctggcatt

SEQ ID NO: 162686 - DNA, 169 bp, Zea mays
  Clone ID: MRT4577_79946C.1
ggcctaagaaagctatttgttactgagcaaaggtacaccttggaaagtttgatttgccagtggtcattggacagaagagtaagtacaagctctagatgatgcaagtgatcttcccaagtcttgttgtacaccatgatatcatcgaagaaaacttaggagcacatttccg

SEQ ID NO: 162687 - DNA, 614 bp, Zea mays
  Clone ID: MRT4577_79947C.1
ttcctacttcccttcccgtttggttgctctacgctcctcgccgcctcgctccctctgtggtccttcatcccaccgatataacaaaatcacccgcaccgatggcctcgagctagctcgcctgatcctacaccgccctcttcctcagcaacaaacccatcgacatcaccgtctggaggatcaccatcatcatgatggtgaccatcatcatggtgatgacctactggatcgatgactcttcatgtaacctcctggaatggcacagtgttgacgatctaatcctctccggtgaatctgatgctggcggctgttcctgatgcttgctgtcgcccccattgctggtgctgcacgtgctgctgcccctgctgccaaggatatgattgttgacctctcggaggcgtatgatgacaacatgcccttctccctgctctatgtgatgttgccctcagctacccaatcattgacctcttctcttatgttgtcacccacttttcttacgctatgtctgctcccgttcgttatcacatgatctcgaggtctgagacatctggactgggctatgacaatgacatggaggacgctgacccatctgattacagtgacacttgatgtctata

SEQ ID NO: 162688 - DNA, 707 bp, Zea mays
  Clone ID: MRT4577_79948C.1
gaacttcacagagctcaacgtctagtctatgtactagaaaggggctaaaatgtctccgcttctcgctgctggcatgatacacgctggatgcctcctggccttaagagtcaactaccaggacccatcaaagggagtttctcacgtcccacctgccgtcttcttctccacacagtagctggcaaaagagtaaccttagatttactacgcgatctgcaagactattcaatctaaatggagaccaaatgatgagcccctctgacatcctactcagggactgcgtcccctctgacttcaccttcgctgacgccacttcagcgtaccacattgaaggcgcttggaatgcacatgcaaaggaagaaagcaactgggatcacttctagtcacgatcctccgcaaaggatactggacggtagcaaatcagacattggagcgaattctgaccatatgtacaaaacgtgacgtcagattaggtccagcgaaatgtgacatggacgcatataggcttctctatctcttgttccagaatactgacgaacgcaaccaaagaatgaggtattaacccggatggaatcaagtactacagaaacctcatcaacttgttgctagaaaacgccatagagccatatgtaacaattttccactgagatgtacctcaagcactagacagagagtacagcggcttcctagataagagtcataagagcatt

SEQ ID NO: 162689 - DNA, 172 bp, Zea mays
  unsure (1)..(172): unsure at all n locations
  Clone ID: MRT4577_79949C.1
cacagtcacagatgacaaaaggatccaggaggttccagcaatgaaggttactgccctggggttcacggagacagcaagggccagggttgtgaatgctnncgcctactgtctccgtgaacctcanggcgagaacacggtcctcttgaggggccccaagaatgcccgtgaggca

SEQ ID NO: 162690 - DNA, 305 bp, Zea mays
  Clone ID: MRT4577_7994C.1
aaaaaggggcccagggggatttcattggcccatccgcccatttggggggcacataatcgggttttaaatcgctaagcagggcctttgggggggccccatagggaaaaactgcttttttgaaaagaaagcttttggattattcatttagccaacaaattccggccttgtaaaaaaaaaaaatcggcaaaatttgccctagtcgccccgctcaatggtcttcccaaccggtgaatttccccccttttggcaaacgaacacacggtcatgggacttgaacacaccaaatgccttgccatggtttaaag

SEQ ID NO: 162691 - DNA, 241 bp, Zea mays
  Clone ID: MRT4577_79950C.1
gcgtaagctcggaattcgtctcgagaggagttagcgaccccaagtagtttggtggagaggttgaataggttgatggggactatctttgatgatggggtttggtgacaacgaggaatatgaggaggaagatgaggaagaggatgatgactatgatgtcccccaaccacctactaagaagaggaaatgattgatggctgtgatttggttggttggttgcttacatgcaggaatgctccctgtt

SEQ ID NO: 162692 - DNA, 433 bp, Zea mays
  Clone ID: MRT4577_79951C.1
cgcgactcgggggacatctacatccatgagtatcggacctggatagtatgcgcgacgagggcgttttgatacacatcctgcgctctgtcgcactggactgagacgagcacgctgttgttgatggtgctgatggtagttggatgtgccgagggcagctggtggtctgaagtcataaagcccggtacattcaacagccacgagctgtcgccgaggtgcacgcttaccggcaccagagcgagtaacgctacctggacgtcgtctgacacactagcgtgcagcgggacctctacggatatgacgcacgatctgcgtacaaccgagttcagagccagacttttagacggctgggctcctgtgaccaagagaggcctgctgagtaagttgctgctgctcggtggacgatcacttttggcatacgtgagagcgtcggcat

SEQ ID NO: 162693 - DNA, 364 bp, Zea mays
  Clone ID: MRT4577_79952C.1
acatacactactttactaaaagattaaagctaactttttggtttgctcaccacacacaccgaaaaagatggcgtcgacgatcatggccgtcaccttctgaattgtctgggtcaagactccgcttcttggacagggacgagccgacgacgtcggcgtcaatgccagcccccttcgcgacgtcttcgacgccgctgctgacggccggatcaccatgggcaacgacctgtggaactgacccgaccgcgttaagtacctgcacccattctgcgaccagacgccctcttacctgaccgtggagtttctcggcgactacaggtgggacaccgtcgggctgtccgcggaccgcgaggcgttcgcgcggaac

SEQ ID NO: 162694 - DNA, 422 bp, Zea mays
  Clone ID: MRT4577_79953C.1
ctcactcttctggctctctctgggagcgccacctgaactcatacaagctgacgttgcggctggcacccaccggcggcgggacatctaccgacgacggggcatctgccacctacggttaacgtgccacctactgtgcagggcccaccggctgaccaccggccgtggtcagtacacctggcaccggcagcccatgagccgtctctagatactcaggaggcgtcgccaggcgactaacctactgaaccgtcgcggactgagactaatttctaagcacacgcatgcgcgtgccaacagacgaatacaagaccgtgccaactgcagggaacctgcggagatggcataaatccgatccacaggctgcgcgtcgagttcctgaagcattagtgcagcccgacggggacggcctactgataggatcaaag

SEQ ID NO: 162695 - DNA, 317 bp, Zea mays
  Clone ID: MRT4577_79954C.1
agacagcgtgtcgtcgaccggacccacagcaacagtactccttgaataatttgtgccgttacaacgcacgagcaccgtactagttactgttttattcagcacccatgtatttcgaatgatcttccttttcttatataacacgaggatactactgaggagctgttaaactcctgtcgaagctgcttcaacagatcgacgaatttctgctcgcaaactaaagtcactttccttgcagcgattctcgaatcaacttctcggtgagctccctcggaagacctcggacgctatccaccgggcccaccagttctttctggtgc

SEQ ID NO: 162696 - DNA, 277 bp, Zea mays
  Clone ID: MRT4577_79955C.1
gcgcgaggaccatgaatgctttgtagccgattatctattaaagatgggagcgaacggagatgatgccgctattaaggaacagataccatgagctcattaccgaaccaaacatgaggctggaataaatggagcgctgccgatactttatgcattttctgctgcgtcgtggggatgtaaccatatattaagaatatgcaacgagactatactctatactctgtttactagtagtacgactagagtaccataactcacataggactaaatgagatactaa

SEQ ID NO: 162697 - DNA, 486 bp, Zea mays
  Clone ID: MRT4577_79956C.1
tttttgtgtttttttttttttttttttttttttttttttttttttttttttttttttttttttttttttctacgaacatatagaaccaccttttattctgattcaaattcgggggaaacggggtacaatagggggggccatcaggggggcaggtgattacagcacaaccttggggtgggatgggcaaacacccaaaaattacttgtccacgaagaggaagggggccactgattatggggcaataaacaccctataaaccggcgggggaaccagagaacctttccagcttaagctacatttttgcataaaggggacttggcaaggttcccgaggggggtttggcgggcgttccgtaaaatgggtttgtcagcgggggtgaaaaagccagcaatacagggtgcaaatataatgagggcttgggcagggtagttgaaattccccttaccccaaggaggggcacgggggccaaccaagggggaactggaa

SEQ ID NO: 162698 - DNA, 338 bp, Zea mays
  Clone ID: MRT4577_79957C.1
gcgtacgctagcattgctttacagcgagcggccttccttttttttttttttttttttaaccaaaacgagcacgagcttgttggattataatgtggcagaatcatcttctgcataaacttccggaagcttgagggcacaaaccacaaaaaatgaaaagaaaagcagatcgaacttcctctgggcaatacaggaccagattatctcttaaaacctgaacgaccacgacgaactacggtcagattaccaacctcacaccaggagctcttaacttaactactgagtcatttctacgaaccgaacgaaagctgaaaagcgtgctgccgatatccttttaccaa

SEQ ID NO: 162699 - DNA, 178 bp, Zea mays
  unsure (1)..(178): unsure at all n locations
  Clone ID: MRT4577_79958C.1
cccgggtccacccacgcgtccgcgcaagacctcgcttcgtcagatcgtccttgaacaacggagcagaagccaaccnncgcnttttcacagagcctgggggcgctatagccgccgtggaggtgtgcgtgaaggccgccgcggggaaccccgacactctcggcgatagtccgatctcgca

SEQ ID NO: 162700 - DNA, 562 bp, Zea mays
  Clone ID: MRT4577_79959C.1
gtacccttcgagggctcggccgggagcgtccatactctaccctattgcagcgacacaaacgagagggcgggagcagccgcagccccgtcgatcccgctgccggtcgccctcacacctgctcggcactggcttagatggtctttgcaacaatcaagatgagccgtggcggaaacgcggggtggcggtcaaaggtatctgagtgacctgtttgcaagcggtgagctcatcaaaccaatagaggcaccaacaactgtgagtgctccacctgatgctgcaagtgctgcacctgcttacaaaccatctgctgcaaagcctgatggcaccaagcacattgatgctgtggttacctaccaaaccaataactatgacaagtgtgacaagaacaacaccgtctacttccttacggaccgtgcttcgaccaacgtgcagactggtactggcagtggatcttccctgagatacctgagtggtggctactgatgcctctcaccaagctataagccaccaactactggaggcggatccattttctgtatcgtgacgggcgatgtgattttatgta

SEQ ID NO: 162701 - DNA, 835 bp, Zea mays
  Clone ID: MRT4577_7995C.1
gccggccgggtttggggcatataacccctcttcgacgcgctgcgtttagcctttcttcatgtcactattacgccagctcttctcctcgcaattgagatatacacttcgcgcttcctcacgtgtacagcgatcgcaattcactcctatatcgcatttccacacctcgagaccgttccagagcatactaccggatatggtggacgatcaacccaagggactaatcgccaacaaaggcattgaattgctcacttggggcacgcccaatggctggaaagctagcattctgcttgaagagctcaaagaggcctacggcaaggaatacacttggcaaggcatcaacatcagcaagaacacacaaaaggagccttggttcactaagctgggtcccaatggccgaatcccagtcattgtggaccatgatcaaggcggttttgctgtacaagagggcctcgccatcctttcatatctgacgcgccactacgaccccgagcacaagtttagcttcagcgaccccctcgacatctcgcgcgctgagcaatggatggcgtggcagcacggcggccttggtccgatgcaaggccaggctaaccacttcaaccgctttaccaaagagcgcatcccgtacgctatgcaacgctacacgggcgagacagagcgcctgttgggtatcctcgattcgcacctggccaacaccgattacctagtaggtaacaaattcagcatcgcggacattgctagcttcggttggtgccacatggcgcgcttctcaggcatcgaccttgagatgttccccaacttgaaagaatggctagacaggatacttgcccgacccgca

SEQ ID NO: 162702 - DNA, 238 bp, Zea mays
  unsure (1)..(238): unsure at all n locations
  Clone ID: MRT4577_79960C.1
gcaacaacagtgccgggccanncaaccaacngncnacacngaacccngcngcnnannnacaacaacaacaacnacnaccanncagccagcnagcnaccgccnacncncagcagcaacaannncnnccannnaaccaannggccgcacngaaccccncngcnnannnccagcagcaaanaccacnaccannnggccagcnagcnacaacaagccccacnnccnnnnngaaacaacaaca

SEQ ID NO: 162703 - DNA, 263 bp, Zea mays
  Clone ID: MRT4577_79961C.1
ggcgagaagctgaccgactgagttgcttttattgctaccaatatattagacctccaggagggtcttccccttttagtgatctctacaaatactttcattattccacaatacttacttcctcctagtgccattattccacatttacttctaccacttactctcatcggctattaacatcaaactttgcaatcttacaagctacaactatctcttgccgctagcgctttacatacaaccaattgcccaatttcaacatcaattct

SEQ ID NO: 162704 - DNA, 1006 bp, Zea mays
  Clone ID: MRT4577_79962C.1
gcgatcctctgacgctgaggcttcatcacatggcccaagatcatcaaatgaatcatcgtactcatcttcatactcatattgcgagtcaaggataacagatctagctgcatttttagcatttttcgagtccaggattgcagtgtccggcaaatcatcattggccttccttgtaaatctaccttttgggacagatgatatggatgaggatgggcccagagatgctgatgaaatagcagaagatggtccctggaatgctgaggaaattgcagaagatggcccaagggatgctggtgaaattgcagaagatggaccttgtgatgctgatgaagttgctgaagataggccatcttgaacaaagtaatgtgtctcagcaactttatggggtttctttgtaatttgaggcacagtttccaccaatatacccttccctttatctttcacagcagttggtgcaggtttttcgtgtggcatctcttctaatgaagtatccaaagctagaagatcttgatgaagtgttccttctaatatcctttggataacttcctcagggttcaggttgtaggcttccagacaagcagaaaggaaacccttcccataatcagggaaaagatcccttatctgactaattttggactcaaccatcgctgtttcctcatccttctgctgtaattcaccaccatgagaagagactggcaaatcagatatgccattccaagaagtgtgagtagatccacacaatcgtgataagaactggaactgctcatcatccatgtatatccatcctttgttccgaatatcaccaatctggctcattaattgaaattcactttcaagttcttggagaaaagtatttccatgattcacttgagaagagtaagtggattctctatttatatctttaagtgtttgaaccaagatgtctcccctgatcataggatcttcgactttagctggaaacatcttagtagaagtttgagcatcatgctccctaacttgacccggccga

SEQ ID NO: 162705 - DNA, 251 bp, Zea mays
  unsure (1)..(251): unsure at all n locations
  Clone ID: MRT4577_79963C.1
cggacgcgtgggccaagcactacatgactctgttgncgacgctgaggagcgactagatcaggatcgtcatggacatgaacaccgtgtacggatgattctcaggcagcctagtgaaggacccctactgcttcatgatcatattatcatactacggccgaaactacctcggngtcttatacgacagacgtatcatcgacgtcaaccactactggagtgaggcgttctagacatatccacgcacgtatgacctg

SEQ ID NO: 162706 - DNA, 517 bp, Zea mays
  Clone ID: MRT4577_79964C.1
aacacctctcgtcaactgtccttagacgccgacctctggttcctgcctgccacacggcgcacacagtggtgaagaagccctccgacacgattctcccatgttggaggatccccttgaccagagaatgtggagattgtatacgaaggcgaagaagcccttgtcgacaagcgcctagggtgacctatctgccaagaccccggactgggacgaggcgctaaaacgaaggcagcgaccttcgatgtgacctacagcatctattttttgacggctctgaaggaattgcactccaaaatctggatttccgctaaatgcatgaccatcatgaactccttgatcaacgacttcttcgagaagctcatggccgtgtacaacatgctgtcgcgcatcaactagatgctgatcatgacctacctccagatccacacctagaagcacctcgtcttccccggcaagctcgccgagcacgccgtctgcgacggcactaacggcgctacgaacttgatctactgttaggatg

SEQ ID NO: 162707 - DNA, 376 bp, Zea mays
  Clone ID: MRT4577_79965C.1
cggacgcgtgggcggacgcgtggggtgcggtctaggccaggcacgcgggcgcggcggcgaggcgggctcaaccgcgacagcccgaccacagcagtgcgggggcgcggcccctggtaagcgagcgggcgcgacccccggtccgggcgcgacagctcggcggctcacgggcgcgcggcccagctcggcgtctcggacgcggtcgaccgaccctgctagcgtagacaccggcgcgcggccttcggccagagtgcaggcacgtggcccctgcagcacggacccagcggctcgtgatctctggcgacctatcgagttagcgtggcccgacgcgagtacatcggcttctgcgcgcggacgcgaacacaccgacccgtcgagc

SEQ ID NO: 162708 - DNA, 681 bp, Zea mays
  Clone ID: MRT4577_79966C.1
gaggtcggccgggaaactggtgtttgcttatggctatgtgctgcggtcttccttgtgccagtcagttgcaacatgatctggtcaaagttgctttttattctgtacccctaattgctttttaatttgcaatgggctttaagattttctagtttggtgtgtttaaattgttatgttttacatttatcaaactgtttcattactttgtagggcaactttgccaaggttaccaactataaatttggtttcctttttttccctgttgccaataccactgttgctactggatgtttggtccatgagctattttatttggtttcatggataatcatccttgccaacattctttactgaaagaacattctacttccaaagctgtataaaacttctagtggtttgaattctcatgtaatctaccatgctgcagcataatctgtttcattttgcgtgacattgtgtaatctatttgtttttttttcagtagtgacatggttgtgagttttgccttgtattttgaatccatgtgtgtatttagtctctttgagcatgtagtgtgaatgtgagttaatttatagtattctaatttggtttctgattaccattgtaatttttcaggcaactttgccaaggttaccaactacaattttggttttctttttttccctgttgccaataccactgttg

SEQ ID NO: 162709 - DNA, 165 bp, Zea mays
  Clone ID: MRT4577_79967C.1
acaacaacaactactactacccggcaaccttctagaagacaggagtcctgatgacttttatggacatatctagaagttgttctattacctgagtactgcaactagcgttggtacactcttacagctggacaatatgagaggctgtttacataggggctatgacat

SEQ ID NO: 162710 - DNA, 506 bp, Zea mays
  unsure (1)..(506): unsure at all n locations
  Clone ID: MRT4577_79968C.1
agcagtggtaacaacgcagagtacttttttttattctgcacgaggagtttttttttttttttttttttttttttttttttttttttgggctcttcttcccttcttcatacgctaaaacaatacagcttttcccaaataaaaacaagacggcggaaccaaaattggccggactaggcgaacccggtgcgcagagagagtctaggcgacgggcagcgggtcgatctggaacaggtcggtgatgtcttggaatcccgcgtactctgcgttgttaccacccgtgtcggacgggcactcctcctcctnctggggtgtgcaggcggagaacggnggcagggacagcgcctccacctccggggcgtcggggaggaagtccagggggaggtcgggcaacaggtcgaactcggtgtacagcgccgggagctcgctggccaaggagaaggggcanncgaacacgatggtcgaatcgccggtctccgggttcctcgcggcagccttgctgcgtgtgc

SEQ ID NO: 162711 - DNA, 1227 bp, Zea mays
  unsure (1)..(1227): unsure at all n locations
  Clone ID: MRT4577_79969C.1
ccggccgtaaaacctttcgatccgtggtgtgttggatctgaacccaagctccgagtcgctttcggggtgggcattctcctcttcgtcttcggttgcaagaaagaaaaagcatcatggacggcttccccaagagcgtcggcggtggcggccctaacattccggcgggatcccaccccgcaggcgggagccaggcggcggcaggaggaggcgcgacgcagcggacgcagtatccgtatgtgactggtaattcagtcattgccttgaaatacaaggatggtgtgatcatggcatgtgacactggagcctcttatggatcaactttgagatacaagagtgtggaacgcattaaggcagttggcaagcatagcatcattggagcaagcggagagttcagtgacttccaggagattttgcgctatttggatgaactaactctgtctgatcatatgtgggatgatggaaactcgctgggccccaaagagatccacagctatttgacaagagtgatgtacaaccggcgcaacaagtttgatcctctctggaactcacttgtacttggtggggtgaaaaagggtccaaagggtgatgagaagtatcttgggatggttaacatgattggtacccacttcgaggaaaaccatgtcgctactggatttggaaatcatatggcaatcccgatactccgtgctgaatggcgcgatgatatgacttttgaagaagctgttaagctgggtgagaagtgcttggtggtcttgctgtaccgagacagatcatctatcaacaaattccagattgccaagatcacaagtgaaggatcaaccatctacccaccatattccttgaagacctactggggcttcactcacttcgaaaacccagcccagggcgctgtgggatcatggtagatttatgctctgcatgccgcgtatcatgccatgaacttaggggagagcaatctgtgctgctgaaatcaaaacccttgtgaacgtttgttctgaacataactggaactctgcatttgcttgtatgacatgcgtatggttcaggaagtttaattccaatatttggtcactaaaaatggattgtgcggttgtgttctcagatgccgtttttgtgttgattgtgctatgtggagaacttggaatgctaactctgtttttttttnnnnnnnnnnnnnnnnnnnnnnnnnnnnnnnnnnnnnnnnnnnnnnnnnnnnnnnnnnnnnnn

SEQ ID NO: 162712 - DNA, 322 bp, Zea mays
  Clone ID: MRT4577_7996C.1
tcccggtcgccacgcgtccgaccactgttcccacggaggccgcttcttcttggcgatggacgtgccgcgcgccattacctgggcatggccgacctatccaccggtcactcacacggcccgctagcggactgctggcggcgcagcctagcggggcggcccgagggaggcgctacttctgcggcgggaaggagcatcgggcgtcgcgcgcggggcggcctggccggctgaaagcgcggcgccgtgcgcgcccagagtcccgacggcgaggctcgcggtcgcggcggacaggccgcggaggctggtgctgctgggcgccgatacg

SEQ ID NO: 162713 - DNA, 1287 bp, Zea mays
  Clone ID: MRT4577_79970C.1
gagtcaaacctttcgatccgtggtgtgttggatctgaacccaagctccgagtcgctggcggggtgggcattctcctcttcgtcttcggttgcaagaaagaaaaaggtcacccctctaacaccacgccgccgccgtttgctgctcggcgcctctcctcacaacccgtacgccaacgtctccaatctcgtatactttcgtgctcagcatcatggacggcttccccaagagcgtcggcggtggcggccctaacattccggcgggatcccaccccgcaggcgggagccaggcggcggcaggaggaggcgcgacgcagcggacgcagtatccgtatgtgactggtaattcagtcattgccttgaaatacaaggatggtgtgatcatggcatgtgacactggagcctcttatggatcaactttgagatacaagagtgtggaacgcattaaggcagttggcaagcatagcatcattggagcaagcggagagttcagtgacttccaggagattttgcgctatttggatgaactaactctgtctgatcatatgtgggatgatggaaactcgctgggccccaaagagatccacagctatttgacaagagtgatgtacaaccggcgcaacaagtttgatcctctctggaactcacttgtacttggtggggtgaaaaagggtccaaagggtgatgagaagtatcttgggatggttaacatgattggtacccacttcgaggaaaaccatgtcgctactggatttggaaatcatatggcaatcccgatactccgtgctgaatggcgcgatgatatgacttttgaagaagctgttaagctggttgagaagtgcttggtggtcttgctgtaccgagacagatcatctatcaacaaattccagattgccaagatcacaactgaaggatcaaccatctacccaccatattccttgaagacctactggggcttctctcactttgaaaacccagcccagggcgctgtgggatcatggtagatttatgcgccgcgcacgccgcatatcatgccatgaacttaggcgaaaccaatctgtgctgctgaaatcgaacacttatgaacgtttcttctgaacatcactggaactctgcatttgcttgtatgacatgcttatggttcagcgagtttaattccaacgtttgatcacatgttgtgaatgtggaaaatggattgtgcgattgcgacctcagatgccgttgttgattgtactatgttgaaaacttgaaatgctaaattagtataggtaggtgacctttgccttgtgat

SEQ ID NO: 162714 - DNA, 1383 bp, Zea mays
  Clone ID: MRT4577_79971C.1
cattgggtacctcgaggccggccgggatactagctcacgaaaccttgggccagccgggccggcttggatctcaacccatcggaggtgctctcctcttcggcttcggttgcaagaaagaaaaaggtcacctcttaacaccaggccgccgccattgctgctccctttgttcgtttctcggcaccctcgatcccgagcgtggttaatccacgcatcgaccggcgaacgccaccgtctcccatctcgaatacctccgcgctcagcgtcatggacggcttctccaaaacgatcggcggtggtggccctaacgttccggcgggatcccaccccgcgggcgggagccaggcggcggcagggggaggcgcgacgcagcggacgcagtatccgtatgtgactggtacttcagtcattgccttgaaatacaaggatggtgtgatcatggcatgtgacactggagcctcctatggatcaactttgagatacaagagtgtggaacgcattaaggctgttggcaagcatagcatcattggagcaagcggagagttcagcgatttccaggagatcttgcgctatttggatgaactaactctttctgatcatatgtgggatgatggaaactctctgggccccaaagagatccacagttatttgacaagagtgatgtacaaccggcgcaacaagtttgatcctctctggaactcacttgtacttggtggggtgaaaaagggtccaaagggtgatgagaagtatcttgggatggttaacatgattggtacccacttcgaggaaaaccatgtcgctactggatttggaaatcatatggcaatcccgatactccgtgctgaatggcgcgaggatatgacttttgaagaagctgttaagctggttgagaagtgcttggtggtcttgctgtaccgagacagatcatctatcaacaaattccagattgccaagatcacaagtgaaggatcaaccatctacccaccatattccttgaagacctactggggcttcactcacttcgaaaacccagcccagggcgctgtgggatcatggtagatttatgctctgcatgccgcgtatcatgccatgaacttaggggagagcaatctgtgctgctgaaatcaaaacccttgtgaacgtttgttctgaacataactggaactctgcatttgcttgtatgacatgcgtatggttcaggaagtttaattccaatatttggtcacttgtgaaaatggattgtgcagttgcgtcctccatccaaaaaaaaaaaaaaaaaacctcgtgctatgacatccttatggtgcagcgagtttaattccaacgtttgatccctgtattgcggatcatctgatcgttggtggcaaccgcgcatacaactgtttc

SEQ ID NO: 162715 - DNA, 199 bp, Zea mays
  Clone ID: MRT4577_79972C.1
accttttgatagtccactatttctatcacgggcaggatcatctacaagcttgggaggaacaagcaattcatacgtactggaaatagccccatccataccaaattgggatgctgcccaagtagggactatatacatgtgcattgacaaagaatctactgcatcatttgcaactatttacattgattagtatgtcttgact

SEQ ID NO: 162716 - DNA, 1020 bp, Zea mays
  Clone ID: MRT4577_79973C.1
gggaccctcgagccggccggaggtacctcttaacaccggccgccgccattgctgctccctttgttcgtttctcggcagggggaggcgcgacgcagcggacgcagtatccgtatgtgactggtacttcagtcattgccttgaaatacaaggatggtgtgatcatggcatgtgacactggggcctcctacggatcaactttgagatacaagagtgtggaacgcattaaggctgttggcaagcatagcatcattggagcaagcggagagttcagcgatttccaggagatcctgcgctatctggatgaactaactctttctgatcatatgtgggatgatggaaattctctgggccccaaagagatccacagttatttgacaagagtgatgtacaacagacgcaacaagtttgatcctctctggaactcactcgtacttggtggagtgaaaaagggtccaaagggtgatgagaagtatcttggcatggttaatatgattggtacccacttcgaggaaaaccatgtcgcaactggatttgcaaatcatctggcgatcccgatactccgtgctgaatggcgcgaggatatgacttttgaagaagctgttaagctggttgagaagtgcttgctggtcttgctgtaccgtgacaggtcatctatcaacaaattccaaattgccaagatcccaactgaaggatcaaccatctaccccccatattccttgaaaacctactggggcttctctcactttgaaaacccagcccagggcgctgtgggatcatggtaaattaatgccccgcgcgcaccccgcatatcatgccatgaacttagttgaggccaatctgtgctgctgaaatcaaacacttatgaacgtttgttctgaacatccctggaactccccatttgcttgtatgacatgcttatggttcagcgagtttaattccaacgtttggtcccatgttgtgaatgtggaaaaaaaaaaaaaaaaaaaaaaaaaaaaaaaaaaaaaaaaaaaaaaaaaaaaa

SEQ ID NO: 162717 - DNA, 232 bp, Zea mays
  Clone ID: MRT4577_79975C.1
ggggcattatgctttgatcgacacggaccagcggaacctaggtgctggcgatggaaagcgaccaaccacacattggccctccgcgacgggctcaggacggcgacctcctttcttaaaagaccggcctcgcgcgccgcagcgtattttttgagatcggagcgaacgaataggaagaccagaacgacgacaggggcctagggaacgaagacgtactgcacccggccataaaggg

SEQ ID NO: 162718 - DNA, 260 bp, Zea mays
  Clone ID: MRT4577_79976C.1
cgtaggcctacgcctgccgatctcgctgcgcctgcgtcgagctcctcgtctgccgtgagatctgctgcgaggccgacatggaatgaccacatcgagatcctgagtgcgtgtgccgaaataaactggaaattcatgacgaccataaactccctgcctcttttgaccggaggatatccaaggagggcagtggtgacgctctgggtgaagagtttaacgtttatgtacttaagatcatgggtggatgtgacaaacaaggcttg

SEQ ID NO: 162719 - DNA, 688 bp, Zea mays
  unsure (1)..(688): unsure at all n locations
  Clone ID: MRT4577_79977C.1
tcgaggcnncggccgggatagcgcatctgcatagcgattatttcaccatcatatgtcgggcttgacggcattctgcctgctgcttggactgctctcgtcgcccgtacacctctccgtctatatctctgagactgcgtgatacattctgtcgcctggttgcatgaggtatacccccaaccatcttagtgaactgagcatacaggactcgccaactatcgcggaacaacactatgactccacgtgtgctacgctatcagatccctacgcggtgctagctggaatcacagagctagagggatctcctcttcttcgattcccctcttttggagcactatgactatctccctgtcctccacacgcccagaatggctgatctagctgtgggcattactcggctacagacaaaacaactgaagggccggtcacaccggctttgtaaggccgacaatcactcactagctatgacgcctcatacctatgcttgctgaaccagccatcacactcggcgtgcaatctaccagggctacacctgaggctaggctactacgatggtcgtgagcatgtcataacctcctgcgtgctcgaatgccacaacccagaatgctactgtcacaacatatgtgacacctgtgtatggaacatcaatgagctgcatgataatacctgacagatatgatgttgtgtacta

SEQ ID NO: 162720 - DNA, 557 bp, Zea mays
  Clone ID: MRT4577_79978C.1
cgggcctgccccggtgtatgtaccataatggattttagcatatagaacagtgctcttcctcgttggctcggtcccccctctctcgttgtcagtttgtccactaattcttcttaccaaggcacaaatctgctgcatctatttcaagagttgcacctcactcgtcaccacgccatattggcttctctctttccgctgcctcagccaccactccttagctgcataatccttgacgagatcgttatgtttaattagttccagccacgctgtgtcagatttcattcctgatgcatttttcttttattggctggtgattttgaaaaggcggcacccacagatcttcagtgcgaatattagagcagacaactcaaaatcgtgcgtaggatagttatgctagtgggcaactggcctttcccataggctatgacacagcataagaagaaagcttcgctcaacctaagtcaatagggtatgatccgtctctggcacgggcatggctagaaagggcaccaactggtcattggcatagggatgctagccatgggggagtagcatgatta

SEQ ID NO: 162721 - DNA, 1724 bp, Zea mays
  Clone ID: MRT4577_79979C.1
cgttgctgtcgaagaaaagggaaaagggtcatttgcatatgcctgggctatggatgagagcagtgatgagagggagcgtggcattacgatgactgtggctgtagcatactttaatagcgagaaataccgtgtggttctgcttgactcccctggtcacaaggattttgtgcctaatatgatatctggtgctacacaagctgatgccgccatcctagttgttgatgcatctatagggtcatttgaagcaggcatgggtgtcaatgggattggtcagacgaaggagcactcgcagcttgttaggagctttggtgttgagaacttgatacctgccgtccataagatggatggggtggaatattcgaaggagcggtttcagtccgttaaatcgcaactcggcgtctttcttcggtcgtgtgggtacaaggactcttcagtcacctgggttcctttgagcgcaatggccaacgaaaatttagtcacagcttgttcagacactcgacttttatcttggtacaatggaggctgtctgctgcaagccatcgactcgttacctcctccccgtcgcgacgtgtcaagtccactgcgccttccgatatgtgatgtcattgcatctcacacgctgggccaggtggctgtctgtggtaaagtcgagtctggagggatccgaactggctgtaaggtccttgtcatgccttctggagacatagctacggtgaaaaccatggagcgggattcctctacctgcagcttggctagagccggggacaacgtcgccgttggtttgcacggggtggaccctggccacatcgcggcaggcggagttctctgccatccagatttcccggtgcgcgtggcgtgtcacctggagctgaaaattctggttctggaaatcaccgtgccaatactggttggccttgaggtcagtgggaaacagcacgacgaatagcattgttcttgttcgtctggtgcgatcttctttatctgtttgtctccatgagaatccattatttccagtttgagctgcacatacggcacgccaagtcgtccgcgaggctggtgagaatactgtcgtccctggaccagaagaccggcagggccctgaagaaagcgccgcgtctgctcaccgcgaggcaggcggccctggtcgagctgaggctggacagagaagcgtgcgtggaggaattctcgacgctgaaggcgctcgcgcgggtgttcctgcggtcgcagggtagcacggttgcggtgggcgtggtgactcgagtcctggaccgggctttggacatgggctagctgcattggcacgggcgcggataatttatgaacgtcacgcgcgcggggggaggcaggtaggtcggtctcctggattaatggcacccgggaccgggagggagagagagagggcctttcggcgcccaacgaacgattcaaaggcggccgacacgagtttcgtccacgcacccccacggttcaaagggaggatccgcccgggacggacgggtcaaaggcccgcgactgcaatgaattcaatgaatctggggctgtaagccggccgttggcttgttgcaatctgtccctattttcttcccatccaaaccaagggggcaccgacaggcacactgcgtagttagtgccccttgtgatgaccgtccgaccgcggcttaggaggggggtgtgcggtggcatgtgttgaatgaaaaaaaaaaaaaaaaaaaaaaaaagccagt

SEQ ID NO: 162722 - DNA, 389 bp, Zea mays
  Clone ID: MRT4577_7997C.1
ctatgacgtaacctgcacgcgtccgtaagctcggatcctgtatagcgggcgccatctattctttctttcacgcatgctgaatctcttagatagattactaatccatcgttgtggatgaacctgtctctctacacacatacatgatctgtcggcagcgttcacaggataccatgcattggactgactagcgaggcaccgaaatttttgtaaagcacttcacactacacaaacccgagagttactggtacctcacagctgactgcaaacctaataggggccccgcaagtactaatgatgagactgtacaacgctcctttgtttttgaccatgacgggacctgtgaccatatgcacttcaacgagataatatctgacttccatttcctactt

SEQ ID NO: 162723 - DNA, 225 bp, Zea mays
  Clone ID: MRT4577_79980C.1
gtgcgttggggcggggacttgttaaagactctataggcgcttgtgtgtgaatcatctcctagtgaggcgccttctgtgggcttgggagcccctgttgatttggttcctgttttgctgagagtggcgcctttgctccccgcgactctgccctgtggggtgggggggggttgtctgcggggggcgttggcctggtgccttgtggcgggttgggtgtcggtgtggccg

SEQ ID NO: 162724 - DNA, 294 bp, Zea mays
  unsure (1)..(294): unsure at all n locations
  Clone ID: MRT4577_79981C.1
ggggggagccacgcgtccggatgggaggacccttgctgactacaacanctagaatgagagcaccctccacttggtgcgcgggcttatttgtggtatgcagggcttttttaaaacccttactggcaagaccatcactcttgaggtggagtcttcagataccattgacaatgtcaaggccaagatccatgacaaggtaggcatcccgcctaaccagcatcgtcttatctttgccgttaagcagctgaaggatggactcacccttgcggattacaacattcaaaaggagagcaccct

SEQ ID NO: 162725 - DNA, 503 bp, Zea mays
  Clone ID: MRT4577_79982C.1
aaaaaaaaaagaaaaaaaaaaaaaaaaaaaaaaaaaaaaaaaaaaaaaaaaaaaaaaaaaaaaaaaaaaaaaaaaaaaaaaaaaaaaaaaaaaaaattttttttttttggccgccccttttaaatttttttttttggggggggggtccttccaacttaatattttttttttaggggaaggaaaaaaaaaataaactgcccgtgttttaaaaacttcttgaactggaaaaaaccctggctttcccaaatttattccctttgaaaaaaatccccttttccccatttggcttaataccaaagaggcccgaaccaatcccctttttttttatttgcccaccctaattggcaattggaaccccccttttaccggccctttaaccccggcggtttttttttttacccccaaaataacctttacttttgccagccccttatcccccgttcttttcctttttttcctttcttttttccccactttccccgtttttccccttaaagttttaa

SEQ ID NO: 162726 - DNA, 1411 bp, Zea mays
  Clone ID: MRT4577_79983C.1
cccacgcgtccggcgccagccgccacgccagcgcctgccatggctcctctcctcctcctccccctccccctccgacccatccccgccgagaactccatttcccggctcgcaccgaggccaaggttccctcgtcccttctccaggcggcgcctacgccttcccgccctcctccaagtccaatgcctcgcggccaccggccccgccgcgcccgcgccgcggtggcacgcggcactgtccgccgcggcggggctgtacccggcctacgtcgcagccggcgcctccgtggccttcacgcggcccgaggcgttccggtggttcgtggcgctggcgccggggtcctacaccgctacgctcggctttatcatgctcgccatgggcctcacgctccagctcagtgacttcgccgccctcctccgcgacaggcccctcgccattttgttcgggtgtgccgcccagtacaccataatgcctgtgtttggcgctatcattagccacgcgctggggcttcccccgtcgctctcagctggcctcatcctgctgggatgctgtcctggaggaactgcatccaatgtggtgactttagttgctcaaggtgacgttccattatccgtcgtgatgactgtctgcagcactcttgctgcagtgttccttactcctctgttaacgaaaattcttgctggtgcttatattcctgtggatgccgttaagctctctctcagtactttgcaggtggttgttgccccaattctattaggttcattgatacaaactgcattcccatcagtagctcaatttctgagtccttttgcacctctgatggcagtcttggcttcatcacttctagcatccagtgtcttctctgagaactttgtgcgcctaagatcgacaattgccgatgcatcccctgtgaatggaatgttctttggggatgtagggactgtcatcttctctgtcttcttgctgcattttgctggtttctttgtcgggtatgcagcagcagctataggtggtttcaaagaaaagcaaaggagagcaatatcgatcgaggtaggaatgcagaactcgtccctaggggtagttttagcaaccgcgcatttctcctcgcccttggtcgcgctgcctcctgcagtctcggccgtcgtcatgaacatgatgggtagcacactgggtctcgtatggcaatataccagcacttccgtgtcagagaacgaaaccagtgcgtgatctactcttactgtcgccatgtgcttaatctaatgtgtcgtatctaccaccaccaccactactactacccgaatatacctttcgagtacttttgatcatgttggggaacggggtcgctgatgatgaccctggaatggaaaaaatcttgctgtcttaattactggaagacccaggttacctgtctgat

SEQ ID NO: 162727 - DNA, 243 bp, Zea mays
  Clone ID: MRT4577_79984C.1
gcaggagttcgccctaagtccctaacatggacggacaacccagagacccatcaaacaccacatgccatttgcttaataccacctttgtcaatgcatagatatcaatgtaattacgcatataaacaggagatacctatagggactttctgttggattggaacgacatagatgcagcatagacaaaatgggtactagaacaaaggcaagttgtgtataaataagtaaggggtatcctcactcgat

SEQ ID NO: 162728 - DNA, 389 bp, Zea mays
  unsure (1)..(389): unsure at all n locations
  Clone ID: MRT4577_79985C.1
aattcggcacgagggcataacgagaggaaaacaaatcagaggaattcgacgagggcaccagccaccagcaccaccatggcggccgcctccaccgccgcctcgcactcagcctccttccccgcggcctccctccgccacgacgcgcgcagaccctcctgcgtagcccccgccgccgccgcggcgacgacggccgctgagacggggctcacggccgtcccggcgccgacgccgacgccgatgttgcgggtggtgccggagtcgctgcagcgggacagcgggtgcctcgtggcgggcttccgggagcgcggcgcgggcgcggcggatggggaggggttcggngacgccgtgggggaaggaggaggccccggcgcgatggagtgcctcaccag

SEQ ID NO: 162729 - DNA, 148 bp, Zea mays
  Clone ID: MRT4577_79986C.1
cctcttcacctctgctggatcataggctgaggtgacgaaggatggcccgacccacaaacatgcactacttgcgaacacccatgccctcaagctgaagatcacctgctgcaacaagatgggagcgaccacccccaaatattccaaggcc

SEQ ID NO: 162730 - DNA, 184 bp, Zea mays
  Clone ID: MRT4577_79987C.1
cgggcgggatcatcttccatagatccctcacctcactcactcgtgcccaaccagagaacccacccaccctccttcatctcccacatccacatctatcctagaaggccctgggcgacgccggggagcacctcgagagagggttccagaagtgaaagaccgaggcggatgactacaagccggagct

SEQ ID NO: 162731 - DNA, 284 bp, Zea mays
  Clone ID: MRT4577_79988C.1
gaagttactagttctgacactgttgtggggagagatcgaggcgtgcgtgcatgcgtgcctaatttgtaatttggtatggtcacgtactgattggtgggctggggaaggatttggtggacccacttgccagtgcaatgtcacctttgcgggctgatttgatttagttctgctcaagtagtcaggtgtttcactgtttgtatttgaagttctggaacatgcgagtggatttagacatcttcttcaggtcatgcgtgttaatatattagctttaagtgattgttaaa

SEQ ID NO: 162732 - DNA, 581 bp, Zea mays
  Clone ID: MRT4577_79989C.1
attgggtacctcgaggccggccgggataatcaaattttatacgaagtcccttcacaatccagtcggacgatccaccaacagccgtgatgtacgggatctgcgacccaaacaatggacaaccctgctccgtatcatccccattgaccataaccgcatcctcggcggcacagttcatgactatcaccttccgtgcaatggatatgtcatcggctgctactgagacgacggagatgattgtgccgccaaggccatccgattatctttccagaacactcatgacttataccactgcgtacgacccgagtgccaccaatccctctgtcgcggctcgtatacagacagtctacgggcctgcttttctaacgcagatctcttgctcaccatgaagcctcgagaccgtacctgctagaggactcacacgcacgtgcatcaacctaaagtgcaaccatgtgtcacacgaatgcttcatctacggctcaagcgacgagaccgtcatggtcaccgccgtcaagaagacaagataccttggcacctttagcaaccacgagaactctgactacgttgccgtgtgagctttctgc

SEQ ID NO: 162733 - DNA, 253 bp, Zea mays
  unsure (1)..(253): unsure at all n locations
  Clone ID: MRT4577_7998C.1
caggaatctatcgtcagtgttcgaagcgcttaacttggctatcttcgccccgatccgcatgttgccggagaacagtgcggtctttacggtcgtttgagcttgacgaggacgatctnttntacgggtagtccgggttgaccgagccgacgcagccgttgcgccgaccactcactttgtcctccgtccgccatgcaaaccctagtcctgttccacgtttatttcgcccgccgcagggcatactggatgccttccc

SEQ ID NO: 162734 - DNA, 457 bp, Zea mays
  unsure (1)..(457): unsure at all n locations
  Clone ID: MRT4577_79990C.1
cggaannnnccgggtccggacccacgccgtccgcggaccgccgtagggtgtctncacccaccactctgctataccaatagtccaacgcaactaccgcaaggcaatccgttcggaccttcgnngtgggggaaataggagggccgctcgcagctcgctcgagaccggggcttcgccnnngagaaaccggttgggtgctgtacctcttctgccggggatgaggctncacctggtctcctatgtattgagccttggcaaagaatctctcggcgcgccggggaccctgtctcgtaataattggtcgtcgtcgagccctcctcttcaacaacgggccgcctacggcgctctttctctcnngccggcgtcttcctgcggccaaacccgtccaatcttccttccacnncgcctggcccannaagtcgaagccgcctcctcgcctcgtcaaagaactcaagcacca

SEQ ID NO: 162735 - DNA, 383 bp, Zea mays
  Clone ID: MRT4577_79991C.1
ctttatgaacacatctgaacgctcaaataatagcatggaggccgccagaacatcccacactggcggtgcagaccccttgcagtgcggctgtgctcagtagagtcccatactcgaactggcttgtgtgcggtctgttggatgcacaatgtcaagcgttctctttctccctagctaaataaatctgcggggtaaggtgtgatctaacgagccctgacggtccaggaaacaggagacctttggcagcggtaagaccaacgtgttcctatacgcgaagagagacattgtgcaaccgtgcggaggtttggaaacatttattgacgcaccagaggcggtgtaaataccacaggtatagtacgcaaactttataaagggcggacgctcgg

SEQ ID NO: 162736 - DNA, 578 bp, Zea mays
  unsure (1)..(578): unsure at all n locations
  Clone ID: MRT4577_79992C.1
cgggagccgggccgcactaccaggggcgacccacgcggccgagccncgcttccctcccgcggggaccggggccacgagccgagagcagcaggggnagccacccgcccagaaaccagacaccangggngacgaagacgagaccaccggccacgagggcgacaagggccccggccaggagaaagccggggggggcggcgacgacgccccaagggccgagagcccgagcagcgggggccgccctcgccaccagggcgccaggggggggaggggacagaaggaccccgacgggggcgacgaggcccagagcgagagaggcanccngaccctcaagggccccagcgagcagggcagcgacaccaacggggacgacagggagaagaccngggaccacaccgggnacaacgagccgcgcggggcccccgaggagcaccccaccccgcgcaccgaggccgcggcgaaccccaaggccaaccgggagaagaggacccagaccaggggggagaccggcaacgggcccgccaggccccggggccaggcaggccgggccggcgcngnacgccnggggccggaccaccggc

SEQ ID NO: 162737 - DNA, 456 bp, Zea mays
  Clone ID: MRT4577_79993C.1
ctttgtttggctgcgctgccaaggcgccgttcttggatttcagtgtttccttaactaggcaaaacgcattctgagccgcggcggacggcctttggcctgtgtctgtttctttgtcttagatgaagtggtcgatctggaacgttagttgctgctcttttctttgccttaggccatgtttaaatgcgctagagttaatagttagctactaaaattagctgaaaatattcaagcagtctacctaatagttcagctattatctatttttaacaaattaactaatatttagctagctatttgttagctagctaaatctactagtcatttttagctaaataactattagatctagttcatttaaacacccccttggatgaagtggcctgtgcactatgaccagtagaagctcactaaaccacggtgtatgaccggacatgatgcaaaggattttggccatgt

SEQ ID NO: 162738 - DNA, 123 bp, Zea mays
  Clone ID: MRT4577_79994C.1
gccggcaccggtgggggaacccgaaattttgggaccgggacctttggggaaaccaattttttcttaaaaagagggatattaaaaccgggcaaaataatgggatagaggggtccctggggaaaa

SEQ ID NO: 162739 - DNA, 394 bp, Zea mays
  Clone ID: MRT4577_79995C.1
ggggaaaaatttaaatacattgggctaggagctaaattggtggggggggagggggttttaataaggggggaaaacaggggataacgctttgaacttgggacccctaaccaaaaaaggggtttttttagggcacacatttggggggaagaaaatccatgaaaatggtttaagttacaggggttttgcccttttttttttgggggttttttaaggaaaaataaaggttttttccctcaaggggggacccataaattggggcaacctttccagggggggaaaaaattttttcaaaaaccgttcctggcaaataggcctaaaagggggggagaaggggccgtacttttttggggttttaaaggttttttgaggaaagggggggggttttttttgggtt

SEQ ID NO: 162740 - DNA, 603 bp, Zea mays
  Clone ID: MRT4577_79996C.1
attgggtacctcgaggccggccgggatacctatactacgactgccttcatttcacgacgatcgctttcctcgtattctcgctcgagcccttcgacccatctaatccgactgatggtaccccaccagcctctggacgatgaccagaacctcatctcgagtgcactgacatagctgcgctataagccaacagaacccggcagccatcttgtatggaacctcgcttctgaactcgctcgacttagatgacatttgtacgaccgcgtgcctgcactctagaaaatttactcaagctacgaggccctatcgacccccacgtctttcttttcgtgtacccgttctgatagacacatcgtcataacgcctacaaactatatcactgaatctgggtttagcacacttctacccccccgcctcttttacgctcgcgctctacgaagagaacaaggacagcgcaccaatctcattgacttgaaacttacagttgcagggaatcaccttctgcatcccatgaatactgtccaccctgcccatggactcgacaggcactttgtccgctgccgatatcgtacaccagcgtgtagtacctctgtctcttctaagctg

SEQ ID NO: 162741 - DNA, 292 bp, Zea mays
  Clone ID: MRT4577_79997C.1
gttggggccacacattacaccgtttttacttattattgaacacaattattgacgcatgctagaaaactaagcgagaacaagaagacaggaaagggccatatttaaataaccaaaggcccaccacctgttctgcctcagggggacggtgggagggaacacacgcaaccttccccagggggcggagagggaaaaaaaagtgtgaacacacaaaaaactggcgcgtgcggtaaaaaaataaacaggcgggggggtgtgtgcccccgagctagcaaggaagatcgcgcgcctgccg

SEQ ID NO: 162742 - DNA, 260 bp, Zea mays
  Clone ID: MRT4577_79998C.1
gaacgccatcgagggcatgaacggcaaggagtttgactgccgcaacatcaccgtcaactaggcggagtggtttttaggtcgtggaggcagcggtggttggtactgtggtggtcatttatgcgtttgatacatgtgtggctgacgccgtgatggcttcatgctacatactgctgtggcatatgctacagtgtctgctgctgctactgtggtggtggcagaagctactgcattggcaaccgtttctactgctactgtaacta

SEQ ID NO: 162743 - DNA, 341 bp, Zea mays
  Clone ID: MRT4577_79999C.1
acccaaaatttgggaccacatttcaccattcttcgacatttccaccattttggcaaacgccctaatttttgggacccaaattttttttacaaaaagaccggggggaactggcgttccttaaaacacccaggttccacgaccgcagaccgggggttaacccgagatctgaaagggctttactttagggtttttggggttctcctttggcacaaggactgtaaacacccccttcttcatggggggcgggaactgctccgtcttggcgttctcgggcaggcggaacctgcgcaggaacctcccggtgtttcgtttcaagcggggccaggtggccggctttttct

SEQ ID NO: 162744 - DNA, 247 bp, Zea mays
  Clone ID: MRT4577_7999C.1
tagtgctatcacaatgaacagtttgctctcgatctcaccgacaccgaggaaggagagatcaatggcgtccgagcaaggaatcgtgatcacgtgccacagcacggctgattttgacgcccacatgaccaacggccaccaacacgacgagcttcacgtcatcgacttcactgccggctggtaccacccattctccgccagtgccgcactgctaggtcaacacccccatgaaggcactcaagtcgggatc

SEQ ID NO: 162745 - DNA, 1659 bp, Zea mays
  Clone ID: MRT4577_799C.1
ccggccgggactgcgatatatagggacccccgtaattgcataccagcggtccattcccttcgtgcttgtttgctctagggtttttgccacgccgccgccgctctgccccttccaccccaccgatataccaagatgacggcgcaggctgcggaggagctcgccgcccagatcgagcagcagaagctcgaggagcagaagaccgaggcagaagaggttgtggtggaggaggatgacgaggatgatgaggatgacgatgatgatgacaaggatgatgatgaactggatggacaagaaggggatgggagtggcaagtcgaagcaaagcaggagtgagaagaagagccgcaaggccatgctgaagcttggcatgaagcccatcactggtgtcagccgggtcactgtgaagaaaagcaagaatatgctttttgtcatctcgaagccagatgtgttcaagagcccaaactcggacacctatgtcatattcggcgaggcgaagatcgaggacctcagctcccagctgcagacccaagctgcagagcagttcaaggctcctgacctgagccaaatgatcccgaagcctgagacatctggcctgggcctggaggacaacgaggaggaggaggttgacgaaactggtgtcgaggccaaggatgtcgagctggtgatgactcaggcatctgtttcgaggcccagggcggtcaaggccctcaaagcttctaatggagacatcgtcaccgccattatggagctgactacttagtgttatttttgtcaaccacccctttcttttaagcatgtatcgtatgccatgcagcttgagcggatatctgtggacaacatgcttgcttagataattttatcatgcttgctttttctgtcaaggctatttgaacattgtttcgtttttgctggcttgctgcatagcaacagtttatgtcctatgtttgtccggacatttcctaaaaaaaaaaaaatattagcggcccgatgatgatgacaaggatgatgatgaactggatggacaagaaggggatgggagtggcaagtcgaagcaaagcaggagtgagaagaagagccgcaaggccatgctgaagcttggcatgaagcccatcactggtgtcagccgggtcactgtgaagaaaagcaagaatatgctttttgtcatctcgaagccagatgtgttcaagagcccaaactcggacacctatgtcatattcggcgaggcgaagatcgaggacctcagctcccagctgcagacccaagctgcagagcagttcaaggctcctgacctgagccaaatgatcccgaagcctgagacatctggcctgggcctggaagacaacgaggaggaggttgacgaaactggtgtcgaggccaaggatgtcgagctggtgatgactcaggcatctgtttcgaggcccagggcggtcaaggccctcaaagcttctaatggagacatcgtcaccgccattatggagctgactacttagtgttatttttgtcaaccacccctttcttttaagcatgtatcgtatgccatgcagcttgagcggatatctgtggacaatatgcttgcttagataattttatcatgcttgctttttctgccaaaaaaaaaaaaaaaaagcgcccctatttcctcaataacccaacagcaaca

SEQ ID NO: 162746 - DNA, 354 bp, Zea mays
  Clone ID: MRT4577_79C.1
ctgtaaaagccacttgaaaggggtgtatatttatccccccttttaggggggaaaacattacttaaaaagtccccgggcccagtttccgttttaaacgttcaaatttaccccaaaagttcaggaaactgtccttgtccctgtaaaaagaaaaagggggggacatttattcaggggtttttttttttttttttggaacccttaacattacggttttgaccccccagaaaaaaaaaaccactttttgggcccctttaaggtttgccgggcagtttttcctttatcttggccaaaaggccttttttttcgccggggccctttgggccgggggggtaagcctcccccggtgttttccct

SEQ ID NO: 162747 - DNA, 1170 bp, Zea mays
  Clone ID: MRT4577_7C.1
ccggccgggattactctgctagctgccccggtctcctcctcacactccctctatcgccaggcaacagcagcgcatgccagcagcagcgctcccgattcggcgccacctcgatccccagtccccgtccacaccacccaatcctgctgtgttcttgctgcagccgttggtctcctgctttgttcgggtgctagctgccacgcgcgatgcctcctaacgcccaagacgtgcacgggagcagcggcgggctcgccatgacagccccggcggcgtccaagatggactgcttcttaaccgccgtctgcacgccgctcaacctccagttcatcgacgtgtcgtaccgtgtgaagcagacggagcggtcctcgaaggcggcgccgggcgggcggatatcgcactccggttccggcgccgcggcgccggaggagcggacgatcctgaaggggatcaccggcgaggcgcggcccggggaggtgctggcggtgctgggcccgtcggggagcggcaagtcgacgctgctgtccatactggggggccgcctggcggggcaccacggcgggacggtgctggcgggcgggcggcccccgtgccgcgccgtgcagcggcgcacggggttcgtggcgcaggacgacgtgctgcacccgcacctgacggtgcgcgagacgctggcgttctgcgccatgctgcggctgccgcggtcggcgcccgccgccgccaaggccgcggcggccgaggccgtgatcggcgagctgggcctgggcgcgtgcgccgacaccatcgtcgggaacgccttcgtgcgcggcgtgtccgggggcgagcgcaagcgcgtcagcatcgggcacgagctgctggtgaacccgagcctgctggtcctcgacgagcccacgtcggggctggactccaccgccgcggcgcgcctcgtggcgacgctgtcggcgctggcgcggaaggggcgctccgtcgtcctgtccgtgcaccagccgtcctcccgcgtctaccgcatgttcgactccgtgctgctgctcgccgagggcagctgcctctacttcggcgccgggcgtgacgccatggactacttcgcgtccgtcggcttcgcgccgggattccacgtcaacccggcccgacttcatgctcgacctcgcaaatggtgagtcatcgtattatgtacgtgtg

SEQ ID NO: 162748 - DNA, 199 bp, Zea mays
  unsure (1)..(199): unsure at all n locations
  Clone ID: MRT4577_80000C.1
aattgtcgagatcagctcatctggcggctttgtaatcaccggcctcttattgggggatctctgactctaatccgtagcatcatcctcgaatatgacgctagatagataatagcgcagtcatgcttacagcaatcaaccatgagctgtaagcattggataagacttatgcgtacgacaagatacacaaancgtccatatc

SEQ ID NO: 162749 - DNA, 508 bp, Zea mays
  Clone ID: MRT4577_80001C.1
gcaggttcaacctcatccaaagatatcttgcagaaacatgtttaaatttcagcatgccacgtagattgcacgccttattgagctcctgaattcgtttcgaatattccttgtatgctgcccggctgttgactctagctgcttcctgtaactttcccattgcaagtgggtcgttgagatgaatttcaccattttttctccagtggtaatcccctgggttaggaagtgcctttgcatctgcactgccagctggaagggctcttgatgggaaagctaactcatgaagacggagagcatctcgtgcaagcatttcaaatgttgcaccctcaattctgctaggtgtgccttcgaaacacttgccaaccacttcagaagaaagaccaagagcttcaaaaatttgtgcacctttgtaggatgcaagggtggatattcccatctttgcaagaactttcatcattccatagttagaagcatagaaatacttcgccaccagctcttcctttgagtaagg

SEQ ID NO: 162750 - DNA, 391 bp, Zea mays
  unsure (1)..(391): unsure at all n locations
  Clone ID: MRT4577_80002C.1
ggacgacacaccannagccanancaaccccagagcgcagaagaacccgaccgacaccggnagggngnngcacggagcccgcgcgcaccaggcacncgcagcgagcgccaccaccacgcanacaagcggcggcagcggcagccagccaccgccgccggggcaacaaccgccgccggagcaacngccaccaccggaacaccagccaccaccggcgcagcncccaccgccggaccaccggccgccgccggaccaccggccaccgccggaccaagagccgccgccggagcanccgccgccgccaccaggccacgacccgacgcaaccgccccgggcacagccgcagccgcaggcacacccaggcccgagccaacagccgcaaccaagcccgagcc

SEQ ID NO: 162751 - DNA, 392 bp, Zea mays
  Clone ID: MRT4577_80003C.1
cccctccataattccctcgtcccacccctccgtagatgattgtgcacagatccttgctgtagggggctccttaaacagtgctcagggacctgtcccatctctcttggcggcatctgatggcattgctcatgatgaacacctcacatgctccttgccacctccatctcaaattgaagatcagtggaacagcagcataaaactgatgatagcaatatggaagccaagggcaatggctatctattacacacaaaatgacgttactcaagacatgactgctaacactgccgtcaagcctatacttagggcgaaattgacttagagcagttcatatgctgcccgtgacatctctgactacaagaccatccttgctgaggagccagatactacacgcc

SEQ ID NO: 162752 - DNA, 244 bp, Zea mays
  Clone ID: MRT4577_80004C.1
ggggcattaaggccaccccattgggaaaaaaaggtttgggaaaaaagggtggggctttgccaacgatgtaacagccctagctttgaaacttggcaggttgaaagcttttgggcggttactttttttgttcaaaaacccctctgttctttttggggggggccctttttttttttaaaaacccccccaatcctggggttttgaaccctttcaaacctagggttggtggccccccggtgtttttttg

SEQ ID NO: 162753 - DNA, 499 bp, Zea mays
  Clone ID: MRT4577_80005C.1
tctgatgtcaattaatggcagcagagttcaataatgtctggtctctgaagcacatactcagttttctgtcggctgtgttgcagacgaatgacttattgccacagagctaaggatgacagtgtgagtatttttgctgttcaatgtaactcagttctgttatttttttgactgttgttgatgcatttctgtcccacctgtccggcagagagaaagttggggcagatttccggcttcaatttatgtccttatcagcactacaacagcaacgacgagcacagtagcaaagcagtccgagccttgtggaggagagcctccacaagaagtgcctcgacgggttccctacctccgccgccggtaccgtgtcattgatgggccacttcatcgctatctagcacaagtgatgttgaaggctgccctttgtgctcaagttcttccgagacgtcaagcgtgtgcgagaacaaggagctatagatgatcgtgacactttcctccatgcagt

SEQ ID NO: 162754 - DNA, 793 bp, Zea mays
  Clone ID: MRT4577_80006C.1
ttcggggatcacatccgagtgcgcccacgtccatcctcagcagaagccactcatcacaatcatggccgagcaactcgtactccgtggtaccctcgagggccactctggctgggttacctcccttgctacctctctggagaaccctaacatgctcctgtccggttcgcgtgacaagacgctcatcatctggaacctgacccgcgacgagacctcgtacggttaccccaagaggagtctccacggccactcccacatcgtgtccgactgcgtcatctcttctgacggcgcctacgccctctcctcgtcctgggacaagaccctccgcctctgggagctctccactggtgtcaccacccgccgcttcgtcggccacaccaacgacgtcctctccgtctccttctccgccgacaaccgccagatcgtttccggatcgcgcgaccgaaccatcaagctctggaacaccctcggtgactgcaagtacaccatcaccgacaagggccacaccgagtgggtctcgtgcgttcgcttctcccccaaccctcagaaccctgtcattgtctcggctggttgggacaagctcgtcaaggtctgggaacttgcttcctgccgcatccagaccgaccacatcggtcacaccggttacatcaacaccgtcaccatctcgcccgatggctccctgtgcgcctccggtggtaaggacggaacaaccatgctctgggacctgaacgagtccaagcacctctactccctgtccgccggggacgagatccacgcccttgccttctcgcccaac

SEQ ID NO: 162755 - DNA, 1365 bp, Zea mays
  Clone ID: MRT4577_80007C.1
gttttatgtcatagacatgaactactttcctggtatgtggctgctttcttgcgttgtctctccgtttgcagggaagggtgctcccagcccccgtcatgccccttggcccctcccaaccctcgtcgtcataacggagggtgctgcgacaagccagcggatgagcgtggcgatcccgctggagcagtccatcacgccggtgctttaggactttatgaatctcaacatatgctatctaccagtgtattactgtggagcctcgtcgtcgactcccacgtccatgagaccacctaggagttgctcgtgtacagctagctctaccaattcgagggatacataagtgggagtactgagggaggtgccgggggagaaaatttttctcagtttggtgctgatttatcaagacgaatgacttattgccacagagctaaggatgacagtagagaaagttggggcagatttccggcttcaatttatgtccttatcagcactacaacagcaacgacgagcacagtagcaaagcagtccgagccttgtggaggagagcctccacaagaagtgcctcgacgggttccctacctccgccgccggtatcgtgtcattgatgggccacttcatcgctatctagcacaaggtgcaacacccccttccctcgctccttcgctcttcctggctccaatctgatacaccctctacgttagggtatgagtgaccgagtgacacttgatctgtcgactttaaccggggcagtcgacaaagcacgcgcctggatgccctactatatgtattgagtacataggattattagtacacttcctttgcactgtcacagcgatctagatctccacgaactaaatgtggatcctctctcttggcgtgcacaccgatcttttcattcacactgcactcaccgtcatggcatccaccaaggacttctcgttcgtctctgccttcaggtccaccaaatactttttcatgtggatcctctctcttttgaaatgtgacctgacttctttgctcaagtcacttaccctctggtctgaccagttcattatattgttactgagcttggttgatgtatggtgatgggtactacagtaaaagcagtttataattccaagataagaaattctggtgttttagtttaggccatggagacacaccattgctgtggaattttgtttagtggtggtgctagatgcgcctggattttcatatgtttcgtttggagaccggaaactttttcccttttttagtgatgttgcaggctgccctttgtgctcaagttcttccgagacgtcaagcgtgtgcgagaacaaggagctatagatgatcgtgacactttcctccatgcaggcgacagcaacg

SEQ ID NO: 162756 - DNA, 963 bp, Zea mays
  Clone ID: MRT4577_80008C.1
tccggattcccgggtcgacccacgcgtccggtttattgtgtttgccaaatcccaggcaaaagaaaatcatttgaaggtggaggcgatgtttgtgagctttgctttacggaatctggatgcaaggacagagatttcattgttgactctcggaaaccactggtccagttaggcaagaacatgcctgcccaggcagagcggaggtcgaagagagtcctggataagtttctcctaaacgaaagacacttgtttataaccacatcaagtggcggattccaggatgtctatctcttctttggaataattgacattctacaagactacgacataaccaagaagctcgagcatgcatacaagtcctttcaggtcaaccctggttgcatttctgccgtagacccaaagttgtactcgagaagattccaagacttcagtcgcagagtgttcatcagagaacattaaagaacaatttgtccagcgggtgactgctccactggcattttacatcatgggatccattggtgaagtcctggggtatgatggtttcaccgatcccgagcgtgccctggaacagtggaaaggatggtcggtttacccgacgcatagttttctgaataattggcgtcgagggaggaggagcactgccgacacgcatgctaatgctgaaaggatgcgagctaaaactgtagagctttgccttttcaaggacttgtaaaatgtaagtgccggctccatgattgcggagcacatacccaaaccttgctgtttgtttattcttcttccgcactcgcatcttccaagaatctcaagtgattttagcttcttgggatgcttgatgaatactaccagtatgaatgatcttggccaaatggggaccagacattgtacatgcacatactgtcgtgtattgtgtacactagtagatggatatcttgtcagagtttaaaaggattttggatgcattactgc

SEQ ID NO: 162757 - DNA, 615 bp, Zea mays
  Clone ID: MRT4577_80009C.1
atgacaggggagaaaaggatgttctctttctatgagaaaaatgatgatcctcaacgagctatcacttttggggatggaaatcaaggatgtcttgaggaggagggcatcaagcatgagttctcttctccctacacccctcaacaaaatggtgtagtggagagaaagaatagaactctactggacatggcaactaatggctcccaagtgaagcaagttgatcttgatgaattagataatgaagaggctctgtgcatcacgctgaggaacatgtccattggtgacgtgtgtccaaaagaatctgaggagcccacacaagcacgagatcaaccatcatcttccatgcaagtatctccacctacccaagatgaggatcagactcaaattgatgaagatcaagaaaacgagccacctcaagaggaggacattgatcaagggggagatgacaatgaagacaaggaagatgaacaagaaataaggtatcaaagaccgccacacccaagagtccaccaagcaattcaaagagatcaccccgtcaactccatactcggtgacattcataacactacaggaaactggttaaagaacgtgggtgaaaaaccgtcgaacttaatgtaa

SEQ ID NO: 162758 - DNA, 315 bp, Zea mays
  unsure (1)..(315): unsure at all n locations
  Clone ID: MRT4577_8000C.1
ttntttttttttttttttttttttttttcgaactttttttttttttttttttttttttttttttttttcttttttttttttttatcccagtaaatttccaccccaactgaaaaaacttgaagtttacccaaaacaccactattacaactggaagggggtaaaaagccacaagagggcccaacaaggaaggggggaaaaaaaaccctcatggtctaaaaaaaaaaagtgggggaaaagccaccaattgtccaagtgctaaaaggggcccaacgttagccccaacgcgcgggaaaaacggcaacaacgggggttgcc

SEQ ID NO: 162759 - DNA, 508 bp, Zea mays
  Clone ID: MRT4577_80010C.1
tttttttttttttttttttctaattatatagattttataacctagaatgaatcctgacttatttcggtacaaccgaacgagcccttagctgctggctgcatcaacgatggatccatcgtcatccctcgtgctgctctggcctgctgctactgctggctctagcctctatcagcgcgtgtagtgtaggcggcgcgtcaccgactggctagctggcggcccctagctatataaagacgcagcgaagattgccctccaagtccaaacacctagccatctccatcctgcactccaccaacggctgcctagctagtagcaagtagcagccatggcgcgcgccaagcagacagcacgcatgcacttgagctgagagttgagagagatgggccgacgccgaccggtcgcgagagctagccactgcttgcttgcctgttgtatggtacgtgttccttcttccttcactgcacttccgatccctcgcgtcgtcgtcgttcgtgactagctatcctat

SEQ ID NO: 162760 - DNA, 354 bp, Zea mays
  Clone ID: MRT4577_80011C.1
ggagaatattaccgagatcgccagtgccgccggaaggccgatgacgagatggcaacgcacgctaatgacatcgaggtcacggcgttcaatgacgtctgaacaatatccacacacgcctgccagatatatgtccaagccatatctggggtctcatggacagagggtcaagctcttgacgtggtgtgccggcgagctggataattgcggcacgacctcttgccccaccagatttaccaatagatcatcctttctgtctctgcgtgaatcaacatgttacttatgtagggaaaccgcataatgttcgctaatgtagtatgtagctcaaacgtcagtgctggtgtattagagaaggct

SEQ ID NO: 162761 - DNA, 810 bp, Zea mays
  Clone ID: MRT4577_80012C.1
ctcgagccggcgggattttgactccccccctggaaaaaccacagccgccacaaccattttcctcttctccttcagccgacgcacgctccctgcatctccctccactcgcccctcgacgcagcacgccagcaggggctcttctctaccccatggctggcgccccaacctccaaaccgctccttctccctgggcgcccgcggcagaagcctcctcggctgagttcccttggagcaggcgctcccagcaggagcttttcctcccatggcgtgacgcttcagctccagggtcgtccatggctcctctccttgagcgccttcccttctgctccagccgctgctcctcaacgctgcacccatttgagctctgcaagcccggtctgcaggtcccctctgctcggacgccgagctccctgtttccccgctccctgcccaaaaaaaaatccagcgaggtcccatctccagaccagcgcccctgctatctcctccccatggcgtcgagcttctccgtcgcacctctgtgacgtgcccagcgcgcccgccatccatccctgtgcacggcgcccgtcctcccctctgttccagccatggtgcggcacaccctctgatccaagctcgagcaggtgaggccgccgtcgcccatggccgatgccctgctttccggccagcagccagcaacgcgcagcacaacaccatgcctgctgtcccagccaccccgtcgagttcccctttgcaacctccatggtgcccctgcttccatcccatagctgagcgcccctgctgttctcttcatgccccttggctggtcgacgga

SEQ ID NO: 162762 - DNA, 399 bp, Zea mays
  unsure (1)..(399): unsure at all n locations
  Clone ID: MRT4577_80013C.1
accctatgccttcttgggggacttggcggccttcttgggcgacttggcctccttgctcccgccgctggacgccttctccgccgtcttcttgggcagcaggaccgggttgatgttgggcaacacgccgcgggcgaggacccggcacacttccgagctcctgtgtgcggatcgccacagcacgtggcgcgggacgatgcgcgttctttcnttttggggttntggttcccctttgggccnaaggggnncccgggtttttgggnccccccgnggccgnaagccttccaggaacctcagcggcgaggtactccaggacggccggaggaacgggcaccgctccgaccctggcgacggccttcttgagagcgccgagcgcgagggaacggaccggctacggacctg

SEQ ID NO: 162763 - DNA, 304 bp, Zea mays
  Clone ID: MRT4577_80014C.1
ttaactctggcgacctaagctgtagctagggtagcatatcaagagctcacagtggcttattcaatggtggcaagcttctgagggcctgtgacatcaacaactgatttgtgcgaagagaattattcacactcgttatatctccagaatggttagtaccatatctaatgtaccatgcgtcatttttgcacttattgtattagcgaaagctttctgccaaggcttatcaaaaaccgaatctactgtccctgcacatatcccatatgatacttgctctcgtaagaagattacccatgcccccttggaa

SEQ ID NO: 162764 - DNA, 362 bp, Zea mays
  Clone ID: MRT4577_80015C.1
aaacaacaatactgtacaggcttcacatgggagaggttctttcaacagtccctacagtcggttttaatgtcgagaaggttcagtataagaatgtggcattcactgtgtgggatgtgggtgggcaagaaaaactcaggtcactgtggaagatgtacctgagtaattctgatgcactgctttgggtttgttgcagatctatgtcgttgattctctggacagagaaaggatcagagacgcgaggcaagagttccaggacctgagaggcacgatgagcacggacgaggtcagcgaagggctggggctgcacgacctcaggaacaggatctggcacatacaggggacctgcgcgctccgcggcgagg

SEQ ID NO: 162765 - DNA, 384 bp, Zea mays
  unsure (1)..(384): unsure at all n locations
  Clone ID: MRT4577_80016C.1
ggactccccctccgtagtgcgagactgcgagggatgttcgcgcgtttcccacgctagtttggggggggcctttagaatcccctntggaggctntngtnagtatcacttgttnttnttngagctaccagntgcctatcatggtcatcatggtcgagctgntgcccccacttgcctatctaatcctcattcctatgtagagctgntccttggcctgtngctttgccttgagcaatttggtttatagcattttttttgtggcttgtgggtggacgaattggactggttctttnttaantgncgagccggtattgctgactaggtccaaaagcccggttgtgcttattattaataacacctaatttttgagagtggcatgtgatttga

SEQ ID NO: 162766 - DNA, 1257 bp, Zea mays
  unsure (1)..(1257): unsure at all n locations
  Clone ID: MRT4577_80017C.1
ggcttgcttctccccgtcgtccgctgttctccgccagaccaaacctgaccaaccccacccactggaccggcccgcgcccgcttggtccagcgccggccctgcctgcagccagccaccgttgtccgttccctcccgcgatccactcctctcgagctctaggggacggaaggaatccggcgggggtggggtgcgagcagggggagggagaagagcagccgcccgccccgcgagggggcaacagctgcccaagaacctgaccggaagagttgtgggagcggcggcggaaagatggggcaggccctgcgcaggctcttcgactccttcttctccaccagggagatgagggttgtgatgcttggtctggatgcagctggtaaaacaacaatactgtacaggcttcacatgggagaggttctttcaacagtccctacagtcggttttaatgtcgagaaggttcagtataagaatgtggcattcactgtgtgggatgtgggtgggcaagaaaaactcaggtcactgtggaagatgtacctgagtaattctgatgcactgatctatgtcgttgattctctggacagagaaaggatcagagacgcgaggcaagagttccagaccattatcaaggaccctttgatggcaaacagcataatcttggtatttgcaaacaaacaggacctgagaggcacgatgagcacggacgaggtcagcgaagggctggggctgcacgacctcaggaacaggatctggcacatacaggggacctgcgcgctccgcggcgagggcctctacgacgggctcgactggcttgcgtccaccctgaagcagctgcaagaatcgggccacgcgacttcggtcgctggcccttccatctgatccagcgcaagtgagctcagtgcctcagccaactgacagcaagcccacaagaatatgctccagcgcgagcgcattcctttggtgggtgtggctgcccgctggtggtggtggagttccttcggtcggtgttgccgtgttggtatcatatgagccagttgttcatccggcagggactcgcgtacttttttttctctcctgagattgtttgtaaattgttgaacggatgcaatgccggcgatgttgatcttgtgtgctggtggtgcacgtggttgttttgtctacttttttttacaataaaaaagagatcgtctgcggttctggtgattaaaaaaaaaaaaaaaaaaaaaaaaaaaaaagggcggccgccaccgtggtggannnnnn

SEQ ID NO: 162767 - DNA, 370 bp, Zea mays
  Clone ID: MRT4577_80018C.1
gattaaatccagccggtgttgcatggagctcatcgattggatatatattgcttgctccagagtgagatctcactcagcatacaccagatcaaccagcaacaaagaaagtagaaagaatagcagtagtaatagaataagccaaccgagcgaaaggagtcgatcggcagccatggcgggaggcaagaacctacggttcatgtcccagtttcctatctccattcattaatggtgctgtcttctactatgtgaagcagcctagcctagtactgcttcgtccctttggtggtgagcccgtatccgagcgggaagagcgggtcgtagtgcttgtcgccgacgttcattggcagctggtccaccgacttgaaccacg

SEQ ID NO: 162768 - DNA, 139 bp, Zea mays
  Clone ID: MRT4577_80019C.1
acggtttttggggtttacaaaattttcccaccctactagaaatccccatattcgggggggcgccgcccatcggattggatccttctaacaagtcgacttcatctgatcggcggagccggggcaccaaccaccattttgg

SEQ ID NO: 162769 - DNA, 351 bp, Zea mays
  Clone ID: MRT4577_8001C.1
atacagaaaggaacaatatattgttaggaaacttacttaaaaggaaatgattccacaagaatttaattaaacacaacaacaggataagcaccattaaaaaaaactgcccaaaaacaaggtaaaaacgaaccaggtgtcggtggcatggcacattttcacaaaaaaaaaaaaaggaaacccacacacgcatgaaaacatacgtgatctatcaatacaaccaaaaatcaaaaaccaaaagcaaacaacagtaccatctggacagacacgcacacaggctaaattttttttcacatatttgcttacgttcctgctcattttattgtcggggttacacctgatgttgaggggcac

SEQ ID NO: 162770 - DNA, 457 bp, Zea mays
  Clone ID: MRT4577_80020C.1
cttgggtcagcagccaggtggaatcagtgtacatggagatgtaccccctgtcccttcagtgagcatctctggtccccactgtgtgggtgggtgtgtctggcccagcttcacacagccattcattcagcaattcctccacgtactcagtgtagaagaagctgggctggaactgcagtgataaacaagaatgattaaggcagtgagcctacatccaccttaaaaagtccgctccgttcaggttcactgactctctctgctcccacagtgggcagcacactgtggacaggggagacactttctccccagccctcctcctgggcctgtgatggagcagcagggaaacatttcattctcctcactcagattaaatcactaagatttttctatttcagaacgtgaatggggagaggaaaggcaaattttgctgaattcaggacaacattcgcaaggtaattat

SEQ ID NO: 162771 - DNA, 296 bp, Zea mays
  Clone ID: MRT4577_80021C.1
ttggacctttgggctgatttagtgcttggcttctctagcatttcgacgccaattacgttatagcgaagatccttatcggggagaagttcgcctgcgagtccgctctcgacgatgagcggtccaacggcgaacctactataatcgcttaatagtgcggcgtcgtaactaccaaagtgagaaagcctcttagcgtctctctggtcgtcagtctcgtccgcgattatacctgcgaccgggcctccggaatattcgagggcatacccgcccttacgggcgcgcatctcgacggcctacat

SEQ ID NO: 162772 - DNA, 277 bp, Zea mays
  unsure (1)..(277): unsure at all n locations
  Clone ID: MRT4577_80022C.1
tcggttcccgcccacctctaaactcccaagcgacgctgcggcggcgggaacaagcggaaggacaagaggcggacttgtctccctgcccccaccccctccctcgcttcgcgcgtacccccttcagttcagccgggcggtaccgacaacggcgccggcattgtacttctgctgcacagctatcactggtctcganaaaaggttgcagcaaccttaactggtgattaggacaagcctgtagtatttcaggatggccatcttaatggagcagttttagaag

SEQ ID NO: 162773 - DNA, 809 bp, Zea mays
  Clone ID: MRT4577_80023C.1
cggccgctcgtataggccgggcctgcatagtcacatcacatcaatacatcaccaccaccaccacccctctcctctctccctccctctctcctcgtagacaccttctccttctaggtttccttgcctgtgcaggctccagcacgtactacactcaagtaccgacgacgacgatgcggcttagctgcaacggctgccgcgtgctgcggaagggctgcagcgaggactgcagcatccgcccctgcctgcagtggatcaagagccccgaggcgcaggccaacgccaccgtcttcctcgccaagttctacggccgcgcggggctcatgaacctcatcaacgccggcacggacgacagcctccgccccggcatcttccgctcgctcctctacgaggcctgcggccggatcgtcaaccccatctacggctccgtcggcctgctctggtccaataactggcagatgtgccaggccgccgtcgaggccgtcctcagcggcaagcccatcgtccaggtctcctccgaggatgccgccgccgaccggaccccgccgctcaaggcgtacgacatccgccacgtctccacctcgtcagccgccgacgggaggctccacaaggtcgccaagcccggccgcacccgcttcaagcgcgcgtcctccgcctcgtcccaccacaacccgtccagcgactccaacaacaagcccaagccgcagccgcagccgcgggcgcccacggcggaggaggagctggatcgtcaacaccgcaagagatgcaggagggcgcgttccagcgtgctccgagccacgaatccctcgaca

SEQ ID NO: 162774 - DNA, 1683 bp, Zea mays
  Clone ID: MRT4577_80024C.1
aattcggcacgaggaagccgtaaacgcaatttcgcacacgaagttccaaaccccgccggccgccgcgtccgttccccttccccttcccttttcctctctcggactcggaccccaatggcgtcgtcgtcgaaggcgccgtcatcgcgccgttccgtcttcgacgccgtccacatccgctcggagttttccgcggccggcatctccgcccacttcatccctctcatctggaagtacgtacttcaaaaccctaggtgcagcgacctggatggcgttccgtcgctgccggcggccgcgtacgcgctcctccggcagaagttccggccgaccacttcgacgctaaccgctgccgcggactccaaggaccgcaccacgaccaagcttctcatctgcctgcagaatggggagtctgtagaagcagtggtcatgcgatatgacacacggctggggaagtatgatggaaagcctcggcctggtggagtgcggtcaaccctctgtgtgtcatcacaggttgggtgcaagatgggctgcagattctgtgctactggaacaatgggcttcaaaagcaatctgtcttctggagaaattgtagagcagctggtccatgcatctcgctattctcagatccgaaatgttgttttcatgggaatgggggagccgatgaacaactataatgctttggttgaagcaatcggagtgtttactggatctccttttcagctttcacctaagagaattactgtatctactgtcggaatcattcatggaatcaacaaattcaatggtgaccttccaaaggtgaatttagcagtgtcattgcatgctcctgaccaagacattcgctgtcagataatgcctgctgcacgtgcctttcctttaggaaagctaatgaatgccctgcagtcctatcaaaatgagagcaagcagaccatcttcattgagtatattatgcttgatggagttaacgatcaggaggagcatgcacatcagcttggtaaactgcttgaaacgtttaaagcggttgtaaatctaataccattcaatccaattgggtcatcaagcaatttcaagacaagcagtgaccaaaatgtgaagaacttccaaaaggttttaaaaggcatctaccgcatcagaactactattcgccagcagatgggtcaggacatagctggcgcttgtggccagttggtggttagcctcccagatgaaagatcagctggtggagcaactcttttgtcagacatcgaagaccttcggatctgacctctcccccaattgttaattctaccattttctcaagatcagatcctcttactaattagcctcacatgatatggtaactggtgctatagtttcaagtcaagctttaaaacatgagatgtttagtttgaccattgttgtgttccccttttgttctgggatacacaattttgctgtacacaatggtgaagacccctgcagttctgctcttgtggataggtggccactgaaacggttggtaacttggtattgtaaatgggacaaccggacaatgttatctcaacaatgccatggtgatatgctatcgtcagtgtaagatgacattcctgtcagatctcaatgagtatctgatgctcccccctcctatctatcaccctctcttgtacttgcagcatttaattgccattagttagtcgcgttggattt

SEQ ID NO: 162775 - DNA, 280 bp, Zea mays
  Clone ID: MRT4577_80025C.1
ttttttttttttttttgagcatctcgcataggttcaattcttgtgctcgcgtgtgcgataagcgacgttgctatcaatcgcatcggtcatagtcatcatcatcctgcctcaacgccgagaatgccctgtgtagtttgtaaaaatcactttttgattggtatcccgtcccatttaatagaagaagccaatgatttttttataaacatgcttgcgtcgggcctcctcgtggtccatgataccagctgaggttgtgaggatgacatagccgaactgacgggca

SEQ ID NO: 162776 - DNA, 548 bp, Zea mays
  Clone ID: MRT4577_80026C.1
cgtacagctgcactatgctccagcttctccttgtcatccagcgctatgttcttataagcagcatctaccatactatctgtagcgctactgtctcataatggaggtcgctcctgcgcgccacaagctgcgcttcatgaagctgaaagaagcactccaggttgcgattgcgatgctgttatggttcctacgcgggtgatgacagtcgtctgagacaaactccgtaattttccacccatcgatatgtccgaagtcctgcattggatgatgtaccagagctggacaaactgcagcttcctgcctgcccaaggctagcatgtcatcctgatctgaactgacagaggcaacgatactctggctatcattgacagcgaaattgccatgacctgataagatcttgtgaatcaacttgctaccattgcacgatctggaacaacagatgtcatggaagaactgggtgctgctgccgacgagtacatgatcggtcagtttgacgactgctacactgcggaccgcctctctcgggatatacttgctcccgaaacaccgcc

SEQ ID NO: 162777 - DNA, 360 bp, Zea mays
  Clone ID: MRT4577_80027C.1
gatcaagagaaagacacgcatattcttgcgaatcacacagtaccactcagacagcaggtgacttttttggtcctcaagcacgagcaaaacaggcacaatctaagagtaaaaaaggccacgcatattaagtacttacaaactaaagcttgtagacacactgcggatccatacaagcttatgaagactgcaaaagatctggccgcacaaaatcagcatgagtggccactgggatgttaacagtggacctaagctgaactcagacttctatggttccgaaggcaggcacagacatgaacgctctgatgaaggcttggctgaacggggctttcttgcatacacaaacaaacaactgttgcacca

SEQ ID NO: 162778 - DNA, 330 bp, Zea mays
  unsure (1)..(330): unsure at all n locations
  Clone ID: MRT4577_80028C.1
gaaggatgcatcctagagagcggccgcacgcgacctatatccttcaacaagcccagacgcaaaacacatcggcncgcnagtcgattgaaagaagaccacagatccccccccgaggagggggagaaggagaaaagcggaggaagaaggcaacagacgacagaaggggaggggaaaaaaagaggcgcggcacacagaacgatggggcgagaacgcgccggaacagaactgagcacaaacgcggaacggaaaagacacgagcgccacatacacgcagacggaggacaccaaaacccggcaggggcacaacgagacaaaaaacaagaacaaggg

SEQ ID NO: 162779 - DNA, 355 bp, Zea mays
  Clone ID: MRT4577_80029C.1
ccgacgcgtacggcagaaggctcgcgtttcgattgacaccaccgactccacgggtgagcgactacgacgaactggacgactcaccaacctacatgataagtacgagcaccgtcaggaggtaccaactctatgtaaaaagaatagcacgacgtatcgatcacggagaaaacatctgaaaaacctaatatacgccaccgaccaagctaggagctacgccatctataacgcggaacaacagaatcaagaactggactccaacttacatgtcttcatcaaacccatgacccagatccaagtcaccggaagcttatagatctacctcccaaatcatcactgaccaaagtacccgtccaaa

SEQ ID NO: 162780 - DNA, 228 bp, Zea mays
  unsure (1)..(228): unsure at all n locations
  Clone ID: MRT4577_8002C.1
aaccaaatttaaaaccttaccttcaggccttttggattgtcaggccgcaaaacccgcccaaccccttgggggggcaacccgattggccccgcttccttgttaccgggcctcttcaacaatctccgcctccggggccggttgggtcaagaaaaaggacaacctttttggtggntcttttctttggcctgcctttcctcgtccggnttttttgtttcctgggggtccctt

SEQ ID NO: 162781 - DNA, 833 bp, Zea mays
  unsure (1)..(833): unsure at all n locations
  Clone ID: MRT4577_80030C.1
aaaaaaagctggtcgagagagcccaggctcctggccgccgccgcaaaacagcttcaccgaccaccatggcgacaatgtctggatccctagttgccggcgttgaagacagagacgccccccggtgaagaccttcttcctcctcctatcttcttattaaccttgcagcctctgccttctactgatgcccccgtccgtcccacctcaagggacgaccgtgccactgatcggccaccgcgtccgcctgagaacaagaaagctcctctgtcatcgttcaccaaacagaccaaaccatttactcctggtgatccgaagctacttccccgaccaccatcaaagaacacttcggattcgaagaggcgctgcttgaagaaatctgcaactgagacacctggacgcaagtttcagatgtcaattgagagtggtggcagtagccaagctccaattagttcacagcctgaagctgaatcacgtcatgaatctattaatgaatcagaagcaattgaaatagaagatgaggagtgtgtagaagaagatggtggttgaggtaggttcaaagaggaagctcacatcagtcgntttggaaggagttcaagagagtgagatggaatggaaatataaaggcaaaatgcaactattgcttcaccaagcttggaggcgaaacacgggctgggactaagcatttgctggatcacttgaagtcttgcacacttaggaagataaagttggctgggaacaagaattgtccaaacttcttttgaggttagtgcacagatgcggggacagtttcagtggaaactacacatttgatcagacatagctagaagggacttgct

SEQ ID NO: 162782 - DNA, 221 bp, Zea mays
  Clone ID: MRT4577_80031C.1
tttattgaacttgtggtgcgctgttccatgagggccgggattgaccttattaatgactcccgctacttgttcctaacgatgactccacactcatgtcggcggaaccaagacacggttggcataccggcggcgcgcaggggtggcacccggtggctaccggtctcctgttcagcctggggcggtgcacctggttacagcttttcctacctcagacactacat

SEQ ID NO: 162783 - DNA, 280 bp, Zea mays
  Clone ID: MRT4577_80032C.1
cccactcgtcctcgtctacttcgtttttttacctctcacatatgctaatatcacggtcagcgctacttccaccatcgagaatcataactaaacactctctactaacatcgctcatcacacacactgtacacacatacttatttactccatcaccacgtcaatgatcatccattatattatatactctgttaccttcatctcaaccatttccaatcctgctctataagaacattcaaattccatctaaacaaactacgatcttttctagatcttccctcac

SEQ ID NO: 162784 - DNA, 305 bp, Zea mays
  Clone ID: MRT4577_80033C.1
gctgagggtgatggagaaggcgaaccccaaaactggaccaactctgagaaaggaactgattttgtcttcaaatattggacaacatgatttggacacaaagactaaacagattcagcagtggattaagaaaaaacacctagtccagattaccataaagaaaggaaaaaatgtagacgtgtcagaaaatgaaatggaggagatatttcatcaaatactccagactatgcctggaatagctacattctcatctaggccacaagctgttcaaggaggaaaagctttaatgtgtgttcttcgtgctttga

SEQ ID NO: 162785 - DNA, 442 bp, Zea mays
  unsure (1)..(442): unsure at all n locations
  Clone ID: MRT4577_80034C.1
acaggcgggccaccggggcgggggcaacaacaaaccccaaaaccnacaaaaaggagcaggccannngnacgacgacgggggggggggggggggaannccaggaacaagggaaaggnncggcggccggggaagcggcancccgaacggancggacagggccacccgggccccggggcgccccancncggggggcancccccagncgaaaagggagaagagggncgcgagcangancccgacgggggcganggcgaacggggcccccgcgcaganccggcgcccagccccgaacgggacgaaccgggaggcccggccggacaaggcgaccccggcggcgcggcccgggnccaggaagcgccccgggaagaacnccncggccngggcccagcacggcgggncccgggcgagcgcccacgcgnngacgangacgcgcgngccggcg

SEQ ID NO: 162786 - DNA, 478 bp, Zea mays
  Clone ID: MRT4577_80035C.1
aattcggcacgaggggagaggagcgatgcttgtcacctactcctttttaggtcccactactctcccctctcacacttcttccgcctcttttcccgtcagattattgttatccttgagtgagtgaggcccaaaggcagcagcacgtacagagcaagcgaagggagaactcaagcgagggaggcagagggcgaagctaagcaagcagctagctgctcactgcttgctctgtgctggtcgtttgctctgtgctggtcgcgttccgtttgcaggaactccttgcctggtgatggacaggcacacctgcaggctctgctttcgggcgggttcacaacgggcgcgcgctgggcgggcacatgcgctcccacgtcatggccggcgtcgtcggctgcagcgcgctcgccgctgccgcggcagcaatcgccgccgctcttcccggcgtccacctcgtcgacggagatgggcgacgggccggcgcggc

SEQ ID NO: 162787 - DNA, 229 bp, Zea mays
  Clone ID: MRT4577_80036C.1
ggagaggggccattgcccggtggcgattgcattgctactacttatccatccattgggaacggttttgtttcacccccacgagctgacgagcacatacccacacacacacaccgtttgttaacaaccagagcgtgactgaaaacacatgacggagcaggcgttgactttgccgtacataaacattttgctgacggggttggcccctcggtggggatcggggagctgtccg

SEQ ID NO: 162788 - DNA, 395 bp, Zea mays
  Clone ID: MRT4577_80037C.1
acatctaaataataattgttgattgagaaggaatacatcatggaacaaattgaagggaggataaacttgaaatcctaaactaacaggtggttcgtaccttacaccatgtgaagtgtctacctggatacttaatacctcgttgctacacactactacagccttgaatgtgcgtgccataagagacaaccttacctacatgaaaccaactaataaaaaaaactaagctcatccataacaggcttcagggttgttgatacaccgggctaactgatcttaacaaataaaccaaaaaacttgactttgacatggacacggcatcatccagaacagaagctatgaacaaaggaaaaccgtccccttgcagtgtaaaattcaaagggtgctcaaatgcttcc

SEQ ID NO: 162789 - DNA, 231 bp, Zea mays
  Clone ID: MRT4577_80038C.1
ctcttgaatcttgatgctctcctgctatgctagccgagacatgtcaaaccgctatgaatcatacaatacacgtatcaatggtaccagctcagtctcgctattgtagaccgaaagacacgcacgaactaacagcatcaaactaaaaccaacctcgcctaccgcgacggtgatctcaaagggcaaatactgcaacactttataacagtggcggaagcacagccatgcttactt

SEQ ID NO: 162790 - DNA, 102 bp, Zea mays
  Clone ID: MRT4577_80039C.1
tggacaggagtggctagtttggggctggtaagagcgaatctgtgagacacttggtcaatccttttgtatgtgctgttcgttgccttgtgagggtaggaggtg

SEQ ID NO: 162791 - DNA, 570 bp, Zea mays
  Clone ID: MRT4577_8003C.1
gcctagctgcagggcgccagcgcggtgggcacgcccaagaggctgacctacgacaagatccagaggataacctacatggaggtgaagggcacgggcaccagtgaaccagagcccgaccatcgcacggcagccaggagtcgatcccgtacaagggcgggaagtaccacatgaagaaggtgtgcctggagccgacgaacttcatcggcaaggaggagggcatcttcaagaacgacgcggccgagatccacaagaccaagctcatgacccgcctgacagtacacgctgaacaagatcgagggccacactctggacgagtccgacggcacgctcaaggtcgaggagaacgacacgctcaactacgccgacaacgacgggcagctctacgcgggcgagcgcgtgcagttcctcttcagcgagaaccagctcgtcctcaccagcaagcacgagagcttcggcagccccttgctcgagagcagctaccgtggcttcttcttgctcagatccagaggctgctgcttcttcaacggctacgacaacggcggctcgctcccctacgacagcaccaggtga

SEQ ID NO: 162792 - DNA, 374 bp, Zea mays
  Clone ID: MRT4577_80040C.1
cccacgcgtccgaaaaaaaataaaaataaaaaaaaaaaaaaaaaaaaaaaaaaaaaaaggaagaaaaaaaaaaaacgcattctgaatcaaaaaaaaactttcatataattactcttgctaaaaaataaatttacctatgttttacttcgtaaattaattatatatgtgcattactaataacatgcgacccctattatcaagttcctattttattatcactattcttgcattgcattagttttcatattgatcgcacactcaagcttttcatgatctaggttcttaaattctactctcgctctatcatcgccttaacctcacatagatcataactttgtctttactcattcacctatctttaacacttctataat

SEQ ID NO: 162793 - DNA, 1147 bp, Zea mays
  unsure (1)..(1147): unsure at all n locations
  Clone ID: MRT4577_80041C.1
ccctggaaaccggnagcagagtcctctctctctctgactctctcctgagggggaggaggaggaggaggaggcagaggcggaagagcaaccaccaagcagcagagcgcgaggcgacacggggacggagccctgaaggtctctcgcccacgcgtccgagcaaccaccaagcagcagagcgcgaggcgacacggggacggagccctggaggtctctcgcgagtccagaggcgatcgacggtgtcgcgattcgtctcccactagaggatagcctggagtgagcatttcattctggagatacaatgggtggctgctgctgctgctgctgttctgcaagggcatctgattcagatagagcaccggtgcgcatctatcaccgacaaaatcccgaggaacatgcacccttgtcgtcagcctttgatggaccatcgccaacttctgctatagttgcagttgacacaaatcttgatacatcatctcttgacacttaccgagcaccacctgcacctttgccatatgatgtttgcttcacagtttcagaaaatcctgatgtggagaagtcaggcattaaaatcaaaactgacgggcagcagtccccaaaagtggacgaatttgagtcgtgcgaaaaaggtgcccctgaggataaggctgatgaggaggaggatgtttgtccaatatgtcttgaagaatacgacaaagaaaatccacgttcagtcaccaagtgcgagcatcatttccatctctgttgcatactcgaatggatggagaggagcgagacatgcccagtctgtgaccagataactctgatagatgggatgtacgaatagcattcttggcggcggttccagttgagttggcgttctttgattttgtttttgttgtggtctggtctggtggaggagatggttgatgagtcttggcaaaaaataatttatagaagaaaaatgacatgaaattgtgctagagtcgcctgtgtcctgtttttacctgaaaaccctgtgagatttgctccctggtttcctcttgcttggtttgcgtgttcattcttccatttagatttcagtttctcagtgcctgtgtgacagggaaatcatctgtattgtacagttagtctgaaacggtgacagaaaagaagaaaagctgattctatc

SEQ ID NO: 162794 - DNA, 490 bp, Zea mays
  unsure (1)..(490): unsure at all n locations
  Clone ID: MRT4577_80042C.1
aaccccgggttgaccagcgtttttttttttttttttttttttttttgggggggggggggggggttttttttttttttttttttttgttttttttttttttttttttttttttttttttttgggggggggaaaaaaactggcccttattgttgggaaaggggaagaccctttttttttaattacagctgtgttaaaaaggggggggggggggggatttnntttccccataaaaacccctaaaccgggggggggggggtttttaaaagggttcaggggccaaaacaaccaataaaagaatttcttttttcaggggggggggtgttttttttttaacccggggggttatgtaattttaaaaggggggggggggaagttggttaatggggttttttgggttttggtggttagcatctttttaaatcccccttgaaattaatttagggtccaaacaattaggtttaggggggcccggttttaaattggagaacgg

SEQ ID NO: 162795 - DNA, 463 bp, Zea mays
  unsure (1)..(463): unsure at all n locations
  Clone ID: MRT4577_80043C.1
gagagatctgaagcacgatgcggagcagtcgaatcctctaagattaatggagtagaaggacgaagatgaagaaaatggtggtcctttatagctctttgatgacgtggctaccaaggaaggaccttctggagcgtaagctgatagcgagtctttcttggcacacaaggaccgtggagtgcaagatatgctgcgtcaatcttacgtgactttcttctataaagagggatggttatggaagagctcgataatttcggacccaaggggtccaaatcctgaagatattgtgagactgggacttggtcctcgcggaggacaagntcggaagagtgttggcttgcctcttcatagagggcacgtagggagtgaagtcaagttttctggaggacatgtatagagttggggtttaatgaatgtatttttagngtgtcttatgctggaagtccttgagctggaatcttacttc

SEQ ID NO: 162796 - DNA, 356 bp, Zea mays
  Clone ID: MRT4577_80044C.1
ggcggaagagcaaccaccaagcagcagagcgcgaggcgacacggggacggagccctggaggtctctcgcgagtccagaggcgatcgacggagtcgcgattcgtctcccacacagggtttctctttgtagggatatgaacaacgggactttggtttttaacggcagctagagggtagcctggagtgagcatttcattctggagatacaatgggtggctgctgctgctgctgctgttctgcaagggcatctgattcagatagagcaccgatgtggagaagtcaggcattaaaatcaaaactgacgggcagcagtccccaaaagtggacgaatgtgagtcgtgcgaaaaaggtgcccct

SEQ ID NO: 162797 - DNA, 110 bp, Zea mays
  Clone ID: MRT4577_80045C.1
aggcttcatttctacctacgtgaccccaagcgccgagcccgctgatcaatccatttcccatgaccccatcccgagaccagggccaggcacgcaccaggagagacccacgg

SEQ ID NO: 162798 - DNA, 1198 bp, Zea mays
  Clone ID: MRT4577_80046C.1
cattggggcgctcggggccggccggggtccgtctccttccacccagacacaggccaggcgggcccattgttgcccaagaccctggaatccggagcaggagtcctctctctctctgactctctcctgagggggaggaggaggaggaggaggcagaggcggaagagcaaccaccaagcagcagagcgcgaggcgacacggggacggagccctggaggtctctcgcgagtccagaggcgatcgacggagtcgcgattcgtctcccagactcccaggatatgaacaacgggactttggtttttaacggcagctagagggtagcctggagtgagcatttcattctggagatacaatgggtggctgctgctgctgctgctgttctgcaagggcatctgattcagatagagcaccggtgcgcatctatcaccgacaaaatcccgaggaacatgcacccttgtcgtcagcctttgatggaccatcgccaacttctgctatagttgcagttgacacaaatcttgatacaccatctcttgacacttaccgagcaccacctgcacctttgccatatgatgtttgcttcacagtttcagaaaatcctgatgtggagaagtcaggcattaaaatcaaaactgacgggcagcagtccccaaaagtggacgaatttgagtcgtgcgaaaaaggtgcccctgaggataaggctgatgaggaggaggatgtttgtccaatatgtcttgaagaatacgacaaagaaaatccacgttcagtcaccaagtgcgagcatcatttccatctctgttgcatactcgaatggatggagaggagcgagacatgcccagtctgtgaccagataactctgatagatgggatgtacgaatagcattcttggcggcggttccagttgagttggcgttctttgattttgtttttgttgtggtctggtctggtggaggagatggttgatgagtcttggcaaaaaataatttatagaagaaaaatgacatgaaattgtgctagagtcgcctgtgtcctgtttttacctgaaaaccctgtgagatttgctccctggtttcctcttgcttggtttgcgtgttcattcttccatttagatttcagtttctcagtgcctgtgtgacagggaaatcatctgtattgtacagttagtctgaaacggtgacagaaaagaagaaaagctgattctatc

SEQ ID NO: 162799 - DNA, 368 bp, Zea mays
  Clone ID: MRT4577_80048C.1
cgtcgactccgcgcccaccggagagaaagaggggtcgttttcgttcctacaacgtccctcccatgggcggccccggcagcaatgacggcagccgcgggggcccgctgcgccttgtgtaatggaggtccaaccgactgttgccggcctggctggcctctggctctcgcggagggtgacgcgcggcttgtggtccacgtggcgtacagatgccggcaggcgctctcctggcgtaggaaccgggccatggccaccatggggaataagagcgtaggggaactcacggaggccgtactcgaggggaagcgcgtcttcgagcgcgccgaccacaacgtgccgctggacgagaaccataacgtcatatgacgaca

SEQ ID NO: 162800 - DNA, 565 bp, Zea mays
  Clone ID: MRT4577_80049C.1
aaccttccttcccgtacccgtcgccagcaaggaagcgctccccgcgtgttcacacctcgacctgcgacgtgtggccggcgcgcgaccaaccgccgactacacgcctgatagtctgccagacgacgacgaccgtcgcaagggggaggagagatgacatggcggctggcagccgccgtggtttccgcgacaacagtggtggcagctgctgggcgccgtatctccgtccctgccactgcgacgcctgtgctccgtcgccggtccctgacgcgactgcctgaaggagagacgagctggtgctctctcagcagcaccacgatgacgaggaacctgagggatcctcgtctgcgtcaagagacaatagccatagcggtgcgcgtcgactagagcgacctcgcaggcgcgattcgatggctcgtgcgattcatccatacgcatcgacaagctacaccggtagaatgacacacccgcgatacgcctggatgtctatgctccgcgaggtaatctccccgccaccatgttatctgcgattcattgttgctgctggcgctgatgacaccgaagtttg

SEQ ID NO: 162801 - DNA, 423 bp, Zea mays
  Clone ID: MRT4577_8004C.1
ctcactagtcggcgtccgcccttttttttttaattttttctttcttttttttatcatatataattgtttttggggtttgtttgccttaattacagtatatgtgacccaccacaaaaaagaaggtgatccattttatatcaatcattacccacttacacgacttttaacaccccacaaagtacttcacatacccatctttcgatgtcccccaatcctcaaatttaacatgatttaaccctgtaccccaattagctttttctagcataagagaccaccagaacttatttcattacttgaaaaacctggccaacccttccattactgacacatcccaacttctgggccctgaggaccttaattttgaacacaaaccctgattttggttgaattccccaagctgggaaccccccgggtccataaacc

SEQ ID NO: 162802 - DNA, 720 bp, Zea mays
  Clone ID: MRT4577_80050C.1
cgggaattccaaaaaaaaaaaaaaaaaaaaaaaaaaatataaaaaaaaaaaaaaaaaaaaaaaaaaaaaaaaaaaaaaaaaaaaccccacccccagattccgcgattcacagacgcgtctatctcagtttgttgcgttgcactaccctgccctgccatcatatcgtacgtgagcccggccgagcgagagcgagggaaaggcttggttgctccaaagttcgcgacgttggggctggccgtgctcctgggggcgaccgggggggctcccccggccgcggggcgcgcggcaatgtcgtgttccaccgggtacagcacgttgatgccgggcctgccgttcgtccaaatggggggggccttgccgccccagccgggttgcgggggaatccgcagcctgttgaagaaggccaacaacacccccgaccgccgaaccatctggggttgcctcaaaaacgtcgccaacggggccaacgggaggggcacctacttcagccgggccgccgcgttgcccagaaaggggggggtccccctgccgtacaagatcagcaccaacgttaactgcaacacgattaattaaatgaggcgtcctgggcgcgtccgggcgaggaatgcatgcttggcggaaagaaataaagaaaggctacgggtattttaagctagatcgaggggggcctgtctctagccatttatggtgttaagcaatcgtctacacagttcgaaaacg

SEQ ID NO: 162803 - DNA, 230 bp, Zea mays
  Clone ID: MRT4577_80051C.1
gaacggcgttactaccatcatccacggaggcaattctatcgctgctttcctcaacggggggcttggcgacaggaggaggggcatttggaccggtgatgcttctagcttgtaactcttggaaactaataatatacctggtgaccttggccttgataacgactaaaacctctcttacatgctatgatactcatgctctgccaacattacgctgcatcttggggatgaccttg

SEQ ID NO: 162804 - DNA, 2936 bp, Zea mays
  Clone ID: MRT4577_80052C.1
ggttatatcccgcttagctcgggaccccactactcgtcgtatttggtttggtattgctgccccaaatgttttcgaaagtcatgatgatattactgaggaacgtctttatcagaacatttttgcttctcactttgggcagttagcaataatctttctatggacgtccggaaatctgtttcatgtagcttggcaaggaaattttgaatcatggatacaggatcctttacacgtaagacctattgctcatgccatttgggatcctcattttgggcaacccgctgtggaagcctttactcgaggaggtgctgccggtccagtgaatatcgcttattctggggtttatcagtggtggtatacaattggattgcgcaccaatgaagatctttatactggagctctttttctattatttctttctacgctatccttaatagggggttggttacatctacaacccaaatggaagccaagcctttcgtggttcaaaaacgccgaatctcgtctgaatcatcatttgtcaggacttttcggagtaagttctttggcttggacaggacatttagttcatgttgctattcccggatccaggggggagtacgttcgatggaataatttcttagatgtattaccctatccccaggggttgggtccccttctgacgggtcagtggaatctttatgcccaaaatcctgattcgagtaatcatttatttggtaccactcaaggagcgggaactgccattctgacccttcttgggggattccatccacaaacacaaagtttgtggctgaccgatattgctcatcatcatttagctattgcatttatttttctcattgccggtcatatgtatcgaactaacttcggaattgggcacagtatcaaagatcttttagaagcacatactcctccggggggtcgattaggacgtgggcataaaggcctttatgatacaatcaataattcgattcattttcaattaggccttgctctagcttccttaggggttattacttccttagtagctcaacatatgtactctttacctgcttatgcattcatagcacaagactttactactcaagctgctttatatactcatcaccaatacattgcagggttcatcatgacaggggcttttgctcatggagctatttttttcattagggattacaatccggaacagaatgaagataatgtattggcaagaatgttagaccataaggaagctatcatatctcatttaagttgggctagcctcttcctaggattccataccttgggcctttatgttcataacgacgttatgcttgcttttggtactccagaaaagcaaatcttgattgaacctatatttgcccaatggatacaatctgctcatggtaagacgacatatgggttcgatatactcttatcttcaacgaatggccccgctttcaatgcaggtcgaaacatatggttgcccggatggttgaatgctgttaatgagaatagtaattcgcttttcttaacaataggacctggggatttcttggttcatcatgctattgctctaggtttgcatacaactacattgattttagtaaagggtgctttagatgcacgcggttccaaattaatgccggataaaaaggatttcgggtatagttttccttgcgacggcccagggcgcggcggtacttgtgatatttctgcttgggacgcgttttatttggcagttttctggatgttaaataccattggatgggttactttttattggcattggaaacacattacattatggcagggcaacgtttcacaatttaatgaatcctccacttatttgatgggatggttaagagattacctatggttaaactcttcacaacttattaatggatataatccttttgggatgaatagtttatcagtatgggcttggatgttcttatttggacatcttgtttgggctacaggatttatgttcttaatttcctggcgtggatattggcaggaattaattgagactttagcatgggctcatgaacggacacctttggctaatttaattcgctggagagataagcccgtggctctttccattgtgcaagcaagattggtcggattagcccacttttccgtgggttatatattcacttatgcagctttcttgattgcctcaacatcaggcaagtttggttaatttagttattttttttttgtactgtatcagaacccagttcattactcttgatggagagggaggatccgcctttttagatttttgctatttatttttctatctaggattagaaccatatacttggtaataataggaacggcacattatggcaaaaaaaagtttgattcagagggagaagaagcggcagaaattagaacaaaaatatcatttgattcgtcgatccttaaaaaaaaagataagaagcaaagtttcccctttgagtttgagcgaaaaaacaaaaatgcaagaaaaattgcaatccctaccacgtaatagtgcacctacacgccttcatcgacgttgtttttttaaccggaagacctagagctaactatcgagactttgggctatccggacacatacttcgagaaatggtttatgcatgtttgttaccgggtgcaacaagatccagttggtaaggataaaataccctttctttcatatttgtatggttttctcgaattgatgatcgtagaagagccctctttaccattctgtataaatggactattctatttgtatagatatggtagaggggcctatccaacccactagtttcccgctaagaaggtggggcagtttggtagctcacaaagctcataaccttggggttacgggttcgatactgactacctgctccatattccttctttatgatatatgtatcatccatttgtatatggaatatgggatttggtttttctttcctaaa

SEQ ID NO: 162805 - DNA, 316 bp, Zea mays
  unsure (1)..(316): unsure at all n locations
  Clone ID: MRT4577_80053C.1
aatttcggcaccaggtcttctgtggagggggcctgcacgggtctcataatcaaaactgcagcggttcccacagcgcgtacagcgacataccagacaatcatcctgatcacaggagctcgagggggaacccgctatgaccaatggcaacaacctgctcggcaagtattaactctccagcatcccttttggttcgacgggggtacccttttttttttttaccttcnacatcnatnccaacggagagggcaacgtctctgccgactacaccaccccggccaaaanaacaanatcaccatcaccagcggctacggcccgc

SEQ ID NO: 162806 - DNA, 288 bp, Zea mays
  Clone ID: MRT4577_80054C.1
tcgaccacgcgtccgagatttttccatctgcataatctgtaaagccttgcaaatatataatgagttcaatgttctttctggttcttgaatggaatctatattctttctgttgatgtactgtaacactcccttccctcttatacaatgagtacatgcattgcctttcaaaaaaaaaaaaaaaaaaaaaaaaaaaaaaaaaaaaaaaaaaaaaaaccctccatcaaaaaaaaaaaaaaaaaagcggccgttttaaaggatccaagtttacgtccccccccatgcaacgta

SEQ ID NO: 162807 - DNA, 586 bp, Zea mays
  Clone ID: MRT4577_80055C.1
aaagcaacaacccacccgttaatactttttcaggggggcaaaagccccagcaaaaaacatgggcccccccatttttttttatatataaacagggaaacaaacagggggcccaaaagccagcccaggggggaggggggggaaactggtgaaaccccccccctccaaaaactaaaaagttcatcgcccccgcaaacccaaaaaatttagggaaaaaccctaccccgaagggttccccataagcaagctttgaaaccccccagggctgccccgaaggggcacacccgttttattttttacaaatatatccttaaaaagcccacgattttcattgggcctttttcccccgggaaaggagccccaacacagcggggtggaggcttccctaatttttcgaaagcagctctttgttaatttttgggaaaaaaaaacccattttttccagttttggaggggggaggacccctttttttggccccacataggtcatcgacagacggccccaaattgaaattgttcggccggaggatttccttgggtaaaatcgacctgcctaaaacccatttcctccagttccctaagaaatttt

SEQ ID NO: 162808 - DNA, 421 bp, Zea mays
  Clone ID: MRT4577_80056C.1
gggtgggaaacaatctgttagaattaatatatgcactggggttaagcttcataagaagcaaacgtacagataaggttcattggatctgggagaacagtggcctacttggagcacatgatacaccgagcacattgagattaacagattatgggagcacattaaatggaggaatggccgcccgaagaattaaatgtggagtacaacagggcgaggtccggatactggtgttcgatgcggactgttgtgcaacatctggacaccagaacagttgtatggagcagcaactgctgttccacaggttgagcgaccactttggccggagtaatcatcctgttcttcatcagagtcacctttgtcacggaatctatgattgttctgcgctggatcagagttcggcgctctgttggactgctctggagct

SEQ ID NO: 162809 - DNA, 504 bp, Zea mays
  Clone ID: MRT4577_80057C.1
acaaaaaaaaaaaaccccatggaaggaacaaaaagggggggccagcggaaaaaatattcagccgggtggaacaaaaaaaggcccaacatcaggagccgggtttttttaccccgggaaaaggatcatatatccaaacataactgggggaagcaacggaaaatggggaggatagaaaaaaattccaggatataacccggggaaaggtttcccccattatttcaacaaaccattggcaggcaggaacgggaaggggttttgtttcaacgggcagcattaggcagcgggggaacaggcaccacaaagtacccccggcccccaagtaggttgagggggggaacatggttgggggcaaccaacggccgccactggtataaggggggggggcccccctcatttggcccgggggccctatgggcccctcgatgggaacaaaccgccccattatgaacccggggaaccgcagggggggcccggggaacaaggggaaaaattccccaaacaaaa

SEQ ID NO: 162810 - DNA, 391 bp, Zea mays
  unsure (1)..(391): unsure at all n locations
  Clone ID: MRT4577_80058C.1
aataagaattttttatttatgcnanaaaaaaaaacaattttttttttgccaccccacaaccctccctttttttgagaaccaaacttttttcaaaataggcgacaaaaaaaactttttctttttttgccaccaaccaaacaaataaaatagtttgccaagaggcgtgaccacgtcccttccaaaaaaagaattgcttacctcccgggggacaaagataacgttctttttgtgaggggggggggtacacccctatggccccaccaaattggcttaccgggggggggtggggacgttgaattttttggcccccccggggggctagaaggagcgctcccccccccccccctttttggtcctcaaaccccaagccaaaaaggacctcttccccccc

SEQ ID NO: 162811 - DNA, 183 bp, Zea mays
  Clone ID: MRT4577_80059C.1
ccatcgggtattttttatttattttcacccctacaccccgggaaaaaagggattgatcggtccaatctaaagggacacaagacacatggaggcaggggagctacagatacaaacaaatttatcacatgagaacccacactcctaccctcaacaggtaaaaggggcccgatcaaaaacaaagac

SEQ ID NO: 162812 - DNA, 390 bp, Zea mays
  Clone ID: MRT4577_8005C.1
gaactctaaccatgttttgcaaggatctccattgccatcatctctaaggaatgacataccacaagaaacaggctcttcatgctggcgaccaagcaggttcggttcggctatgggaaacattccgcttatcatcatcgatcaagaacttcagtttctcctttgaacttagatccgacacttaggtgtcgtttggttcatatatttgtaacgtaatgggtaatggataacgttaaatcaaaaaaaaaaaaaaaaaaaaaaaaaaaaaaaaaaaaaaaaaaaaaaaaaaaaaaaaaataaaatgtggtgaaatgaataataattataatattatttaaaaataattttcaaaaaaaaaaatggggggcccccccctttattatttttgccccc

SEQ ID NO: 162813 - DNA, 241 bp, Zea mays
  Clone ID: MRT4577_80060C.1
gttcatgacgatcatgatgactttcctgagcttgtccctggatagacattttacggggccgtttaagagaaaatggagtccgcattattatgctacatgcctgctcgcgttaaaccattccattacaagggacctgttgagaactctgacctaccttatttgtccctgtggaacatggtgctgtcatgatcgatatttttgtatggccagctcgtgggattatacatgaagcatgcctgtt

SEQ ID NO: 162814 - DNA, 378 bp, Zea mays
  Clone ID: MRT4577_80061C.1
tcgtagcgggcgcccgggcaggtacaagctttttttttctttgttctttttgatatacatttttgttttgcccctatgagcgaaaacgagtatgtcttaaattgatagcagaaagaatgaaaatccttcatatgcgggcaaaagggcgccatttttgccgcctcaacacgggacctaagaacatgtccaggagtccaagaccacgggaccacctgttatgaataacgtccttggaccacatgcccactccttggggccttggcggttgggcccggagaagctgtggcccccaggcttggtgggttttgcgagttttttggttggggttaatctatcgttggcgtgcccgggggcgcaacgccgatgtttgggggggtt

SEQ ID NO: 162815 - DNA, 406 bp, Zea mays
  Clone ID: MRT4577_80062C.1
ggaaggctcctcggcgatgaacgctgggcgttcaagctggggagttgaagcaggtcgatgatggcattgaccgtgtaagcagctgtagtgagatgctcagggttgttagtgccagttcgctgctaatctgttgttttgtttgagatttgaggtcactaatgttattagactcatgacctgtatggcggttgtttctggactttcttttcttctttctcttaatttgagatttgagatgtctttcgtgtctattatttgaaccagttggtttgtgacgtctcccggtttggcaagttatgttttgtctgtatataatcggacagtaagcctaaaataggatccagctgcttggatttggatggtaatggttgtgaataatgcgctaccttttgcattgcagtaactg

SEQ ID NO: 162816 - DNA, 544 bp, Zea mays
  Clone ID: MRT4577_80063C.1
aactggattgattggccttgccgcttattatctcagttccctatgaacgccttatggctgttgtatgatccataaattatgctaattatattatattgttagtcaaaaaaaaaaaaaaaaaaaaaaaaaaaaaaaaaaaaaaaaaaaaaaaaaaaaaaaaaaaaaaaaaaaaaaaaaaaaaaaaaaaaaaaaaaaaaaaaaaaaaaaaaaaaaaaaaaaaaaaaaaaaaaaaaaaaaaaaaaaaaaaaaaaaggggggccctctttaaaaaaaaaaaaaataacccccccgcgccgcaaaaaaaaaatttttttaataggggccccaaaaaaaaaaaaccggcccgggttttaaaaaacggggaagggaaaaaacccggggttacccaaaaaaaaaacctttgaaaaaaaacccctttttcaaaagggggaaaaaagaaaaaaggccccccccaaaccccttcccaaaaagtggcccaacctaaagggaaaagggaccccccccttagcgggcaatataaacccggggggtggggggtttcccc

SEQ ID NO: 162817 - DNA, 263 bp, Zea mays
  Clone ID: MRT4577_80064C.1
gcggtcaggttggagtagttttttctaagagggagggacaacaggcctaatccacatggtctagatgggataccctactagattgccaagtccggaactgtgtttgcactaggccattgtgcaaagcttggggtacaagagccggttagaaaacggggagaacaggactacaggaaaacctacgtggggagctaactagctttcgtttcatttaaaaagatctttaacggaaacgaacccaaacttctgagtttcacacactg

SEQ ID NO: 162818 - DNA, 938 bp, Zea mays
  Clone ID: MRT4577_80065C.1
gcatggcaacgctcagacaaatgaacccgatgtgttaagctcaggaagcggtagaggaactgttgcggaagagaaaaactcctccacctcaaatgactgcgcccatgaatgtacactccccttgctttccaagagaatacttgcagctaaaaataaggaaccgaagctggggagagcacggaagtttctgtcatcagtttgtgaaacagtcgacctgaagaagctcttggctccttcaaccattgcagtgattgtcggcttcataattggaggaacgcctctgattagaaatgctataatcggcgacagcgccccgcttcgtgttcttcaggaatcgactgagttgataggtggaggagcgattccgtccgtgacgttgatcatgggagcaaaccttctgaacggagtacgaagcggggcaagagttcctccgtcggtaatagccggcgtcgtagccgtgagatacatcctgctgccgctgctcggcaccgcgctggtgaagggagccgtccggctgggcctcatccagccagacccgctgtaccagttcatcctccacctgcagtacgccgtgccacccgcaatgaacattgggactataatgcagctgtttggcgtcggggagagcgagtgctcggtgatcttcgtctgggtgtacgcgctggcctccgtcgccgtcaccgtctggtccgccttcttcatgtggacgctgtcgtgagctcctcgcaaaagaagcttaattaattagacggccaggccctagctcgccggcgtatcttctggggcttaattgatcagctgttttgattgaatgatgaatcagatcgatcgggcggttgcagctcgtacatgtttgtaaaacttgttgcattgatcgtcgctgtcactgcactaaatgaacacaggattttccgaaaaaaaaaaaaaaaaaagcggcc

SEQ ID NO: 162819 - DNA, 386 bp, Zea mays
  Clone ID: MRT4577_80066C.1
cccacgcgtccggggcgccattaccgggcacagggaggtgggatgagagtgaaagagtcgtcgcatggatccggccgccgaccccctacgttccttcgccgtcctcgggctggcggcaaccactgccgcagccaactccggcttcgcggactccaacccgatccgtcctgtcaccgtccgcgcggcctctgcgctcttccaccgtcttcgtcgcgctcggccgcacccgcgacgcgcttcgattcgccatcctcgatacacctggtgcaggcctgggtgttgcgacttgccgctggggggttctcgtggattcactagcaaggttaccctcggatgctcgcccaatttctcatcagagcttcaactccgtcgtgtgccgcaccgtg

SEQ ID NO: 162820 - DNA, 291 bp, Zea mays
  Clone ID: MRT4577_80067C.1
gccttttctcttatcttccttctcttgcctgtcactagtgataactgctagtggtacttcgatcaaaagggatacggataccccattgccgtcccactgagcaagagagattttcgtgcgactacagagtcccaatactattcccagggcccaaaactcttgtctgataccagtaaccgtttcttccagcggaatcgatattgtgagggggcgagttccagccaccgtaggcgtatcaatattggcgaacgcgcgagttctcgcggggaaaaacaacgcgttctgcgagga

SEQ ID NO: 162821 - DNA, 349 bp, Zea mays
  Clone ID: MRT4577_80068C.1
ctgccggactacctgcgcgacaacgagttcatccacgcgcactaccgctgcgagtggtccgtccgcgacgcgctgcgcagcgccttcgcctggcacaacgagacgctcaacgtctggagccatctcggaggcttcttcctgttcctgtacctcgccgtcgccgagccaacggggacggtggccggcgccggagccggagtcggagccggagccgccccgagtatcgtgacgttcgtgctcgcgtcggccaacacctcatggtcttcgtgggaggccagcagtaactcgagcttgacggccagcaagggtttgatggccgtgttcgggagcagcgacggcgacgcccacg

SEQ ID NO: 162822 - DNA, 471 bp, Zea mays
  Clone ID: MRT4577_80069C.1
gggggggaaaaaaaaaattggcccggcgattcattttttggtttgcattgggatggcccaaatgggcttgggggtggggcacaggcaaacgggccaggggtcctacccaaaccggtggcccttcctatttaccacacaatccctttttggtagaattactatttccaacgctacatgaccattttggggggcgggggcaggttgggggcgaagtcaaacccggggccccccagccccgacgggggggaccgggggcagaagttccgctcccgctccccttcctccctttccaccggggccgggtccaggaacaggcccgggtggggggcccccgtccccgggaagagcccggggcccaggccgagggacaacgggcccctaggcagggggggggggggggggccgttttcccttggaaacaacgacgacgacaacttggggctgccgttcgcgctcgcagccagggccggg

SEQ ID NO: 162823 - DNA, 325 bp, Zea mays
  Clone ID: MRT4577_8006C.1
ttggcatagggaagtaaggtctctagcacgacgtaaaaagttaggaaaggggatcatatgcgctaggcgttgcgcctcggggactcaagggtttagcgatgaatagtgccaagcaaaaggtcaataccgggacgccgatcaaagaactccagtggcaaggccctttgagacaagctagcgtgctgaacagaaagacgaaaagtgatgacaggttcttcttcttgcagtcttcgtgtgacaacatgaggatctggtagaaagacctacagtgactatctgtcccgaaagagaggacagataatggaggcacctgtttttatcagcc

SEQ ID NO: 162824 - DNA, 535 bp, Zea mays
  unsure (1)..(535): unsure at all n locations
  Clone ID: MRT4577_80070C.1
gacaaaagcattctacttctgacatacactaccttgtagccgtccactacccgattgcacactcgtgcaagtgaacacaacatctagaccgctcaccgtggggcccgcgcgcacgtctgtttgcactcaggtgatgcacgaagtaaaagggatcctggatttatccggtggctacgggtggagtctcacatgtaacggtgatgtgatgacaccgacgggacggcgcgcactccgataacaaatgtcataccangctactggataacactctacataggttattctgtcaagcgacgcctcaaacattcttacccatccattatggatactactactataaaaaaaaaaaaatgggcaactcgctattaagggaggaggcttacgatcaagaaggatgccaatgcatatctctactatattgacaccaaaattcaactcactggaaatcaattttataacccacatgacaccaaaaaaacatccttggcttcaaagaataatttggcccccaactacatataactttaatgacgtg

SEQ ID NO: 162825 - DNA, 421 bp, Zea mays
  Clone ID: MRT4577_80071C.1
cggtccaggactcgcgggtcgaggcccgcgtccgcgtccacaagatcccgagcggctgtccgtacgtgctagtacgactaggtgggttaccgccctcgcggcgcttgtgcctccgccatcatactacacgtgcgaagccttcatcgctaccagaatacgggacaattaccaccccgtccgcactctacgatggcggcgcctcgggccacggctcacgcggcctcgcggtgtctctccggtgccaagtcgtacgaggctgctgagcggatctccagcccggttgccatctcggagccttcaactggcctccgggaaaataggagccgcgtcctcagcgttcgtgccaatgttgccacaggcgttcagacagccagcactgtggctgatggagcgaaaatgccgtggtagcacaatgatgctc

SEQ ID NO: 162826 - DNA, 238 bp, Zea mays
  Clone ID: MRT4577_80072C.1
cacccaccgcctccgtcgccgacaacagcgtagtgtagtgtagttccggagaggtgtggggatagtagtagtgatccgcaatgtcgacggaggaggctgttgtggctgaggtccctgtgaccgaggtgccagcggaggtcccggcggctcatgtggccgatgcgcctaatgcgaagaaggcgtccaaggagaataatgcgcctaaggataataagccgtccgctgcgaagaagccggc

SEQ ID NO: 162827 - DNA, 349 bp, Zea mays
  Clone ID: MRT4577_80073C.1
tttatttataaacttctggttttgtgaatccttttttgtttgggccacctttacaaaaatgcaacccaatatccatcatggaaaattggaaagtctccataaacctaagagcattaatgcacaacctatatatgctactatccatagcacccaggcaacaaaccaaacctgtgccccaagcaaatcccccagcaatatgcaccacaccatgaatataattttctgtacctaaaatacattactcagaggctcaaatcctcgtcccaggacttacacacaaaatggaactccagggacagatccctgccttaaacttggtaagaaatacacgcgggcttacactttcctc

SEQ ID NO: 162828 - DNA, 877 bp, Zea mays
  unsure (1)..(877): unsure at all n locations
  Clone ID: MRT4577_80074C.1
cggacgcgtgggtgctcgaggtagagtctgcggaacaccaaacttcgacgactgcgccggccgtcggccgtcgctgccgccctattttgaccccatcgccggcgacgataatcgccagctgaaggacaataactatcatggatgctactgcaaattcagatgtgcaaagggctgaggaatttaaacttaaggcgaatgatgccttcaaggcaaacaagttctcgcaggctatagagctttacagtcaagccattgagctgaatagttcaaatgcagtttactgggcaaaccgtgcatttgcacacacaaaattagaggaatacggaagtgctgtgcaggatgctacaaaagccatcgaaattgattctagatattcaaaaggttattatagacgaggcgcagcttatcttgccatgggaaagttcaaggaagccctgaaggattttcagcaggttaaaaaaatctgcccaaatgatccagatgctacaagaaagttgaaagagtgcgagaaagctgtccaaaagatccgttttgaagaagcaatatctgctggggatgatgagaggcggtccgtggcagactctattgactaccatatcatagaagtagagccacattatgcgggaccgagaattgatggggaagaaataacgatagagtttgtcaaagcaatgttggatgaatttaagaagcagaaatgcatacataaaagatatgcttaccagattgtgctaaaaaccttggatttgctgcgatcgatgccttcccttgttgatgtgggatgttccaaacgggggacattttacagtttgcggtgatgtgcatggccagtactttgatttgctcaacatatttgaccctcatggncttccatcaa

SEQ ID NO: 162829 - DNA, 2225 bp, Zea mays
  Clone ID: MRT4577_80075C.1
tatacctgtacgcttacggacacgtgggcggaagcctccggcgtggtagagtctgctcaacaccaaacttcgacgactgcgccggccgtcggccgtcgctgccgccctattttgaccccatcgccggcgacgataatcgccagtttgtggataagggtcttttaagtcttcatatgaaactatccttttgatatacagctgaaggacaataactatcatggatgctactgcaaattcagatgtgcaaagggctgaggaatttaaacttaaggcgaatgatgccttcaaggcaaacaagttctcgcaggctatagagctttacagtcaagccattgagctgaatagttcaaatgcagtttactgggcaaaccgtgcatttgcacacacaaaattagaggaatacggaagtgctgtgcaggatgctacaaaagccatcgaaattgattctagatattcaaaaggttattatagacgaggcgcagcttatcttgccatgggaaagttcaaggaagccctgaaggattttcagcaggttaaaaaaatctgcccaaatgatccagatgctacaagaaagttgaaagagtgcgagaaagctgtccaaaagatccgttttgaagaagcaatatctgctggggatgatgagaggcggtccgtggcagactctattgactaccatatcatagaagtagagccacattatgcgggaccgagaattgatggggaagaaataacgatagagtttgtcaaagcaatgttggatgaatttaagaagcagaaatgcatacataaaagatatgcttaccagattgtgctaaaaaccttggatttgctgcgatcgatgccttcccttgttgatgtggatgttccaaacggtggacattttacagtttgcggtgatgtgcatggccagtactttgatttgctcaacatatttgacctcaatggccttccatcagaagaaaatccttacctcttcaatggcgattttgtggaccgaggatctttctccgttgaagtcatactcaccctttttgctttcaagtgcctctacccaaaagctatgtaccttgcaagaggaaatcatgaaagcaagagcatgaacaaaatatatggctttgagggggaagtgaggtcaaagctgggtgagaagtttgttgaactttttgctgaagtcttttgttggttacctcttgcccatgtcatcaacaacaaggtctttgtggttcatggagggctatttagtgttgatggggttaagctttcagacattaggtccattgatcgtttttgtgaaccacctgaagaaggtctaatgtgtgaattactatggagtgaccctcagcctcagcttggaagaggtccaagtaaacgtggtgttgctctttcctttggcgcagatgtgactaagaagtttttacaggaaaataacctggatcttattgtccggtctcatgaagtaaaggatgaaggccatgaaattgaacatgatggaaagcttataacagtcttctctgcgcctaattactgtgaccagatgggcaacaagggtgcatttattcgcttcacagctccagaaatgaaaccagatattgttactttctcagctgtgccacatcctgatgtgaagccgatggcatatgcaaataacttcctcaggatgtttcaatgacagaatataacaacattgtttagcaatttttatcagatgagtctgttgtttgtcagctcccaattcacatttcttgctaggtttaagtatatgctcccttgtacaacaaatcaaatgatgcaagggattcaactgtcgatttacttggatggtacatccatttttgtgcacgagttgtgattcttgtaactatccgtaaagtcttagatcattagattttagtttacttgtaaaattgctaaatcgtcatttcctgtcttgcttatcagtgagttacacacgtttagtgcttttatcaaaaaaaaaaaaaaaaaaaaaaaaaaaaaaaaaaaaaaaaaaaaaaaaaaaaaaaaaaaaaaaaaaaaaaaaaaaaaaaaaaaaaaaaaaaaaaaaaaaaaaaaaaaaaaaaaaaaaaagggggggccctttaaaaaaaccaattttttaaccccgggggtggaaaaataattttttttttttggggccccaaaattaatttcatgggggcgggttttaaaaaggggggaagggaaaaacccggggggtccccaatttt

SEQ ID NO: 162830 - DNA, 865 bp, Zea mays
  Clone ID: MRT4577_80076C.1
agttcctctataaataggggcatctcgttgacgtggggaagccacactccattgcagctagtgccaaagtagcactagtactctgcaggcactgagctcatcaaggtagcttagctaggatcaatggcgtcgagcaggacagcagcgatgctggtcctcgtggccgcggtgctgtgccctgcagccttgtccaagccgtcggcggcgttcatctctatgcccaccgaccacgtcggtggccgtattcctcccgtctcccccgccgatggactcgccttcgacttccatgccgactcctgcccgcagttgcaggacgtggtgcgctccgccatggagaccgcgctccacagcgagatcgccctcgccgccggcctccttcgcatcttcttccacgactgcttccctcagggctgtgacgcgtcggtccttctgacgggagacggcagcgagctccagttgccgccgaatctgacgctccaaccgcgggcgctgcagctcattgagtccatccgtgcccaggtgcacgccgcctgcggacccgtcgtctcctgcgccgacatcacggccctcgccacccgcgatgccgttgccttctccgggggtcagggctacgacgtgccgctcggcaggctcgacagcctcgcgccggcgccgagctcggccgtcttcgatctcccccaggccagctccaacgcctccacgctcatcgacgtcttcgatacccgcaacctcgacaatgtcgacctcgtcgcgctctcaggtggccacaccatcgggaagggccactgcagctccttctccaaccgcttctccgaggactccgacttcgtccgaagcctcgcctccaactgcctcagcgacttca

SEQ ID NO: 162831 - DNA, 269 bp, Zea mays
  Clone ID: MRT4577_80077C.1
ctgcaggagtgagtaggcctgctgtatttcttgtaactgctgggtactacaagataagttacaatgttttacactttaaaaaaataccagaacgaacatttgcattattggtgacttactagttcagcctctaggttatggcacagcatgctaaaaaatcatgtgtttaaaagtaaatgttgctaaaatgctggcatctggtcctattgggttgatgcattttcacttctgtggtcatgatgaaatggcctggtctaaagatagtgagg

SEQ ID NO: 162832 - DNA, 1066 bp, Zea mays
  Clone ID: MRT4577_80078C.1
aattcccatccatcagtaacttggcgggactgcgggacatcgacgcatcccatatctataggcataatggagcactacgactcctatctatgcagcggcagcatgcatagctacggcggcgttggcggagccacggacgcggcgttggacgccggcggtgacgacatgcagcgcctgctcaacgcgctcatggacgacatggctgccgagtccgactccttctccgacgacatggaggcagcctcctccgagtcctcgtcctccgcctgctcggccaacagccagcaggaggccacccggcggccacagcagcaaccggacggtggccacagcaacggtagcaacaagagctccaagaagcagcatcagcagcagccgccggctccctacatcggcgtgcgcaagcgtccctggggcaagttcgcggccgagatccgcgactccacgcgcaagggcgcccgcgtctggctgggcaccttcgacagcccggaggccgccgcgatggcctacgaccaggccgccttctccgtgcgcggcgccgccgccgtgctcaactttcccgtggagcgcgtgcaggagtcgctgcgcgcgctggcgctctcttccgcctcctctgccgcgggctcccctgtcctggcgctcaagtgccgccactccatacgcaagcgctccccgaacaagaacaagaacaagaagaagcaggagcggcagcaacaggtggccgtggccgccgccgcaccacagcagccgccgtgccccaccagcgttgtggagctggaggacctgggcgccgattatctggacgagctcctccgggtgtcatccgagttccattggcaataacccatagcgaatggcggtcctgcgaggtgcaagcgatagcgaggttgatgggttggggatcgagttcagttgtcatcacaaatacagaatgcctgcagattgttgctctgctctgtccttgctcgccaattgcgaatcgacgacgagttgcaactcttctttaaaaaaaaaaaataaaaaaaaaaaaaaaaaaaaaaataaaaaaaaaaaaaaaaaataaaaa

SEQ ID NO: 162833 - DNA, 303 bp, Zea mays
  Clone ID: MRT4577_80079C.1
cccacgcgtccgctcaaatccgtcttcagattgtccatataaagaaccaacaatgctaccagaacacaaatctgatgttccagctacttctctcgaaggacatgaagcaagtgaagttcaatttctgcaatctgatactgctgtcgaattatctccatcagagcattctgagtataaagttcagcatgtggttggaagcgctgaagatacaatttcaaagcaagtaaattgtgagcagcctttagatcaaacaacattatcaattcatttgaggccatttgaggtggagatctcacaaggtga

SEQ ID NO: 162834 - DNA, 385 bp, Zea mays
  Clone ID: MRT4577_8007C.1
gatattataaacgtcaccttgatagcgttttctgcatcgcacttcgctctggaaaagaagattttctctcatgggccctgggtcgtaccattctcttatggcaccatcgatcttaaaaacctcatggcttactgcacgctcacaggatgcctacactttcttacgacgcccacggcatggtatttgctgtctcctatggtagccgtataaacatcgttgatattctgaaattctgaatgactccttttgctaccttctctgtctgcacttatgattctgaagcccatgtcgtacactttcaacattgattgcaggctgattctgttaaccactaaatctagtcctgttcatgtactagattctttttaatgcaacatcatttcat

SEQ ID NO: 162835 - DNA, 796 bp, Zea mays
  unsure (1)..(796): unsure at all n locations
  Clone ID: MRT4577_80080C.1
ctgtgcggcgctcgaggcggccggtcgggccgggaagcccccccattagacctcgaggccgcccgatttgggcctgatccgtttcgtagtttctttttctcggtaatccagccgttttccctttccccagagattcgcatattctcgcgatgggagcggaggaagcagagggtactcccccgccgctgcccgccaccggcgagcccgcaaccacggcaagggcgcagccaatatctgcagcacaattcctctcctggaagcagcgcaaggatgcagaggtagccgcaaggaaagctgaagcagctgagaagcgagctgatgatatcgcttcgggagcggcgcagatgaacggccgcgagctgttccaacatgagccctgggtgttcgacaacaacatttactgagatcgtgtcgggctactgttcctgcattagtccaagctccagcggtggtttcattttgtactgctatatcagctttgcgaaactgtgtctctcaatagggattttatttcaccgtttctaagattattctctcaataggtaattgaacttgtttcaaatacgttttgccaaatctttgtgcagtcaccgtcgaatgatatctagtgtcgctattctttttctaaaactcttacaaacaaagagtattggtcggaagagaattctcgatcttcagattaaaaaaaaaaaaaaaaaaaaaaacaagaacaaaaaaaaaaanaaaaaaaaaaaaaaaaaaaaggaaaaaaaaaaaaaaangggggccccccaacctcaagttttggtccccttaa

SEQ ID NO: 162836 - DNA, 709 bp, Zea mays
  Clone ID: MRT4577_80081C.1
ccggccgggtctcggccttttggctaagatcaagtgtagtatctgttcttatcagtttaatatctgatatgtggaccatgtgtccacttcgatattaaatttattttttgtgggggagggaccacaacagtggcttgccactgggttcctcgagcgtcgctcggctgttgcactacaggctgagctaggcgcgccccaaccaaagcgaaattaaattattggagttcacaggctactgcaacttctgaaaggccaacaaagctcacaggccattactcgatcacaggctactgcaactactgcaaatcctttcttctgttctttcttcagtggtgtatttttattcttagaggttcttttcttcttaggtaccagcagtgtcaactccagcactagttggctctatagtcatgttagcatctgcctaagggcccgttcggttcttggggattggccacccagaactattcctagtcggattacttacctaatttatataatgtttgattagctggaacaattccggaccaaacgaacaggccctaactctgcatcaggaggaagcaaccacagagagaggctccagtccagtagtccagtacatcaaattcagcatcatcatccatgcaaattgccttatcaaacacttcaattatttacataaacacgcacgcacatccctgaaaaaaaaaaaaaaaaatttgcggcc

SEQ ID NO: 162837 - DNA, 288 bp, Zea mays
  Clone ID: MRT4577_80082C.1
gatcataaaagggcggccgggatctatagattcacctatcaatatcctcctcttacttacaggccatagctaagcaggtctgacctgatgtcgcggcagacatacatctatgagcaattcatgtgaaagagccagggtgacgcacctgacctccgctgcgatcgccgaccaggacggcaccgtttgggcacagagcaccgcattcccacagttcaagatagaggagatgaccatcatcatgaaggacttcgacgaccccgccactgctggagctggaccggcctcttc

SEQ ID NO: 162838 - DNA, 368 bp, Zea mays
  Clone ID: MRT4577_80083C.1
gcactcatgctgataatatacatatactacacttataaaatttttatatattataacaaattctcccaaaagattgattattaaaaagctctgccccatctcaatataaccattttaccacatgcccttcatctccccaagtttgacaaaccattcctaccacataaatccactaaacattttacaactccgaaatcgccacatattccaatataatacctaatcgctatacaccatgctttaatcatatcaccaccgtactcttctcaacatctcttctactttgtttatctatcttatcctttaactactaagattcttttttcccttaccaatttttaaaacaatccaactacccatttcccctt

SEQ ID NO: 162839 - DNA, 263 bp, Zea mays
  Clone ID: MRT4577_80084C.1
gcagctagcgcgctcctcgagcccagcagagaaaggccggcctacccagtctgtgtctgtgtgtgtgcagtgtccaccggcagcgctaatcgtaatagccatggggtccaccgccggctacgtggccgcggtggtggacgaggaggcgtgcatgtacgcgatgcaggtggcgtcgtcgtccatcctgggcatgacgctgaataacgccatcgagctgggcgtggtggaggtggtgcagaatgaggccggcagcggcaaggcgg

SEQ ID NO: 162840 - DNA, 235 bp, Zea mays
  Clone ID: MRT4577_80085C.1
ctacggagcacgtactaaaccgggggaaggccacttccactgcgggtgggaacaactaccttgatgacatcccacccgaccaaccacgactatttcctcgccgttactattcccaaacaagtctccaccggttcgtttgccaacaccgtccgtttccgtgctatgcaccgcctgctcaataggaaaagtcttccttacaacaaaatactgatcctattccatgtacctcattcag

SEQ ID NO: 162841 - DNA, 240 bp, Zea mays
  Clone ID: MRT4577_80086C.1
acctgattatggttacaaccaatagggggaggatgaacgagattattataacacagggctccgaaaaaggcggctacgtggacgacgtgatagagggcctggcggctactactgaggtgggaggcgtcactggatactgttatgattatggatatgcccccagaggaggttactatgaagagcaagacgaatactatgatgagtcctatgaatatgctactccgactggccgctgatgtg

SEQ ID NO: 162842 - DNA, 2032 bp, Zea mays
  Clone ID: MRT4577_80087C.1
cattctgggacaggatacttctgaagaatatcgatgcttccctccccaggactctgttcttcagaagtatcctgtcccctaatgcgacctgtgacatatcaaatattaatgtgacatgcacttcacactgcaatcaattggcaaccggccgggccgggaaacccacaaaaccctcgccgtcgcgccgcgcgattgcctctccggccgccgcgagcccgcgacactagtaacggtctacaccactagaatgactgaagaattgaattccagcaaattcaagcttttgttttagccaagatttgagattcgatttgaagtgtggaagtccttacaatttgccaatcctatatttgatctctgctgtgctgcgttaaatccctaaacttcacagcgcggcgccggcccagccacgccggaagaagtcgccgcgtgaggtcagtgtccccgttgctgccgcctctaacccgaagcctaggccgctgccggtgcataacaaggagaatcaggcggaggggaaagtagcagaggagggggcagcaactgaggagggggagaagtaccgggcggaaccggaaatcttgccgctgccgccggccatggcgaagctgggcccggggcaggggctcgggtgcgaggcggcggaggggtcgctcgtgcccagccggaagcgggagtacaagccctgcggcaagcacactgaggggaagcgcccgctatatgctatcgggttcaacttcatggacgcgcgctactacgacgtcttcgccaccgtcggcggcaaccgcgtgacaacttaccgctgccttgagaatggtagtttcgctcttctacaagcttacgttgatgaggataaggatgagtcgttctatactctaagctgggctcgtgaccatgttgatggctcaccactgctggtggcagcaggaagcaatgggatcattcgggtcatcaattgtgctacagaaaagttagctaagagctttgttggccatggcgactcaataaatgagataagaactcaaccgttgaagccttcgctcatcatttctgcaagcaaggatgaatctgttaggctatggaatgtccatacagggatctgtatcttgatatttgctggagctggaggtcatcgcaatgaagtattgagtgttgacttccatcctagtgatattgaacgttttgcaagttgtggcatggacaacactgtgaaaatctggtcaatgaaagaattttggctatatgttgacaaatcatattcatggactgaccttccatcaaagtttccaacaaaatatgtccagtttccagtcttgattgctgcagtacactctaactatgttgattgtacaagatggcttggtgacttcatcctatcaaagtgcttaatgaggggagattctatttgcagagtgttgacaatgaaattgtgctttgggaaccgaagacaaaagaacagagtcctggggagggaagcatcgatatccttcagaagtatcctgtcccagaatgtgacatttggtttatcaaattttcatgtgattttcacttcaatcagttggcgataggcaaccgtgaaggcaaaatctacgtgtgggaagtacagtccagccctcctgtcctcattgctcggctgtataatcagcagtgtaaatcgccgataagacaaactgcagtgtccttcgatggaagcacaatccttggagctggtgaagacggcaccatctggcggtgggatgaagtggaccatccgagctccagaaactgaagaagtgttgccgctcaatgctggactgatggttatgctcggttggggttgtgatggttgaatccgttggcggaaagtgccacctggtgtttttttctagtcaaaatggttggtgttaacagaatattgaatgcttcgaatgttgaaagttgggatgcttgtgctggtactctgctccgcggacgagtgaacttagtttgttgcaactttgggaaccgttgtcatctgtttgttctgcatttctaaaaagagagcaaatttcaggat

SEQ ID NO: 162843 - DNA, 276 bp, Zea mays
  Clone ID: MRT4577_80088C.1
aggacgagttccgcacgttcggggttcttcgcagtgtctgggttgctcggaaaccacctggctttgcgtttattgattttgatgataagagggacgcagaggatgcaatccgtgacctagatggtatgtgatcaatgtattgctgtcaacatgttataaacctctattggtatgttgtatcagatgtttatatgacattccatatgttgtcggtgttatttgtgaagaatatctgagttggtactaaattacattcagagctctatttggtataaa

SEQ ID NO: 162844 - DNA, 172 bp, Zea mays
  Clone ID: MRT4577_80089C.1
cgtaactggatcctttagtcacccaccgtctttttatctcaccatggcggaggggagagtcccaaacgcgaggaagctcttcaaccctgaccttctccatgtccaatgaactatatctcgctaaacgactacctggtgtgactgcggaaatctctaacattcctgcccactc

SEQ ID NO: 162845 - DNA, 151 bp, Zea mays
  unsure (1)..(151): unsure at all n locations
  Clone ID: MRT4577_8008C.1
cctcgacggaaccgcatcggtgcccgtgctctatatccgtgagcacgctctctctctctcctcatagcacatcagacggggncgcgagggcgcagcatcgtagggcagatgtgcgtcgatgacaagtatagctcgctgctgctctttcaga

SEQ ID NO: 162846 - DNA, 504 bp, Zea mays
  Clone ID: MRT4577_80090C.1
cccagcgtccggacaaccatgggcagggctcgggcagaaccaactgttgttttgctcatcacgctcgacggatacctatgttgcgcagctgtactacgggcttgtactactactcgtgccccggcgtgaatggcgccgataagcaagggatgcagcgccccataaccaggcaaaagcggggggggacctccatagctaccccttttcttgaaggaatgcttcgtccaggcctgcgacgcaagcgtgctgctggacgacacgcccagcttccatggaatagaataaggacaaccctaacaactgctcctttaggggattcaaggatatcgaagccggaaagtgcaactgatgaaaagctgggccccggcgtctggtactgctccgacatccttggcatttaagacagaggacagagcatgaatgatgggtggacctacctgggacgtgaatgtcgatgcggcgggactacacgacggccatattcaatggtgccaacaacaacat

SEQ ID NO: 162847 - DNA, 451 bp, Zea mays
  unsure (1)..(451): unsure at all n locations
  Clone ID: MRT4577_80091C.1
cccacgcgtccgcgcctccactacaccacacagagccgcagcagactcgcaagggaaaggagatggatcgcctgcccgagtcgacccgcagcatgaggaagtacgcgtcggacgccggcgggcttcgcgcggcgcggcagagccccgggtggcggncgcgtgcggagcgcacgacgcacagtatgtccacgacggcgccgcgcaccaagaccaagtcggacgcctcgttgctgcgcagggtgcccttcaagccgatccgccccagcctcaccaacctgcaggaggcgctcctcgagaccaagctcgccgagctattccccgccgtgccgctcgccatcgccgtccagagcgcgcacttcgaccaggcgggggtgcttacgctcagcctactcggcctcatccacctggccgagcaggtgagctacctcaccgagcagagcgagacatacac

SEQ ID NO: 162848 - DNA, 1155 bp, Zea mays
  Clone ID: MRT4577_80092C.1
attcggctcgagtactcaccaagaggatcactggtaaggtttcaaaggaagaaactcctgatcttggaccttaatggtctgctagcagatataaatcaagattaccataatgcacacttggcacatgcaaaggttcgaaccaaattagttttcagaagaccatactgtgacgattttctgagattctgcttccagaattttgagctaggaatatggtcatcaaggaaaagggaaaatgttgaatcggttgttgatatccttatgaggggtcttaagcaatgcctactattttgttgggacatgtcttactgcactgttacagggtgcaaaacaattgacaacaaggacaaaccattagtgctgaaggaactaaaaagggtttggaataaggatgagccagacctcccatgggggcagggagagttttcaccttcaaatacattactggtggatgattcgccctacaaggctctgtgcaacccgccaaacactgcaatcttccccgaaccctacaattacatgaaccagagggatgattattccttgggacctggtggagatcttcgggtttatctgcagagaattgctgctgcagacaatgttcaaaattttgttcgggataacccatttggtcagaagtccatcacagagagtgatccaaactggaatttctatgtgaaaatagtcgataagatggagaagcaaatagttgatcaagtggaaacgaaaatagttgatgaagtggagaggtccttaggttaataggaacaaaggttcaatcaagagaaagttctgtatttgtttgtgttgcttagcaggtgttttgcattgcgccagtgctatcatgtgtaatctaatttagtaattgttgtttcatagacaaaacatgatttgaagaatcttgataggttttgttgttccaaccgagggatgaatcattgtttgtcctgtatcgagtgttacaggctttctggtttgctaacttagctatttctggaagtttggttgactatgctggaggatgattcagttcgatggaactgttatatactcgaattgttgtaaatcatctcagtttcatggtttcttgaaaaaaaattcttatgtctaaacccttgaccttgccttgcgcaatgcccgttcaattcaaaaagg

SEQ ID NO: 162849 - DNA, 290 bp, Zea mays
  Clone ID: MRT4577_80093C.1
cggacgcgtatttattttgaaacttccttacaaaatggatgaaggaacggggggtgtctcgcttgtcattgcataacaagcggcttcacacaaagtgaatactcctgcgtgagatacaagccaaacaacccaattgcttcttcaatgaatgttctgcataacaccaactgcaagggggaaaaaggacccgcgcacattatacattcggaataacttatactgaaagtgaaaacgtgaggactcaggccctgacgttaaacaaaaaccggtagaatgcgcccatcaaactg

SEQ ID NO: 162850 - DNA, 551 bp, Zea mays
  unsure (1)..(551): unsure at all n locations
  Clone ID: MRT4577_80094C.1
tgtctctctaggagnattctctcatctactttttctgattcggtgttcatgctccaacaaaggagcctcaaatgcttaaaattttgaatgctagttcattatggctactatgttgtcatatcctggcccgggtggattgtgtgatatcctggcccaaggtttaataggattgatagaatactcatataaataaggtgcatcttttttcggaagcctatcttgaaagaatctttaggttaagcgtgcttggcctaaagaaatcttaggatgggtgaccgactgagaagtcttctcggacggggtgttataaatggtatcagaaccgtccctcgcggtttcacggacgtgtgtgggctaaggattcaggtatacgtggcatggcgcatgtgggcccagaggaggttccggcttagggttgaccgacgaggacgtcggtcttctaagggggtggattgtcatatcctggcctagatggattgtgcaatatcctggtctaaggcttaatattattgatagaatactcgtacaaataagatccatcttcttttttg

SEQ ID NO: 162851 - DNA, 541 bp, Zea mays
  unsure (1)..(541): unsure at all n locations
  Clone ID: MRT4577_80095C.1
gggggggggtttttttttttttttttttttttttttttttttttttttttttaagccaaatttaaggtgctactattttcaatttcttgaaagcaatgcagtacaaacacccctttcatttaatagcaattggttccaattaggggagggggggggggggctttttttttattngacccaagcgaataactaaaaaagggaaagaaacacatacttaaccatcacccattggaaacaccaaacattacccaccccacgcaaacaacacgggcaaccaattgggggagggggggcgccaaatttagagaccccctccaagcccagggggttcccaaagggcgacccatacggggatgatttgggccccacgggcctccttccaggccctggtgtgataggggccggtttccactaacgggggggcaccgaacacgggtgcttagtcgggctctccctgcccgagctcaggcccagccacaccaggggggggcccgaagggcggttttccggtgccgacatttgccgcctggggcagctcggc

SEQ ID NO: 162852 - DNA, 300 bp, Zea mays
  Clone ID: MRT4577_80096C.1
ggtgtgttaacaagaaattacaggccacttagaacaaagtgaattttgtctaacagacctagacgctatttgatcgggctaccgggacgttatatgataacagtcgacgggctgaaacagaggcgccacggattcgggaatttcctatgtgagcaaggtaccaacacaagtaaaagtccccagaaagggtataatacgggccaaggaatgctgctgactataagtaaggggatcacttttggaccgttggggcacacaaatggtgaaatcttgagaacaaaatggggcaggggggcacac

SEQ ID NO: 162853 - DNA, 377 bp, Zea mays
  Clone ID: MRT4577_80097C.1
attcgctaatactccaaagcttacttcgataattctttgttcattgtaagcttcagagattttgaaatggctgagagggaaagggtgatgaactcacccatgtggagtactatgatgctgcagagaaggccaaggttggaatgattactgaagagatcatggctagcttgtttgatgattctgatgacagcgaagaatttgattttgaagaggataatgccaatgtcgatgatcggtcatattgaggtactgagaaattctaattatatcagtgatatttctatcgtgaggcttggtggagaggaaattacacctattccttagaaggatgaagtagtggtagtgaagtgctttaaaaatttgatatctaccttcat

SEQ ID NO: 162854 - DNA, 673 bp, Zea mays
  Clone ID: MRT4577_80098C.1
attgggaccctcgagggccggccgggaccaaacccatttccctcactccataccgtcccggcccttgattcttcaggttccgcccgaccccgtgcgtccgcggaccactagccatgtcacgatcccacctctaccaccgtactggtcctcctcaaggatcgacaaaagagtgtccaccacccgacggtggtcccccacgagatcggcacaactgctgcttcggtacctgcttgtatttcctgacccctatggactccgcgatgaacaccgagaatatcacagagatcatgaacctggcggaagaagattacgttccaaacagcgacaagaagacgcgaccgtgctcacatccctatctatgaagcactggaggaggagctctacaacatgaaccagaatatccaaaggaacgatatcaacctgaacctgacaatgacacgtactacaaagaaagggagcctgatgggcatgatcgtgagcacagagatctgcatcatcttcaacaagattatgctaacaaagatggaaaaacacaacgacgagaaaagaaggacagggcattctgtaccgcagtagacatgcagagcgaacaaaggagcaggcaactgacaccagcccgcgtacataaccgatggagataaacatcgatccaacccgtttggcagcgtccaga

SEQ ID NO: 162855 - DNA, 436 bp, Zea mays
  unsure (1)..(436): unsure at all n locations
  Clone ID: MRT4577_80099C.1
gggagggacgcgtgcgggtcctccaacgctactaccggcggtagcgtggttcaagggcggcgagcggagccngagggggggagaggaaattgagggggggcnatcgggcatggggtgcgacgacaagggcgggtgcgccgtgccgtgccccggcggcaaagactggaggtgcacgtctgggagcggcgggcagcgggaggacacgacttgcgggtggggggaggactgcgagggcaggccgtgcacgtgtgggcgggccacgatgccgtccgggcgggagaacaggagggctaactggtcctggggggcggcctggaactggggatcctgggcctcgggctgatccgtgcgcctcggcctcgtgctaccgggctggctagtggaggggggtggctactgtccagggagggtctggaccaagcaactagcggtactt

SEQ ID NO: 162856 - DNA, 127 bp, Zea mays
  Clone ID: MRT4577_8009C.1
cctatcgtctatgctatgtggaagagcaagatagtatgcatcagaggtccctcaaccaacactcgtgagatgatgtactagctgcagagactcgttgaaggtacacgcctaatatgccatggtgaca

SEQ ID NO: 162857 - DNA, 464 bp, Zea mays
  Clone ID: MRT4577_800C.1
ggggggggaatccggcccagaaccctggggacccacgcgggcgcatcacaagaaccaaaagaacccgcgcaggggggggcaacaaaaaggacaccccccgaacccccgcgaaagggcggacgacgaagcgaggagccggcgcggcggcgaagacggccgcggccggagcaccagcgcaggcgccaaggaagagggagggaccagcggacgaggagcccgagagggaggcgccgggagcgagccagaaccaggcccccgagcgccgacggaaccgagaggcaagcaaggacggacagcccaacacagaccaagggccggcaagggacaaaacaggggcaacagaacaaaggagccacgcgagcaaaactcaaggggcgcggagacacaccaaaacgccggaccccggacaagcggcaaaagagagcaacagaccgaccaggccaaggcaaaggagacaccagaac

SEQ ID NO: 162858 - DNA, 221 bp, Zea mays
  Clone ID: MRT4577_80100C.1
attcggctcgaggggagctcgattgcgaactttttaaaacggggggcacagcatgatggacccggaagtcgaatggaatctcctgaagacattcgtaggtgcaggagaaatcaccctatggacccctgcggggctccagttgtacgagcgctcaggcctaaccggggccagttgcgacacctacgaacatagtggccttctgtgattctctgaggacacct

SEQ ID NO: 162859 - DNA, 134 bp, Zea mays
  Clone ID: MRT4577_80101C.1
cccatttttacgcccacccgtccgtctacttcatcgggggggcttatacctacgttaacggggttataaaacctacaaacatctctctttatgaccactgacgaaattttcattcttaaaagagcaattccatg

SEQ ID NO: 162860 - DNA, 488 bp, Zea mays
  Clone ID: MRT4577_80102C.1
gtgaggccatatgcaagagattgcaaaaggctggaacattttgtttccataataaaaaaagaatccaaagcacagttgaaatatgtcagtgacaaactgacaagactaataggttgggtacttggcagtgtgaatatgtatgttttggagggaaatctactctaattgaatcctgcctgtcaatcattcctatgtacacaatgggggtctatcacttgcatgaagggaatttccagatgctagactcgatcagatctcgttttttctggcatggaactagcaagaaaggaggtgtcacatgacaggtgggaggctctaaacagacccaaggaatcctgcatgtctcttggtgaagtggatagataagctgtaaagagggaaatgacagactttgttggaatctgttaaggaggaaatatttgggaaaccagaacatttttaaaacaaaactaggaagggttcacagttctggagatctttgttagatc

SEQ ID NO: 162861 - DNA, 172 bp, Zea mays
  Clone ID: MRT4577_80103C.1
ataatatccacaaaattattttgccattgctcgttagtatttctctttgtgtcctgtttacttagaatgattagtggcagtacagttttaaataaaaaactcgaccagagggaaggatgtcctctgattttggtcttatcaagtttgtgccagccttcaaacctggacgggt

SEQ ID NO: 162862 - DNA, 648 bp, Zea mays
  Clone ID: MRT4577_80104C.1
attccgcccacgctgccctgctctgctcccccagtcccccaccccaactggcgtcgccttccccggggaatgcgaccgcgcgccagagcatgccccgcccggagcccgcgctagggttccccgcccgcgcgtccaagccgccgccccagcgccgccgcaagaggcagccgccgacgaggcggaggcgaccggccggtgccgcaccggtggggccacgcggcgcggccgatccagatccggcgcactcctccgcgctgctgcccctcccaagcggcggcagtggcttcgcctcgcggggcacggttgcgccagacgaggaagacgggagagacggagcaagctcggcagaatcggaggaagtggcagaagcaacaaatcattcgttctcccactcagtaagagagtgccagaagcagcgtcgactcaagtcagagaggtctgcactggcgcgcccgacggccttgcatgagctcaacagcgctggaggtgttgagctgctagtgctctcgccgagatgcttgattggtaacccgggaggaatgagcaagagctcgacgacatcatcccggagcagatcaggcacaggcacgttcccgagccctgggactccgaactacaaccggcattgtgcaggcagcatgcagtact

SEQ ID NO: 162863 - DNA, 244 bp, Zea mays
  Clone ID: MRT4577_80105C.1
ccctcgctatcggacgcatgtaccatctgccttgaggcctactgctacagatacccctccaagatgaccacctgatgctacgagtatcacctacagtgcattctctagtgatgacagaagagctgccagtgcccaacgatgtgcaaggcagagaggatgaaggaccattccagctatgagctccgtgaggcccttcaggaagaaaggaactactcgcaagatgacgacgcgcgcacaaccaccg

SEQ ID NO: 162864 - DNA, 311 bp, Zea mays
  unsure (1)..(311): unsure at all n locations
  Clone ID: MRT4577_80106C.1
ccggcgcggcgagccgcgagcangccggccgacggcggaaagccaaggaggagcccaccaagaaagcggccnacacgggcacccccggcaagggcagccgagcngcagacgagcccacgggcaccagaggcaagagcccccccagcaacaacggcgagaacgccgaggagaaccgccgcgcccgccgcgagcaccaaaacagcggcccaggcgcngnccaggacagcagcggggagcaacncggcgaggagacccaggaccagaagaccaaggacgggaagggcgcaggcgaggaccncaaggagggaggg

SEQ ID NO: 162865 - DNA, 301 bp, Zea mays
  Clone ID: MRT4577_80107C.1
ggccgctacccctagtccccacagcgcaaggtacgttccatccgacgctctggcgtgtaatctgtacttggccggcgtgtgatctctactctggtagggttgccgttgtcaccggcgggaacaaagggatcgggctggaggtgtgcaggcagctggccagcaacggcatcaccgtcgtcctgacagccagagacgagaagcggggcgccgccgccgtagaggagctcgcggacgcgggcctctccggcgtcgttttccatcagctggaggtcaccgacgcccagagcattgccccggccgg

SEQ ID NO: 162866 - DNA, 413 bp, Zea mays
  Clone ID: MRT4577_80108C.1
agcagagagattactacgatccaacagttatagagcaagagagaggaagacacactgaagggttagcacgctaataacttgcaggagcagcaagaatggcggggacgcgtgggctctattgctgtttcctggccgtgcttctggaacgagtgggcgatgacaccgtcttataagaagcggatgttgccgaatttgtgcttaggcacggcgcggcggtcttgcgcaagcatggacgacctggcgttaagatgctaaatcctgagccacaacctaaaagtaaaacggagccccatatgctggcactgacgcagcccgaacctaaaccgctatctatgccacatgcggagacagaggctgaacctgaaccaaagcccaaccatgaacctaaccaatgcccaagccttaaacaaaat

SEQ ID NO: 162867 - DNA, 1522 bp, Zea mays
  Clone ID: MRT4577_80109C.1
tgggtacctcgaggccggccgggccgggattcgctcattcccgcccgtcccgcaaccaccaccgcggccgcggtgccatggcatccgccgccggcgccgccttgtgcccatgctctttctccaccgtactctcctcctccccctcaactcccttccgtcgcgcaaggacgacgcctcgcccttctctccgcccgctgccgcgccgcgccaggctaccgctgcggccgggccactcgcgagtcggatcgtgtctgcaggtactgaggtgcctcccgaaatgcgactcggggaagccggacggaggaggagatgctgggttatcgggtcggaaggcggcccggccagcgggtcagggaggacccaggcggcccgcgcagttcggcgcgtcgtcgtgcgggctcgcattcacgacggtggggggggtgataatgctccaggcatcgcagcaggcgcttgccgccacgcagttcgctggcctgcagcctgcggatgtgctggggggtctcggggacgtcagtacaggttttgcttcagctttcctgttgatcttcttttctgagctaggggacagaacgttcttcattgcggcactgttagcagctagaagttctggagctgtcatttttctaggcacatttggagctcttgcggtaatgaccattatatctgtagttcttggtcgagcattccactatgttgatggcatcattccgttcagctttggtggtactgatttcccagttgatgacattgctgcggcatgtctcttggtttattatggggttactacattacttgatgcagcctcaggtgatgatgaaaagatcaatgaggagcaagaggaggctgagttagcagtatgacacgtggggggaaatgttgcgggggtcatgtctgctgctggtactattgctagcacattcgtattggtttttgttgctgaatggggtgataaatcatttttctccacaattgcactagcagcagcttcatcccctctgggtgtcattgcgggatcactagctggtcatgccattgcaacattgattgcagttcttggtgggtctttgctgggaacattcctgtctgaaaagattatagcatacattggagggagcctattcttggcctttgctgcgattaccatagttgagatagtgacttgaaaagggagttccagcttccacaattcataaaaagtactgatcttttgtcagggcaatgaaaaatcagcttgctgatcgtaatggtagtacattgatgtgttaccgaacatgattgtccacaggaacttcattgttcgcatgggacgtcctaggcttgcgtagagtgttttgtttctggtgatgagaatttctgcttctttatccaagaacaatgtttttgtcatcatcatgatttgtagtggaaacactgatagtcaggttggtcggaagatgggactgggaggaaactatgaattccatgtagcttttgaacttcctcttacattatttacaagtatatgaatcagtcttttcgt

SEQ ID NO: 162868 - DNA, 300 bp, Zea mays
  Clone ID: MRT4577_8010C.1
ctatagtatttaaataaaagtcatagacgaacaccagagcaattttttatagagacgtgggccaaaaaacaagaggaccacaaaaacaagaggacgatgtcgtccccacctcatcctatcctactttgatatcgaaccaaacagacaagtggccatccttttctcccgtcatacaatggggccaagcgctgttaccatcgcagccattaatttcctcaatggtacatgggtgaattacaaccaatcgacacagcgctaatcgcctaaccacacctgtttgttttgtacaaagaaaatagt

SEQ ID NO: 162869 - DNA, 1724 bp, Zea mays
  Clone ID: MRT4577_80110C.1
gtcccgaggacggtggtctggtaattcgccgcgcgcattacattacattacatacaaacatacacagtttggccgttaattagccagcgctgacaaattaaccctcgtcttcgtcgcctgacccgccgccgaccgccgtacgtgaccaccaaccaggctatagagctacctccagccgccggcccgcgcgtcgtccgccgcggtgtacgtacgtctgccgcggagccacgcgcgcggacatggctcagctgaaggccgcgcgcgccaccgacgtcccgcccgccatgccggacccggacccggacgtcgtcgccgccgacctcggcgcgtgcgtacggcacgggcgcgttgacggtttggcagcaggaagcggcagggcggaggcgacggcgacggcgacgaccaccgcggcggcggccgatcagggacgacgacggccgccgctggtggtggtagggcaccgcggcaaggggatgaacgcgctggcgtcgccagacccgcggctgcgcggcgacatcagggagaacaccctccgcgccttcaacgccgccgccgccagccaccccgccgtcgcctacgtcgagttcgacgtccaggtgaccagggacggctgccctgtcatcttccatgacaacttcatctacacgcaacaagacggccaagtctcagcgaagcgtgttaccgagctgaacctggacgagttcctgtcctacgggccgcaaagagaccaggggaaggccggcaagccacttctccggaaactcaaggacgggaggatcctcaagtgggacgtgcagtccgaggacgcgctctgcacgctccgtgaggtcttcgagggcgtccaccggcgtgtcggcttcaacgtggagctcaagttcgatgacgacctcttctacacggaggagaggcttacctgcatcctaaaatccgttctcaaggttgtcttcgagcacgccaacgacaggcccatcatcttctccagcttccaacccgatgccgcgcagctcatccgcaagctgcaagacaaataccctgtgctcttcctgaccaacggagggacgcaggtgtacgccgacccgcgtcggaactcgctggaggaggccgtcaagctgtgcgtcgccggcgggctgcaggggatcgtgtcggaggtccgggcgatactcaggcagccgtcggcggtggccaagatcaaggaggccaacaaactgtcgctgatgacctacggtcagctcaacaacgtggcggaggtggtgtacgtgcagcacctgatgggggtggacggcgtcatcgtcgacctggtgcaggagatcgcggaggccgtgtcggcgttcacggtcgttacggccgtgcaggcgtcgggctcccaggacggcggcggcatcgtggtcggcgagaggatggagacggctgccgtggcggtggcagggacgccgagcttctcgccgcgggaggtgtccttcctcctgaggctcattcccgagctagtgcaatagcgcgttcttgctgctttgctggtggaatctcgcgacgagatcctctgtatccgtagagttaggtcactaacgtgtgaatccggcctttttgtttgtcaactgaaatcgaaaaaggttatgggttacattcgtagagactaccagcacagcgattacgatttccatttctgcttgctcgagtatagagtacaaaacataaaaattaagtaggtgtgaatataaatttgagct

SEQ ID NO: 162870 - DNA, 306 bp, Zea mays
  Clone ID: MRT4577_80111C.1
ctcgagccgccgggctcgatcgatcgcgtcctcctccttcgctccgttcctagctcgctcgcgtctctctctctctctccgagctccgagctccgaatgttgattggttggtgtgtcctctagtagctgaagctgccagcatgatctgaggtgtccacagcatatatatggaagcagctagcgatcagatcatgctgtgcagtttcatctgctcgtggacgcacacgagatgctgtgcctagctgggacgcggttgattaattcaaggggctttgcatgcggcgctccacttgatttgggtacaaa

SEQ ID NO: 162871 - DNA, 403 bp, Zea mays
  unsure (1)..(403): unsure at all n locations
  Clone ID: MRT4577_80112C.1
gcgctcggcctcgccttccgtttccaaccaggcacctcgccacctcctcgtgggatcgcgcgcaggagcggatcgccgccgcaggagagcgttccgagtccgaatacgtacgggatggtggaggcgccggccggtctgagcgcggcggcgcaggtgagcgcgctgccgctgcaggtggatctcctgcagctgccgccggaggtgcccgcgccaggggatcccgccctgcgcggcgtcctcgacagcctcttcgcgcattggctctcgctaccgaacaccgncgtgctgctcgccagcctcgtgcacaaggccaaggccagcggcggcggcgccgtggcggntgtggctgggatgctgccctccatgttgctgcaggggggaaccggcgtgccggctattttcc

SEQ ID NO: 162872 - DNA, 334 bp, Zea mays
  Clone ID: MRT4577_80113C.1
ggggaccgaaaaaaatgtgtttgtttacggcccccgtttacacttgtttttttaaaagtttttgcagcattgttaaatttttaaaaaccgggaattttttgtaatacctgccaaatgcaaaacccaatttcaatggattactttaacagggaaattgtttctggaaaaagtttttgtttgaaaaaaaaattttgggcccaacctaacaaaaggtaacacgttttttttattagggacgcattttttaaacggtggggccaaaaggttggtgttctttcaaagagcttcacagggggacttgtttgggggggggggccattttctccgttttttt

SEQ ID NO: 162873 - DNA, 511 bp, Zea mays
  Clone ID: MRT4577_80114C.1
cccacgcgtgcgctatattagacgggaccagagttcggagctattgccgctctctgacacaactgtgacactcccgcatcgtgaactctactgtacttcaccactctgcaatatgaccggatacaagcaccagcactacaacttcagagagctacacttaggataaacaaacactcgcaactcgatgagactctaccagcccaaatgaaggactgcataaaaagctggaatgatctctgggtgactgaccagccatttcagcagaaggagcactatctaccccttgaaggatatcgaccacagctaacttaagtggcttgaaatacggaactactgtaactcacaacacaaatggaaaaagaaatgtgtgagagatcctcatctactgagacaatgacctcaatcgacatatctgtagctatcgcacacacaactacgcatattacaatgtgtggcaccatgacagactttcattaactctggcaacaccactgacactgtatgcgctatc

SEQ ID NO: 162874 - DNA, 217 bp, Zea mays
  Clone ID: MRT4577_80115C.1
gtcgacacacccgtccgcccacgcgtgcgattacacgtatgcttactcattgatctaaatttcatttttttaaccctacaagatccaaccgtgaagctcttatgcatttttacatttataaaccttcttactccaacaattataataccctcttacagcacataacactttgatgcatttacaaccatacaacacaaactcacatcaactacaacaa

SEQ ID NO: 162875 - DNA, 695 bp, Zea mays
  Clone ID: MRT4577_80116C.1
gcctgctcttcctggacgagcccaccagcggcctcgacagcgccgcgtcctaccacgtcatgagccacatcgcgcgcgtcgccgcccgcgacggcatgaccgtcgtagccgccgtgcaccagcccagcggcgacgtcttggagctcttccacggcctatgcctgctcgcagccggaaggacggtgttcttcgggaccatctctgacgccaccgagttcttctctctgaacggcttcccatgcccacgcctgagaagcccgtcagaccacttcctcagaacaatcaacaaagactttgacgaggaaaccgtggtggagagctctgacaaagctaaaaggaaaacagcagctgatgaggcaatagaaatcctggcgactgcatacagatcatccatttacttggacaaaaccacagaccaaattgtcgaaatgaaaagcatggatggagcttcatttcggcggagagaacacgcaagctttggcaccaagctccttgtgctgacgaggagatcgttcctgaacatgcacagggacgtagggtactactggatgcgtctggccatctacatgggcattggcgtgtgcctaggcactatcttctaccaacttggctacagcacctacagctctatccagagtcgatgtgaagtaatcatgtacaccatcgcactcctaactttcatgtcaaccggagga

SEQ ID NO: 162876 - DNA, 1413 bp, Zea mays
  Clone ID: MRT4577_80117C.1
ctggtacgccctgcagtaccgtccggattcccggcgacgccacgcgtccgcgttcctccttgcatatatatatatgcatgcagttcttctctctgaacggcttcccgggccggcgcctgagaagcccgtcagaccactttctcagaacaatcaacaaagactttgacgaggtaaccgtggtggagagctttgacaaagctaaaaggaaaacagcagctgatgaggcaatagaaatcctggcgactgcatacagttattataataattaggacaaaaaataataagaatgaaaattatccctactgcaggatggagcttcatttaggaggagagaacaggcaagctttggcacgaagctccttgtgctgacgaggagatcgttcctgaacatgcacagggacgtagggtactactggatgcgtctggccatctacatgggcattggcgtgtgcctaggcactatcttctaccaacttggctacagcagctacagctctatccagagtcgatgtgaagtaatcatgtacaccatcgcactcctaactttcatgtctatcggaggatttccatccttcgtagaagacgtcaaggtgttcagaaaggagaggctgagcggccactacggcgtgtcggagttcgtcatctccaacaccatctccgccactccgtacctgtccgtcgtttccctactgcccggcgcgatgctgtactacctcacgggcctgtccaaaggcgccgaccacttcgtctacttcgtcatggtgctctgcgtctgctgcctcctggtcgagagcatgatgatggtcatcgccgccgtcgtcccggacttcctgatggggatcatcgtcggcgccggggtgcagggggtcatgatgctcaacggcggcttcttccgcctccccaacgagctgcccaagcccgtctggaagtacccctgctactacctgtccttccacaagtacgccgtgcaggggctctacaagaacgagttcgtggggctgtcgttcccgagcgaccagctcgtcgactccaatgtcaccgtcagtggcctccaggtcctcgagtacaagctgcaggtggagatggggtactccaagtgggtcaaccttgccatcctctgcgggatgatgctggtgtacaggatgattttcttcgctatcgtcaagatctccgaggaagttcggcagaaaaggggtggcaaaagaggatgtgttagatagtacgtagccggctcttcttcatatatgtatgtgtgtatctctttcctctcccccattattcttccaaattgtataagctgctgacaccatgggtcggatagacaaccgaccacaattctccacctcaacgacaattaaactataagccaacagaagttcaatcttcaaaaaaaaaaaaaaacggacgcgtggg

SEQ ID NO: 162877 - DNA, 2273 bp, Zea mays
  Clone ID: MRT4577_80118C.1
atgccccctgcccccaccccagcctacgatctcccacagagtcacagtcactgttcacacaacagctgctagtagccgtagcccgtaggcgagccagaggcggcccaattcgagagcggttccggcggcgtgggcggcgccgtgcctgagatcggagccccgtggcgcggtgctggcaactggcggcgcgatgtgggcggtccacgggagggagtccacggccgctgcgcttcgcctgctgctgatcgcgatcgcctgcggcctcgtcttcgcgctcctccacctccccctcccggatgaccgtgcgcgaaccgccgaccccggtgggcagcgcggcgctgctgggggcggcggggcccgcctgtcggtgcagcaggggagggttcgagaggccagaaggctgagtgtcgtcaccgaagagacagatgggcaaactgacgaaacggcggcggaagaagatgaaaggatatctaaatctcccccagacaccaaagagaagatctggatgatgcaagatcagctaattttggccaaggcgtacttgcatttcgcttctccccaaggtagtgtacatttagttcgagagctgagattgaagataaaagagatcgaaagggcaataagccactcaagtggaggtacccatgtacctgggagtgtgttgcaaaaaataaaggcgatggagctgaccctttcaaaggctcagaggacctacccgcattgctctcagatgacgtcaaagctacgtgcaatgatgcataatagtgaagaattggtcagagcacaccaaagtgaatcttcattccttgagcaggttgctgtgaggacattacccaaaggccatcactgcctagcaatgcagcttaccgcagaatacttttcgttagatcccactaaacgtgaattccctaaaagagacaacattcagttgggtggttattatcattatgcgatgttctctgacaatgtgcttgcaagtgctgtggttgtcaactctacaattgctgcatcaaaggatcctggaaggatattattacatattgtaactgacgcgttgaattatcctgcaatgatgatgtggtttctgacaaacccaccaactccatcagtaatccaaatccagagcctagatgatttgaaatggttgcctggtgatttcagttccagattcaagctgaagggggttcgggatccgagatacacttctgcactcaaccacttgcgtttttatttgccagaagtgtttccatctttgagcaaggttctactcttggaccatgatgtggtagtacagaatgacttgtctggattatgggacctagatatgaagggtaaggtaaccggtgctgtcgacacatgcacctcaagtgaaggtttccgccaattggatagccttattgatttttccaatccaagcgtcttcaacgaacttgacccaaaggcttgtgcatttgcatttgggatgaacatatttgacctgaacgaatggcgcaaacagggtttgagtacaacctatcatagatggtttcaactgggcaaaagtgagaagttgtggaaggcaggaagcctgccactgggtcaggttgtcttctacaaccgaacgctgcctctggaccaccggtggcatgttctagggctcggtcatgactccagcatcggaagagatgaactcgagagtgcctctgtcatccactacagtgggaaactcaaaccctggttggagatttctatcccaaagtacagaggctactggaacaggtaccttaactacgataacccgcacttgcagcagtgcaacattcacggatagaggcgatggcgggtgaggtgattcgcaaggtagaactgggatatacgcaacttcgctgtagtaacttattaggagagcaagttgttgtttttttgtttctgttgctagatgccctatttgcaattttgtttgctagtagtcacaatcggtacaaaagcaaaaaaggaagaacaaaatcgagtacacgagctacagtttcactagtgatacactgaaggtttgacaaaagtcaagccactagctaacattatcaataactagtgttgcctcggacctggggaagagtgcgaattccacggagctcagttagcgtgcgttggacaagatagatgtaaagttttcgcgataatatcgttctctcttacaaagaaaggggttttactactgccatttaaaaaaaataaaaaaatctactttataataacaaaaaaaccacaaaatttaataaaactaataattatac

SEQ ID NO: 162878 - DNA, 550 bp, Zea mays
  Clone ID: MRT4577_80119C.1
gttcaccttagtcgcctttgctcctctgacttccccaagctgccggccgacccaaaggcggcccgtgccctagagccgccggccgaccgccgcaccgtccgcctatcccccgcgccgcctccatcgccgtccgcgctccaccttcccgcgtccccgccgtctccaccccgtccgcaatctcggtcatcggttctgaggtatgagcttctccacaagtttcgggtgtgccggtgcgcacccggcacgccatctggatccgccgccggccgggaagacatttcgtggtgtcagcgcgacgcgtttcctgaggaacaggcggtttgccggttgccctggtcgattcgaatgctccgcaaactcgcgccaatctgggccgcggcgcacccccaaggacaccatgtacgacctccaccctgagatctcgatgctctatggagaggataatggcgcaattgctgcccccagcaaggagcacgtcatcgggaaagcaattgagaccttaccgctagcagatgcttctatcgcgtaccgctacaatggaacccccgga

SEQ ID NO: 162879 - DNA, 317 bp, Zea mays
  Clone ID: MRT4577_8011C.1
gtctaatctactataggacttaggatatgaagaaatgttttttagggtggcggatgatgattatagcgtgtctaaagttttagtctgaaaaagttatgagaagactttaaagttgtaaaatctaagataacggtaagtccgatgacctatacactacttctttttaatcgacttagctcaatagcgatgagacaagacatcaaggttagctacgtagcgctctacataattaataatgtattgatgtcaatctcgcgctggaatacacagtgtatagtaactcttgacattgttcatttcatacagttagttgatta

SEQ ID NO: 162880 - DNA, 795 bp, Zea mays
  Clone ID: MRT4577_80120C.1
atgcagtatacttgtaaatagcttggactggtcgaaacttagaccaaatctcccgtggcttgtagaatcgggaggatgtgttttgctggattcttgtattattcttcagttcctttatttccattatcggaaacgaagggagccttcggatgagcacgacaacgcagacaaagcctgactgatatagaaactactgtttcttcttcggctcaaagaattgaagctgaaatgggtatcgataccgacctgcctcctacaacgggctctggatagcagcagcatcgttgttacctgaagatttggagcgtcgtttcactggttgctgcttggagggtacttctcaccgccgtcatgtcctgtggagaggcttgtgaactattatttgtctcgtagtgtcaaaatgtcttgtttttttgtatttatttatatcagatatttgatgttggctggtctgcttttgttttatattctttttttgtgtgtgtgtgctgcagaaacttgcacgagaaatgtacattcgtcgaataaaaatgtgcttattctcgttttttacgactgactttgccatgtattcttgccaccagcagccttaaactccaagcgacaagctctgcaaaggggcaattgtatactgcgctgttcgcttcctgcccaagccagcccagactgatctcatattattattattttcaatttggaaggtccttcggtctatggagatagctgtcttctccggcgaggttataccctctaccgcaggcttgattctaaggtagcagcctaggcgcttgaaag

SEQ ID NO: 162881 - DNA, 703 bp, Zea mays
  unsure (1)..(703): unsure at all n locations
  Clone ID: MRT4577_80121C.1
gtacgcctgcaggatccggtccggaattcccgggtcgaccccgcgtccgccacgcgtccggctccgtggaggcccgcttcggtttctgtcgcggggcccgcggtgtctcctagcgtaaccggaactagccgttgcgggccggccttctctgcgctcgggccttgaggtgatctccgagcgccccggacccctccttcctcgccgtccccctcggctcggccgctcgcctctcacagccgccggcatgagctccaggccgccagcgtcgccgccagcgcaaggctccaggttgctgctgctgtcgctgctcctgctagggacggtcccaggcccgcgcccgggaagcgccttctacctgcccggcctggcgccggtcaacttctgcgccgaagagaagagcaacgagtgcaaggctgatatagaattgtttgttaaccggcttgattcggtggaatctgttcttccttatgaatatacagcgtttgacttttgccaagcgtcagaaggaaaacgcccatctgaaaatcttggtcaggtattattcggngaaagaattgaaccctcaccgtataagtttacgtttaataagaaggaaacctgtaagctcgtttgtacgaaaacatacaatacagagaaggctgaagacaaacanaagttagacttcctgaaaaaagcatgctactgaactatcagcatcactgga

SEQ ID NO: 162882 - DNA, 657 bp, Zea mays
  unsure (1)..(657): unsure at all n locations
  Clone ID: MRT4577_80123C.1
ctggccggggcaaggaggcccaccccttcttcctgcaaggaccaccacctccatgacgtagatccggtgagggagggccagatccagaccgacaggctcagatccgtcgaaccctggccaccggcatagcttcctgccggctgtcatgcaccaccctgacacagactccgaaatgccgtcaccgaggggcacgtctagaagagggctcgccgctcacagctgcggcatgcgagcacatgccctacgacggatggagccgggcgagggcaaggctgggcaagggcgaggatgagaggggagagcagagcagagctgttccctgctgccgccatccttgtgcccgcgcgagccactcggcagagcgctccgatgacagcgaggcaggggagtgggagggagaaaccagcgggggtgctgcctggttccgcccatgggcgccggtagtctcccaaaattgcggtagctagcattggtttactatctgttgtgtggtattgtgtacctaataatggttggaatgctggtagttgttttttttgtagtactataataatctgatgtgattctagtattttcagtaaaaactcatcagagacgtgaagactataattttaccatgtatatgtncggttatatgtgtactcataagacaggtcg

SEQ ID NO: 162883 - DNA, 1047 bp, Zea mays
  Clone ID: MRT4577_80124C.1
ccaccggccggggcgcccggcgtccccaactccaccgacgccgagcacaaccgttgtttccggctggtcctccactggccgctcctcagtcagtcccggattctcccttgggtctggagtggaatggaggttaatccgatcatggggtgatttcctcttttaactggatcagcgcagccggagctcaaaggtgcctgtggagtttattacatcaagaattttgggttcgacataatccccatgtcccccaataagtccggccatgcttcaggccgtgacgcggttttctggtccgatagaatgaacgaatatcttattgattcgctgcttcaccagcaagccattgggaacaggagtgagtccaaattctcatcggtggcatatgatagcatcatcaccggtgtgggtgagaggtttggcgtggtgatcgaccggaacaatataaaaaatcgcctaaagcatatcaaggaatcgttcaatgaatgtaggaacctccttggtgaagataatcggtttaggtggtgcccagagagcagaagattcaatgccgacccaaatgtttggagggagttgatcgagagaaaaccagaagcaaagaaatggatgatgaagacgattgaccattatgatagcttaatggatctatttggtaagaatagggagaaacgtcaagacgttgagaactcaaaaggtacctcgaagaaaaaggcgcgaacagaaccgccaaaggagatacttcaacgtactccattaaatcggaaggggtcagctcttgccgaaagttcagataagacggtggacaaatgtgagatccatgatgagataaaaacaaatgtggaacttgatttgtcagaatcgtgcagaactgataatggcattgttgccatacctgttcgtgcctattcatacggtaaaggtttgccctatgctcctgaaaattggccacgtcatggagacatatggcactggaaagttggaagcagggcttctggagcaggccattgggctgacaggtatattatgccgccatcccgttttcgtggcgct

SEQ ID NO: 162884 - DNA, 208 bp, Zea mays
  unsure (1)..(208): unsure at all n locations
  Clone ID: MRT4577_80125C.1
gttaccacacacgcacttcgccgtgtnnacngagctggtgtcagagatgaacagctcctgangacaccttaccataaaatggatagcgacatggggatactgtggacagctgtatcgagtagatgtattcacatttcgctgaaatagcagtcggctccttccctcccgatgtataggctcagattacaaagggcttagacgagggtcg

SEQ ID NO: 162885 - DNA, 1178 bp, Zea mays
  Clone ID: MRT4577_80126C.1
gcacatgcgaccttatcttctctggagcttcatctccctcgcgcctagcctccccagcgccctgccaagctcctgctccctttccatggccgcagtctagctcggagctccctctgctcatctccctcgcgcccagctcggcctgcgcgctccggcaacgccgtcctccagctcggccgccctcctgctgctcgccatggtcgtggcgtccttgctcacatcaaccagcttggactgcacgctctggcatccgctggccgagcagctccctcacgccgcgcccctggtcaagctcgtccccatggcggctttcccatggcgtcccttggcctccagcttctgctcgcgctagctcgccggtgacggcaaggccgaccatccctgctacccagcgccgaccgctcactttccatggccggcgctcgcccttaacgccggcgctcggaccacgccctcgctgccggtgctcgccgaccgcggccgtcctgctccctgctccaaccaagctcgcccaggtacgttaattgatcacgtgatgcggaagacgacccaagtcgaccccaggataatgagagattggacatctccgcaagacgacgtcgtcaatcggacgaaccttaagatggacagactgaacgagtgccaaggcaaaggatggtcgtcaagtgatcatcgtctaacacgcactaacgtagtgtttattccaggtatcttcaaactcggatcggaaccacagtgggagaagcacgaacaatacgaagattgatgcagcgccgaagctacgcgcgagggagcttcggcataacagcatgaaagggaaccgacttaaaggggaaaaggctatttagacctcgatgaattattttatagtcattagcaaatgtaaagggcatggatgtaatttcacaagggctgcgttccatgcctataaatagatgaacaatacccctgtactgttcacgctgacttgcatttgctcgtgcatcacacttgtacttttaccttctatcaagccgaaggtacatttgtaatttgatatcatttatattttctatgataataaaatagaaatgagctgataatgttacacaaaaaaaaaaaaaaaaaagcggccccttatattaatttacgattgtatactgagaaatatatatgataatgttattgccccccccgtt

SEQ ID NO: 162886 - DNA, 258 bp, Zea mays
  unsure (1)..(258): unsure at all n locations
  Clone ID: MRT4577_80127C.1
ggcatcatatcatatttattccattcatgcgagggnaagagncataggggagttcattgcaaaatattttttttgtctcataccacaaaatgatgtagctattgcgtctctgatatggtagcaaaaaatagcaatactattgcccatagcattgaaatgcaccaccacattctgtgaccgccagcgctcatggtgacttgctttcagtgggggagccaccgcggtcagcatcatcagcatcgtcatcagcagaatcat

SEQ ID NO: 162887 - DNA, 165 bp, Zea mays
  unsure (1)..(165): unsure at all n locations
  Clone ID: MRT4577_80128C.1
accactgccccgcgctcccctcccactggctttgggctgcctctcgccgtcgcttcccnntccccgatgggctgcttccttggctgcttcgggggggccaaggagcgccgtcgacgccgaagcggcgcttcaaggcccacggcggccggctggcgggtacaccaa

SEQ ID NO: 162888 - DNA, 286 bp, Zea mays
  Clone ID: MRT4577_80129C.1
gtgtcggactgatattttctggcgtacatgcattatataattggaagaaggatcgaatcgcacttgttaataaaagtacaccaaaagctagcgagcgagtcaactttacctgcgtcgtcactaacggcgttcttctccaagagaaatagctactcactgtctaattaattatcggctctacatatctgcatcattatatacagaaattttatatgtatctaatcaatgttggtttgcggtgatagtcttttttttggcctaataatttgtcaaacgtatctaattt

SEQ ID NO: 162889 - DNA, 168 bp, Zea mays
  Clone ID: MRT4577_8012C.1
gacccactcatcctcccactcttactaccacacgttttaagatttcactctaaaccaccgtttttcgatctctgtccacttcaaacctcctttcctcctataaccaccacttacacactagctaataaaactccatacctcctttcctccaacagacacccatgacca

SEQ ID NO: 162890 - DNA, 197 bp, Zea mays
  unsure (1)..(197): unsure at all n locations
  Clone ID: MRT4577_80130C.1
agaaaggagcanagaacaaacgaggagagaccgcaccacacaccncacgccngaaggccagagcaaaacccncacggccgcgcccaaggacaacgangaacancgaacaaccaaacaaagcaaaggacgaccagcgcacggaaagcaaaacgcacagcacgccgggcgcaccacacacagacacgagcggaccgcgc

SEQ ID NO: 162891 - DNA, 513 bp, Zea mays
  Clone ID: MRT4577_80131C.1
gggaaaaaaaaacagcccgttggccaacccgggttttggttacaaaacgcatcccgttttaacatgctaaacgggaaaccctggacagttaaaacggtggaaacaaaaaaaaatttcttgttacctttgaaccactgggacatttttttactggaatgggggggggaaaatcaggggagcccctttttttgatccggtattgggccccttggtttttggaaacttgactccgaaaccggtatttggaggcttgagggccaaaaaagcgtttttgtactggaacggggaagctggaaataggggagaacctttttctgaaccggaattggcatgcttgggggcccccgctttggaccccttgttttctaacagctcacccagggggggctccaaaccccgggggaatttgggggaggggtcaaaaagtcctccctcaatggggaaaaatgaccgggggcccccgaccctgggatctctcccgatttttatgaggaaccctggaagccccgcaaa

SEQ ID NO: 162892 - DNA, 635 bp, Zea mays
  Clone ID: MRT4577_80132C.1
gttggggtgttggttgtttaatcaacataagaaatcccattatttaaatgcgtgttgcgccgaaatatgcgttatatccaagtccacccaaacgcccaaggtatatatacagtcgaaagatggacacttctaatttttcagtcccgttctatgccatcgcccgctagcaatgcttcaggttcgattagacatgtccgtcaacagcccactttgcgagagcaggccagccaagcaacaggccaaatgtaggaacataggtgacgatcttgcccacgacaaagctaacctccttgacatagtcaggagttgcaggcttcacggtgactggaacccgctcataaggggcgtgctcaaaagcgcggcccatgcttcgaatttgcatgatgaatgaaacaggcctgcgagcaacggtcttggctgcagtgcgagtgaggacggcggcggacatcttgagatgtgtttgaaaagatgtgtttatcgagttggttttgtcgtgtaagatgaggagattggagatgcaatcgaattcgatttcgagtcttgaagatattatactcggtatgtatgattgagtagagatattcgtagaatataaaaaaagaattgagtagagaggtaatcctctgtggattgtg

SEQ ID NO: 162893 - DNA, 572 bp, Zea mays
  Clone ID: MRT4577_80133C.1
ctggctacgagctctttcttggggatatggctaggatcaggcactactctctcccagactctcaagcaaccgctgctggtgggccctgctgctgtggcttctctggtggcatatatgcgcacgggcttcaaggtgatgctggttggccacgccggagggcttgtacttactacgctagcaaccgttctcaactggggcatcaagtcaacctgaacctgcacaagtaactcgaccctctcaatggcgcatcgctacatgtgccatcagatataagacggatacacagccttgcttaaagaacaacatctactagaacaaagaacacaatctttcggagcgcaaaagacacagatggatatatgactcaaaccaattaaacatgcattcttgcaagatccaacaaaaaaagaagagctataggggttctacattgcttgtgggggcttaaaaatctgcatcgatcacttaataataactttgaatgctgctcaactcttaacacacgtgtttgtaatgatgatctaactaggcggatcgctatatagctgcctgcttacgtacacgtgcatgcg

SEQ ID NO: 162894 - DNA, 284 bp, Zea mays
  Clone ID: MRT4577_80134C.1
acgcgattcggtcaccacctcgcacataagccatatgaccaacatggcgccaaaatttgctcttatgcttggattttgaagtgctgtcgcaccatttccgatgctacagcttatgcttcttttcccgccttaccacggtttcgtggaaaaccattttacctacagaccacagcacgagtgcatttaccttataccctgtctcacatatagctatcagagtccttgggcttatggcaaacatagccacactcacactggctgcaactgtgctcttagaacgagtt

SEQ ID NO: 162895 - DNA, 346 bp, Zea mays
  Clone ID: MRT4577_80135C.1
cagctgaagctaacacagatcttttcgccgtgtaacgccatcatcaacagcaggcatattcggcatgtcacacacacaacacactcacatcttatatcaccaccatggattctctcagcatcgcccctcatcatcatcagcaaccgcactccatgtgcctgccatacccatcgcaagaccacatcacccctatactcaacgtgtcgaatctgctacacacccggagcttccacgtcaccttcgtcaacaccgactacaactcaggcacgcctcgtccggacccgctatactgctgccttggccaacctacctgacttccgcttcgccaccatccccgacgtcctgc

SEQ ID NO: 162896 - DNA, 615 bp, Zea mays
  unsure (1)..(615): unsure at all n locations
  Clone ID: MRT4577_80136C.1
ccgggcctttccttccgtgttattattattatatcatggattcgtggtgtaggatccgcatgcagaaacgttggagaaaaaagagatcgagaggatcggaactccatccacgctcatcgacacagttgtacgcattatcaaggttatctgtccaccaaagaaaagtcaaaaccactactacatactcacacatgacgcgcgtttgagtgaatgtgtcgcggttgtgcaccacgacacttttattcccttcattgtggccacattttcctgtccgcgacgatttattagacatatttgggagcgagaggattgattgaatagtcaggcgatattagcctcttcgatctccttcgaatcattttgctcttaaataagccttaataatttagaattgcttctatccatggggagcagacctaggactcctctggttgcctgcaacgattctcaaccgaaaaaaatggcgaatgagccattactgttagagcaactccaatagttatgtaaattttagctctctaaatcacagaaatataggtttgggagtaaaaaaatgtaagttctccaatagttttctaaatataggttgtanggttttgtttttgtatcntatcc

SEQ ID NO: 162897 - DNA, 697 bp, Zea mays
  Clone ID: MRT4577_80137C.1
ggtttaggggatatggatgacaggaacaacagtatagaggaactagaggtggtgaggaagatgcaaggagcaagaggttggatgaatatgagtctgtggatgtggatccggatgccatggataacaatatagatgaaataaacacagtcaatgaagactcaaggaggaaaagcttgaatgaatctgagactgtggatgtggatccggatgccatggacaacaatatagatgaaatgcaggcggtcaatgaagactcaaggagcatgagcttgaatgaatctgaggatgtggatgtggatccgcatgccatggacaacaatatagatgaaatggagatggtcaatgaagatgcaaggaccaagagcttggatgaatctgaggctgtggatgtggatccggatgccatggacaacaatatagatgaaatggaggcagtcagtgaagattcaaggagcaagaccttcaatgagtctgagtctgtggatgccatgaacaacaatatagtcgaattggatgcggtcaatgaagacacaaggagccagagattgaatgatgaatcagagttggtggaagaggatgttaagggtccaaacttagatgacaagaacactgcggatgagcatgtcaatggcacaaacattgatggaatatgtttgggatttgtggcagttgaagtggtgcctgctgtacatgaggc

SEQ ID NO: 162898 - DNA, 937 bp, Zea mays
  Clone ID: MRT4577_80138C.1
tccttaagcagtggtaacaacgcagagtacgcggggctgggctgaactgggcttaatgggccgaaatccgttttttctttttccggggaatttctaaatgcttttatttttattttctctatggatttcaaatcaaattcaagccaaattcaaattcaaacaatttcaaacatgtgcgtcaaacaaaagaataatttggctcagcatgatgcaatatttcatgactcacattggttttgctataaaataaatagttaatccctcacctaattgacataagtctaatcaaaaggaagagagaatgtaacaaccgggcttgggaacaaagccgggtgcatgtcatacatgcgtcaaagaagacaacatatataataacagagtgtatagagataaatgtcacaatatcatcagagtacttattacatagcggaagtcttataaaataaaagataaatataaaatgaactaaattccatccttggcgccataaagtcgactgggagatgccacctagatcaagtcaaactcctcgttgtgtggctcctcttgaaccacctgttcttctccttcaatgagctcctgctcagcaacttctatctgctgaacaccgggatcctcagccataggctcttcggagatggcgcgcacaggagaccggtccgcggtgaagtgcggattggcgcggtcgcggagctttgacgagaaattgtcatcggtgtgaggatgattttcccccgccgcacgagcacacacccggtggtacgatgacgcctcctggcccgattcccggaccccaacggcgatgaagtcgcgatccaacggtggtgaccgactctccctcacgtatggcgaattttcctcatacgacgaccacggtgcatggcttgatgaggcgaggaaacagataggggttgcagccgtcagcttatgcccatgg

SEQ ID NO: 162899 - DNA, 283 bp, Zea mays
  Clone ID: MRT4577_80139C.1
ccattcaacccgtattttcatttccagaacaaaagcaggtctgaacaagcccttggactccattttcaaggaaaagctttccttatctatctgtaagaaaaagaattcatgccttacaaatgacgccccagacatgtgttttgcaccttggcgcctaatggagtgggtccacacaagcacacgttcatacctttagagtgctcggagaagcaaatactcacgcgtgcccatgctgaaaataaatacacaatttatcacacgcctgccatgtacattttgctgt

SEQ ID NO: 162900 - DNA, 243 bp, Zea mays
  Clone ID: MRT4577_8013C.1
ggggcccccccttttttttttttcttacgaaaccggatattcttattacatccagggaccatctttctcgtgcagggcaaattcttcgaatagggtgcacgggacggggacaagggacaaaagtggtgggcgtctaacccgttcaaaacaggccgactacctatttggccttttcctagggcccctggggagaccccaataacggctaacaattcactcgaatgacataaaccgccaggggtg

SEQ ID NO: 162901 - DNA, 123 bp, Zea mays
  Clone ID: MRT4577_80140C.1
accaaaggcagggttgggcactggggctaaaaccaagtgggggcagttgaaacggggagttaacatgatcaatgtgcgcgggggcctgaaactcaggcagatatcctcacagaagtggatgct

SEQ ID NO: 162902 - DNA, 774 bp, Zea mays
  unsure (1)..(774): unsure at all n locations
  Clone ID: MRT4577_80141C.1
gatcaaggccagtacgaccacttcaggtacttcaatattgacgggcactccagtgtatggtacacatgcattaaactcccttattctacgccacaatctgatttttgctccaggaacagtgtcagatgacactacagcctctttagcaattgcggccaaatgttttgtgtgcatggaagctgactccatgtcaacagaaccatgatagggcatctcaagatgtgctaccccacaaggcggatctatgcgatgaccagacattgttaaccttggtagcactggaattgcacactgtctctgggtttctaaaacatcaagaactgttgcaagtagattatcacgggaagtgcttgcatatacatgaattgggcagccatcattgaattcaaatgcaaatatctgtggttcttctacaaatcgaacaagagcacttactgctgagagtggtcgtactatgacagcctcatagttctctggacgtctttcaacaagtgaagtgcttgtaagaacaagcagacaagagacagaatcgccctgttctccaagcccaccccttggtccaacacccaaacttaagctctcaatataagcagtgccatgtgcagcagaacgtaatcttgttactgaccactctccatgtcgtgtttcagcagctccaactgcctccatagctctttttgctatgaactcgtccgctttcattgattgtgaattatccacagatagtgataatccaatctttaatttggcagtttcgtcagatgcgatatatcn

SEQ ID NO: 162903 - DNA, 283 bp, Zea mays
  Clone ID: MRT4577_80142C.1
ggagccatgcaggccttgtgctgaccaagctgctcacctcggaggagctggctctgttgtgctccaggctgctggtcttgggctccttcctgcttctcttctgtggccttctctgctgtgtcactgctatgtgcttcctcccgcgccgggagttccactggtctagaacccggctctgagggcactggcctagttcccgacttgtttctcaggtgtgaatcaacttcttgggccttggctctgagttggcagaggttttagagtatgcgaacatctggaatct

SEQ ID NO: 162904 - DNA, 692 bp, Zea mays
  Clone ID: MRT4577_80143C.1
ccaaaaaaaaaaaaaaaaaaaaaaaaaaaaaaaaaatgcccttagttgcgatttgcgaagcgaactcccaccatctgcgacgccatgtcttcttcctctgtccaacaaacggcctttcccgagcaagaagccgatgcggaaggcgaaacgaaccctgagctctaccagcatttcgccaacttggtctcctccctgccgagctccaaaggcttgtccaacaacaaattctaccgccacggccaaggctggcactgcagcgaggtgggcatagtgggcgccatggtcaccgacgcgtgcttcagcgcgcgcccgtcggacgtcatcatcgccaccctgcccaagtccggcaccacgtggatgaagtcgctcctgtacgccaccgtgcaccggagagagcgtcccgtcgtcggcgccgccgccgccgaccagcatcctctcaacagctggggcccccacgacctcatcaagttcttcgagtaccagctctacacgcgggacagggtcccggacctggacaggctccccgaccctcgtctcttcgcgacgcacgtccctttcgtgtcgctgccgagctccgtggtcgccacgccgggctgcaagatcgtctacgtgtgccgcgaccccaaggaccacctcgtctccctgtgggacttcgtcaacaaatactttagggtcaaggatgggctcgagcc

SEQ ID NO: 162905 - DNA, 821 bp, Zea mays
  Clone ID: MRT4577_80144C.1
gatcgcagagagttgcgcccggaccccggaccgcgccgacccggctcgcaaactcctccgcaaccctcgtcgccgccggctgctccacccccgccaccgccatgggtaaattccgcaagcttggccgcaattactcccaacgcctctgcatgctcaggacgatggtgtcgcagctggtgaagcacgagcgcatcgagaccaccgttgccaaggcgaaggaggttcggcggaaggcggatcagatggtgcagctagggaaggagggtactcagcatgcagcaagacgtgctgctgcctttgttcggggtgatgatgtcgttcataagctatttactgagctggccttccgctacagagatcgagctgggggctacacaagaatgttaagaaccaggatacgtgttggtgatgctgctccaatggcatacatcgagttcgtggacagggagaatgagcttcgagaggccaaacctgcaacgccgccgccgcctcaacgagcccctcttgatccatgggccaagtcacgtgctagccaacagtgggcaggacctaaaatcaccaagacctcggaatcagacggcttatgagctaattgcaaggctgtccacccaggaggaagtttggaacgagagagatgtatctctgctttgcttattggagttgtaacagatctaactacatgatcaaattcgtgtatgcatcggtctgccagtcctgtgtggctgtgtccgtggatcgttatgtcagattagtttctgatgatgtgtctttcaccgtttgcctgttctgaaccaaaagaatgttatagcaatcagttccac

SEQ ID NO: 162906 - DNA, 619 bp, Zea mays
  Clone ID: MRT4577_80145C.1
ctgtgcggcgctcgaggcggccgttccgagacgaggctcttcacaggaaatattacctatcccctacacatacatacttcctgagacactcttgcaacccactcacttctgtctgatcgatacgcatagacactaaaggacgactacgccatctcctgaggcacagctgcgcgttcaagcccttctctatgaatctcagtcaccccttcgacaccatgtacccctcctatcgctccgcctgcgacccccgccaactccaacactgacctcttcgacagcgcccgcttcacactgttccccacaacccgatctgcaaccgatcaaggcccaactacccgaaatcaacatccaagacttcaagtgcccacctgtcatcatcctgaaatgatgcgcctcatggcgcaccaccttcctcagaagaaggaccaggacaacgagagtttccccatctagcatagcatattccaggtcgccatgcgattccgcctggcatatagaccctctctgcatcaagttcaggctagtctcgagagactgatactcacttgctccgtgtccaaagaaccatagtaataacgctgatgtgaatgctattcatatctccggttaactatccact

SEQ ID NO: 162907 - DNA, 169 bp, Zea mays
  unsure (1)..(169): unsure at all n locations
  Clone ID: MRT4577_80146C.1
ntatcagcagccgcccgttgggaaaggtagcttcaagcggcccgccgtggcgcgtaagctcgggcggtctgagccaaggtacggcccttggggcgctaacccctacgtgggtcggagcgggcggctagcagaggcgccgattgctagcttggattctgacttagagcgt

SEQ ID NO: 162908 - DNA, 834 bp, Zea mays
  unsure (1)..(834): unsure at all n locations
  Clone ID: MRT4577_80147C.1
gccggccgggtctgggtgactcgaacggccgtcgagcccaaacctagcgatctcgcagagagtgcgcccggaccccggaccgcgccggctcgcaaactcctccacaaccctcgtcgccgccggctgctccacccccgccaccgccatgggacgatggtgtcgcagctggtgaagcacgagcgcatcgagaccaccgttgccaaggcgaaggaggttcggcggaaggcggatcagatggtgcagctagggaaggagggtactcagcatgcagcaagacgtgctgctgcctttgttcggggtgatgatgtcgttcataagctatttactgagctggccttccgctacagagatcgagctgggggctacacaagaatgttaagaaccaggatacgtgttggtgatgctgctccaatggcatacatcgagttcgtggatagggagaatgagcttcgagaggccaaacctgcaacgccgccgcctcctcaacgagtccctcttgatccatgggccaagtcacgtgctagccaacagtgggcaggacctaaaatcaccaagacctcggaatcggacggcttatgagctagtatacctatgttccatagaaagtttcagttattttgcttaagagattttttttatctagagataactgccgatagaataattcaaactttattgtcattttgtatgcttctaattcaccaagtgaagattgcaaggctgtgtccaaacaggagggaagtttggaacgagagagatgtatctctgctttgcttattggagnntgtacagatctaactacatgatcaaattcgtctatgcatcggtctgcca

SEQ ID NO: 162909 - DNA, 859 bp, Zea mays
  unsure (1)..(859): unsure at all n locations
  Clone ID: MRT4577_80148C.1
ccccgcgtccgccccgcgtccgcgtgtgttgcgcccggaccccggaccgcgccgacccggctcgcaaactcctccacaaccctcgtcgccgccggctgctccacccccgccaccgccatgggtaaattccgcaagcttggccgcgattactcccaacgcatctgcatgctcaggnctttgttcggggtgatgatgtcgacgatggtgtcgcagctggtgaagcacgagcgcatcgagaccaccgttgccaaggcgaaggaggttcggcggaaggcggatcagatggtgcagctagggaaggagggtactcagcatgcagcaagacgtgctgctgctcataagctatttactgagctggcctttcgctacagagatcgagctgggggctacacaagaatgttaagaaccaggatacgtgttggtgatgctgctccaatggcatacatcgagttcgtggatagggagaatgagcttcgagaggccaaaccccaaactttttttttttttaaacgagtccctcttccttcatgttttaccccgcgtgctggccaactgtgggcatggcctagggtcacgggcccccgtggttccccttttttgcccccccttttaaaccagcccaaaaaaaaattacccaggtttaaaaaaaaaaaaaaaaaaaaaaaaaaaaaaaaaaaaaaaaaaaaattattccacctttattgtccttttgtatgcttttaattccccgagtgaaaattgcaaggctgtgtcccaacaggaggaagtttggaaccaaaaaaaagtatttttgctttgcttattggagttgtaacagatcccactccatgatcaaattcgggtatgcccccgtctgccc

SEQ ID NO: 162910 - DNA, 1009 bp, Zea mays
  Clone ID: MRT4577_80149C.1
ccctcgagccggccgggccggaggccgtcgagaaaaaacctagcgatctcgcagagagttgcgcccggaccccggaccgcgccgacccggctcgcaaactcctccacaaccctcgtcgccgccggctgctccacccccgccaccgccatgggtaaattccgcaagcttggccgcgattactcccaacgcctctgcatgctcaggacgatggtgtcgcagctggtgaagcacgagcgcatcgagaccaccgttgccaaggcgaaggaggttcggcggaaggcggatcagatggtgcagctagggaaggagggtactcagcatgcagcaagacgtgctgctgcctttgttcggggtgatgatgtcgttcataagctatttactgagctggccttccgctacagagatcgagctgggggctacacaagaatgttaagaaccaggatacgtgttggtgatgctgctccaatggcatacatcgagttcgtggatagggagaatgagcttcgagaggccaaacctgcaacgccgccgcctcctcaacgagtccctcttgatccatgggccaagtcacgtgctagccaacagtgggcaggacctaaaatcaccaagacctcggaatcggacggcttatgagctagtatacctatgttccatagaaagtttcagttattttgcttaagagatttttttatctagagataactgccgatagaataattcaaactttattgtcattttgtatgcttctaattcaccgagtgaagattgcaaggctgtgtccaaacaggaggaagtttggaacgagagagatgtatctctgctttgcttattggagttgtaacagatccaactacatgatcaaattcgtgtatgcatcagtctgccagtcctgtgtggctgtgtccgtggatcgttatgtcagattagtttctgaaaaaaaaaaaaaaaaaaaaggggcggccccccaattagaaacctcttccccccggaatttatttggggcgggacc

SEQ ID NO: 162911 - DNA, 426 bp, Zea mays
  Clone ID: MRT4577_8014C.1
accaaaaagcgggaataaaaacatgttttgatgaagaagcaagccatcaatgtacggtggagcctcaaagggcaaggacggacacaccgggaacaagcatacacgaagggaggggcctatgtgtgtaataggcggagcgcgcaagacgcgaaataggcctggttgcagtacacaacctgatagatatgctggacctgggatattatatataacaagacgccctgcatgctgggatgggaggatacggacccggcgcccgctcacagacccagaatggcgatgagcgggttgtacacgatgtccacctggaccaggaagatatagaacttgttcctctgatcaagctggagcggaatgaccctgccaagggccgggtcctggaccaccgtaccattgtagcagaactctttcttgagatcggggagg

SEQ ID NO: 162912 - DNA, 245 bp, Zea mays
  Clone ID: MRT4577_80150C.1
cccactcgtccgcccacgcttccgtgtacccgtactagtaaatatttatgcatcaagctctatagattcgcatatcgacaataattcacaactatactattttagcctcatctcatgtacatatgcattatcttgactaaagatgtctcaacctctatctcacttcttccctgctcactcgatatctatcgaaatgacaagcttaaaacaagttattttgtcacacaataaaaaacaaaagtctt

SEQ ID NO: 162913 - DNA, 236 bp, Zea mays
  Clone ID: MRT4577_80151C.1
ggctcttaattctttcccggcctcacaccgagccagtcgtctcgctagggtttcgccgtcgccgccgccatgcctcaccgtatctcaggaaggtctgccccacgagcagctcccagagatgcttcattggagaaccccccacatgcagcacgacaggctcctcctccagcacctgtccgacacctggatgggtccatggcaggaggaattgcgactacaattgctccaagtctgac

SEQ ID NO: 162914 - DNA, 2460 bp, Zea mays
  Clone ID: MRT4577_80152C.1
atgattgttctaaaaggccaagacatagatgtaattttgggcatgaattggttagcccagcataaagcaatcctcaacactgatctgagaacaatcaggttgagttacggccaagaagaaattcttttgtctatccccgtagccattccagctagaccaactggcagagtgtatgaagctatcataccagagatccaagatattccggtagtatgtgagttcccagatgtcttcccggaagatctgcagggattgcctccagaaagagatgtagaatttgtgattgagttgaagcccgccatttttgacaagaagaaggatcaaacgttgcggatgtgcgtggactatagaccccttaatgaggtcactatcaagaataagtaccctcttccctggattgacattctatttgatcaacttactggagctcgggtattctctaagattgacctcaggtcgggttatcatcagatccgtatccgacccgaagatataccaaagaccgcattcaccacgcggtatggactatttgaatatttggttatgtctttcggactgatgaatgctcctgcccacttcacatatctgatgaactcgatatttatgcccgagttggacaagtttgtggtggtcttcattgatgatatcttaatatactccaagaatgaagaggagcatgctcagcacttgcggatcgtattgacgcgcttaagggaacaccaattgtatgctaagtttagtaagtgcacattctggctggaggagattcaatttctgggacatgtattatccgctaaggggattgcgccagatattgaaaagcccttcgatgtgtattgtgatgcatcgggcagtggtctcggatgtgttctaatgcaagaaggccgagtagaagcttatgcttcaaggcagttgcgccggcatgaggaacattatccaactcatgacctggagttagatgcggtggttcatgccctcaaaatatggcgtcactatctgctggggaatgtctgtcacatttatacggatcataagagtttaaagtatatttttacccagtcagagctcaatatgagacaaaggagatggcttgagctgatcaaggattatgaattagagattcactatcacccaggcaaagctaatgtagtggcagatgcgttgagtcgtaacgctttctgccattgtcttaccatgaagacttctgacaaaatgttatgccaagaaatggagaagttgaacctgggaatgattcaacatggaacttcaaatcatttgaagcttgagtcagtcatcctacaacaaataattgacgcacaaaagaaacgtgtcaaggccatacacatgaaggttgctggtccattacaatctctacctatccctacatggaaatgggaagatataagcatggactttactgtgggattacccaggacagcaaaagggtatgattctatttgggttatagttgatcgacttaccaagatagcccattttataccagtcaaaacagatcacccggttactacctatgcccaattatacattgctcgtattcttagtctgcatggggttcccaagactatagtgttggatcgtggaccgcaatttgtagccaaattttgggaagcacttcataaatccctgggtaccaagttgctccatagttcggcctatcatcctcaaaccagtgggcagactgagagggtaaatcagatactcgaagatatgttgcgagcatgtgttctggagttcccacagaaatgggatgattgtttaccattagcggagttctcatataataatagctatcaagaaagtattaagatggcacccttcgaagctttatatggacgacgatgttgcactccgttaaactggtctgaacctggtgaaagatatttcttcaggcctgatatggtaaaggagacagaagagaaggttcaacgaataattcataatttgaagaaagctcaagctcgtcagaagagttacgcagatacacaccggatacccttgtactttccagttggagactatgtttacctgaaagtttcaccaatgaagggtatatcacgtttcggggtaaaagggaagcttgcaccctggtatattggtccttttcctatccttgagagatatggaccagtggcataccgacttcagttacccgaaaccttgtctgcagtacataatgtgttccgcgtgtctcaattgaagaagtgtcttcgggttcccgatcgaacaattgaagtaacgaatgttgccctagaaccaaacttgacgtattcagagcaccctattcgagtcttggatcaaaatgacagaactacccgaaggaaaactctcaagttttacaagatacagtggaaccagcattcagaagatgaggctacatgggaaactcaggactttttagaagagaatttcccaggctttttagcctcgtgtaatttgtaa

SEQ ID NO: 162915 - DNA, 1811 bp, Zea mays
  Clone ID: MRT4577_80153C.1
ctggccgggatgcgtttatgaactagtatatactacagcttggtatctgtcatcttggacatcaacagtctacgaaacccacatttgaccattatcagtttttctaaatatatgttagtagaaaaaatcattctgaaacctactaataaactttcatatggcatatagatctttgtgcccaatttgtaaaaccaattaaaaattcttttgatggttgtcttgctctcatatacccccttttaagcctaaacctttatgtgtttggtatgttcaccaattctttgttcttgatgttattagcatgtatcaaatgatttttgccacatgaatattcatgatctttaatgctgggtgaccatgtgaaattttgctgtttttttaagcagtgtgatttgcaacttggatttggtgcacagaagcagcagatattttctaaccatggagagcttagaacggctacacctggatcccctctgcctgggagcattgccagaaaagattctgtacccactgaaccctcacattttgggagcatgaatggacctaaatcttttcccactggaacatctcagtttgggggctttgcaaagcctacttttgtgcctgctgcgccttctcagtttgggagcatggctcaagctaattatgtacattctgctcaatcctcccaattcacaagctgggttcaaccgaattctattcctcccgctgaatcctctcagtttggaagcaaagcccaatctagttctgtgccccctgctaatacctctcagttcaggggcatggctggacaaaattctgtacctcctgctcagtcttttgggagcacggttcgaccaaattatgtaactccagaatcctcacagtttgggagcatggccagaccaaattctgtccctccacagtatgttaacatgcccagccaaaattttgtgagctcatccgagccaacactggttttggggtatgcaccacagattggaagtggccctccacctcaagtacagttaggatgggatttgtccttgccaaggatggttactggcggcagcatggtcacttgtttatgtatatggtgcaacagtcagttccatcattttggccctgttgatggacagcagcccagttcttttggcttcatttgccccacctgtaaagataggatgtctggtcatcacagtgtgcccaacaatggttcatggcagccttgaggtgcagcgctgtctggttaatcatctgtattgctgcattcgagggatcttgtggttttctgtacactactcatgcctgtcgactgtcaaggtctgaaaatggtcttctcaagcagcagttgtccgtcctccaagttgagtggactgccaaggaatgaacggcatctctgtatcaacagtgtcagctgggagctggtgtagtagggtaatgagagaagctacttttcaagatagcaatgggagaccatgatgaatccaggccatatttatattttttcttgaatccaccagttacgttacgtgggaatgtcttgagttcactggttgcattacatctggaattttgctgccctcggatgacccagccacctttgcattgggctccgaggatgttgccactcagcttccccatgttttggtttactttgagttctagcagcgatgggagtggcctttgttattgcagtgtcttggtggctgtgtaaagtatgcgttagctctagctgtctcaggtttaatttgtccccattgaagtagttgtgcctttgtcgatgattgctcatttaagttgtgtatactcaagctgaaaaggctgaaggt

SEQ ID NO: 162916 - DNA, 373 bp, Zea mays
  Clone ID: MRT4577_80154C.1
aatccggaaccatacactctatctctcctcagacgcccccagtgctacatctgatgggtcatcaccagaattgcgatcatatcaacatcaaatcgccacgcattctcatagacactatccatcttttcttccatactcatggacaccatattaaattggaactgtacagattcaagcagattcaatcacctagacatactaaaggctgcctaacattatatttgcatgcacactctatcagccattttcacgttacatatttgcggttcactacggtggcgatgaaacaaactgttgaacttgcatggcgctttactgcttgacctgtgtatttacgcccgcattttctcactctacgttccgtcacgttgaa

SEQ ID NO: 162917 - DNA, 314 bp, Zea mays
  Clone ID: MRT4577_80155C.1
cggatctggctcgggccctgaagacgcgaaacgggggtgcggccgacccaaggctcggactcggtctaatccccggaagatggtgaactccgctcctcccgacccaaggctcggattcaggctcagtcccggaagacgacgaactccgcttcgcccgacccatggctagcactcgggctcaggcccagaagacgacgaacaccgctttggccgaccccagggctcggactccggccgggcctgtatcggacgacctacgcctcgaccgagctaggatctctggctcggcctatgccacagaaaacagacttaac

SEQ ID NO: 162918 - DNA, 837 bp, Zea mays
  Clone ID: MRT4577_80156C.1
aggttgaggcagtgatcggtccacaacatgatgttcctgctgtggcacggcaccatgatcatcaggagtggcaggctccacagcaggagtagctgtgccgttggcaagtggagcagccacaggcgggactacagcaaccgcctctggctgcgcctcaacggcggtagaggcagggatgtccccgacgaagcggaagatgtcgttgagcacgaagtagcccatctcctgcggcgcgaggaagaaggattgcgagaactcgcggcgcactccatcacggccggtgaggtgacctgtgacgagcacagcgacgccgccgcctaaagactcctgcgagtccaccgtcctgatctccgctttggacacgtccatctccattatcttctcgctgatcgcctccatggtggtgaccgagtccatgccggcggctccggcggcggatgcggggcgagcgaggcggctggcctcctggtagaagcggtacaccagatccggcgactggtgcagcacgaggtagtactgctgcacgaacgcgttgcccaccatttgcgcagacggcggcgcctcggaggcgggggcgacaggctgcggcgcggccatggagacgctggatcgggggacggggggagacctctggttttgaggagaagcggcggcgggtgcggcgcgcggctcccgtgcggcggcgtgtggcgcgcttgaggtctggtggcgaaggagatggaggcggaggcgagtgcgcaggtagggcagctggggcttatgcgtacggcggatctggagccgtgatctgatgtcccctcgtctgggaacctgaggtcttttctgtttattccgtcc

SEQ ID NO: 162919 - DNA, 803 bp, Zea mays
  Clone ID: MRT4577_80157C.1
gcttgtgtcccgtttgtacgtgtcccaggctcccagccatggtggccggcttccacccctgctccctctgtattctccttacctgcgcgcacagttcctgcgcgccttctcccagccggccatctgcagttcgccggggctcgcccagcccggtcgtcgtcaagctcccatggtggcgcgcgcctgttcctctcggccgaccgcgctgctcatcttcctacctcccttgctcctctagctcgcggagcctctcctcgacagcgccctgtttcttcttggccggagcgccctctgctcggcgtccctcgctgctcgccggggaaactctttcccttcttgctggcagcaacatccagtcgtgcagctcttgactcgccggccgagccccagctgcctgttctgctcgctcgtgcctgcgcgccgcgctcggattccgtctccctcgcgctggcttgcctcgtcgtcgaattccagaaatcgcgtcgtcgcttgctcgcttgcgctcgattccagtcccctgctccttgttcctccagctcggatttccctccctagtcgagtctccttgccgcgcgcagctcagccttgccgtttccttgtcgcgctcgcccatgtcgccatcgtagtatcgtcactagtgatagcttcgtatcgtcgttgagcccgtcgaacctcgttcttccctgcttgatctcatcgaaccccgaaagccggactttagagaaaaataagcgaggtccatgtgcatcgcttatcaagtgctcagtcgaagacttcgatcgaaggtcgtcatcatttcgtac

SEQ ID NO: 162920 - DNA, 459 bp, Zea mays
  Clone ID: MRT4577_80158C.1
gaattaatataagtaacttttactaatattacttaagttattacatctctcaagattgtaatcaactactagtgccatgctagtctacttcatgcctggcagctagtctactccgtggtgatggagttgtacacttgctgcattgcctctctgaaccggtcgatgtccagtgtgacgttctggccctcgaggaaggtctcccaaagtttgccgctgcgctctatggagatcgggtcggtaaacacaggatggtccctcggatacttgtacttgagcgtggtctcctccgcgttcgcctcgtattcgacgtagcggagtcccatgtccggcgccgggtcgccgaagtcgaaccggcatgggtacttcaagtttccccacgggatgatctgcactatggtgccgttgtgcggcaggaacaccatgttggtgagccctgcgccgtgcacgcccaccatcacg

SEQ ID NO: 162921 - DNA, 142 bp, Zea mays
  Clone ID: MRT4577_80159C.1
gtatctttatggccgttttcctaataaatcttatgcatacatcatggaaggcgcatattattaagtcgtatcatatgtcatggatggcaagccaaccaaacgttagccattatgctcaagcacaaacttagcagcacagcac

SEQ ID NO: 162922 - DNA, 1554 bp, Zea mays
  Clone ID: MRT4577_8015C.1
acagaacaagattagtagtggaaaatacgacaggaattccaaatatcttcatataataatcactgcacggaccagtaaaattaacacttgcagaaaattacgagctaatcatctggtaaaggtgccgatcatgaactacaatggtacagcaataagcaatgttgcgtgcatattaaaacatcacaagatttgtggagcactgcacgacaaattcctcaagcagtgttcttgtgagcacgtaaaacagaacgccgagggcaatggacactggtagggccggcaatgccttgcggaagaatgccagcaggagcagagtgatgccaagccctgcaatgatggcaaggtagcaggcatacactgtcatgtagtcatacatcgctgccctgccgaccaaaacgctgtagaatatgaagtcccccaacccaagcttaatagccccagatgagcttaacccaatgccatcttcatcttccacctcttcttcagatctctgagggcgtggctggatcaaagctaccatcagttcagcaacagcaactctatgctcctgcaatgctgaaacttccccaacttgtgcgacagtagaagaatcagaggagctcaaagcagccgccaatgtcaccctgggccttgaattactaatatcaccagcaagagtggcaggttcatgaacttgggatgccgaactgtttccagagtcaggctgaagtacctccccaatcacctcaaccgtggaactggcatccaaatccgcgccaggttgcctcccttccctccacaagcgccaattccggccatggcggggatccaccggtctggcctcgtagaccaaggccgggatctcctcgttcctctgtatggccagctcgagcagcaccctcaaggggccaccagggagcagcactgccgcgaggtcgtagatggccatggcgacgagcagcgcccaggtggtccactcgggcagcagcgtgaaccagaaggcggtgagtacggcgacggcgacgagcgcggcctggtggagcgcgatggggacggaggccgggaccagcgcggcgagcgcgagcgcccccgcggcgttgggcaggaggagcgcgaaggagacggcgtcgagcgggaggcggaggcgggagaggaggaggagcgcgacctggccgccgaggacgaggaggacggagagcgcggagaagccgaggtaggcgcggaggcagggcgtgcagcggaggtagaagaggagcgcgagcaggaaggtggcggccgtgacggcgacgacgaaggtgagggcggtgatgagcgccgtgggtatgtcgtcccctccggagacgccgccggtggcggccgcgatggaggcggagaagggcgacggggaggagggcgaggagaggagggagaccaggagcacgacgaggagcatgcaggcggagacggggtagacgatgcgggtgatgtcctcgccgagcgagtccagcacggtggtgcgggcggggccatcaacggggacggcggcagcgtcggcgtcggccatttggtggatgtggaatggggatcgcttccaat

SEQ ID NO: 162923 - DNA, 312 bp, Zea mays
  Clone ID: MRT4577_80160C.1
cccatctggacccactcgaactcataaacacatatttcatttattcatacattgtctccaagcttacatcacggaacaatgggactgttaaaacagcgatctggcataaaaaaacaaccatacaatgctatcaaggcaatgcttctagtaagcacctcgcaatggccacgatcaccatgaacaccattcatcctaaagagaccgtagaaaagatgcaaccctacatgaccaatacacaccatggagaacagcacacacactcaacacatcaagactctaaacatgacaaccaaacacaccgtacaagtccac

SEQ ID NO: 162924 - DNA, 1936 bp, Zea mays
  Clone ID: MRT4577_80161C.1
cattgggtacctcgagcccggcgggggtccgcacgccccggccaaaaattccccaatcgctcgttttccaccgccgcggcggggctaaatcgcccggtattccccaagccaccgtcgctccacgccaccccggcgtcgccgcctccacacgttcgtccccggtaacacccgtttttatccgtcctaccaccccgcacgcccgctcgcctcctcctatcgtcgcatctctccacggccgcgagcagcaatcgatggtgggggacctgtccctcctcgccgtcgcctccgcctcccccgtcgtcctcccgccttccaaggagctccatggcgtgcttcctctccagggtaagagaccgcaggacgccggcgtgcagctctgcgcgccgttgcagcagcacccgccccaccatctagaggcggtgccttaccaccagggccagcccgggcagatggtcgtgcccggcacccatcagggacaggccctcccggcggcctatcaggccatcacgatgcccgacacggccatgctcatcgacgtgcaagattctcaccctgactcggttcaacttagccttgggattgcggagcaatgtgcaaggcaagagaaactcctcaagtttctggtgtcaggatctgatgtaaaggaacttgatgaatccttgctagctgaattcacggggcaacagactctagcaataaacatgggaactcatccatatttgccggatgataagctatcaattcctgaattcgtgttgaatgagccccaacactatctgccagagaaagaacttgtcatcccagatcctcttctgcacttcatccagtcccatggtgctgctcttactattgatcaaagtggtcgggtcctcttagctggcaatggtgatgagatgagagacttgctctcaattttcctggcgttcaacatgtcgagacgagaaacaggtggctgcaaggctgcatttcttgttccatactttgagaggaaaagacgttctcgggctaacagccaagtatccaatttaaaattagcaggcacaactgctgatgtttcaaaaagtactgattttaattcaaaatctttgtcaaagaagaaacataaagtgaaaaacatcaaagaacgtgactcgtatcagagaaactacatacatgctagcgaggttattttatccatcctgctggacaaggacaggagcagctcgacaatcctctcgctgaaaaaggctggtcctgagatcactgaacttttaacgcaatgctctatcggcattgctggaactggactggctattctcctgtcagttatgtgcaagatgtctaatggcatgaggactccttttgcttctgcccgactgcttagcaccagcgtcggattcggactcttctggctatcctgggcagtcaatggattgcgtgacaccatcgccagcattttcagaagccgaagtggcatgaatatcgaggatgacgaggtcgcagtgaaaatagaaaaaagtgtgaacgagatcctcttcagggcattaactctcctggcaatcactgcactgaagtttgcatgagcagtcatcacgattttataggtttgtcgatgcagttgtgatatactcacctatgtctatgtggttcagaagtgtagtactgctttctgtaggaccaagttccacctgcccaaaccatggttatagcttcccagttctcattgatctcgtagaaaatgagccaagttgtaaattgtacaggatttttgcaggaaactcggtgtatattgtggatgatggattttaactctgtgaacattggataatctgatgcccagagcttatttatatttttatctacttaatagctgctgcattgtttctaaaaaaaaaaaaaaaaaaaaaaaaaaaaaaaaaaaaaaaaaaaaaagaaaaaaaaaaaaaaaaaagcggcc

SEQ ID NO: 162925 - DNA, 327 bp, Zea mays
  Clone ID: MRT4577_80162C.1
ggacaaggtgccattcatttagtagccgcacttggtttgatagcgcaatcataaccaagtgcggctactaaatgaatgggctatcaaaccaatagctgcggcacgcgtaaatataaacttcagggatattcgtggatggactgcgcttcactgggctgaatgctgtggaagggagcggacagttggtgccctgatagcaagcggagctacatctggtgctttaacagatccaacgcagcagtatccatctggaagaactcctgctgatttagcactataaaatggtgacaaaggcattgctggttctcttgcaaagactgctttgac

SEQ ID NO: 162926 - DNA, 292 bp, Zea mays
  Clone ID: MRT4577_80163C.1
tcgcgggtcagaagattcgacaaccaactgcgtctggcaagatccttcgcgtcgtacgaggagacaataaccactcactatccagcggcatccaactactcaaaaccaagaacctgttccagtgtgaaactgaaagcgctcgggacaaattacctttaataataaatatatcctttccttctctaagacactcctgtaataaatatgataatattcgcgtctttcgttgtttattgatggtggcacgacgcgtcatcttgccggcagctgcaaggaccttgtctccctcctg

SEQ ID NO: 162927 - DNA, 387 bp, Zea mays
  unsure (1)..(387): unsure at all n locations
  Clone ID: MRT4577_80164C.1
aaatanacttcnccccccccccccaccaccagggggggttgagaaaaaaccgggcccacccaacaacaaacggagaccaagagggnnaggacagacgcagcaccgaacaacaaggggggaaaagaccagaaggganaaaccggcaacccagcacaaacangacgagccgagccgcngccgcggcccaaacagagaaaccgaacccaagaaccgggggaaagccacaagggcgcaaccccggacggacccaaagacgggccccagcccaagggggcccgcaaggagagggaccanggacacaagaccgccgacaacagggaacaggacagccacccaccggaggccgaaaccaacaggcacaagcgccgaagcgccccaaggcagacc

SEQ ID NO: 162928 - DNA, 433 bp, Zea mays
  Clone ID: MRT4577_80165C.1
cggacgcgtgggcggacgcgtggggggatcggtgccgggctgtgaagtgaagaaaaatttcaaatcgagccagtttttgttctagtttagatcaaaacgaacatatataatggagtacactaaattctaaaccaggcctgttcgttcctccccgaacgaggactagaactagccaaactgttagaaacgaacggcctcctaggtcttgttcgtttacaccaatccagctctgtattaacaatctatgccacaatctattcccttagaccttgttcgtttatgagcgcctaggccaaaaaggcgtgtggaactacagtctaccgttcatatccgacgttgtagatcctagcgcgaatggttgacatcactagtcctgacatcaagcttggtgcaacgacgcgttacggacattaagattgtgtcacatatgtgc

SEQ ID NO: 162929 - DNA, 951 bp, Zea mays
  unsure (1)..(951): unsure at all n locations
  Clone ID: MRT4577_80166C.1
attcagaataccatgtcttccacgcgtcgacataatggacaaatagatcactgagtgcttggttctggtactgtggtcgaaatgaagcagaaaggctctcccagtcctcagccctctccctttgcccaggcttattgccgccatcaagtccatgtttccttgcgccagaagggtggaaaggaccataaacaaagccactttgtttaccctgccccagccgactacgcacagctaatttgcaattcgtcaagacatcaccaccactctgtacaagttttgctttcttcttattttttgaatctagattacttgtatgcatgtcaatgttagtgagttctgttccaaacgctcttttctttgatgcgatcttccctggtgggggcacagcaactcggacgcgtgggcggacgcgtggggttgccctacccaaccaacgaaacgcaggctttctcgagtccccttgatgtatcttctcaattagattcagtgaagacaggacattggcaatgtcatataacctccgaactttagttctcatattggtctcctcgtggccttctccaaggagcagttttgcagcttcatcgagtgagatcgtgtcaacctccatggtgaggaagagcttcacgaaattctgtgtgagcagcccaagtgacttttccttcctatgatcagatctaaggcggcaaccggatgcgcccggtttgccagaaggtttgtccacagtttgactcaatctctcagtctcgatataagcacccggattggccaatgtatcatcatcttcgtcttcagaaattgtggcagcagattgctgctcggtttgcagaggagccaagccagacttctcccttaacgccctttccttgagttctcgcaaggatattgagactccgccgaaacctatccaggtgtagcgattnttggctttcctcacaagaatcncaacgc

SEQ ID NO: 162930 - DNA, 623 bp, Zea mays
  Clone ID: MRT4577_80167C.1
cctcgagccggccgggacattcattccaccccatgcccctttacctcgactccccgaatcccgacgctatggcgcccaaggccgacaacaactctcggcatgagaagccggcggccgaggagaaaggggagaagacgaccgctggcaagatgcccaagtccgagaagcgcctgaccgcctccaagtcctccgggaaggagggggcggagaataatgtgaagaagaaggcccagaagagcgtgggagacctacgagatctacctcttctaggtcctaaagcaggtgcaccccgtagcatcgtcatctcctctcatggtgatgtccatcatgaactccttcatgaacgacatcttccagaaggtcgccggttaggacgctaagctcggccggcatctctggaagcccagcatcaactctcgctggatccagacctccgttgtgccatcatcctgcccaggattagctctgccaaagacttcgtttgcgaggtatactcatgtcgtcgccaatgtcttcagccatggatcactctgcaccgtccacgtgattagttaagtctcctcttcttacgagggttcttctgagggtcttctacccctccgcctccgctgctatgtatgtgc

SEQ ID NO: 162931 - DNA, 287 bp, Zea mays
  unsure (1)..(287): unsure at all n locations
  Clone ID: MRT4577_80168C.1
cccttctgcagcgccctcgaaactcgaaagcgtcctgtagttcaagctccgcgcctccgccggccaatactcaggtactcgctaatctccgccggtcacgtcgcaatggcgccaggcgctccgcgagagtatgccctcgaggggggcgaagcggcgcaggacgaagcgcccgagtcaccgcaggaacgggaagaagcgagtcagagagaagaggatggcggcnttaaggaggccgnnnnctacntggaagctcccacttaccttccggtcgggccatcttccgagct

SEQ ID NO: 162932 - DNA, 204 bp, Zea mays
  Clone ID: MRT4577_80169C.1
aaaaaaaaaaaaagcgggaaaaagggaaaaaattagggtttggttattacacaaaacccatttcccccttgtattgggggaacccgcatataaatatgtatgtgggtgcatgctgaataccaacaccccttaaggtggggatatatataaaaacaccaaggtcgttttttgccccatggggggaacccccctgccccaaaattt

SEQ ID NO: 162933 - DNA, 284 bp, Zea mays
  Clone ID: MRT4577_8016C.1
gtgcgagctggtaagatggatcggttggaggagcgagaacattaagaaagggggaaaggagatgggagaggcggcgaaagggaaaagagcggcaggaggaggcggaggacaggaatacccaggagccgacgcaaggtcaaggaatcagactctcactcgacaacggcagcgccagggcaagtctggaatgttgccgatgtcgaacccttcagctagtcccacacagcttacaattttctatggtggatcagtatgtgtgtgtgactcggtgacaccaggaaagg

SEQ ID NO: 162934 - DNA, 731 bp, Zea mays
  Clone ID: MRT4577_80170C.1
gtttccgacagtgtgccctcccctccacctccgctccgctcactcctctcctctcctgctgcgtcgcgagaataaaggcgagcgagggaggagggatcgagccgagttcgtcttccccgtctccgtcgacctccgagctcgagggactgccggggccgggctggggaggggagacaggcgctcaggcgaggcacagaacaaccgacagggtcgctgcagccaggtgctcctccttccttctccttggtcggtcggtcggtcgaggagttaaggaagaagaaccatgtttggggactgccaggttctctcgtccatggcggccatggccgcgggcagctcctccgccgatgcgctcttcgcctcgccgctcatgcccaacccgggcgcgctcgccggcttcatgtctaactcttccgccatgccctttcatcaccacttctccaccaacttgatacccgtaagtgcttcgccttcgtcttcatcttgtctgttgcatattagcatatacatgcatatgaggaaaattaataaatgtgtttctttttgctgctgggttgttttttcagaaagaggagggcgttatgggtgggcttcacatggccgaggacgaggagttggacctagacatggagatggagctcagcggcggctccggcagcggccacctggacggtctgctcagcttcgccgacgtcgacgacgacagagaccagaagccacagcacagcgag

SEQ ID NO: 162935 - DNA, 203 bp, Zea mays
  unsure (1)..(203): unsure at all n locations
  Clone ID: MRT4577_80171C.1
cgcggacgcgtgggtgggtttcgatatgacattaattcttaactcataagagaagatcttacctttggccattgtggggctaatcggccagtgcatgtaatggcacataagtgccctgacccgaatcgggtgactcattcagaagattcagaaattcaaagctgcaatgaccagaactctaaaaaaaaaaaaaagaatanaat

SEQ ID NO: 162936 - DNA, 362 bp, Zea mays
  Clone ID: MRT4577_80172C.1
acgcatgcacccacgggaccggggtgttacaaccacatctacaacttcagacagccaacctacacaccggggaaggtgttaatacattctggcgatatcctctctctctacgatactacagacagcatgtggcaaacaatctcgcatgcttacaacaccatcatttgatgtaactacaacaaactatttgctacgaatcgtaccatcttactgcagaaccccaccattcatgatgccattatctaaatcaacctatgcattatactgcaatcataaagttctcatactgatatgcgcaaattgtcagcagttatagactatacatctatatagaaagtccagagacaaaaaataacgccagc

SEQ ID NO: 162937 - DNA, 663 bp, Zea mays
  Clone ID: MRT4577_80173C.1
ccccctcgagtttttttttttttttttttttttttttttttttttttttttttttttttttttttttttttttttttttttttttttttttttttttttggaaaaaacccaccccattggtttcccaaattctggtaccgggggccttccccccaaccaaaaccaaaaggaaccgacccctcccctttgggcccaaaaaaaaaaacagggggaaggggggggggcccggcccccccgaaaccggaccgggggggtggggggagaaaaaaaatggaaccgggcccccctcccgggcgcgtggggggggggggccgcccaaaatttaggggtggccccggaagaccccgggttggggggccctgcccccaaaaacttacggggggaaggcgggggaaagggcccccccaataaggggcccccccaaaaaaacccttgggcccccccccggggccaaattcccggggccggggggaccccttttttttaaaggggccccccccgggggggacccccagtttttgtccccttaagggggggtaaatggccccctggggaaaaccagggccaaacctgttcccgggggaaaatggttttcccctaacaatccccaaaaataaggagccggaaaaaaaaagggaaaaccccgggggccccaaggggggc

SEQ ID NO: 162938 - DNA, 278 bp, Zea mays
  Clone ID: MRT4577_80174C.1
aacattagttcattttcctttgcggtagtattcagatctgtcctgtgtgtgcacgccacctagtggtcaatctgtgaccttggtagtgatctgtgctacttaggatcaaggccatacatgtgtagtccaggagtgagccctgtagttcataaaaatgtattgggttgctttcctggggctctcccagctagtttttccccctgaggcttctcttttcagttatttggccagaagctgaaggtttagttacccccactctgtcttgcactacgctgact

SEQ ID NO: 162939 - DNA, 575 bp, Zea mays
  Clone ID: MRT4577_80175C.1
ggggaaaaaaggcccaaaccaacccccttttttttcaaccccttcaagggaaccgccaaccccgggggggtatccggggcccccagtcccccaacacccccagggggacaaccctgggtttcccccccttagggaaaaaaagagtttgggggcttaaaaccaaccggaaggggggcccccagggggaagaaaaccgggggaacccgtaaaaaataagccaagggctccccatccaggggggggggggaaaccgaccacccttaaggggcccaggcggccagtcccaaagccggcttgggggggcccccattcccttggcccggaatgggggttttaagacccccccccccccccggtttaggggccttggggggcccggcgaaaaaacccggccggggcacccccgggggaaggggcggttttttggggggggggggggccccttttgggggaaaggaaaaacccgggggcggggggcccgtccctggggggacccttcccggcctcaccttggggggggacccaatggggggggggggggagggggccccccataaaaggttcccgggggcccc

SEQ ID NO: 162940 - DNA, 568 bp, Zea mays
  Clone ID: MRT4577_80176C.1
aaagggaaaggcaaaatttggccccgcaaaaggttaaacataacccccccagggggggggcttcttcggggcggtaaaaaacctttttttttggcaaaaccccttttacccaaccctaagttggcattctttcaaaaaaaaaaaagcaaagccgtccaacctttgtttcttttggcaccaaaaaaaatttttgctggaaaaggaccaggcaagaaattttctgtccctgatttttaaaaaaccttgttgtatagggcccccctaaaaaggttccaggccctttttaaaaggtttctcaccccaaaattttttagcccccttgatttcatgcccgggcaaaaaaagaccatagttcctagcattcctaacccccaaaaagaaagtttgccggcctttaaaaccaaaggcaatttgaaaggaaccgcaaaaaaaacctgggcttttgtttgtctaacaaaaccccacataaagcggttaaaaagtttgtaatccgccaaagggaccccaaaaaaaccaaattttttaaaagaaaacagccagccgggccccccgattaaaaaccccttcc

SEQ ID NO: 162941 - DNA, 365 bp, Zea mays
  unsure (1)..(365): unsure at all n locations
  Clone ID: MRT4577_80177C.1
cgaccaactccaaccacggacccggactggctgggcgcctgggacccgccactatggctcttgcaacctgcttaaatccccccttctcgccgcgaacacacgggtcgcacgcacgcacaccccgttcgtgccacactgccacctaaccccccttccccacgatcccgaggctactagcactaggcgtcgaactcgacagcaacggcggctgggctcccgccgatcgaggaaggcctcatcgcagcggctcattgattaacttcaccagatgaaagcaggacttataaggccggccctgatcgagtcgtntgcgccctgggcttacttatccgccagttggtagaacaaatgaaactggtgttatt

SEQ ID NO: 162942 - DNA, 631 bp, Zea mays
  Clone ID: MRT4577_80178C.1
aattcggcacgagggagaaattcgagcgcgcgcaatacagctgtgccttccaggacgagggcgatgggggccgcgacttcgcgccgccggagctggtctggggtaaggtgcggagccacccctggtggcccggacaggtattcgacgccgccgatgcgtcagagatcgcactgcagcaccggaaagccggcgccccgctcatcgcctacttctgggacaggaccttcgcgtggagcgactcttctgcgctgctccccttctgcgccaactttacgcgactatccacccagagtactatgtctagcttcgtctccgccatcgactccgcgctgttggaggttgagcgacgcgtagaggctggcctctcgtgcggttgcttcagttccaacattgccacgaagcaggaggttcaaaactccggtatccggcaaggggcgtatggtgcggcgatagactctgtctacacgagggatgccttccatggcaaaacatttcttgactacatctcagcactaggaaagaagccactagccggtgctgatcttcttgacctagccaccgccaaagcacagttgagggcattcaatcgttcaaggggttcaagggaccttcctgagtttgtgatgtttga

SEQ ID NO: 162943 - DNA, 314 bp, Zea mays
  Clone ID: MRT4577_80179C.1
attcggctcgaggggacaggtttcatcagatttttttttgggacacgggtgggaactgaagcagtggcatgttttataggaggaagcaattgcgtgcgtggtccattgatatcatcacaatacggttggaaagctatagcaatagggtggcatcttactcttggtatgcaaaaaagttttatttttactgtagcttgtctttgatgatctatgattaagccaagactgaaaatattatgatgaatgaacttggttcgaaattcaagttcctgttgaggaaattcttcacatgacggtgaatgccaggactctaa

SEQ ID NO: 162944 - DNA, 255 bp, Zea mays
  unsure (1)..(255): unsure at all n locations
  Clone ID: MRT4577_8017C.1
ctacaaaacgagagaataactccgctacttaatcaaccagcaccaatgaggtcttaaggagcaaaaaaccttaggggggccttacaaccccaancatagcaaaaaacatgtaacacttggaaggctgctttctgtaaacaccccatagggccaaatcaacgcaaagcgtgtctgtataaaaataaggaacggttaaatttaaccccaaaggtccaaccccagcaagaaaagggggccccctttctgcacggaaaa

SEQ ID NO: 162945 - DNA, 1326 bp, Zea mays
  Clone ID: MRT4577_80180C.1
aggctcgttcgagttcggctcgttgacagcccagcggctcagccctatccccgttccgtccgtccgtcctgacctcggctccccgggcagcggcgcccggcgcaccacacaggctttctccaactatccgccctcgccatggccatgaccgtggcatccgcctggcttccgtcgaccgcctctcgccggagaatcttatcctctccgctcccttcgttcgcggctcctatctccatccacatgccacggcgggcgccgcctcccagtcccttccctccaaagccgcgcctcttcgtcgcctccgcgcagctcgatttctccagagctgttcaaacagcatggagggtcggtaacgatgctgtggaggcaggaagtaatcttgtcccaggttcagttccacgaccaattgccaggataggtgttgcctttgctgctgtgtcagttgcctttttccttgtcaaatccattgtgtccactgcattatttgttctggcaatgatgggcctcatatatctcagcttcctggctatgaacccaaaggaggcatccggctctaggctggatgaagcaatgggcaacccatcggaggaccctgttgaagaggcccgtaggataatggagaaatacaagtaattaacctgtgcaaaggtgctgtactctcagaggtatgatttgtctgtagagcttccttgcgtgacgtgaggggtgatggatgggtggatctgattttagcatactacactacactcagtgttttgatatatgtaaatatagttgcacggttggtgaccaaatgaattccgcaaatcaacaagaggttaccaattttccggtcaaaaaaaaaaaaagggggcggccgccctttttttttttttttaacccaagggaattcgatcgattcatcattgaacaacaaggcaattaagataagacgctgctggcgtcgatcctcctctctgcttgccgcactcaggcgtccacgacctcgtcgtccttgtacgcaatcatcaactccttgatggggctgaaccggaaggacgtcaggtcgtagggcgggttggaggaggacatggacatggacgcgcagatgggccccgcgccggcgccgcgcgggccggtggccaccacgagggacgccggtgtggtccgcgtggcggccgggagccgggagcccgcgaaggaggacttgaggaggctagacgcggcggcggtggccatggctgacaagctataagcgctagcttctttccttcttgctgcagcagaggggctgtagaagtgggcaaggggatgaggctgctggctgcgatttccggaccggccggc

SEQ ID NO: 162946 - DNA, 759 bp, Zea mays
  Clone ID: MRT4577_80181C.1
caaccctcgactcgaggccggggcgcctccgtctctcgcccaccccgcacctccgcgctccacgaaagaattccaacgcgcaccgcgccatgcgccgcgggacgtcgtctcctggacgtctaccatctcgcgcgcggcgcgacagggtgacctgcatgcggcggcagcatctctctgcgctatgctctcctcccccgccgcgcccgcccccaacgacgtcacgctacttaccgttctctccgcctgcgccgactccccatcctcgccgctagccagccccctcgccctcaccctccacgcccgcgcgctcaagctattcccctcccacctcctcctctccacctgcctcgcgcggttctacctcgcgtcccgcctcccgcatctggcgctccagctgttcgactcaatgccggtccgctccgtcgtcacctacaacaccatgatctccgggcttatgcgcaacggcctcgtcgacgccgcgttcgaggtgttcgacgggatgcccggcccggacaaggtctcatggacggcgctcatcgacgggttcgtcaagaacgggcgccacgacgaggccatcgactgcttccgcgccatgctgctggacggcgtcgagacggactacatcacgttggtcgccgtcgtgtctgcgtgcgcggaggtaggcgcgctcgggctcggggatgtgggtgcaccggctcgtgctcaggcagcggctggagcgcaatgtccgcgtcgccaactcgctgatcgacctgtatg

SEQ ID NO: 162947 - DNA, 770 bp, Zea mays
  unsure (1)..(770): unsure at all n locations
  Clone ID: MRT4577_80182C.1
gccggccggttcggaagccagcagcctcatccccttgcctcttctaagcccctctgctgcagcaagaaggaaagaagctagcgcttatagcttgtcagccatggccaccgccgccgcgtctagcctcctcaagtcctccttcgcgggctcccggctcccggccgccacgcggaccacaccggcgcgtggctgggcgggcagctgttctcggccatggtggtgcgcaagccggcgcacctgttcctggacgagctgggcgtggcgtacgacgaggccgaggactacgtggtcatcaagcacgccgcgctcttcacgtccacggtcatgagcctgctcctggcgcgccccaacgtcaagctgttcaacgccgtggccgtggaggacctcatcgtcaggggagggcgcgtcggcggcgtcgtcaccaactgggcgctcgtgtccatgaaccacgacacgcagtcctgcatggaccccaacgtcatggaggccaaggtcgtggtcagctcctgcggccacgacgggcccttcggcgccaccggcgtcaagaggctccaggacatcggcatgatcagcgccgtgccggggatgaaggcgctcgacatgaacaccgccgaggacgagatcgtgcgcctcacgcgcgaggtcgttcccggcatgatcgtcacccggatggaggtcgccgagattgacggcgcccccagnnatgngcccgacgtttggcgccatgatgatctccggncagaaggcggcgcacctggcgctcaaggcct

SEQ ID NO: 162948 - DNA, 1117 bp, Zea mays
  Clone ID: MRT4577_80183C.1
ggaccctcgaggccggccgggaaagtgaggagcctactagagccgagctccgagttcaaaccaggctcgttcgagttcggctcgttgacagcccagcggctcagccctatcccagttccgtccgtccgtcctgacctcggctcgtcgggcagcggcgcccggcgcaccacacaggctttctccaactctccgccctcgccatggccatgaccgtggcagccgcctggcttccgtcgaccgcctctcgccggagaatcttatcctctccgctccctccgttcgcggcccctatctccatccacatgccacggcgggcgccgcctcccagtcccatccatcgaaagccgcgcctcttcgtcgcctccgcgcagctcgatttctccagagctgttcaaacagcatggagggtcagtaacgatgctgtggaggcaggaagtaatcttgtcccaggttcagttccacgaccaattgccaggataggtgttgcctttgctgctgtgtcagtcgcctttttccttgtcaaatccattgtgtccactgcattatttgttctggtaagcagtcacgacatttgcggcaatgatgggccttatatatctcagcttcctggctatgaacccaaaggaggcatccggctctaggctggatgaagcaatgggcaacccatcggaggaccctgttgaagaggcccgtaggataatggacaaatacaagtaattaacctgtgcaaaggtgctgtactctcagaggtatgatttgtctgtagagcttccttgcgtgacgtgaggggtgatggatgggtggatctgattttagcatactacactacactcagtgttttgatatatgtaaatatagttgcacggttgatgaccaaatgaattccgcaaatcaacaagaggttaccaatttccgggtcacaaaaaaaaaagaggttagcaacaatttcattcttaatattgtactacctccattttttatttgacgtgagatagtacaaatttacactaacaaatgtctaataaaaaaatcggagggggtatgcagttatagttattcaagctttatatttgccacaaaaacttactaagtcttatatatacactctgttcgttct

SEQ ID NO: 162949 - DNA, 329 bp, Zea mays
  Clone ID: MRT4577_80184C.1
ataactctcgatcgactcacacaattccccaacaaagtctactccgcgccaagtggataagattgcggaagctccgtatgtaccatcaaaggagaggcggggaacaaccaggaagagatcaatttaaatgcaacaacttgaaggttgacaagcatctggagaattaccttggccatatggctatggacccgcctgctgtacgcaacataagaaaatatctgtactgctttactgccgattagaaatactgcacgcaatattctcacagggaagaaatcaggttagtgatggaattggacgaacatgttatgcgtgtagctctcgcctta

SEQ ID NO: 162950 - DNA, 1550 bp, Zea mays
  Clone ID: MRT4577_80185C.1
ttttttttttttttttttaaaagagaacagagaagcaactccacgattaccatgcatttttccccgtagtaggactcgcacgtgacgtgacagagagagcacaggtgtggcatgtcgatggcgcggtggtggtgctatgaacacgacacactatagcgagtcaaattaataataacaacaacaataataaagctaacccaagggaattcgatcgattcatcattgaacaacaaggcaattaagataagacgctgctggcgtcgatcctcctctctgcttgccgcactcaggcgtccacgacctcgtcgtccttgtacgcaatcatcaactcctcgcgcaacggcggcgacatggtcccgtccacggcgttgggcctgcccagggccttgagcgccaggtgcgccgccttctggccggagatcatcatggcgccaaacgtcgggccctgcaacaaaccaacagacaattttagacatattcctcattcattcagtgagtatcgcaatgacatgagtattgtcttcctcactactgaccatcctgggggcgccgtcaatctcggcgacctccattccggtgacgatcatgccgggaacgacctcgcgcgtgaggcgcacgatctcgtcctcggcggtgttcatgtcgagcgccttcatccccggcacggcgctgatcatgccgatgtcctggagcctcttgacgccggtggcgcccgaaggcccgtcgtggccgcaggagctgaccacgaccttggcctccatgacgttggggtccatgcaggactgcgtgtcgtggttcatggacacgagcgcccagttggtgacgacgccgccgacgcgccctcccctgacgatgaggtcctccacggccacggcgttgaacagcttcacgttggggcgcgccaggagcaggctcatgaccgtggacgtgaagagcgcggcgtgcttgatgaccacgtagtcctcggcctcgtcgtacgccacgcccagctcgtccaggaacaggtgcgccggcttgcgcaccaccatggccgagaacagctgcccgcccagccacgcgccgccgcccggcgacaccgactgctccacgatggcgatgctcacggcggggtccttggagagctcgtacgcgcaggacagccccgcggagccggcgcccacgatgacgacgtcggtgtcggcgtaggtgatcatgtccgtcatgtagcgacgggtcatctcgcgggacacgatggactccttgatggggctgaaccggaaggacgtcaggtcgtagggcgggttggaggaggacatggacatggacgcgcagataggccccgcgccggcgccgcgcgggccggtggccaccacgagggacgccggtgtggtccgcgtggcggccgggagccgggagcccgcgaaggaggacttgaggaggctagacgcggcggcggtggccatggctgacaagctataagcgctagcttctttccttcttgctgcagcagaggggctgtagaagtgggcaaggggatgaggctgctggctgcgattcgcagcccggccggc

SEQ ID NO: 162951 - DNA, 271 bp, Zea mays
  Clone ID: MRT4577_80186C.1
attcggctcgaggcgaccgttgatgcttaattttgcagcctggggctaacctgctgagacatgtgctgcttgacaaagaagcagccgggctggctttggataggcggagctgctaacaccgcaaccaacgactccactctagtaagatcaccaaggctacggctccgcacactataggtgtctcgaaaaatcttcagacagctgatacaagcgatccaaaaacaagccaattgactggaggacagagtaaaacgacctcaatttcgagtac

SEQ ID NO: 162952 - DNA, 1004 bp, Zea mays
  Clone ID: MRT4577_80187C.1
gacagcagcaggagaccccacgagtggcccccacgtgacagagcacacggctggtgtgtggcatgggctacacgaacacgacacactaacgagacagattaaagctaaccgatcgaagggaattcattcgtccaacagcaacaaagtcccagattaaaagaagaaactcttgtgatggcgcgtggatgctcgctcaggcgtccacgacctcgtcgtccttggacgcaatcacgaactcctcgcgcagcgccggcgacacctctgggatggtcccgtccacggcgttgggcctgcccagtgccttcagcgccaggtgcgccgccttctggccggagatcatcatggcgccgaacgtcgggcccatcctcggggcgccgtcgatctctgcgacctccatcccggtgacgatcatgccgggcacgacctcgcgcgtgaggcgcacgatctcgtcctccgcggcgttcatgtcgagcgccttcatcccgggcacggcgctgatcatgccgatgtcctggagcctcttgacgccggtggcgccgaagggcccgtcgtggccgcaggagctgaccaccaccttggcctccatcacgttggggtccatgcacgattgcgtgtcgtggttcatggacacgagcgcccagttggtgaccacgccgccgacgcgcccccgccgcacgatcaggtcctccaccgccacggcgttgaacagcttcacgttgggccgcgccaggagccggctcatcacggtggacgtgaacagcgccgcgtgcttgaccaccacgtagtcctcgggcttgtagtggcccacgttcagctcgtccagggacgggtgcgccgggagcccgcgaaggaggacttatggaggctggacgcggcggtggtggccattgctggcaactagagggaggcgcgagcatcttcattcttgttaaaaagaccactgtaatgtgagttgttaaggttatgaggctgtgggtaaaaatccgggaatacggaccggtcct

SEQ ID NO: 162953 - DNA, 1601 bp, Zea mays
  Clone ID: MRT4577_80188C.1
aatctcggttaccgagtaccaattatacattcggtatatagctgttttcaaccgatactcgtaccgatattcgtaccattttatcccctagtggacgagtcccagcgttacagtgacagtgcagaacaaaagagaacagagaagcaactccacgattaccatgcattttttcccgtagtaggactcgcacgtgacgtgacagacagagcacaggtgtggcatgtcgatggcgcggtggtggtgctatgaacacgacacactatagcgagtcaaattaataataacaacaacaataataaagctaacccaagggaattcgatcgattcatcattgaacaacaaggcaattaagataagacgctgctggcgtcgatcctcctctctgcttgccgcactcaggcgtccacgacctcgtcgtccttgtacgcaatcatcaactcctcgcgcaacggcggcgacatggtcccgtccacggcgttgggcctgcccagggccttgagcgccaggtgcgccgccttctggccggagatcatcatggcgccaaacgtcgggcccatcctgggggcgccgtcaatctcggcgacctccattccggtgacgatcatgccgggaacgacctcgcgcgtgaggcgcacgatctcgtcctcggcggtgttcatgtcgagcgccttcatccccggcacggcgctgatcatgccgatgtcctggagcctcttgacgccggtggcgccgaagggcccgtcgtggccgcaggagctgaccacgaccttggcctccatgacgttggggtccatgcaggactgcgtgtcgtggttcatggacacgagcgcccagttggtgacgacgccgccgacgcggtcctcccctgacgatgaggtcctccacggccacggcgttgaacagcttcacgttggggcgcgccaggagcaggctcatgaccgtggacgtgaagagcgcggcgtgcttgatgacgacgtagtcctcctgctcgtcgtactcgatgttgagctcgtcgaggaagaggtgcgccggcttgcgcacgaccatggcggagaagagctggccgccgagccacgcgccgccgccgggggacacggactgctcgatgatggcgatgctgatggaggggtccttggagagctcgtacgcgcaggacagccccgcggatccggcgccgacgatgacgacgtcggtgtcggcgtaggtgatcatgtcggtcatgtagcggcgggtcatctcgcgggagacgatggactccttgatggggctgaacttgaaggcgttgaggtcgtagggtggggtggaggaggagatggacatggacgcgcagatgggccccgcgccggcgccgcgcgggccggtggccaccacgagggacgccggtgtggtccgcgtggcggccgggagccgggagcccgcgaaggaggacttgaggaggctagacgcggcggcggtggccatggctgacaagctataagcgctagcttctttccttcttgctgcagcagaggggctgtagaagtgggcaaggggatgaggctgctggctgcgatgctcgctgtggagatccatggccccggccggcctcgaggtacccaatg

SEQ ID NO: 162954 - DNA, 622 bp, Zea mays
  Clone ID: MRT4577_80189C.1
aataatgcagacttacaacacacatgtaaactggtgtcactttatttcacagaaatagcaatgaataaaataaggttaaaaaaaaaaaaaaaaaaaaaaaaaaaaaaaaaaaaaaaaaaaaaaaaaaaaaaaaaaaaaaaaaaatccggggtttctcaaaagggggttgggttctcctcccccaccggttcggggtcagggtctggttcgggggcgaaaaggaaaaaaagggggggtcggaagttgaaaaacgttggttccttgggggcctcccctgggccaacgaagaacaatccctcaaaaaaggctttaaaaactaaggggagggccccgaagcgaaaaacatcctggaacgggaaaagcaaaagtcccggggtttcgggttcgtcaccttttccaaggaggaagcgaagggcaacgccatccagggcatgaaagggaaaaaattcgaagggcggaaaatcaccggtaaagagggccaatcccccggcggccccggaaggggcggtggcggaaaacgtggcgggcgccctgaaggaagcggctaacgcggggggggggggggctaacgagggggtccgggaagctaacgcgggggcggtgggggaaaacgtgggggaaa

SEQ ID NO: 162955 - DNA, 1016 bp, Zea mays
  Clone ID: MRT4577_8018C.1
aaagatccaccagttcctccccaccagaaacatggttagggttagggttagggaggaggcggaggcggctgctttattcccgatcccgatctcaatcccgatgccgatccccatgaccaccggaggaaaaaagattagggaggaggcggaggcggaggcggaggcggctgctttattcccgacgcggatcacgatcggcatggccagcagaggcggaggagcgccatgggcggacggtgccttccccgattgggtgatgctggaccgcctcggccgcaccaagtcctacgacggcatatgcgctgttcgtgaggccgtcaaccagaacaagaccgccgctgcagttcacatggccagcggccgctcctgctacgtgtccttcgccctcgccgatcctccagaaggggtctcctacttcgacctccactggccggagaaagaagcctcagccacccggcccgcctgtccctacgtccgggcaactgacgaggacctcgtcctcttccacatctccatcccgagccagactcgctacgacaacatcgcgtcagatctgttcgtctacacggccgccggtccttccccctcggtgcagcagctccctcggtacaccaaggacaggaaaaggccgttcctgatggataaattcgccacaggcatcctgcagctcgcgccggactgctacattgttgccgaccttaatgtctaccccaaaaaaagcgacactggcaatcatcccatgcttgttgaactctgcatcttcaactccgagaaaggacattggggaaccatctgcaacaggcctgccccgcggccgcatgaccagagcaatgtccggttccccttcctgtggtcaactgacgatgtgctcgctcttgatggtcgttttctgtgctgggtagactacttcagcggtgtcctaatatctgacttctccgatacatgctcccctgtgcttcacttcgtgcctttccccgggggaaaagagtaccgtaatgacgtacgggttgaaagat

SEQ ID NO: 162956 - DNA, 259 bp, Zea mays
  unsure (1)..(259): unsure at all n locations
  Clone ID: MRT4577_80190C.1
cggnggcncgccggcgcaaagaaggaagaacccgaacgcccaggcaancnccgcgggccagcagacgagcagccaaccgcccgccacgccgcagcacacgcacaacaagggcggagcccgagaggngggcgaggcggagcacaaccagcacaacacgacncgacacgccacgagggccagaccggcggaggcaagagcggagagcaacagcggcgcgccgggagccgaaggcaaacgcgagcgccaaagagggggagaa

SEQ ID NO: 162957 - DNA, 2632 bp, Zea mays
  unsure (1)..(2632): unsure at all n locations
  Clone ID: MRT4577_80191C.1
ggcccctgcaccaattattcaggccaatatgactctcatgagcatttcataggtcccctcttcgatacccccgataaaacccccgacccgccccgtctccagctggccaccccatcctcgtcttctccaattccaaagtaagaaagccacacgcgaggccgaccgaggaagtccaatctcatggcgctctcctgcatgaggtgccccgcgggcgccggcgccgcctccgcccgacgcgccgcagcgcagccgttggccgcggaggctgcggtctccttcgccagatgccgcggcttcgggaggtccgccaccgctgcgacttccgcctggttttggcgcaaccatgccgttgcctcacagggagtgaaagctcccatggatgctgatgtcaagaatgctgtcatacctcctacctcaccaaaggtggaaagtggctctccttcagaaatcactctggatgaatttgaagacttgagcgctctatgcaagaatgatgattctactgttagcatcacagtagttggagcatctggtgaccttgccaagaagaagatatttcctgccctttttgctctctactatgaagattgccttcccaagcatttcaccatctttggctatgcacggagcaagatgacagatgctgaactgaggaacatggttagcaaaacactgacttgcagaatagataaaagggaaaattgtagcgagaaaatggaagagttcctcaaaagatgcttctatcattcaggccaatatgattcagaagagcatttcatagatctagacaagaagctaaagcaacatgagggttccagagtttctaaccgccttttctacttgtcaatacctcctaatatatttttggatgttgtaaaatgtgcaagcaaatcagcatcttcggtgaatggttggacacgagtaattgttgagaagcccttcggccgagactcagaatcctctgctgcattaacaagcggtctgaagcagtaccttgtagaggaccaaattttcaggattgaccattatttgggaaaagaactggtggagaatttgtctgtcctgcgcttctcaaatctcgtttttgagcctctctggtcaagacaatatataagaaatgtgcaacttatattctcagaagactttggtactgaaggacgtggaggatactttgatggctacggtattattcgagacataatgcagaatcatctcattcagatactagctttatttgctatggaaactcctattagtttggaagcagaggatataagaaatgagaaggttaaagttcttcgttccatgaagccgttgcagctggaagatgtggtcgtaggacagtataaaagtcacacaaaaggtggtaccacataccctgggtatactgatgataagacagtgcccaaggatagtgtgactccaacgtttgctgctgcggcgcttttcataaataatgccagatgggatggagttccctttcttatgaaagctgggaaagctttgcacacaaaacgagctgagattagggtacagttccgacatgttcctggaaatctctacaaggggagttttggcacagatcttgatagggccactaatgagcttgtgatacgtgtgcaaccggatgaagcaatttacctaaagattaacaacaagattcctggtctcggtatgcgactagataggagtaacttgaatctccattatgccgcaaggtactcaaaggagatacctgatgcttacgagagactcctgcttgatgccatcgaaggagagcgcaggcttttcatccgctcagatgagttggatgctgcatggtcactcttcacacccctcctgaaggagctggaagagaagcggatagctcctgagctctacccatatggaagccgtggacctgtcggggcccactatctcgccgccaagtacaacgtaagatggggtgacttgagtgcggagcactacaaggcatgaaacgaagatggccatatctttgtgatattcttgcttttccatttctataagtttgcacgccctggcagtgagatagatttaagagaaaaaaagatgagaataaggcgggcagttaactaggttggaaggcatgtatccattactagactgaatagctttgttggcataattgcagctgttagggctagtttgcaaccccgtgtttccaaagaattttcattttcccaaagaaaattagtttattttccctttggaaaatgagaatctcttgggaaaattgagttgccaaacgcccttaaaaatatgtttctaggaatcagtttatttttcacaggaacaataaaggaaacggaaaaaatttgccgcatttcaaaaaaaaaaaaaaaaaaaaaaaaaaaaaaaaaaaaaaaaaaaaaaaaaaaaaaaaaaaaaaaaaaatttgtaaaaaaaaacacatgtgtagacgttcaggttggcaagccggttaggttccgcttcaactagttaacatttgtactgaactaaatgaacacgctgagaacaactatctcgtgggatttgattaatcgttctgtttgtaggctactctaacatgtaaagacgaccttagtgaagagttgagnacacgttacaaggaaacaataactgtaggctt

SEQ ID NO: 162958 - DNA, 626 bp, Zea mays
  Clone ID: MRT4577_80192C.1
ggccgcttttttttttttttttttggtagcaaacaagcacatttatttatttttatgcttgtgtgagagtaaacagcaacaactacacattgatcctgtgacaacaaagctcacatgtggaactataagcaaagggtccatcaagtggtggccaacctgtaggaccctcaaaaaaaaaaggaagtggcacccctacagtacttccaaatcaaggcttgcaaagtccccctcagagctgaaaaaaaaaaaagatggtgccattttctccacaattgaagctttcctgggagcagtgtgatcaagattgagaggacggcaaaggtagggttttttttgtgtttgacaaacacaatcctctcatggaaaaacaaggtgaaagggcaaacatactggcaaaggggagagaggaaaattaggaactccccggcctatatagcaaagccctagaaaaaggctgggcacttctttttgtttttgttttttttacaatctgctccctcccaaaaacatggagtgacaggatcaaaccatgtaaaaaactggagggagagaaaataggatggggggtaactaggtaataaacctctgcacccatgcagcaaaaaacagaggaaatggctatcttt

SEQ ID NO: 162959 - DNA, 365 bp, Zea mays
  Clone ID: MRT4577_80193C.1
ggggggcacggacaacgggggacccccatgcttttttggccgggtataaaaaggcacacatggccggggaccacccggttatttaccctggttttttaaaccccacaggcccaggcccaggatttcaaaatttcaaaactggggcatgcaacccggtagctgggggggtgggggggcaccgccaacctgaaaggggggtctggtgcttccaatccaagaaaggggggcacactaacaacaggggtaacccgggaatattcccccacacacaattaaaggggcccgggaacccgggtttttataaagggggaccaaaaccccaagggccccgagaaggaaaagggtctttttcaaccccctggggg

SEQ ID NO: 162960 - DNA, 180 bp, Zea mays
  Clone ID: MRT4577_80194C.1
aatccacatgtgttggagtggtttggtataaaatttaaactaaatgtcacacgggacgagtccaactgtccaacacacatatactaagatggatacgtggatatccaaacaagttaggtgtctagtgtctaggtttttgtttgtggtaatctgcaatataactttgagatcctttgtgtg

SEQ ID NO: 162961 - DNA, 374 bp, Zea mays
  Clone ID: MRT4577_80195C.1
agttgttgggggggattttttcattgttggggtggtctccttcacatacatacaatggacgcggaaggcaaagaatacgccagacgacggacaagaactaatcagggacgccaacagagtcagcggggaacactgaaacacgatgaagtcaaacgccggaacatgcgtggacacccaaaaaatcggagaacgagcagaagcgctaaagccttcacgctggacgcggcgatccaggaagggctcaggcacagtatcaatgggtaaagatggacatagatgccaaaagtgcgaaactgcgatccgctcagcacaggacgcaacgtaaaacccggaaggataaagcgtaaagactggggagccaacagagagagcaa

SEQ ID NO: 162962 - DNA, 422 bp, Zea mays
  unsure (1)..(422): unsure at all n locations
  Clone ID: MRT4577_80196C.1
gccacgcttccggtcgagccgggaatgcgcacgggacggcgcacgcgaacgcggcaaatcgcagcgcacatgtgacccggacgagtgcagggaaaagggcagggccaccgtgccgccggcggggtcgctcgatggctttcttgatttatttcctgctccacgccggcgcggaggcgcgatggcgtgcgagaagctctaacttgagctttggactccagctgacagccggggcgacatacggtggggcatactgggaggggcgggttccctggaggattacatgcacaaccacgcgtacagccgggtgggcagctcggggacccgggcggttgcgccgtcgcctccgttctcgtcgnggaancacgtggctgaatgaaggcctcatcgaatggaggatggactgcgagggccagctcggacgc

SEQ ID NO: 162963 - DNA, 351 bp, Zea mays
  Clone ID: MRT4577_80197C.1
gggggttgttttctttgtacaactgaattttggtgatcttgcatttttgacgccgggctggaaggaaggggcaaccgtgttcagactctaccaaaggaccagggaggagggggggcgaaaccaaaaagggacccggaaataaaaaacccaagacgggggcaaaatttggaggggggaaaaaggggggatttttttggggccgggggggaaccccccccgtttgaattgtcaaaggggggggggggggaaaaaaaaacaaacctcttggggggggggggaaaaggggccccctttttgggttcccccccggggggggggaaagacaccccccccccccaggggggggggggg

SEQ ID NO: 162964 - DNA, 179 bp, Zea mays
  Clone ID: MRT4577_80198C.1
actacctaattacccagacgaccgtattgagcatgctagctatcacagcagtgaaccggcacactcaaaaatcactcctcattacactacaacatctccatcttcaccgaaaccgcatggaaccactcttggatattgtagtacacgatatcaattctaccaatctacttctcaacaca

SEQ ID NO: 162965 - DNA, 551 bp, Zea mays
  Clone ID: MRT4577_80199C.1
agaacgaggccttagcgttttttttttcttagtacttttctttttattaactatttttgttgatccgttttttgtcttttcggtgggttagcaaaaggatttaaataataacattcgcatgattgcttgaaattgtgcagcatactctatgcacattaaaaatgatgtgtgtcttgtctgacaatatgaatgtcgtctggagagaaaggaaataaaagttatttgaaaaaccccccggaaaaaccaaaaaaggaccccaaaacaaagttttaacgggcggccgaacctgggaacaaaacaaagccgggggcgaataccgccctaaggcagaataccggagacgggggggggttacttttggaggcccccttgggcccaaacggggggtaataaaaaataaactgggcgcctggttaaaaaagttttcacttgaaaaaccctcacgatatccaaggcgagagcttaaaaaaaaaaccctgttgtgcccattggggggaattataaaaaaaaaaggatggtggcgccctatgccaatttgaattcggaaaatt

SEQ ID NO: 162966 - DNA, 2523 bp, Zea mays
  Clone ID: MRT4577_8019C.1
ccggtcctcatcacagtccgttcctcccccgctccctctcctccacctccggccctccgccattcccattcacaaagcacgctccgctttccttttgtttatttactcttcctccctccgcatcctcctcgcgtcgcattcccccgtttccgcccatgcgtgtccgcctcctcgcatccgccgtcgtctcgcacctcccccgcgccccaatctggtccgggcggagttagggatgaggacacaaggggaggggcatgtggaggaggccacggggttcgaggtgggcatcgtggtgcccaggctctcccgcgccgccgcggcgggggccaccgacaactgcgtggcgcgtctggtgcgggagctcgagggcgccgggctgctcgtcgagcgcgtccgcggcgtctccgctgagttcatcaagctagccgcaccaatggggaccctggggagagctgctgctgagatgcatatgaagaagctaacctacatcgggatggagcttcagtttcaatcggaccaggttgcagcattcgttaggcagacagacggttccctgttcagctggagagaacgctattcctgcttccgctacttgatatatggcattgtgaacaagacaaactctgaagtagtccttaaatttgatgataaggagttccattggaagcaaagtgagtccttattaacaaggctggaagctgaaggagttgtaaagctagtattccctttgcatgatgaaattaaaaggaagcaactcctgagaaattgggcgcttaattggcttgacttcacatggcagcctatcgatgagtttactcctattttggaacaaagattgcaacatactttgcgttcctaggaatgtatgcgcgatggcttttcttcccagctgtttttggactggcaactcaactcatagattttggatcattgcagtggttggttcttcctggtttctttatctttgttatttcttgggctgtcctctttctgcaattttggaaacggaagaattcagcacttcttgcaagatggggtattcattgttcactatctgaataaaaacctggacaacgtcagcttcttgagtgattctcttactgttgaggaaaaggagttttgtgttgtgtctgctgagaaaagcaagttacaaaggaacgaatggttcggtgttctccttagaataaggaacaatgctatcattgtgctggctatcatctgtcttcagttgccatttgagttggcctatgctcatctatatgagattacagaaactgaggctatgaagtatttgttgactgcagtatatcttgttgcaattcaatattacaccagaattggtggcaaggtgtctgtcaatttgataaagtatgaaaacaaccaaggagaagaatcgagttccgctagtttagtttataaggtctttggtctttactttatgcagtcatatattgggttattttaccatgcttctttgcatcgtgatatactggccctccggcgagtcctcatccagcgtctcattgtgtaccaggtattagaaaatctaattgagaattccattccttacctcaagtacagttacaaaaagtacatagctgttcacaagaaaaagcgtgggaaagaatcgacagtgggtaggtcagtccggttatcaacaagagtggagaaagagtatttaaaaccctcttatactgcaagcattggagcagaactcgaagatggtttatttgatgactttctggagctggctcttcagtttggcatgatcatgatgtttgcctgtgcatttccattgattttctgctttgcagctctgaacaatgttactgaactcagagcagacgcattgaagttgttagtcatgttgaaaagacctgttccccgtgctgcagctacaattggagcatggttgaacatattccagttcttggttgtgatggcaatatgcaccaactgcttgcttctcgtttgtctgtatgacgaggaggggaaatggaggattgagccaggactagcagcaatcctcataatggagcatgctctccttttaatcaagtttggtttctcccactttgtgcctgaggagcctgcgtgggtgagagcaaatcgtgtgcgatacgtagctcaagcacaaaacgtctgctccaaacaactcttgaggagcatttcaaaatttcaaggaaaactggattgagaaccaggatgtacaatttagaagtcatcgctggttttgtagtttaggtagagcggttttgtatagtacaaagttgtacagatcatctaaccgatgtagatattagcttatcgccacctatcgtaccagtaaattggtacaggagaatgctctcaagtgttagactgagtttttttcctcttccattttaatgatctgtttaattgaacggaaactcagacatggtacaccatgtaatgtgctgtggttgatttcgaagacaccctagccgacaggtattactggagaatatgcactgctcttcattactgatccatatggattgg

SEQ ID NO: 162967 - DNA, 326 bp, Zea mays
  Clone ID: MRT4577_801C.1
gggttaacccaaattggggtttttaaaacctactccccgttgggggggccacaaagggcgggtttttttaaacccttacccttttttaaacgggcccttggaccgagggggcttttttttttaaaatacttggaacaaaaagttcccacaagggccaccaaaaggttgggggtttttggcttaattacaagggggttttggtcgccggaaagaaatctagaaagaagaaaggcttcccagcgcaagagcttgaaagaacacaagcaaaattttttttttaatcgcttgggcgttgtggggaatttgggggggattagacccttttg

SEQ ID NO: 162968 - DNA, 360 bp, Zea mays
  Clone ID: MRT4577_80200C.1
aaaaagaaagcctaagaaaaagcaaaactaactgatcctcgagctaccaggatgcaaagcttacgaaacccttaatgcattgcccttatatcaaaggtactttcttgcaaggtccctgacctgggtttcaaaacgaaaggtggtcatccaagacccgggccgtgaaagcgggttaaggattatctgaccttgaagctcatggacctgtaaaaaaaggccttttattccataattaactgaggaagtcatgactcgacatgaatccgacatgtgccccagtcggagttaaagaaagtaccaaagatcaatgataaatcttcgaaacccaatcatactgagacttaggcacatgccgtataa

SEQ ID NO: 162969 - DNA, 506 bp, Zea mays
  Clone ID: MRT4577_80201C.1
ttttttttttaatacaggcctagctagctagattattagctagcacttcatgaatattgaccaatcaattggttagctctcagcgtacgaaacccccgatcggtttttctctttattcgtcacatttattttaggctaactccttccggacgctcctccgcgctccagtgccgcctcccgagggagatcttctttgtctcggcgcgcacatgtcgtccgccgtctgctgctccaggctagcaagagagggagaagaagagctcgctgggctcgagcagtttgtagccatggggtcaacacttccgcgcagccgtcccgtggccagctgaccgttattattatttgcctcttcgtcttgagccgcctgctgggtatcctgaagcactgccggcgagaaattgtgtttctgacaccggtgcaacgacagcgagtcggcaatcgcaactcctttttccggcactgcagctggcgcgtggtcagtcctgctcctcgggggaatgggtgga

SEQ ID NO: 162970 - DNA, 259 bp, Zea mays
  Clone ID: MRT4577_80202C.1
acgctgcagtacggtcgaaattccgggtcgaccacgccttcggaggacccttgggcggacccttgggtgtccttcccggtccggtccccaagccttagcccaatccttgggaacaacgggttattgcccgccgcggcaacaagcaacaacaagcccttaaccgggaacaacccccaccaaaagccacaattgctccggccataaaatggccagtaccatccggccaccaatttcctttgccacaaaaagataaaacccg

SEQ ID NO: 162971 - DNA, 297 bp, Zea mays
  Clone ID: MRT4577_80203C.1
cttacaaactttatgttctttacttcactatgcgaataaaaagtaaacagcacaacaaatacaaggcagaatggttacataaaaacgctctcataatgccagtagcacacttacagcgccagaactagaccttaggtattacttgagatgcccatcacatgcactagtcttaccctgtactacaaaccacaagggcgtacgattaacaaacgatcagctgacacacgcaactgtcaacttggcgtactggaacaccagctgaatgatggcaattgtgctaacattagaccgcgcaaa

SEQ ID NO: 162972 - DNA, 465 bp, Zea mays
  Clone ID: MRT4577_80204C.1
attcggctcgagctcatctgccaaccatttttactctcaggatacctctggctcaaccggggaggaaagagttacaacatgacgaatcaatcaatggattcaggattaaacccatactactttttgtcttttcatacacttttgattaagtgatggctcaaacacaaatatgtattcaactttatttgagggtagtacgatggatagtaaatttgaatatggttctgcaattagcatggtctgcactaatgagctacttcctcagtgctggcagtttgtgagccccttgtctaagcttctcctgctggtgggtcaaatgataaagtcgtcgaatcttccgtgccatcattatggcttgcattcaccccattggtaagtgttctgaaaactattatggcttgaatgtcgttagccaaacatacccccgatacaaaaaaaaaaaaataattgggcgccccctcactt

SEQ ID NO: 162973 - DNA, 413 bp, Zea mays
  unsure (1)..(413): unsure at all n locations
  Clone ID: MRT4577_80205C.1
tntttttaataccaattattctgcagcggccctacttggccaaattaacgaaactaagatcggccacatgacaagcacacacacacggatgacggatgagtgcatacacgtcaaccgctcaaaagaagcacgcgtcatatccgaagatggaggcagaaaggaaaccgtgaggcacgatttgtcccatcgatgcacaagaaaagacaatacctaaggaaaatgccaacggacgggagaaaaaatgctccagagcggggagctgctttgggcgctcgacggcggcgacgaagtgcacattgcctttatgggaaggcacctgttttgacacatactcccgatgggagttgaagaagacgaagcgttccaagaagagcgacacgcccgtagctaggcttagcaccagagccgagctc

SEQ ID NO: 162974 - DNA, 422 bp, Zea mays
  Clone ID: MRT4577_80206C.1
gtttccccccgttccaaattcgccaacccacaccaccttcctctctctggccgccggcctcagatcagatcaaagcggaacaccaactcctcctcctcgtagggtttggtgtgttcacctcacctctcgcggcgacggcgaagccttctcttctcttcgctccgctccgctccgctcggtgtttcagccatgatgtcgcggtcgtacaccaacctgctcgacctcgcggagggcaacttcgcggcgctgggcccggccgccggcgccggcggcggcgggcggcagaggcaggggtcgttcgggctgaggcggatgtcgcgggtgatgacggtgccggggacgctctcggagctcgacggcgatgacgagtcggagccggcggccaccagcagcgtcgccttcgacgcgccctcgttcgtggc

SEQ ID NO: 162975 - DNA, 193 bp, Zea mays
  Clone ID: MRT4577_80207C.1
ggcgctgtttttttttttttttaaaagaaagagaaaagggaggccccaacccgaggagcaagcgaacgaagacaaccgaaagcgagccgaacagaagagaaagagagcaggcagcacaaatacaggagggcagagaagccaagaaggacaagggaccggcggagggcaagcactacccggaggggggggggcc

SEQ ID NO: 162976 - DNA, 317 bp, Zea mays
  Clone ID: MRT4577_80208C.1
cggacgcgtgggctgacgcgatgcatgcccatgcccatgcccatgcgcatgaagactctgatggctatgctgaaaagatgcttattgagttaacggctgtgctactgatgctgctgctgaacgtcctaccgttgttggagcctaactacttgctgtcctgtgcatacgcttactagcataagtgccaatacccacatgaggatgcatactatgccaagatgtgtgattcatacgagcagaagacacaccatagcactgagcgagcgacactcgagcggactgttcagaggaatcattactgcatagtcacacagaat

SEQ ID NO: 162977 - DNA, 327 bp, Zea mays
  Clone ID: MRT4577_80209C.1
aaaaaaaaacaaggcttttttttttccattctaaatagcaaaggacaacttgcagcaggacacatacccatacaagccctttcgtcccatttgcagcctacccataaccgtatactggaaacagggttctgttaaacataaaatcactccggacagtcagtttatgcctttttaggggacttggcggcctttttgggcgactttgcctccttgctccccccactggaccccttttccgccgtttttttgggcaacaaaacagggtttttattggggaccacaccgccgggggcgatggtcaccccccccaacagttttccaagcttc

SEQ ID NO: 162978 - DNA, 633 bp, Zea mays
  Clone ID: MRT4577_8020C.1
aaaatgaaagaggggaaaaactgacttacacttgtgggcattcttcaccatttgctggtaagataggtggcgatcacctaatatctacacttaacggtcatatgcatcaagatattacacccctagatttgtacatctttgtactatacaaaaccgctctacctaaactacaaaaccagcgataaccgctaaactgtgcatgatgtttctcaatccagttttccgtcaaattttgaaatgctcctcaaaagttgtttggagcagacgttttgtgcctgagctacatatcgcacacgatttgctttcacccacgcaggctcctcaggcacaaagtgtgagaaaccaaacttgattaagaggagagcatgctccattatgaggattgctgctagtcctggctcaatcctggaatatgttcaaccatgctccaattgtagctgcagcacgcggctcaggtcttttcaacatgactagcaactttaatgcatctgctctgatttcagtaacattgttcagagctgcaaagcagaatatcaatggaaatgcacaggcaaacatcatgatcatgccaaactgaagaccagctccagaaagtcatcaaataaaccgtcttcaagttctgctccaagctcg

SEQ ID NO: 162979 - DNA, 344 bp, Zea mays
  unsure (1)..(344): unsure at all n locations
  Clone ID: MRT4577_80210C.1
acggaaccagncaaccagctttttaaggaggaactttagcgcaacactttgcaggttactnagagacgctactgaaaacttcatcgccctacccattactgtgaatacagtggcatctctcccctttgaccatcctccatccactatgcgactgctccagcatactacctgcatatcagatcaacaaagataaccttgcgcatactgctaagaaaatcaagactacccaaccaggttctacagaccctcaaaaccttaatcattacatcatcaccactctcatgaacggactatatattacggcgagcacattactttattgaattagaccacttaacctttac

SEQ ID NO: 162980 - DNA, 335 bp, Zea mays
  Clone ID: MRT4577_80211C.1
caacaacaaacactcatacaagtaagttcaaaaggtaatagctttcactttaaaatatgtattgatttaaaacgctgatgtgaatgagttcggcaaatttgtagcaactagcacaggtccaagggatacatgtcccagtgcccccaccaccaccaccacctctcgttcattatccttggtcttcacctccacctacacctatatctccatctaccgaacatcaggtatgcaaattcatcatcatttacttgttgttagttatattatgatataactcagcaaatataatttgtatatgtatattagacccctccagctacctttgccgacgcatg

SEQ ID NO: 162981 - DNA, 398 bp, Zea mays
  Clone ID: MRT4577_80212C.1
gcccgcggctgacgcggtacggatcggatccagaatccgagagctttgcttttcgttaggaaagaagaccttgttgtttgggggctttataatatgcgttatattaaggcacactgagcccaaaggaaatcatctcgtaggaatgagaaatgatctctgtgccattcaccaatagtatgatgacaacagacctgatgtatagctgtgctttgagagagaacacgatcaggtaaagccgcatctaaaagagaaattgcgttttgtgtttaaactcgcagcgtctttactaccatttccattatgcgaccagtagccacaatgaaactgctgctctggtcctgggtgttgtgaccatcaccttatcaaaaaattcatactatataggactctacagtata

SEQ ID NO: 162982 - DNA, 524 bp, Zea mays
  unsure (1)..(524): unsure at all n locations
  Clone ID: MRT4577_80213C.1
gcaatgatggcatcgagtattggattgtccgcaattcatgtggcgagccctggggtgagcgaggctggatgagaattgtgaccagcacctataagggagggacaggttccagctacaacctcgccattgaggaggcctgcatgcatttggggaccccattgtctaggtagatgtccctggaagcaacactgtgaaccatgatgaggaggggtgattatcgacactggatatgtccattcagctagaaacagtggccctcatgcggacacgaggaccagagtgtgggctgcaccccgagaggtggtaggaaaggatgggccacaactacactggaaccctcgacctcccgaccggcttccctccactcacagacctgcttcctcctccaccgtgccctgcaggcctacctccagccgccagagaggacagctatggtctaggacattctgngtgttaccctggagtccacgggaggtgaactagtccagactgcctgagatgagtagagtatctggcgtcaccag

SEQ ID NO: 162983 - DNA, 313 bp, Zea mays
  Clone ID: MRT4577_80214C.1
ctcactgacgcgcgctcgacgcgggtttctgtctgcgccgacttgctccgagctacggaagacgagctctaggtgatgtacgaggtgctgaagcagccgaccgacggcgccacggccgacaccctcggctcgtccttcgcgatcaatgtcgtacctgctcgtacgacctcgtagcgccgtcatagactgtccgatcggacagagcagctactagcagccgtatgccgacggcgacacctaggaggaagacgatgaggagtggaagctcatgcgcatgctcaccgaatgacgacgtgatcaagagctatccgct

SEQ ID NO: 162984 - DNA, 817 bp, Zea mays
  Clone ID: MRT4577_80215C.1
acgccatcatttccatccatcggactccccgaggcccgccgcgtcgcctcgccgcgccatcgccgtcgccgacgaccgccgaccgaacccaaggatggggcgcaagcgcgcggtgctggtgggcatcaactacgcgggcaccaaggcggagctcaagggctgccacaacgacgtggcccgcatgcgccgctgcctcgtcgaccgcttcggcttcgacgacgacggcgccgccatccgcgtcctctccgacgccgaccgggccgcgccgcagcagcagcccacgggcgccaacatccgccgcgagctcgcgcgcctcgtcgccgacgcgcgccccggggactccctcttcttccactacagcggccacggcacgcgcctgccggccgagaccggccaggacgacgacaccggctacgacgagtgcatcgacccctctgacatgaacctcatcacagaccaagatttcacagagctcgtgcaaaaagtccctgatggctgcctgttcaccatagtctctgactcctgccacagcggtggcctacttgacaaggccaaggagcagattggccacagcacaaagcagaacaaggcacagcaaggcaaacgggaagagcgctctgaatccggctccggcggcttccggtcgttcctcaagcagaccgtccgggacgcgttcgagtcccaaggagtccaccttcctcgccgtggcggccagcagggtagctatgacgacgctgagtccgaggagccgagcctggacttcggcacagatggccacgtcaagaaccggtcgctgcccctctcgacattcatcgag

SEQ ID NO: 162985 - DNA, 549 bp, Zea mays
  Clone ID: MRT4577_80216C.1
gacgatttaaaattgaagtgctatgaagagatggataagaggaagaaactttataatattgttcaagagacaaaaggaatttatcaggttttttttgtcgatgccgacacttaagcaaagatgaggtgtcatcaggcctgaatgcaaatggaggaacaactaaaaagacatttaagtttgatagagtattcacgacgaatgatgatcaaggtatattagtgataacttgatgtttgaatgaagttgtagtttattttacaattgcaatccattgtgttagacacaatagtctacaaattcagttatttgagtttaacattataaaaacaagattgctagctgggtacttgtacatgtttggctaaaaaaccttatgatcattatgctgtcagctattaccgtgtcagacacaatagtctacacattcaattatttgagtttaacattataaggagaagattgctagctgattacttgtgcatgtttttcaaaaacagcaaaaagtgcttaactattgggttaaacacttaccttatatgacttctgttg

SEQ ID NO: 162986 - DNA, 980 bp, Zea mays
  Clone ID: MRT4577_80217C.1
attgggaccctcgacggcggggtggccgcttgtggctaagctgctgcacgcgcggaccgacaaaaatccagcactagccaaagcacaggcgaagcagcagcagcgagaggccaccacaaacatggcgaccacggcgtttctacccccggccaagctgccgctgcaggggcgtcggttcgctagccccaaaacggcgggacgtatcagtgtcagggtccctccggcgcgagcgcagcaagagcagcaggtgaaggaggaggaggccgaggcggcgagcgtgccgccgccgcaggccgcggagaaggaggcgaggaagggggacgcgcagtccctgccgcggcagcctttggcggagagcaagaacatgagccgcgagtacggcgggcagtggctgagcagcaccacgcggcacgtccgcatctacgctgcgtacatcgacccggtgaccaacgcgttcgaccagacgcagatggacaagctgacgctcatgctcgacccccaggacgagttcgcctggaccgacgaggcctgccagatggtcttcaacgagttccaggacctcgtcgatcactacgagggggctgagctgtcggagtacacacttcggttgatcgggtcagaccttgagcactacatccgcaaactgctgtacgacggggtgatcaagtacaacatgaggtccagagtcctcaatttcagcatgggcaagcctcgcatcaagttcaacagcaaccagataccagaaaagatatagaatgtacttatccaacgcccttaaaagaatggtttctctccattcgattaccgagcaagatgtatactctgcagtcccagatacgatccagagcattccagaattcatattacgcagatgcaaagccatacaccgattctgttggcagaattttgtcacccctgaacagtaataaccacataacgagaggctgggcaagacaagggtttgctcagtttagatagat

SEQ ID NO: 162987 - DNA, 352 bp, Zea mays
  Clone ID: MRT4577_80218C.1
cagacgcctgagaggaatggacttttccaaatacaggggcggacttgtcatgggggatgacactagtgtggggcctcacatacattcaacgctaaacacgtgaaccagaaagtatggtacgttatataaacctttatcgcatttggaacaaccaattaaaagcggtataccatttaccgcaccaggaacataacatcatggctcagcaagggcacgcatttgaggtgcctgccagcattggaaagaataattcaaaattctttccgtactgatgagacctacacggttgtttattaaatcaaaaacacacacttgactacacatattaggcacagaaacgactaaaaacaaa

SEQ ID NO: 162988 - DNA, 723 bp, Zea mays
  unsure (1)..(723): unsure at all n locations
  Clone ID: MRT4577_80219C.1
ctcgaggccggccgggataatatagttgcagcaagcacctgtagacgaacaagtgctactcttcttatgactgaacgcctgcctacacaccgtatccgtgctccatggcgcctcactgcgcagcgcagccggttactctccgcacgttgacgcggacgactacgacagtcggctacgacaccccctgctgaactggagactacagacgaagggcaaggatgactacacactgacgcttccgccggatagcacgactacggacgcacctgagcggcatgcggtactcgcaggtcctcgcggtcgactgactaccggtccgagcgcaccccggggcatgcaagcgctcacacacaacgtcaccggcggctgcttcactcatctcacgcgatcgcgagcaggcaggctgatgccacatgcccaaggcccccggccaccactacccacgtgtgaccgggggtagtgacgacaacaactgcggctgctactcgtactcaacttcggacaaaacatcttccaccaccagacccaacgacataacttccgaagtgccgggggtatgaaccgaaccaacatctctggtgatgacttgtacgcctgcgtgcccaaatccaaccactgctaggaatacggttctgcgatttcctcgaatgtgtgatgctacttctgaccttacatgtcaaatctatgccgcccggaccccaangaacacaagcacaaggagca

SEQ ID NO: 162989 - DNA, 1486 bp, Zea mays
  Clone ID: MRT4577_8021C.1
gctgagaaaagcaagttacaaaggaacgaatggtttggtgttctccttagaataaggaacaatgctatcattgtgctggctatcatctgtcttcagttgccatttgagttggcctatgctcatctatatgagattacagaaactgaggctatgaagtatttgttgactgcagtatatcttgttgcaattcaatattacaccagaattggtggcaaggtgtctgtcaatttgataaagtatgaaaacaaccaaggagaagaatcgagttccgctagtttagtttataaggtctttggtctttactttatgcagtcatatattgggttattttaccatgcttcattgtatcgtgatatactggccctccgccaagtcctcatccagcgtctcattgtgtcccaggtattggaaaatctgattgagaattccattccttaccttaagtacagctacaaaaagtacatagctgttcacaagaaaaagcatgagaaagaatcaccagtgggtaggtcagtgcggttatcaacaagagtggagaaagagtatttaaaaccctcttatactgcgagcattggagcagaacttgaagacggtttatttgatgactttctggagctggctcttcagtttggcatgatcatgatgtttgcctgtgcatttccattgatattctgctttgcagctctgaacaatgttactgaaatcagagcagatgcattaaagttgctagtcatgttgaaaagacctgagccgcgtgctgcagctacaattggagcatggttgaacatattccaggtttactagctgaactttttaatttcactacttgtgagttgtgggaatatgcatgtcctgattcactctgaagtttgttttcagttcttggttgtgatggcaatatgcaccaactgcttgcttctcgtttgtctgtatgacgaggaggggaaatggaggattgagccaggactagcagcaatcctcataatggagcatgctctcctcttaatcaagtttggtttctcacactttgtgcctgaggagcctgcgtgggtgaaagcaaatcgtgtgcgatatgtagctcaggcacaaaacgtctgctccaaacaacttttgaggagcatttcaaaatttgacggaaaactggattgagaaacatcatgcacagtttagcagttatcgctggttttgtagtttaggtagagcggttttgtatagtacaaagatgtacaaatctaggggtgtaatatcttgatgcatatgaccgttaagtgtagatattaggtgatcgccacctatcttaccagcaaatggtgaagaatgccctcaagtgtaagtcagtttttccccctttcattttaatggtctgttgagttgaacggaaactcacatgctgcaccatgtaatgtgctgtgggtgatttcgaagagtaagatggcaccctagccaacagatatcaattacaaaaaaataataaaaaaaaaggatc

SEQ ID NO: 162990 - DNA, 239 bp, Zea mays
  Clone ID: MRT4577_80220C.1
aggatcaaaacatattatcgggggccaattaatttatgggtacagcaaatgcaatcgggtcaaccaacatgcaggtagacacaccttcgtacatgagcacaaaaactgaccccaaacatgcagagggagatagcaaactgaaaaactttgttttttttttttttacacacaccacaaaatacctatgtttgggagccagctcggcctcgcttattattggtcaacccccaccacaagct

SEQ ID NO: 162991 - DNA, 443 bp, Zea mays
  Clone ID: MRT4577_80221C.1
ccgggtgtaaatataccaactgttgttatggctgtgatgccttttctttgcagctgatggtgtatgttacttgtaaggttgtccaaatatttgtatttattaaatcattgtttttactggagggacttgtgttactgtcattttaattaaaacattcctagtttctggttactttgcaaatttgtattctgatattggacatttaattaaagatgggtttgagtaaagctgttaaaatatttttccatctaggcaagcaccattacccggttattgttttgacttaagacaattaattgatcatgacaactttttcatgtattgttaggaaacttctgaatgatggcagaagagttcgtacttattaggaataaaaaataaaatttcaaacaaaaacaaccttcaaaaatgtgcggacttttgtgcatgcttttaatgcttgg

SEQ ID NO: 162992 - DNA, 1021 bp, Zea mays
  unsure (1)..(1021): unsure at all n locations
  Clone ID: MRT4577_80222C.1
ggggaaaagaaagacctggnaagattttgaggagcgaagagaaagccacaagcaaggctctttgatgctacgatatatgcatcaaggcaggaggatcatctaaaggcaaaaaaagaaaaacaagaaaaagaaaaaacatgaattcaaagatgatgacttacttgatcacaggccatacagaaatgacaggagggtacctgaaagacatcgagcactaaaacgatctagtccagctcctgtggttggatatgcatcatctgccaagcgtcgcagaggaggagaggttgagctctccaacatattggaaaaagtagttgatcacttgcggggtttgagtggatcactgctgtttttaaaaccagtgacaaagaaagaagcttctgattaccttgatatcatacggtacccaatggatcttggtaccatcagggacaaggtgagaaagatggtgtacagaaacagggatgaattcaggcacgacgtagcacagatacaactcaacgcacacatatacaacgacactcgctatcctcacatccctccgcttgctgacgagctcatggaggtctgcgaccatctgctttacgaaaacgcagatctgctcaccgaggcggaagatgctatcgagtagcaatataaaaagctagatttagcatttggatcttgctatatcctaacatagatgatgtatctatcttctgatctgtaggaggggaaaaggttgtacattttttgggcctagcagcaatctacatgtgatcccgaatccagccagcttctgttggtattgtgttgagaggtagtggaagtacaaaatgtctaggttagccactcaatggcctcatgttgtaaaaatgtagaatgtaatcatgtccatatacatggcatatatcggtccaataaaccgattgtgttgcagtatttgatatgatatggaatggcgtttcaattgcagcgtgaaaaaaaaaaaaaaaaaaaaaaaaaaaaaaaaaaaaaaaaaaaaaaaaaaaaaaaaaaaana

SEQ ID NO: 162993 - DNA, 2451 bp, Zea mays
  Clone ID: MRT4577_80223C.1
ccggccgggaccgccacccattgaaaagcagagcggcagactggcagaggcaggcgctctcggctctcctcgtggacaaaaccaccggctcccgatatccaaattggaacaggggattctgaacttggggtttgttccggggaccgattctggcatcggcagacgggatgtcagcccccctcgaccgacttgctaggccatgttttgaagggtttgtacataacgatgaaaggaaagagagcagatctgatgcagacaactcagaaggagataagaagactaagatcggatctttcaagaaaaaagcaattaacgcggggaacaaattcaggcattccctgagaaggagaagcaaaaagaagaccgaaagggggggattccatcaaggatataagggacattaaagaacttcaagatgttgagacatttcgacaatgcttaattgacgaggatttgctgccgccacagcatgacgattatcacatgatgttaagattcctaaaagcacggaaatttgatgttgagaaagctaagaatatgtggtcagacatgcttaaatggaggaaggaattcggggttgacaaaatagaggaatttgagtacgccgagttagatgaagttaaaaagtattacccacaattttatcatggggtagataaagagggaagacctgtctacatagaattaatagggaaagttgatgcgaacaagctagtacaagtgacaactctagatcggtatgtgaaataccatgtcaaggaatttgagaggtgcttccagataagatttcctgcttgctccattgctgcaaaaaagcacatagattcgtcgactactatttttgatgtgcaaggcgtgggtttcaagaacttctcaaaatctgccagggaattaatcacacgattacagaagatcgacaacgataactacccagagacattgtgccagatgtatataattaatgcaggccaaggcttcaagatgttatggagcacaataaaatcattccttgatccaaaaactgcttccaagattcatgttcttgggaataagtatcaacataagttgctcgaaataattgacgagtgtgaattgccagaatttcttggtggcaaatgcaagtgtattgaaggttgcgaaagatctgacaaaggtccttggaaggatcccaacataataaagagagtcctcaatggcgaggcgaactatggcaggcaaattgtgaccatatccagcactgatggaaggatagtcagttatgcttggccagtgcacccaaatagaaaaggcagtgatgcatctgccgagtctgggtctgaagtggaagacgtaacatctcctactgcatcaaggaacctgattacacatcctattttgacccctgttcacgaggagtcaaaattgtcggcacatggttcttcatctgttgttcatgcttctattggagaaaacattcctgttgtggacaagattgttgatgatggatggggtagtcccagatctagtccacaagctgcttcttcaggttcattgtccctgaggaatttgcatggcacatttcaaggactcagagctcaaactatcacatggctgacattcttgatgatgaccctttttgccatgctttgttctgtcccaagcaagatggctagaaggatctccaaccaatctggtaagcatgacgactatcatgttaagtatcctcaagagcaggagtgcaaggaggagtttcgacctccatctcctgccccatcctacacagaaaatgatgtgatttcatcgatgctgagacggctgggtgagttggaggacaaggtgcaggtgcttgaaacgaagccgtctgagatgccgtttgaaaaggaagaattgctcaatgcagccgtccgccgtgtggatgcattggaagctgagctgatttccacaaagaaagccctttatgatgctttgatgcgacaggatgagctactcgcgtacattgataggcaggagctgatcaaatttcgtaaaaagaagttctgcttctaagatttgaccgtggagcagctgttcatgtccggagccgtttatgtgtatattggattgcggctaatatgtagtagaatgtaatgtgtccatctttagaagtgtgtaaagtatagtaggaaagaaaataggtgcgttgtggtgtgcgcctctcctccccgaggtgaatgtgtggtctagcacttgtgtgctaccctaaattgtaatcttggaagttggtgtatagctgattgcgtgctaatacgtagttgtaaatgaaatcgcatgtgctcgtgtttacatgaaaaactaaatatagcagccccaaaaataaaaccggttatttggttaaaatcgtctgaccacatattcttagctttctcaacatcaaatttccgcgccattaggaatattaacctcatgtcataatcgtcatgctgtggcggcagc

SEQ ID NO: 162994 - DNA, 966 bp, Zea mays
  Clone ID: MRT4577_80224C.1
cccatataggaccagagccaacaacagacagatttgtagttgacatggtaaactgtgcagtatttaagacttatctttgtaggtgccataggtgcatcagattattcaaacttgtgattgtgatttgagaagttttgctgaaaacatgaagcaatgcaacatttgtctgaagagtttgaatatggagtttacatctttagttacctatggcattcctactaacatgttggctttgttgggaagttagctaatgtgaaagaagcatattgcacaaatctcaattcggcacgaggtttatgctcaccattcctaggttttatgcaaaatattgcctgtgaagcttgtaattgtaatggagactacctatttgacactcttcgaccaatttcagtttttttcagcctagaccaacgtactgcagtataagcagtatgaactgcctgtgtaccagctattacattagcacatgttctgtacctatactttcccctttctgtagctccagttaacttttgtatgcttgccagtcaggatctgatgaaaggactattcctgggaatactattgctgttcaagctgacatgccttttagcggtcttacaacatttgggactgcatttttatccaagtttgagtgctctcagatgcgacatccactgctagagcatatcacatttgttgacacacctggtgttctttctggtgaaaagcaacgcacacagcgcagctatgatttcactggtgtgacatcatggtttgctgcgaagtgtgatcttatccttctcctgtttgatcctcataagctcgatatcagtgatgagttcaaacgtgtcattggatcattacgtggccatgatgaacaaatacgcgtagttttgaaacaagcagaccaagtagacactcaacagcttatgagagtttatggtgcattgatgtggtctctcgggaaagtattgaatacacctg

SEQ ID NO: 162995 - DNA, 279 bp, Zea mays
  Clone ID: MRT4577_80225C.1
gggcgcggggtttttttagcattacaaagccccgttggggccacaaagggtacaaatagagctttgagcacggggacttaacgctttgggggttaaattaacgcaccccacccctgttgggcaggggggacccaaaaaatgctgagcttagagagaaaatgacccacgattggggggtcccctgggttgagaatgggccccaccaaaaaggggggggggggaccccaaaacaacctgatgaggggggaaaaaaaaaaagcctttttttgcggggcccca

SEQ ID NO: 162996 - DNA, 120 bp, Zea mays
  Clone ID: MRT4577_80226C.1
ccactcgtacgcacacacttcctcaaattagcatattagatccacaacttcatcatacgtctctttgaaatccaacattaccaatcgtacaattcaaactccaacttactcctatactat

SEQ ID NO: 162997 - DNA, 1293 bp, Zea mays
  Clone ID: MRT4577_80227C.1
ggcgtatcctggtaacttatctcccttgctgcataattcggagaactaaatggaatgcctttggtttaccatttgtgttagtaaattgtgtacactgcgagaaagatgaagcaaaacctgcaaattagaggactcggttgttcaaagcattagcaaaccctgtctcgataaaagggcacaacctaaatgctctatatatagcagtagtatcctgtactcaccattatattgagtgataaaaaaaacataacaggaactctaaacaccaagtcaaatcagtctgtgttgaatgtgtcattgtctcattatgttagttacttagttagcaaagtctatctgacatatgctatagcagtcgtgctgttatttctgaatttcatgctgcccatcttccagctgaagccctttggaggcaaatctagttctgtctgatctctgttatggcctaaccatgaccacctgaaaatttggaaagtccaagtcccaacgtgagacataggcacgaatgactgcagaagattaactgattaagatgttttattttcaccaagctaaccgttttgttttatgcaatgccttatatcttgccatcttgcccatcaacattccatgcagttcactgatggcatgcactccttaaatgcttttctacttagacacacttcacaacatggtaagttcacttgcaagttattttgattttgtgcagttggcttaattacttatgacgtggtacatttagggacgaaactgtgaccctttctttgccttttaaggtggccgtacccatttctggacctttcatcatctggagctcctctatggtacctcggcatggccatcgctcatgtcccctgcttcttcctgtattggttgatcgtcaaggcgaagcacacttatttccaacggatgttcccacatgcttatgttagggcaacatagatccatttatctaatcacaggtcaggataaacatgtataaataaatatcggtatcatactacttctgcacctgccgggcttaagtgtacacctgtatagtctcgtgaatccacagcccctttgagatgggtatgagacctgagaacacgccaagaccggcatgttgatcaatgaatcgcagaggttcactgtcacctgcaaacagagtcttgtcatgtcttgctccttctcttgtaaagcatgtaatcagccgcaagtactgcatctgttcgaaccctaaacccttaaaatactgcagctgttcgaatgctgctgtagttacaatctatccgaataaaataccgtacacag

SEQ ID NO: 162998 - DNA, 196 bp, Zea mays
  Clone ID: MRT4577_80228C.1
tttgggtcgacccacgcgttcgttctatggcagcaatgagaattcatagctcctttgtttatgatcggtcggacgagcctatgctccaagaaaacaccgtccgttccgggccgtcggtatggtggcggcaatcgacgtggtgttgtggggctgggaattctggcggtcgtggccatggacaacaagaggtcttatt

SEQ ID NO: 162999 - DNA, 789 bp, Zea mays
  Clone ID: MRT4577_80229C.1
cttcgccatccctctctatcccccgccgccgcaccagctccgcctccgccacttaaatctccggcgaccgccgaagctccagtgaccgtcctcttcaccctctcccggccgccgctatgaggcgctttctcacccatctccaccaccactcccaccgcctccgcccatccccaccactctctcgtatccccacaaccaagaacaacctccctttccttgtctcccgtcgcctcctctccgacgacgcctctcctccggccgccgcgccgtcgcctccccctcctcctcctccggccgccgcgccaccgcctccccctccgccgtcagccatcgacgtcccaaacgaagaattgaagcggaggttggaagcttactataaggtggaggatgagtcggagctatcgtctgtggctgtggctgttctcgagcggaatcttgcagatgcacacagtgagaccgatgatgaacttatcgaggagctgcgcgacaggccacttcctcaggtccatgatcgggactttgaggctgactttgacgagatgtatgagactgatgaggagcttactgacctgtacaacgcgaggcagcatgttgagaacaagatgaaggacgataagtcatctaataacatgaatgacaccaagtgggatgaggagatcaagaaagcagcagagaagggccagctgagtaacatgaaggagtgtgaggatatcctcgaggacatgctccactgggaacaagttactacctgatgacataaagcaaaaggcggagggccaatctaaccgg

SEQ ID NO: 163000 - DNA, 426 bp, Zea mays
  Clone ID: MRT4577_8022C.1
ccgggatagcacaatgatccaacagtgcccgcgcagatgggattttagacatcctgcgcggtcactcttgcgttgcgatgttccagctccttctgtcctccatagcggtgtcaccgttcgcgggcgccgcactcgtggacctcaagctgggtaggtacatgacatgccgcgatgcaccgtacgcggcggacgatactcctgctcctagtcccgactccgcctcatccttagactcgacatcggaggagcactacatcaacaatgcctacgactagacgcataaacctgattattctctggaataactaacagagactaccttgcaccctctggatatataatcatgaacgtgcatcacagtttggaatgcgactggaaaacacatgccatgtgcttgcctattataggacatctgtttatttatta

SEQ ID NO: 163001 - DNA, 321 bp, Zea mays
  unsure (1)..(321): unsure at all n locations
  Clone ID: MRT4577_80230C.1
aattgacccacgcgnccacgcgttcacgaaccctcagccgagttttaaaccttttaacgcacccgacatttgggggtactgcatatttttaagggtctaaggaagattactacccagacccccgcatcggatttaactcacgaacccacccctgacattaactctttcttcaccaacagagatatagtcttcgtattacgcactggtcaaaaacaaatgtgctatattatcctcagccggatctatcaaatttgctgcccatggaaaatattactccttcttcttcccacatgaagtaattaccaaacttgttaccaccac

SEQ ID NO: 163002 - DNA, 274 bp, Zea mays
  Clone ID: MRT4577_80231C.1
gtacgcgtcccgttcataggaaggactttttctaagtctgtaaccgaagaggaaatgatgggatcgtggctattggaacctttctcaacattcttcttgtgaataacttctcgaatggtgaggtttgacccaagacaattcatgttccatctactgtgacgcttgcaactattgatcttgctatgaaactcaccaattaagtgcatgtcactattatcttatctggtactctgtacttatgtgctagctcccgtgattgcgctgcaatgccccc

SEQ ID NO: 163003 - DNA, 263 bp, Zea mays
  Clone ID: MRT4577_80232C.1
gggggagggtgtgagagcagttttcggtagtcgttcttcagttcgaggcttgctcgtggactccccgcagcgtccagttgggggggagccgattcagtcatggtatgctttgtcggtattctgctgatgcgatggatcttctccaccgactctgctgcgcccacaactgtcgtcataggcatggaacttcgcatctacatgaggtatcacttcggttgtaggctgatgagaggatcatttggggagatctaccacgacaacgg

SEQ ID NO: 163004 - DNA, 218 bp, Zea mays
  Clone ID: MRT4577_80233C.1
aatttccggtctaagtctatccctagatgggcaccgtccatgtcgtccagacgtttcgcatccatactccttctgtccacctgggtgactgggcccttctacagtatatgcttcttacaactcacgcggcaccatacctgcgcatcgcacaagaaatccaattcgctcgcgcacaggaagactgctctcgagagccgcatgatcatcttctcccgaac

SEQ ID NO: 163005 - DNA, 820 bp, Zea mays
  Clone ID: MRT4577_80234C.1
cccacgcgtccgctctttcccagccctctctctctccctctccacccggccgccaccatgtcaggcctctacagccagggcttctcccctgcaagaaccctctccccccagattaggagcaaccccgacgctgacagccagtacttggccgagcttctcgcggagcatcagaagctggggcccttcatgcaggtgctgccgatatgcagccggttgctcaatcaaggtgagattgacttttttttctacccctcgctcgctcactgtggctgggccaaatatttgcaatgttgtacaaggaatgtggctccaactcttcacggtgagcccgacgaggctgcgatggcgaaagagagcgcctattcggaggatgaggtggccccaaggaataccatgggagacgtgcctctagagtaatacaagaacgaatagcacattgtgtatgatatcgatggaagatcaagaaacatgataaggaggggcgcattgaggcctacctcaggaacgcacgtgatgccaagaattgacatctcagatgcaaatgtggggagacggtgcctcatcaatgacgagtaggttgattctctgctagctagcggcaccattgctcaccacaactggtttgcttgagcaacttaatgtcactctcaagaggatccccatttccaccaacaccctgaagcaccacacaagctttagaaagtcggaattgtactccgtatacataaattaccatgatattatatgtttctattctatgttgattctttagaaataatatatatgatattgtaatgtttaaagaaaaaaggagaaagat

SEQ ID NO: 163006 - DNA, 219 bp, Zea mays
  Clone ID: MRT4577_80235C.1
agagctgacggcatgcacgcgtcgtgctcgatggtgggctgcagagaccactaaaacctttcgaaggccacagaaagtaagcccgaccagttgatggaaatgaatactgagcttgccgatgtttgagccggttattaaatacattgcaaggcgtaataaaatccgagtatataccatgttgacccggatgatacgttccatttttttgcagacactctg

SEQ ID NO: 163007 - DNA, 645 bp, Zea mays
  Clone ID: MRT4577_80236C.1
cactcctatgggcgattgggttcatcgaggccggccggaaatgtcaccttcttttcctcactatccctctctgttccctcgacggtatggcctctccttaaccgcggatgccgatctctgccaccagcgcacgggacgctagttgatcacgtgatatggaggactagagccgagtcgaccacgagatgttgttaagcgcgagtttcttcgtaaggtcgatgctgatggataaacttaaggatggatggcctgatcaagtgccaggacaaggaagatcatcaagatgatcgtcgtctaaccaacactgacttagtgttattccaggttttactttgcgctgctgctgatggtggtaagtgccggtgggctcggccttcttataagtctaagatcatcgatgaacggaggaggaggttgaagtctgatgtggatgcgatgttgacatgcattaaagattgcgaggatgatgaagcaaggatgcaacacatggtgtatgacacagagcttgaagaaacatttgaaaatctttatattgattaatctctttgtgaccatttgcgcaatgggactgtaatattatgcacttggactttggttgttgtaaagacaatgaactttttaatgagctgcgctgtactctttttt

SEQ ID NO: 163008 - DNA, 819 bp, Zea mays
  unsure (1)..(819): unsure at all n locations
  Clone ID: MRT4577_80237C.1
gccggccgggcttccggaacagcaacgctcgcgctcttgtcgctcttcccgatccggacgggcgaggtcgacttcgacttcgacttcgacttcgacttcgacttctcgccgtccctcatccgctacaagagcggccgcgtgcgccgcctccctcatggccacgtccagggaggacgccgtcgacgccggagccggcctcgccgcgcggctctacatacccagcgacgtcctcggcacgcccgagaagctgcccctcctggtctggtctacttccacggcggcgccttcgcagtccactcggccttctccggcgcgcgctcccgctttctgacttctgagcgcgctcgtggcggctgcccgcgtggtggccgtgtccgcggactaccgcctcgcgccttcatcaatcctctggctttgccggcggaggagtgggcgaccaccccttcatcaatcctctggctttgccggcggaggagtgggcgaggctcggctgccggcgtgctctggtgaccgtggccgagctcgacacgatgagggacaggggccggcggtacgtcgacgcgctgaggcctgagggggagcgcgtgggccggggaggaggctgttctgtacgagaaccagggcgaggcgagggacacgtctacttcatcgacaaaatcagtggcgacggcgacaaggccaaggcggagatggcggncgtcgtgtcgttcatccagcagagcggctaggtagtactgtagtangataggatccatctgtgtcgtgtcgttctcgttcatcaagccaaggggtttcgtgcttggattacgcattcccatt

SEQ ID NO: 163009 - DNA, 707 bp, Zea mays
  Clone ID: MRT4577_80238C.1
ccggccgggatggcgcctttcccgctccgccttctgcggacggcgaccctgccgcgacgccgagaggccagcggccaggcgagcagactgcagtgcccccctgcctccccgctgggctgggaagaggatccagtggcaatggagggcgcgcaagatcttccccggcttgtcgcgtcccggatcctaccggcctaccactaccacttccaggtccagccagccattcgatgtgacgtgatcgtatccgatctttccccgtgccgtatcacgtccgcgtgattttggatttgtgtctcggcttttaggaggccgtccgcggcaactttcagtggtcagaagctgtagaaagccgaaacaagggctctgtctcgtcttgctggataacccgggctctcttgtgactggtcaagctccatccactacatgtggtggcggaggtatctttcgccaaaatagacggaaagcggccttttgattttgccactagaataccgaccacgccttgcaaccaatcatactgtagtaagtaatagtatcacggcggctttcgatggcatgcatgtgtgtggccatttggaacgtgggccccctcgtgcagtgctaggggcaagttcctgtacatgcacggggctatctggagacccagcaggcggccacatttgaaacatgtagatttttttttaaaaaaaaaatattttgcgagatcc

SEQ ID NO: 163010 - DNA, 826 bp, Zea mays
  Clone ID: MRT4577_80239C.1
tcgaggccggccgggaggacttgccctttgcttgatatccgacctccctcatctctgctccatcacacgatactagcatagccatcacatctccctcccgacaagatgaggttctcttttgcatccactctcgtcgtgacgcttgctgcgtcggcatcagccaacagctggtttggaagcactgttctacgacaaatggcatgagacggagcttgagcgctggctcagtgaccacggcattccccaccccagcccttctgaccgcaagagcctccaatcgaccgtcaaggccaactggaacgacaagactgtttctccctacaccagctgggacgctcctacgctccagaagtacctgagcctcaagggccagcaggccaagaagggcaccgagaaggacgcaaagagcctcgtcgagcaggtcaagctatactggactgagactgaggactctgcaaaccaggcctacggcaatgttaaggactggatctttgacacctggtccgattctcagctcaaggctttcgccgacaagcatggcatccccgtcccccagccccgccagcgtgactcccttctcgctgccgtccgtgacaactaccagtccgccgctgaaaaggccaaggagaccgcaaactaccctggcgactggctctacgcttcatggtctgactctgatctcaaggcctggtttgacgagcgtggctactctgttccccagcccaacacccgcgactccatgattgctgcccttcgccgtcagtctcgcccttgctagcctgcagtcccaggatgcctacgcctctgtcacttctgctgctgccgc

SEQ ID NO: 163011 - DNA, 282 bp, Zea mays
  Clone ID: MRT4577_8023C.1
attcttttcctttttattaggggccaaacaatggggtcacatttatatatccaagcgggatacaccaaaatatgcgtggcgagcgacatcatgcgttggacattaaatacaattctcaccgtaaggagaaaaccccaactgaaaaaacgagttctgcctatccacttcaccatacgtctcctgggatttaacatccctgcatgagctccaaaaacctgacacaaactttcacccaaccaagcacacatggctcttctaaaaaatcccgaggaaaataaggta

SEQ ID NO: 163012 - DNA, 162 bp, Zea mays
  Clone ID: MRT4577_80240C.1
aagacgcgttgggtttttttttgagaactggctggagtcattcgcgtgtacattaaattttacacttacccttgaaaatgagtatgcccaacttcggggctgaggaactgatgaaaaaggaagattatcctttacaaaactgatgattttactttcaattac

SEQ ID NO: 163013 - DNA, 247 bp, Zea mays
  unsure (1)..(247): unsure at all n locations
  Clone ID: MRT4577_80241C.1
cactaacnaacgaactcttgctccgatttctagctanctgacgtcnactattgcgccgccgctntataacacgagggcgccgcatgtagtggccgtgctggtggtggtggcgctgctggcttcgtccgcgtcggcggcgatcacctgcgggcaggtggggtcgttgctggcgccttgcattccgtacgcgacggggagggccagcgcgctccccgcgtcgtgctgcagcggcgtcaagagcctcaac

SEQ ID NO: 163014 - DNA, 243 bp, Zea mays
  Clone ID: MRT4577_80242C.1
aagagactcattgcttgggaaatgctttcttcgtactaaaatttgattcctttttttcttatgaaaaacgaactcagtttaaaagtatttttagctcgtatgacttgttttcattcattaataataatttgaaataaaactaaggaaatggaatcttaaaagtctatgacagtgtaactctgacagtctcaaaatgacctgataaattgataagacaaagatgagattattggggctgttcat

SEQ ID NO: 163015 - DNA, 130 bp, Zea mays
  Clone ID: MRT4577_80243C.1
ctttctcgtgggatggctcgacgttgtgctgcaccgatgagcattgagctatatggcgtcccacggctgtgcggaagctcttggctacaaaagaacgcgacatggtgcgcccaccacatggacgacgcca

SEQ ID NO: 163016 - DNA, 434 bp, Zea mays
  Clone ID: MRT4577_80244C.1
ccggatattttcggatcagcggcgaggcaaatgcagtcgataagtgtgtggttgttggtgatggtgccgtcggaaagacctgtcttctgatctcttacacaactaacgccttccccggcgagtacatccccacggtgtttgacaactactccgccaacgttatggtcgatggaaagcccatcaaccttggactgtgggatactgccggtcaggaagaggcgaccgtctccgtcctctgtcttaccctcagaccgacgtcttcctctgtgccttctctatcatctcacctgcttctttcgagaacgtatccgccaaatggcacccagagatctctcaccactgccccaacaccctagtcatcttggtcggtaccaatgctcgatctccgtgaccacaaagtcactttcgacagactgcgggagaagaaccaaccc

SEQ ID NO: 163017 - DNA, 517 bp, Zea mays
  unsure (1)..(517): unsure at all n locations
  Clone ID: MRT4577_80245C.1
aaaaaaaaccaaaaactccgggccccatccgtttaatttttggggtaacaacaaccacaacgacctccgggggggggggctgttttgccgtttttaggtgctccctgacccccaggggggagcccatttttttaacccccattgatccgggcaaagggcccggggaaacaaccgcaaatttaagaggcaaaagcttgggaacttctccgggacctagaacattaactaaaccttctggaacaccccagcaaacggccaagccggaagaaatttagggaaaaaaaaacctggtggttacccaagggggggggttttcacgggcctaatttttaaaaaaaaaagccccgagggggggggggagtttttggggcaaaaaccaggggcctccacaaaggggggaggggtggggaaaaaaccggccgaccgaccgacgggggaaccaaccaacgantaaaaaagagggtttggctcccaacctggggcccccttttggggggggccatcccttggcgtggga

SEQ ID NO: 163018 - DNA, 384 bp, Zea mays
  Clone ID: MRT4577_80246C.1
attcggctcgaggtgatccacgcagaggtttaacgcatgaacgaaggcccgtgcacagagggagctaccgggtctatcgatccatcttgactggtgcgacatagacaccgtgtccgagcctaacgcgcagacggagcccgtaccgaacaagagcccacactctgttcagtcaggcagataatacacctcggtctactactctaacgcatacggaaagccacagtgggacggaactggctccggcaccaccgtcgactacaagttgtgggccacctgctctgacaggggaactggagtgaccatgaaacggaagatgaaaacctactgttctgagatgcacgtggactaggaaaattatccgccgggggactccaaacgcgctat

SEQ ID NO: 163019 - DNA, 491 bp, Zea mays
  Clone ID: MRT4577_80247C.1
ggttgtgtatatttggggagatataatggggggtagtatataatttttaagtacttggggggttggatttaattttaaaaaaggtccactcccctttaaacccataaatttagattcgccccatttaaacaaatagtgggggggttcggacacacccatttctaagaaggtctttaaaaaaccttccaattgacaaaaaaaattcccccttctacaaaaccttggcacccagcgttttaaaacccccctgaatttttctgcccaatggtcattccccaaagggtgcctaaagatccccccccaaaatggtatagtgtactattttcaaaaattttggtgaagaattgtaatatccaaaaaataaaacccccaaaaaccccccgattaaaacccctgattggacccccctccctaaaaaaaaaaaatccccgaaaaccaccctttttaaaaaaaaaaatggccgaaaaaaaaaacaaaccccaaactttttt

SEQ ID NO: 163020 - DNA, 285 bp, Zea mays
  unsure (1)..(285): unsure at all n locations
  Clone ID: MRT4577_80248C.1
cccgaatgttttgagttgcttggtgggtatgggcttatggctgtacctggagagcatagataccccggttgctcatgtacatataataataacataatttggcaacgagtgtgagtcgtttggagattgtgtgcgcacttgtatctgagtatggatctgatggtggtacttgcatagtggggatgtgcatactgtttcgacgccatgtgtgtgtatggggcacctgataaaaaaattactgttgattcccaaaaaaaaaaaaaaaaanaaaaaaaaaaanaaaaa

SEQ ID NO: 163021 - DNA, 444 bp, Zea mays
  unsure (1)..(444): unsure at all n locations
  Clone ID: MRT4577_80249C.1
gggggggggggggtttttttttaaaaattttttggggggggagggaccgtacatacataaacctgctgaaatacactcttccaaatcctgcttcaaatcatccaaggcccaagccctcccaaccaacttttgccttttttcaaaaaaacaatnggcggggggggggggggttcatttacaancctcctacttacatnnatacaactnnaattaaattttacanttcacactattcccntcaaacccanaaatcacatcccaatncctcnnaatnntaaaacctcancttctccatccatttcccttncaactccatctccccccacctttatatnnnatanatattnatccaaaccaccttcaccataaaaaatcttnnctccatanccannttnntccactnatcctactncatcttcancaacaaccactacatcaattttt

SEQ ID NO: 163022 - DNA, 542 bp, Zea mays
  Clone ID: MRT4577_8024C.1
ttctactaagaagttggcatttacaggaagttgatggtgtgaaagtccttcaacttgaaactgcagctggtgcagctattcgtgtatgcaaataaccccctgttccagtactcagttttccccccatttccccctaatattcgcactctaatgcttttgttacttttaactagttctttgacaaagcgattggaattaatgttccccgctcaagatttctcccagtgaaggctacatctgatttattgcttgggcaggtatttctcgatgcatctcaatgttttgttagcctgatattgtaataagcctagttctaagctcaattttgttgatggctcaatgctatgctcatttttgtttccagtctgatctttacaccttggtcgatggctttgtcatccgcaacccatccagaacgaatccagctaacccttcgattgagcttggacccgagttcaagaaggtaaagcagtttgtttccaagataatgaagatacctttcataatagagttccatcagcactgagaatgttccttcacaa

SEQ ID NO: 163023 - DNA, 199 bp, Zea mays
  Clone ID: MRT4577_80250C.1
ccacgcgtccgggcataaattacttttgcctattatttcaacaagcatacacgcgacactagcatgactttatgagcacatgcttaaaatatgccagatgaactgctggttgtaaatgtgagcgtggtgataacttgaagatcgaagttgcagggggaaaaaaaagcataaaaaggaaaaagggtgaaaagaaggggga

SEQ ID NO: 163024 - DNA, 154 bp, Zea mays
  Clone ID: MRT4577_80251C.1
acaggctgaccccaccacagctagcgaaaatctcccgatcccctctagtctccgaaagggaagatgtctgtgcacaaaaagggctggaagggcctgttcaatggcagacccaaaccccaccggaaggtgctcccccacaacctccaagggatca

SEQ ID NO: 163025 - DNA, 438 bp, Zea mays
  Clone ID: MRT4577_80252C.1
ggggaaaaaaaaaaccattttattttttcaaaaaggattaaaaaaagaacaccttttttggcaggaggggggggtttaaatttaaaaaaaaaaaatttttctaaagaaaaccataaaaaagctgggaggggggaaattaaaaaaaaattttattttttttgatcagggggggaaaattaattcctttttgcctggtggccaacaaaaaagggtccaccttgcccaaggaaaatggcttcctaggaaccaatattaatcaaactggggccgagcgggcccctttaacgggaagggtttttggaaccccgggacaggggttcccaaaaaaatttaaaaaacctggcaccctgcagttgctctctcagaggcaagcctcttgaaaaaatgaaaaagccggagggctgctgaattccccaggggggggccttccccaggggc

SEQ ID NO: 163026 - DNA, 429 bp, Zea mays
  unsure (1)..(429): unsure at all n locations
  Clone ID: MRT4577_80253C.1
gaggnggaggaagcggtggccatggagtctcagactctccgccacangancgaggacgacggcgccgacaacggcancccgcnccccaacgncaacnccagganccncncnaaggncancgagnaccgcaacagncacgnccacgccgccgccaaacccgcngacnccgcngccnccgagggcggcgaggaccccaagagcngggacgcgaagnncgncaaggtggaccaggctactctcnncgaccncanccnggcngccaacnancngaacancaagggannngcnggaccngaccngccagacggnngcngacangancaagggcaagacnccggaggagaaccgcaagacanncagcancaagaacgacnncacccaagaggaggaggangaganccgcanggagaaccagngggccnncgagcg

SEQ ID NO: 163027 - DNA, 364 bp, Zea mays
  unsure (1)..(364): unsure at all n locations
  Clone ID: MRT4577_80254C.1
gggcagggaggggtgatatctccgaacaaggaggtacaaacctcgcatttggctatgtctagacagagaaaactagtagcctgacatatccgtgtatcaatgggccctagcccatagaacaaaaccaatcgaagtatccgccgggcgcccacacggaagaacatgcactacatgtaaacgcgcgtcgcgtattcagtaatcattagaaaccagcaaaaagatactgagcggaaacagacaaaaagctctcatgtcatggagagagagatgacgctctatactcagggtaagaggccagncacaggctactgtacttacaaccacctggagagagagggctacttattactggaactagtggggc

SEQ ID NO: 163028 - DNA, 491 bp, Zea mays
  Clone ID: MRT4577_80255C.1
aagcaaaaacccggcaataacaatttttagctttaacaagcaatccaattttggacaggttttttttaaaaaaaacctttgggttcagttcaggcggggcagcttttggtggggctttaacaatagaacattttttggccccaacatgggtaactaatttagcacttgatctccttaagaccctgggagaaataggggaatggcggattaggggccccatccttggaataggggaataccacgggcgctttgtcctttatgctttcaccaacaaaaaattgaagggccttcaacttgctaaggaaaaacttgggtgccccctcgacaccctttttgaactcatccgttttttttggctccaacacaaaagggagattcttgagggatttttttatggaagaaaaaatgatttcttgtcaaaaggagggtgctcctgtaaacggaatgggtcaacaatatcaaccaccttcacgggtgggtaatcaacgctt

SEQ ID NO: 163029 - DNA, 465 bp, Zea mays
  Clone ID: MRT4577_80256C.1
gggaaaaaagggaaaccaacttttttcttggggggcaaaaaaaatacaaaacgggccctggaagcccctttccaaaaagtaaaagcggcccctttttttggccacttttttaaacaaaaaaatgccccccaggtataaagggggttcccctttgggggccccaaactgaaaaaaaccccccctgcctataacttacaaacagacaatttgggggaggggcccattcggggaatttttttggttataaaaaccttccccctccttagaagtgggggccacacgtttgggtatccggcccaagaacccggggggggaaccggtcttagccaaccccccggacccttgggcggccccgtggggggacccgggggcggacccgtgggccaccccgggaattcgggcccggccccgggggggaaccaattttccttaaagggggtgataaaaggtggcgaaaaaagggaa

SEQ ID NO: 163030 - DNA, 661 bp, Zea mays
  Clone ID: MRT4577_80257C.1
ccggccgggaacgcttgtctcacacgctcagttcgacgagatactaccccagaaaagttacaccaccatcacacgtgaacccatacggacgaacccaatctaatcgagtggacgccgcatcaccgtactccggagtccttatcaaagcgcggccggagaaggacgggatctccggtagccgggatgactatcaagccggatttcgccgctgaacgcgatggggatacccactgatgatatctatggtggaatgcattacgagggttgcctgaagaagacgcccttcatgctcccggagctacggcggcccctacacgctgtctgctccgcctagtacctgacgcgaccgactgacgagctcaagggagatgtgaaggacgtcggcacggaccccgtggagcaaatggatctctgctctaagttcatcgacgacgccatacgcggtatacccgtaactgccgacgtcgagatcgccctcgactgtgacatcctcgtctgctggacgctccaccaagttcttggacacacaccgagaggacgagagtatctccgtcctgtagtctttcacagaaactttctcgcgtcattgtgacgaatacagcaaggcaagcgtctctaactgacatgcctgtcactgctgaaatggcacaaaagtgtggac

SEQ ID NO: 163031 - DNA, 1281 bp, Zea mays
  Clone ID: MRT4577_80258C.1
cggacgcgtgggcggacgcgtgggcgcgagcggccgctcgcgatctagaaactagggatcgtgctaattctacttctacttcggaatcgccgccgctcccggcgcctcggattgtcaactaccgcaggaggtcgcggcggcaggatcggtggtccagcgtgcgatggcggcggcgcctaccgtgcggggctacgggccagcgacgccgtcgtcgtcgtcggtggcgctgcctcggccgcgatcgcgggtgcccgcgccgctcgtgcccgtgacgacgcggcggggggcgccgtcggtgcgcctgcgcgcggcgggcgcggacacgcctccccgcggcggcctgcagctccagcggcgggaggaggacgaggggctgccggggaccgtgttgggccgaggggaggacgatgaggtgtcggagaaggtcggggaggagaaggtggagaggtggatgcgggagtcgatcgcggagatcgtgcggcacgtcggggaggcgccgttcctggtgcacctgttcagcagcggcgagggcgagcgcgtgacggtgcggcgggagcccgcggcgccggagagctggccggacgtgcggcgccggtgggggccaggcggggcgcggaggccggacgggatcatcctggtcgagcaggtggcctcggacggcggcggggcctccgccgcctcggaggcggcgcggcaggtgtgggggctggtggtgcaggcgcgcggcatggagcgcgcgtcgtgctacgtgctttccacctgccgcgtgcgctcgtcggccgggttctgcacgcacttctgcctcgcgcgggcgcagtgcttcggcgaccctgtcgagctccagctccgcaacgcctggctcaaccgcctggtggtgcaggcgcgcggcatggagcgcgcgtcgtgctacgtgctttccacctgccgcgtgcgctcctcggccgggttctgcacgcacttctgcctcgcgcgggcgcagtgcttcggcgaccctgtcgagctccagctccgcaacgcctggctcaaccgcctggccggccgccggtagccgcccgtcggcagctgctgctactgatactactaataggattcgatgctccaaggaccaaatgcaatgatgcctcctcttcgctggcaagaacgaggaagagaagcttgcagattggatttgaagcaggggaggccaacatatcttttcgttctcccagaattggatatcaattgtacagattattgattgtaaatttgcttattcaatcaagaagcagttcatcgagtcaa

SEQ ID NO: 163032 - DNA, 1356 bp, Zea mays
  Clone ID: MRT4577_80259C.1
tctttcttccgcctctttcgggctgccaacacggcgcaaatccccacaaccccaggccggcggggaggaggttcctctgacgtactgcagggacagtagggtcactgcacgcgggccctgtcgcacgcgggggccacgcggcagtgccctctccccacgtcagaggatctcgttccggccggcggacgggcggactcccacccacgaggccacgacccacctcctcgcgacgacgtgctcggctcgcttccagccacctggctcgctgcccgcctcggaatccccgccgcgagatcccgtcccccgggccgggaggatggaggtgaaaacggtaaaagttagcaacctttcattaaatgctttgaaaagagagctcacagagttctttagtttctctggggatatagaatatgttgaaatgcaaagtgaatctgaatggtcacaacttgcttatgtcacatttaaagactcacagggagcagacactgctgttcttctctcgggggcaacaattgttgatcgtgctgtcattataactcctgctgagaactatcagctgcctcccgaagcacacaaacaattatcgggagcaaacgtccctactgaatcagcagtcaggaaggcagaagatgttgtcagcagcatgttgggcaagggatttgtgctcagcaaagatgctctcaacttggcaagatccttcgacgagcgtcacaatatcctatccaatgctactgccactgttgcatctctagaccgccagtatggcctgagtgaaaagatcaatctgggaagggccattgttggcagcaaggtcaaggaggtggatgaacgctaccaggtctcagaactcacaaagtctgccttggctgctgctgagcagaaagccagctttgcaggctctgctatactgagtaaccaatatgtctcatttggtgcctcttggctaacaagtgcattcactttggtaacaaaagcagcaggtgacatgacctccatggccaaagacaaggtagagagagctgaggaggagagaaaggccatcatgtgggaggagaggaatgggctggtgagcgactatgcaaagatccatcttgacgagccctcttcatgggagcccgcagttctgcctttggaatcagtggatgaacagaagctccaggctgtctgatccacaaaaccgaatgccaatcgttgtcacacgttttctcttacttcggagaaagagtggcgctaccagcattgctgctctaaactactatgtgtgtgtgaatggagtactactgtacttgtgtctacttgagtactacagaaacagaatacaacttccttctttagatacagaatgatttaatatag

SEQ ID NO: 163033 - DNA, 616 bp, Zea mays
  unsure (1)..(616): unsure at all n locations
  Clone ID: MRT4577_8025C.1
gcttgggagcggacccacacgaactgctcaaggcttggaggaggtctagtaaggcgaacggactgcttccggccagaggtcccgggcggaggaggaagctgtggctgccggcggtgggacgccccggccgctcagcccccgggcactgctgtggggcgttcaggatcgggttcatacgtagtgccgcatcaagtagcgccttcatcactccagtgatctgccctcaatccgtctctcccactggcccacgaatagtgatggtagtgagttcctggagtgactcaagctgagctgaatgaccgtatggagagcttccgtaaatcaaatagggattggattggattgtcctttctctccagtgtcacaagttgtccacatttgtacaagttcccgcacaaccctcactgtattccagtctgcctacttctctgcatctaccgccatcaccaaccttctagccaccatcatctcctgcctggactgatgtagttctccccacatccnctctacaatccattctccacgaagcagtcagattgatcattttgcactgtaagtctgatcaagtcactccctgcttaaaaccctncagtgtctcattcacttaaaataaaat

SEQ ID NO: 163034 - DNA, 311 bp, Zea mays
  Clone ID: MRT4577_80260C.1
ccttaaccattttatctggggggttagggttatggttaaaacacaaggtgctcccatttcctgttcctcagcacaataatacgctcatgtatcatcaccaacacttcctatgaccttatatcctgaccatagaatgattcacacacggctcgcctaatcattcacctgaccacaagaacaagcacacttacttgttataaacccataacttcacacgtatcttttgtcccatggccctgtctatcttgctaaagatcctaccgctgcggatcgtcttgcctgatccatactattaactgacttggggattc

SEQ ID NO: 163035 - DNA, 1382 bp, Zea mays
  Clone ID: MRT4577_80261C.1
attgggtacctcgaggccggccggaataaaaacacgcgccccgcaaagtcgtcctctttcttccgctcgccgacacggcgcaaatccccacaaccccaggccggcggacggacgggcggactcccacccacctcctcgcgacgacgtgctcggctcgcttccagccacctggctcgccgcccgcctcggaaaccccgctgcgagatccctgtcgcccgggccgggaggatggaggtgaaaacgataaaagttagcaacctttcattaaatgctttgaaaagagagctcacagagttctttagtttctctggggatatagaatatgttgaaatgcaaagtgaatctgaatggtcacagcttgcttatgtcacatttaaagactcacagggagcagacactgctgttcttctctcgggggcaacaattgttgatcgtgctgtcattataactcctgctgagaattatcagctgcctcctgaagcacacaaacaattatcgggagcaaacgtctctactgaatcagcagtcaggaaggcagaagatgttgtcagcagcatgttggccaagggatttgtgctcagcaaagatggtccgggcttggcaagatccttcgacgagcgtcacaatatcctatccagtgctactgccactgttgcatctctagaccgccagtatggcctgagtgaaaagatcaatctgggaagggccattgttggcagcaaggtcaaggaggtggatgaccgctaccaggtctcagaactcacaaagtctgccttggctgctgctgagcagaaagccagctttgcaggctctgctatactgagtaaccaatatgtctcagttggtgcctcttggctaacaagtgcattcactttggtaacaaaagcagcaggtgacatgacctccatggccaaagacaaggtagagagagctgaggaggagagaaaggccatcatgtgggaggagaggaatgggctggtgagcgactatgcaaagatccatcttgacgagccctcttcatgggagcccgcagttctgcctttggaatcagtggatgaacagaagctccaggctgtctgatccacaaaaccgaatgccaatcgttgtcacacgtaattcttttgcagctcgccctatatatagatttattctttttcgtcgatgcagtggatcaaaacaaatgcgcttatcagccatagcgccatgtaaatttctgaaagttgctcccgtgttattaccaggttttctcttacttacttcggagaaagagtggcgctaccagcattgctgctctaaactactgtgtgtgtgtgaatggagtactactgtacttgtgtctacttgagtactacagaaacagaatacaacttccttctttagat

SEQ ID NO: 163036 - DNA, 1413 bp, Zea mays
  Clone ID: MRT4577_80262C.1
cattgccggcctcgaggccggccggggcgccgcgaaaaaagtcgccctcttcctccactcgccgacacacacggcgcaaatccccacaaccccaagcgggcgggcggacttccacccaccttctcgcgcggcgacgtgctcggctcgcttccagccacctcgctcgccgcccgcctcggaatccccgccgcgagatcttgttccccggaggatggaggtgaaaacagtaaaagttagcaatctttcattaaatgctttgaaaagagagatcacagagttcttcagtttctcaggagatatagaatatgttgaaatgcaaagtgaatctgaatggtcacagcttgcttatgtcacatttaaagactcacagggagcagacactgctgttcttctctcgggggcaacaattgtggatcgtgctgtcattataactcctgctgagaactatcagctgcctcctgaagcacacaaacaattatcgggagcaaacgtctctactgaatcagcagtgaggaaggcagaagatgttgtgagcagcatgctggccaagggcttcgtcctcagcaaagacgctctcaacttggcgagatcatttgacgagcgtcacaacatcctatccaacgccactgccactgttgcatccctagaccgccagtatggcctgagcgaaaagatcagtctcggaagggccattgtcggcagcaaggtcaaggaggtggacgagcggtaccaggtctcagaactcaccaagtccgccttggctgccgccgagcagaaagccagcgtcgcgggctccgctatactgagcaaccagtatgtctcggctggtgcctcgtggctaacaagcgcgttcgatatggtaacgaaggcagcgggcgacatgacctcgatggccaaagataaggtggagagggccgaggaggagaggaaagccatcatgtgggaggagaggagtgggctggtcagcgagtacgcgaagatccatcttgacgagccctcttcgtgggagcccgcggttctgcctctggaatcagtggacgagcagaagctccaagctgtctgacacgcagagaccgagtctctcgcacgaaattcttttttgcagctcgtcctatatatagattgttctttttcgtcggtgcactggatcaaaacaattgcgcttgtcggccagtgccgtgtaaatttctgagagttggtcttgtgttattaccaggttttgttcgtttctttcgttttggagagagtggtgctaccagcactactacactagactactctgtgtgaatggaatactactgtactttgtctcttcttctactactactacagaaacataatataacttccttcgttagattctttaaaaaaagaataatacaatagtgagttgtaagtgtgaaccacttgtgc

SEQ ID NO: 163037 - DNA, 747 bp, Zea mays
  Clone ID: MRT4577_80263C.1
cattgggtacctcgaggccggccggggcagacctcccggccctcgcgacaccgccgtcaagatgaagctcaacatctcgtaccccaacaacggcacccagaagctgattgagattgaagatgagcgcaagctccgcgtcttcgtcgaccgccgtatgggccaggaggtccctggtgacagcgtcggcgacgagttcaagggctacatcttcaggatcaccggcggaaacgacaagcagggcttcccgatgaagcagggtgtcatgcaccccacccgtgtgcgcctcctcctcggtgagggccactcctgctaccgcccccgtcgcgacggcgagcgcaagaggaagagtgtccgcggttgcattgtcgctctggacctctccgtcctcgcccttagcatcgtcaagaagggcgatgctgagatccccggtgtcaccgacgttgttcaccccaagcgcctcggtcccaagcgtgccaccaagctccgccgcttcttcggtctcagcaaggaagatgatgttcgcaagttcgtcatccgccgcgaggtccagcccaagaaggagggcgccaagccatacaccaaggcccccaagatccagcgcctggtcactcctcagcgtctccagcacaagcgtcaccgtgtcgcactcaagcgccgccgcgcagaggccttcaaggatgccgccaacgagtacgcccagatcctcccacagcgcatcaacgagggcaagtctgcccacgatgaggc

SEQ ID NO: 163038 - DNA, 172 bp, Zea mays
  Clone ID: MRT4577_80264C.1
cagacacgttggcatacgccttaccaatcgttcatacacgtactcataatttatcacgggggaaaatctagatgccttggatgaagctaactaagatttgcatgacaaccctttcactgatcaagaacctgtactatggaagaacacataagatttcttaaagaaatattcc

SEQ ID NO: 163039 - DNA, 461 bp, Zea mays
  Clone ID: MRT4577_80265C.1
aacatcaaagacacgacattatccagcagaataatccagatgtgatagtcgaatttatcaatacactaagttatataacagcaaaacagttcaggcgctccaaaatttgactagagcttataaaagaaagtgcagtactggactagaaagctacagctttatttcaatacttcacttctttgctttcttcggtgccccagtagctggagctgtggatgagacaggtggtgttatttctcgtggaccctgggccaacctctctggccttctcagccttggacttgtggatactctccataagcaccctcttgttcttgaaggcgttacctttgaccttcatgtacatgtcatgatacatgtgcttgtcaatcttcttggcctcacgatacttgcggagaaggcgcctcagcacacgcatcctcctcatccacagaaccttggtgggtagcctagcctccctg

SEQ ID NO: 163040 - DNA, 355 bp, Zea mays
  Clone ID: MRT4577_80266C.1
ggtctaggggcgacgatgctggaggaggtggcctcgccgactgggcgcgccattgcaagcaccgacgctgggagttcttcaaggagaaaggtacatcgacagattctggctacgcatgtcgttgttgtcttatgatcgtgcgattttttgtgttgatttgtgaatttgctagggagttgtgtgcctcattattttggtgtaaactctgattttcgtaggtacacgacaatataggttataatgggaaatgaattggagaaggatgaagaggaatttcaatttggagttgctgcgatgtacatgtacgaattatctaacactttgatctctcaccaaccacaataattgtcaaacg

SEQ ID NO: 163041 - DNA, 598 bp, Zea mays
  Clone ID: MRT4577_80267C.1
ttagctgaggagctgatcctcaccggcgtcgccatcgtaatcgccttggacagcggcaccagaacctctgcctccgcagggtgcttgctggtatcattacaatctggtagttttagtggttgggcttgacttcctactattcagaaacacagtaccgagaagtctttaggtggggtcaaagatggtgtcgctgaagttgcaaaagcgccttgccgcgagctacctcaagtgtgggaaaggcaaggtgtggcttgacccaaatgaagttagtgagatctccatggcaaactcccgcctgggtttatcatcaagaagcctcataagatccactctagatcccgtgcaagaagggcacatgacgccaagcaaaagggacgccactcaggatatggtaagcgtaggggtaccagggaggctaggctacccaccaaggttctgtggatgaggaggatgcgtgtgctgaggcgccttctccgcaagtatcgtgaggccaagaagattgacaagcacatgtatcatgacatgtacatgaaggtcaaaggtaacgccttcaagaacaagagggtgcttatggagagtatccacaagtccaaggctg

SEQ ID NO: 163042 - DNA, 430 bp, Zea mays
  Clone ID: MRT4577_80268C.1
gggacacaacaggtccgttaaaccaacgaagccacaacgccgattcatgacacacaaaccgcgggggtttattaaacgacaacatccatatagagggacaccagagggcaccagacaacgcaaatacccaggtacggcaaaaaattaaaagacccagggttaactgacctttgtggagggggaacaccaggggaaaagggcccaccttatggaaggtgaattccggtaaggggcgggcaacctcaagttgcttgccagtaaaaaaaaaaccctgcgggacgggggggaggcccttattggccggaaaattcgctttaaaattgtttagggggacggagctctaaaaccccacaaatatggttttaccggtgaaggatttcacaaaaaattgaatccctccttaaaagccgaacaacagggggagggggct

SEQ ID NO: 163043 - DNA, 1849 bp, Zea mays
  Clone ID: MRT4577_80269C.1
agttccgccccgagcggttccaggaggaggacgtgagcgtcctcgggagcgacctccgcctggcccccttcggcgccgggcgccgcgcctgccccggcaagatattggccctcgccaccacccacctttgggtcgcccagcttttgcacaagttcgagtgggccgccggcgggggcgtcgacctgtcggagcgcctgagcatgtcgctggagatggccacgccgctggtgtgcaaggccgtacccagggttcagggccaagcggcctcctagcctagcctccatgcatgcctgatgcctggatgccgtagcgagagtgggagactgatgagtgtatgccgttatgtttgtgtgtccatgcatgcatgcatgcctcggctactgtagcttttggcttgcttgttgtgcatgtcctgcgtcgagaccttgcgtagtatgatgcagtataattttaataataatattattattaaaggttaaaaaaaaaaaaaaaaaaactcgagactagttctctccctcgtgccgaattcggcacgaggaagccaccgccgcctcgcatctcctcctccgccccacgcagctgaggagctgatcctcaccggcgtcgccatcgtaatcgccttggacagcggcaccagaacctctgcctccgcagggtgcttgctggtatcattacaatctggtagttttagtggttgggcttgacttcctactattcagaaacacagtaccgagaagtctttaggtggggtcaaagatggtgtcgctgaagttgcaaaagcgccttgccgcgagctacctcaagtgtgggaaaggcaaggtgtggcttgacccaaatgaagttagtgagatctccatggcaaactcccgggtctatgtttttgcaatacttacaggccagaatatccggaagttggttaaggatgggtttatcatcaagaagcctcataagatccactctagatcccgtgcaagaagggcacatgacgccaagcaaaagggacgccactcaggatatggtatgctgctgcaactcatttatgtcacagttctgaagggtgagtaagctcgtggtaatccgatgcctgtataggtaagcgtaggggtaccagggaggctaggctacccaccaaggttctgtggatgaggaggatgcgtgtgctgaggcgccttctccgcaagtatcgtgaggccaagaagattgacaagcacatgtatcatgacatgtacatgaaggtcaaaggtaacgccttcaagaacaagagggtgcttacggagagtatccacaagtccaaggctgagaaggccagagagaagacactttctgaccagtttgaggccaagcgcgccaagagcaaggcgagccgtgagaggaagatcgctaggagggaggagaggttggcccagggtccacgagaaataacaccacctgtctcatccacagctccagctactggggcaccgaagaaagcaaagaagtgaagtattgaaataaagctgtagctttctagtccagtactgcactttcttttataagctctagtcaaattttggagcgcctgaactgttttgctgttatataacttagtgtattgataaattcgactatcacatctggattattctgctggataatgtccgtgtctttgatgtttgtgttaaaaaaaagtgaagtattgaaataaagctgtagctttctagtccagtactgcactttcttttataagctctagtcaaattttggagcgcctgaactgttttgctgttatataacttagtgtattgataaattcgactatcacatctggattattctgctggataatgtccgtgtctttgatgtttgtgtt

SEQ ID NO: 163044 - DNA, 257 bp, Zea mays
  Clone ID: MRT4577_8026C.1
gaagtgcattccaatgctaaatagaagttatgagtgggtttaacaattttagatgattcagcttttgttccattactgttgaactatatgaactattccattactgcagagattttagtatctgttttaataagctctttttgttatttaaaggctgcccatgggtttctgcctagtggtaaagctgattgttaccctcctttgaaatcccttctagttctgagatgctttgagaggtactggattcgattttggga

SEQ ID NO: 163045 - DNA, 619 bp, Zea mays
  Clone ID: MRT4577_80270C.1
ctatgccacctccgcctccattgcccaacattatgccggcaggttttccaggaccaagcggtccacctccacctccgcttccaccggcccagaaccaaccccaacagcagcagcagtctcctcaggcaccacagcaatcacccacatcagcaggattcttccagtcatcagcaggcatggggttcttcccaccagtgcaggtgcaacattctccgtctgcccaacgccaatgactcaacggtggcatggcattcatcgggctataatggcagcactttgtgctaacttctgtacattaaccaataatcacctagcgtcgagcttatacgtggctgatcctgcaagagaggcgcaggaccgttgtcacggttagaaaaaaaaactgtagaataggcttttgtgatgactctcgttttggtcagagttgtttaactcttccttgttctgtgtagtagttagatgttgtgtctctgtcccccgtttgctttgatctcctgaggcaaaagaaagtggcactgaaattgttgcccactgaatcactgatcgtgctgtcattgacatgatgtaaactgcaaatacttgttctattgttgtttaaatttaattatttattatgatt

SEQ ID NO: 163046 - DNA, 583 bp, Zea mays
  Clone ID: MRT4577_80271C.1
aggccgatccccttccaggatggcgccggtgtagtggaggtagccatcatcagaatccagaaaggagcaccgtgtgtgcgtgatgtggccggagaagatgtacgcgtgggcgtccatggcagaagacccgctcaagcgcgcggggtcggcatcggcgcatccgtcgagccctctacggcgctacagcccaacgacgctggcggtcggcggcctcatcgtcgttggcggcctcagctacgtcatgttcgggagcaagaagaacgggcgcgaccagcaggccagccgagcttagaaaaggcccgtggagatcgtcgattagctagcttaccgagatgttccgaaaataagataggattaggctctttggcgggtgttatgtatgtgttccatatgtgcaaaaacctcgagtgctactatcttgttatccatgtatgtataacatgccaattttcttactgaataagtagcctcccttgtgatttaattattagaaccacggaagatatgtggttcaaatgttaagctcgtttcaaaaaaaaaaaaaaaggggccgctcgcgatctagaactagtcggacgcgggg

SEQ ID NO: 163047 - DNA, 316 bp, Zea mays
  Clone ID: MRT4577_80272C.1
aaaaaacgggccgacccacacgtccgaaccaagcaacataaaacgtcaaatttattttcaccaatacaacaacaacgacggccaggatattaaccctcctgaagctcctcactatttctgcatgacaacactaacgcgacaattttccctaaatgctaacaagctcctatagcttccattattcccacataccttccatcaattatttctacagtatacgaaaacccagctcttcaaccctatacgctacaacacgcaatcgcaccaagcaacatacatttatcacccttgtttcaacaattgccagacctatctt

SEQ ID NO: 163048 - DNA, 376 bp, Zea mays
  Clone ID: MRT4577_80273C.1
aaaaaaaaaaaaaaaaaaaaaaaaaaaaaaaaaaaaaaaaaaaaaaaaaaaattaaaaaaaaaaaaggggaaaaaaaaaaaaaaaaaaaaaaaaaaaaaaataaaataaaatttaaataataaaaaggggccccctttttatagattccaacctttcttcctcttccatccaaatctatatttttttttttgggtccccaaatttaaatttattggccgtctttttaaacctctattatttggaaaaaccttgtcttccccaatttaattaccttgaaaaaaatccccttttccccggttggctaaatacccaaaaggccccccccattcccctttccaaacatttccccaccctaaattgcaaaaggaacccccc

SEQ ID NO: 163049 - DNA, 546 bp, Zea mays
  Clone ID: MRT4577_80274C.1
tcgaggctcttccgggactactctctctctcactggttgacgccgcgaccgacccaacccaactgccctttatcggtagatctcgcgcgtctacggcgtcgacttacgacgcccccctataccgcgtccgggcttaccccatggcacggctgcactgccttgaggccgtcctgacgttggggatcatcaccggcatgctctgcatcatggacaacgcccagcatttcattcacaaggtcgggcacagcaggccgaaccacatcagcaccgatctgtgggacgtcaagcatggagcgccagcgacaagaagctcgagaaacaaccctacggcaactatggtatggagcaacctcaaactttcctggatgttgtcgaacctggctcaaaagcacacaatgactgctcttttgtttgctgcacaactggaaccaatacttgcaagcgcggctctgaaatatcaacagacatgaaaataatccggatctgacatgtggataggtgaacaaagccaaatactgcggcaaaaaaaaaaaaagataatcggac

SEQ ID NO: 163050 - DNA, 167 bp, Zea mays
  Clone ID: MRT4577_80275C.1
ccgaccttacatgttatccacaccattcaagttctcctctctattatacctgggaacacttcaaataccaacgggacatacatatcctacatactccagcaaacatctcacttctcagtaagaagaaacttagaacttacaccctatatactcaccttattactgac

SEQ ID NO: 163051 - DNA, 396 bp, Zea mays
  Clone ID: MRT4577_80276C.1
ctcaagttccggttgctccaaagaaaattgtttagttttctagcatgaagcaacgcgtggcgtagctgaagatcacagattggcatgtctacataataattgctggccgcacctgtctacagtatgcatgtattcctaaattgtaaaataagtgaaaaaacgcatatgtgcgcgtgtatcatggtgtgtactcctaaattgtaaaataagtgaaagaaaaaacaagtggatcattgaatgttgaaggatgtttttgtaaccagatgttctttagactctgttttttgtttagagaaattatattcccttttcgtgtttatttattttttttttatttacttttattgattttattttttttcttaagtattctctatatatggttgtgtcgatttt

SEQ ID NO: 163052 - DNA, 324 bp, Zea mays
  Clone ID: MRT4577_80277C.1
aattggtccatcacaacctaactatatcctttgatacaaccccatgaaacttaggggcctgtgggtatataggagcagctagccaaaccaagaccaccacaaatggtcgtcgatccacaaggatgctaaaacagactccaaagcgttcgagtatatacactcgcccaacccgaacccaaacgtgactactggcgccctagtggataggctcattccagaacgacaccttctaagactccccagacaacacctggcagacggagtccagcacctacaacagtgtcaccctggtctgcctactattcagcctcaacaccactttct

SEQ ID NO: 163053 - DNA, 285 bp, Zea mays
  Clone ID: MRT4577_80278C.1
ggggggcgttagaactagggattttctgagaatccacgagcaccactgggtcttatgagaggcctgactttccttcgttctccactccataccattgtgacagaggacgaagtgggcaggcggaaggcggggccggtgcactgccgacggacagataccgcggtgacttcacccgacgctgtgaaagcagaactcggcttggaccaagcggctatgttttcactaggaagcttcagtctctaccatcagatggagatctggcgtaccgctactattggaaggaga

SEQ ID NO: 163054 - DNA, 738 bp, Zea mays
  Clone ID: MRT4577_80279C.1
ccggccgggagtgatctccccatcccttccccacatgtcaaacagagcacagaccacagcctcctccggaaagcaggaatcccaagaagcagcgacggcgacggcgacggcgacgccatggctctactaacggcgccacccgcggcgctggtcgtcctcgccgtggcggcggcgctgctggccctgctgccgcgagggagcgcgcagatatcagccccgcccgcgggcgcccccgcgccgtcgtcgtcgctggactgcgcgggcgcgctgctgaacctgacgccgtgcctgacgtacgtggagcgccgcagcgcgctgacgcgcccggagaagggctgctgcggggcgctcgcggccgtcgtgggcggcgacgacgccgcctgcctgtgcgcgctcctggccgggaacggcgcgcgcggcgtccgcgtcgacaccgtgcgcgcgctcgccctgcccaccatctgccgcgtggacgcgcctccgcccaggctctgcgccgcgctcggcatgcccgtcgccgagccgccgggcggagccgccgcggacgcgccgatggactcaggcgtagctaataaaaactacattatattggctggattgtatttgtacgtcgtgaaaccttgcgatactgtgcactgctgcactgtggggctcgccggcgggtggattctcgctgtcgagcttgaggctaatgagctggctacgttcgtcggcctgccgtctgctccaactgattga

SEQ ID NO: 163055 - DNA, 157 bp, Zea mays
  Clone ID: MRT4577_8027C.1
ggtgtttgtgagaggaaagcacatgccccagggagtcattttcatggagtcgacgaaccaaaacatgctataagaactgtggcctttgcttaactttattctctccaatattagtaattcatttcagtattttgaggaatggattatcgcaccattt

SEQ ID NO: 163056 - DNA, 856 bp, Zea mays
  unsure (1)..(856): unsure at all n locations
  Clone ID: MRT4577_80280C.1
tcgaggnnccggccgggaaaaaaaggaaaaaaaaaaaaccgttcaccaactatttttccttcaactgaaagcttcttctcagctgaatttcgttatttcccctttccttaacaacccttgaaatctaaaccgcacgacttcagtcgccaaacaccgccaaaatgggtcacgaagatgctgtctaccttgccaagctcgctgagcaggccgagcgatatgaggagatggttgagaacatgaagattgtcgccggtgaggaccgagatctcaccgtcgaggagcgaaaccttctctctgttgcctacaagaacgtcatcggcgcccgccgtgcctcctggcgcatagtcacctccatcgagcagaaggaggagtcaaagggcaactctagccaggttaccctcatcaaggagtaccgacagaagattgaggccgagcttgccaagatctgcgaagatatcctcgaggtccttgaccagcacctgatcccctctgccaagtctggcgagtccaaggttttctaccacaagatgaagggtgactaccaccgttacctcgccgagttcgccattggcgaccgtcgcaaggactctgccgacaagtccctcgaggcctacaaggctgctactgagttgccanaaaacccaagcttcctcccacccaccccaatccgccttggtctcgccctcaacttctccgttttctactacgagatcctcgacgctcctngaccagcttgccacctggctaagcaggccttcgatgatgccatcgctgagcttgacactctgagcgaggagagctacaaggactctacactgatcatgcaactgctccgagaccacctcactctctggac

SEQ ID NO: 163057 - DNA, 669 bp, Zea mays
  Clone ID: MRT4577_80281C.1
cattgggtacctcgaggccggccgggaaagacaccgtgctccctcccctggcgccctagtccccaacgccggaaatgccgctgctgctgctcctgaacgccagtgccgaccaccatctcccatagtgcagagctcccgatcctcctcttgccagggcgccatcgctgagctcgccctgccccagccatggacgccgtcgggccacccgtctcctatctcctctcgccctcatcctctggctgctgccccttcctattcctggtggctgagtcttcttccatggatgctggccgtgctgccctctctggtgctcacctctgccccctgcgttggatggccggttgctcctgccctaggtatgctagatgattatgtgaattggagggcatggatcaggatggatcacaaggtggctttgatgaacccatctcgatagggacgacttgatcaagtgtcaggattgttgatgctcaccaagcggacgtcatctaaccacactaacctagtgtatcccaggcaagccccagtgcatttgccacctccttgttgttataaaatttttatcacttatatgctgcattaggtgataggagttgagtgatgaaacacttgatgcattgccattccttggaatttgattacctcgaaaaaaaaaaaaaaaaagcggcc

SEQ ID NO: 163058 - DNA, 214 bp, Zea mays
  Clone ID: MRT4577_80282C.1
ggggggaggccaaagggtaaaatttttggggcctgtggggaattttctttcaataggggtaattccggggggcctaacaaaatttgttcctttttgaaaaccttctctccccggggttccctttaaacaaaacccgtcagcttgcttgcctttgaccaaatccccccaaggtccacataacaggaagtttggggaatctccctccaaaaccggg

SEQ ID NO: 163059 - DNA, 472 bp, Zea mays
  Clone ID: MRT4577_80283C.1
cattgggtacctcgaggccggccgggataagataatccggagaaggtaccgcgcaagcaaaacttctagatgtggctgccggagaccgcaccccctccccaatcacaccacccgacaacgcgctccgcaaattcggaatcgccgctaggcttccgacaagatggacgggcagaaagcgaaacagatgtagaagaggaagctgtcacagcaatcgaaagacctctgtggagctcggcggcatcgtcgaccactacaggaaagtagtccgcaacagccgatagaacgactgaggcaacgtcctcggcaccgcatcctacgcaatcaacaatgctaccgactcctatgccataacgacaatagcgagggcctgcaggatcctaccaaatgatgactgggccaagattgccaaggagcaccggtatccatgtagaacaggataaatgcgagagacaatgtggcttgttggctaaat

SEQ ID NO: 163060 - DNA, 188 bp, Zea mays
  Clone ID: MRT4577_80284C.1
ccttcctactcgtctatacgcgactactctaaagataggagccgccggcccgggcgactccctctccgcctcccggccaccacgcacaacagccttacaagtagagagtggcgaaccaggttaaccaacggactgcactctataagctaggaggacaggtacaccagtgctcgatcactctgtgaagg

SEQ ID NO: 163061 - DNA, 298 bp, Zea mays
  Clone ID: MRT4577_80285C.1
gttcatttttttttttttttgttttcttttttttttttttttaaaaaaaaccttttaaaaaaaaaacctttttttgtttttacaggggggggaaccccccttcccccttttcaggaaaaacttacaaaactccccttcagagggggtccagttttttggggatgaaaatggttaatgtcttggggtgccccaccacaaggtggatgaaggggacgtggtgctaaactcctatcccgctcctttttggacgaaaatgccatccacaaacttgacaagaactttaaaccaccattgtttt

SEQ ID NO: 163062 - DNA, 308 bp, Zea mays
  Clone ID: MRT4577_80286C.1
catctgagccccctaagctgatcctagagcggcgcaggtctggttttcgacgccggagaccgataggtcggtcggcccactcggcagcgggacctgaggaacgcccggccccgcggccagactgcgcagagcgggacgctgaggagaagagagagaacatggcactcgcccccggcagcagtgaatggatcatcgcggtaggtcgcctcgctgcctgcctggccggtcacccagatttttctatgctttcgtgcagaagacagcagactccgacggtactaatgatatacgcatgcggtcagttctaa

SEQ ID NO: 163063 - DNA, 505 bp, Zea mays
  Clone ID: MRT4577_80287C.1
tggcttggaacctttgggctgatttatgtgcttgcttatgtgcttgcttatgtgcttgtctcctggcggagacaaacattaggagacgaggacgaaggctccagaaaccattagaacacaagccatgcaaagaaagattgctgctaaaaattactcttatactattaaacggacaaattactaaaaagtacctcagtccaactccggatagaacaacccctaaagtaccactacaactacaacactctagttacatctcagaaagaggccccattagacatgacacggacttacggtaaaagttaaccttaaagcgtaccctaataggggtcgtaaacgataggtaaatatcccaaaaggactcacgggatactagcggtaaatatcccaaaaggactcacgggatactagcgtaccctaagttactacttcctacggcgtagattcacaattaaagcactagacccccccacagtacccccaaggaaacaaggagtcggatagc

SEQ ID NO: 163064 - DNA, 602 bp, Zea mays
  unsure (1)..(602): unsure at all n locations
  Clone ID: MRT4577_80288C.1
tacgtaagctcggaattcggctcgagccatcttaaggcggcatctcttctaacgaactactggtcccctttctagttcacatgtgtcgctgttgggctgctgctaaaggaacaagaatggaggcagggcctccctacgagcctgcgccaacggtggcagacggtagggactggtcggagctgtccctggacgcgctggtgctggtcttcggcaggcttggccctgtggagatcctcatgggctcgggcctcgtgtgccgctcgtggctccaggcggccaaggagccggagctgtgggcgtccctggacatggcgagccacagggcggtggaggagatgggcggcgacgtccttcgcggaatggccagggtggccgtgggccgctccagggggcggctggaggtcttctcggggaagcacttcgtcaccgacgatcttctcaactacatatcgggcaggtcggcatgtctgaggagcctcagccttgtgtcgtgccccgaggtcaccaacaaagggttcaccgacctggtcacgaacgcgcccaagctggaggacctctcactggagctctgcccgaacgagggcggccgccgactaatngct

SEQ ID NO: 163065 - DNA, 244 bp, Zea mays
  unsure (1)..(244): unsure at all n locations
  Clone ID: MRT4577_80289C.1
gacccacgcggccgctcaaggtaggaagaaggaccagtgcctgcatcgatggtgtgctcctatgctctccttttccggccggctggtgnccggattgccgcggccagccggccgggcctgggaatgcttcctaggtacgcanccttcgccgccccggtacgtctagtccttcagtcaagccagtgctctacaggcacctgtggttcgcgctcagccagtcgctacgatcactaattcgacctgg

SEQ ID NO: 163066 - DNA, 328 bp, Zea mays
  Clone ID: MRT4577_8028C.1
agggggacgattttttttctgatggaacaacagcaaagttagttgttggcagtacaaacacatgaccctgcttgttttttaaaacaactaacaactgaactaacaacttgaaaacgatttaactcattactcatccatataacttaataacaacttgcagggacagactttcgtgcacaattagggttcaaacagacagggatagccggaattcaagcgccaggctcgattgaacaagaccgacttttcacttgcgaatccgagaagactccgtcaaacggtgcctgaaaccgctgaactcggttcaacgggcactgactaggaaagg

SEQ ID NO: 163067 - DNA, 419 bp, Zea mays
  Clone ID: MRT4577_80290C.1
catgctcgagcccagaagcgtgaacggcgacctcatcttcgccagcatcttgctcaccggcaccctcaccgggtaccctggtggcctctgtgctgacccgttcgtctacggcatcggctcgcccaagaagatcacggagctgagcaccaaggtgatcaacaacggtcgcctcgacatgctcgtcgtcatgctcgcctggattcacgcctagtacaccggcacctgcaccatcgacaacctcttcgaccacctcttcgaccatgtccacgacactatcttccacaccttctcccacaaatgaagagtcgaacttattattagccttattaggagtgctaccacacatgcttcgacacgttcatggccaatatatatgacactttacatgaaacttgacatggaatgactgctgagtagac

SEQ ID NO: 163068 - DNA, 226 bp, Zea mays
  Clone ID: MRT4577_80291C.1
gcgcactactggtggattggaagctggtatctataaagatggccagacccgtgaacatactgggggtgcgttaaccctgggagggggggaaataatttgctgctgcaacaagatggatgcaaccactcccaaatactccaagggacggtatgaagaaattgtgaaagaagaatcattctaccttaagaaaggtgggtgcaaccctgataaaaatgccttttttccc

SEQ ID NO: 163069 - DNA, 285 bp, Zea mays
  Clone ID: MRT4577_80292C.1
acctgagtttggcgccttcagtgacgccagatttccttcttaaactttagcaaaagtacttagtttaccgttatatattcaaaaattattcttctcaagaaaggtaggggactgattgtgtcttcgattgagacagacccacaaacatgacaatggatctgttttgaacaatctgtgtccataaccataccatttagagatacacagtaattctcatgtagatgaactcatgacccaagatgcaaatatttgccattgaagtgcacataagaccatcaaataaaa

SEQ ID NO: 163070 - DNA, 303 bp, Zea mays
  Clone ID: MRT4577_80293C.1
gaacccaaaaacggaagggaagaaaggataggaacccctcctgacttcccttgcttaatcccacaccccctctcggagcccataaaaaaatgaggcgggggattaagcaaatggtggtggtggtggtggtgctgctgactgctgagccttgcctcccaccgtggctactggggctgctggggctgttgctgcccctcgggaggcggcaggtgcggcggcggttgcctcctgccgccgctgccgatgtgcttgttgttgtgcatccagaccttgaatacctgccgccggacgccgacctggtcg

SEQ ID NO: 163071 - DNA, 355 bp, Zea mays
  Clone ID: MRT4577_80294C.1
agtccctcaccgcaatggccactgccttgcagggccagccgccgaggttcactgcgtgcatctacacaacaaacccgcaagaacatgtggctgcctgcccagatgatgatcgtcgttgccaccaccagaaacgacctcgagcggtgaccaccgctagccgcaacaccacccttcttctgaattgctgatgccacgatgcgctgccactcgcccgcccggcaagcctgcccggcggcccggcacatcgccgccgcaggacacacagccgccaccacagcaaacacctccaagccgccaccaagccaggccaccgccgtaggcgtgcagcagcccaatatcttagtgccccacaacg

SEQ ID NO: 163072 - DNA, 846 bp, Zea mays
  Clone ID: MRT4577_80295C.1
cccgtcgtcgccgacccggacgccgcataaaggaaagcttgatccggacaagcgggacagaccgtgacgcagcacagccctggggaagcagctctgcgacatgcaccgctcgcgccgccgcgcccgcatcgtcgccgccgccctcctctccgccttcgccgccgctgccgccgcgctcacggtgtacctcgtcttccgtccgctgaagccgcaggcctccgtggtgcgcgtcgccgtgtaccgcatggccacggccgccgggaactcctcggaggggcgggccccgccgccgtacacgctcgcggcgagcgcgcggttcacggcgctgctgcacaacccgagcgaccgcgccgtggtgttctacgacggcctcttcgcctacgtgacgtaccgcggggagatggtggcgccccccgcgccgctgcccggggtggcacagggccgcggcgccgacgtggcgctgtcgccgcatttcggccttggcggcgcggtgcccgtgccggtgtcggcagacgcggcgcaagcgctggagggcgactgcgcggcgggccgcgtggagctacgcctcgtcgtcatgggccgggtcaagtacatgagcgggccattcaggaccggatggcgcgggctatacctgcgctgcgatgtcaccgtcggcctctgggtggacgccaccgcgggcgacgacggagccggggacgtgccactgctcgagtaccccaagtgctccgtcgacgcttgagttgatccttgatcggcgcaatgcatgagcgctcagatgatcagattttcagaattctggtggagaataaggaattgggaaaagcatttttctgtgtcacgcatgct

SEQ ID NO: 163073 - DNA, 242 bp, Zea mays
  Clone ID: MRT4577_80296C.1
aggggcgagatcgcttcccgatcacgcaaccatggctcgactgtcagccaccgccgcgctccccctcctcgtcctctccctcctcgccgacgcgcactgcggtgccctcgcagacgcagccaagcacgacaccgagcccgaatcaaccgccgccgtggacgcggaagaggaccacgtgctatccgaccccacggaccacgctgaggcgggcagcggcagcgccagtgaaaaggaagccatac

SEQ ID NO: 163074 - DNA, 328 bp, Zea mays
  Clone ID: MRT4577_80297C.1
agagcagtaaacacccaaaggccttgaagttatggacagggcagatagaaatacagccaacaacaatataactcaccaggaacattgtgaaaaaagaacccgatttggaaaggcgctaacgagcttttcacgaagcaaagagttcgatgctgtgggaatcagacggtcactgacgcaaagcctgctgcagaacaatgggcagagacgaaagttactggataaggtgcttgccatgctccacctcctccggcccaacagaggacagtattatgtggcccttacattgcttacgcaaaagcgtactgaaatccgtataaaaagcgccata

SEQ ID NO: 163075 - DNA, 2149 bp, Zea mays
  Clone ID: MRT4577_80298C.1
ccggccgggattacccatttttgactcgtacgtgcgtgactacagttgcatgctatggccatggccaccacttcgccggcaactgtgcagccatcatcatacaagcacacgagccgcggcgcggcgcggtgctgccctcctcctctgctgtcctggaagacacgaagctttgggcagcaggtgacgacaagggccacggcggcgagctcccgtgggcagcccgccggcgtggcactggcagggggagaagagggcgacagtatcaggcggctgcagaacgggtcggacgtgcggggcgtcgcgctggagggcgagaaaggccgggccgtggacctcacgccgctggcggtcgaggccatcgccgagagcttcggggagtggctgcgagaggaggagctccggctccggggccaggagcccgagcagctgcgtgtgtccgtcggccgcgaccccaggctgtcggggccgcggctcagcgcggcgctctttgcggggctcgccagggcgggctgctccgtcttcgacatggggctcgccaccacgccggcctgcttcatgagcaccatactgccacgcttcaactatgacggctcaattatgatgacggcgtcacacctcccctacacccgcaacggcctcaagttcttcaccaagcgcggcgggctcacctccggcgacgtcgagaacatctgcgaccgcgcagcgcacaagtacgtggcgcggaagacgggagtcggcggcggcggcaggggcacgccgccggtggtgatgcgcgtggacctgatgagcgcctacgcgcagcacctccgcgacatcatcaagcagcgcgtggcgcacccgacgcactacgacaccccgctgaggggcttcaaggtggtggtgaacgcgggcaacggctgcggcggcttcttcacctgggacgtgctggagaagctgggggccgacaccacgggcagcctccacctggagcccgacggcaggttccccaaccacatacccaacccggaggacgccaccgccatgtcgctcacccgcggcgccgtgctggcgcagggcgcggacctgggcgtcgttttcgacaccgacgtggaccgcagcggcgtcgtggacgccgggggcgcggccatcaacggcgaccgcctcatcgcgctcatgtcggccatcgtgctgggcgagcacccgggcaccatggtggtcaccgacgcgcgcgccagcgacgggctcacgaggttcgtcgagtccaggggaggccgccactgcctgtaccgcgtcggctaccgcaacgtcatagacaagggcgtgcagctgaacgccgacggcgtggagacgcacctgatgatggagacgaccgggcacggcgcgctcaaggagaactacttcctcgacgacggcgcctacatggtggtgaagatcatcattgagatggtccggatgaagctggcaggggtggagggaggggtagggagccttatcagggatctgcaggagcccgccgagtccgtgctcctccggatggacgtcatgggtgagcccaaggatgccaaggaaagggccacacatgcagttgaggcttttaagaactacatccaggaggacaaacttttcggttgggtgctggacgactgcggggattgctcagttgccgagggatgccttacggacacaaacaatgatcccatcgatgttgatgcacacatgtacagagcaaaactatacgacgagaatcagagagcagtaggcatggtccacattcgtcaaagtgtgcataatcccaacatagcactaaacatgcagtcctatgctcctggtggctgcaaatccatggcaaaggatcttcttgagaggttcttgctggcaagcggactgaatgagtttgttgacataagccaagtagagaagtttgtccagtagttcttatgcttattatagaatcttagatttacctactctgtatatgaacctagctaggagttcactactgttgcgagtgtacatctattacattattctcctatcccatccatggtaaaccttgtatgtgtttagcaaatattgatagatgaatgcttgatattattgatagagacaatcagctataaaaaaaagaggcccttccatgaaaaaaaaaagaaaaggggcggccgccacc

SEQ ID NO: 163076 - DNA, 754 bp, Zea mays
  Clone ID: MRT4577_80299C.1
aggccagcgccccgaagctcggaattcggctcgagggaggacaaacttttcggttgggtgctggacgactgcggggattgctcagttgccgagggatgccttatggacacaaacaatgatcccatcgatgttgatgcacacatgtacaggtatcatctacatgttttacaatatatattttttaggagttacttttaaaaaatattagaaaaccccttctttgatattttcaatttttttggtggcttaaaaaaacaagaaagtaaattttacaaaccttagagatggtctaagtcgtccatgcatagccactacgatggctacggatgctttactcgctatactttgtgaaagcagagcaaaactatacgacgagaatcagagagcagtaggcatggtccacattcgtcaaagcgtgcataatcccaacatagcactaaacatgcagtcctatgctcctggtggctgcaaatccatggcaaaggatcttcttgagaggtaacatagacataacactgagcggatcctaactctcgcttcactttatgagattgttgatcttatgcttcttgttgattctaggttcttgctggcaagcggactgaatgggtttcttgacataagccaagtagagaagtttgtccagtagttcttatgcttattataggatcttagatttacctactctgtatatgtaacagctcagaacctagctaggagttcactactgttgcgagtgtacatctattacatt

SEQ ID NO: 163077 - DNA, 351 bp, Zea mays
  Clone ID: MRT4577_8029C.1
gagacacatagacatggtgacaaatgcagtgttactcagaacatgattagtttagctacacacaaatggctgtggccaacgatagctggatacattgatcaacagcaggtgcagcagattatgccagagcttactgaagtagcaatggcgtaccgtgtcgagtacctacacctactatcatttagcgcgctcgaggtgggcaatgcacctacgtacgtacaacaacaggtgctgcaacaaattgtaccagctgtgactcatctagctgtggcaaaccctgctgcctacttacaacagttgctgtcattcaaccaactggctgtgtcaaactctgctgcgtacctacaacag

SEQ ID NO: 163078 - DNA, 308 bp, Zea mays
  Clone ID: MRT4577_802C.1
gccggccgggccggggccacacttccacagccaagcgcctctctctgggcgtcggctgttgctttagtccagccgaccggagtcgagttacggctggaaagactcgacggatgtggacgcaatctctgcgacctacctcactcgttagtgaaccgagccttgacgcttgatgtctccaggtcgtacgacgtctgtagattgcgagtcggtcaacaatctgacacaggaacattgctggatcatgcctccgccaagcgaccgattatccctcacctgatgcgactccggatggagctcggcctctacgc

SEQ ID NO: 163079 - DNA, 394 bp, Zea mays
  Clone ID: MRT4577_80300C.1
cggacgcgcagcactgcggcggttcggcgtccccggtgcgcggcctccatggcggctcgggcgcgcgaccccggcgaggcggcgcaggcggccatgcatacgcgtgatccccagcccagccccggtggcggagcggtccacagccacggcccccccgacgggtgcgcggatgcggccccgagcagcgacgcgtgcgcgggcggctccagccagccccggcgggcgcgcgtgcgcgacaccctgggcgtgacccctcgacggctcgtgggcgtagcccccggcggcgccggcgcagaggtccctggcgggcgtcttgcccgcgggtgcgcggccttggaggcgcgctggcaaacagccccgcccaggcacacaagcgcgaccccccgcatgggtg

SEQ ID NO: 163080 - DNA, 422 bp, Zea mays
  unsure (1)..(422): unsure at all n locations
  Clone ID: MRT4577_80302C.1
tnnnnngggggcttttggaccgattttgggttttttaagccccaaaccaacccgggaacaatttaattacccccattattggggggttacccaatacgcctcaatcaaagggcccgggggcttttacattaatccctaaaacataaagggcggcgcccaaaaaaattaaaactttcgtcacagaatgttaccaaggcccctgcaacatttccaaacaaaaaaccgaagggggcccccaataatttcatggccctgcatggggagcctccatgcctaccaaatattcttcttttggggccatgcttgggtttttttccaaaggacaggagtgtacctaaagaaaaccttttgaaagtggccaggggcttctttgacctttcacttttgcaaggggggcatggaaagggagaccccattgcccg

SEQ ID NO: 163081 - DNA, 472 bp, Zea mays
  Clone ID: MRT4577_80304C.1
gtaagctcggaattcggctcgagaccggacgaggaactggggtttctgacgtgcccctttttgggagggggtggggactgataagggcgcggtcacagctttggcacaccatggtggaaaggggatcggatcgcctggccttcatcaccgggcagacgcgcacacgtctactgcgatcccgatggcagatgtcaccacttggaccacaggttgatggaggcactcgagaagatgggtcaagcgagagaaaccagttgccgaaaaacgaacctgctgtcgtggtacctggactaccagatccgggtgctctccaaggagtcatggctagagccttacgctatgatgccctggtacccgtaagtgaacgagctggtggccagcaggaaaataacgcaagtaccccgagctatgatgacgaactttttcgcttatacaagatgggcactgcatgtcctgaaagtgagaccgtaaa

SEQ ID NO: 163082 - DNA, 529 bp, Zea mays
  Clone ID: MRT4577_80305C.1
cgcgctcaccatcctgctcatggaccagcaggtggccggcctgcaggtgctcaaggacggccgctggatcgccgtgaacccgcggcccggcgcgctcgtcgtcaacatcggggaccagctgcaggcgctgagcaacggcaggtacaggagcgtgtggcaccgcgccgtcgtcaacgccgacaggccgaggatgtcggtggcgtcgttcctctgcccctgcaacgacgcgcgcatcggccccgccgccaggctcctcaccgacggcacgcccgccgtctacagggactacacctacgccgagtactacgccaagttctggagcaggaacctggaccaggagcactgcctcgagctcttcaggaccccgacctcctaggagtattttggatgcttctctttcattttagcttttcggtactagtttgtttgttactagaatggaacttgccgactgcatcagaaactgtctgtctgtacccctcatcagctccccctccaaataatctctctgcccatgtgggcttgtttc

SEQ ID NO: 163083 - DNA, 912 bp, Zea mays
  Clone ID: MRT4577_80306C.1
cggcgatgatgtcggtggcgtacgaattcttccggctccccgctgaggagagggccaagctgtactccgacgacccggccaagaagatgcggctgtccaccagcttcaacgtgcgcaaggagacggtgcacaactggcgggactacctccgcctgcactgccacccgctggagcagtacgtccccgactggccggacaacccaccatccttcaggaggaccgtgagcgcgtactgcagtgcggtccgggagctggggttcaggctgtacgtcgccatctccgagggcctgggcctggacggagcgtacatcaaggaggcgctgggcgagcaggagcagcacatggcggtgaacttctacccgaggtgcccggcgccggagctcacgtacgggctgcccgcgcacacggaccccaacgcgctcaccatcctgctcatggaccagcaggtggccggcctgcaggtgctcaaggacggccgctggatcgccgtgaacccgcggcccggcgcgctcgtcgtcaacatcggggaccagctgcaggtgacgtgctcttgtctcgctctcccattattcccaccctctcacctcctctctgcccctggcctccactactgcactgcacctgcacaggcgctgagcaacggcaggtacaggagcgtgtggcaccgcgccgtcgtcaacgccgacaggccgaggatgtcggtggcgtcgttcctctgcccctgcaacgacgcgcgcatcggccccgccgccaggctcctcaccgacggcacgcccgccgtctacagggactacacctacgccgagtactacgccaagttctggagcaggaacctggaccaggagcactgcctcgagctcttcaggaccccgacctcctaggagtaatttggatgcttctctttcattttag

SEQ ID NO: 163084 - DNA, 709 bp, Zea mays
  Clone ID: MRT4577_80307C.1
ctctggctcttcttcccccacatcccccttcttgttgctacctcagatttgtatctcgaattcgaggaatttatctatctccagactagatcgaggaacaaggtccgtgtcagatccgtgagggagggagagggaccatgggatgaggcaggtcaatcggcggctcccagatccgtcccccacggtggctcgctcgccgggacgacgacctcgccgacgacacggccgttttcaaggtggcggccacatcgtgcggagatgctgtcgtcaaggtaccttgacgcggccgcctcgtcctcacctcgccgatcgagcggagatgcctagctgctctgtctcgccgtcgtcaagggcaggctccatccttgtccacaactaggccatggagatggaggtcacagcagactgccgccatgaccatgccggtttcgatttggcccgatgcaccacgcaccacctccgggcctaactcattcttcagccgctgctccgactcttcaaggtctctctctctctctctctctctctctctgctcttgctctgggtgaattaattaggttaggtgtgagatgaaaactggaacctttttcagagagcagaggtccgtccaactgcattgatatagtgttgcatatgttgctgatgcgcatctggaaattactcactgtgtgcagcttgctatatgaacaaatgatgcatgctcacata

SEQ ID NO: 163085 - DNA, 1225 bp, Zea mays
  Clone ID: MRT4577_80308C.1
aattcggcacgaggggcagaggagcacacacacacacacacggccactccgcccccgctgctctcgcgttgccggccccgacagagacgaggcacggtcggctgctctcggttccccgcgcgcgcgctagctagaaggacgcggacgcgtgggcggacgcgtggggccaagaaggtggtgctgaagctggacctgcacgacaacagggacaagcagaaggtgctcaaggcagtctccactctccacggtactcctctcctctcccctgctctgctcccctccaccgtcactgtcatggaggccgcgcgcctgcaggagtaggaccctccgcgacctccctcaagtatattcgtagcgagtgagtccgtgtccgaattctggtctctgacgcggcggcaaccccacgcgcgtgcgcaggcatcgactccatcgcggtggacatgaaggagtccaagctgacggtggtcgggctggcggaccccgtcgacgtcgtgggcaggctgcgcaaggtcggctccgccgccatcgtctccgtcggcccggccacggaggagaaaaagaaagacggcgacaagaaggaggggggcggcgacaagaaggacgctgacaagaagggcgacgacaagaagcccccgccgcccccggtgtacccgtacccgtacccgtggcacgcgtacgccgccgccgccgccgccgcgcagtaccagtaccacccccggccgtacccgccccagtacgtcgtccacagcgccgaggaggaccccaactcctgcgtcatctgctgatctgatgccggcgtggcgcagcacagtcaccgtcttcttttttgcacattcctatgtttgttgttgttggcctgcttgcctacctgctcgatcgaccgccacgtcgtcggtgatcgccgggaccggggcgggtgtggtggttggctgctccgctcgtctctatgctggcggtggggttggtcgttggcccgtgtccgcaggtcgttgcaatcatgcaggcgatccatccaaaaagtacttgttgccttgtcggggttctcaggctgctgaccagcgtggtcgcgtagtgtgcatgcggttttttgtccttggctatttgcctattcggggtgtttgaggcatgaaactttatatatatagagagagagatttataaagattaattgaccttgtaatgtaaaaaaaaaaaaaaaaaaaaaaaaaaaaaaaaaaaaactcga

SEQ ID NO: 163086 - DNA, 441 bp, Zea mays
  Clone ID: MRT4577_80309C.1
tagtcacctgcctatatatcttgcgagagagagagaggatagctagctagctcgaatggagtgaggcataaagaaggcagcagggggtgtagttgtcgctgctgacttctcccgctggtgttagctccgacgacggacacggaccgactacctggaagcggatacctcccgcggggctggactgaacatcatctcgagggagtttggccatcccgcgagaggcatcctctgtggggaaacctgggtcttcctaccatgctatacggcagtcatgggttgcgcatagcattggccaaatctgcatgatgtgatatctggactaacgctatttgtaatttgagatgggagaaacacaggacggtagcgtggtgttcaacttattgcatgtgtgtggtgatctaataatcctgtctactaaaaagggatatggcggatgcggat

SEQ ID NO: 163087 - DNA, 373 bp, Zea mays
  Clone ID: MRT4577_8030C.1
gggggcaaggaaccaaggggcacttttttgaaaaaaaaaaaagggggggggcaaaggaaaagggggggcaaaaaaacccgaaaaacgggaagccaaaaccaaaaaaaaaaaaaaaccggggggggggggggattccaaggccaaaaagggtttccttgacaaagccaaaaggaagttagggaaggccaatttcctgaaaaaaaggaccaccccaagtgggaacccccccctttggagagggggccccagagcgcaaaaaaaatttttttaaaaggaaaggggccaacttgggggaaaccacaaaaaaaggtttttttaaaaataaaaaaaaacccccttccgaaagccaagcctaaataaagggggcccgggg

SEQ ID NO: 163088 - DNA, 562 bp, Zea mays
  Clone ID: MRT4577_80310C.1
tactctcgagtttttttttttttttttttgaagagatagatagattattactgcaatacgtgcactgcacgcgtgaacggtgaacccccaccgacatggtttaccggtgcctctgcagtctgcacggtctcagtcgccgtgtcggtggttggcttcgcatcgccgcgactagcacgttgctgctttgcagacgaaagcacgtcccaatttctcttgtttcttgacactgaccagctgtcgcgcttgcgcgagtgcgttcgacggcgccaatgtgttattgattgtacaccgcgcagcaacagcgagaaagaaagaaagaaagaaagaaaagctcgcacaccgggaccgatcaaccggacggacggacggacggcggtcagtctctgcctcctgctgtcggactgttggacccgctgtaccgcctcgtgcggcaacgacgaggtcacgaggtctatgtctattcgtgcccgctgctcgcgccgtcgccgtggccgtggccgtcgtggtcgtggcccgtgcccctcgtccgcttcctcgtctcgcacgccgccggagcgggctc

SEQ ID NO: 163089 - DNA, 1685 bp, Zea mays
  Clone ID: MRT4577_80311C.1
ggatgataggaaaatgaatgaaaggaagaactcaatactgacaaaatacatttcgcggagttgcggtgaatgaatgaaaggagaaactcaatactgacaaaatacactcgctgcaaatgaatggagaactcattttcagctcactacaagctgcccttgatattatcagaagaaaaaaaaagaatgtgaaaaatagggacaccacatcattgccatccgcatttcgtcctcatgttcttgttatcttgtagctccacatccaccatcccactctccctattcttcttctcttcaagtgccactcccatccaccacaaggcttggcttggtgggaagaagacaaacgccggcacgcgcacgcagacacgatggcgatctgcagcgcgcacactaccacctccctgcgctccccatgcacgaccgtctcgaacgcaggtctgaggcagaagcaagtcatcttcgtcaccagcaacaggaggagcggcggcggcaggaggcacggaggggcaaggagcttccaggtctcgtgctccgtcgacaagccggtggtgattggcctggcggcagactcagggtgcggcaagagcaccttcatgcgccggctcaccagcgtcttcggtggcgccgcggagccgcccaagggcgggaacccggactccaacacgctcatcagtgacaccacgacagtgatatgcctcgacgactaccattccctggacaggaacggcaggaaggagaaaggtgtgaccgccctcgaccctagggccaacaactttgatctcatgtatgagcaggtgaaggcgatcaaggaaggccaggcagtcgagaagcccatctacaaccatgtcactggcctcctcgaccctccggagcttatcgcgccaccaaagattttcgtcattgaaggtctgcacccaatgttcgatgagcgagtgagggacctcttagagaaggaaaggtgctgcgtgttaagctcatcatgaaagaaggggtgaagaacttcaacccggtttatctctttgacgaaggatcgaccatcagctgggtgccttgtggaagaaagctcacatgctcttaccctggcatcaaattttcctatggcccggacacttacttcggaaacgaggtatctgttctggagatggacgggcaattcgacagactagatgagctcatctacgtggagagccatctaagcaacctttcaaccaagttctacggagaggtgacacaacaaatgctaaagcatgcagacttcccaggtagcaacaacgggacaggtctcttccagaccatcattggactgaagattagagacctctatgaacagattgttgctgagagggctggtgtaccagcggaagcagcaaaagtttaacgatctatgcattcagatgtcctaaaactacagctctccgaactcaatgggagtaacaaccttcgcatctgttgggatatatggcgagctaggaggtatagaaatgtcattgcagaactcaggaaaacgtgcaatggaatttcttgaaatccctcttgaagagagtgagaactcgatagatcaagaatcaccacacgttgtattaatcgtatggtataatatttatacatgtacaggatgagctacgcaaaaaaaaaaaaaaaaaaaaaaaaaaaaaaaaaataaaaaaaaaaaaaaaaaagcggcc

SEQ ID NO: 163090 - DNA, 997 bp, Zea mays
  Clone ID: MRT4577_80312C.1
cccacgcgtccgcccacgcgtccgcggacgcgtgggcatcatgaaagaaggggtgaagaacttcaacccggtttatctctttgacgaaggatcgaccatcagctgggtgccttgtggaagaaagctcacatgctcttaccctggcatcaaattttcctatggcccggacacttacttcggaaacgaggtatctgttctggagatggatgggcaattcgacagactagatgagctcatctacgtggagagccatctaagcaacctttcaaccaagttctacggagaggtgacacagcagatgctaaagcacgcagacttccctggaagcaacaacgggacaggtctcttccagaccatcgtcgggctgaagattagagacctctacgagcagattgttgccgagagggctggcgcgccagtggaagcagccaaagtttgatggcccgcgtgcattcagatgtcctaaaacgggacaggcctcttcaaactcgacgcacgtctgttggggatatatgcatgggcagcatggcgaggaactaggagcctaggaggatgtggaagaaacgtcatttgcagagctcaggaaaacgtgcagcacttgtttagatgtgtgccttcttccatgcttcattgcagaaagaaatcaagtgcctctactactatcaggtactcctattcaagtgtaggagacgaatccataccacttccattgttggttattgtttctctgacccggagccaagaacagtcaacaaggacccgaggttgaacatctctttttatggactactggagagtaacaacatgtccgtttggttttaattagtactggattggactgcttctacagtattttgtctttatggattatagctgtagtagtcggttttaattcgtactggattggactgcttccacagtattttatctttatgcattgtagctgcagtagtccgaacaactggttttaatccgaggagagcattatgttcttgcc

SEQ ID NO: 163091 - DNA, 2175 bp, Zea mays
  Clone ID: MRT4577_80313C.1
cggaattctcgggtcgacccacccgtccggccgcgcgtacggaggcccctcaccctcatgtgatcatgtctttatctcccggcttaactagtacgcacccagtggtttcggtgggaatggaaaccctacaatcccctgctaatactgcagggcgagcctgagcgtgatcccccgagccggcccgccgaaaaatagggaacattatcgccatcctcgaggccgggttatcttgtagctccccatcccccggcccgctctccctattcttcttctcttcaagtgccactcccatccaccacaaggcttggcttggtgggaagaagacaaacgccggcacgcgcacgcagacacgatggcgatctgcagcgcgcacactaccacctccctgcgctccccatgcacgaccgtctcgaacgcaggtctgaggcagaagcaagtcatcttcgtcaccagcaacaggaggagcggcggcggcaggaggcacggaggggcaaggagcttccaggtctcgtgctccgtcgacaagccggtggtgattggcctggcggcagactcagggtgcggcaagagcaccttcatgcgccggctcaccagcgtcttcggtggcgccgcggagccgcccaagggcgggaacccggactccaacacgctcatcagtgacaccacgacagtgatatgcctcgacgactaccattccctggacaggaacggcaggaaggagaaaggtgtgaccgccctcgaccctagggccaacaactttgatctcatgtatgagcaggtgaaggcgatcaaggaaggccaggcagtcgagaagcccatctacaaccatgtcactggcctcctcgaccctccggagcttatcgcgccaccaaagattttcgtcattgaaggtctgcacccaatgttcgatgagcgagtgagggacctcttagatttcagtatctacttggacatcagtgatgaagttaagtttgcatggaaaatccagcgggacatggcagagcgtgggcacagccttgaaagcatcaaggccagtatcgaggccaggaaaccagattttgatgcctttattgatccgcagaagcagtatgctgatgctgtgattgaagttctgccgacccagttgattcccgacgacaacgaaggaaaggtgctgcgtgttaagctcatcatgaaagaaggggtgaagaacttcaacccggtttatctctttgacgaaggatcgaccatcagctgggtgccttgtggaagaaagctcacatgctcttaccctggcatcaaattttcctatggcccggacacttacttcggaaacgaggtatctgttctggagatggatgggcaattcgacagactagatgagctcatctacgtggagagccatctaagcaacctttcaaccaagttctacggagaggtgacacaacaaatgctaaagcatgcagacttcccaggtagcaacaacgggacaggtctcttccagaccatcattggactgaagattagagacctctatgaacagattgttgctgagagggctggtgtaccagcggaagcagcaaaagtttaacgatctatgcattcagatgtcctaaaactacagctctccgaactcaatgggagtaacaaccttcgcatctgttgggatatatggcgagctaggaggtatagaaatgtcattgcagaactcaggaaaacgtgcaatggaatttcttgaaatccctcttgaagagagtgagaactcgatagatcaagaatcaccacacgttgtattaatcgtatggtataatatttatacatgtacaggatgagctatgcatctactactatcaggtactcctattcaagtgtaggagacgaatccataccacttccattgttggttattgtttctctgacccggagccaagaacagtcaacaaggacccgaggttgaacatctctttttatggactactggagagtaacaacatgtccgtttggttttaattagtactggattggactgcttctacagtactttgtctttatggattatagctgtagtagtcggttttaattcgtactggattggactgcttaaaaaaaaaaccacagtattttatctttatgcattgtagctgcagtagtccgaacaactggttttaatccgaggagagcattaatgttcttgcc

SEQ ID NO: 163092 - DNA, 442 bp, Zea mays
  unsure (1)..(442): unsure at all n locations
  Clone ID: MRT4577_80314C.1
ggtcgccccgcgtccgtatcttcgngggtcgaactnggcccgtcngagaatcagagctctgnggctgctcacatcaggccaccaccaacccctcacgtcggcggtggcgtcgtcggcgaaggcagagatggcgtccgtggccgcggcgggggtcgcggcggcggcgctcctgtcggtgctgtcncgcgcgcgggggggggcggcgcgggcggggcgcgcgccggggtccctgcgcctggtggcggtgtgcaagacccagcccgtgcctgtcttccggggcgtcttcgtctcgggcctccgctgcttcggcgtgaacttcgtcctggtgctcatcgtcctggcgcctctgcttccttcggctcttgcgtggcgcttcattgggaatcttccttgcctctnctccgttgccctncttgctggcgtgccnctccttgttctggtt

SEQ ID NO: 163093 - DNA, 272 bp, Zea mays
  Clone ID: MRT4577_80315C.1
gtcattcgccgccgactggaacttcatttagtgtgtggtcagctattaagttactaggaagatgacggcaaagcgtgatccaccttctgtgcttaaagagctctaacagtgtcacatacactatgtattctagatagatatgaaactgttttaatgaataaatattgtactatctatggtagagtagcttaaatactaatacacagatgatgctaagcatttcacaggcgtcatcgtcgggttaggaagtcacttactaggagtgccatgat

SEQ ID NO: 163094 - DNA, 435 bp, Zea mays
  Clone ID: MRT4577_80316C.1
tgaaacctgctgatcgagctcgaccacgagcgcgcgcaccaccacccacacccccacccgatccccgatctcaccgtctaacccggaccaggtccaaccaatctccaacagcatgtaattagtaaggaagcccccacgcgctagctcacccgccggggtctcgccacgatgagaggccttctcgcgtgcgccaccctcgcccgccgcgccgccggctcctccgagcccgcgcgcgtgcgacacctggcggccgccgcgtaggcggcggacgccgagctgaagaggacggcgctctacgagcttcacgtcgcccacggcggcaagatggtgccgctcgccgtgtggagcatgcccatcgagtacagggactgcatggtggactccatcgtcaacggccgggccaacagcagtctcttgcacgtgtgcgacatgagc

SEQ ID NO: 163095 - DNA, 389 bp, Zea mays
  Clone ID: MRT4577_80317C.1
ccgcgtgcgggagccgggacggaggtaactgtgctgggtcgacgatattctagtcggcggccgccctttttatgtgtggttttttttggagaggtcatgggggtctacggggatatgcatgcattccaggtccttcttaacacctacagcatggtgttgatgcaggacaaaatccgtgcacggtcgcatgacggcaggatgaacgggggtgggctgtacaaaaagcgccagcatgcgcaaacgcactgcgaaatcgaggcatgctataaagaactcaactaggtgagctctttctagtcagcggctggatcagtgatgagacccttgaccttcagtataaactggtcaatgctgccacacacgagaaagacgatggaaggggggaggga

SEQ ID NO: 163096 - DNA, 295 bp, Zea mays
  Clone ID: MRT4577_80318C.1
gaaaaaaggccaaacccccagcgggcggcatttttatttatttaacggaaaaaaaaaaggttttaccaaataacatgtttttttttttaggggaaaccagcaccactttccgacccagggttggggggtttttttttggtttttaaaccaaggcggggcctggctaagcctggttattttttttcccgggttgcccaaaaaaccttggttgttggggtggcttagctaaccctgttttccctaatgtttttgccctggctgacctgctcgtaggggccaaagccttttttaattt

SEQ ID NO: 163097 - DNA, 735 bp, Zea mays
  unsure (1)..(735): unsure at all n locations
  Clone ID: MRT4577_80319C.1
gacgcctgcaggtatcggtccggaattcccgggtcgacccacgcgtccgtgatgctccacctgcatattcagagctctatcgtccaagctttgttcatccaggggctgccacagtccccaccatgtcagctgcatttcctggcgcctcattgtatctgcctatggcccagtctgtggctgttgggcctctaggctccacaatccccatggcttattatccagttggtcccatctatccacctggctcagcagtgttggtggaaggagggtatgatgcaggtgccagatttggagctggtgccaccgctggcaacattcctcctccacctcctggatgccctcccaacgctgctcagctcgcagtcatgcagggagccaacgtccttgtaactcagcgcaagggaaacttcttcatgggtggctcagatggtggctacaccatttggtgaggagccatggccactcctgtgccggggaagacatcacataccttcagcacttctcacaatgtaactgctttagtcatattaacctgaagttgcagtttagacacatgttttntggggtgtctttctggtgtccaaacttttgaggcacttttcanatttaataagggaaccatgtagggtagcagcccctccctaaagcattctgaggtaagggaggtatccattcttcanatgaatgtgagtgaagcagcccaaggctcttccttaattcctctggagtgatgct

SEQ ID NO: 163098 - DNA, 401 bp, Zea mays
  Clone ID: MRT4577_8031C.1
attcaggaagtgggtccgactaacaatgccttctttgggatcaacagtgatggtccattgggctttcctatggaaaccgagggcttgttggttagtgcaattaatcctgagaggtgtcagcctaatatgtcatactgacgttgagatcaattaccgaatacaaaatgatgcccagcaagagatctcagcctccatggtttcacaggcattcggtcagtctgatatagcttttaactcaattgattctgcattcaacgatggtgtcatgttgagtagaaattcttgcccccctgcgcctccgcagagaatgcggacattcacagaggttctccggatatgaagaaatgaatcatgctgtggccagcatggtttggtatagtaggccaacttgaggaccgaca

SEQ ID NO: 163099 - DNA, 246 bp, Zea mays
  unsure (1)..(246): unsure at all n locations
  Clone ID: MRT4577_80320C.1
aattaatntaggtagtaagtcggatcggtcagagagatgagagactaagttcagtggtagtgttgatgagaagcagaagggttttgaagatgtttagaaagagaggacgtatggaattgatggatcaattgtgcgcattatgcagaggtgaaagttataggtcattaataagtggttgctgaatgtgttgagcagatgagccgcatgttcaagcctgacttgagagcgatatagaagaggattgag

SEQ ID NO: 163100 - DNA, 284 bp, Zea mays
  Clone ID: MRT4577_80321C.1
ccgggacgggcgcgcgtgttgtgtgatcctcggatccgtggcgcgcggcaacaaaatccacgatcacgtcacctgttccaacttttcaaaggactgatcgcgtgttttgtcgcacttgacattactcaggtaatacttgataattactaatctattctattcttgtgtccaatcgttggcgttgttcggtatatcggtttattttcctagggtgtgtttagaagcactttctatcaagcttctacaaacttgtttacgagaaaaaaaaactggatgtaggtatt

SEQ ID NO: 163101 - DNA, 205 bp, Zea mays
  Clone ID: MRT4577_80322C.1
gcggggggaaattgcgcccaacacgaacacctttttattctgtcctgggcacctctgacaggttcccacggcgctctggtgctcaaacggctatgctgccgggttttcctccggacaacagtcctggttgggccttttgccttggacccttatagccagcttccagcattccggcacgtttgttacccgctgggcttgcctatct

SEQ ID NO: 163102 - DNA, 738 bp, Zea mays
  unsure (1)..(738): unsure at all n locations
  Clone ID: MRT4577_80323C.1
gccatcgcaacanagcaacatgccaacagccatattggcgaggcggagcaatccgtagtgggattgaaatccaaaaccctaaactaactccaatccacacttgccgtcatggccctcaagcgctcggccgccgccgccagcctggggtcggcgtccgacgcctccgacggcgaggcgggcgcggcccgcaacagccaccgccgccgagtctccccgtcccgctcccgatccgagtcccctcggcccaacctcggccctagcgccgccgcttccgacaccaaccgtgagcgttccccccgcgaccacctcgactccgatgcggactccgacgccgacgccggcgccggcgccggccgcggcgcccgttcctcgaggcttctcggcgaacgttccccgagcttccactccaactcggacgctgacgtcgccgggcgctctccgtcgccgaggcgcaaccgcgagcgcacccttcacctccactctgactccgactccgacaactccaccacggccgcggccgccgcctccgatgacgccggcgacgcctcgcctttggctattgcgcaccgtgcctcgcacatcgggacctccaacgtcaaacccgtcagcacgcgcccgatggatgtgccctcgcgcgccgccgcgggatcttcccaacgtcgttccaagcgccgccccagcccccactccccggagcaccagaagcggccgccccgggtttggagtcctgaagacgag

SEQ ID NO: 163103 - DNA, 274 bp, Zea mays
  Clone ID: MRT4577_80324C.1
caggcatatatatctgtctgttagcaatgattattacatcatcagatcagcatgtgctatactccctgcaagagctatactgacatgaacaggcagttcttggagaagaaagagcatttctttaagtacctggggaatacagctctcagtgatcagcagggagtttatttgaggacatcagtcacctttggggttgccatgtacaatgagatttataatcatgatactcttcggtggtagtttcaaaagacactactaatacgcaggaagcgtt

SEQ ID NO: 163104 - DNA, 210 bp, Zea mays
  Clone ID: MRT4577_80325C.1
aaaacttacccttttttttacacaagcaggggatggttcactgataaacgcctggggcatttttttttaaacaaaaaaaaaaagggtacccctggttaacaaccaaaggggcacaataaagtgcagcgtgcatacctgggcagtaagggacaaaagcccttccacaacaggggaaaaaaaaatatggcccctgatttacgtgaccccttt

SEQ ID NO: 163105 - DNA, 326 bp, Zea mays
  Clone ID: MRT4577_80326C.1
taggtcgcgtcgttgcgtccacgccccgcccacccaccgcaccgcccgtccgcgcgccgcacggaagccaaagcacaagatgaagaatggaagtattgcatcgctttttcgaaaacatgaagagaaaactgcatctcgtgctcccccaaatcctcctccaaatatagatgaagagttgtctactctagttgatgttgtggatgatggtccaactgctttaagtgaagaaccaattgaagatgaagaaccaactgaagatgaagaagaactttctcctgtttatgatgttgatagccttgaaaatgatctaggattgagagttacta

SEQ ID NO: 163106 - DNA, 270 bp, Zea mays
  Clone ID: MRT4577_80327C.1
tcaatcatcgttctcttaatattagctaagcctcgggctcggccgctacatcatcagccggcatctactactacagatccacatgacttctttaaacccttcatcgtaacgagatcagatatattattatatgtcaagagagccccaaaatggttctatgtatgtctgaaatctacctacttgaactgatgaaaatatattgtatgaatatttttgcaccatatgcttgttaaataaagactaatatgactaaatcgatcaaaaatttat

SEQ ID NO: 163107 - DNA, 245 bp, Zea mays
  Clone ID: MRT4577_80328C.1
cttcaatcatctatatatgacatgaagcaagagacaataattcttactatttttttcgacattatccatatcagtagatgtttgtagtaatgtgatagctcatattctattcattcaatgaaaagctacccattacatttttcttaagaaaaaaacagagaggaacaatcttttgttgctagagaaccaatttccctttctagaaacatgcacaccatattttatgggatggagagaatatacat

SEQ ID NO: 163108 - DNA, 676 bp, Zea mays
  Clone ID: MRT4577_80329C.1
atccccatatcaacttacgtcaatcgtttattcctctaaaaggtcgaagccgtccatatgattccgtttcgtcgaaacccagtagtgtattgttccgtaatgtcaataatctcccccacaccgcgactctgtctaaacgccggatcctgatccgccattaccgccctcagctcgagagctcgactcttatcacagaggcgcgagttccccgctctgttataaacccgcgccgcgccttcccgtcctatcccctctctcaggctccgtcgcgggatccgaggggcgcgcgcttgcgtcaggtccaggtccgccagaggcgatgctcacgtgcatcgcgtgctccaagcagctcccgggcgacgcgccgccgctgcgcgagccgtcggacgacgatgaccgcgccaacgccggaggcgggggcgaatcggcggcaacgcccggcacgaggcaggccatcagggtgctcaccgcccagatcaaggacatggcgctgaaggcatcgggcgcgtaccggcactgcaagccctgcgccggttcgtcctccccggcggcgtcgcggcggcagcaaccgtactaccacggcgcgtacgcggagtccgggtccgaccgcttccactgcgcgtaccagcgcgccggcagctccgcagcatccacgccggggtgcgcaacggggggg

SEQ ID NO: 163109 - DNA, 457 bp, Zea mays
  Clone ID: MRT4577_8032C.1
cctgctgcctccatttttctaaggtctagcaactccaatctaatcatcttttgcgaaaataaacaactgggagtttaaatagctccaatatccatacaaacaaattgaaatgcacacagagtacccatctctggctatgggaaaaggaacatgttctttcgaactcttgcagattgtgatagcacctaccacattgacaggagccagaccatccagctcgtacctcctgccactgtgacattgttaagggatgatccacactggcaaggacgtagagacacacatactttttccatgaggtaacatcctgcacctggaggccttttaaatgctgtggatggttaggagaccatttcagacgtaccatttcttcattgaacgctggaacttgcgagttccgtcccactgcctgaggggacgctggtgacatgcactacgccaacatgtgtgctcacat

SEQ ID NO: 163110 - DNA, 333 bp, Zea mays
  Clone ID: MRT4577_80330C.1
acgtggtgcttttacttttgaaggaaacttatttggaagtagctgagcccggtgtgcccgtaccgtcttttcctttgttacgcgctggcaaaccttgcctttggggaaaaggttgtacagttctacacattcccacttggcgctcactactttttacttgggggctccgcacgtttttccctcactccataacataggctaaattaaacggggggaacccccgctgagcatggaccaccattcccaaaccccagttttttttttgggggtactcgctttatttggacttgccggtcgtttagataaccccgagggcccgggaacctgggcttt

SEQ ID NO: 163111 - DNA, 538 bp, Zea mays
  Clone ID: MRT4577_80331C.1
cgggccgggtcctctttcgttaggatggtgcgatgtcggatgggtgggagaacgcgctctattggctcttttgggtgttgattccggtgtttagagactggactgttctgtgcctctaactatcactccctactcatctccttcggggccctacgggtgttattcttactcacaactcatatcttaaatatgtatgacgcaaaagtgcctgaccttgtgtttcatcaccttctccacggaagaggcgatgcggaacgccatcgatggcatgaacggcaaggagctggacggccgcaacatcaccgtcaacgaggcccagtcccgcggcggacgaggaggcggcggctgtggaggttacggttgtggccgtggaggcggcggctacagcggtgtctggcgccgcgatgacggcaaatgctacggcggtggctgcagctacggtggtggcgaaaacccctacggtgccggagtaagtggctacggcggaggcaacctttgcggcggctacggcaactccgacgggaactggaggaactga

SEQ ID NO: 163112 - DNA, 627 bp, Zea mays
  unsure (1)..(627): unsure at all n locations
  Clone ID: MRT4577_80332C.1
cgcccgcgnggatggcacggcgcgaggacaagggaggggaccttcccagttcctctcgattcttcccatttcttctcaaaaaattaaagattgtccacatgccacgctggagcaggggcagatttgggttccgggccacctgggccgtggcccgagtcgtggcccaaatatccacttatacttaggttttttcagcccaaccatttatccttcctctccacttgaagcctgggcgtatggcggctgcaaccctgatcgacctagcctcaaccttgccctggcggcgacttgaggtcgacggccagtcaccagtgctccctatgacaagctcgacggccgctgcgcgccctccatggatctagcaactagcgaaccgggcagtcggcgacctcctcacctccctgcggccctgcgccttgcttcctgcctccctccacggttcgtcgcgggcctgtgttttccgcccctcgccggtggctcggctcctccacggcagtcggcggcgtcaccaactccggcttccacaggtcagccacgctgacactggaacaggatgtgcgctgaagtttccacacagatgtcaggcaccacattcttgatgatgagattcgcacgacattgtaagca

SEQ ID NO: 163113 - DNA, 592 bp, Zea mays
  Clone ID: MRT4577_80333C.1
gccggccgggtcgggaatctccatctcacacaggaatcttcacaagcacttcgacgttacacgcggcgcttgcacacgagacacaaccaacgcgtcctgcaccaatgtggttactaccagtaggtgtgactactgctcggaggaggagaagtccgcgcccccggacggacttcagccgccacggacgtcgtggaccagcatctcgtcgacaagcgacaagttcgaggaaggtcgacacgggcgcacgcggcgacggcaaccaccaccaccaccatggacaccacggggtccagatcttcccgcggtgcgagcacatggtccacgtggacatcgatacctgcaccgccaaggtccacgagagcagggagagcttcctcgccaggggtaactgagcagaccgggcggtcggtatccacggccgatcgtgcctgcctgcgtgccttatgtatgtctgagattgtggaaggtcatcgtacttggctagcgtacgtacgatgcacgcactcagctcctgtacgaattacgacaataagctcgtgacctgaataaaacttcttcgtaataccaaaaagaaaaaaaaaacaggccccta

SEQ ID NO: 163114 - DNA, 1679 bp, Zea mays
  Clone ID: MRT4577_80334C.1
gtctaccccttgatcggacgtgttgtctttcctcgacgagattcccaaaccgctccgccgccgccgctcgtcagcctccgttctaaccgccgcgccggcgacatgccgcccaaagagctgccggggttctactacgacccagagaagaatcgctacttccccatcaggggccccatcccgggcgctgccgcccgccgcggcacgccagcagcacctccggccgtggacacaacgggatgcagcaggaaaagggctaggcggccggagctgctcaacgccagggagatgtacggcggcggagtcatgttctccaataaagccgccaggtccacgttcaagcagcagtgccactacgcgcaggcgtatcagcccatggtctggaagtaccaagccaccacctctgtggctgataaggcgctcgaacaattggacgccatggttcagacaccgcaagggttgaaagagtccaggctgctagtctccggcagcatgaacggttcgattcggttatacggattagggactgctctgagtaactttgagaatgaggcagagtttttgccccaacctgcttgtactcttgtgggaaagcacaagccaggaccactccccagcatttggtcacctggaacaggcttcatagctttctcatccagtatatcatgcataaagaagctcggacgtcatgtccctgatgcatcgaacaccaattcatcagttcagcgagcattgtggctactcttggatctggagaatctcatgcctctttatatattatggatctttctgaagctgttgacttggcaatcggaccatggactacctacagagttcattcacttgatcgaacaatgtggacagctgattgtagttctgatggcacacatgcagctttcggttcggaccttggtgctggtctgatcgatttggaaacaaggggatcatcgtgggtatgtcgttctaaaagcgacattctttccctgaaatttgtgcactcgggaaaagttgtgctatgtggtctacggaatgggagtatagcccctgttgatgtacggcaaaaacagcataatcagcctactggagtagcttcatctagcaatgctaggaggacagttcccatgctgcccacaaggcatcgtgggaagcaaagaaaccaggctagcaaggataaattttcaagagttatttctatgtcgtcagcagtttgtagcttggtttcactctcatcagatgagaactacttcttaggaagctccatggatggatctatcaaactcttcgatcttcgcctcattcagaagggaggtatacagtcgtatggggggcatgtcaactcacacacacatttaccacttgctgttgatccatctgagaccttacttatgtcaggtggggaggactgcactgttcgcatctggagcatcaaaacaggcgagctaatctttgcgcggagcatgggagacagtcccttcacgtcatcttgttggcccgaaagcagccatggcttgtgcagtccttggctgtttgatgtaaaccatagctggggagcttggttggggtcacgtgctgggctgttctatatgcatggtacttgagttaagttatgtttggttcgctacctaacttgccacactttgcctcacttttctgcctaaggttagttcttcaattcgaacgac

SEQ ID NO: 163115 - DNA, 246 bp, Zea mays
  Clone ID: MRT4577_80335C.1
gggacccaaaaatttttgctttcgtccttgggcccgacccccaccaaaaccaagagggcacaacccaatttctctgccccccgcggcccggtatctaattaaaaaccccggggccaaattgggggcgtaaacccaggcgttgttaggaaaaaagggttgtcaaaggggtccaacaggttttcgaggggccccttgccgggaaaaatggcctggacaaaaaaacccaacctggaaaaaatggggggg

SEQ ID NO: 163116 - DNA, 491 bp, Zea mays
  Clone ID: MRT4577_80336C.1
cagcttccttgcttgtgcctggagcctagccgcctccttttgttttgccttaagtttcttctcttctttctcttttgcctttggatcttttttcagcttccttgcttgtgcctggagcctagccgcctccttttgtttcgccttaagtttcttctcttctttctcttttgccttttgatcttttttcagcttccttgcttgtgcctggagcctagccgcctccttttgttttgccttaagtttcttctcttctttctcttttgccttttgatcttttttcagcttccttgcttgtgcctggagcctagccgcctccttttgttttgccttaagtttcttctcttctttctcttttgccttttgatcttttttcagcttccttgcttgtgcctggagcctatccgcctccttttgttttgccttaagtttcttctcttctttctcttttgccttttgatcttttttcagcttccttgcttgtgcctggagcc

SEQ ID NO: 163117 - DNA, 394 bp, Zea mays
  Clone ID: MRT4577_80337C.1
tgtcctcgctcacctcgtccgtcctcgtgagctccgcctgccttccctctggacagctccagcctccagccatcttcccccacctgtacacagttcgcactcgcatgctcttcgccccctcgcgcttaccgctgccgcgcctcccgactcgccgcctccgcctagctccgggctctccaatggcctccatgctcgccatcctcaggccctcggcgccggccccgctcgcgggacgccgggccagggctgccgcgccggcgaccgcgagggtggcgctatctaccagatctaggtattcgtcagccagggtgtcgctcggctccgaggttgcagtgggcgccgacgcgctcttagccgactataagcccaccaccggttttctctttcccggcca

SEQ ID NO: 163118 - DNA, 1406 bp, Zea mays
  unsure (1)..(1406): unsure at all n locations
  Clone ID: MRT4577_80338C.1
cgacccactcttccgtcttctcatatttttccacatattctctttttctaccttgtatctatacccttgcgccaggtttatttgtacttcagagaaggcaactgtatatttgctcaaatatttattgtctcaaatgttcacattcgctctgtttgtacttgtgaggttaaataattaacaaatgtcaccttgttaccatatgcaatccattcattatctttgataatcttctcattaataatacacgttaacttagttgcattgatcctgcttattattgtaagctttcttgtttcatatccttaatgatcttcaaccttttcttgagcacctcggagccggccggggcaaatccccttcctcgcctcacacgccgtcctgttggtcgtgcctctcttcaacctttttttcttgagcattagcgagagccccttacatggtgcagtgctagcatcgttgctggcgacctcggtgaggtcggatctgcaaaggttgcagctagcgcgcctacactacatcaacatggtgtggcatctcctttcgcagatccccaacatgctacgccgccggctgcctcattggaactcctgtgcaccgcttgcctttcttctcccattcaacccgcaggcgttccctggctcaatagcgcaactaggggatgtccgccgctacctccatataggaaacgacagatttagattttcaggtgatgcgtggtcgggatcccggatcaatcaaaataagtgtgaaataagtgtgaaatttgagaggctgttgaacttccagatcaggtaccaaccaaaaaaagtgacccttttgacggcgtattgcgtgggcaaggcatgccagtgcgacaatagagaaactaacggggagctctgttcgttctgctgattgcttatgattaggctcgcagtggtggtagctgggagagcttgggactggccagacgcgaccaactcacccatgtaataagacaacttttatacatagccgacagtacgcaacctcatgcgcaagatccttaatgaaaccaaagagctgcagcagataaccaacgacaagcagaaaaatcaggttgtacgcatccaacattttactttcatatttgctgaagatgtcaacaacaaaataacaagcagcccagacaatggagatgatgtatacgataattgcagatgagttcaagtcaatggacaataaggacatgcgccctgaaacttacccttgaacttnttttgtcttggaaaccgggaagaaccaccatttaatggcagnccagaattagagaaatntacatataaaagtgcagagatagtntgtttttggattttccttattnttaagggtatgggttagcttaacccttttgattacaccaaaactgaatatggtttttggggcac

SEQ ID NO: 163119 - DNA, 1904 bp, Zea mays
  Clone ID: MRT4577_80339C.1
ttaggtgacactatagaagagctatgacgtcgcatgcacgcgtacgtaagctcggaattcggctcgagcacacattaagcattggtgctaacttaagcattttatccaccttcgaagcatcaagtgctatggtgggagaagaaaagtttttttttattaagcatgtccattgtacatgctctaaatgtgcataggattattcctttcaattacaatatatttgcaggcttgtcaattaagtgctatgttctgcctgctgaatatgttctttatgcaggcgcggattcccgggcgctgtggcgctgtcgtcctcgctcacctcgtccgtcctcgtgagctccgcctgccctccatctggacagctccagcctccagccatctccccccacctgtacacagttacaaagcttggcacttcgcagttcgcactcgcatgctcttcgccccctcgcgcttaccgctgccgcgcctcccgactcgccgcctccgcctagctccgggctctccaatggcctccatgctcgccatcctcaggccctcggcgccggccccgctcgcgggacgccgggccagggctgccgcgccggcgaccgcgagggtggcgctatctaccagatctaggtattcgtcagccagggtgtcgctcggctccgaggttgcagtgggcgccgacgcgctcttcgccgactataagcccaccaccgctttcctcttccccggccagggtgcccaaaccgttggaatgggggcagaagctcagagtgttccagcagctaccaaattgttcaaccaggcaaatgaaatccttggatatgacttgctggatctttgcaccaatggaccaaaagaaaagcttgactcaacaatgatcagtcagccagctatatatgtcaccagccttgcagcagtagaggtactacgtgcacgcgatggaggccaagatgtgattaactctgtagatgttacatgtggtctcagtttgggagagtataccgctcttgcatttgccggtgcttttagctttgaggatggactgaagcttgtcaagctaagaggagaagctatgcaggatgcttcagatgctgccaatagtgcgatggttagtgtgattggtctggattcagaaaaggtgcaagaactatgtgatgctgctaatgacgaagtagatgaaaacgatagagttcaaatagcaaactttctgtgccctgggaattatgcagtttctggtggtgtaaaaggtattgaagtagtcgaagccaaagcaaagtccttcaaggccagaatgacggttcgcctagctgttgctggcgctttccatactagcttcatgcaaccagctgtttcaagattggaatctgcgttggctgccactgagattagaacacctagaattccggtcatctccaatgttgatgcgcagccccactcagatcctaacaccatcaagcagattttagctcagcaggtaacctctccggtgcaatgggaaaccactgttaagaatcttatgggcaaggggcttgagaaaagttatgaactcggacctggaaaggttatagcaggtattctcaagaggatcaacaaaggcactagcattgagaacatcggggcttaaacgtctgggatctgaagaactcttgatggaaccaagttacacagcagaggattgaaacatgccattattgtggaacgatgtttccactcagagttaccgttttttttaccttagtggttgaattttgatcttgatgtaaaattgacatgaaacacatatggttaatgattttatgaacagtgtagttttcacagtttgaaaaaaaaaaaaaaaaaaaaaaaaaactagttctctctctctgtctctcccgcgccccgggaattaattccggaccggtacctgcaggcgt

SEQ ID NO: 163120 - DNA, 301 bp, Zea mays
  Clone ID: MRT4577_8033C.1
aaatccctaaactatttataactgcaaaaagaattttcagagttcagttcaccttatttttgggacagggtacaaactttttactattatacctttccctcctttccattcattattataaacattcattaattaaaacaaaattaatttgcttcgtaaattatttcactaactttctaacctttgttcaacaatctatgggttatatctttataccttcttcttacttattctccattaaaataaaatatttattactccccataataaatttacttcttcaatttacttatttaccatt

SEQ ID NO: 163121 - DNA, 665 bp, Zea mays
  unsure (1)..(665): unsure at all n locations
  Clone ID: MRT4577_80340C.1
nagngcaccactttagttacatcatgatcaacatgtcgcgttaggatatcttttatctttgaaagtataatgtgttacctaactacaaggtgatcttcgtctctattagctttatgataaaaaactaatgttataattagagtcaaatgttatcattaaatgcatatagataggactgtacttgtgttggactctaggcttaacctatgtatatatatgctagcattaggatctcatattataataagtattattttaggatgaccatctgattggtgtggctacgtcgagcgcccgctacatgactgcaacattctagtggccgatgttgttgactttagtcaaatcacgattggagtagtttcccaatcggagcttgggacgatagggctcaaaaccctcacgcgcgaggtgatgggcatgctcatcgacacacccaagcatgtgacgcttggcaggtgggcaagacgtctgttagcctccacaagtctggtatgccgtcgttgatgtctatgggttatacaaggttggttgtctgttgttcacgatggagcgcacacaccgccgatagaaggatgttgtcatctattttcctgcggttgttgttagagcatctcaaatagaagtcctaaacagagttgtattttgaaatatagtactttaac

SEQ ID NO: 163122 - DNA, 292 bp, Zea mays
  Clone ID: MRT4577_80341C.1
gtactatacatatggcactcattataagaccagagtgtacatgggatgaaccatcaaccgatggggatcatctataatgacggaacgatgtcatttaatgatgacgccttgctagaaccaaggaacgttattatgtgcgaacttgtgatatagatctacaagatgagaagcatcactcatagagaccgtgtgaggactctatgataggcagagaggaaaggaccgtgaaatacaccacagccgttgccgttagcgtgatcgtagtgacagggacaaggatcgtggtcgggac

SEQ ID NO: 163123 - DNA, 608 bp, Zea mays
  Clone ID: MRT4577_80342C.1
cacaacccccctcccaggagccgcccaggtacgtcgccggcggcgatgactacgcgcttcaagaagaaccgcaagaagcgcggccacgtgtccgccgggcacggccgcatcggcaagcaccggaagcatcccggaggtcgcggtaacgccggtggcatgcaccaccaccgcatcctcttcgacaagtaccatcccggctacttcggtaaggtcggcatgcgctacttccacaagctccgcaacaagttctactgccccgcggtcaacatcgagcgcctctggtccatggtgcccgccgacaaggcggctgaggccggcggcgacaaggccccgcagatcgatgtcacgcagttcggctacttcaaggtgctcgggaagggggtgctgccgcccaagcccatcgtggtcaaggccaagctcatctccaaggtcgccgagaagaagatcaaggccgccggcggcgccgtcgtgctcaccgcctaggtttcagtccttgttcgcctcttggttttgagatctatatctgaactagtagtgctttcctgtctcagctatttgtgttaagaagacctgtagtttttaaatctgtggctgctgcctgttgggac

SEQ ID NO: 163124 - DNA, 332 bp, Zea mays
  Clone ID: MRT4577_80343C.1
tgtcgggaaaccacagccacacaagcaaccgggggtgggccaaagcactcggggggcaaggaacgcctcgcaaaggaacaacgcgactgctccaacgccctacaaacgctcggaggggacgccccccaccaacgggaacggccctgcctcgtccctcccatccctggccacaccgcgtgcgaggacgccggcaacccaatccgggggcgacagacaaggagcaaaccttgaaacgggccacgctgccaacggaccggagcccaccgagccactacatgcgaacaagcaacggggacggaggaaccactccaccctggctaagggccggcaaa

SEQ ID NO: 163125 - DNA, 1764 bp, Zea mays
  unsure (1)..(1764): unsure at all n locations
  Clone ID: MRT4577_80344C.1
antaagtagctataattaattcacaaaagctgagaagacggggggtcacacatcatacttcttttgccattgcaatggaaaacaactacgcatgcccaccacccagcaagggaaacctgatcacagtcttgagcatcgatggtggtggggtcaagggcgtcatccctgctaccttccttgcattccttgagtctaaactccaggagcttgatgggagcagcgcgcgcatagctaactactttgatgtcatcgctggcacaagcacaggtggtcttattgctgcaatgctggcagctccgtcgctgagcaatgccaagcaaccatgctatgaggccaaggacatcgtgccattctacctcgagcacagtcctcgcatcttcccatgcagaactgggattttgggctggttcttcaagatcctacaaacagttaaggtgatgatcaggccaaaatatgacgggaagtacctgcacaaagtgaccagtgatctgctgggtggtaccagagtggaagagacgctgacaaatgtcgtcattcctactttcgatgtcaagtgcgtaaagccaacaatattcagcacattcaaggcaagatctagtgccttgatgaatgctcgtcttgctgatgtgtgcattggcacgtccgcagcaccgacggtcctccctgcgcactactttgaaaccgtggatcaccgcactggcgcatcgcgtagcttcaacgttatcgacgggggcctcgccgcaaacaatccgactctggtggcgatgggtgagataacagaacagatgaggcagaagagcaaggagttccccgagaccaagcccctggactaccacaggtatctggtagtgtcactaggcacaggccttccagagcaggacatcaagttcgacgcgtgccgtgtcgccaagtggggcatcttcggatggctcggccgccgggagaacaccgtgcccttgctgcagatgttcatgcacgcgagctcagacatgacggacagctacgtcgccgaccttttcaaagcgatcgggtgctcggaccaactgctgctgcgtgttcaggaccgcaacatacccatagcggctgtggcagctgacctctcgacggagaagaatctgcgagggctggttaagattgcagagaaccttctgcataagccactaggcgaggacgattataagaccgacgaccgcgtcgagacgacgccgagagatggccgtgccatactaacctatgctggtatgctcgcacggtttgcaaagctcctttctgatgagaggaagcttaggcttcagaacatgggacactgtatgccggtcatagcaaatcgtgaagcttgagaggtcttccgaaacacatattgatacatccatcttataggagttagagagttcgttcgtgtaggctatctgcaagctgttgtgtgtgtattgcaagttgtgacgacgacgtgagtgtgtacgtaaatggataaggcgatatggtttgctttggagccctgtacgtaaatggagaaaatgtgatgccctggcgtctggttgtctagcattctaccagctggctctccgatcctagtcacatccatccagctcctccttttcagaacgccctgtacttctcaatgatgcagcactcctagtactaaacctttaatatatcataaacacttgtttttccccctttcaatatatatatgtatgcagctaagacaacaaaaaaaagaaagggcggccgccgactcggggctcgtcggcccgggaagtt

SEQ ID NO: 163126 - DNA, 741 bp, Zea mays
  Clone ID: MRT4577_80345C.1
taggggccttttttttttttttttttgcttttttagatgaaactagcacaactgatagcgaggatagatttaattgatgtgaaatatttgatatgaactggcatcaaaaaccgcataagcactgcccaacaggcaggaaccacatattttaaaactacaggttttcttaacacaaattgctgagacaggaaagcactatcagttcagatatagatttcaaaaccaggaggcgaacaaggactgaaacctaggcggtgagcacgacggccccgcctgctgccttgatcttcttctcggcgaccttggagatgagcttggccttgacgacaatgggcttgggcggcagcacccccttcccgagcaccttgaagtagccgaactgcgtgacgtcgatctgcggggccttgtcgaggccggcctccgccgccttgtcggcgggcaccatcgaccagaggcgctcgatgttgaccgcggggcagtagaacttgttgcggagcttatggaagtaacgcatgccaaccttgccgaagtagcccggatggtacttgtcgaagaggatacggtggtggtgcatgccaccggcgttaccgcgacctcccgggtgcttcctgtgcttgccgatgcggccgtgcccggcggacacgtggccgcgcttcttgcggttcttcttgaagcgcgttgtcatcgccgccgccgacttacctgggcagcgcctgggaggggggagcctcgtgccgaatt

SEQ ID NO: 163127 - DNA, 558 bp, Zea mays
  Clone ID: MRT4577_80346C.1
gacccacgcgtccggaccgcaacatacccatagcggctgtggcagctgacctctcgacggagaagaatctgcgagggctggttaagattgcagagaaccttctgcataagccactaggcgacgacgattataagaccgacgactgcgtcgagacgacgccgagagatggccgtgccctactaacctatgctggtatgctcgcacggtttgcaaagatcctttctgacgagaggaagcttaggcttcacaacatgggactgtatgccggtcatagcaaatcgtgaaggctatctgcaagctgtcgtgtgtgtattgcaagttgcgacgacgtgtgagtgtgtacgtaaatggataaggtggtatggttttgctttggagccctgtacgtaaatggagaaaatgtgatgccctggcgtctggttgtctagcattctaccagctggctctctccgatcctagtcacatccatccagctcctccttttcagaacgccctgtacttctcaatgatgcagcactcctagtcctaaacctttaatatatcataaacacttgtttt

SEQ ID NO: 163128 - DNA, 790 bp, Zea mays
  Clone ID: MRT4577_80347C.1
tgggaccctcgaggccggccgggccggagagtttcctcctccactccctcccccccgcctccactaccccactcccaggcgccgcacaggtacgtcgccggcggcgatgacgacgcgcttcaagaagaaccgcaagaagcgcggccacgtgtccgccgggcacggccgcatcggcaagcaccggaagcatcccggaggtcgcggtaacgccggtggcatgcaccaccaccgcatcctcttcgacaagtaccatcccggctacttcggtaaggtcggcatgcgctacttccacaagctccgcaacaagttctactgccccgcggtcaacatcgagcgcctctggtcgatggtgcccgccgaaaaggcggcggaagccgtcggcgacaaggccccgcagatcgacgtcacgcagttcggctacttcaaggtgctcgggaagggggtgctgccgcccaagcccatcgtcgtcaaggccaagctcatctccaaggtcgccgagaagaagatcaaagccgccggcggcgccgtcgtgctcaccgcctagttttcagtccttattcgcctcttggttttgagatctatatctggactagcagtgctttcttgtctcacctatttgtgttaagaagacgtagtttttaaatccattgctccttcctgtttggacagtgctttcatatcagatatttcaggtatattagagctaactgcgctatcaactgtgctattctcatccgttcaactgattttgtgatgcaaaaaaaaaaaaaaaaaaaaaaaaaaactcgag

SEQ ID NO: 163129 - DNA, 283 bp, Zea mays
  Clone ID: MRT4577_80348C.1
atacatcatcctatgcacgtgtacatatataatttgagcttgtccaatacatgttatatccactataaaaactatattcttatacactctccttttcacaaaactaccttattattatcgctcatatagacatcttctacattcttctctacccttaaaaatctttcactcccaatcttcttactagattcttttaatcaactaagtctttaacaccccatgtacttacccctttcctccacaacctaatattaacttaaacactaaatatcaattacataac

SEQ ID NO: 163130 - DNA, 1977 bp, Zea mays
  Clone ID: MRT4577_80349C.1
taattaattcacaaaagctgagaagacggggggtcacacatcatacttcttttgccattgcaatggaaaacaactacgcatgcccaccacccagcaagggaaacctgatcacagtcttgagcatcgatggtggtggggtcaagggcgtcatccctgctaccttccttgcattccttgagtctaaactccaggtaaactctacacgtttattgttccttgagcctaaatgcatatatacatgcaagtttgagtgccatttattcgttggtgttcttttacatttttttaggagcttgatgggagcagcgcgcgcatagctaactactttgatgtcatcgctggcacaagcacaggtggtcttattgctgcaatgctggcagctccgtcgctgagcaatgccaagcaaccatgctatgaggccaaggacatcgtgccattctacctcgagcacagtcctcgcatcttcccatgcaggtttgtatggctagctgtttaacgaatatctgtacgatttcccatctgagactgctcagttttatctatctctaaattgtttatgtacaaggtaaccagaatttcgcgttttgtctcagtatgtatgtattactatatctataaaactacatggaaaaaaaaatacttcaccttgttattcgttctgatgctgcaagaccagaactgggattttgggctggttcttcaagatcctacaaacagttaaggtgatgatcaggccaaaatatgacgggaagtacctgcacaaagtgaccagtgatctgctgggtggtaccagagtggaagagacgctgacaaatgtcgtcattcctactttcgatgtcaagtgcgtaaagccaacaatattcagcacattcaaggcaagatctagtgccttgatgaatgctcgtcttgctgatgtgtgcattggcacgtccgcagcaccgacggtcctccctgcgcactactttgaaaccgtggatcaccgcactggcgcatcgcgtagcttcaacgttatcgacgggggcctcgccgcaaacaatccggtgcttatttattgcttgcttggttatagtagtagttttttttctttcttctggctgggttttgacgactagcatgaaatcatgtgcgtattttgttatgatctttttgtccctgtccctgtcctgtcctctgatctgacagactctggtggcgatgggtgagataacagaacagatgaggcagaagagcaaggagttccccgagaccaagcccctggactaccacaggtatctggtagtgtcactaggcacaggccttccagagcaggacatcaagttcgacgcgtgccgtgtcgccaagtggggcatcttcggatggctcggccgccgggagaacaccgtgcccttgctgcagatgttcatgcacgcgagctcagacatgacggacagctacgtcgccgaccttttcaaagcgatcgggtgctcggaccaactgctgctgcgtgttcaggaccgcaacatacccatagcggctgtggcagctgacctctcgacggagaagaatctgcgagggctggttaagattgcagagaaccttctgcataagccactaggcgaggacgattataagaccgacgaccgcgtcgagacgacgccgagagatggccgtgccatactaacctatgctggtatgctcgcacggtttgcaaagctcctttctgatgagaggaagcttaggcttcagaacatgggacactgtatgccggtcatagcaaatcgtgaagcttgagaggtcttccgaaacacatattgatacatccatcttataggagttagagagttcgttcgtgtaggctatctgcaagctgttgtgtgtgtattgcaagttgtgacgacgacgtgagtgtgtacgtaaatggataaggcgatatggtttgctttggagccctgtacgtaaatggagaaaatgtgatgccctggcgtctggttgtctagc

SEQ ID NO: 163131 - DNA, 593 bp, Zea mays
  unsure (1)..(593): unsure at all n locations
  Clone ID: MRT4577_8034C.1
aattcggcacgagggtatgcgggttgctgacttgtccacaacaagcacatcactttcgttttcttttctcccccaagaagatgagtgagaagatgagcaaggagggatctcgctttagaccagcgaatccatccacaaagattccgtgcacctccagcgcagcctccgctgtctgtccccgcggccgcggcaaccgagcaggaagaggaggatcccgtcctcccagtctagaacagccgcttgcaaagcgcatcggcggcacggccggggattccgcgaatctgccaccgcttgctgctgagtctgacaaccgccatcgcagctgatggggatacccagcgacggcgacgacgtggtgcaaatccggcacgccgacgccgccggcgagcccaccgtcgtcaccgtgagctgccccgacaagacaggactgggctgcgacctgtgcncggccgtccttctcttcggcctcagcgtcgtcaagggagacatgagcaccgacggccgctggtgctacatcgtgttctggctgttgccgcgcgggcggcggcccgtggccgtgccgtgggacctnctcaaggaccggttgcttcagc

SEQ ID NO: 163132 - DNA, 2380 bp, Zea mays
  Clone ID: MRT4577_80351C.1
gccggccgggtctcgataactgccctgccctctctcccatcaccaccgcctgcgactgcgagctcaaagatccatccacactgagctgcccaaatccacattcccatcggcgcagacggccgggaggaggatgtccatgccggagacgttcaccctgaaggtgggggaggcgacgccggccgccgccggcaggccgtcggccgggcccgtgtaccggagcatctacgccaaggacggcctcatggacctcccacaggacatccagtccccttgggacttgttcagtggggcagtcaagaagtaccccacgaacaggatggtcgggcagcgtcaggttacagatggcaaggccggtgagtatgtgtggcaaacgtacgaggaagtgtgccagaaggtcatgaggattggatcagcgatcagaagcctgggcgtagagccgggagctcactgtggcatatatggatccaactgcccggaatgggttatggccatgcaggcatgtaacagtcaagggatatgttatgtgccactgtatgacaccctcggagctaaagctgttgaattcatcatgtaccatgctgagatatccattgcctttgtccaggagagcaagatcaaatcaatactagcagttctccctaagtgcacagcgcaccttagagccattgttagtttcggagattttgcaagcgagatgaaagcggaagctgagagattgggcgtctcctgcttttcttgggaagagttttcttcaatgggaaaacaagactaccaacttcccaataaacgtaaggaagatatctgtacaatcatgtataccagcggaacaactggagatcccaaaggtgtgataatcacaaacaaagctatcgttgctggtgttatgaccacagaacacctcctcaaagagaccgataaagtgatcacagaagaggattcctacttttcctaccttccattagcacatatatttgatcaagtaattgagaactactgtatttctaaaggagcctccatcggattctggcaaggggacattaggtacctgatggaggatgtgcaagtgatgaaaccgacaatattctgtggtgttcctcgtgtttatgatcgtatatatacaggtataaacatgaaaattcagtctggagggatgatagccagacacctttttcagtatgcctacaactacaaacttgccaatatgaggaaagggctgaaacagcatgaagcatcaccgtttttcgacaagatagttttcagcaaaataaaggaagggcttggagggcgtatacgtctcatgatagctggagcagcacctttgccagggcaaatcgaagaattcatgcgggtaaccacctgcagcgttgtagtacaaggatatgggctcactgagagttgtgcaggatgcttcacgtcaatcgccaacattttctcaatgattggaacagtcggccctcctgtcacaacaatagaagcacggctggagtcggtccctgaaatgggctacgacgcactgtcagacacgccccggggcgagatctgcttgaggggccacaccatgttctccgggtactacaagcgccctagcctcactgaagaagtgttctcagatggctggttccatacaggtgatatcggggagtggcaatccaatggcacgatgaagatcatcgacagaaagaagaacatcttcaagctgtcccagggggagtatgtggcagttgaggtcctggaaagagcatacctgcagtcaccccttgtggcatcggtctgggtctacgggaacagcttcgagtcgttcctcgttgccgtggctgtccctgagaggcaggctctcgaggaatgggcagcagccaacagcaaggccggcgactttgcagagctgtgcgctgatcccaaggcgaggacctacgttcgggatcagctgaaccaaactgggaagaaacttgggttgagaggcttcgagatgctgaaagcagtctacctggagccggtgcctttcagcatcgagaaggacctcgtcactccaacctttaagctcaagagaccccagctgctcaagtattacaaggatcgggtcgaccaaatgtacaaggatgccaaggaggggagagctgcgccatgagcccatgacggcattgccaatttgccacgagtggctatgatcctgagcattgtgattcctcgaaagcgtgtacatattgattatcacaatttgtaagtttaaggcatgtgtgttctatgccaaaatgtcagcagaaaatgaattggctaagaagctcgtgaatcgtgatagcttacattaataaatttattaagctagtccattaccttcaaacaaaaaaaaaaaaaaaaaaggcccctaaaaaaaaaaaaaaaa

SEQ ID NO: 163133 - DNA, 411 bp, Zea mays
  Clone ID: MRT4577_80352C.1
aaaataaatctttttaatacttcttctttgtctatattactcttttgatcacttgctcccactatcacatttgatgtttctgttttctggaaggaaaaaggtggtgacatcgagagtgcagctgaccccaaggtgtctgctcaaatgccagtaaggtctgacactatcgtgtacatgttacatctctcgctgcatatatatatctcatcctcctacctattagactattagcccaactagctatatactctggttctgttaccatgtacccatcattcgtcattagaacattctcttccagaatgatcgtttctgcatgttttgagcaaggaaggacttatattacacaggtaaaatcttggatcacatgttggcagtaatagtgctctctttctgtttcctgtcacctga

SEQ ID NO: 163134 - DNA, 427 bp, Zea mays
  Clone ID: MRT4577_80353C.1
ctactacgtcatcaccgactgactttaaactagcccactagctaggccggccctgccttgctcttgctgaaagtcgcggcatgtgaatccatagtttgcgagtccaatcaggcgtgccccccaattatttaagagatgagacagggggggaggggactgactgatggacagcgagcgctagctacctagccttgtgtctggagagctgcatccggcgtccattagcctacctgaagggtcttcagaaaaggcagaactcaaaacagcaaagatccctgacgacgattcagctgctatgactgatgaagttggctcatgtgctggtaactaaagagtttgcctcagggccgttcgtcagtcgtcacggcttcgactttagccttggtatttcaggcaggcaggaagcaagctccatttgaattgattg

SEQ ID NO: 163135 - DNA, 1412 bp, Zea mays
  Clone ID: MRT4577_80354C.1
gactcctatgggcgattgggaccctcgaggccgggccggggagtttcctcctccactccctcccccccgcctccactaccccactcccaggcgccgcacaggtacgtcgccggcggcgatgacgacgcgcttcaagaagaaccgcaagaagcgcggccacgtgtccgccgggcacggccgcatcggcaagcacaggaagcatcccggaggtcgcggtaacgccggtggcatgcaccaccaccgcatcctcttcgacaagtaccatcccggctacttcggtaaggtcggcatgcgctacttccacaagctccgcaacaagttctactgccccgcggtcaacatcgagcgcctctggtcgatggtgcccgccgaaaaggcggcggaagccggcggcgacaaggccccgcagatcgacgtcacgcagttcggctacttcaaggtgctcgggaagggggtgctgccgcccaagcccatcgtcgtcaaggccaagctcatctccaaggtcgccgagaagaagatcaaggccgccggcggcgccgtcgtgctcaccgcctagttttcagtccttattcgcctcttggttttgagatctatatctgaactagcagtgctttcttgtctcacctatttgtgttaagaagacgtagtttttaaatccattgctccttcctgtttggacagtgctttcatatcaaatatttcaggtatattagagctaactgcgctattctcattcgttcaactgattttgtgatgcatattgcgatatctttcgtgttgtgaaactcgtatgtctcttttcttgcgctataaggttggtagaaacaatgtgaaatacgggtattgctagcttgttctctttgtattgtagagtgtagactaataaactcgactcaattcacaaaaaaaaaaaaaaaaaatttgcggccgcaaattttttttttttttttttgccatttgaatacgtttatttatgcattacttaattagtgagaattcacacatccattattcggcatgcccgcgttatttcatcgtatatatatttatttcaagttctggggcaaggaaaggaaatagcggctagcttatatattatcagccgatgtggggcgtctgggcgacgatgtcgacgaagatgcggacacggttagggcgataatccgcggtcaccgcggagccgacgggcagcaccacgatgtcggcgtccggcttgtccttgaggatcaccttcttggcgtcctccacgctcagcccgaccacctcaggccacgacgtcttggcgccgccgccgccgccgccgcactccgtggagctcatggtgtcgcgaactgccggaccagttgacgatatgatcgatgggcaggtaaatcttgcttgttgcactgctggttgttggatatcccggccgg

SEQ ID NO: 163136 - DNA, 822 bp, Zea mays
  Clone ID: MRT4577_80355C.1
ttcagcactattaaaagttttgctccccctccctcacccgcctccactcccccctcccaggtgctgcccaggtaagtcggcggcggcgatgacaacgcgcttcaagaagaaccgcaagaagcgcggccacgtgtccgccgggcacggccgcatcggcaagcacaggaagcacccgggaggtcgcggtaacgccggtggcatgcaccaccaccgtatcctcttcgacaagtaccatccgggctacttcggcaaggttggcatgcgttacttccataagctccgcaacaagttctactgccccgcggtcaacatcgagcgcctctggtcgatggtgcccgccgacaaggcggcggaggccggcggcgacaaggcaccgcagatcgacgtcacgcagttcggctacttcaaggtgctcgggaagggggtgctgccgcccaagcccattgtcgtcaaggccaagctcatctccaaggtcgccgagaagaagatcaaggcagcaggcggcgccgtcgtgctcaccgcctaggtttcagtccttgttcgcctcctggttttgaaatctatatctgaactgatagtgctttcctgtctcagcaatttgtgttaagaaaacctgtagttttaaaatatgtggttcctgcctgttgggcagtgcttatgcggtttttgatgccagttcatatcaaatgtttcacatcaattaaatcgatcctcgctaccagttgtgctagtttcatctatacatttgacttatggtgcgcactgtgggatctttgctgctgtgaaatgataactgggctttgttggcagattattagaacg

SEQ ID NO: 163137 - DNA, 871 bp, Zea mays
  unsure (1)..(871): unsure at all n locations
  Clone ID: MRT4577_80356C.1
actcctatgggcgattgggtccctcgaggccggccgggctccacctccatcacccgcctccactcccccctcccaggtgctgcccaggtaagtcggcggcggcgatgacaacgcgcttcaagaagaaccgcaagaagcgcggccacgtgtccgccgggcacggccgcatcggcaagcacaggaagcacccgggaggtcgcggtaacgccggtggcatgcaccaccaccgtatcctcttcgacaagtaccatccgggctacttcggcaaggttggcatgcgttacttccataagctccgcaacaagttctactgccccgcggtcaacatcgagcgcctctggtcgatggtgcccaccgacaaggcggcggaggccggcggcgacaaggccccgcagatcgacgtcacgcagttcggctacttcaaggtgctcgggaagggggtgctgccgccaaagcccattgtcgtcaaggccaagctcatctccaaggtcgccgagaagaagatcaaggcagcaggcggcgccgtcgtgctcaccgcctaggtttcagtccttgttcgcctcctggttttgaaatctatatctgaactgatagtgctttcctgtctcggcaatttgtgttaagaaaacctgtagttttaaaatatgtggttcctgcctgtttggcagtgcttatgcggtttttgatgccagttcatatcaaatatttcacatcaattaaatctatcctcgctatcagttgtgctagtttcatctatacattcgacttatggtgctcattgtggggtctttgctgctgtgaaattcataactgtgcttgttgcaagattattagaaactatnnnnnnnnnnnnnnnnnnnnnnaaaaaaaa

SEQ ID NO: 163138 - DNA, 1028 bp, Zea mays
  Clone ID: MRT4577_80357C.1
cattgggtacctcgaggccggccggggtttcctccccctctttcactcgcctccactcccccctcccaggtgctgcccaggtaagtcggcggcggcgatgacaacgcgcttcaagaagaaccgcaagaagcgcggccacgtgtccgccgggcacggccgcatcggcaagcacaggaagcacccgggaggtcgcggtaacgccggtggcatgcaccaccaccgtatcctcttcgacaagtaccatccgggctacttcggcaaggttggcatgcgttacttccataagctccgcaacaagttctactgccccgcggtcaacatcgagcgcctctggtcgatggtgcccgccgacaaggcggcggaggccggcggcgacaaggccccgcagatcgacgtcacgcagttcggctacttcaaggtgctcgggaagggggtgctgccgccaaagcccattgtcgtcaaggccaagctcatctccaaggtcgccgagaagaagatcaaggcagcaggcgggcgccgtcgtgctcaccgcctaggtttcagtccttgttcgcctcctggttttgaaatctatatctgaactgatagtgctttcctgtctcagcaatttgtgttaagaaaacctgtagttttaaaatatgtggttcctgcctgttgggcagtgcttatgcggtttttgatgccagttcatatcaaatatttcacatcaattaaatctatcctcgctatcaaaaaaaaaaaaaaaaaaaaaaaaaaaaaaaaaaaaaaaaaaaaaaaaaaaaaaagaagaaaaaaaaagaaagaaaggggccctcgagggcaaactataaggaccgttaaaagagggcaaggggtcacctgggcctaaccaggcccctgggggagcaccagggggaaagcccagggccgcccacagtagcgagccgaatcagatcagggagggctaaggggaagacccaggggggagtaaggagacaggtaacgcaaacggattgagaggggcgaacaacgcgcggacaaagggggaa

SEQ ID NO: 163139 - DNA, 227 bp, Zea mays
  Clone ID: MRT4577_80358C.1
aaggaaacacacaactgcacgctttaatttccggtgtttacaccaataaatggtttatgagacccagaaacagtcgcatgattaacacctgccttgggcacctccacagagaccacgcaggggaatcatattgttgacggtgatccccgccgaatttaaatttttgcccaagaaaacacggcctattttatcataaacttttgtccaaaataaaagattccaaaggg

SEQ ID NO: 163140 - DNA, 446 bp, Zea mays
  Clone ID: MRT4577_80359C.1
gggggttcaggatatagcaatcacaaaaccaaagcagggcccggtacaagcagaacaggaccccactctctggccccagacccaatataccaacaaaccacatacttacccagcaacaaccaggtcacattctaaccgacccactgaacaacagtttccaaggaacccaattattacccaaaaaaagggccaaaaaaaaaatgaaacaataataataataataccggacccccctaaaacggacactaccggacccccctaaaacggacaccggaccagaaacctaatgaacccacccctcgaccaccaaaacgggatgaaagaaagaaaaggcaggcccccgctgcgtccaatgcgaccacaccttgtaaacacaccggggggaacttttgattacaatataccaacaaatgaaggggtatgaacaaaacccaggcataaatggc

SEQ ID NO: 163141 - DNA, 329 bp, Zea mays
  Clone ID: MRT4577_8035C.1
cccagtgccagagtgacagtgggactcgagatcgtggtgcttgtggattacaacatgtggctcccggaggcggctccgatggtagggccttgcccgttctgccatgctgcaccggcgggcacggcagaggtgtgcccccgcatcgctcctgtagtctcctggtgggcaggggcggcatcgggggggtgttgggtggagccggtcgggcttgggagctccagactcgcggaccccgcacctcgcacagagatctttcagggtccgggctgttccccagctgcagctgcgccacggcacccgcttgttacgagaagatttgtgttcggatc

SEQ ID NO: 163142 - DNA, 316 bp, Zea mays
  Clone ID: MRT4577_80360C.1
tgtcacgcggccggggaacacgggtggcgccaggcacgcgcacggggctggtacgtgtcgggaggggagaagagggattaatgcattagcagtggcttgaccggggccagaacatacatgaagatgagcaagggatttttcccgatgaggtggccatcgagaaggtgacagaatctcctggaaggggatacatcaagcagtttaagcaagagcagcagaatattctcactccggatgcaggaaccaaatgctgatggggactcccagacttgcatgcaagttaatgcctgcggtggtcgatcattaggatgctgag

SEQ ID NO: 163143 - DNA, 458 bp, Zea mays
  Clone ID: MRT4577_80361C.1
gggggggattctacaacaacgggggatgaaacaaaccttttcataactgaaaattggaccccgggcactgaatgggaacactgaatgggaacaaggcctgaaaactgaagtttttggaaaaattaaaaaagtttggggttacataccccacacgattatgcaattttgcccaaaagaaaaaacccctgtttttttttttgaagggacaaactcgcaggacacaccctggataaaatgcaggctgacgagtcaacatttatgatccaaacggggtttcgggttacgggcatcgcacagggcccttgaaccaaccattggcaaaggggaaggccaggaaaaccaaggggggggacctccccaaaaaattattttgggcaggggggtcatcatggggttttagccctccctttcccccggggtttggcaaaactgggttggccccttttccttggggaaaa

SEQ ID NO: 163144 - DNA, 408 bp, Zea mays
  Clone ID: MRT4577_80362C.1
taaaattaaaccatggctgcttctacaatggctctttcctcctctaccttcgccggaaagacggtgaaactcgcaccatcttcttctgaaatcagtggaaatgggagaattacaatgaggaagactgctgccaagcccaagccagcttcctctggtagcccatggtatggtcctgaccgtgttaagtacttgggcccattctctggtgaatcaccaagctatttgactggtgagttccctggtgattacggatgggacactgctgggctttcagctgaccctgaaacattcgctaagaaccgtgagttggaggttattcattgcagatgggccatgcttggtgctcttggatgtgttttccccgagcttttggcacgtaacggtgttaagtttggtgaagctgtatgg

SEQ ID NO: 163145 - DNA, 249 bp, Zea mays
  Clone ID: MRT4577_80363C.1
atttctgcccagtttcctgggaggtttggtcctgtcatggagcagcatgtggacctagcaaacaaaagtgtgcttcttcaactttgtgcagcctacaatgccaacattgtctaggtaacaacttcaatgatattattttataagtttaaaccatggatcaaacaaaaaaaaaaaaaaaaaaaaaaaaaaaaaaaaaaaaaaaaaaaaaagacaaaaaacaaaaaaggaaaaaaaaaaagcaaggaaatt

SEQ ID NO: 163146 - DNA, 625 bp, Zea mays
  Clone ID: MRT4577_80364C.1
gggtaaccgcgcccccccccgcgagcctccccccccccccccccccccccccccccccccccccccaggaacaacttttgtgtcacggtggatcagagagaacctcagagccggagaggataagcaacacggaccccaaaggtttcttttttgaacgacaaactcgttccatacacaacacacaggacatgaatacgcttggcaccaaaaaaaatgttttccaaaggagaccggatacaataaaaaaattccccgcgtagaggggttataaacgaaacaaagctcctaaagctccttgaggatgctatccacccccttgagatcatgaaaaggacaaacttccttggagattgccacggacagggcaaggtaaaattgccctacacccatagcttaaaaaaaaaacactagcccttgagctggaacaagcgagcccttttgacacctacttggcactttaaacaaaaaccccaaacaggaccttcacaaaaaagggattcggggctggacttgacccaagccttcctaacctttgaaaaaataaccctgaaaatcagaatccaaaacacaccctagctttaaaacggtgaagcataggctagaaaggctttcccacactgggttt

SEQ ID NO: 163147 - DNA, 357 bp, Zea mays
  Clone ID: MRT4577_80365C.1
ctaataaacctgcgcttcactactctatggcagtgcttgtctacgaacccgagctgcggaggtgacaacatgctgcacgaacaacctaggatgtgaccgcatgtgtcctgcggaatagggcacctgcggattacacacagatcaacctggagatcgtgggaaatggtggaactgcacaaactacatttgcgaagaggcatgtcactggagagttagagaagaaatatgaaccaaccattggtgtggaagttcatgcgcaggatttcaccactgactgtggtaagatcagggtgtactggtgggataccgcaaggcaagagaagttgggtgacctgaaggatgggtgctgtatgcatg

SEQ ID NO: 163148 - DNA, 210 bp, Zea mays
  Clone ID: MRT4577_80366C.1
tcgtcctcacagtctttacttcatctacgtatgactatgcctaaatcccatagctcttgaagaactcgacacatacgatctttcttgttctacttaccacttatactcaacgcaccatggggctcgcacatctcgcatgcccctatataactattcctgcttctaaattttcattttactctgccctttcaacatactcgttcatctaca

SEQ ID NO: 163149 - DNA, 464 bp, Zea mays
  unsure (1)..(464): unsure at all n locations
  Clone ID: MRT4577_80367C.1
cctttggagcggccgcccttttttttttnttttttttttttttttttttttatcaggacttctgaatttttctagtatcaagtttacaaatccaaaagacaggatcgacgaaccaaacgcattttgtccatgaaaatacataaaatcagctatatgtgtgggtgtgtatataggaggaagctagagtccgaggagctgtgtgttctcccatagcgtcttggcggagcggcggagcctcctggcctcctcctcggggagctccatgtcggcgaccccgaggatgccggcgcggcctagcctggcgggcaggctgaggaacacctcttggtcgtcggggatgccgtggaatcccgcggcgaggacggagaccgggtggatgcgtcgctggtcgcggaggagcgaggacacgaggttggcgacggagtagccgatggcccaggacgtgtagcccttgaggccgatga

SEQ ID NO: 163150 - DNA, 176 bp, Zea mays
  Clone ID: MRT4577_80368C.1
ccgtccgaaagaagataaatggtcacaggacacaccatgcatagatgattgaataggactgcactaatcaagggaatggtcacatccgacttagaggttgctaaggttgaaggcgctgacattcagactgtaagtggaattctgagtcaggctaaaatggcagcattgattgttcc

SEQ ID NO: 163151 - DNA, 433 bp, Zea mays
  Clone ID: MRT4577_80369C.1
aaataagtcatatataaaaaaaaaaagaaaaaaaaaaaaaaaaaaaaaaaaaaaaaaaaaaaaaaaaaaaaaaaaaaaaaaaaaagaaaaaaaaaaaaaaagattaaaaagaaaaaaaaaaaaaaaaaaaataaaaaaaaaaaaataaaaaaaagggggggccctcctaggggttcaaattttgcttccccttccatgcaacttaatgccccttcaatggtgtccccaattttcatttcaggggcgttttttttaaatcttgttaccgggaaaacccctgggtttcccaattttaccccctttgaaaaaaacccccttttccaaatcggggttattcgcaaaagggcccctacattttccctttccaaaaatttgccccccttaaaggtcaatgggaccccccctttttccgggcttttaaccccgggggttt

SEQ ID NO: 163152 - DNA, 549 bp, Zea mays
  Clone ID: MRT4577_8036C.1
gtttctgcgcttcgcaccgaccaccaatgttgggctgcctcgtatgcgggttgctgacttgtccacaacaagcacatcactttcgttttcttttctccccgaggaagatgagtgagaagatgagcaaggagggatctcgctttagaccagcgaatccatccacaaagattccgtgcacctccagcgcagcctccgctgtctgtctgtccccgcggctgcggcagccgagcaggaagaagaggaggatcccttcctcccagtctagtgtctagagcagccgcttgctgccaccgcttgctgctgcttctgagtctgacaccgccatcacagctgatggggatactacccagcgacggcgacgacgtggtgcaaatccggcacgccgacgccgccggcgagcccaccgtcgtcaccgtgagctgccccgacaagacaggcctgggctgcgacctgtgccgggccgtcctcctcttcggcctcagcgtcgtcaagggagacatgagcaccgacgaccgatggtgctacatcgtgttctggctgttgccgcca

SEQ ID NO: 163153 - DNA, 170 bp, Zea mays
  Clone ID: MRT4577_80370C.1
attcggctcgaggttaaatagccatgctttcgacaagagccccacctcactatgtctagacacttcacctgatggctgcgtgcctctcatgcgcgaggccactgcataactgacagtgcaccctgtcgactgggccaacccggtgcatcttaaagtgcagaagacatgcc

SEQ ID NO: 163154 - DNA, 271 bp, Zea mays
  Clone ID: MRT4577_80371C.1
gcctttcttttttttttttttttttttttttatttttattttttggacaggccaaaaggggggtttattataattgcatatgtcacccaatcagtcccaaaacagttttctgggaattggcttatacaatgtcgcaacaaaactttatatttaagtactatatgccggtggaattaagggtttcgtttataaaggggagattacgttgacgacttgttaagtataccatataataggattctgtggatggggagaatttttgttaacgatt

SEQ ID NO: 163155 - DNA, 351 bp, Zea mays
  Clone ID: MRT4577_80372C.1
ctcttaacctatctacccaattttgggcttcccggccgcgtgcggacggcccagatctccgccatcctttacaaacagcagaaactgaacatgataccctatctcacagcggcgcacttaggagcttatgatttttttagcctcaacaatatttactttattaaacgcttgctccgagagtgctatacaacctcttggaaaaggcacaaggatgttctcccactgcatgcgtaaagagactgtctgtttattttgttctgacttgtcaattactcttgctcaaagccggctatttttccaacaagtagcaatatttaccaaccagggaggacttcctcgcatctcatatta

SEQ ID NO: 163156 - DNA, 741 bp, Zea mays
  Clone ID: MRT4577_80373C.1
aaaaaaaaaaaaaaaaaaaaattctatcaaaactatcattgttttgttttgcttaaccatttgtacaaattgcaggatgaggagtattattgatgatttaaaatagagccacgattttgcacacctaaggattggtacaacaattatttcctttttaattcaggtgccaaatatgaaatatgacccccctcccaacaaaaaaatgatgcgtaggcattagacgacaacctgaggagctgggtgctatcagtttggttctgcagtcattcaccaaacaagaaaaggaagaggtttgcacaacagaacatagtgcaaaactgaaacagaaagacattttcataagccattgcaagcatctctcccttgaaacagacatcacaaaaatcatgtgtatcattgaaacgaagcacagactcacaggtcgattaaattacccgaaaactcaaagaaaaattcgtgccgtgagcagcgagcagatttcatacctcattagacatgatgggcgaagaagggggcattggatggtgacgtaggaggtacctggatggagagggcagccgcggcggcacgacaaagggtgtctgtggaggctggttctcctcggagaccttctgcagcagcgtgtcacgtggtgatctccttcgtgctggacccccacagggaccctaatagaagtggaaaagcaatagtgagatagcgagggagggagggggctacggaggcgagagaaggagtggggga

SEQ ID NO: 163157 - DNA, 235 bp, Zea mays
  Clone ID: MRT4577_80374C.1
attacacagttactgctgcttggggcaattgagagcatacaggtaagcagtttccactttatatgcatgctcttagatttgagtccatccatggtctttctgacaatgtggatctggacgcaccttgtctgctatacagttgaggactctcaaaattctagtagcaagtaaggctgtgtccagtagaccgtgtaaaacactgttttgcactgtagacagagtggagtttgaaata

SEQ ID NO: 163158 - DNA, 843 bp, Zea mays
  Clone ID: MRT4577_80375C.1
atgggcagtctccagcaacctttccagcctaggacggtgctccgtttcgggagtcttgagttcatgtccctcgacggcagctacgacatgatactccttcccccgccgtgcgacagcgacaatggcggccgacagcccgcccaccggcggcggaatcgacgacgtcttccccgcgtggtggaagaacaacattcgagctcaccccaccctctcccccgccgacggaggaggaggcggggcaaccaaggccaagcaggaggcggcacctcgtcggctgtcgagcgagtcgacggcgccggtgccccaacggggggcatgtcgggcatcgacctcgcgtttgagacgaagacgagtgccgtctccccgcaacacgccaattccaagcaaacgaacgacgccagcacgctcgcgaaaggcttgctgggcgtcaccctcgtacctgagacgacggtgcagtcagtccctgacgtgacttcgtcaccgcccgtcgaccaagaggaccggctgacggacgtctcgacctgcgggccctcagggtccgaggaagatgacgtgtccgacttctgttgggatttctccggacttggtaaccccagtgccatgcgggacttcatgaccgcatgcgactactgcctttctgactgttccgacggtagccacagcctcggcgacgaggactgcggcccaagtcgtgaatgcttccacgtcgatctagggggtccctccaaaggcaaccatcttggtatgctgaagaacggtgatctccctaggcctgtgcctcgcgttgacatcctatgggagctagctgtggtccccgttcaggcggggggtcatgacccatag

SEQ ID NO: 163159 - DNA, 403 bp, Zea mays
  Clone ID: MRT4577_80376C.1
cggacgcgtgggcggacgcgtgggtgcagtgctactcattactcaacttgcaaatgcagggcgggaggagcatgagcgcagtggaggccgccaaggaggcggcaacgaacgtgggtgcctcggcctgggccggcaaggagaagaccaaggccgtcgtgcaggagaaggcggccaaggcgagggcgcacgaccctgccgagaaggcggtggcggaagccaggatgcatgagcgtgtccacgaggtggaggccatcaagcaggacgccatgcgcaagaacgccaccgtcaaggagcgcgccaccgcggcagagcaccacccgacgccactcgacgtatgggccgcctcagtgacggcgcctgctgccggtgcaggtgtgccggttgctacgaccgagacgggcgt

SEQ ID NO: 163160 - DNA, 1308 bp, Zea mays
  Clone ID: MRT4577_80377C.1
atgggcagtctccagcaacctttccagcccgggacggtgctccgtttcgggaatcttgagttcatgtccctcgacggcagctacgacatgatactccttcccccgccgtgcgacagcgacaatggcggccggcagcccgcccaccggtggcggaatcgacaacgtcttccccgcgtggtggaagaacaacattcgagctcaccccgccctctcccccgccgacggaggaagaggcggggcaaccaaggccaagcaggaggcggcacctcgtcggctgtcgagcgagtcgacggcaccggcgccccaacggggggcacgtcgggcatcgacctcgcgtttgagacgaagacgagcgccgtctccccgcaacacgccaatcccaagcaaacagacgacgccagcacgctcgtgaaaggcttgctgggcgtcaccctcgtacctgagacgacggtgcagtcagtccctgacgtgacttcgtcaccacccgtcgacgaagaggtacccaccgattcccatctcacgccctttggattcagcctcgacccgccaagcgacttcgctttggcggacgctctcgtagaggcgagtccaaaccctctggggtttcgtacgcggtcaccctgggaccggctgacggacgtctcgacctacgggccctcagggtccgaggaagatgacgtgtctgacttctgttgggatttctccagacttggtaaccccagtgccatgcgggacttcatgaccgcatgcgactactgcctttccgactgttccgacggtagccgcagcctcggcgacgaggactgcggcccaagtcgtgaatgtttccacgtcgatctagggggtccctccgaaggcaaccatcttggtatgccggagaacggtgatctccctaggcctgtgcctcacgttgacatcctacgggagctagctgtggtccccgttcaggcgggggatcatgacccacagctcgagcaaatccgcggggtgcaggccaggctcgacgagggagcaggaacacttgagccgatccgccgggacatcgggcaggaatgggcgggccaacctccggccggagaagtgcgccatctaccccagggtatccagcaccgcatcgccgacgatgtcagggtgaggccgccacccgcttccagtggagtcggccagaacctggctgcagcggcaatgcttctccgcgctatgccggagccatcaaccaccgaggggcggcgaatccagggagagctcaagaatctcctggagggcgccgcggtccgacgggccgagagctctgtgaaagggaattag

SEQ ID NO: 163161 - DNA, 257 bp, Zea mays
  Clone ID: MRT4577_80378C.1
atctccgaacatctgctcagaccttttaagttctgctccggccatggacgccacgggcactggtactttattgaaggctaacaacgtatccgccggtcgcaaggccggccgtcccatgaagaaatctgtgacgaggtccgtcaaggccgggctccagtttcccgtctgccgcatcgggcgctacctcaaaaatggccgctactctcagcgcgtctgcagctttgcccccgtctacctcgcggtcgtcctgtaatacc

SEQ ID NO: 163162 - DNA, 855 bp, Zea mays
  Clone ID: MRT4577_80379C.1
atgggcagtctccagcaacctttccagcccgggacggtgctccatttcgggagtcttgagttcatgtccctcgacggcagctacgacatgatactccttcccccgccgcgcgacagcgacaatggcggccgacaacctgtccgccggcggcggaatcgacgacgtcttccccacgtggtggaagaacaacattcgggcttgtcccgtcccctcccccgccgatggaggaggagacggggcaaccaaggccaagaaggaggcgacacctcgtcggctgtcgagcgagtcgacggcgccggcgccccaacggggggcacgtcgggcatcgacctcgcgtctgagacgaagacgagtgtcatctccccgcaacacgccaaccccaagcaaacggacgacgccatcacgctcgcaaaggacttgctgggcgtcaccctcgtacctgagacgacggtgcagtctgcccctgacgtgacttcgtcaccgctcgtcgaccaagaggtaccgaccgattcccatctcgtgccttttggattcagcctcgacccaccaagcgacttcgctttggtggacgctctcatagaggcgagttcaaaccctctgaggtatcgaattcggttaccctgggaccggctgacggtcgtctcgacctacgggccctcgggttccgaggaagatgacgagcccgactttagttgggatttctccggacttggtaaccccagtgacatgcaggactttatgaccgcatgcgactactgcctttccgactgttccgacggtagccgcagcctcggcgacgaggactgcggcccaagtcgtgaatgtttccacatgcagcgatcggcaagcgtgtag

SEQ ID NO: 163163 - DNA, 803 bp, Zea mays
  unsure (1)..(803): unsure at all n locations
  Clone ID: MRT4577_8037C.1
gccggccgggccgggaagcgtgcccccacaccgccccgctcctccactccgccgcttttcattttcaccttcccttcctcccttcgcttccccttgagtgcagcaggacccccacctgataagagcggactgctccgctcttgtcctgccacccacgcacgccatggacgcctgggaggccaccaaggtggtgttcgaccgggtgcgggcgctggacccggagaacgcctccaagatgatgggcctgctgctcattcaggacaacagcgacaaggagctgatccgcctcgccttcggcccggagcacctgctccactccttcgtcgccaccgcgcgcgccgagctcgccgccaagcccgcgtccccgccgtcgcccgtgctcggcccgctgcagtccggcgcgccctggggcctcccgagccccggctctggagccggcggcggcggcggcggcgaccaccaccaccactcgcccttcgccgccgctgaccagctcgggtacgacggcggcgccgacgcgttctacgccgacgagtacgactgctgggtcccccgcgggcgccgccggcgcccaccgccggagcttctcgctcagcgacgccgaggcggccgcttcgtggaggccctgcatgtactacgcgcgcgggtactgcaagaacggctcctcctgccgcttcctccacggcgtgcccgaagacgacgccgcggagcgggagatggncgtcatgcgcgccaaggccctggccgccgcgccgccgacgcagcagcagcagctcatggcgtccgcgtaccccttctcgccg

SEQ ID NO: 163164 - DNA, 598 bp, Zea mays
  Clone ID: MRT4577_80380C.1
ctcgaggccggccgggctcgctcggagtcgctcgagcacgctgccgccccgcttccgctcgcctgagcacgctgccaccttcgctcacctagagtcgcccgacgttgccgcctccgctcgcctgccgtcgctcgagcacgcccccgctcctctcgcctggaggctggagtcgcctgagcacgtcgccttctctggcctagagtctctgagcatgtcgtcgcctcagtcactccgcctcctcaggtgttaatagtctgtggttggggacttgaggcaacagatagcagcaggcagtgaccagcgtcaggagcagagaatgttaagtggaaacaacacatgaagctaacatggagaaggaaaatgcaatgacagtcgacatgaatcttgtgaaaaggagttcaactcataatttcttctactgccaaagtttctaatgaagagacttgtactctgtttttatgttatattgtctatttgtacgtgtggatggagatgatattatgtgatgtgatgatggatagattaactttgttggtattagatgttatttaagttaaactttgttggatattagaaaaaaaaaaaaaaaaaagcggcc

SEQ ID NO: 163165 - DNA, 175 bp, Zea mays
  Clone ID: MRT4577_80381C.1
gatcaaggggggggtaataacagccatctcaggaatacagggaggaatggggggcacaaaagggtttgcgatgttccttttttcacacctattttttatccccccctccacggctattacaaaaaggtgaagaacccctaacgtgccaacgtttaatattaagacaacacgcttg

SEQ ID NO: 163166 - DNA, 304 bp, Zea mays
  Clone ID: MRT4577_80382C.1
ggtgattacatgctgcgagctgtctctctagggcggaatgattaaaacaacgcggcgtatgcagggcgaccaccacggaacagcatgacgagcgccaactggcaaaatgatggccgccggagggcgttggaacgaaggacaggaacgcatcccacacgatgggcccaaagcaacgttgaacatactcgaggaaccaccacattgcaacatgagttagacctgcccattgtgaattaagacccaaacgagttgcgcttctatggggagtattccgagacagaaggctttattgaatcatgttaac

SEQ ID NO: 163167 - DNA, 137 bp, Zea mays
  Clone ID: MRT4577_80383C.1
gtgacgcgtagccaccggtctgcacttgagctaatacgtcggacgtgtgcagggcacctactgacgaccgcgagagcacaatgtgggactatcataaggcgaattatcggccggactaacttaggcaggctaccgcg

SEQ ID NO: 163168 - DNA, 255 bp, Zea mays
  Clone ID: MRT4577_80384C.1
aactacgccgcaggaaggttaacggtccgacccacaagttgaatcctctcaacaccacggagacgaacaaaaccagacttcccttgacctgctccacataaaagagtaactggaaaatgtgcactgcaggacttcctcaatgcactaacatacacagcaatggtggataacgggcctatctaacaagagctgattcctttaaccgtaacagccactaccgccatatccacatcaccacacagtcccttactatac

SEQ ID NO: 163169 - DNA, 631 bp, Zea mays
  Clone ID: MRT4577_80385C.1
gctcccaaggtcgcgccgcggctcccccctcccccaccgcatcccgccggtcgctcgactcgcctcaccgccgccgccggtcgacatggggttcgtgtccttcgccgggagggtcctcttcgcctccgtcttcctcctctccgcctaccaggagtttactgaatttggaactgatggcgggccagctgcaaagaatctgcagccaaagttttaacagtttcaccaaaaatatctccgtacacctcggagtggtggtgcctcatgtagagttgaagcatgtcattgccgctaccattggtctgaagggtctgggaggtctcctgtttatcgtcagcagttcatttggtgcttatctcctggccctctaccttgctttcatcacgcctgttgtctacgacttctacaactacgacatggagaaggctgaattcgtgcagatcttcatgaagttcacacagaacctggcactgtttggagcccttctcttcttcctgggcatgaagaactcggtccccaagaggcaggccaagaagaaggccgccaagtccaagacaacctagagcatctctctctgccaagatagctgtggccgtaggggctttgcgggaaagacggtcttatttaacaaagc

SEQ ID NO: 163170 - DNA, 660 bp, Zea mays
  Clone ID: MRT4577_80386C.1
tttttttttttttttttattaatttgtcccttgaatttataggaatataattaggatggagatgaaaaggtacatcacagtttgccaatctcctacaaacggggaggcactgtaactaataaaaagctaggcccttctactgtatacagacaaagacacaataatcactccacgtcgtgtatcgtgcatatgtcatcttccttgagacattgtggccgaaactgttccaatgcttgcagtcgcagttgacgaaggatacgacatgatgtatgggtcgaagccatcttcttgcatcagggccagggcctcaaagctttggtgggtgggcgctagttccggaggcgacacatcgccatggaggtactgcatgacttgccgcatgctgggccttgcactggcaaacgggtgtgagcacaacagtcccagcttcaacgccaggcacgcctcgtcgacatcgtagtcccctttgagcctgccgtcgatcgcatcggtgagcgacccattctgcaaatgctggaacacccagtcaaagagcacgagccggttctgctgcgcctcactgtgtttgataggccttcgcccacacgcgacctcgagaacgaacacaccgaaggcgaacacatccgtcagcggcgtggccttgccggtgcacgcaagttc

SEQ ID NO: 163171 - DNA, 392 bp, Zea mays
  unsure (1)..(392): unsure at all n locations
  Clone ID: MRT4577_80387C.1
cccntttaatattcccnnaagnacaaccnngngaatgtggaactattaaagatatccaccgctgaccccccagggtaggaacggttatcacccactgaagaaagggaagaaagaaaaagaaacgaataaagttcaaggtataaaacagttatagaaaaagaacatagaaagaggtgcattcggcttcctgacagcacaatggacccacggcaactcataggcacgggaatgtgtaagcatgcactccaaatacacgtccaaagcaagtcgtatccatctcagacccaccaggacgctaccaagggatcaggtcctctgaaggaccagcggcccacgacaggccctcacaccaggcttcaggaagacattgctgccgtgcggaagcttgcgcc

SEQ ID NO: 163172 - DNA, 233 bp, Zea mays
  Clone ID: MRT4577_80388C.1
ggagggaaggccattttcatgttgggtgccatgtaaacttccccttgtacctaccagagggggaaccaatggttggggaaaagattctacgtggtttgttaaatcctgggccagcatggacgaagagcggcggaggtccaacatatgacccaatgccttacagatcttttttttttctctttaaggcaccgcaccaggcaaacagccataattcgtgtcttcacacgtggaga

SEQ ID NO: 163173 - DNA, 246 bp, Zea mays
  Clone ID: MRT4577_80389C.1
atcggaaaaaaattgagaaatcttttttattcaggggggtttggggggcaatcaaactccaaaaagtcatttggaaaaaaactgtcctttcaattgcatctctttgaaaccccgatactccccaaagaccttcttgccctttagagacaaaacctaaaaccctttgaagttgcaccaccccacctcttttccggggtgatttttgggcacctttccccacccaattcgggggatggacacccggtc

SEQ ID NO: 163174 - DNA, 371 bp, Zea mays
  Clone ID: MRT4577_8038C.1
aaaaaaagggtcccgggcggggccccttgtttaacccccctaaacccccccaaaggggggggaacaaggggaaaagttgaagccttttacaaaaaaccaccgggggggcccgttaaacccaccaaaacctagaggttttggcccaagagttaaaagggcccccgggcccaaaaaaaaaaaaaacccctaaggtcccaccgaaaaagcccggtttttaagggggggggggcttaaaaaaaagggggcatatttcccctacgggcgtaccggggcggaaaaaaaaatttctgcccaggaaaaattgcccccccgcccccaccgggggggggggccccctggataagcccctttttttaagaagaaaccccggg

SEQ ID NO: 163175 - DNA, 719 bp, Zea mays
  Clone ID: MRT4577_80390C.1
cattgcaaataaccctcaaccctagccgccagcggccgccagattttgctagtaacaagtgcttattagcttcacctccccctccagctgccgccgcctgccatctccggcgacgagcagggcggagaaggagaactagccatggcctcggtggcgccggaggttgagaagaaggaggaggaggagcaggtggtgaacccgtgggaggtgtcggcggggaagggcggcatcgactacgacaagctggtcgaccagttcggctgccagcgcctggacgccccgctcatcgaccgcatcgcgcgactcaccggccgccccccgcaccgcttcctccgccgcggcctcttcttcgcccaccgggatttgaacgagatactggacatctacgagaagggggacaagttctacctctacacggggagagggccctcctcagaggcgttgcatctcggacacctcgtccccttcatgttcaccaaatatttgcaggatgctttcaaggttcctctggtgatacagctaactgatgatgagaagttcctgtggaaaaatttgacggtagaggaaagtaaaaggcttgcgcgtgaaaatgcaaaagacattatagcatgcggatttgatgttgaaaggacttttatattctctgattttaattttgttggcggtgcctttttccaaaacctgtttaaagtggccagatgtgtgacttttataaagtt

SEQ ID NO: 163176 - DNA, 2321 bp, Zea mays
  Clone ID: MRT4577_80391C.1
tcaaccctagccgccattttcccacagattttgctagtaacaagtgcttattagcttcacctccccctccagctgtcgccgcctgccatctccggcgacgagcagggcggacaaggagaactagccatggcctcggtggcgccggaggttgagaagaaggaggaggaggagcacgtggtgaacccgtgggaggcgtcggcggggaagggaggcatcgactacgacaagctggacgaccagatcggctgccagcgactggacgccccgctcatcgaccgcatcacgcgactcaccggccgccccccgcaccgcttcctccgccgcggactcttcttcgcccaccgggattcgaacgagatactggacatctacgagaagggggacaagtactacctctacacggggaaagggccctcctcagaagcgttgcatctcggacacctcgtagactgttagttcacacggctaatcaactgatggttggcgatgatatgtgctgcaagtgtccacagttaaagatgcttgggacatattgacataaacatgttccttgaagtaaatggggttttattttattttgaggagatctacacaacactcaagttttgtttgataacttgcacgtcgctttcttagttctggtcttgtaagtgatgtttcattaactatcagaatctttcttcagatacttgcaggaggcttttaaggtgcccctagttatacaactgactgacgatgagaagtacttgtggaaaaacttgactattcaggaaagtaaaaggcttgcccgtgaaaatgctaaagatattatagcatgtggttttgacattgaaagaacattcattttctctgatttttcttttgttggagggtaagattactcttcctaattttgattgatattttaatttttgactgattttttggtccatccctaaggaagtcaataccatgctgtaaatcttggttttgattgttatttgcaaactaataaaccctctggccttgtctcacagtgctttttatgaaaacatgatgcaagttgccagatgtgtaactatgaataaggctattggaatatttgggttcaatcttgaggatcacataggaaaggttagctttcctccagtgcaggcagtcccatcattcccttcttcatttccccatctcttcgctggcaaggaccaactgcggtgtcttatcccatgtgcaatagatcaggatccatattttaggatgactcgtgatgttgctcctagaattggttatcagaaaccatcactgattgaatctagattttttcctgctcttcagggggagaacacaaaaatgtcagctagtgacgcaaattcggcgatatacgtgacagatagtgctaaagaaataaagacaaaggtgaataaatatgccttctcaggtggccaggactcaatagagctccatagaaaacttaattcggcacgaggtgtggatgtcccaatcaaatacctgaacttcttccttgaagatgatgacgagcttgcgcacataaaaaaggagtacaaggagggaaggatgttgactggtgaagtgaagcaacggcttattgcagttctatctgagattgttgctagacaccagagagctagagctcaagtgaccgaagagatggtcgatgcattcatggcagtgaggcctcttcccaatatgtttggctgagcatcacggcgacaacttgaacaaacatttttgttatcagggagaattttaagagtctttagaattgtcgtgccaccataagtatcccctgtgttttacttcttcgggatttaggcaaacctggccaaacatcccatgtggtggctgtggttgattttgtaaactcatacttgatatggtatcaatgattcaattcagacattttttttcaagaaaaaaaaaaaaaaaaaaaaaaaaaaaaaaacgtgccgaatcggcaaaaaacaagaagaaaaagaacgccacgcagcggcggcggcgatagggaaggggtctattgtcgagaaggaggccgttaacctgtgactggacaaccgcaggccctaccccttgcgcaaggatggactggccaaccggacgctcaaactggtcggcggccactacaacttcgtgtcacgggagtacctcacatgggacaataagcagtcatcgcgaatgtatatatatacactacatgatgcatgttcgtattcagcatgcaggtacatacatatatatatagccggatcacccactgcaatgtgtgaatgtgcattgtgtaataagcaataccatatattctaccattctaccgttttttattt

SEQ ID NO: 163177 - DNA, 278 bp, Zea mays
  unsure (1)..(278): unsure at all n locations
  Clone ID: MRT4577_80392C.1
ggaagctgaggccaacaaggctgntgnaaaatatgataacacatcaattgactaccagatagagtgctacaaaagagagggtctaacccattattcatcanccaaacttcctataacnagtgcggccgtttgggctntntnataattanggaacatatacccataacaaacttntttacatgcctttgggtcaatgaaggtgaccggttcacctccagagatcagctaagcttcagcacaggtagggataaaataagggggcaaggtaattggactgc

SEQ ID NO: 163178 - DNA, 899 bp, Zea mays
  Clone ID: MRT4577_80393C.1
aaacgagcgagcatcctccatgtccaggccgctctcttccttctgcctccaccggatcaggtccggcggcaccgcgtccaccgccgcgcctccatcgatatgcgccaacaaggacgacggcggcggcggcggcggcggagagagcaggtccctaaaggatggcaagcaaaaggacgagtgggaggaggctaacgagaagggcagcgcagaggccgtcgtcgtggggaggaaggtgatggtggcggcggcggacggcggcggcgaggaggcccgcacggcgctgcagtgggcgctgtcgcacgccgtccggccctgcgacacggtggtcctgctcgacgtcgccagcggcaagaaccgacgcgatccgagagggagtccgcacctggaggccttgaggagcatctgccaggccaagagaccagaggtgtgcgtggaactttcgctggcggagggcggcaaggaccgggggccggcgatagtggaggcggcgaggaagcagggcgtttcgctcctcgtcgtggggcagaagaagcggtccgtcacgtggcggctgctgtccatgtggatcgccggcgtcaagggcgggggcgggggcggctacaccagcgccgccgactactgcgtgcagcacgcggcgtgcatggcgctggccgtccggcgcaagagccggcgagggggcggctacctcatcaccaccaggcggcagagggatttctggctcctggcttgactatagtggaatagcgaacggagtggctcaggtttataggcatagtatttatgggccgcaaaaataataattaatgcagtagattgctgtgggctgtgttttgttgctgttttagaactgacatgatatcatggattgcgtttttgcaataaaaatcaagcagcataag

SEQ ID NO: 163179 - DNA, 228 bp, Zea mays
  Clone ID: MRT4577_80394C.1
tgcattaactgcggacaaaggtgcgtgcggggctaaccatacagacgcagccgttaccaatggcttcgatcacacctggggatacggtggatatggaatgttgcagcatagagaacatagtgatgaagggggaccatttgttgttgaactctttcagaggcacaatgttactatctgcgcatggccatagatcagctaggtctgggaggtttgcatgcgctgccggag

SEQ ID NO: 163180 - DNA, 530 bp, Zea mays
  Clone ID: MRT4577_80395C.1
aattccgttgctgtcggtgtgtatatatatggaccaaatttacatacatacgtatgtactacacaatctaggcctaggtaatatccgtcgatatgattattcattagcagctaaccagctcgatggatagtcctagctagagagaaaaaaccttaggcagaggaggaggaggaggagggatggcgggggcatgaccgattgattggatttggatcatccacgcccaaaaagaacaagacatgattactgctactgaactgaactctcgtcaccatctcggattccatgcatcgatcagcgagctagccaagccaagtcactgggcggcagcagtggcggccgccggcgcgtgctgctgctgctggtcggcgcagtcggcgcagacgacgccggactggtggcggtggaacttggcgatgtagatggcggccttgttgtcgacgtcccactcgccgccgtcgtcgtcgctgggccacaccctcctcctctcgtcgccgccggccgcgtcgcgacagcaacggaattcgagc

SEQ ID NO: 163181 - DNA, 635 bp, Zea mays
  Clone ID: MRT4577_80396C.1
agtatagcaaccatagctagcatacttattttgactactttacaatatctatacatacttataggcgttgtaaactaaactgaatggacgacgatgtggacggcttggttttttgcataattacttggtaaggcgcacatatatctttgacgatggcggattcgacgaagtccatgctgtcccaattaaagaggagcgctccgaacacgccctcgtacgagaaccagaatgcgtacaatggaacgacgacgaatgctgacgagccccaggaattgcctaaccacgtgagcttcaagggagacaacgagctatacctgagcgctaggatggtggaaggctacccctacctgcagtttgcgtcggacgacataagcgatccaagtgtgaggtgcaccaagtacaactacatgatcgacggcaagcgggagatccgcgtcaagtgcagaccactacagcaagttctggcggcgcatcccaaactggatcaggggcgacaccgaccacaccagcaccgacaaccgtgacaccctgacagaggctgcctacttgggcgactacaccgacaccgcacacaggctgctgaacctgaggataaccatattgtgcaccggctgacctacgagggcaaggagagc

SEQ ID NO: 163182 - DNA, 428 bp, Zea mays
  Clone ID: MRT4577_80397C.1
ggaaattggaaaagagccggatccatttttgttttggggggggccgggggtactggacaaacatgggaatttggatgcacaaaaaaagggggttttggttttaaaacccaaaggcttgggggggttttagtatttttacaacaagaagggaaacaagatcgatccaagttgcaacgggggggcgcggtgtttctgcccgaattccttttttggtaaaaaagggggggtggccttggccggcccctcccatgcaaaaagggccgagggggattgagaccaaaaaacgatgaatcaatttggggcccaaaatttttgggcgagggggctaaaattgggggaattttgggggcgcgttgccggactccatgaacactttgagccaataatccaagtcgccctcggggcccacggaccaggaggagggggga

SEQ ID NO: 163183 - DNA, 366 bp, Zea mays
  unsure (1)..(366): unsure at all n locations
  Clone ID: MRT4577_80398C.1
cacctccccnnttttttaattttacaggagcaacagaaacgaggtcaggtggacaagcaaaacacgctacacccaaaagaccaaaccaacccccaaaaaaaaagaaactgatctaaagcggaacagtcaacctgaatattcccaacgcaacaattgaaatattgtggcgcggacaataaccgctcaagcaaatacggttattaggaaggactacacttcggtgctattattactgaacacgaagatgaaacctttaacattttcaacatgcatcaaaaagaaaggggccgtccttacatcccctaccagagcagggggtgttccaaccattccaccaccaaaaaacactgaccgggacttatcact

SEQ ID NO: 163184 - DNA, 545 bp, Zea mays
  Clone ID: MRT4577_80399C.1
gtcatagcactttttcagagcatcttaggcaccattgcaacccaaccagggaagctgcatccctgtggtggtccttaggcaccagtctttgttaaacaaaaccctttggcactattgtggttttctattctctgtctgaactctattcaaaagtatctttgctctcttgggccttttcttttactgttttgttttttttttttctaatcctgctttcatactagccagtgtggggaaaaggtacaatatgtcaaagagatgagagagtgttatttcttgggcaattttctattagtgtttcttattttggccagttcttttatttatgtccttgtgacccaggtacttggggggccagctacccttctggccttttagcgtctttgaaggagaccagacatgagtgaatacctaggagagtgtcagcatgtttctggaaaattggcagagaccaagccctgctgcagattcgtcaggccaggtgaaagggccaggcagttgcagctgatgatgtaaatattttgtacagtagataaataaatgtt

SEQ ID NO: 163185 - DNA, 292 bp, Zea mays
  Clone ID: MRT4577_8039C.1
aggctcgaggtatgaaagaaaacttgaccatttgaagatatatgaataaagaaatgtactatagatgatactttaggaaaacactgtttggtaagtgttccagtctgatattttaagtgtgtacttcctatacttgtataaaaatctttgatgtttgcaacaatactgtgatttttttaagtggatttcttttgcaagtgaacatgatcattgaaagttgatatggcagtttccaggaaataaatgcattctttgtagaatgggggtgggagattacatatttatattttca

SEQ ID NO: 163186 - DNA, 825 bp, Zea mays
  unsure (1)..(825): unsure at all n locations
  Clone ID: MRT4577_803C.1
ccggccggggggaagacagactgagtctgacagactgacagagagagagagagagagcacacgcaagacgagcgtcgccttctcaatctccgaatccccccccactcggcacgagctgcctaaccaaatccgtccacgctgtctcgtcccctcggcatcgcagtctcctacccaaatcgtcctcgcttcctcctccccgaactgacccgctgctgccgataggatagtaggatgacgaagctgacctcggagctactgcggccggtggttccggcggcggcgctggacgaggcggcgctgctgcgctacctggtggccaacgtcccgggcttcccgggccacgcgcccgcgctatcgctgacccagttcgggcacggccagtctaaccccacctactgcatccacgcctccgcgcccggcggggggccgcccaggcgctacgtgctcaggaagaagccgcccggggccatcctccagtccgcgcacgccgtcgagcgcgagtaccaggttctcaaagctctgggggatcacacagatgttcctgtcccgaaggtttattgtctctgcacagatgcaagtgtaattggaactcctttctatataatggagtatctggaaggaataatatatcctgatagcgcgttgccggnggtaactccatctaaaaggcgggctatatatttgtctactgctaaaactttggctgctatacacaaagttgatattaatgccattggattacaaaagtatgggagaaagagacattattgcaaaagacaggtagaaagatgggagagggcatatcttgcatccgctggcgaagga

SEQ ID NO: 163187 - DNA, 329 bp, Zea mays
  Clone ID: MRT4577_80400C.1
attgttgatttttttgcccacacactatacacgggcaacttttctacattgacggggttccctttaaaccccacacttacgacctactccttataaccgactactaaaaggcccatccaaccgaacaacccatggcccccttgcatacacttttcccttccccctcgccggccaatgtataccttccctcttccccatgcatgcatcgaggactaactgaagccgccgattcgaccgctccggtcgcatcattttcttttttcggaccaaaattacgttcctccaatctgattttattaaaaacctcaattctaacccaaatatttttg

SEQ ID NO: 163188 - DNA, 520 bp, Zea mays
  unsure (1)..(520): unsure at all n locations
  Clone ID: MRT4577_80401C.1
ttctcgagtttttttttttttttttttttttttttttttttttttttttttttttttttttttttggaaccgaccgattttcacgaggcccaaaaaaatacccaccacaaaagtcccacccacccacaaataaagtttaaggggacaccccgcaccaactgacaataactttgggaagaaacggggccagccagcaactgcagcacactaaaaactgacaacaaaccgtttagcccacctcctcaattttggggccaggccccccgttgccggaaggggcgtccttgtccatgccgccagcgccgcccatgttttaacccgcgccctggaacattttggcaataatggggttgaaaaggttttccagctccttaattttgtcctaaaactcgcccgcctgggaaagctggttggcgcccacccagttgagggccgggtaaatggcgccctcaattttttttttgncatcggccggaagtttgaacgcaattttctcgtccttgatcgggttgcccatgtt

SEQ ID NO: 163189 - DNA, 625 bp, Zea mays
  Clone ID: MRT4577_80402C.1
gaatcctcctcactcgccattcgccacctccacctctcttctcctcccacgccgccgaccgcgggtccggctcgtcgggcccccgaaatccggccagatccgcctcagcggacgccggcaggccagccggtccgcctcgccgacgccgggacaccagccctagtcttcatccgtcggcgctcgcggtagggtcctcatatccagcctccagcgacgccggtgagccgcccttcgcctcctctgccctcgcgcctttcccggcgcctgccgaatcgtgctcacgcgcgttcgtcttcacccagaccttcgccatggagaacgcctgcataaacttcaccgccgtcgcgcgctcggcgcggatgctcaagatcgacggcttcagcctgaccgagagcatggaccacgacgactgcgtcagatccaggtggaccttcgacgggtacgagtgggaggtccgcgtctaccccgcgatgaccagctctgccggcggcggcggcggcgcgtacgtggtgctggaggtcgccttcctcagcaagccccgcaggggcagcgtgagggccgccataggctgccggctggtcgacccgagagggatactcaaaccgtccaatgaaatcagtatctc

SEQ ID NO: 163190 - DNA, 288 bp, Zea mays
  unsure (1)..(288): unsure at all n locations
  Clone ID: MRT4577_80403C.1
cgnnnctttttttttttttttttttttttgagaataaattccgaatacattgaaaggtacatggcacaaaccagtaaaaatttcttttcatttaaaaaaaacttgggccttatgcattggaagggacatttaaaatttaaaggacctaattcctctgggggttggatggaaccaccaccggtttttaacaaggccctaaaccattcaattaccacctttataacataacccaacaaactgtttcctatttaagggccaaagatttcttttacttaatttttccatttt

SEQ ID NO: 163191 - DNA, 132 bp, Zea mays
  unsure (1)..(132): unsure at all n locations
  Clone ID: MRT4577_80404C.1
cagctaanaagttaggtcatgcctctactctaactctcctaagtacagtgagatgtatctnngaattgcaggggctggagggactgtgctatatatgaggacatcacttagtactttagaatttatgggtca

SEQ ID NO: 163192 - DNA, 866 bp, Zea mays
  Clone ID: MRT4577_80405C.1
gagacttatgtacagtttatttactacgctcttgtcgctatgtacatgtgcagttgaacgacaagctcggcccgtgctgtaacttttagcacgtacacaacacataggagtacttgtgtttcacatatatggccgctactggagctagcagcagctgaagcctacaggattacacgtacaaccaccagctgggctcgaaggagcagctttgcctcctcttctcatcagttgaggtgctcctttggaccaccctctgaccatgccctttattcttcaaaacaaaccttttttttttctttctctcgagggcctattaacacaccttgtatacgtacgtaatacgtacatgtacacttgtactgttgtacacgccgaacggtgcctctcatatcaccgctcgaacttgttgcccatcacgagcagatccactaacctgccaactggcggcgggacgctgagcggaggagcggcgacgccaggctactgctggccctggacgccgccggcgacgtggccggggacatcgacgacggcgcggcgtgccagctgccgctgctgctgccagagtcgacgacgcagaagagcgccgacgaaccacacggctggtggtggtggtcgccgccgtacagcaggcggcttccgatggcgacctgatgcctcgccttcctgtactccacgatggctcggtacaccaacgggatcaggccttccattgcaatggcgaccgagagcttgctataccttgctgagctcctcgagctcgagcaagaagtgagcctcactcaacgatgctataaaagggggtggtccttcttcatctctggtccctcatgaggctagctagcagctatctgctgcttttcacc

SEQ ID NO: 163193 - DNA, 557 bp, Zea mays
  Clone ID: MRT4577_80406C.1
gttgtgagtacttgactgatctggttctatggaccagttgcgttttttgcacccaaaggtactcggacgtcctgatatctgtggatcatgctataaattgtggttgatgctaaacgtgcggcaaagaagtaccctgaacctgaaggagacgagcaccgtcgcgcaggccaccatctaactcggcgtggacggcggacaacaatgacagacccaagttcctcgaggccgcagtggaatgcatcgaggctctcctagggtgcatatagtgaggcaactgcaagtgctacccctgcaactggtgttcacataactcgacgaccaccgaaatgattattatttatctaacttgccttggtggatgaacaataataagcgaagccgagctggctgtcatacataggtattgtgtggtgtgcgtgatagagagagaaacacacttcttcaggtcgctatatatctgtggatgtgtggcgtaactctctgtgctcacgtatccacgtgtgtctacctacatgctggtagatccgattgcatctgttgttaccatagtagaattg

SEQ ID NO: 163194 - DNA, 571 bp, Zea mays
  unsure (1)..(571): unsure at all n locations
  Clone ID: MRT4577_80407C.1
cggncgcgtgggcggncgcgtgggcggccgcgtgggcggacgcgtgggcagcctttgacataggctggctctctgtgagatcaacccagatgccgttgttgtttatggaaccagtgtggtagatggcagagcctatggtaaattggtaatctccaagtagtgttgtaagttggtacctatccgcagccacgcatgtgcctgttgatgaagtttccttgacactctgctggtccgaagtctgaaagaattccagcctttttcttccaatgaaagtcatgctagcagtaaaaaaaaaaaaaaaaaaaaaaaaaaaaaaaaaaaaaaaaaaaaaaaaaaaaaaaaaaaaaaaaaaaaaaaaaaaaaaaaaaaaaaaaaaaaaaaaaaaaagggggcgggccgttttaaaagaacccaagtttacttcacccgtgcttgcgaacgtaataagtttttttttaggggccccctaaaattaaattcactgggcgcgggttttaacaaacgtggggaactgggaaaaaccctggccgttcacccaatttaatatcgctttggaaaaaatatccccttt

SEQ ID NO: 163195 - DNA, 1027 bp, Zea mays
  Clone ID: MRT4577_80408C.1
ggtaccatcaatgaagattgtacaaaatcaagggtccaaatgggtacagtagataataattgtggtccagctggctcccacgtcatgagaccagccagatcagccagcaacggtcacttctacggtgcgccggcggcacaatcacgacaaccactcactcctctccacgtggccacctgcctcttacccaacggctatttcaccatgtccccatccccagccgcagccggcctcccgcgtccccgcctgtcgctagttctctcgccttgaccgcagaaataaaacgaaaaaaaaacagcgcgccaccgccaccaaccaaacagaggaaaaggaggggaggaagaagcggaggagagagaaaccctaatcgagatgggcaagcttctctgcgacccctccgccgccgccgtcgccgaggccctgccgccgtccccagcccccgctccgcctccgccgctcctcgcttggtcctccccggccccggcctcctcccccgaggcctccatctcgcccacaggctgggacgcggtctgggcgctcgaggaccagcagcgccgccgcctccaccggatctgggagcggggcgtcgcgtggaaaccctcctcgccgggcgccggcgaggccgcgctgcctcccgtggtcttccgcctcgaccacggcggggaggtcgacgccgatggcaactgcctcttcaccgccgcgcggacggcagccgctgccaaggccgacgcgcgcgagctgaggcaccgcgcagtgcgccgattcgccgaggtctacgccgccgctggggaggacgacaagaacgccgtcgacgccgccgtgaggcacctctacgcgccggatctcaaggccgggtggggcgtccatgtcgtgcaggagatcaaggtgctcgtgcccaaggcccagcgccacgcgctcgactccgccatccaggagctcgtcgatctcggtatccaaaggtaccgagctcgcgaaactgcccttgctcgctgctctagctcaatcttttgttttctcgccattcaag

SEQ ID NO: 163196 - DNA, 230 bp, Zea mays
  Clone ID: MRT4577_80409C.1
gggggaacaaacaagcatgggcattggggcttcctttttgcgagaaaatcgctggatattgggaaatcttccattacaacagggggggggaacccttcagtcccctaaaacacattttttttttaacaacgggggcggatcattgtcatcattggggaaacctccatgatcccccccccaagatgaaacccgggggggggcaaaaaaaaatagcgctgggtgaatcaccc

SEQ ID NO: 163197 - DNA, 872 bp, Zea mays
  Clone ID: MRT4577_8040C.1
tcgaggccggccgggccgggatatcataattttttaaaataaaagaaaaattcctcgcacccctcaaccctaaaccatgccaactcaaataataaatgcgacgacaatattcgcatcgctaatgggcatcaatttcctcgtggtttccatgatcgcatggagccattactctatgaagggcctcaatgacaactacaacaaattcccttcagacagtatccagatcccatacaatgatactccaattgaaaacatcacataccgtttccaagacccatttatcgcttatcatctcatggacaagcttgatactgcgtcaattcttgacaagagtacaataaccagtccaacactttatcaccgccctttccatggactcaagataaatgataattattgcaaagaacatcgtgctcattttgctaatttcccagagatagtctttgacagaattaacctcgtttcagatttctggacgaatcatcagctaaaaatgacttctttacgtcaacttggaggcaaagatgtccaaccagaaatctccttcaacattattggaaagccagaaaatcgcaaagacgccttcttattcaaatacactccaagccttgaagccaatatgtacttctttaacaatccattccaccaatatagactgattggcacagaacattcttgcctttctcaagtctataaccatattcctggaagcgaaacctgctgagaaaagatatggtggcaattctatcgctgaaataacaaaaaaatttaatccaagcctccaatgcttggaaccaagaagttctttccacataccaacgccctttggaaaagaaaccaggggaaacttcccttccccccttcaaaatccc

SEQ ID NO: 163198 - DNA, 615 bp, Zea mays
  Clone ID: MRT4577_80410C.1
gtcatgcaacagccagcccatctcatctcatctcgctcgatcatcgcactcttcgtgctgagccgtttatgcacaagaccacggcgaagatgtcgtcgacggccaccgtcacccgcgcccacctcgataacaagctcgccctcgccaaacgctgctccagagaagcgacgctcgccggagccaaggcggcggccgtcgccaccgtcgcgtctgcggtgcccacgctggcgagcgtgaggatgctgccatgggccaaggcgaacctgaaccccaccggccaggcgctcatcgtctgcaccgtcgccgggatggcctacttcgtcgccgctgacaaggccatcctctcgctggcgaggaggcactcgtacgagagcgcccccgaccacctcaaggacacttccttccacggtggcgccgccgccgcagctcgtccccgtccgccggcattcttcaggccttgagctagtattatcctgcttctgccgttggccgttgcgcgtattctagaaaaaatgtatgcgtcgttgtcagtgtcccaagaaaccgctgccgcatgaatatctgacgccgaaatgtatgtacatccgtgtactgaataaaacagagggctcgatc

SEQ ID NO: 163199 - DNA, 418 bp, Zea mays
  Clone ID: MRT4577_80411C.1
aataaaaaaaaattaaaatctggtattaattttattaagttgaaaaaaaaaaaactttgaaacaataaataatccgcccccaaaaaaaaaaaattttttccaaaaaaaaaaaaaaatccctagcccctaaggggtatctggaaacccaaaaaaaaaagaggggggggaaaactctgggttcaaaaaaacggggaaaaaaaaagggtgatttttaaaggggccataaaaggaaccatccagaaaaaaggggtttttttggtggggattttaaaaacaaggccacagaaaaccttgggaccggacgcggggctgaacccggaaattccgaacagcaccttgggggggcccaagttttcctaaaaaagagacctataaaagcagggggtaaaaagggacatactggattcgggggggaaat

SEQ ID NO: 163200 - DNA, 582 bp, Zea mays
  Clone ID: MRT4577_80412C.1
atctatcccaaccagccagccagcccatctcatcccatctcactcgatcaccgcactctttgtgctgagccgtttctgcacaagagatcatggcgaagatgtcgtcgacggccaccgtcacccgcgcccacctcgagaacaagctcgccctcgccaaacgctgctccagagaggcgacgctcgccggagcaaaggcggcggccatcgccaccgtcgcgtctgcggtcccaacgctggcgagcgtgaggatgctgccgtgggccaaggcgcacctgaaccccaccggccaggccctcgtcgtctgcaccgtcgccgggatggcatacttcgtcgcggcagacaaggccatcctgtcgctggcgaggaggcactcgtacgagagcgcccccgaccacctcaaggacacctccttcgctggcgccgccgccgccgttcgtccccgtccgccggcattcttcaggccttgatctagcgtcctgctaatgtatgatacgcacgcttgtgcccttgtgcgtattctagagaacatgtgctttacatccgtgtactgaataaaactgagggctcgatatcctggtttcg

SEQ ID NO: 163201 - DNA, 221 bp, Zea mays
  Clone ID: MRT4577_80413C.1
gttcaatatcctagtataccttaataaataatttaagatactatgatgagagcacggttcccattactgttgctgggacttgtttacctggcttcagtttctgtctcatttggcattgcttactgggaaaaagagacccccaaacacaacaagtgtctccagagttgcaatagcgagagagactcgtacaggaaccaagcatgccacgctcgttgcaacct

SEQ ID NO: 163202 - DNA, 235 bp, Zea mays
  Clone ID: MRT4577_80414C.1
agggaggaaacggggacccaaacttcttgccaaaatttacccctcccgggagggcggaaagccccccctggatggttagcatccaaaaaccctaccggggctgctttacatggctcacgctgaaaccaacccctgggtattggttgcgccccaatagggcccggaaccactttggctggacaggcttagcattccccggaggaaaatcttttacccgggggtttttttggaaatt

SEQ ID NO: 163203 - DNA, 155 bp, Zea mays
  Clone ID: MRT4577_80415C.1
agggggaattttttgagggcgaagaggcgagcacccagaaacagatagccggcgcggaaccagctggtagcgcggccaaagactagtccacctcgcctggctcacggaggagggagccgaagctgaatgggcaagccctggatcgaccccttgag

SEQ ID NO: 163204 - DNA, 818 bp, Zea mays
  unsure (1)..(818): unsure at all n locations
  Clone ID: MRT4577_80416C.1
cactctgctccccgcctgtacaatggacccaacgatcgcgctcaagcgctgcctgcggatcgacacctatgccagccattggaggaggtcgaggagccctcgagttgatgctcgccctcgcctgtgcctaggattagctcggtacataaccaccacgtcgcatcgcctcgccgtccgagagaaggaaaaaggaggaaaagtatgctcaccagaatccttggtggtggcgtctgaacccgcatcacgttgtccctcacaaattgcgaccgcctaccaccattgcctattgcaggtgttcgactacgaggagctctaggccgccatagccgactttagctgctcatagaagcttgtagaagaaacctcccctcctcaaagcaccccttcctccatcggcgctgcatcggtgacttcgcatacgggccatctcggtcgagcatcagccgagcggagcgagcaagtctgcaggtaaagtaaagattgcttggttataatttatggttgggaaatgaataccacaaggtttttaatggtgtcttggcttgtattgctggctagcaaatgacacaattgctaacttgcatttttgtaagtgtctttacggtcccttatccggatgttttgtttttttcttcccgttatcaggcgaggtcgagcagcagaggacgccggcgacaactagcttgctccccggagcgaagggcgaggaggtcgaaaggaggaaggagacatggagctgtcccgcagagcgtcggttcagcatcaagatgctgctgccccccctanggaggagcaggagataaagagaagctaagcag

SEQ ID NO: 163205 - DNA, 367 bp, Zea mays
  unsure (1)..(367): unsure at all n locations
  Clone ID: MRT4577_80417C.1
atttatttacgctgaggcgctggccggtcgagggccgcgggccgtccgctgtgggggcggaggcagggtggttgcggccgcggcgttgcgggcccagccgaggccggggccgaagccgcgggccttgagctcctcggactgctggccgagcgcccacgttttttttcgagacgngggcgaagcagtggcgggagggggtctctgggagtgccgcgctctgcgcgcgtctctagcgcgctatacgtccgcggttaggtccactggcttcccgtaaaatagacaaaacaccgtgcacagctcccacaccgaaccacacaaccgcgcgccggggccacaatatctctcccatctaaccaaccgtaataca

SEQ ID NO: 163206 - DNA, 445 bp, Zea mays
  Clone ID: MRT4577_80418C.1
gcgacgccgcaccgtttccatcgccgacgaaaccacggagcgcgcccacggcggataaatttgggcgcgggcgggaaggagacacgcgcggacgacgagagagaaaccccacagaccgctccaaaccccacccacgcccctcccctcccccaaaactccgccgccgccggtcgccatggagaggaagcaggccgactacagcaacctggacgagaggtacaccatccagggggagaggtaccagggccagcagtacagccacatctactacacccgcctccaccacatgcgcaccctcctccacgccctcgtcccctcccggaagccgcacctccccgtcactacggtacttggactcgaagaaggaaaagattgtgtgcttgttggaactttatacaagcacatgaaactgaagccttcaattctcgatgaatactcaaaggag

SEQ ID NO: 163207 - DNA, 317 bp, Zea mays
  Clone ID: MRT4577_80419C.1
aggaccgtcacggcggatcctaccaccatgctgcccccgccgcgaaacactcgaacctgcccatcccacgccggcgaccgcaccacacttccgatgccgccacccgcgcctagtccggacccgtaccgcgactgggccgacctgccggagctgccgctggcggaggtgctccgccgcctccttccctgcatccgctcgctctacgccttcgcggggacgtgccgcccctggcgacacctgctccgcgcctccgccgccgatctcgtccgcccccgcgtcccgccgctcctcctcctctgcgccgacttccgcctggt

SEQ ID NO: 163208 - DNA, 459 bp, Zea mays
  Clone ID: MRT4577_8041C.1
cacaaagggagcagaactcattttagcaaagaagtgaacctgacactgacgaccagcatacatgggcatggttctgatacaacaacaatgctgcccatggatagtgacaaaggcttgaccttcaggggttcatctaggtaaacgggtcacccatccagatccgctgactaaaatgctgttgatggatagatgagtatcggtggggaaaattgtcatacatggccgggatctacaacttccgaacctaataaaacatggacacctctttatagcaattcccatattaaacataatactatcttgccctatcttcaagggcgtgggaacaccatgcttacgtaatcaataaaaacccataaactcgcctaccaaaccttctacacttgtcttcaagatctctataactatccgcgatactattgcgattaataatatacacgaacccctgctctatgacac

SEQ ID NO: 163209 - DNA, 452 bp, Zea mays
  Clone ID: MRT4577_80420C.1
agggcaatattattattataataatataggaaaggagggtgacaaattacagtaatggcccatgccacatttacagaaccagcacccaacaatcccatccgttttacgatacacattcattattattattccttatcaccatatgggagtgattacaatttctcaacagactcaaacctagaagaagaagaagaaatcctcatcaaatctcagactcagagaccatggatctcaatactgcaatatatccgcagaagccataatagggttggttcagataccccatattcaacgggttgaagaagctattattattaattggctcaacgaaggtgctcgatgttgctgctgctccaaaacccgccacagtggtggcattcaacacgtcaacgatctcattcagagactctaacctgtgactaagctcacccacctgagccctaagcaccgag

SEQ ID NO: 163210 - DNA, 431 bp, Zea mays
  Clone ID: MRT4577_80421C.1
ggatcgggggcgtttttcgacgtggttcagtttcacattacagtaataacagcggacagaaataactccagcaattccatctttactcgctgtcagcgtcgcttcacgttcccacggatgcaacggacggcgaggtcggcacgccggcagccgccctgcctttgaccaggtcgtcgatgaggcgctgcaaatcacgggacgacgagccgccttccgccacggccgcgtgggccttgacggcgagatcccgcgccctgcccctcgccgcctcccccggcccaccgggctccaagaacctttccactgcccgagccacggtctccgccggaacgacctcccttttcttgtaccgcgtgctccgcgccccgctccagacccgttccccgatcccgagcacgttcgtcaccagcctcttctcgatgaactggtcg

SEQ ID NO: 163211 - DNA, 791 bp, Zea mays
  unsure (1)..(791): unsure at all n locations
  Clone ID: MRT4577_80422C.1
ggataccaatttaaacccgagaattatccccgaccaaaagtttacgaaaatgccccccaaactcctcactcacctcatcctggccctcgtcgccgtctccggcgcggcggcggcccggcgccacccggccccggccaacttcacagcctcggggaaccccgtctacatctggccgctgccgaagaacttcacctccggcacgcagaccctcgccgtcgaccccgacctcgcgctcgacccgcagggccccggcggcggcgccgcggccgtcgcggaggcgttcgagaggtacaggcacctcatattctccccgtgggcgcacgccgcccgccccgcgtcggcggggtacgacgtcgccaggctcaccgtcgccgtcgcctccgccgatgagacgctggagcttggagtggacgagagctacacgatctacatcgcggcggcgggcggcgccaattccatcgtcggcggagcaaccatagaggctaatacaatatatggagctattcgcggattagagacattcagtcagttatgtgtttttaactacgatacgaaaaatgtcgaagtgcacggtgcaccatggtacattcaggatgaaccacgctttgccttccgtggcttgatgctagacacctcaaggcattacctcncagttgatgtgataaagcaagtcattgactccctgtcattttctaagctgaacgttcttcatttgcatatcatcgacgaacaatcttttccattggtagataccatcatatccaaatctatggaagggtactattcaaaat

SEQ ID NO: 163212 - DNA, 728 bp, Zea mays
  unsure (1)..(728): unsure at all n locations
  Clone ID: MRT4577_80423C.1
cctcgagggccggccgggattaaaattnnnnnannaaaaaaaaaaaaaaaaaaaaaaaaaaaaaaaaaaaaaaaaaaaaaaaaaaaaaaaaaaaaaaaaaaaaaaaaaaaaaaaaaaaaaaaattccctgggttgttcccggccagaacccatttgtttggccccaaaaataaaccctggctggggaaagtttaaactatttcaaattggaaaacggcaaagggctcttaaaaccatttaaattttgtttgagggaccgggctacccgaaaacccgaaaaatttcaaaagtttttacgggaaaaaacccccaatttccggggggggccctttttttgaaaaaaaggttgacggggtttctcccccccggcccaatgtttcttgaaaatttgagggatcccacgcccttcgggccgggaacgaatatttaaaatttctgccctatcaattttcaagggaagaaaagggcccacccaggggggggccgggggacgaaaaattagggtccattcccgaaaaggaaccctgaaaaccggttcccccttccagggaaggcagcgggggccaaatttccccatccctgacccgggggggaagggccaaaaaaaaacaatcccgggcgcgtaagggccgggaatttgaaaggagaacaacctaaaccccttaacggggacccttggaagggcaagtctggggccacaacccgcggaaattccggttccattaggg

SEQ ID NO: 163213 - DNA, 354 bp, Zea mays
  Clone ID: MRT4577_80425C.1
ttctgggagcgatgctgtcggagctcatgagcaactggtccatctacaccaacagatttgcagccatgctggacctgatcatgatcggcggcatcaacctgtcactcgggatactcccgcacgttgacaacttcgggcacatcggctggttcgccacaggcttgctcctcggcttcgtgctgctgatccagccccagttcggttggctggagcagcccttcggtgccttgaccaagtaccagttcaaggcatatcatagcatcctcctgcttgctgaccatcgattgctgtctgcagggtgcgctggtgagatcggacatggtgtccagtagagagaacggggacgaccactgt

SEQ ID NO: 163214 - DNA, 910 bp, Zea mays
  Clone ID: MRT4577_80426C.1
gcacgagtttcaggacacaatcaagggctagaagccactacaggcccaaattcagcccatacccactctcccatccacgagaccacaagccacaccaaacccgcgttcatccggggacggacgagctcgccggcgagagagcgactgagatggaggcggcggcagcggcggccggcgtggagctgggctcttcgaagccccagatcgcgacgcaggcggagatggcggaggcccgggtgccgctcgcctaccgcgaccagtgcgcgcacctcctcatcccgctcaacaagtgccgcgtcgccgagttctacctcccctggaagtgcgagcccgagcgccacgcctacgagaagtgccagtacgagctcgtcatggagcggatgctccagatgcagaagatccgcgaggcgcaggagaccaaggtcaagggcggcgcctccattggcctcatcccggccaccgccaagctcgcctgatacgggtcccagcccgatccgcttgatttaggtctgcctgttggctatagcagcgtccagaggcgttgcgccgtgcaaggatcctcaatgtttgttgtgtgaacagagatacgcgtttgaatttggcataaagttaactgttgccttctttttcccttcccccctctctctctctctctctatctccctccctgatgggtatcttcaggtttcaatttgatgatggaataaggaaagataattgtcgtattaccgatgactggatgacttttttgaagttttgaaaacttgttcaccttgtggcttgtgttgctgcctaagccaactactgccggcaggcatggcaattgcagcgattaatcacaaaaaaaaaaaaaaaaaaacaacaaaaaaaaaaaaaaaaaaaaaaaaaagcccctaattttggtgtgccc

SEQ ID NO: 163215 - DNA, 469 bp, Zea mays
  Clone ID: MRT4577_80427C.1
tacaggaagactggagcgaaccggtcgatgctgaacgccgcgtttgtggcgaggagggagcacatatacggtgaagcgcctggcgtggaagttcaggggaaatcagacgattctcgtcgacggcttgcctgtggaggtgttctgggacgttcacagctggctctttggatcaacggcgagcaacgcggtgttcatgtttcagacatgccaggcgcctgagaagtcgctgccatggtcgtactcgcagatttttagggagtcccagttgcaaggtcttggtttctcgctgatcctgcatgcgtggaagcttgaatagggctctttttttttttgcaggatcacaatttgcttctgcacctgcccccttttctttagtgctagcagaaaacgttttgttgagtctgagtgcctgttcatcagaatgctatggaggctctccaatatatgttctttcgtttcattttgtttt

SEQ ID NO: 163216 - DNA, 459 bp, Zea mays
  Clone ID: MRT4577_80428C.1
tcaccccacacctcctcacggtgcaaagcaacatacatacgttgaccagaactgtcacaacgcacgccctaatgctctccctattcccggtcatgtggcttatgactcttcatggctgtgatcatgcacagagggtgggagctacatcctctaccacgacttaaagtcaagccaatgcgatgacgtgcacattctgtgggcgagccttggaatgttctcacgacctagccgacacctacccctacgacatctcttgtggaactgaacacatgaggggcggctggtacgtctgcagatgccccctttaaaaatgcaaccaacaatgaacttacctcggcctcactctcacgtttgagagataattcaaacaataccaataataaagtatggatgcataccacactatacccgctttttgagggacttgtgtaatgacttagtcgaggcctagaccggagc

SEQ ID NO: 163217 - DNA, 277 bp, Zea mays
  unsure (1)..(277): unsure at all n locations
  Clone ID: MRT4577_80429C.1
caaggccgaggaccaaagggggcggnagcacaaaggaccaagacaaaccccccccacacaccaaacgagcccgaaacaaanagaggaaagngggaagggggggaacanggnaccggcccgggcggccgcnaagggcgaanncggcagaaacccaccacacggggggccgcccgagcaggccccnagagggcccaanncgccccagagggggcggggnnacaanncacgggccggcgggncacaacggggggacggggaaaacccgggcgggacccaa

SEQ ID NO: 163218 - DNA, 642 bp, Zea mays
  Clone ID: MRT4577_8042C.1
gttgggccgggtgaagatgaggtactacaatgcccgacaagactccgaaagcctgtgggatcgttgacgatgtactggcgctggtggagaaatagggcctggggatggcgttccatggtgagtggtgaccccaagaagtggtgcagctcacccatgtccttcatcgcaaactcctgctggagggaggagatgatggatcgcaggagcatgggggaggaggccgtgagaacaatgtcgtcaatgtagaggaggtacgccatgtccaggccatgacggaagacgaacatggaggattccaccttggcctcgacaaacctctaggagagcacgaaagtggcgaagcagatgtaccatacttgaggcgattgcttgaggtcgtagagggaccggttgagcttgcagaccatgtcgtggtgagtcgggtccacaaagccgaacgactgagtggctaagtgcagtacaccgtctccgttagagtgccatggaggaagacattcttgacgtcgagctgatgcactagccaagcccgtgagagagctagagtcagaacaatgtggatggattgatgctacttcgtactattctttacctggtatcttgtttttccaatctatgatttcaatgctgctacattcataaagc

SEQ ID NO: 163219 - DNA, 370 bp, Zea mays
  Clone ID: MRT4577_80430C.1
acttctgagttgtgagctccttgctgcggctgcttgctcccctcatctctagcctgtacaccggttggagtggttaccagtgttctccccacctgctcctctcgatccactcccccatagccatgggtgtgcaagcatacatctacggtaatcgcacgcttttcctgccttgaagcgtttctgtttcgccgctgccgctgctgtggtataaaggtggaaggctgagccgtcgaaggacggagtcccggcggagggaagattgctccgtcgccgcggtttcgcggccaagaaggtggcttacgcggtggaaaggggcggggcggggccgtgtaatgaatcctgctcccacggcaatgccgcctctggcccc

SEQ ID NO: 163220 - DNA, 1929 bp, Zea mays
  Clone ID: MRT4577_80431C.1
gtccctcccctaccattaaaagtactgtatcccccctcctctcgctaaccctttgtctccttcccccacaaaaccacctccgccccctcctcccaccagtacctgtgagttgtgagctccttgctgcggctgcttgctcccctcatctctagcctgtacactggttggagtggttgccagtgttctccccacctgctcctctcgatccactccatcccctttggccatgggtgtgcaagcatacatctacggtaattgcatgcttctcctgccttgaagcggaagccttagccttagcctgccgcctgggggaaaccttctgtttcgccgctgccgctgctgtggtataaaggtggaaggctgatccgtcgacggacggagtcccggcggagggaagattgctccgtcgccgcggtttcgcggccaagaaggtggcctacgcggtggaaaggggcggggcggggccgtgaaggaatcttgctccgacgccaatccctcctctgcccctcgattttcgggcggttgtcggtgctgcctttcgcagtaagaggtgggatctcgcgtccggcggcggcggcggcggcgttgctggatcgagcaacctccggcggtggcctgcgtacctgcgtggccgatctgtgcgtggctgttcatctcttcgccggcattgcgaggcgggctcgccgggcggtgtggattgcttgcggtgaggagtgcggaggagaggtgctgatccaagcggcgggcgggcgggcggctgcacgccaggtgttcgacgaaggaccccgaccgggccagccagccatgagggacttcccttcctgcttcggcgagagcggcgtccagatcgcggacgcgtcgtcgtcgtcgtccagcgccggcaagggcgcggcgcagaacctggtgacctgcctctaccagacgcagttctcgggccggccctgcgtgatctcgctcacgtggagcaggagcctcatggggcagggcctcagcgtcggcgtcgacgacctgtccggccactgcctctgcaaggcggacatcaagccgtggctcttctccaagaagaaggggtccaagagcctcgacgtcgaggacggcaagatcgacatcttctgggacctgtcgggcgccaagttcggcgctgggccagagccggtggaggggttctatgtcgcagtggtgttcgaccttgagctcgtgctcttgctcggcgacatgaagaaggatgcctacaggaagactggagccaaccggtcgatgctgaacgccgcgtttgtggcgaggagggagcacatatacggcaagaagacctactccgccaaggcgcagttctgcgacaatggccagttccatgacattgccatagagtgcgataccgtcggcctcaaggatccgtgtcttgaaataagagttgacaagaagcccgtgatgcaggtgaagcgcctggcgtggaagttcaggggaaaccagacgattctcgtggatggcttgcctgtggaggtgttctgggacgttcacagctggctctttgggtcaacggcgagcaacgcggtgttcatgtttcagacatgccaggcgcctgagaagtcgctgccatggtcgtactcgcagatttttagggagtcccagttgcaaggtcttggtttctcgctgatcctgcatgcgtggaagcttgaatagggctcttttttttttttttgcaggatcacaatttgcttctgcacctgcccccttttctttagtgctagcagaaaacgttttgttgagtctgagtgcctgttcatcagaatgctatggaggctctccaatatatgttctttcgtttcattttgtttttgctttgccatctcttataaacactttgtttggatagctggcaagttatgtgatgtcccagtggctttgccactctgttccttctcaaatcct

SEQ ID NO: 163221 - DNA, 1062 bp, Zea mays
  Clone ID: MRT4577_80432C.1
atgatgaaaatccttgaagccaagcgattactaaagagcgccgacccccacgaggtcgtgctcctccaacagcagcaagaagaaggcaacaccggtgcaccccatctggaggcccgggagatggaaagacgcgatgaatgcgagaagagcaaaggcatggctactgcccgaggggtcgatccctttttaaaggcagatctccctactcgcaccccatggagtcacgggcaaagtccccgccgacgtgctccagggttcccaccctacgacacgggggctaggtcccacatgtcatacaaactgatccaaaacgccgagaagggtggaccgccacgcaagaagcatgcaaccgcaccacggttgtgcaccctttcagcttcgttgcaaccggcggtccagcatggagccccgagcccacatgtcatggatcgggaaaggggatatgtcgaaaggatccttctcagcgaaggaaacgagcctcgagccctcctactgatcaggggttcgaaggttgcgccctgtggggttcggcaaccgcctcagagcactcgggcttcgagccctttactgatcagggggtcgaaggctggcccctcagaagggtttgacagccgccccaaagcacgtagagtcagggatgaccctgggtacgtccgttacatggccaaggctcgggctacactcccgaggtaccctagaacatttccgagaccagcgggaacgatttgtaatggaatcccaccggagggaggcaccgagccctcggaccctatcaaatgggtccgggtccagaaaatcacctgcagggtaacatggcgcgttcccccctcctccttgcggaaaggcgacgaaggggcgtacaataaaaagccgagacagtcctcgatcgtcgtctcgctctatgcagaggctcggaggctgctctcgcaccaggctacggccaaattgttggccatgtcgacaaaccagcttaaaagctcagagcttgaccatgcacccaggctgcggccaggccgcatgagggaacaacaaggccgaccgaggaatcacaaaaagaattaa

SEQ ID NO: 163222 - DNA, 503 bp, Zea mays
  Clone ID: MRT4577_80433C.1
gcggccgggccgacggacgctctatctctaaccaatagtcatatctaccgactaatctcaatgaccaggaaacgaatttgttcttagaggggaaaagagtctagaataccatgaatccacctgtacgatatcttctattcagttcatttacttaaagacgtatcttgttctgctaataaatatagctggtggtatcagttatagcgccagtgaaaaaccgagatcactagtttttgtcagcatgagagcgttcatttccattgtttttactaccctacatctgttgcttaagcactcacctaagcttaagttatggagaattcatgattcatcagttattttagatatttctaacaaacaagatagagtgagatgcatgatttgtaagacaaatgataaattcgattcatcagacggaacatgagtgcctaatttcgcaataagagatttgatgcggaatctgtcagttaagcctactaataatattaagaactagatcatct

SEQ ID NO: 163223 - DNA, 382 bp, Zea mays
  Clone ID: MRT4577_80434C.1
gctgctctcttaccccgagctcggaaggccgcagaatcacgcgggtcccccctcgcatgtgaccgagatggcggtagccaatcaggagaccggtgattacgccagcttccaggtcgtgagcgagggagatgctgtaactgttaaaactacatttgagaagaggcatctcactgcacagtttgagagaaaatatcaaccaagcattggagcggaagatcatccgtggcatttcaccgctgagtgcggcaagatcaggttctactgctgggataccgctggggaagagaaggttgggggcctcaagcatgcgatactatatccatggccagggtgcgatcatgcatgtcttcatgaaacctcaaggctaaatcacgagaatggc

SEQ ID NO: 163224 - DNA, 106 bp, Zea mays
  Clone ID: MRT4577_80435C.1
tattctatccgagctcgaatcgctcgagcgggctctacagcgatcaagcctccatgctgccgctgatgtcggcgtcacttctgctccagatggtggcgtagatggg

SEQ ID NO: 163225 - DNA, 498 bp, Zea mays
  Clone ID: MRT4577_80436C.1
ttgggaatcaataatacgacttgcttacttgattcttcaacagatcaagcttctttctggccacaacgtccaggatgtcttgcagatagatgatcaagctgcccattgcggctcacgctgcaacaactatagtaccctgacctgaagaagacgagcaccgacgcgacatccaccgttctccctgcgcggagtgtgcccactataaaaacgccgcgacccgacatcatcaaggccgcgcggcactccagccatgacgcccaccgatgcccctgcattacctgatacgagtgcgacccctgtgactgctgatctcgtctatcgacgaccatgcatataattattatctatctattctgtggcgtggagtgaacaataataaaccaggcctagatgactgaccataacatacgcctcgttgccagtgagtgcgaaacagatacaaacagagttcttcgggtcgctatctctctctgcatgcttggcgacaggcaatgtgct

SEQ ID NO: 163226 - DNA, 391 bp, Zea mays
  Clone ID: MRT4577_80437C.1
ggaacacaaacaaagggtaaattcccctttgtttccccaggttttaaaaaacccaccccaaccttgtctgtcttcccaggttttaaaaaaacacccccgatcttcccccgaaaaaccccgggggcccccaagggaccgggttttccctttttctgggaccccgggacaaaccaagcggggaaaaggccgggttcccccccccggggggggcccccctttcacaactttgggaaccttttttcgccgcccccggccacataatcttccgggagcccagcccgggggacatgggaccccccctccccttttggggcttcccccccagaggaagaaagacgccccccctccttgagggggcgccgtggggggaaccccccccccccttgggggg

SEQ ID NO: 163227 - DNA, 643 bp, Zea mays
  unsure (1)..(643): unsure at all n locations
  Clone ID: MRT4577_80438C.1
ggagaactcactttcccaggnagtcaccgaatccgcattcgataaacctgccgtgtcccgttcaccccgcgttcgcttcatccgggcgtgggctaccgccgcagccgccgccctacgtccggtgaccaggctttcattgagctttgccgacgacgaccacgcaccaggtatatgcccgtgcgttgtcacgaggtgggggagcaggtggagcgacacctagactacaaatataattattgtttatcgctaaacactaagttacgtgtgatctggtggtctaggtatatgcccatgcgttgccacgaggtaggggagcaggtggagcgacacctagactacaaatataattattgtttatcgctaaacattaagttacgtgtgatctggtggttagctccaaatttctagagcaaaggggcgtgggtttgagtgctcgctctgtactattttttgtgtgcgctgtgtggacgctggccatagagagtgtgaaaccgtggtagcaccagatgcccacgttaggttcttaatagattaagaagttatgcccgcgcgtggcaatgacacaatcatcgcgagaagtatttgttgttatgtaaaaactttgtttgctggccaaataaaaattagaagggacgagctggtc

SEQ ID NO: 163228 - DNA, 316 bp, Zea mays
  Clone ID: MRT4577_80439C.1
ttggcctgatagctcctggggccattgtgtggcactgtagcacatgggcaggcatgcagacctgtgcgtcactggttcactgctatctcactactgccttgctgctagcaggttctagaggttgcgacctcatggaatcttgtgtgtcgtgtgtggggtggactggagattagggcaaggccgggggatatgtgcaacagaatgaagtgtgctgggctgtatctccgaagcaggccaatacgtctctgcccttgtatgtgtacctgatacgtctataggatatgtacattctctcccgcctgtgagcttggggtgg

SEQ ID NO: 163229 - DNA, 461 bp, Zea mays
  Clone ID: MRT4577_8043C.1
ggaagcaaaatttcaggggcctattattaaaaggcccgacccccccctaatcagggcccttagggatcccccgggccaaaactgccccccgaaggggaaaaaaacttttttttccgccccaaaccccaggggggcaacccggaaatcccccgggcggggtccttaaaacattggggggggggattcagggtttattcacaaaagccgggatcctatccccatttcaggggagaaaccgcagcgggtttggcatctgcaaaagggggcccagtccttatgcccaaaccggccatgctgatccccccataaaatggcaaataaaagggggattcccgccccaagaaagccacttggtcccttttcagcccagggaaaggaaacaccccaattggcttaaggaaatggccccaaacaccaggggttcctctggatttcaccccattaaatagggggggccccat

SEQ ID NO: 163230 - DNA, 773 bp, Zea mays
  Clone ID: MRT4577_80440C.1
agtcctctctgcggccaggcgcgggccgagcgcgcgggcgtcgtgcagctcgcgggaccagtccgtcgagcggctgctagaggcgaacgcagccctcgcacggaagaagtgcaccgagaagagcgcgccggcgtcgaggacgccgccgggccaacaggtcctccggcgtggcgaggtcttggtcttggtcttggagcagggtcttggtcttggagcactgcacgaggagcacatcagcatgggagatagtggataaagagcttcgaaaagaaagaccctctattgataaccaaagacttctaagtaggagagtagatggagatgattttgttttgaacaaggcacaacgtttggcgttgaaacgcaacttgggaaactgagatgttcgccaatctgtgggccaaaggcttcagtttgctaggtgagcatctgcacagttctgaaattggcgcctattgttgcacagtttttttactacagcaattattccacactcaggctaaatttggctcagttggttacaatgtcatgttgattggaatctgccatttgtgaatctatggtctatgacttatctggtagggttagattggataaatgtgttcaatacacaaaaacttgtactatctatatgacactagagattagtgtgccagattgttaaaagctagataatctactgctaccatttaaaagtaactgctggattaattttataggtggattgtgcttaaaattgcaatatggagcgacagcaacggaattcgagctcg

SEQ ID NO: 163231 - DNA, 232 bp, Zea mays
  unsure (1)..(232): unsure at all n locations
  Clone ID: MRT4577_80441C.1
cgccgccgtcgccgncgaaacagcacatcgctctctcgatctcagtcanggcggaggtggagcagtcccaggacgtggtgangttcttcanccgctggtaccttcgacgatgtccaggtgaangatatctcgactgaacgactncctggctgtgactgcggcgangnacgtgacattcctcgncgnactccgcggggcgctactccangaagtggcctccgnaaggcgcagt

SEQ ID NO: 163232 - DNA, 178 bp, Zea mays
  Clone ID: MRT4577_80442C.1
cgattggcctctggtgctaccacacagctgcatgccagccaccgccgctccactgctacttgaagttccataatgacataattcatcacttacttgacactaagggctaaaaagatcactaacagcctactcgacacttgcgacaaagggatagcaccaacaggctaaaaggatcact

SEQ ID NO: 163233 - DNA, 523 bp, Zea mays
  Clone ID: MRT4577_80443C.1
ggggggggggggggggggtttttttttttttttttttttttttttttttttttttaggccttacaaatatcatttttctttttcatgggtgaaccacgaaaattccccttcgtgagaacaaaaaggggaccacgggggggggaaacacaaatgggggccgatgggggcacccccatgtgagtagcagtaaaaaacagcacattggggggcctaactctagcttgaacgaattgggactatcctattacctggttggggcgctccaaaaaaacatcaaaatttctgggcctgggcttggggattcacaggtgaagctccagccacctattgtgggtgggcggcataaaaaccggttttttaaacatcctcaaccttttgaggggccacactatcttcaacaactggggggggatcatctccaaaattttcaggggctgggcctgcaaacaccttgaccattggtgggggaagtagtctttccccaaggttgaagccttttctgaattcctggggtatgatcccc

SEQ ID NO: 163234 - DNA, 792 bp, Zea mays
  Clone ID: MRT4577_80444C.1
tcgttttgaacaagaggcaacggtcttatcgattaggatttgttaagctggatacaattttacaagtggaagatcaggaatatgagtacatcttatgaatataatataatatactaaaccaacatcgcgggcgtgttattgccaaacattttttttgggttcggcaaatgctccaaactaggttttagcctgctcttcttcaccttcaaaattgtacttacacaatagacacagatggctgaacctgatgattgcggataccagagcggaacaatgcccttcttaccttctataggcttcagccttcagatgtcaccacctccgcaccagcgatgtgagtagctcaaaaagctcaaaaggacttccacgccggtagacatcatcctgctgcttttgctggttggaaaacagttgtgataccaaagcacgccatgcagttaacaagacccctgtacttcccatggttaccaagataaaaggagttggtggaagatgaccagacgtcactgctcggatagcaagtcccaacggtatcccaacagcccatgatttagctgcggtgataaccgcgcttccgacgccattgcgccctttggcatcatcgccaaatccgccaagaaggtaggcgctcagcagccacccagcaataaaggggtcggccgtcttgaacgtctcggcgtcgaggacgggcaggccatggctgaaccttccaatcgcagagaacagcagaaggcagaacacgtccccgccggccagaagacccagcttcgcgtaggagacgagcttggactc

SEQ ID NO: 163235 - DNA, 306 bp, Zea mays
  Clone ID: MRT4577_80445C.1
agccagcacgactcgcgagggagcgcgcggacggcgctttacgcaaaagcaagaagaccttctccctcttctcctaggaaaacagggtggctggtgagcgcgatcgtgctagacgagacggcagcagcggggatggggagcgcgggggattgcctcgccgggtgccgcatggtggccggggggagaggccaaccgggccatcgggaaccgggtccgcgggcctccaggtgggacgcgctcccgcacgtgggccacgtgcggcgcctccggacgcgtgtggtgcctctggaaccgctggtccgacgg

SEQ ID NO: 163236 - DNA, 333 bp, Zea mays
  Clone ID: MRT4577_80446C.1
tggcttgcgacctttgggctgatttatgtgcttggtgtcgcttaagggtgctttgcctatgcctcgctacggtcgagtctcccggtaaggttataggtcgtcgttgcggatagggcggccttacgtatacgcctctcgtcttttataattcttcgggaagtcccgttcctactggaaaaggtaccttcggcgttatcggcgtaattcccgtcgtcaaacattgctacgaagcgtctaaggagctcggtttcgacgggtccgacgctataccggtgcctcccggtgacggcattcgcaacaacggttagcctcccgagcgctcgaatacggtat

SEQ ID NO: 163237 - DNA, 812 bp, Zea mays
  unsure (1)..(812): unsure at all n locations
  Clone ID: MRT4577_80447C.1
cgccantacattctctcggcgggntcattgnaccaaatctgcagttcckcattgtctgactrcgatcgacntngtcaantttcsgacngggatgttccnagctgsaatckcgakkbattkgtbwcgccgnttgccgtctccttgcgcttctantcgtgctctcccmtytccttwtcactgtgactyrtcctbtcwctkttaacdkgctggctcccttctsttccgtccggctttcttcacattttctcngtgtakatctctckctgggtagtggtccgtgtatstgcgatctctctggcatactnggtscgtgttattcttctsgntctagcatsntctatcgtgtgcgtgtcgtcacgcccgakcgctcgggasggcgcngatacgtgtncngcgccctcctnagcgtntcgngccctntcctgtggggggggtctctctgnyatcnacacgggncgnctstacgtcnggantnagncntnancnngggtcgtggnctangcntnancngtcggcgtcancnycctccacgnatgtgygacntcntngctngccccangcgagcngggcggggccgtgtngngggccacgtgtcctggatngttgggcatgtgtgsctggtgcctngccgccgggcggtgggtagsctagngctctcacgagtgtcttngtgctgagctctgcgctaatcgtttggggagcgcgtcttcagtcgtktgcgtatakctctgcgatatcgccttnmgtcaggatctgtttsagtgcttgtctggtgggckctgtmacagtccctcagngtctcattcagcgct

SEQ ID NO: 163238 - DNA, 808 bp, Zea mays
  Clone ID: MRT4577_80448C.1
ggtaccctccgaggctcggccgggtgtaccaattctgtccttaatgttggaattaataaccctagcgttcacctcattcagtcgtctctaagtcttcagtagtttcagagttcagttcagttagtcattttcagttttcgatgtctaaacttttagtttctggacactttttaatttcagttaggcgcaaagggatgtgcagcgctttgatcacgaggtgtgggatgacacagccacctcttgatgtgcacgtacttgtagggcgttgatcatcactttgttttagtcagtttggttaaatacagttgagaaaaatgcaggcagttctctgctgcacaaaatctattgtgtcctcgtgtttcgctctagaccattcttcgactctcaccggcgatgagatgtcactctcatctccgacacttaaatgaaatgagtggaagtgtgactactccgagtgtgctagacgagcaacagtgcccaactgaatacctttttccttaagctaaagatgatgacgatcctgagctaaagacctgagataactgatcaccactttgttttaccattggtttgctgcaacttgagatcctgtaaacagaaatggctgatcgtgttatttttatttgcagctgtcatgcatgtgatccatcgaattgcaaagaataaaaaagaccagatctccaaaaaggaccagcagatctggtcattttcccaagccatttacaaatgttggtagatgcaggattcatagttacagaaactatgtggttcaaattttgccagtatttgactcatcacttcatcacat

SEQ ID NO: 163239 - DNA, 714 bp, Zea mays
  Clone ID: MRT4577_80449C.1
atggactcattgcgaagcctggtgttgtcttcatcgcccgatgagtccgacgatgagatcgataaccttttgctttggcaccatgttgagcaccatgtaatcggagacacgagcatgcgtcgtaggcgctcctcattgcctcgccgtgttatccatagggatcacgctgctggagaaaatctcatcaagcaccactacttcggacctaatccagtgtatccatcccatgtatttcgtcgacggtttcggatgcaacgtactttgtttctacgtatccttcgtgccgttcaacgagaagacgattacttcacagtaagatgtgatgcaactggtttagcaggtcttggtccattgcaaaaagtatgtgctgctttgcgtatccttgcgtacgggttaccaagcgatgccgtcgatgagtacatacagattggacagactacggctagggactgccttatccgtttctgtcgcgcaatcatatcttcctttagcgaacgatacctccgtatccctaaccacgacgacattactcgcatacttagtgttaacgcggacagggggtttccgggtactaacaatgatctcaacgtccttcatcgatcaccagtgtttgatccgttacgtaatggatccatgccacctgtgcacttcactattaatggtaccacgtacaatttcggatactacttagccgatggtatatatcccaattga

SEQ ID NO: 163240 - DNA, 847 bp, Zea mays
  unsure (1)..(847): unsure at all n locations
  Clone ID: MRT4577_8044C.1
tttatgattggcccttcaatggtcatggtgatgtcaaaagctattgcgtgccttttgtttgggggatcaaagaagaggctaccagatggtgtccgtttgagaggggacattcatgccttgcttttgggtgatccatccacagcaaaatcccagtttctgaagtttgtagagaagactgcaccaattgcagtctatacctctggaaaaggttcatctgcagctggtcttacagcatctgtaacccgggatagtaactcgcgtgagttttatttggaaggaggggccatggtgctggctgatggcggagtagtttgtattgatgaatttgacaagatgaggcctgaagacagagttgcaattcatgaggccatggagcagcagaccatatctattgccaaggctggcattacaacagtactcaattcaaggacctcagttcttgcagctgccaatccaatttcggggcggtatgatgacctgaagaccgcacaagataacatagatctgcagacaacaatcctttctcggtttgatctaatcttcatagttaaagatgtcagaatgtatgagcaagataagcgaatagcaaaccacatcattaaggtgcatgccagtggtgctgcaactcaagcaaacaagaacacaaatgccaatgaaggagagaattggctgaaaagatacgtcgagtactgccgcaacacatgtagaccacgactctcagaaaagcagcagagatgctgcagaataaatatggtgagatcagacagaaaatgagancacaatcccatgagacaggaagagctgcagccatacccatcactgtgaggcagcttgaagctatcatacg

SEQ ID NO: 163241 - DNA, 150 bp, Zea mays
  Clone ID: MRT4577_80450C.1
gaccacgaggagaggccgccagagagcaggaattcggcacgagggatttcaacccatctgatccatcgatctgaagaaggttcccttttctcctacatttgcaagcatgcagcactgaattatgaattctctgtgatctcagctccgatc

SEQ ID NO: 163242 - DNA, 343 bp, Zea mays
  Clone ID: MRT4577_80451C.1
tcggtcagttgtcctgagtggcagcctccaggggggcttatatgacagttttgctctgggtgggctgatcacgaacggtgctgggcatgcatcttaccccatggatgctgtccgcagaaggatgaggacgacttcagttgaggctgcctagttcaatagctagttggacgcgttgaatcggatgcttacaatggaaggtccgatgttcctgttcacgggtgctggtgctaacaatggtggtgccattgcatgggctcgcgtgctaggctggatacgaccaactgcagatgctcttggtgggaaagaagaacggctaccgcggtgcttaaacggaaaaaaatga

SEQ ID NO: 163243 - DNA, 861 bp, Zea mays
  Clone ID: MRT4577_80452C.1
cattgggtacctcgaggccggccgggaccggccttcttcaggaacggcgcccctaccacgccttaaagaatgtttatcgtgaactgcactcagggcacactcctacggcttcaattcggcgccttccatggacaagctaaagctcaaggcgcgtacggcgcgcagcaggctcactggggcttcttcgtctgcgcccgacacgcctgaacagacggctccacaacaatcgcccgtaccacaacaaaactccagcacccatgccctccacgagggcacttacgcccgggactttggtgtccccgccgaccaacaaccacaacagcccgccgtcgagccccctacttcattgcagtcgtccattgacgcgggcagccatgtacccaagccctctagggttagcgacccgtcgtcgcacgttacataccagacgcttgcagcacagcgagcaaggagcaactctgcgccaaacagaggaacaccgccgttccagcaatacccacgccgaccccaagctgcccgccaaacgagcattggtatccgtcgcatgcccccattgagtcccttgaggcagaccgttcaaccaccagcttcatccaccccgagagcaggcacgcccttgcctgcgctcgacgaagagcaagaactaggccagctcccgtccaacagcagccaatccaccctcactcataccaactcggcacccgatcagactcgcctgcggaaaataaagagcgccgtccagcttaggataccattctggggcaagaaggatgaaggcaaatcacctgcaacaggccccagtgtcaccaccgcccaagacgacggagcgaccaactacagttcaggcatggtcgatgtctt

SEQ ID NO: 163244 - DNA, 249 bp, Zea mays
  Clone ID: MRT4577_80453C.1
cctttattttatttttgtttttaaaacactcacgtgacgatttttttttttctgtgggaaggggtgggaataaggtggttcaaaagttaaattttgtggaaattaaaaaatacgggggtcaggcccaaagaaggttgggatgtccaccataaccggttaaggccatacaaattcacgggggggcacattgtaaccacgggcgcttctgggttgagacagatctaactgaacagtttgcacggatgttaa

SEQ ID NO: 163245 - DNA, 305 bp, Zea mays
  Clone ID: MRT4577_80454C.1
gggagaaaacttttttaattattggaaaaatttgggttactgaaaaaaaaaaacaccccaaagaacaacaaggattggaaaactttcgaaagattcgcccaaattattaaaataaaaaggataaaaaggggcccaacttgcttgtatgaactttaaggggggtcctaccaaaaagggcttaaaaagcttgcaatggcttagtcttcaaggggggggagggacggtacccacgaatttccccaaaagggaaaaaatccccaaaaagggaaaatcctggacaaaaatgggggggccggggggaccac

SEQ ID NO: 163246 - DNA, 1110 bp, Zea mays
  Clone ID: MRT4577_80455C.1
aattcggcacgaggaaagaatatagcaagcttgacaattgccctatttgtggtctctcaagatgggttgatgttgaaggaaagaagattccacagaaagtgttgcgccattttccgttgatacctaggctacagaggatgtttgtgaacaaagaaacagcagaacaagcacagtggcacaagctgaagcgaaatcctaaggaaaatgaaatgagtcacccagctgatggtgaggcatggcaagattttgatagaaaatatccaaattttgcaaaagatgccagaaaccttagacttggcttagcaactgatgggtttaaccccttttcggtaaaaacactaaatacagcatgtggcctgtacttgttgtgccatacaactttcaccttgggcgtgcatggaggagtcaaatttcatgatggctttacttattcctggtcctacatcacctggaaaggacttcgatatttttttagagcctcttatagaatatttacttgagctttggacaggtgtacctacttacgatgctctaactggacaaaagtttaacctacgtgctgcagttttatggtgcatccacgattatccagctttgggcactctttcagggcgtaaaacaaaaggtttttttgcatgtattcattgtgataagcaatctctttcatacagcctaaggagcaaaattggttattttgggcattttcgttttcttccggtgggacatcgcttgcgcaaaaataatgaatttgttggtcttcatgaaagcaatgatcccccaggtaaattctctatggaagagttgatggctgaattggagagagtcaaacatgttaggcctaggaagcaacaaggaagtaggaaaaggaaacgttctaatttggacaaggatcatgtggtaatttggagttggatggttagtttatggaagttaccatattggaagaatttgaaactgagacataatcttgatatcatgcacattgagaaaaacatatgtgaaaacttgattgggactattctcaatatacccgggaagacaaaggatacaattaaagctaggcttgatctgaaagatatgggtattagaaaggagttgcattttagaggg

SEQ ID NO: 163247 - DNA, 332 bp, Zea mays
  Clone ID: MRT4577_80456C.1
gcccttctttttttttttttttttttttttttttttttttctttttatgttttttttttttgttttatctttcttgccttgggacaacaactgatttcccggggaccgcttaaaaaaacaaattgaactcctgcacgagcatgggaaacacccccccaatatttatgccacccccgcaacccggtacccttcttttaaccatggccccaaatttacagccaccaccagagggtccaatgccgtttttgactgaccataacctttcaaaaccaaccctccccccggtaagtaaccccacccccagtgcatttccttcgcatgccgccctcaaa

SEQ ID NO: 163248 - DNA, 309 bp, Zea mays
  Clone ID: MRT4577_80457C.1
tggccttggtagcgctcgacatcagcattcgacgcctcagctcgggtcagcaccgactgcagcagtcggcacgcatgcgatgatagtagctgctgctgcccctgcgcctgcagttccagcatccgcaggcaaaccgcctttactctctcctcctccagctcctccttctccctccgccgccgctccttcagcttgtggtctcaaacggctcccgcatggaagagacagcgcaccgcaccacgagcagcaggcgacgagaggtggtgtggccgatcccggcgcagccgtagactcggctctctctctaga

SEQ ID NO: 163249 - DNA, 331 bp, Zea mays
  Clone ID: MRT4577_80458C.1
cccccccaagggggccgggttcacttaagtttcccccaagggcccaagacccagtttaaacttgggggaaacagttaaaaccccagggggggaaaatttttactttggtgggggaaaaagttggggaaagggtttccgggggccagggttccctaaaaagggggccatgaggccaagatgtcctaagggaaaaaaacccttgggggggaacattagggcccaccctttcctttttatggggaatttttcaaagggcaaatgctttgggcccaatgggctccaaaaactttgaacaaaactttcccaatgcaaagcccagttggttgggggg

SEQ ID NO: 163250 - DNA, 320 bp, Zea mays
  Clone ID: MRT4577_80459C.1
ttattttaaagagtgtgagtaccaccagaaaggatccattgatttgtggggggtatgaacagttagcttttaactgccttttttttcacaactctcatgtttccttgatgcatttttaggaaggagatcccttgtaaccagctgtgaccggcgtcttatttttaggatctgaagttccaaaaccaaaaataccaaatccatgctatccgcttattttgctcctgaggaaactcataacttggtgttcattcatgttcgattacactctatatccaattgtcaacaatttactatctttggccctgttcctcttcatgata

SEQ ID NO: 163251 - DNA, 756 bp, Zea mays
  Clone ID: MRT4577_8045C.1
ctcgaggccggccgggaagttgtctagccgcggcagatagcagcgaataaatccgtcaccactctaaaaaacgaggcgttgcgttggccgggccgggagcgcgccttcacttttattcacagtttgcaagctagctagctaggacgagctgccagcggcgccagccatggcgatccgtggcgtggcctccacccgcgaggaggacatgacgctggaggagttcaaggagtggctgaagcagttcgacgccgacggcgacggcaggatcagccggaacgatctccggagggcgctccgccgccgccgcggccgcggctggttaaccgcctgtaggagcgaccgcgcccttcgccacgcggacaaggacagcagcggcttcctggacgactccgagattgagaacctcgtcgccttcgcccagaaggatctcggcatgaagatatccacctggtagaagtagtagaagaagcgcagagtgacagccgctgcatggtcctgcactcctgcatatgagtgggtttgggtgtattcgtgtggtgtgtgaccgtgtgagctagttacccgtgcacagctacttgtactcgagcattgagacgatacaaaaaagctatatgatgtacgaatacgaagtgaacgaaggcacagcagtgtcgtccttggccaccctgcgttgcgtgccagagggccctgttatgagctttggcctgtgtaccaagaacttgaacctgtctaaaaaaaaaaaaaaaaaggctccta

SEQ ID NO: 163252 - DNA, 388 bp, Zea mays
  Clone ID: MRT4577_80460C.1
caaactcaaattattcatgatttgtcatagttctgggtagtacgcacacacaacacagccggtccattattaaaccaacactgacacgacttatgacacgagcagcagatactttgacaacctccatggtggggagggggcgccagacgacgcaggtacatgggttggtgaaactatgcatgattattgaccaccacggtgactgtccacaagctggagggcgctctcctttggcatgttggactgtgcttcggtgcgagtgttgcgccggctgttggtcgtgtaagatcataagctgatggcagggggggatgtcgtacgtggactaattcagaaggcgttgattgtacgggttcgtatgggctgttttcagggaggttgttggaac

SEQ ID NO: 163253 - DNA, 1413 bp, Zea mays
  Clone ID: MRT4577_80461C.1
ggatctcaaagggatgttataaacatcaacgaggatgtcacgattgatgatgcaatgaatgataaatctatgccagattctggacgaaaggtgactaatctactaggccaatttgttaattccacttggtctccggtctaatccacgtttttgtcatctctttggagatgaaaatgtgatttagcagcattagcagctgtcatgatcgtcatgcaatatctattttggattgggtagcagcgaacaactcaacaacacttggacatttcaacatgaaatgatctccatgagaagaatgtccgcctgacttcagtagaccaggacaatttagtttgaagatgctggatcatttctgtgatgattaagtctttgtcacttcaataagcgtcctgtatggtgttgcctgtagccctgtatggccgaagctactaaagcaggtaattagggtttgataaagttaaagcaaccgagtcccaaacttttgatcttgattcgtgcaaacggggacgatgcaacacattttcaaggtattctggacctttatgaagcatgctctgggcaggtcatcaacaaagacaagtcttctgttcactaaaaatacgagaagtgagacgaagatggcggtcatgcaagctctaaatttaacacaagggactttcaacgacagatatctgggcttaccagttcgctttgggcagtccaggacaaaaacttcttagtacttaaatgataatgtgacaacgtattcaaggttggaaagaaaagctgctgtcaaaagccagtaaataagtgctgataaaggccgtagcacaaggaattccaacatatgctatgggatgctttgacttaaggaagacttgtctgctcaaatcagcaatgccatattcagatattggtggagtcaacaggacatgggaaacaaagtgcattgggtgaattgggctaaaatgaaaacgctaagggcttgttcgtttcacggttagtccatgtggattggttagtccatgtggattgggtggtattgagtcggtttaaatccataacaaatcaaaatccattccaatacacttcagtccacatgaaactggaataatcgaacaaggtctaaagagttgtgatggaatggagtttagagatatcgtagtatgttcttttataaacttagtcaaaactaaacaagttcaacttcaacttataatgaaattaaatagacgaataagtacattgctaatgctggtcttcagagagtgcgatggtttgtttcatatgattcactatgatgcttgtatcatatataattaattcatgttccgcattcagtgacagattattgggatgatgccacaaactcctaatttctgttacaccggatacttctgttcccatttgtttgctgaaagacagcttgccccg

SEQ ID NO: 163254 - DNA, 581 bp, Zea mays
  Clone ID: MRT4577_80462C.1
cccctgcatactgtcgctcccgccttctgcacgctgacacacaaaccgcgtctcgaaacctcccgaaaagggcagccgctcacgcgccggcctccgccgccgccgccacggatggtgtcatcgaggaaaacgtgatggcaatcctggactccttcggcatcaaggactcccgcgagctccacgacgaccgatccgccttcttggaggccgtgcgctccacctgcctcacctcagacaacccatcggccccatcggggagaatgtatgatggtgtttcccagatacttcaaaacagcagctctcttgagcctgctgcggcaagcatccatatgttaacagaattgggcaagcaatattcaagaacatatgtggcacattctgggggacaccaatctttggtggtagttaaagagtcctgcgtaccttgcctctttggcaaaggcgcatgcagaagagagattggcggaaacgtcaggagctcagagcacctattagatccttcaagattctcgatgatggaagaggcctattgcagaacccgacaaatggcacggatgattataatggaaataaaggctatc

SEQ ID NO: 163255 - DNA, 318 bp, Zea mays
  unsure (1)..(318): unsure at all n locations
  Clone ID: MRT4577_80463C.1
gggggttaaattcttttttcttgcnnttaccccccccccacaaggaaatttttaaccattttctcccaaaacaaacttctttaggcacttttttttttcaaacatcaccttccagataagaatgaaattttttatatgctccccttattgtccaacccaaggcaatgcccacattaaacctccggattatttttacaacttttcttgaaccactcctgaaactaattaaccctcattcaattcctagtttttgatttccagactcaataataccctttttcactccgcatcgtaaaccgaggattataattttttcaa

SEQ ID NO: 163256 - DNA, 2722 bp, Zea mays
  Clone ID: MRT4577_80464C.1
ggggtagcagcgaacactcacaacacttggacatttatcatgaaatgatctccatgaggagaatgtccgcctgacttcagtagatcaggacaatttagtttgaagatgctggatcatttctgtgatgattaagtctttgtcacttcaataagcgtcctgtatggtgttgcctgtagccctgtatggccgaagctataaaggataaattctgacacgacaacaatgtggcgttggaacatagcaggtaattagggtttgataaagttaaagcatccgagtcccaaacttttgatcttgattcgtgcaaacggggatgatgcagcacattttcaaggtattctggacctttatgaagaatgctctgggcaggtcatcaacaaagacaagtcttctgttcactaaaaatacgagaagtgaggcgaggatggcggtcatgcaagctctaaatttaacacaagggactttcaatgacagatatctgggcttaccagttcgctttgggcagtccaggacaaaaacttcttagtacttaaatgataatgtgacaacgtataggttggaaagaaaagctgttgtcaaaagccggtaaagaagtgctgattaaggccgtagcacaaggaattccaacatatgctatgggatgctttgacttaaggaagacttgtctgctcaaatcagcaatgccatattcagatattggtggagtcaacaggacaggggaaacaaagtgcttgggtgaattgggctaaaatgaaaatgctaaagagctgtgatggaatggagtttagagatatctatgcttttaatgtggtgttatcttgctaaacagggatggcgattagctcagaatccagattcctcgtgtgcaatacttctaaaagctaaacattttcattcgacggatatcttacatgctaaaccaagtgagggcatgtcttatacttggagtggaggagcattctgaaggggaccaaacatgttaacttttcattggttgccagaggcctgacgcgaagactgtacactccaaggggaccaaacatgttaacttttgccaatgatctgacagacccggttactggacaatgggataaggatttaattgaacaaaatgggatagggatttaattgaataaactttttggacggaagatttattaagttgcatgtgcagccagttcaatctaaaaggtgctgatagtggggaattgcactggaaggccggttgtgttcgtagatatcgtaggtggttgtatgttcttttatactctagctcagactggacgaaaggtaactaatctactatgttaattgacgaatcgggacttggctccggtctgacccacgtgtgtgtcatactctttggagatgaaaatgtgatttagcagcattagcagctgtcatgatcgtcatgcaatatctattttagattgggtagcagctaacaactcaacaacacttggacatttcaacatgaaatgatctccatgagaagaatgtccgcctgacttcagtagaccaggacaatttagtttgaagatgctggatcatttctgtgatgattaagtctttgtcacttcaataagcgtcctgtatggtgttgcctgtagccctgtatggccgaagctactaaaggtaattagggtttgataaagttaaagcaaccgagtcccaaacttttgatcttgattcgtgcaaacggggacgatgcaacacattttcaaggtattctggacctttatgaagcatgctctgggcaggtcatcaacaaagacaagtcttctgttcactaaaaatacgagaagtgaggcgaagatggcggtcatgcaagctctaaatttaacacaagggactttcaatgacagatatctgggcttaccagttcgctttgggcagtccaggacaaaaacttcttagtacttaaatgataatgtgacaacgtattcaaggttggaaagaaaagctgctgtcaaaagccggtaaagaagtgctgattaaggccgtagcacaaggaattccaacatacgctatgggatgctttgacttaaggaagacttgtctgctcaaatcagcaatgccatattcagatattggagtcaacaggacaagggaaacaaagtgcattgggtgaattgggctaaaatgaaaatgctaaagagttgtgaacttgtgatggaatggattttagagatatctatgcttttaatatggtgttagctttctaaacagggatggatattagctcaaaatccagattcctcgtgtgcaatacttctaaaagctaaacattttcattcgacagatatcttacatgctaagccaagtgagggtatgtcttatacttggaggagcattctgaagggaatggatcttctcaagaagggggatggccaatggtttcctagaggcctgctgcgaggaccgtgcactccaaggggaccaaacatgttaacttttgtcaatgatctgacagacccggttactggacaatgggataaggatttaattgaataaactttttggacggaagatttattaagttgcatgtaccagttcaatccaaaagttgttaatggggaattgcactggacaattcactggaaggctggttgggttcgtagacatcgtaggtggttgtatgttcttttataaacttagtcaaaactaaacaagtttaacttcaacttataatgaaattaaatagactaataagtacattgct

SEQ ID NO: 163257 - DNA, 242 bp, Zea mays
  Clone ID: MRT4577_80465C.1
gacccactcgtccgcaggcacgttggctgacacgttttctccttattcaaccgacgcaaacaggagaagatttgctaacattaatcggtcttcaggtctaccaatgcatgactttttcctgctactaacattttgatcgtcctaagcaatattacttgtattgttctaccttttcacaaaccaatcatactatgttctacctcatgatttcttcaccttaatgtactatcaagtcatatcct

SEQ ID NO: 163258 - DNA, 328 bp, Zea mays
  Clone ID: MRT4577_80466C.1
gggccaacaacactaaaaggaactttaaggggaaaacccggggccacgggggaaagggggaggacacccgaaaaccaaaaaacaagggcccccccactttgggttacttagggggcggcaaatccaaaaccaaggaaaatatataaaataaaaaaagggggcccggggggttcaaagccaccaaaaaacgggggggggggcgtcccccagcggaaaccccaaagccaaaaaaaaccggtacttttggggcaacccaggcccagcctcttattccaaaaaagtgggggttgaataaacccccaccaaaattttttaggggggaggggcc

SEQ ID NO: 163259 - DNA, 264 bp, Zea mays
  Clone ID: MRT4577_80467C.1
ggagatagaagcatggtagatagataatgggcagatgcaagtattagtattcttgattgttggtataatgactcttcattcgtttggagaaggctctggtgttggttgttccgttgctggctcataaggggtcgctcatggtcttctagttactatagctatatcagtgcacaacataccagaatgcgagcagtaagcatggttctcgcgtctagaggggtgtccccccaataggcaatgatgttgagtatctatacatcttta

SEQ ID NO: 163260 - DNA, 682 bp, Zea mays
  Clone ID: MRT4577_80468C.1
aattcggcacgaggggctgatcagcgcgtggtggcaattaagaaatcgaaactcgtagagagcaccgaaatcgagcagttcatcaacgaggtggccatactctcacagatcaaccatcgcaacgtggtgaagctccatgggtgctgcctcgagtccgaggtccctctgctcgtctacgagttcatctccaatggcacgctgtacgatctcttgcaccaccgcgaccgcgagcaagacggacgacgacgaaccttgctgcagcagctgccctgggaggcacgcctgaggattgcagctgaggtcgccggcgcgcttacgtatctccactcagcagcatccgtgtccattcttcatagagacgtcaagtccatgaacgtgcttttgaatgacagctacacggccaaagtctccgattttggcgcgtccaggtctataccgattgaccagacacatctggtcactgctgtgcagggcacatttgggtatctagatccagagtacttccacacaggccaactcaacgagaagagcgacgtctacagtttcggtgtcattcttctcgagttattgacaaggaagataccgatcgtcgatggtgacagcggttacaaggtaaacttgtccagttatttcttatgggaaatggagaggaggccgcttgaaagatagtcgacgtcggaat

SEQ ID NO: 163261 - DNA, 734 bp, Zea mays
  Clone ID: MRT4577_80469C.1
cattgggtacctcgaggccggccgggccaggccgtctctccctcctcccttcgtttgcgtctcaccactcaccactcaccactgctactgctacttcgttcgagagggatacggataccccattgccggcccactggcgagagaagattttggtgcgactacagagtcccaatcctataccccggccccaaaactcttctctgctaccagaccgttccttccgccggaatcgattttgtgaggggtgccaaacagagatgtcggctctcctcgacctactgatggggatcttccgccagcagaccctcggcgccgccgccctggagctggccgcgctggcggcgcccctctggctcgccgctctcgtcggcctcctcatcgggtgggcatggcgcccgaggtgggcaggggtcgtcgttggcgaccacaacgcccagcaggcggcgcagctccctccgccgcccgccgctgccgcggtggtctctcgcaacgaggcgcccgccgtcgtaccgagaactgtggtggctcctgcggcgcccgaggacgagcagctggcggtgaccacccgtgacttgatgcacctctggcggctcgtccaggagaaggacggtggcccgtcgtggatccacatgatggaccgcaccttgccgaccatgaggtaccaagcctggcggagagacccaccgaatggtccaccacagtaccgcagtagcactatctttggagatgcatca

SEQ ID NO: 163262 - DNA, 473 bp, Zea mays
  Clone ID: MRT4577_8046C.1
tctccggccgcctcgtgcccgacccgagatcggatctcctttgaggccgggctcaggcctcaggggtgccgccaccgcctcgttcgtctccagggaccgcgagctgttccctcgcctccagcgcagccgttcatccgccggcggcggctccaaggcgtccctgtccccggagaggcggtgcggcgtgggcgcgatgcagcagcgggtggcgcagctggaggaggagctccggagggagcgggaggagaaggcccggaccgtgagggacctcgaggacctgaggcgggacggcggcgccaagggtgtcgcggacaaggtgcaccttctggagcgggaggtgagcaagttcaagcagtcggagcgcaagatgctggagtcgctgatataccagaccaagcagctggagcagaccaagatatcgctcgaggaggccaagctggagatggccacgcttgcacagcaggcgagcaaga

SEQ ID NO: 163263 - DNA, 369 bp, Zea mays
  Clone ID: MRT4577_80470C.1
cccacccgtccgaaggacaccaagaatgtcttgagttcaacatcgtaccaaccatgtctgggccctcctaacaacttgatgtaaaagaagcattcacggacagtgaccataaaggccagttctaaggaagatattgtgaggctacatttaccatgctcaggtggtagttattgtatagaaagaggaagttgccaataggctatagatggatgctggcacgtcctatatcaagtctctcgatgatgaccctgcgtgggtaaagacggcgtgctatgcacacttcaaagaatgcatggagatctcacatctatctgtcaggcatgtgattacgctactggttagcgatattacaccacactctagcagttc

SEQ ID NO: 163264 - DNA, 1018 bp, Zea mays
  unsure (1)..(1018): unsure at all n locations
  Clone ID: MRT4577_80471C.1
gtacgtaagctcggaattcggctcgagccaccacagaccacaccattaatcccctcccttctccccggggccgggcttgtcttcttcctcccgattcgttttctttttcttttcttccgctgctgcaaaatctcgcgctggcgcggcccgaggccagaggactccgatccttatccctcacgcatctcccgcctcgcctccgccacacgttccgcgcctctacagctctcgacctcgtctggatttttttccccgacccgattttcgcatcagctccttctgcccaccgggctcgtctcctcccctggtttctttttcgtcacttgtcaccgctagttcctttagagaaattcggctcgccccaatattccattaccggcccactgacgagagagagagagagagattttggcgtgactatccagagtccccaatcttacacctaaaaactcttctcagctaccggtgcggcatatcgcccctatcggcggcgaacatttgagttctcgcgacgtgtcctcgaggattctgtggtggaagatcggatcttttgctgcgggttccagttgccaaccagagatgtcggctctcctcgatctactgatggggatctttcgccagcagaccctcggcggcgccgccctggagctcgccgcgctggcggcgccgctctcgctcgccgccctcgtcggccttctcatcgggtgggcatggcgcccgaggtgggcgggggtcgtcgtcgtcgacaacgcccaacagatggcgcagctccccgcggcggcggcgcctccggaccgcgccaccgccaccaccaccgnggtggtatctcgcaacgaggcggccgccgtcgtaccgagaactgtggtggctcatgcggcggccgaggacgagcagcagcagctggcggtcaacaccggtgacttgatgcacctctggcggctcgtcgacgagaaggacggtggcccgtcgtggattcacatgatggaccgcaccttaccaaccatgaggtaccaagcct

SEQ ID NO: 163265 - DNA, 3900 bp, Zea mays
  Clone ID: MRT4577_80472C.1
cggggcctcgcgatcgccaccacaccagcaatcccctcccttctaccccgggccgggcttgtcttcttcctcccgattcgttttcttttttcttttcttccgctgctgcaaaatctcgcgctggcgcggcccgaggccagaggactcctccgatccttatccctcacgcatctcccgcctcgcctccgccacacgttccgcgcctccacagctctcgacctcgcatggatttttttccccgacccgattttcgcatcagctccttctgcccaccgggctcgtctcctcccctggtttctttttcatcactcgtcgtcaccgctagttccctttagagaaggtgtacccccattattccattaccggcccactgacgagagagagagagagagagagagagagagagagagagagagagagagagagagagagagagagattttggcgtgactatccagagtccccaatcttacacccaaaaactcttctcagctaccggtgcggcatatcgcccctatcggcggcgaacatttgagttctcgcgacgtgtcctcgaggattctgtggtgaaagatcggatctttagctgcggattccagttgccaaccagagatgtcggctctcctcgatctactgatggggatctttcgccagcagaccctcggcggcgccgccctggagctcgccgcgctggcggcgccgctctcgctcgccgcgctcgtcggccttctcatcgggtgggcgtggcggccgaggtgggcgggggtcgtcggcgtcgacaacgcccaacagatggcgcagctccccgcggcgggcgctgctccggaccttgccacagccaccgcaacgggggtaggatctctcaaacggggggccgccgtcgcaccgggaacagcacaagatcatgcgggggccgctgacgagcagcgggggctggcgggtaaagcagatatcttactgcatacctggccacccctagccgcgaccaccgccgccccgccgtgttcgagaagaacgcccccgcactgtaccagccatgcgcgacaacgtgtcggggacggcggagggacccaaataccggaacagcgcctcggaggcccgcatcatacaccgcgacatcaaggccagcaacgattgctcgccgcggccgatgagccacatccccatgggccatggcgctcgaaagcagcttagcttggtggcctcaggagtcgtagagaaatttctcacggatttctggatttattttctttcttattaatggcagcgcgtcgcatcgctgtcatcgtggtggcatcggtcttgtcggcaatggcggtcatgggcatagcgttcatctggacaaggatgaggtccagatcaagggacgatctcctccgtgcagacatgggcgacgacgggtcgtccggcgagatgatccgcgccatcgcggcgtcgcagctgagcttcaagtaccaggagctgcgcgcggcgacggacgagttcagccagacgaacaagctcgggcagggaggctacggctccgtgtacaggggcgtgctggcggacgggcgggaggtggcggtgaagcggctcttcttcaacacgcggcagtgggcggagcagttcttcaacgaggtgaagctggtgagccaggtgcagcacaagaacctggtcaagctgctgggctgcagcgtggaggggcccgagagcctgctcgtctacgagtacctctgcaacaccagcctcgaccactacctcttcgacgcgttcaagaagaacgcgctggactgggagcggaggttcgagatcgtgctgggcacggcggagggcctctcctacctgcacagcgcctcggaggtccggatcatacaccgcgacatcaagagcaacgtcctgctgccctttcttctgggacgacgagttccgggtgaagaacagctgggacgacatgcttcttcagtacgagacactggaacagtgcgccaagactggaaccatgttgtccggtgggtcaggaagtttccgttcttctgcagcgacagggagtacatcataggccgcaggatatgggcgtctgggaagacattttactgtgtgaccaagggtgttcctcgtccctccgttccaagacaaaacaaacctcgccgtgtggacttgtactactctagctggtgcatccgtccagttgagtcgagaaaaggcgacggtgcaatgagtgcatgcgaggtgctcttgttccaccacgaagacgaatcaagaaaaggcgacggtgcaatgactgcatgtgaggtgctcttattccaccatgaagatatggggatcccatgggagattgcgaagctcggtgtccggcaagggatgtggggctgcgtcaagaggatagagcctggccttcgggcataccaggttgcgaggaccgctggagagcctatctcaaaacatgccgccatggcgcatgttaccaccaggttcgatgctgacgagctcgtcacggaagacagcgcggaggccagttcatccagtgacaacaacaagaccaccgaggttgagaagccaaagcactggacaaacaacatacccaaggttctcatgatcggcggcgccgtcgccctggcttgcaccttcgacggtggattgatgaccaaggccgccatattcggcacggcgaggaggtttgcagggccaggaaggcggtaggtggatggagctggtcaccctagagcaatgccatgctaatcatgtgtagcaaagcgttggttggatggatgcctggaagtgccctaagcagtcctttttgtagcaatgcactgcagaggacagaatgccttgtctagttgctcagtctagacatcatcctcatgttgcagataaggtggtgtgctcttattacagatcagtatcagttgagaaaaatagatccctgcacatcccgagaaaggaaatggacgacaaagatccagcgacacagagaagtgtacgtaagcagaccgggcatgcttgtgctgctgctgcagccgcgccgccgggttagagccagctggataggttagaaatgtagcattattatgaggacaaagtgtacgatgaacaaggttcattctggcagctgtacgacgaacaaggttcattgtcgttagatgaaacgacaagaattcactgctgtttagtaacaagaattcttggtcttgtagctctggcatctatttgttctcccctatggaaactagatgttgacctttttggcagttggtgcaggatttttgcacgtacaagtttttacccaaaaaaaaaaaaaaaaaaaaaaaaaaaaaaaaaaaaaaaaaaaaaaaaaaaaaaaaaaaaaaaaaaaaaaaaaaaaaaaaaaaaaaaaaaaaaaaaaaaaaaaaaaccccggggaaaactggggcagggggggggaaaaaagggacccaaacaaaacccccccctttttttttcttggaaattaaaaggggggggcccctgaaacccccccccgaaggatcccccccttctgggggaaaaccttggccccggccggaaaattggcccctttggggggggggccaggggggtggaaccccccttttttcggaagggggtccccaaaaaggttttagggtccccccccggggaaggggaaaatttttggggggggaattggaaaacttttggtaaagggaaagggaaaacccaccccccgaagggggaaaaattcctcaaaagtggggggggtccgggaaaaaaaaaaaagcccttcgggggagggttttttaaagggccaaaggaggggcttcccaacccccttaaaggccccaaaggggaccccctggttggaaaattttttggaaaaggtggcgaaatggtgggccaacccggaggcttaaaattttttggaaaaattaaccaagggggtttccc

SEQ ID NO: 163266 - DNA, 551 bp, Zea mays
  Clone ID: MRT4577_80473C.1
ctcttcgagtggatagaattggaaccattgcacttttggcattccttactgttcatggatcagtataactatggcggaattcaagctaaaacacaaaacgtagactcttcagatggtgataatgatattgatattgtctcaagctggaacatggcagaagatttgcccaaagatacacaggatcattttgtcttaatcgtatcagaattcctatatattccgtggaaattcatgaaggaacaagtagctgctcaagctaccataagggatgatacctcatgcactccatctgtaacaatcatggctgctgagaatcttgagggccaggtgatagaacacctccgtgacaagattagcaattactttgcagacaagcttctaagaactgtaagtgatatacttcaccatttcaaagggaaaagcaaacatgagtcagatgaacctgcaaaatctgatcctcacacgcataaaggcgatgctgcattggagttcattaagcatatctgtgcagttcttgctcttgatcaaaatgttcagcatgatattttgag

SEQ ID NO: 163267 - DNA, 2163 bp, Zea mays
  unsure (1)..(2163): unsure at all n locations
  Clone ID: MRT4577_80474C.1
aggggcatccgcgctgggtggaacgttcgcttttcactcccgcggtcgccaaggaaaacgagcgagagctgacgaaaccgagtgtgtgatgacgggacggagaggagcccggaccggcgaccaccgtgtccgtccaccgcagggaaaacacgaggacctcgcgacgcgactccacccacacgcacagctccatgcctgcccacgcggacgcctgagcatcagaccagaggagagctatatctactccgctcgccaccaccaccaccccagaccagcccagcccaccacacccagctctctcccttcgccaccggccacagccaggccttgtcttcttcttcctcccgattcgtgtttttttcctttctttttcgctgctgcaaaatatcgccgtttcctatctcttatcccccacgcatctcccgcctcgcctccgccacacgttccgcgcctccacacctctctcgatctcgcgcgtctggatttttccgacccgatcttttccccccgcatcagctgtcttctccttgcgccgggccaggccgcctctccctcctcccttcgcttgcgtctcactactcatcactgctactgctacttcgttcgagagggatacggataccccattgccggcccactgcgcgagagagattttggtgcgactacagagtcccaatcctataccccggccccaaaactcttctctgctaccagtaaccgttccttccgccggaatcgattttgtgagggggcgagttccgccaccgtgggcgtatcaatatcggcgaacgctcgagttctcgcggcgaaaaacaacgcgttctgcgaggattccgtggtgaaagaccggggccttttttctgcggattccagctgccaaacagagatgtcggctctcctcgacctactgatggggatcttccgccagcagaccctcggcggcgccgccctggagctggccgcgctggcggcgcccctctggctcgccgcgctcgttggcctcctcatcgggtgggcgtggcgcccgaggtgggcaggggtcgtcgtcggcgaccacaatgcccagcaggcggcgcagctccctccgccgcccgccgctgccgcggtggtccctcgcaacgaggcgcccgccgtcgtaccgagaactgtggtggctcctgcggcgcccgaggacgagcagctggcggtgaccacccgtgacttgatgcacctctggcggctcgtccaggagaaggacggtggcccgtcgtggatcacatgatggaccgcaccttgccgaccatgaggtaccaagcctggcggagagacccaccgaatggtccacacagtaccgcagtagcactatctttgaaagtacaggtgcatcacaagaacctgatcaagctgctgggctgcagcgtggaggggcccgagagcctgctcttctacgagtacctctgcaacaccagcctcgaccactacctcttcgacgcgctcaagaagaacgcgctggactgtccggggaggaccgccggagaggctgtttccaagtgtgctgccatggcacaggtcaccaccaggttcagtgccgacgagctcgtcatcgcagggccgggcaacacggaggccagttcttcttcgtccggcgacggcgcagaggttgacaaggcgacgaagcactgggcgaacagcatacccaaggttctcatggtcggtggcgctgtggccctggcctgctgcaccttcgacggtgggttgttgaccaaggccgtcatcttcggcactgccaggaggtttgcaggagggccaggaaggcggtaggtacggtgtaacggtggacggaaagatccagcggcacaacacaaaacaagtgttgctgcactgcagcccgctgcgggttaataggttagaaatatagcatttgttacgaggacacatatangaagtattatggaagaaaaccgctgttagataagaaatacactgctgtgtattagtagttaataacaagagttcttggtttttgtatgtaaccatattgtggatcggatccattgttcttccccatggacactactactaccagtctaccagatcgatgttgaccttgtggcagttgctgcagttttttttttttgacagagaaatctgtaccttatgctgtgtgtgtttagaataagaaaa

SEQ ID NO: 163268 - DNA, 376 bp, Zea mays
  Clone ID: MRT4577_80475C.1
tcgcaagtgtcctttctccatctttctccttcactccactcccaagtccccaccaggccggacccagtctctccactgaggcgcacgcttcgcttccgctacgctcggctcgagcagaatataatgcaacgggcagtgcacgccgtcaggccacacggcaatgttcttaaatatgctgttctacatcacatcagcgctcacaagccagcaatgcttgctgctgactttactagtgtcatgtcagttacatctgctcgcctataggatcgaggataggcactggcactgtagcagatgtctcgaatcctaaagggaacatggctgatgactcttcgctctggtgcaccacaaacgttaccgtctatgacgctgtcaa

SEQ ID NO: 163269 - DNA, 606 bp, Zea mays
  Clone ID: MRT4577_80476C.1
aatctgacgtaaagtcatacaaaaataaggtaaaaggcgttgtgcgcgaaaaaccctagcgaagccgcatccatcatggcgatgcccatcttcgtcagaggtgactccggtgcgctcatcgcgccgcgcgggtgatcggtcacaccgactgattcgtttgccgctgatccccaggccgcattattgcactttgtacctcatgcatatctaccaataacacgcggatatgggctaaacatacaaggcgatctaccagctccacgcagaactatgctctttctaggaaggagttgttctcctataactcacagatgtagcaaaaggtaccttcacaaggtcgatgaacatattgtttatcatgaccggcagaaattgagcgaggaagatcaatgtatcttctgcaccgctcacacgggtatacctccgatgcaaacatgcgaacacatacgataaagatgatcctgtctcatccgacacgagtcaagacagaggtgacgcgaagaatatcatcgtgaacatgatcagatgatatactgtctgaagtcgttgacatagaataaatggatacaccccaggcggatatctcaactgatgttaccctcgtca

SEQ ID NO: 163270 - DNA, 220 bp, Zea mays
  Clone ID: MRT4577_80477C.1
aagcgcttcccaccctccctccacctccgcaaccctactcccgaccgcgcacgcacaacacctaccatatcgcgccgctaccccgcttacctcccgaaactaacacctcaccgaccatgtccccctacccgaccaacccgaacatacctgtctccccctactatctatcctaccctacaataccaggacgactcgactcccccatattaccccatctact

SEQ ID NO: 163271 - DNA, 566 bp, Zea mays
  Clone ID: MRT4577_80478C.1
cggccgggattaaatttaatcatctcatcttttctctcttacaatctctatgatttcccccactcgtcagtggcagcagcacctgtagcagccatggacgccatcggagccggtacaatggggaacaaaggggcgcccgggagcaaggcagacgtacccagaaagaagtcggagacgcggtccgacaaggtcggtctgcagttccacgccggccggatcgggtgctacctcaagaaggctcgatactggcagcgcgggggaactggcgcgcccgtctacctcgccgccgatatggagtacctcgccgccgaggtactgtagttgttagtcaacgcggtgagagattacaagaggacgcggatcatcccgcgacactggctcctgatgatacgcaaggatctagtgagctcgtcatactgctgtgcgaagactacatggggtactgtaggtgtcctctgcaagatactcttgcggcctcctgtccaagaaggcgttgaagaaggcgagcatcgtggtgagactggacaccctgctatgcaagaagggcgacaatgcccgctgaagga

SEQ ID NO: 163272 - DNA, 231 bp, Zea mays
  Clone ID: MRT4577_80479C.1
tctcatgtgtgcgcacagactctgtataactggcatgcgtagagtgagagtgtggtacagggtaagacacaaggggaactggtataagtatgcgtcggcacgcaatacggcgcttggagtcggcacggtggaggagaacatgtgtaatcctgctggttgtcaggaacaccctgaggatcatgccattgaagctccctgccggctgaccttatgatccccgtgtgcgcatga

SEQ ID NO: 163273 - DNA, 568 bp, Zea mays
  Clone ID: MRT4577_8047C.1
aattcggcacgagggcaagctagctagctaggacgagctgccagcggcgccagccatggcgatccgtggcgtggcctccacccgcgaggaggacatgacgctggaggagttcaaggagtggctgaagcagttcgacgccgacggcgacggcaggatcagccggaacgagctccgggaggcgctccgccgccgcggccgcggccgcggctggctcaccgcctggaggagcgaccgcgcccttcgccacgcggacaaggacagcagcggcttcctggacgactccgagattgagaacctcgtcgccttcgcccagaaggatctcggcatgaagatatccacctggtagaagtagaagaagaagaagcgcagagtgacagccgctgcaactgcatggtcctgcagaagcgcagagtgacagccgctgcaactgcatggtcctgcatatatacgaggcttgttcggttattttcaatctatatggattggaggggattgatacagattgagagagattttgaattactaggaattaaaacccggtgggttggcgtgggtgtgtgtgggtggg

SEQ ID NO: 163274 - DNA, 242 bp, Zea mays
  Clone ID: MRT4577_80480C.1
cataatatatatttgatggtataaaaattaatacttttatctacctatttagtcagatcgagaatacatctaaattaaattctcggagctagtaagtccacctttacaaatttaaaaaattggacattgtagcaatgaaaaaattccttaaacctttgttttaaaaattacaatgataccttgatggtcggcttttaaccaatttaaactttttaatacctggggaaaaggtaaaactaaca

SEQ ID NO: 163275 - DNA, 386 bp, Zea mays
  Clone ID: MRT4577_80481C.1
attttcggggcgacccacccgtccgctcccgtctttgtctggcatggccagggcaattggcttttactttcagcctcaagaataaccgaaagaggcgcgggcaactatctacggagcacggccgtatctacatgctccggaagcaacccgtaggccgctggaactccggcggcatgcactaccaccttatccttttcgacaagtaccacttgagttacttgggcaatgagggcatgcactactctaacacgcttcgcaacaaggttatcactgtccgatcatcaaccaggagcggaatactggtacgatggtgcctctcgccaaggattacaaacgtgatcggcgcggaccagttctcgttcgccaacgtgacgcaaataggatac

SEQ ID NO: 163276 - DNA, 350 bp, Zea mays
  Clone ID: MRT4577_80482C.1
atatgacggtttccccgtattttggcacaaataaaaggggttacataagcaccattattgttacggccagagggaaacaaaactagcaagctcaagctagaagcgggggccagggaaaaaaagacctgggttctgctcaaaagcccctaccttacatagcacagggggggcaaaaaaaaaggaagcccgccccccccggaacaaaaaaagcggacttaacggggcccgcgttctttttgcccccgaacccaggcttcaaaaaagcgcccccgcccagaaaacccaccccaccaaggcgggccggcaagccacctgccagtccaaagaggtccagagcccccggggaggaa

SEQ ID NO: 163277 - DNA, 843 bp, Zea mays
  Clone ID: MRT4577_80483C.1
ggccgctttttttttttttttttttgtgaataggagagaattaaattcctttcaatttatctcaagccctctctaatcgagctcttttagcaacctgagatcccgggaggatccggcccaatccctaccggtgatttcgccgcactgtgatttcgctgagcacgagcactccctcgcacctgcgtgctcggtgaagcaccggagcttcctcgcgcacggctgcctcctcttcttcgcgcaagcaccggatcttcctcctcttctttacgcaaggcattagatctcccttctcttctcttctctggagagctttttctggagcctgggcgtgaggatcctgcaggccggtggcgtggagcgcgcgttccggcgcgccttgtcggccgagaaagtcgagctggtgaagtccctccactctacaccaccggcgggcccatagcacggcagcctcagcccgcgcgcggtgagctaatctattgtcggcatggatgtagtcactccacttcagaaaagagtcagttgcatggctcctggcgaacattggacatgtttattttgttacctttgctgttacaaatttggcactcatttattttgagcgttgcgtggtcaaagaaagaaggttgtttatttgagtggcatgaataaaaaagtcttattaactgagtgtgagtgttttgatgatgaacataaaatgacctccgactgttttgatgatggtcgtgtttatttgagtgacatgaatttaattgagactatttttaactatttgagtccagtctccctatacaaaggacagtcttttatgaccaaaaaaaaaaaaaaaggggcggccctcgagct

SEQ ID NO: 163278 - DNA, 302 bp, Zea mays
  Clone ID: MRT4577_80484C.1
caaggaagtatcattagtggatcaaggactcaatggaaaacaacgcattctgcagcttgaacatgagatatctctcttgagtcgtttggagcatgaaaatatagttcaatatatagtttcccaccttccttatgtgttccaaaatattgaactatattttggaacacataaggaaggtgggaaactatatattgaactatattttcatgctccacaagactcagaagatatctcatgtacacgacagctgcagaacgcgttgcactccattgagtccgggagccactaatgatacttccttg

SEQ ID NO: 163279 - DNA, 386 bp, Zea mays
  unsure (1)..(386): unsure at all n locations
  Clone ID: MRT4577_80485C.1
cctcgaggccggccgggatctgcncctccaccacgtgcttcttccaagatgacactttagtcctctctccgctgcaactgaccatgtgctcagtgacgctgacccctacggaggacttcaagggccacacactggccatcacgacgatcacctcttctttaccgagttgatatcctcagtcgcgctcggacaacgttcgcagctaacgcgccgacatatcgtggcgcactagaggcttgtcaacatacggatgaatctatgaacggagtacgttatcaccaagaacgaccgctactccaagggagcgcgacgtgcggtaaatatataactgaacgaaatcgtcttgcccagagacatgatacttcgttgctgcagaagctggattc

SEQ ID NO: 163280 - DNA, 768 bp, Zea mays
  Clone ID: MRT4577_80486C.1
gctacttattgcgagggcgagaggaagagggtagaggcggagaagcaaggggaggcgagcgaaggtgagatctccaatccttctggaagcttctggattcgtcggagtctccagcaattacggccgccgcggacgcgcgccgcggcgccgcggtggttttaggtggcggcgccagcttagcacgcggggggtggacgacgagcgccgtcgcgtgtctgcacgtaggactagaagaatctcccgagacacttgtgtcaaattctgaatctgcagaattgctgcgtctgctcattagcaagatgtccattgaagaaaggaaaattagtttgataagcaggacgacttcgttaaatcctaatgcggtagaatttgttccttcatgccttagatctgtgagtgatgcttcaaacagatcggacacaaccaagattcctgtctcagagtcctccaaggaaatcagcgcagaccaaccagagtctgtaccaagcaaccctgatgaagaagcacatcggtattggcaacaacagcttccagatgatatcactcctgatttcaacgttcttggccaagatgagactcctggacctgacagtctttcactcacgggcttgtcagtgaatgatggctttggtgcttccctattttttccaaaccagaaatcaagaatgcagcaccatgcttctccctttgttagggacatgcgaagtacacgagggaagtttggatttcttggccaggaacagccgcaagcttctattatgagtcccc

SEQ ID NO: 163281 - DNA, 356 bp, Zea mays
  Clone ID: MRT4577_80487C.1
cctaaaaacatgcactagtgatagtcacctaaacagcccccaggcgatctctgtgaaattgattacttaacgttattggcatactgagacatgccgcttgatacaaaatcaggccgagaatcccatacttatctaactaggtgggtgtctttttactccatatgggccacaaaaaactacgactctggaagaccgctaccaccaaggcttcctactatgcacacacacacacaggcgaccacactcttggatgctgagagctcgtgcttctacgactggccatgttgcttgctatttggattcacctggcccctggagcgccttctcggcggtggccctttccttcaacatgctgt

SEQ ID NO: 163282 - DNA, 271 bp, Zea mays
  Clone ID: MRT4577_80488C.1
cccacgcgtccgcccacgcgtacgcccacgtttccgcccacgcgtccgaaaaaaaaaaaaagaaaaaagtaaaaaaaaaaaaaaaaaaaaaaaaaaaaaaaaaaaaaaaaaaaaaaataaaaaaaatgaaaaaaaaaataaaaaagaacagcctttttaaaggactaaatttaatgaaattttcattcaaaggacataatattaatttagggccgcctaaattcaattaagttacctagattaaaaaactctttcattgtaaataatctgg

SEQ ID NO: 163283 - DNA, 252 bp, Zea mays
  Clone ID: MRT4577_80489C.1
gcctactccgtcatgtcgcatctcccagctcagccgctctctgctctctctcccttcagcgcccccggacgtttctctgttgggccgcgcctagcgtttggcgtccggcttctctgcttcctgctgcgggccgtgtccttggtcgcctgtctctctgctgtcgcggccctgtcaattgccagcgccactctgctcgcacatggagttgtccaacttctctgctcgccggttgaattctttgcgacgcgcgcg

SEQ ID NO: 163284 - DNA, 478 bp, Zea mays
  Clone ID: MRT4577_8048C.1
tcgagcggccgaccgggctggtacaagctcaactttttttcttttttttttagggcgaccaatcaaacttgttatttttgggaagccgctttcgtgatcgcacaaaaacttcattgtcagaaggacaactatatgatgcaatctaaaagagggcaccggcgatgaccacaaactgggtggaaagctgatgcgtttgacaaagcatgaagaacgaagggcagcttttggtgcctatctgacacggtggcggggttatccactgactgatataagaacaggggcacatggcggtcaatcaagaatgaagcagaaattgttgctgctagccggccaaatggtctaactgtttgatggtgaaaataagcagaggggttcaaatgcgcccaataggttatatggaacaaattgttgattgtaagaaattgcagttgctagctggctgaataaaggtatgccatatctacttgaataatcacac

SEQ ID NO: 163285 - DNA, 817 bp, Zea mays
  Clone ID: MRT4577_80490C.1
cggccgggccgggtttgcaaaaatgtgcctatttgtatgtttaatactataaaaatagagattgtatattttatctatttatgtttttcttatggacaaaagagataaaaatgggctgtgaaatgaataggggtaatctagtctatctatatgtggtgtaagcaataaaagaatgcaaaatatagatggagtgttattttctaaattaatttggtgaaactggtgttgttctacgaattgcttaaaaacagatgttattttctgaacttcttctcaaaccggtgctgttttgtgaattctccactttagtacagggactaaagtttagtccatactctatttggttctatgacctaaaatatttataaaagaattaaatgaattataagagaaccaaaatagtcctttgtattcttccgtcattagttcaactgaaataaaataggggcaaaaggtggaattaatatgatttagtctgttttagttatttcttgagagattagagactaacagtttaatcttgttttagtcccacgaacggcttaatctctctatcttttctctcacgattgttttttttttcacagccaaaaagcagaggacaatccaagtgatggacatcaatgacataccaaagccgaagagcagaaacgctttcatccgcaagagcggcagcggtgggctcccggcgaggcaccgatagcctaacctcctccgtcggctggatatctgcgacacttgcgaagttgtgcctagaaccgcaacgggaaagaaaagaagcaaacggtttcttggtctttttttcctgtacctgact

SEQ ID NO: 163286 - DNA, 894 bp, Zea mays
  Clone ID: MRT4577_80491C.1
cccagcgtccgaaaattgttattgttgtttctatatattgtaaaaacagtgttctttttcacaacctatgtcattacattactcgtgtattgaaactatgggtttgaaatgttctaatgtccagacattccataaccataataatattgaactcttgcatttatactagtgacaatgaatcttgcaatgcattttagcggtggaatttgtctacatcgtttaaatttttagaaataaccattgaaattgcttgctgttgcaccaaggtgctgtgaactatttttttttgttttatgcatacatttttggtttacaaaagaaacatccccctctcatcatctgcatacattattagtcactattgtcaccagaaagtcgtgaaggttgtctttttttttatgactgcagcttatagttaactaaattgacattgctgggaaggatgtgattgagggagttggaggctctactgcagtaatttgcattgccttgtcatgcactagatattaatcagttctttaagtgacatgcagccccacccccaccaaatgatatgacagtgagacaagtcgctgacaaactggcaagctttgttgccaaaaacgggagacagtttgagaatatcacacggcagaggaatcctggagatacaccattcaagtttctatttgacaaacactgtccagactacaaatattatgagtttcagcttgctgaagaggaaagggctcttgctcagtcaaaggaggctgaagcatcgaaagctaactctggcactgcaagcttcaaggcacaagggggtacttatagaagctcatttgacagaaatctaactatcagacacctgcatcagctttgtacggggcatataagggttggttcttcccaaggaag

SEQ ID NO: 163287 - DNA, 361 bp, Zea mays
  Clone ID: MRT4577_80492C.1
attgaacaggggccctccaaatgggctagccatatcatcaaaatagttaaaacgggccatgcttttgtttcacaatgcatttttcaaactgggaacccacccaaaaaaacttttccataaacacttggtttttggctttgcgacacacctaaaactatgttttaacccagggccaggattttggggggcttttttttcctaaatttgggggggaaagggccaaaaacccggttgcctataaattaacctttttttgtaacaaggcccacctttttgtggtgaaattggaccttgttgccccttttggccctttttttaatgggggggcggacaacccacccgaaaaaaacgtttttttttt

SEQ ID NO: 163288 - DNA, 1623 bp, Zea mays
  Clone ID: MRT4577_80493C.1
ctcgggttccggccgggatgcattgggtacctcgaggccggccgggacggcctcgtcacgcccaccctctccctcttcgggttccaggcttccaaagttgtcagagacggcgagagtagggggtttccaggaagcttcgccagggcgccggtaagttgactggatttgctgctaggcagtcaggcaagctcgagttttgccatttgagaaggagagggaaaatgatgacctcgtggcttctgggccgccggggcccctccggcttctcctggagttccaccgccgaccaagtcacgcagggcatctccgccgccggcctcaccgccatcgtcactggggcgtccagcggcatcggcgcggagacggcgcgaacgctggcgctgcgcggggcccacgtcatcatggccgtcaggagccttcccgctgcccaggccgtcaaggacgccgtcctcgcccaggcgccgggggccaagctcgacgtcatggagctcgacctctcgtccatggcctctgtccgcgctttcgcgtcccaattcatcgacaggggtctccccctcaacatccttatcaacaatgcaggagtaatggcaataccttttgcgctttcaaaggatggaattgagatgcagtttgcaactaatcatgttgggcatttcctgctcacacaccttctattggataccatgaagaggacctctcatgaatcaaatttggaaggaagaattgtcaacgtgtcatcagaggggcacagacttgcatatcgggaaggaatccgttttgacaagatcaacgatgaatcagtgtatagtagcattggtgcatatgggcaatcaaagcttgcaaacatattgcatgctaatgaacttgccaggcgatttgaggaagataatgtcaacataactgcaaattctcttcatcctggttccattatcacgaaccttcttcgctaccacagtatcctagatgttctccatcggacgctgggtaaattggtgttgaaaaatgctgagcagggtgcggcaactacatgctatttggcactccacccgcatgtgaagggcgtgtccgggaagtacttctgcgactgtaacctgtacgagccaagcgcgaacgccaaggacatggagttggccaagaggctctgggacttcggcgtcgagctcatcacctagctcatgcttcttgttgttagcgacttgttttcagacatggatgtaatgtaaatcccttgacagatggtaaattctgtaggccctcgaggagctcctgtgtggtaaactcattcacctcaatctatctacgtgtattaaggtggattagggtgtaaattaaattaatttacactccaatcgccctcgaggagctccggggtggataatgctttggttggatattttagtattcacctgaatttacgtgtattaagatgaattagggtgtaaattaaattaattacactccaatccatctcaatatatatggattaggtcgaatactagagtattgtaatacttcaaaatcctattttggataaattagtaaaacgtatttcatgatttaaataaatatgttttcaaaaaaaaaaaaaaaaaaaaaaagaaaaaaaaaaaaaaaaaagcggcc

SEQ ID NO: 163289 - DNA, 434 bp, Zea mays
  Clone ID: MRT4577_80494C.1
acgcggggaagccaggcgatcttgttgcacacataaaggtcacttgtgctgctgatgccaatggatcgaaagaatacatccattctttacagagttaaagccaccaaatcatggaaaaaatgcaaaaataaaggatgggttgttttggggacaaaatcaaaaaaaaggggggggggaaaaaaaaaaaagggcaaaaagggaattgcccaaaaaccaatccccttggggggggggaaaaaagggggtttaaagccaaaaaaaattttagttttttggaataattcgcccccatttttttttttggttttttccccgcgccccaggggggggttaatataaaaactaagggggggaaaaaaataaaaaatttctggggggggcaccccttttggggggagaaatttgacagaataaaataaaaacacggggggggg

SEQ ID NO: 163290 - DNA, 282 bp, Zea mays
  Clone ID: MRT4577_80495C.1
ccggccggggaaggtgcacacaatacacaaaaagatacaggagctggtcactaaatcagttggggtttctcgacctgagcgagttcttattgatggcatatttaattcgcggctaactcgccacattttatctaagtttagtcgttcgaattgaagtactaaacttagacatgcaataccaaaaaatgtcttgcaccctaggtcagtttttctttttttaaaaaaaaaaatcaacaacaaaagttgtacactgacaaaaaaaaaaaaaaaaaacccgcggcc

SEQ ID NO: 163291 - DNA, 250 bp, Zea mays
  Clone ID: MRT4577_80496C.1
gcactcctgctttgttgcaaattctattactagctgcacaagggcgtgtttgagactagcggaccgaccttaaagttgaagttgaaaaggtcggcctgcgcggcgatggatgtcaagtgcctgcgtctggacgggaacgtggccatcgtgacggcgtccacgatggggatcggcctcgccatcgccgagcgcctcggtctggagagcgtcgccgtcgtcatctcctctcgcaagcagacgaacgtgaacg

SEQ ID NO: 163292 - DNA, 524 bp, Zea mays
  unsure (1)..(524): unsure at all n locations
  Clone ID: MRT4577_80497C.1
cgcccgcaggtacccggtcaccggaattaaattgcccgggggtcgacgagggcctcacttagtnncggcggacccgcccccttttttttanttttttttttatttattaaataaaggaagtgcgcgggttttacgtatattattataggtgatcaaaatnnncatatcatcggtgggaccgcacattaatattatgggtgtacacgcgagattgcacatcgtggatcaaacccacacattgcacggtgagaccacaccgtgacgtaccatgtagcacccaaagacttgaccgcctaaacattgcgaggagggatgaatagcgaaacgtgaaagaacctctgtgttcttctctcttctcacaccaccaccacnnacaatactctattgtattggcagccagcttcggccctcgctttattatttgttcaacgcaccaccacaagnctagatgagataataatcatatccattggtcgtcgatcgatgtgatcagcagttgcaggggtcgcacttgcagttgccac

SEQ ID NO: 163293 - DNA, 268 bp, Zea mays
  Clone ID: MRT4577_80498C.1
agcagctctttacggcattggcaaattatttattttgattttctttttacttgttcatttttttctatgatctaaattcacttttaatttttacattagttttcgtacatacacagttatatatacttatgtatatgtattatttgttttttaaaatcaggttatattttgagtttgtaatcaaaaattgtgttcatttcatgcgctaaaaatgtgaaaaagattgttttagtatcatttgtaaaaagaacaacccgcattgaaacat

SEQ ID NO: 163294 - DNA, 1053 bp, Zea mays
  Clone ID: MRT4577_80499C.1
atgagcttgccgttcgccggagcggatgaacgccagaccctcttctcctccgcgtctgcggccactggccaggaatcgtcgatctgggttggctgctgctgtagatgtgatcggtggggtgcgaatgacggcaggcgtcgagtgacggctaccaatggtgattctcgtttatcagtggcggcgacgacataccagtccacttcaccggcggcggctacgtatgaggcatctttgccagttgtggatgactacagcacgatgcaatctggttattacaccagtctactgaaccaagaccctgaaaatgttttcatttttgaggaaaatatggacaatgcaaatgaagtcatggcatcacccgcatcaaattgtttgaattcacaatcaaaatctagaggtcgttctaagaattttaatgaacctgaagacattttgttgatatcagcatatctcaatataagtaaagatgcaattactggaagagatcaaaaggatggtagattttgggagagagttgagaagtactttcatgtcaataaaacttttgagacagatcacaattggtcttcgctgaaacatcgatggagtataattcaaaaagaggtgagtatttttcaaggtttccatgacagcatagaaaggaggaatcaaagcggaaaaacaagcagtgataagtggactgaagataaagtatccaaggaaggtctaggatgtaacaatgccactggtggagctcagcccaatgctcaaaggccaacaggtagaaaagttgaaaaggagaatatgaaagaaaaaaagcgcagggatgatgaagctgatcctttcattgaagaagttaaaaaaatgagagagtcaagggaacaaattgcgatgggaagaaaagatcgtgatgataagttaattgagcttgaaaacaaaaaactgcaattggagcaagatcaacatgacgagaagataatgacaaccgacaccagcaatatggatgatcaggcaaagaagtactttaagttgatgaaagacgagattttagctcgtcgtttcggaagtgggtag

SEQ ID NO: 163295 - DNA, 591 bp, Zea mays
  unsure (1)..(591): unsure at all n locations
  Clone ID: MRT4577_8049C.1
ccggccgggccgacggcgacggcaggatcagccggaacgatctccggagggcgctccgccgccgccgccgtggccgccgctggttaaccgctagtaggagcgaccgcgcccttcgccacgcggacaaggacagcagtggcttcctggacgactccgagattgagaacctcatcgcctccgcccagaaggatctcggcatgaagatatccacctggtagaagtagaagtgtcttctcttttttctcttaataaagcttggacgtgacaattctcttgccgcgtctttaaaaaaaatatacgagtgggtttgggactttgggtgtatgcgtgtggtgtgtgaccgtgtgagctagttacccgtgcacagctacttgtactcgagcattgagacgataaaaaaaagctatatgatattatgatgtacgaactacgaagtgaacgaaggcacagcagtgtcgtccttgtatacttgtactgtaccaacttaaataagtttatgtggctgttgcccttgggccttggccaccctgcgttgggtgtatgcctgtgtaccaagaactanaaaaagaaaaaaaaaaaaaaaaagcggcc

SEQ ID NO: 163296 - DNA, 691 bp, Zea mays
  unsure (1)..(691): unsure at all n locations
  Clone ID: MRT4577_804C.1
aattcggcacgaggcagaaggcctccttcctgccacacagcagcgccaccccctctcatggccctccccgacgacgccattcacctccccctgtcccccgtatcgccttcgtcaagtacgcccctcccccttccaccccatgacggagtgctcgattccttcatctgatggcgccacccacctccccccgctctcctccgccgccgcggctgtcgaggctcacttccaggcgcactggtccgcgctcgacgctgccgcacgccaggacccggcgcgggtcatcgccgtgggggactggcggtccccgctcgagctccccttcctgtggcttggggatgtcccctggtgtcgtctccgtcaggctgcaagtccaccaattcggcctcatctgcgacaacctcgacgcagtcaacaagttcgagcccaattacaggcttatcagaagattggtatattatatgctcgagtggtgaaaacaaataataccatgaatcccgatgtctcatgcagattggtatattaatgcatgctttaaagaataggaatatataagagataagacttcttcggtttccactactatcatcacctgacatttaatcagaaggcgtagacaatttctaacttattcatgtacatatttactggntctgtaacaattactggtcataaggtatacttactacatcga

SEQ ID NO: 163297 - DNA, 184 bp, Zea mays
  Clone ID: MRT4577_80500C.1
tactacactggagcagtatgcgatatcacagaactgctagagaactggtactacttctactacatgggcagaggtcaccagcaccagctgagaggactacgactacatgcgactggtggcgacatacctaatcgagtagacgtacctgctgcagttgtatgggcaggagcagatgcaacgcaga

SEQ ID NO: 163298 - DNA, 2023 bp, Zea mays
  Clone ID: MRT4577_80501C.1
cacagcttcttcacacacacagtgcgagaagggcctacaggggccgtacttaatccggactcacgcagcactgaccagtcccccacgcccaccgaacagctcccggcggaagaggagaggtttctgcagagaaaggcgtcaagcctgaccagccaggactggtctgttttgacgtgttctgctcatacctacccgcctgcgaattcattttgtggcagttggacgcttgcaaccgtccgaaagctttgttgcttgaatgcgagcggcattctggctgtagaagtaaaaattggagatccagtattaagcttaagggctcgttgatgccatttgggaaatggatagatcgacatcagccaggcgtgtgccctactaatcctccaaaacgctcatctcgtttgatgtagttacagaagttaattgatttactaaatgacccatatgatcctgttcatgtaacattgctaacaggatattatgcagtctgtgtcttggttgtttcagaaaacagcaaatggtagagtatgctttggtagatcgggattccagtggagcaggaatgttatggtgtgaaggggtaagcaagactttacttcatgggtttgtcgggcttgtgaaaaacctgagcaaaagagggagtgctgtctttgccctgtaaaaggtggtgctttgaagccaacaaatgttgataacttgtgggttcacgtgacatgtgcatggtttcagtcacaggttgcttttgctagtgatgagctcatggaacctgctattgggatattgaacattcaacctttgttatttatgaagatgtgtgtggtttgtaagcaaatacatggttcatgtactcaatgctacaggtgctctacttactaccatgccatttgtgcatcaagggcaggctatcgaatggagcttcactgcttggaaaaaaatggcagacagacaacaaagaagatttcttactgtgcccaacatcggagccctaaccctgataatgttttgataattcaaactcctgctgggactttctcatcaaaaaagcttgttcatagcaatggcaaggtagctgcatcgaggctgatcaggaaagatattcccttggatttgccatcagaagttaaaatttcagagaacttatcagcggcgagatgtcgggtttatgttaggaaagatctaaagagatctagagagggaacaattgtacatcatgttagaggaccttgtcaacaccgctgggaagaaattgataatctgaatccaccaagggaagagagggatccagaatctttttgtactttcaaggagcgtttgtgttacttacagaaaacagagcatggtagagtatgttttggtagatcaggaattcataggtggggactttttgctcggagggacattcaagaaggagaaatggtccttgagtatcgtggtgagcaggtcagacgaagtgtagctgatttacgtgaagaaaaatatcgtgtgcagggcaaagattgctatcttttcaaaatcagcgaggaagtggttgttgatgccacagacaaaggaaacgtggcacgactgatcaatcattcctgcacaccaaactgctatgcaaggattatgagtgttggacatgatgaaagtcgtattgttctaatagcgaagaaaaaagtttgcgctggtgatgagctaacgtatgactacctgttcgatccagacgaggccgatgaacgcaaagtgccatgcctttgtcagactgctaactgccggaagttcatgaattagttcgcttagatgtcagaggatcactgatataattttttcccccttatttacccccgggttttctccctctcgatgattcatttcctggtatatgttagagctcaatttttgcttacattcgtttttagaataagtatagttagagctctcaaaaagtggagcttccattcctgtaaataccacagctgtaatcactagggacagttcatttttcaaataaaacatttttgtgctaaaaaaaaaaaaaaagggcggc

SEQ ID NO: 163299 - DNA, 1371 bp, Zea mays
  Clone ID: MRT4577_80502C.1
atggcgtggagatgtaatgatcgcgctaaggcccatgccagcagtcttaatgagcacatacaggatgttcgaaatttctggtctgttcttgataaaggacccagcccatcggtccttagtttaggactccaaccaaccggccctattccatcttcccacgtcgacagactcgccggaaacttccaatcgagtgatcccttccacgccgccgctactattcttctactctacagcttgccgttcgccggagcggatgaacgccagaccctcttctcctccgcgtccgcggccactggccaggaatcatcgatctgggttggctgctgctgtagatgtgatcggtggggtgcgaatgacggcaggcgtcgagtgacggctaccaatggtgattctcgtttatcggtggcggcgacgacataccagtccacttcaccggcggcggctacgtatgaggcatctttgccagttgtggatgactacagcacaatgcaatctggttattacaccagtctactgaaccaagaccctgaaaatgttttcatttttgaggaaaatatggacaatgcaaatgaagtcatggcatcacccgcatcaaattgtttgaattcacaatcaaaatctagaggtcgttctaagaattttaatgaacctgaagacattttgttgatatcagcatatctcaatataagtaaagatgcaattactggaagagatcaaaaggatggtagattttgggagagagttgagaagtactttcatgtcaataaaactttcgagacagatcgcaattggtcttcgctgaaacatcgatggagtataattcagaaagaggtgagtatttttcaaggtttccatgacagcatagaaaggaggaatcaaagcggaaaaacaagcagtgataagttagctgaagcaaatgcaatgttccatgaaatgaaaggaaaggctttttcgttgttccatgcatggaacattctcaggcatgaaccaaagtggactgaagataaagtatccaaggaaggtctaggatgtaacaatgccattggtggagctcagcccaatgctcaaaggccaacaggtagaaaagctgaaaaggagaatatgaaagaaaaaaagcgcagggatgatgaagctgatcctttcattgaagaagttaaaaaaatgagagagtcaagggaacaaattgcgatgggaagaaaagatcgtgatgataagttaattgagcttgaaaacaaaaaactgcaattggagcaagatcaacatgacgagaagataatgacaaccgacaccagcaatatggatgatcaggcaaagaagtactttaagttgatgaaagacgagattttagctcgtcgtttcggaagtgggtag

SEQ ID NO: 163300 - DNA, 742 bp, Zea mays
  Clone ID: MRT4577_80503C.1
ctcgaggccggccgggccgggctcctgccgccgccgccgctcccgctcccagctcgtgttccgcttcttgcagccgtcgccgcgaagcgctccagagaacttccgtcaacatggggtatctcactgtcttctgttgaagttttttgatctatcctcgtgtccatctattttctggcttagcgattatgagtgtggttcggtgtgactgcataagtgcatctggttgcttgacgcgcagctttgcttgcgctaatgtgaagtatacatcgtgatctattttgatttcttctcagtatccacgtgaagcttattgacggtccagtgctgatcagatactacaacgtcagcgctaaacatattcataagcgacattaatccgttgctgctgtgtagcaatatctttcttggtccagttacttggatttgggaagctatgcatggtagcatacaccttcattattcttcgcgttttcaaagagtcgcctttttttgtgaaacttcatttgaagttttgcgaaactcccgatttggagccttgaagcgattacagttataatccatttatttaagagtcaacagtttagctgttcaggtactgcaggtgtagtgcacctagtgtttttctcacaaacattttagacgcttattctagtacacagtgaggtgacgaaaacttaattagcactaggaaaactgtatataagtgtgtcaatatatcgactaatatcttgattcagacatt

SEQ ID NO: 163301 - DNA, 399 bp, Zea mays
  Clone ID: MRT4577_80504C.1
atttttattttgatgggcacctcctgcttcagcagatcacacgcaagcagcagcaacatcaacagcgaccgcagcaattgatggcccgtaggactttaaagatttctgctgcattgcccgggcaggtgtttgattgtttgaaccaacaccgacagtctatgaatcaacagctatctgacgtggagatcttacttgagtccagctcgaacttgagcaacagtatcatcaccaactccaacaagagcagtaccaacggaagctacagttagaaccacttgcccagctcttttaaccacagccacaccataactggaatcacgatgactcttgagcaatcgatgcaatagtagctgccttgttctaattttggaccaaccactatggttgatcaaggcttac

SEQ ID NO: 163302 - DNA, 410 bp, Zea mays
  Clone ID: MRT4577_80505C.1
attcggctcgaggttcacagttgatttttaccaggccgggcctagatcatagggagggggacattatagaaccattctcttggctacatgcaatggattaagcctttacaagagtccccatgcgatcgactttacaagtatctcggatcaataaccagcaggttctgagcggggcacaggacggatgacttgcatgctcacatgacgaactgtctaagaaggctatcgaactgggtgcacctgaacaagctatgctcaaacactgtgattaaggtgctttactgattcaagagctcgagtgcaaggaacacgagctgctttaaggtcatgatgccattgcacgaaaagaagcagcatttaaggagttttgaagtgaaacttaacaacaggagactgatgatgagagattg

SEQ ID NO: 163303 - DNA, 1948 bp, Zea mays
  Clone ID: MRT4577_80506C.1
cgccggccgggctcgggccggggcgggggggggcaatactataaataatggaccggagcgaggtgtggtgaggtggaactgaatactacaatggagctcacgtgggacgaatgggatgtcattatactggctgcctgcagcttcctcatccctctcgtgttcctctgcaatgctacgaagcggcggcggcggcgcgcgccccctggcccggccaccgtacccatcatcgggaacctggcgtggctaacgttgcgcgacgggttgggtgagctggacatcctgcgacgactgcactcgcgctttggcccgctgctgtcggtccgcttgggttcatcggagcaggtgaacgtggcggaccgccgtctcgcacacgccttgctcgtggagcgtggcgccgctgtggctgaccgctcgccgctgctggtgtccaccgagaggttcggggccttcggctctttcagcatacacgtgtccagctacggcccacgctgggagtgttctccgccgcaacttcgcggcggaggtcgtgagcccagcgcggttccggcagatggcggcctcgcgggagctggcgcttgccgacctcatccggaagctgaagctgcaggagggcgtcgtcgtctgcagggacgcgttccagcacgccatgtccagcctcttcatcgccatgtgcttcggcaaggtcctcgacgactcgtccgtggacagcatcggcgtcgcgctgcgcgacttcgtcctccacggcggcgcgtcggggatggggatggcgctattcttgttcctccctgctctcaccacgcgactcttccgtggcctcctgcggtctaaggaggccaagcgccagaagctcgaaaacgtgtactgcctgccattgatccatgagcggagagagcgcaggaagacgaagcagctgacgcaggagcacccgcactgctacgttgacacgttgctcgacctcaggctcgacgaggaacaggatggtggccgccttctcacagaccacgagatagcaagcctgtgcatcgagatcctcatcgttggctcggagctaccggcgacggcgctggagtggatcatggcggagctagtaaagaacccaggcgtgcaggacaagctctacgaggagatgatggtgaaagccaaagccaccactgacgcttctgctggcgtgctcccgttctcggaggatgacttgcccaagataccctacctgagagcggtggtgctggagggtctccggcgccatccgccggggcaccagatgccgccacgcagggtgagggaggacgtggaggtgggtgactacgtggtgcccaagggctcagcgatcaacttcatgctgtacgacctgggcatggacgacgccacgtgggaccgcccagcagtgttcatgccggagaggttcctgcccggcggggaagccgaggcgctggacatcaccggcaccaaggagatgaagatgataccgtttggggcgggcagaaggatctgcccgggcctcaggatcgctctcctgctcctcgagtacttcgtcgccaacctcgtagcgaccttccactggaaagaggtggaagagggcgacgtcgatgtcaccaccgaggacgctcagctcaccgtcctcatggggaagccgctccgggcgcgcctgcttccaagactgcctgctgcaccgtgatgatgatgggtgacagtagtgtgacactgctccatctatggatccacgcaccgacatgaacggacgagacgacgacgacgatgcttttaatttcttcttctcctcatcaccgtcatcatggtctttcctttttctttatatataataaatgtatgcatgcatgtacacgacagagtgtatgtatatatgcatgtatctcagtgtctcaccaaataattaatgcgaataaagatcaagaacataacatatttgttcttgcttgatagactcacc

SEQ ID NO: 163304 - DNA, 580 bp, Zea mays
  Clone ID: MRT4577_80507C.1
tgggtaaccgcgcccctccctcggccaccccacaccccccccccccccccccccccccccccccccccccccaaacacttacaaaggggacgggaaccacagttagggtccccagatttctacaaccaaaaagtagggagtgaagggaaataaacaaccatttaacaaccccattagggggttccagcctccttttaaagtttgggaacgaacgcgaaaagaaccgaaacaacatccttggttggcccctgaaggggggcaaaaaacaacaaaacggttccctgcagcgccccaaaaaggggggggaaaacctggggggggttgggaaaattctcaagcgccttaaagtctccgggcccgaaaaatttgccctaaaaaacggccccaacaaaatctgttggcctcctcaacgccctcttttttttgaaaggcgcggaagggtttgaccccggttggtacctcctcgggggggacaaaaagccaggcattcttacctttaatgcacggttggagcgcttccaagggggggccctcgatggttttcccaaccaaagtgtttttccccccaaaagtttgaagg

SEQ ID NO: 163305 - DNA, 362 bp, Zea mays
  unsure (1)..(362): unsure at all n locations
  Clone ID: MRT4577_80508C.1
tcgttcttttttagcaggctgagctgacagcatgtagaagcgagagaacaccagagcctatgggcacgatgagggcaccctaagatatttccacggtaccctctaacgatgaaggtattggcgcaggattcagtggtgcagatcgtctgacggccatgacattgggtgcgatggcaatggccatgcgtatgtcaccagctcctcttagcaataagccaactccagttgccgctacctcatctttgtggtacaagngatcccgatcacttgacgatggctaatgaggtgctgactgaagatctttcaaagaatgttagccttcgtttataagcggaaacaataaggtattgccaagatgagca

SEQ ID NO: 163306 - DNA, 406 bp, Zea mays
  Clone ID: MRT4577_80509C.1
acgcggctggtcaaggagcgcgaccgcacgagctcgtcagccagcccgagccccgccgcggtggcgcctgcgcgcgccccgcaccaccggccgtcggcggcgccgtcgtactccggccgtcttacccacaccctcgcaggcattctgtcgcccgaatgccgtaccccgaccggccgccagcagcaaacggaatgggcccaactgtgagaccaggtgtccatcctgctactgcgccatgtgcattcttcagggttgtatctgtactaaaaccgaatggcatgttctgtagtgtagcgtgttccggcgtatcctcctctcgaatgaataacggcttgtgtctcgaggaagaaaattgagcctctttgcttgagccaaaccaaccaaccaaccaaccaatcctggatgg

SEQ ID NO: 163307 - DNA, 603 bp, Zea mays
  Clone ID: MRT4577_8050C.1
ctgtctttgaggctggttaggaagcaagagtcctgatctttcatgctgcacaatatgagcatgcaaaaagctttttccagcagaacatgttccctcgtctccagttgccggaaaggaatttggggatcaagaacttagctcgtcctacccccatgttgagttctgccctggaaaacccaaagcaagtagtgatcatagtacagaacccgaccaaagtaggctggtgaggaagtccaggctccaggggaacagacgctgcccagtgttcatagcttcctgcaacttgacagagcctgagtttgcctcttagtgggagaatgagagagagctgtagtgtcacctgacattccccaaaccttgtgaagcacgttggcctaagtgtgccgtgatcccagcccacactagcctgggtgcatctgctaatgggagaccaaatctttgtccgggaagcaagaagtgggtgggagaatgtatcctgtttttgtcagtttgtttgccttactcatttctaagtgcaataagggagtgtctcacaggattgcacctgtgacatcctgatggatgcttccctgtggccctcctggggcaagggtggacagactc

SEQ ID NO: 163308 - DNA, 132 bp, Zea mays
  Clone ID: MRT4577_80510C.1
tcgttgggaagggagcttcgaggcgggccggcgcggttcgttggccgggcgggctgaaccaatggcacgggcccttggggccccaacgccctaacctgggtcggggccggccgccaacaaaagccccggttg

SEQ ID NO: 163309 - DNA, 716 bp, Zea mays
  Clone ID: MRT4577_80511C.1
acccgggccgtctcgatacagcatccgagagatctcctacggtccaggtcccaatcgtcgcggcgtttgcccacacctcttccgcggcccgtagttgcctccgcgccagctagcccataaggggagcgcagttcttatccacatagggtgcgtctcggtctccaggtttgctcctgctgcgcctacaactagactagacgaatagcatggcttatagggtgacagcaagtaacgccctgacaacacattgaaggaggtgtaaaaatgtatcagctatctgaggagactgtgccacacattgacgtgaaccatgctattgctgctgcacttgaacccaatggacttggaaggctactatctattccgagcagcatctctgcactcatgtcatgctattgtacctaggtatgatcactcctataaccatgacttgtaaactacgacattggagaaggcataagttgcatgcctctttgatcaaattaacgaagcatgccggcgctggtagtggctttgatcttttttttgggcatgaagatctccatgcagaaacggcactgtggccttgaagaacgtcctcctagagaacacgaactatgactgctgagatagatgcacgcctgagtagtgtgtatcatagacaggagtatctactagcaggctcagagcgatccacagaatgccatccagccgctctcttacatgagcatcatgag

SEQ ID NO: 163310 - DNA, 232 bp, Zea mays
  Clone ID: MRT4577_80512C.1
ggaggtccagaagaactatgaacacttatttaaggtgaatgataaatccgtgggtggctccttctacctgcagtcaaaggtggtccgcgcacaggagcgcctggatgagcaactcaaaatccaggcccaggaggacagagaaaaagggcagatgcccatacgtgactgctcggctcccaccgtcccccacgccgcctctaatttatagcttggtaataaatttcttttctgc

SEQ ID NO: 163311 - DNA, 282 bp, Zea mays
  Clone ID: MRT4577_80513C.1
tttttggtggattaaatgtatataatgtccagctgggtcaaccaactgacgacggatgactccaaagagacaaagacaagttgatttcatttgccaatcaccacagatttattcctctaggccattaaaggagagatcagtcccgcccatacatgaaagcggttggaacaaaatcagtggttgattgtgactaaaacatattacgaacggtatttgacgctcgcaaaaagatgcagtgagcctggccaactgatacgaattgaccggaactgatgctggtta

SEQ ID NO: 163312 - DNA, 749 bp, Zea mays
  Clone ID: MRT4577_80514C.1
aggccggccgggccggagtacatgaatatctccatgccgtcgtctcccaaaaggggctctcagcacccgcaagggccttgcatctccagcgtcggcgtccacgacgccggggaccagcgaccatgcggccactttcctgttgcgctctcgcctccgtctccacaatttgtgcaccggacatagaatgaggctgtgctggaccgccagcgtcacccccgaccggggcaccctatcgtatgcgtagtggaccttgatggtgccattgctcgactcgccgcgcctgtccgttgaacacatcatggccttttcttccccaatagcgcgtattcttagctagggtttcaagctctccatcttcgattgagcgtaagtccgtccaaggttgttgtcgtcctctcccatcagtccgtcaccggagccgcgcttcacccgccgccgctgcctcatgcctccacccatctcagccgtcgaacccatagtgtcggcgacgtcgcctgctagccgcacaacgattttggcatcgtcatccgcgtacgcctcaatgtctctgccaccctgctctattttgacatcgtatatgctgtccgggggatgcggtcatgacaccgagtacacccacggaagcaagttgctgagtaccagaccatattaaagtcggcgtcgttgacggtctcattgatttctacaatccttcgaaaacaaccacccgtccaatgttgtatgcaccaatgaatcatgcaagctgcatt

SEQ ID NO: 163313 - DNA, 341 bp, Zea mays
  Clone ID: MRT4577_80515C.1
aaaaagggacaaaaaacggggtttggccgattccccacaagggccccaaatttttaatttggaggcccggaaacaaaacctctttaaaatggggggtttgtttaaaggggggggggaaaccctggggcccttgcccccctttttggggaccggaaaacttgggcccgggaaatttaaatccccccaaagcaaccctttagggcccccccccccgggcccccccctttcccgggtccgcaaaacctgggcccccgggggccctgggggcccctgccaaaacccggttttttacgggccgggcggggggtgtggggcccccccgggaaccggccgccgggggg

SEQ ID NO: 163314 - DNA, 419 bp, Zea mays
  Clone ID: MRT4577_80516C.1
gggggaaaaagggccccaaatataaaaaccagccccccccaaggcaacccagaaggggtcttctagaccaaaggaaattggttctcccagggccatggaaaaaggcttctcaacattacctcattgcccacaaaaaagggccggcgtcccctatcactaaaaaacttttaaatcttggtaggcttcaaccaaagggcttcaaaaccctggaccaagaaaaaaaggtaggggaccggcatcggcttttgcatcaggcctcaaagaagggggtgccaaatgggcctggagggacccccccccccttcagggaagcggtttcccccaagccttccttcaaatgaccccccctggacccccttctggaaaacaagttaaaagcgggggcggatttcacaaccctgccggtcggcccaacaact

SEQ ID NO: 163315 - DNA, 407 bp, Zea mays
  Clone ID: MRT4577_80517C.1
gttatctcttatgatattttactttgcgtctgatacgaaaaacagtgatacctcaactgccgcttactataacaggatgccttatccatagctgaccatgaagatacaattgaaagggagggcctcaaggactgaaatcgtagacacgcacagaagggtgcttgctgcacactgcgcatgcaggatagatcaacgcagtccatactagtcagccatccaagagcacttcgattttaagattcttcagcagaatcacgaaggttccaagtctcgagacctgccacaaaatggatgcctacgacatgattgcatacatgcactaacttaaccagcctcagcagcacaaagacgagcgggatgctacactcctcgcctacatccttgacacgtccgagacttccgtaccg

SEQ ID NO: 163316 - DNA, 1523 bp, Zea mays
  Clone ID: MRT4577_80518C.1
gtcgtcctccattctgtcgccgctgtgttcgtgcctctcctcgctccccgatcgctgcccctgggcgccgcgttcgccgccggatctgggcgcgcgacggtgccccagacgaaccgatggcgcgggcggcgcttcgattgggcgtgcgcgcgctcgcgctcctcgtcctcgtgtcagtggctctgcttccacttgtcagttccgacgatgggtacagacactgcgagggtgtcgtcaggggctgggcggatgcctcgtctgggcgcgtgaaggacggggacacactgagcctcaaggatttgctcttcttcctccacattcctaggactggaggccgcacctactttcactgcttcctcaaaaagctgtatacgaacgcgcaggaatgcccgcgttcttacgacaaactacggttcgatccaagtactttggacatctggccttggaagtacttggttccatggatgagggaagatctgtttgccaggagagatgccaggggtgtttacaaagttcatagtagtaagaaggttaatgcatatgatgtggatgatatggttatgccattacatcggtacatcaatgatccagttgcccatgaaatcattcataatggggctacctttcagattactgggttaacgaacaactcatattttgatggagcacatgaggttcgacattgtgtcaggaatcatccagatcttggtcgtattgtgcttgaagttgctaagaataggctggaccagatgctatatgtaggacttacggaggatcatgaagaatcagcgaggttgtttgctcatatggtaggagcacaggtgctttcacaatctggaacattgactttagatctcaaggaagatctgctcattgagactgattctcacccatccatggagcctgaggacgaagaaacaaacggacatctgaatagcacacatggttggcagaataatgaagcgatgaactctaccaacgacgaacatggaaaaggaaatatgactgttggtaaactgatggaagcttatgaaacttgcattgccaaactgtggaagtctcaatctggccgacgtaaaatatccctaaagaaagttcaggaagcgaacttttcaaaagaggcacggaagctggtacctgaggcaattctgaaccaaatcatctcgttgaacagacttgatatggaactttatgaccatgctaagaaaatttttactcaggaacatctgatgctaaaagctcagcaatccatggtggggcagcacagacagtttggagaacaaaagggttggatcggcgtaatgtgcagcgacgggatttgccctccttggatggtggtcttggttgttctagggatctccacgatcatagttttggtcacattagctgtaacgacgagaaaaagaacgtctaaacttaaggtttaaccggaattcgtgaggcagtctatagattttgatgtatagcctgggaccggacaggttttagagcaactccaataagtataataaaatatagctcct

SEQ ID NO: 163317 - DNA, 471 bp, Zea mays
  Clone ID: MRT4577_80519C.1
ggccgcttttttttttttttttttggagaagaacaatatcagacaatattaataaccaactagaaaagcggaggaataaagcctcacaacaggaagatgaataccatacatcgacaggatagataaagaaccttcggaaacatagcacgattggagccaatcatggcagatcacaggataggagacaggcagaagtactaagactactagccagttgagggtatagtactcgacagcctgaacgccgtcctcaccctacagaaattgaactccgacctcataacaactattgtgacgcgcccccagattctaaaaagcctctaagaacttatccatttacataccttgaccaaggaaccagtgcacgaaagagctctatgcgaacatgaggtggaactagaggccaatgaggtagaagacctccacaacactggtggagttgtagatcatacatatggaatgctgcacctt

SEQ ID NO: 163318 - DNA, 553 bp, Zea mays
  Clone ID: MRT4577_80520C.1
atgataacacgtacagaaatacctattacgagttcagtgcatcttcctcctgcgtcccgggcacgcgcatactgcgtcaccctccactatatatatatggggcgtcaccgtaccccaccttcatcgccgaaataaacaagcaagaagaaagaaaccatcaacattgaacaacagcatcccatctaaccagttttttaacctacttgctccagaaaacactggaaattgccgtgtccgaacgtccatatatatatatctacacgtaaacgtctcgtattggaatacaatattgtgtcgttcttgtatgatcccggcgtagttagagaagagcgttacagcaaaagcaaatggtggttgagacgagcgcttcagagaacagtggcgggggcggcgcaacctttttcgtcgatcagctttcgatcgaggcgggtgggtgcgtgctacggccgctggtgcaacgggagtacgggacacgtcaggttcggtgccgggcgatcgagtgcacggccccacggggacggcgacagccgacagcaacgagccctcaccgtcg

SEQ ID NO: 163319 - DNA, 373 bp, Zea mays
  Clone ID: MRT4577_80521C.1
gggaacaaaaaaacttccattttatttcccatggggggggggctgttaacccttcctaaagcggccaaaaaaaaaaaaactggggggaaaaaaaaaaaacccaagctggggggcccccttggtttccccaccccacaaaattacaggcaggcccttttaaaaaaatgaacatggggcccaatgggatcccccacaaacctagcgaaaaaaaaatcccagggggcaaatccaagcttcatgcccaagggaaaaaaaacccctggggccttgcacccctccttaaacttgggagggaaaaactggtgttaaaccaaaaacttgggggcccccccctgggaaaaaaagaaaaaagggggaaccttgctgttctttt

SEQ ID NO: 163320 - DNA, 509 bp, Zea mays
  Clone ID: MRT4577_80522C.1
gggaagccagaaagctcactacatggttagctcactctaacatacttttcacataaccattggagtatatagctcaacctgaattgagcacgatatcatccgatagtaaccttacgtgctatcgcgaatgactgcatcatgtatcgcgtggcgggaccatgggaaataagtggctggcccaatctaaagccgagcagtaacgtacatcacgcccgactccaaagcaaaaagcgaggaaaggctcgacaacaaatgatgatgagccaaccgaatagcctaagaactgacccttatagctgactgcaagctatagcctgagcgctcaccctgtggaagtgctacccctacctctagtcagaccgacacgacataggcgatccaagtgcgaggatgaccacagacagctacatgatctgcaggaagcccctgatgctggtgatgtcccaccacattgcgcaagttctggcagctgatgcgacactggatcagctgcgacaccgaagatccag

SEQ ID NO: 163321 - DNA, 192 bp, Zea mays
  Clone ID: MRT4577_80523C.1
gttacaactacagtggtgaagtggagtctgtttggtggattggctgtgtagcggcctgcggtctactcgtgatgtccagcgctccatcataagtccagtgaacttgcatgctataccatcccacgtgtaggtttgatgtccgctctccggttgtgcttcagaaaaatgctacgagcaaccagtgccaaagag

SEQ ID NO: 163322 - DNA, 444 bp, Zea mays
  Clone ID: MRT4577_80524C.1
aatggcacacaattatagaagtgttatttcttgcctcaggtatgggtgagtacaccggctagactaggggaatactgcacgtcagactgaaaccaacaggcgccctacttcagtattgatagaacataaactttaagatgagagagagagaatggataactccgtaaagaagactgtatctccaacacataccattatatggaagaatctggtgggatactgagctaaacagagtgggagaatattaatgtagtaataacatggatcccgttgggctgcgaaagaggtgatgattccttggtattatatgggctttcacatcgggaagctttgatgggatggtttaaatgtctaggtctttgagattgacgcacttactctacaaagccttttgaggtggggagctcccttagactttgaatttaaggtctgttctctgtctga

SEQ ID NO: 163323 - DNA, 447 bp, Zea mays
  unsure (1)..(447): unsure at all n locations
  Clone ID: MRT4577_80525C.1
cggccggcgggcgcgagcggcagcccgcaccaccggcggaggggagggggacccgccgagccgcggcgncccggggcgcgccccgccggaaccgcgcggccgcgcacggcaacacgcccgggccacggggcagggagaacggccccggccgccaacacgacgcccaagccggcagcgcaggaccnagcggcgggggggggagggaagagcaacaaggcggaagacaacacggccggcgcagagaacgagcaaaaccaggacaccacggagggaaggaggaagcaaggaagagcaaccacaccgagagggggaaaaacaaccaagaacccgccaccagccgcaaggagcagggacggggcgaaccccgccacaacgcncacaggaggaggggagaagccagagccgaaagacacaagcgacaagagcaagagcgagccccgcgacgcg

SEQ ID NO: 163324 - DNA, 339 bp, Zea mays
  Clone ID: MRT4577_80526C.1
ggagaacttcaacccaaggcgcggagcttctctttgcaggaaacgaagccaggcacgggcttgagggttccagccgtggatctcctgtctaaaataaatagcactggttttgcctcgatggaaggagtcctcaggccagctgacaattttacaacatagttacattcatggcttaggctaaaccggtctaaaacactgggattcaacaagcgagctattgcctgatcctatggtactgtacaataattctcaatgaaagaggatgttacaaaaaacatagcgaaccttgtgatagaacttaaccaaccctacccaggtcaaggatatgagatcaaaggg

SEQ ID NO: 163325 - DNA, 135 bp, Zea mays
  Clone ID: MRT4577_80527C.1
attcggaccgggtccttgaagccttccaggttttccttttatgaagtctattaaaactttgccttattaatggcattacttgtttcttttttaaaattgtattccgttaccatttcacaaaacattacaacccga

SEQ ID NO: 163326 - DNA, 504 bp, Zea mays
  Clone ID: MRT4577_80528C.1
gtgggttttttttttttttaattttttttttttttttttttttttttttttttttttttttttttttttttaaaaactagcaatgtttcttactgacatctactagttatagggagaccgttttacaaaaaccacatgtgacatatttggggggggggggggggccagaaaaccacccccttttggggctcccaccccccttgagagaagagcgctacaacacttaaaaccgggcaacccaaaacctggggttgaccctcctcaccttgggggccatggaaacgggccccgacccggcggaagccttcttaatctccttactgttcctgagcgaggacctcggccccaagtctccaccggggcatgccccaaaaatccacggctggcatagacctcctaacggactccgggccgttggaggggaaagccttcttggctaccccgcgtttggacagcttaacggcgacacaggggttctcggccaacgtctaggggtccactgcc

SEQ ID NO: 163327 - DNA, 1078 bp, Zea mays
  unsure (1)..(1078): unsure at all n locations
  Clone ID: MRT4577_80529C.1
gctgggtttttttttttttttggcataaactgggatgtgtggacccatctcagtttccataaaccagtttcttaaaaactgggggggtccaaacagtccctttatactgctgtaaacaccacatgattattataaaagcatagtgacaacacaaatcattaagcaatccatcaaattatgaactggcagcgcagtcaacttagtataaaactaacctacaaaaaggataagaattaagtaatgataagcccagaacaaaaaaaaaagatacaaaagctcatgctgaaaaactctgcaacttccgcaagcgcttcacagcagatgaaggttgcttcttcaagaccttctttgcagattttgccttaggcttcgccttcttcaatggtgccggtgttatgggacctggctttacgcccttttttagagcacttccccttggagtagccgaaggtggcagcctcaaacactgcggtggcaaaggattgtgaggtttccaaactaaattattcttcatcgagaacctcaccttcttaccactcttctctccatcctgggcaagaagattaccttcgctgccatcacccccatcagaagcttcagacagcttatcggcagactttgagcgcttcctctttgttgccactttcccactgactggtgtcactggtgaagcgcttgagctgctgccccctttgaccataccagcttctgctgcagccatctcaaactgcttctgaagattggactttaatgtctcatcaaatgtaatgccatcagcaccatcaccgatctgctgatcatctacaggagcatcagtactcttatcggtggtgttcccttcatcaacaacctccaccttcctctttttcttcttctctttcttcaccccgaattccgagcttaccttcttctcacgcttcaaatccttggcatcccccatctcaccttcagccaatgcaacattcttcgtctttttcttcttttggccttttcatcgcccgcatttggttgcacggacagctcagcagcctcaaactgtggcacagggtttcgaganccagatagctgcaaagcttnc

SEQ ID NO: 163328 - DNA, 595 bp, Zea mays
  Clone ID: MRT4577_8052C.1
gagccggccgggaactcgtcgtctgccttgtgcggctccatttatgactctgtaccttgagagtttatctctcctccaaacatggaaatagagaagggccacatcataattgtgttcattggtcatgtcgagtctggcaagacgaccaccacaggacacctgtatgctacgagatcgaagggatccgactagctgagtgatccagaggtctagaaggaggctgctgaaatgaacaagtgctccttcaggtagacgagggagatcacacaagctcatcgctgagcgtgagagaggtatcgccattgatgattgatctgtgggaagacgacaccaccaagtactactgaacaggaattgatgcccctggacaccgcgacttcgataacctgatcactgtgacctccatagatgactgcgccgcgcctatcattgactccaccaatgtaggtcgttaggttgtgatcatccaaggatggccagacacatatacatgctctccttgagttcacccttggagtgaagaatcatcgatgtgctgctgcaacaatgtgtatgccaccgctcccagatactccaatgcacgacatgacgagat

SEQ ID NO: 163329 - DNA, 449 bp, Zea mays
  Clone ID: MRT4577_80530C.1
actactaataacctggcctaaacgtctgcactagaaacacaaaactgttgctagcatcacggaggccatgcaacttaaaccggtcttaaaaagattatgtaaaaaacgaactgggaatgacttcatcatctactaaatgagaacgggtgtaactaggcacctcacccataaccactcatctttctaattgaaaggaagggatcgtgttcccacactgacccgtaagactctagtgacacatcacctgcttctgatgctctacaaaacttgacccgccaacagtattgattccctagcagccccctcatatgatggacatgttggctcctccgcctatccacattcataaacctgctctaaagagcactcacccatcactgcaaaccgcataagaggacatgctcctcagagccacacaccttgaagacatcaagtctgtactccacact

SEQ ID NO: 163330 - DNA, 529 bp, Zea mays
  Clone ID: MRT4577_80531C.1
ccggccgggaatttgtttctgaacgcgttcctcccgtctcccctgatctcctcagaccccagaagcgcctctgcggtcatggacgccaccgccactggagctggaggtaatgcgaataagggagcggtcggtcgcaaggccggctgggccgtaggaacgacctcaggggacccatgtctcgtgcaatgcctaacttccagttccccgtcggccgcatcgaccgctacctcgagatgggccgctacccgcagcacgtcagcagcgctgtccccggctacctcgcgtgcctcctgtatcacctcgccgctgaggtcctggagctccccggtaacgctgccaaggactacgagaagacacgcatcgtctcgcgccacgtgctgctggcgatccatgaccacgaagatctcggctagttgctgaccgccctgaccgtcgcccacggcggatgtgctgcccaacatcaggccggtcctgctgctcaagaagactgcggtaagagcgtccagctcacgggattcaggatgccaag

SEQ ID NO: 163331 - DNA, 788 bp, Zea mays
  unsure (1)..(788): unsure at all n locations
  Clone ID: MRT4577_80532C.1
ccggccgggttcgtcccccgcctcctcctctccaccccgcgtgagccgccgccgccccgcctcccccctccagtccgccgctctcccgcggatcatttacctccactccattccgaggatctcatcagcatgctctccggcgcggcggcggcccttcctccgagaccaggagctcgctgccggagtcagtgaggggtacgtagtcgccgcccggttccggcagtccgtggggccaagggagagaggagagggaagcaagtggaactgtgctgttgcggtattctccggaacactctacactaggcagcagagcagattcgcccctgctgaaaacgcactcgatggcgtccgcgacgggggtttcctcctcggagatggcggtggaccacgcgacggggccgggcgccgtggagaagccacggttcgatgctctgactgagatgagcggcgggaggccccaattccggaaagtgcccgtgccgcagcaccggttcgcgccgctcaagcgatgctggatggaaatctacaaacccgtatacgagcacatgaagatcgatatacgcatgaacctcaaggtactggactggagtctacccatattgggctttcttgctttatgtgaatgagcttttcgtgctctattccttgcaagaaccatagattgtatacttcagatcgccgtcaagaagctcaacccggagagcgtccaaggcctgcagagtggcaggataacatggagaacttcaaccctttcggtgagaatggagagtanggtacagggtcaccat

SEQ ID NO: 163332 - DNA, 322 bp, Zea mays
  unsure (1)..(322): unsure at all n locations
  Clone ID: MRT4577_80533C.1
atcgctcatnggtatgccgcgacgtagctcgaattcggtctagggcctagaggatgacgaatcatagcaatcaaccagagcaagcctatataagaatgctgtcatatctagtcgtgcagagatcccagggtcattagctgtcggccatgatcgcggatagcattgtacggcagcgtcccagtgtcgacgaggcacttcactagctgcgcatacttactaccacgtatcggactacccggacagtatatactaacgcaggaatctccctggttggtgccctgcttctgtaatatctgccagcttcaccatcgtatacatatat

SEQ ID NO: 163333 - DNA, 195 bp, Zea mays
  Clone ID: MRT4577_80534C.1
aaaccccggtaccctatgatttttacctcaaaaattcacagggcaaacatgggcggaaccagggtctgatctaccaccaaagtacagcaaggctaggggcccaagctaacaaacaaccaaacttaaagctgttacatgacatgcgaaaatgcaacttaagctaccatgtcaagattaggctagattcggggaact

SEQ ID NO: 163334 - DNA, 497 bp, Zea mays
  Clone ID: MRT4577_80535C.1
cattgggtacctcgaggccggccgggaaaaacatcacaaactgagctgccgcgaagtcgctttccccatttccaccgatgacgacttcgaggagatccacgaaggagaaccgctactttcctgccgagggtggacggcctatgtatacctgagactttatgcggacgtacacgatggggaggaccagccaaccttgctcggaagctaccccgcaatgttcgcacttctagtcggacaagaacgaagaaagactgcttacactgcgtaccaaggcgggcaccaccacctcaatagatgggatgcacatttgcgagcacatactggtgctgagggggaagattgacgcgaccaacgacgacggccatggtttttatctacaccgcccacgaggaatttatacttggaaggatgcgcctactgcgcctgcgtacatccgcatgaaagacaggagggcccagccactgggcgttgccaagctaggaaaattcgctcacatc

SEQ ID NO: 163335 - DNA, 321 bp, Zea mays
  Clone ID: MRT4577_80536C.1
tgggctgtttagtgcttgggaaattatggtggtgccttcgtctcccatttggttgaaccgtcgttggctatttgagatccgtagacactgactcgaccgtggtacgacttgcctactcgtcgagattggtggggaagactgacggttaagcaccatgctttgtctgaggtctggaaaagtataggccgaacatgaggcatattggtctgcggctaactgggtttcaagcctataatcctgctgagccctgctatataaagccactcatagagacacgtcggatcgccccccctaaacgcgcggatacaatcgacaacgaac

SEQ ID NO: 163336 - DNA, 2419 bp, Zea mays
  Clone ID: MRT4577_80537C.1
gggaccctcgagccttacgggtccacaggctttcttgaactgttcttgtggccggcctgacggcgccgggaactccctacggcgggtgggagggccctggcatccagctccggggacacttcgttgggcattacctgagtgctactgcaaagatgtgggctagcacacacaatgacactcttaatgcaaaaatgtcatctgtcgtcgatgccctctacgattgccagaagaagatgggcacagggtacctgtcggccttcccatcggacttcttcgattgcctcggggccatcaagtctgtgtgggctccttactacacaatccacaagattatgcaaggtcttcttgatcagtacacagttgctgggaattccatggctcttgacatggtgataaagatggctaattatttcagtgaccgggtgaagaatgtcatacagaattatagcattgagaggcactgggaatctctcaatgaggagactggtgggatgaatgatgttctctatcagctctacacgataacgcacgatatgaagcatttgacactagctcatctcttcgataagccatgctttcttgggttgctggcagttcaggctgacagtatttccggttttcattcaaacacacacattccagttgtcattggtgcgcaaatgaggtatgaagttactggagatcctctttacaagcaaattgcgtcattctttatggatacaataaattcttctcatagctacgcaactggtggcacatctgctggtgaattctggaccgatccaaagcgtttagctgggactctgagtactgagaatgaggaatcttgtaccacctacaatatgcttaaggtttctcgcaacctattcagatggacaaaggaaatagcatatgcagattactatgaaagggcattgataaatggtgttttaagcattcaacgggggacagatcctggtgttatgatttacatgctaccccaggcccctggacactcaaaggctgtgagttatcatggttggggaacaaagtacgattcattctggtgttgttatgggacaggtatagaatccttttcaaaacttggtgattctatttactttgaggagaaaggagatccacctgcactcaatatcattcagtacataccaagcacttacaactggaaagcagctgggcttactgttactcagcaaatcaaaaccctcagctcttctgaccagtatcttcaaatttcattctccatttctgcaaacacaagaggtcagactgccaatataaattttagaattccgtcatggacatttgctgatggtgcaggagcaactttaaatgacaaagatttggggtctatatctccaggatctttcctatcaatcaccaaacagtggaactccgatgatcacttagcgctacactttccaatcaggttaaggacggaagcaattaaagatgacagactggaatatgcatcccttcaagcaatcctgtttgggccatttgttcttgctggcctatccactggtgactgggatgcaaaagctggcaacggcagtgctatttcagattggatcaccgctgtccctccagcacacaactcacagctggtaaccttcacacaagtatccaacggaaaggcatttgtcctctcaagtgcaaatggcaccctgacgatgcaagagcgacctgaagtcgacggcaccgacgccgccatccatgcgacattcagggctcaccctcaggaggactcaacagagctgcatgacatctacagcacaaccttgacgggaacttccattctgctcgaaccattcgacttgccgggaaccgtgatcaccaacaacctcactctatctgcgcagaagagctccgattccctcttcaacatcgtgcccgggctcgatggaaaccctaactcggtctccctcgagctcgggaccaaaccaggatgcttcttggtgacgggcacgaactactccgcagggacgaggattgaagtcaactgcaagagttcccttgagagcattggcgggatactcgagcaggcggcgagcttttcgcgaactgacccattgaggcagtatcacccgatcagcttcgtcgcgaaggggatggccaggaacttcctcctcgagccattgtacagtttgagggacgaattctacacggtttacttcaacgtcagggcctgagtcctgacgcttacacttgcagtagaagtaatacagaataaataatgtgcgcgcgacctttttcacacttgcagtagaagtaatacagaacagccaatgaagaagcaattgggttgtttgaacttgttatgcacgcgggagtattcactttgtgtgaaaccacttgttatgcaataccaagcgagtcataccccgttccttcgatcatttgctaaggaagttacagt

SEQ ID NO: 163337 - DNA, 542 bp, Zea mays
  Clone ID: MRT4577_80538C.1
gagcggccgcccgggcaggtacgatctgttgtagcagctgttgttgcaggtatgtagccacattgcccacagcgagtgggctagatgaaagcagttgttgctgttgcaggtatgtggcagggttcaccatggctagttgactaagagctgacagaaactgttgcaactgtagttgttgctggtatgcagcagtgtttgccagagcaagtgggttggatgcaagcagttgctgttgcaagtaggaggcagggttcaccgcggctagttggctcagtgcgggcacaaactgttgctgttgttgcgttgcgatggtttgtatggttagatgtgccaaggattgttgttgtaattgggcaaacggttgttgtaagacgctcgccgcaagcgcttgttgtagcctataggcttgcacaatagggtgttcgatgcccattgatgtaactgatgggaggaactgtggaataatggcattaggagcaagtgagcattgtggaataatgaatgcagttgttgtactcacagaaagggaaaggagtgcaagg

SEQ ID NO: 163338 - DNA, 302 bp, Zea mays
  Clone ID: MRT4577_80539C.1
gccgtcttctttttttttttattggaatttttttattttttatccaagcacgcccaagcccaatactggtgcatcctgtgctaaagaaacagggaaccaaacactgccatacgattatttgctacattaacatcacacaatatcattcatgtgcccactgcgaaataattagttactactaaaacacgtcaggacgatccaatcgatgcctggtttctactttccacaactagggaacgagcttggttttgatacaacacccacttcccacccaaccttattccctcaccgaagcttgcact

SEQ ID NO: 163339 - DNA, 945 bp, Zea mays
  Clone ID: MRT4577_8053C.1
aataagttgcgtctgcatcgtcgctataagagagcaggggccgccccctccgtccgtccatccctctcgctctccgctccattcgattcgatctcggcttcctctccaagccacgcgacgcgagaccagagctccggccatggcggcgacgatccagtccgtgaaggcccgccagatcttcgacagccgcggcaaccccaccgtcgaggttgatgtgtgctgctcagatggaacctttgccagggccgctgttcccagcggtgcatcgactggtgtctatgaagctttggagctgagggacggtggatctgactacttgggcaagggtgtttccaaggctgttaacaatgtgaactccattattgcacccgctttggttggcaaggaccctaccgctcaaactgagctcgacaactttatggttcagcagcttgatggaaccaagaatgagtggggttggtgcaagcaaaagcttggtgctaatgcaatcctggctgtatcactagctgtttgcaaagctggagccagcgtgaagaagattccactgtaccagcacattgccaaccttgctggcaacaagcaattggttttgcccgttcctgcgttcaatgtcatcaatggtggatcccatgctggaaacaagcttgctatgcaggcaatgctctgaactaagatttccacatctttcatcatgttgtttctgcacatgtgttatttatgcctatgcttgcatatgtgcaggagttcatgatccttcctactggagctgcctcattcaaggaggcaatgaagatgggcgttgaagtgtaccacaacttgaagtctgttatcaagaagaagtatgggcaagatgccaccaatgttggagatgaaggtggttttgctcctaacattcaggagaacaaggagggccttgagctcttgaagactgcaattgaaaaggct

SEQ ID NO: 163340 - DNA, 1396 bp, Zea mays
  Clone ID: MRT4577_80540C.1
ccccccccccccgcggtttaagggcccctacaaggggggttcccatttcccattagggtgggccaatttttggaaaggggaaccggtggggcctttttggtatttaccccacttgggaaaaggggatttttttccaagggatttaatttgggtacccccgggtttttcccattcccccgtttttaaaacccggcccaggaaatttaatttgggggccccaaaaaaaaacttttacgttgcaagcccggggaagtaaaatttggttcttttaaaacgggcccccccctttttttttttttttttttttttttttttttttttaattttttttttttttttttttttttttttttttttttttttttttttttttttttttttttttttttttttttttttttagatcaagataaatctcaatcaatatattgattatttataggaagttgcacatgccggtatgagggcaatgttatcaagtacatctcatttgtaatctaaaagatggcacctccaacgatcggttgctgccttgacaaggcaaggttcatcaaagagatttggttgtatggcagaaattgttgctgttgcaggaaggcggcgaccaatgggttagccgctgcaagtggattaagtagttgctgccgctgttgtaggtacgcagcagagtttgccacatctagttggttgaatggaagaagctgttgtaagtaggcagtagggttcgccacaactagctgactaagagccggtacgatctgttgtagcagctgctgttgcaggtatgtagccgcattgcccacagcgagtgggctagatgaaagcagttgttgctgttgcaggtatgtggcagggttcaccatggctagttgactaagagctggtagaaactgttgcaactgtagttgttgctggtatgcggctgtgttcgccagagcaagtgggttggatgcaagcagttgctgttgcaagtaggagacagggttcactgcggctagttggctcaatgcgggcacaaactgttgctctagttgtgttgcgatggtttgtatggttagatgtgccaaggattgttgttgtaattgggcaaacggttgttgtaagacgctcgccgcaagcgcttgttgtagcctataggcttgcacaatagggtgttcgatgcccattgatgtaactgatgggaggaactgtggaataatggcattaggagcaagtgagcattgtggaataatgaatgcagttgttgcgctcactgaaagggaaaggagcgcaaggagggctaatatcttggtagccattgttgttaggaagttgctagtgcacttccctttgtgtgtttttgaatgctcaaaatattatgggcgatggattaactactgatttgggagatatttcc

SEQ ID NO: 163341 - DNA, 1328 bp, Zea mays
  Clone ID: MRT4577_80541C.1
ccgggatctcccatatcattagttaatccatcgcttataatattttgagcattcaaaaacacacaaagggaagtgcactagcaacttcctaacaacaatggctaccaagatattagccctccttgcactcctttccctttctgtgagcgcaacaactgcattcattactccacaatgctcacttgctcctaatgccattattccacagttcctcccatcagttacatcaatgggcatcgaacaccctattgtgcaagcctataggctacaacaagcgcttgcccaattacaacaacaatccttggcacatctaaccatacaaaccatcgcaacgcaacaacagcaacagtttgtgcccgcactgagccaactagccgcggtgaaccctgcctcctacttgcaacagcaactgcttgcatccaacccacttgctctggcaaacactgctgcataccagcaacaactacagttgcaacagtttctgccagctcttagtcaactagccatggtgaaccctgccacatacctgcaacagcaacaactgctttcatctagcccactcgctgtgggcaatgtggctacatacctgcaacaacagctgctacaacagatcgtaccggctctcagtcagctagctgtggtgaaccctgctgcctacttgcagcagcttcttccattcaaccaactagatgcggcaaactctgctgcgtacctacaacagcggcagcaactacttaatccacttgcagcgactaacccattggtcgccgccttcctgcaacagcaacaatttctgccatacaaccaaatctctttgatgaaccctgccttgtcaaggcagcaaccgatcgttggaggtgccatcttttagattacaaatgagatgtacttgataacattgccctcataccggcatgtgcaactttctataaataatcaatatattaattgagatttatcttgatcaaaaaaaaaaaaaaaaaaaaaaaaaaaaaaaaaaaaaaaaaaaaaaaaaaaaaaaaaaaaaaaaaaaaaaaagaaaaaaaaaaaaaaaaaaaaaaaaaaaaaaaaaaaagggggaaaaaaaaaaaaaaaaaaaaaaaaaaaagggtttgtaccctgggccggaccccccttagggggaaatttggaaaatttccttcacctgggcggggggttaaagcttcctttaagggggcccaattccccctaaaggggggggtttaaaaataacggggccggggtttaaaaccggggggcggggaaaaacctggggttacccaaattaaatcccttggaaaaaaacccccttttcccaaggggggaaa

SEQ ID NO: 163342 - DNA, 289 bp, Zea mays
  Clone ID: MRT4577_80542C.1
acaaaaagggcaagacaacgccggcacgtagtaggctataggcagctagctcctgcacctctgctgcagaccatgcacacacacatgtaatgtttgttcaggccgtggtcacgtctcttcgcaacatttactcacccccatttactactacgtactgcgctgcacccgtccctgtagtactctctaggacgtaccttcatcatgcacgcagcgaccactaattctcacacacgctacggtacggtagtagtagtttcttgcttggagtcagagcagaacggacggtaga

SEQ ID NO: 163343 - DNA, 349 bp, Zea mays
  Clone ID: MRT4577_80543C.1
attatatacattttttttctttttctttttgtttgagatagacatcattcaactttttgtcattctttaaaaaggaacgaccaaggtacccttaatcccatcccccttaaaatttgatgacagaagaagaggttttttaacttaaacagaccctacccttggttgggtgaaaaaccataacgacagattggcaacaacatttacatggccgatgtgaacaacaacaggaccaaactgggccccacgagagatgtgctggcaaaaaaaccacaggggaggaaaacaaaaaagaaaccccggtgcgataccccaggccgcaaccttgggaaggcctggttacattgatgga

SEQ ID NO: 163344 - DNA, 311 bp, Zea mays
  Clone ID: MRT4577_80544C.1
ccggccgggaatatatattcaataattagcatcgcaactagcaagatttacctgctcatcgtatcatatctccagactgagtgcgtcagttcgagaaaccatgatatccgactgagtgcgctggaggggcgggaggggccaagacgacgtgaactgaggtgctctccatgtagcgcagactagagattctccgcttcccggcactaccaacctctcctccgtgatggtgttgatgacctccgcaatgcagatgaccgcgtaatatcatctgaacggggtcagcagcttcaggcatatcctatcccacaagc

SEQ ID NO: 163345 - DNA, 576 bp, Zea mays
  Clone ID: MRT4577_80545C.1
cgaaccattccatccaaccaagaagttacatacggcgggaaaaaaaaaaaaaccgagggaatataccaaccctttctttgaatccacccggcgcaacccacccaaccacaacagactggttgagaaaaaaagaaaagggaagggatggaagaaaaaacaatccagccctgactaagtgaccggcccaaggaaggggacccacccatgaaaaaccaaccccatctatcatcccctccctgcctttatttaccaacccaactttccttaaagaaagaaatcttatccaatcaagtgattgccaacccaacccttccttaccaaccaggacggtcccttctgtttggccgaccccaattcccaggcaatctagactggggcgcggagtgggctaccacccccgaaggtccctcccaaaaaaaaactagctcacccaaccaaaccaacgcccggcaccaaacctatgctttcgaagcaagcatgatttatccatacccaaacctaatggaaggaaggatggaacaaatgagtgggtgggaaaaggaaggaggcctttcttcccttcatttacccaattga

SEQ ID NO: 163346 - DNA, 215 bp, Zea mays
  unsure (1)..(215): unsure at all n locations
  Clone ID: MRT4577_80546C.1
ttttctanctcctcacgcgtactattctcnnaataccctcgagccaattctgccgacgctaatctcagatactctctccctcggcgtcaccgtaatcaccgccatngccgatgaatgcatagctgctgtatctgtaatggacgtcaacactgctctacaatatgtgctgatgaccgctctcatccacgatggcctatcacgttgcatacgcgaac

SEQ ID NO: 163347 - DNA, 144 bp, Zea mays
  Clone ID: MRT4577_80547C.1
atgttgtatattctgcattgggaaggtgtgatttcagggtcaaaaaccacaaactgcgccaaaaacaggtgcctaggagcggataccacaccatactttgtttacgcctatacacatcctatttacacaaaaacagtagcaatt

SEQ ID NO: 163348 - DNA, 270 bp, Zea mays
  Clone ID: MRT4577_80548C.1
ttggcatttgctaggttagtcggttgctctgagagatagagcgctcctcttcttgcattgtgcagagaagtgtgatctggacgaggcattttcagtatgactgtgtgatctgtagcaaatccatgtgctggtgctcgagtgtagatacgaggcttagccaacacacgctatggctactatgtgaaacgagctgatcgtgtgtcggtaagcagcagatctcgtgcgttcggaaatgagttcgagcctctcaggcctactctgagctactgg

SEQ ID NO: 163349 - DNA, 193 bp, Zea mays
  Clone ID: MRT4577_80549C.1
cgtccgagcacatctagcatcttccatgccaaggccgggatcgctctgatagaccacttcgtcaagctcgtcacgtggtaggacaactattggggctacagcaactgcgtcatcgacctgatgcgccacatgttcaagacgcagtataggggtgttttccccatgcttctgcatgatgggagctgcaggtgta

SEQ ID NO: 163350 - DNA, 392 bp, Zea mays
  Clone ID: MRT4577_80550C.1
aaaaaatttttaaattttaaaaaaaaaaaaaaaaaaaaaaaaaaaataaaaataaaaaaaaaaaaaaaaggggggggcctttttaaaggaccaaagtttactaccccggcctggcaaggaaaaatttttttaatggggaccccaaaattaaattaatggcccgggttttaaaaccgtgggaatgggaaaaacccgggggtccccaaattaaatgccttggaaaaaaacccccttttccccagtggggtaaaaaggaaaaaggcccgaaccatcgcccttttcaaaaatttgccaacccgaaagggaaaagggacccccccctgaaccggccaataaagcccggggggggggggggttccccccagtggaccccttaaaatttgcaaggccct

SEQ ID NO: 163351 - DNA, 409 bp, Zea mays
  Clone ID: MRT4577_80552C.1
cggacgcgtgggtggagagcaggtggtttaagaaagggttccgaccgggcagagtctacgtcgtggtgtgactcaagtgcacagcttagcagacggtgaggatgaggtgccggaactggggcctagtgagcccccaactccacctcccccgccaccaccacagaaagaggacgacggtgatgattctggttgggaatcagactcgtctgtagcatcctgcccagccacattgtcatcagaggagaggagacggcctgctggatcgctcccacggccagtaagtctaaatgcatttgatatcatatcattctcaaggggattcaatctgtcggggttgtttgaggagcgaggcaatgaagtgagatttgtctcagcacatcccatgcaaacgattataacaaaattggag

SEQ ID NO: 163352 - DNA, 342 bp, Zea mays
  Clone ID: MRT4577_80553C.1
gttctaatcgcgagggccgccctttttttttttttttttttttttttttttttttttttcatatgaggttttttttattaaaattatttttttttaatttatttttaatttttttttatttttttaaaatttattttttttttttccggaaaaaattaaaaacacctaaattaaatgttcccttcccaaaaatacgaaaaaaataccacttaatgcaaatcgacaacaacttgcccaacctcgaaaaaattttacctccctccaaaaaaaaaaaaccttccccaaaccaaattgaattattctcccttttccccaatttactcttaggggcccacaatcttc

SEQ ID NO: 163353 - DNA, 367 bp, Zea mays
  Clone ID: MRT4577_80554C.1
cgcagaccgggagtagccgtcggctgttactgaatcctcagatcacggctagccagaatcacgccactctgctgactcccggcgagccatgggcaaggagaagactcacatcaacattgtggtcattggacatgtcgactctggcaagtcgaccaccactggccacctgaactacaaggtccgggggaatgaccaggcgggtgaatgagaggttcgagaaagaggcctgggagatgaacaagcggtcattcaagtatgcctgggggcttgacaagctcaagggccagcgggagaaaagtatcacaattgaaattggtttggggaagttcgagaccaccaaatactactggactggcaatgatgcccc

SEQ ID NO: 163354 - DNA, 198 bp, Zea mays
  unsure (1)..(198): unsure at all n locations
  Clone ID: MRT4577_80555C.1
cccgggtcgcccacctctctccagcgtcccccacctccggcatcgtccggccgctccgaagttgccacaccgtatctcanaaacagtggcaagaaggcgccccgtccatgtggcaactccacacccagcaaaggcaagaccattgtnnatacattgttctttatnctggtcaagttcttcccaaaattgggggggggg

SEQ ID NO: 163355 - DNA, 236 bp, Zea mays
  Clone ID: MRT4577_80556C.1
cccacgcgtccgcccacgcgtcctcccactcgtccgcccacgcgtccgcttaggcttaggattatgcgaattcaggatcggacagattagtaatcattcagccaacttaatcatcttaacaataaacttgaattcatcaaacaactcaatgaaaagctcctactcaaacgatcatgtgataatctcctaatacttgaagtatgtaacttacacttgacagaaatgtgatcatctga

SEQ ID NO: 163356 - DNA, 143 bp, Zea mays
  unsure (1)..(143): unsure at all n locations
  Clone ID: MRT4577_80557C.1
ggtaaaaagcaaatatcattttccatttaagacaggcagaacaaccatttacaggagggccgggaatgcaaggataaacaattcggggttacccagncaactctaacaggggggtttatcccttaagaattcttaagaaacaa

SEQ ID NO: 163357 - DNA, 475 bp, Zea mays
  Clone ID: MRT4577_80558C.1
gttggtgggttttttttttttttttttttttttttttttttttttttttttttttttttttttttttttttttcccaaaccaacttatgggtaattaatcctagaagggggagggacatgaaagcataaaaaaccagggcccaaagggggggggggggtaaggaaaagtcagggggggcccacccccaaaaacccctggcgcgctttagcaaaagccagctaaagccaggggaagggccggggggcaacccttgggggatacactttttttccggttaaagggggaatagagggggggcccgcctccaaagccaagggaggttttgggggccaacatccttcagggggcagatttggtccccccccttggcgggcggggcgggcacaacagggtctttcccgttttcgaccccttccttatggggggccccagggggctcttcggggggggggctaggaccacccttaggggggc

SEQ ID NO: 163358 - DNA, 526 bp, Zea mays
  Clone ID: MRT4577_80559C.1
tttttttttttttttttttttttgatttttttttttttttttttttttttttttttttttctttttcttggtttttttttttttttttttttttttttttcccccaaaaaaaaattcaaaaccatttattcggatgtggggcacgagggaacacgtacgggccttccccccttgccaattgaaaaacaacgacgacaaactcataaacacaaactgttttgttgggccccctaaaaccaaaactagattatgggttcggaattattactcccggccagccaccggccgaccgagggatgctttacttgatgcccaaccttttttttatcccccaaacaaagtcgaaaaccttttcggccgggtaaaggtttttggcaaccctggggccctcggcccaacgtttggcccaggcggccagcctggggcactctttttccaccctaacccccccaaaacggtcgtaggcgaggaaccaggacttgaagggcacaagcgcaacttccacaaaaccaagggcgtctccccc

SEQ ID NO: 163359 - DNA, 866 bp, Zea mays
  unsure (1)..(866): unsure at all n locations
  Clone ID: MRT4577_8055C.1
gctttccctaaagccccctctcctcgccttctccgccctccgctccattcgtttcgatctatttcggcttcttcctctccaagctacagccccggccatggcggcgacgatccagtccgtgaaggcccgccagatcttcgacagccgcggcaaccccaccgtcgaggttgatgtgtgctgctcagatggaaccttcgccagggccgctgttcccagcggtgcatcaactggtgtttatgaagctttggaactgagagacggtggatctgactacttgggaaagggtgtttccaaggctgttgacaatgtgaacttgattatcgcaccagctttgattggcaaggaccctacagctcaaactgagctcgacaactttatggttcagcagcttgatggaaccaaaaacgaatggggttggtgcaagcagaagcttggtgctaatgcaatcctggctgtgtcactagctatttgcaaagctggagccagcatcaagaagattccgctgtaccagcacattgccaaccttgctggcaacaagcaattggttttgcctgttcctgcattcaatgtcatcaatggtggatcccatgctggaaacaagcttgctatgcaggagttcatgatccttcctactggagctgcctcattcaaggaggcaatgaagatggggtgttgaagtgtaccacaacttgaagtctgttatcaagaagaagtatggacaagatgccaccaatgttgaanaatagaaaggtggttttgctcctaacattcaggagaataaggagggccttgagctcttgaagactgcaattgaaaaggctggatacaccggcaagttgtcatattggaatgggatgtgctgcttc

SEQ ID NO: 163360 - DNA, 696 bp, Zea mays
  Clone ID: MRT4577_80560C.1
caggcttttgcacacgaaagacctaaactgtccggtgtcgatgccccagggcgtcaggccacaccacaggctccgcttccgtactggtgttaactagttagggctgacaagtatcactagcgttccatcgaggtcgaggcaatggtgtggatggccgaatgaatctcgaccaccggacgcgagcgctccggagaccggactcgcttccgttgccggacgaggagaacaacgctgacgctgagaaattccagatcgtcgaggacatgacctccatcgtgcacgccgtgcaggatggcgtgctgtctcatatcctcgccctgaaggacgtcatcgagaacctcgctctagtggggctcgccgacgctactacggaccgcgccacctttcgcgacatggtgccgatggagactgataatgacctggaggctcacttccgccgctttgccaacgaagaccgttcgtactatcctgtactggcactcgctgctcctagtaacatgccacgtactatcacgtacctgaagagattgttcatagagctctttattcaggaagggtttcagcgtgattatgtgtttgactggatcattatgaacgaccagcaagctgcaatgaccactgatgcacctcgtgaaattgctccagttagtcgacaaaggatctgggatggatccctgtcggaaacaccaatagaca

SEQ ID NO: 163361 - DNA, 177 bp, Zea mays
  Clone ID: MRT4577_80561C.1
caaattgcaagggatactgcatttaacctgttggctgagcaactacagaaaagtgctcaaagcacatgagaacaaggctcaccttcattaaattctcaacaatacatgggaacaatgcaaaagggtatggttaaacccccttttatttacatggtttatacgttttgggaatgctct

SEQ ID NO: 163362 - DNA, 627 bp, Zea mays
  Clone ID: MRT4577_80562C.1
atcaatcaatcccacgggctgcccggcggtggggaggctgaccccaacctccgaacccagcgtcgcctagatctccccgtgcctacagctccgacggagggcgccgggcgactaacggcgacagcgacgctgagcacgcgacctctacccgtgacgttcgccgcctccctactcgcctgctacgggcgccgtcacatgactccagggcacatgacaccgagcggaacgactgaagcgcaggtgataccctcaaagacgatcccgacgagaggattaaggtgtaagactacaagctgccgaccaagacaacaagaagatcggggctaaagactctaagcggctcagccacatgcatgccgcgtacatcttcacgcaccgcttcctactgaacaccgcgaaccgcactttaacaccagaaacagaccatcgatcatatacggcagcctacaccacgcgagatctcacaccgagggggcatccctaggctttcaaaccaccaccgatcatgcggagcgcgattcagtcatgaacaaccggtggccatacccgaacaggacatagggagcagaccactattttgtggcaccacatcactttgaagcatgcatccactaccaggaagagaag

SEQ ID NO: 163363 - DNA, 870 bp, Zea mays
  unsure (1)..(870): unsure at all n locations
  Clone ID: MRT4577_80563C.1
tgggtgcctgcaggccgggcagtcctcacagatcgcgcgcgcaccagcaccaccactgccgtctccggcgacgaccacgccgccggccatgccgtcctcctacgctgccgctgcagccggatcctcttcccgcaagccgaatcgcacctccagcgctgccgcacccactcttcgcccaccagcaccctcaccgtcgccggcacccgctcccctggcggtgaaccctagcgtcatctctgattccgacccctcctcctactcatcttcctctgcggatgaggccgatttcgccgcctccgactccgcaactgcctctgttgtctctgcctacctctcggttgctggcgagggggccgacctctcgaaagttggcattttcctctcatccgccgcgcgccgccgatcgccgccgtgccttatctgcttcgatcctatacgcccctctgacccggtgtggtcatgctcttcatcctgctttgccatcctccacctcccctgcatccagtcatgggcgcaccagtcagcatccgggcccgccgtgccgtgcccaacctggggatgccccaagtgccgcttcgcctaccccaagtccgagatcccctcctcctacgtctgcttctgctccaagaccatagacccggctccggacccctggatcctcccccactcttgtggcgacgtctgtggccgccgtcttgatgcgaatctcgactccggctgtgagcatacctgcctgctgctgtgccacccagggccatgcccgccatgccccggncgttgtccctaaagcgacgtgcttctgtggagcgcaccggnagccccgacgatgcgcacatcagcggtactctttgtgnnggaaatgcacaaacg

SEQ ID NO: 163364 - DNA, 593 bp, Zea mays
  unsure (1)..(593): unsure at all n locations
  Clone ID: MRT4577_80564C.1
ccccgcgtccngacactgatttcaaagcttatgggaactgaagtggtcgatggatgcattcatccaacatggnaaactgattgatggcatatgtagagaaagccttgcttttcaaacagcaaggagggaaggcatgcctgacttgataatcaccagggctgaggagctatatttgagtatgagtacaaataacaagcagggagcatcagtggcgcacaatgagcctcctaatggcagccccagtgtaaatggcttggtttaggagcctgaatctctgaagaacagactagaaatgctgcctggtacctttgagccgctgcggaaggaagttgagagtgctgttactacgatgtgtaagaaaatactgtcggacctttacaacaaaagtagcatcccagaactggtcgaggtggtctgcgttgctgtaggtgctagagagcaaccaccgccttccactgttggcagatctagcatctacgtgattatcagaagcgacaacaggctctatgttggacagacggacgatcttctggggcgcttgaacgcccacagatcgaaggaaggcatgcgggacgctacggtattatacgtct

SEQ ID NO: 163365 - DNA, 339 bp, Zea mays
  Clone ID: MRT4577_80565C.1
aaacttaacaaggggccaagcccaccaggaacacccggggcaaccgaggtaaaacaacagcccccccaccgaggcccggggggggggggaagggaatccaatttcccacaggcccccacgattgcggaacaccccgggccgaacaaggcggccgggcacacataatacccgaaaggggcaggagcgaaagcccttaccccgacaagggaccccccgacttggggggcatgccggggaccttcttgggccgaccccgaaccttgggtggcaccaccggcgggggggaggccccccccgccccgggggggccggccacgccgaccgggggcctccgattcc

SEQ ID NO: 163366 - DNA, 374 bp, Zea mays
  Clone ID: MRT4577_80566C.1
aaaaacccggaccgacccacgcgtctgcggacgcgagggaacggccggaccgagcgggagcaagacggaaggggggcgcgccacgaaggcgtaacagcgctgccgacgcgggggagaacgccggagaccagcacgacgaaccgggcacggggccgcccggagcgagaccaggccgaacagcaaagcgcagaaccgagaaccggaagatgaaacggaccgaggacgagcaggcacggaagaacccagaccacaagagcgacgaggaagacaaaaacacagcggaagacgaccgggccacggacccccagaaccagggccacgcggaggcccagaggggaaaccacaagaccgggcacggaagaaacccaccgggc

SEQ ID NO: 163367 - DNA, 361 bp, Zea mays
  unsure (1)..(361): unsure at all n locations
  Clone ID: MRT4577_80567C.1
gggaacaccncacagaatgggcccaaccaggggcgtcnngaggctacctcattttagctggctgtttgggcccgggnatgagaagttgctggacttanggcctgcttgagttcacttacatctgtggtccancgtttgtctangttgtgtgctgtgtggntggaagctgtgattcactggcgaagaattggaggaagatcgatgaatttgacgcccgtcctacagngctggagtgcgtttaccgtgctcttccgcgggcttgtttgggtgcgtcatcattgtgggagccccttcctttttctgcttgaggctctgcatcanagtcaattttccctgcgtgccttactgcggtngacatgtc

SEQ ID NO: 163368 - DNA, 542 bp, Zea mays
  unsure (1)..(542): unsure at all n locations
  Clone ID: MRT4577_80568C.1
ccccgcgtccgnaaaaaaaaaaagggggggggggaaaaaaaaaaaaaaaaaaaaaaaaaaaagggggaaaaaaagggaggaagaataatagaggatcaaagaattaaagaacagcgggcaatgcgatggtggtggatttttttttgggggtaactttaatttaagttgactgggccgtagttttacagggtggggtaggggggggaaccttggttttttcccaccgttaatggccttggggaaaaattctcgtttttgggccggctgtgggtaatatgtgaggggggccggctctttttcgccctttcccaagggatgaaactgggttgaatggggaattgggatcgcgccttgtttctggcgctttttagcgcggtgggggggggtggttaaagggcaccgtttaccgttcccttttgccagggggggtagcgcccggtatgttccgttttttttcccttttttttgtgggccacatttgctggggttttctttggngggtttttaaatggggggcttccttttggggggccgggtttagt

SEQ ID NO: 163369 - DNA, 345 bp, Zea mays
  Clone ID: MRT4577_80569C.1
tatcttcatacaaagcacattcatgtaccaaccatcgcaggcaaaatagtgggagtgcctattcttgctcatctttctgcacgtacggactctgagaccatccttcttcaatgcttacatgctcgacatactattgcttgctttcctcgaacatcaaccaacaatgattgcaacatgtgaaaacgctcaggttcaaccctacaggatccaagatgcaagcgcattaaggaagtaacatgaataccacgaggggctacgacaatgatgccctcctattatgaaagctacgttctatgtgcattgattgactcactgacatcagacagaacaactcgcgctagctaa

SEQ ID NO: 163370 - DNA, 774 bp, Zea mays
  unsure (1)..(774): unsure at all n locations
  Clone ID: MRT4577_8056C.1
tacgcctgcaggtaccggtccggaattcccgggtcgacccacgcgtccgccgccatgaatgaggaatacgacgtgatcgtgctgggcaccggcctgacggaatgtatcctgtcggggataatgtcagtgaatgggaagaaggttcttcatatggatcagaacccatactatggaggagaaagtgcgtctataacaccgctggaagatttatacaaaaggtttaaattaccaggacaaccgccagcatcaatgggaagaggaagagactggaatgttgacttaattcccaagttccttatggccaatggtcagttggtgaagatgctgcttttcacagaggtcactcgttacatggacttcaaagtgattgagggaagctttgtctacaagggagggaaaatctacaaggttccttccactgaagcagaagccctggcatctagcttaatgggactgtttgagaaacgccgtttcaggaagttcctggtttatgttgccaactttgatgaaaaagatcctagaactttgnagggtgttgatcctaagaagacctccatgagagatgtgatnaagaagtttgatttggccaagatgttatagactttactggccattctcttgcactgtacagaacagatgactacttagatcagcccgtgttgtgaaaccattaatagaattaaactttacagcgagtctttggcaagatacggtaaaagcccgtacctgtatccgctttatgggtctgggagaattgccgcaaggatttgcaag

SEQ ID NO: 163371 - DNA, 232 bp, Zea mays
  Clone ID: MRT4577_80570C.1
ctcgacagtggatactaagagaatccaacattacgagtgcacagaggcaacaaactggctagcagccaaattcaatttatacgcgagctgaccttttattatggtccaccctacaaaactaagtgtaccaccaacaacctatctgcatatgcctagagcataaacggaaaagaagcattacttgaagacatgtcatgctttcttttgacccagctgctttcttgaaattgag

SEQ ID NO: 163372 - DNA, 582 bp, Zea mays
  Clone ID: MRT4577_80571C.1
tccacgcgtccgatcggggttgagcgcggaaagccggcacgctcttgcttacgtggcgagctgcacgcgctggtgagcgtgaatcacgcgctagggaacccggcaacgctgtggatcgagaccccaatgttgtccgactgctgctagtgagaccacctagggggaaaagacgaccgacgcgtgaacgacgggttgatggccggtgcagacgacgcgcgcgggctaatcccgcctgctgaggaacggctgaccgagctcatgtcgatgatcctgttacggctggcggggctgacgggggcgatcaaggactggatggccgtgctgaacagcctgaagatggtgatcgtctataacaccaacgagtacagcgtcgtcccggagatcctggtgcggatgcgcagcctggactcattggacctctcgagcaaccagctgacgtgcgggatgccggcgtcattcgcagagctggccatcctgcgggtggtggacctcgggcacaagcagatgacggccagcatcccggcggcgctggcgcaggggcagctccgatcgctgaacctgggtgcatagcattgacaggcc

SEQ ID NO: 163373 - DNA, 2067 bp, Zea mays
  Clone ID: MRT4577_80572C.1
ccggccgggcactactcaagccgctcaaaactctagctagctagcagggggggaaatggctccacttctcgccgcagccatgaaccacgctgcccatccagtccttagaagccatctaggacccaacaatgagagtttctcacgacaccacctatcttcttcaccgcaaagcagtaagcgaaggtttaaccttagctttacgccacgatctgcaagagtaggcaatcaaaatggagtccaattgttgagcccttcggaaatccctcgaagggactggttcccctccgacttcatctttggtgccgccacttcagcgtaccaaattgaaggtgcttggaacgaagatggaaagggggaaagcaattgggatcacttctgccacaattttccggaaaggataatggacgggagcaatgcagacattggagcgaattcgtaccatatgtacaaaacggatgtcagattgctgaaggaaatgggcatggacgcatataggttctctatctcttggcctagaatactgcctaagggaacggtcgaaggaggtattaaccaggatggcatcgattactacaaaaggctcatcaacttgttgctagagaatggcatagagccatatgtaacaattttccactgggatgtccctcaagcactagaagagaagtacggcggattcttagataagactcataagaggattgtaaatgattacaaaaacttcgctaaggtgtgcttcgacaactttggtgacaaggtgaagaattggttgacctttaatgagccccagacatttacttcattttcctatggaaccggggtctttgccccaggacgatgctcaccgggactagactgtgccatcccaactgggaattcactcgtcgaaccttacattgctggccacaacattcttctagcccacgctgaggctgttgatctttacaacaagtattacaagggcgagaacggccgcataggtcttgcatttgatgtaatgggtcgtgtgccatacggaacatcatttctagatgaacaggccaaagaaaggtccatggacattaacctaggatggttcttggagcctgtggttcgtggtgactaccccttctcaatgagatcgttagcgagggaacgactacccttcttcagtgacaaacagcaagagaagcttgtgggatcctataacatgttgggaataaactactacacctcaatattctccaaacatatcgacatctcaccaaaatactcgcctgttctcaacactgacgacgcctacgctagtcaagaaacgtatgggcctgacgggaaacccattggtcctcctatgggaaatccgtggatctacttatacccagaaggcctaaaggatatccttatgatcatgaagaacaaatatggaaacccacctatctacatcactgagaacggaatcggggatgttgatacaaaggagaaacctctacccatggaggctgccttaaatgactacaaaaggctagattacatccagcgccacatctcaactctcaaggagtcaatagacttgggagcaaatgtgcatggctacttcgcttggtctctgctggataactttgaatggtacgccggctacaccgaacgttatggcattgtctacgtcgaccgcaaaaataactacacgcgctacatgaaggagtcagccaagtggttaaaagagttcaatactgcgaagaagcctagcaagaagattattacgccagcttaaaaacatgggacctcgtgatgtgggtacggtgccacccatgaaataaaaacctagtgtgtggtttgaaacctaaatttttctttttcttttttgcaccatgagagaggtagtggagtcatattctccagcaccgtggctaataatgtattgttgcagtacaatctagcattgtcgtcatgcaataaataaagtgactggtttccctatttcaaaaaaaaaaaaaaagggcggccgccctttttttttatctcattccgtattttatttcctttttcaaactccactctgcaaacagtgtcaaacagtgttgtcatctacag

SEQ ID NO: 163374 - DNA, 315 bp, Zea mays
  unsure (1)..(315): unsure at all n locations
  Clone ID: MRT4577_80573C.1
cctttccttaacccggaccggaaccccggcttaagcttggcatagacacccttngcggccaagaacaccgacggcccggcccccccccagtctttccctgccgggttggcggattccggccggaccaaaccccctaccgcgcaacgcaccggtattggcttgacaggcttccccgctttggccgagaacccaggcggcccgccaagttggacaagggtcttggggttcggggccaacttcggcaacaacaattggtttttttgaaccaccccggttccactgtttcctaacccgaaaatccggttgggaagattt

SEQ ID NO: 163375 - DNA, 143 bp, Zea mays
  Clone ID: MRT4577_80574C.1
ttttgctggcggggatactatataatgcactcatgtatgcgacagacaaaaggccacaaaataccaaattgacctggcgtgcgcctgtcacagaatgctagaagaccaggaaactgttatgggccaaacaacatgatactgcc

SEQ ID NO: 163376 - DNA, 351 bp, Zea mays
  Clone ID: MRT4577_80575C.1
ggaacaaaaacaaaaacatgtttaacttcccaaggccaaaaataacaggggggttctttaaccgtttttgaagtatcggcaaaaagctgttaagggcagggttgggtttgatccggggaaaccccgggttcccctaaccttttgggacaccctatccagaatcgcaaaaaagtccctgacaaaaacaaaaaaccaaagggggttggtttcctttttgccaacgtcgccggggaagaactcggggatgcccctgacgggcccaaggacccggggcttgtaatcctcaagctccctgataacctccttggcctggttgaaaaacggggccataaagggaaaaaaacgctggac

SEQ ID NO: 163377 - DNA, 819 bp, Zea mays
  Clone ID: MRT4577_80576C.1
atggtccctgccgagacgaaggtacaagatgtaccagaaaagactgctggtacttctccgtcttcctctattagtgtttcagaaatactaaaggtaatgactgaacccttcccgtttgctatgctaagtcccctgggatcggatctgactagcctattacagtcaaaggaaaagggaattgaacaaagctcgggagggaaggagactgcttcggctaccgagactgacagacttatagctgatgtgactcccgagaaggacatagctaaagcatccactgataaggcttcagcattaaaaatggaagagttgaaaaaggcttctttggaggacacagagttggacctatggcacctgggcggccaagaactcttcgatgaagatatttctgaattgaaagaattcacgattgcttgcggctacaagtccggatctatgctctttggcggcgtcgacgaagagattttagggtgcatccctaaccgcgccagagcaaaatttgttaatactttatcaaagagtattggatttccgaagctggagcaggatcttagtaactatagaaggcaacacattactgcgagcttattctactcgaattttatgagcttactactgagtaaagctttgaaacttcaacaagaagatgaagatattaagaatgaactcgttgttaataacctagaaaatagagtgaaggaacttgaaagttttctggcagagaaggattcaaaggttaagaatgtcgaagcagacctgaccgaagctcatcttcggatcaaggatcaggctgctcacatttctaatcgagataaatag

SEQ ID NO: 163378 - DNA, 526 bp, Zea mays
  Clone ID: MRT4577_80577C.1
ataaaaaaaaaaaaaaaaaaaaaaaaaaaaaaaaaaaaaaaaaaaggtagaacctaaaaacaaaaccacgcataggaaaaaattataacatatatccataacaactgttgggccgtggtcgcgtccctctctcagggccctattttgcccttttgggagccattttaggggcctcttgccccctttttaggggcccattactggcaatagccgggggttttccaatttaatggccggggataccaacccctttcccccggaaaaccctttggggaccaggcccttttcgtttgcggttcttacccttttcgcgccctgactggttactgtacgggccctttcccggccctttttccccaatgggcgcgccctttacgggcaatttaacctctccgtttgggggctttatacccccgggtcctgttggtttttcccgttcctttctgtccattttttggggtttttcccctcaattttttaaccgggtgccccctttttgccgcccatttttggctttttggcccct

SEQ ID NO: 163379 - DNA, 1600 bp, Zea mays
  Clone ID: MRT4577_80578C.1
gacggagagagctctcagcttctctcgacctaagtaagctaggtggacaacgcctgcaggctgcggcaccaacgcggccttcgccgcgaccccctccccatctccctcctccctaccatgcgcgagggcgaggccgacgcccacgcccacgccctcccgtcgaacacccagctactcccgtgcctccaagatgacgagccgcgacaaggtggggtgctcctcgatcccgctgcccctcgaccgtgtcctggccgcgctggtcgccagcacccagcaactcgggagggggtgggaggcggccttccgcgtccgatgcgggaaggcagctggagcggcggtcggggaggcggaggggaaaggagaggttatagagatgcacacgccgctgttctacgctacctgcgccctcggcggcgttctcagcaccggcctcactcacctcgctgtaacgccgctcgacctcgtcaagtgcaacatgcaggtggatcctagcaagtacagggacattccatctgcctttggtgtcatgctccatgagcaaggaccccgtggcttgttcaggggatggatggccacactggttgggtacagctgccagggggcctgcaagtttgggttctacgagttcttcaagaagtgctactctgacattgctggtcccgagaacgctgaaaggttgaggactttgatctaccttgcagcttccgcgtccgctgaggtgattgcggatgtagctctctgccccatggaggctgtcaaaattcgggtccagacacaaccgggatttgctcgctgcctggtcgatgggcttccgaagattgtccaatctgaaggtgcctttgggctttacaaaggtctacttcctctttggggccgccaagttccctacactatgatgaaatttgcttgctttgaaactattgttgagatggtctacaagcatgctgttccgaaaccgaaagaccaatgcagtaagccactacaactagcagtgagctttgcagggggatacattgctggagtattctgcgcggctatatctcatcctgcagacaacctcgtatctttcctgaacaatgcaaatggagccaccgtggcagatgctgtaagaactcttggaatatggggtcttttcacacgcggccttcctcttcgtataattatggttggtactctcacaggagcgcaatgggcagcctatgacgcgtttaaagtgtttgttggactgccaacatctggcggagtggttcgtagctgtgctgctgtgcctcctattcgcgccaagagggtgcaccgagaagacgtgctaaaccaacggagagtagacgtaccgcattgagaagatgtgctgaaccaacaaagcagaataggaaatgtgttgcgatttcactgagttttgtaggagttcgaaaccagttgtttaagttttagctggtagagcaaaagagcattcactttcaaggggcttttattggaacctcttgaacaacagacattgtaatgataaacagctttagaaatgcgccatgcctggtgtagcagtacaccagcaccccgtctctactatacaaaccataaaaaaaactaaaaaaacaaccat

SEQ ID NO: 163380 - DNA, 129 bp, Zea mays
  unsure (1)..(129): unsure at all n locations
  Clone ID: MRT4577_80579C.1
ancaattctccagattaaaagcacatcgttacatgccggaaatcacgggagcgcagatggatcttccactcctgcgaaccattcaggggctatatacaactatgtataagcgcgcatccatataaatac

SEQ ID NO: 163381 - DNA, 302 bp, Zea mays
  unsure (1)..(302): unsure at all n locations
  Clone ID: MRT4577_8057C.1
agaagccggccaaccaaccgggggcggcgacccngcggagcgaacgagggccccggggncgagcgcagcngnccccngcccgcgcgccggcggcgcgccggcccgcnccaacggccgccgccgccacgaagacggcgaacagccccgcgacgaggcgggccgcgcagcacgaccccgggggggggggggccgccggacncaagcaggnggaagacccggccccggcggcgaaaaagaacgagcngcggccgaagcnggaggcagcaagcaacaacccaggggacgggaaggagcagaaaggc

SEQ ID NO: 163382 - DNA, 333 bp, Zea mays
  Clone ID: MRT4577_80581C.1
ctttgctccaaaaaatgaccgcgccaccctgcttctcacctctatttggctacgcgctgcatgcttgcatgctgctctttttttgcatgcgcgctgcatgcttgcatgctctctgttttcttttctctagtttttttctttggttctagcaggtggccgccgggagctccatcagttcaaaaaaattgagcacggtgggcttcggccactcgaaagaaagggccccacagcgcctaccgccggcgagcgcatccccatggagcgggttaatcatagaacatgcatgtattaaatattcaacgttggtcaaataataactatgccatatccatg

SEQ ID NO: 163383 - DNA, 545 bp, Zea mays
  Clone ID: MRT4577_80582C.1
attggtacctcgagccggcgggcgggatctcacctaaacacatagtatcttcattcctcattcatatctcgttccatccctcctatcttgtgccacgcctccgttacataattctgcagcgtgtgcttacacttatctcacatcgctctctccctcaggccgtcaacatccacagctatatctacgtgcatctccccttgcaccgtcggcacgagcatccgcgtgatctagaatggaactgcgctcaggctcgtcctctatgcaatgactactcatatcaggatctgctatatatgacacgagacagaaccacatcactcgataccgtacgagtctacactgttgatgtgcctgacgtgcccgtcgcacagagtgccggatcagcatgcgtgaataatgctgacgacttttcttcatggaggcgtcatggcgataccacttgaacatacctgcgagtcttcgtcttccagtcagagggggatgaacattacactacgcacccgctactggacgtcgaggtggtgtcaccatgcggctgctgcaat

SEQ ID NO: 163384 - DNA, 284 bp, Zea mays
  Clone ID: MRT4577_80583C.1
cagagaagaggtatgcaccaaaaaggtggaatcccaaatgttgaaggtgctgccaaactgctgtggtctgagtggacaggttcctcattagcttactattgccatccccctacatcttggactcctcctccatattttaatgagagtattgtggtagacatgaaaagcggcttcaatctggaagaactggaaaagaacaatgcacagagcataagagccatcaagggccctcatttggccaatagcatccttttccagtcttccggtctgacaaatggaataat

SEQ ID NO: 163385 - DNA, 372 bp, Zea mays
  Clone ID: MRT4577_80584C.1
gagctctctattcggcggccgccctttctttttttttttttttaacaatggaaattgggggtgcattggattcggatctacatattctacaggtacagtatccatatgcacctaacagtaccaatcttttttaccttggagaccagggtcggagtaaatgattactgcaccgaatgaggggataatcatagagagccaagcgcggtacgctctcacaagcttattagagatgtacacatccacggccaccgagaagctcatgaacttgacgtccttacagtccgccttttgcttggggctcaggctcttccgcgctgtcattccgggcttcaccacgtcctcgggcaggcttttggccgtggcagcccacca

SEQ ID NO: 163386 - DNA, 374 bp, Zea mays
  unsure (1)..(374): unsure at all n locations
  Clone ID: MRT4577_80585C.1
naaccttttggcttattaccccnnnnggaaacaacagagatcgggcaaagtaaaggggcaactgcctagattagatcccacacagggaagcaggggacgatggtaaacagaatgccacttaggaaggaagccaaaaaaccggaacaacaggtcatgacttcagacaagagatgagctggaacggccctatgtatgcctaaacagccaggcccttaccttacctctggattatattggaaaatccatgggtctcgggcctcataaaccatatggcatcaagcagcaggaaccttccttccatcttcaaggaagaaaagggccgactcagggacatcaggccaagcatctggaaggaactccacaatatcatacga

SEQ ID NO: 163387 - DNA, 463 bp, Zea mays
  Clone ID: MRT4577_80586C.1
tatagaagtactgtgacgtgcactgctcccttaccttggatcgctatagtagcggagcgcctgtcctttttttttttttttttttttttttttaccggcgtgatttttttatttttttaacatttttttgtttttgggggcaaactgtacaaaccttaaaaaaatttgttatccacattatttaaaacattctgccccacctaacaaaggttacaaactggcttttggccttaaatttaaaccacaccctgtctaaattccagtttgatttggaccaacattccccatacccgggagaaattttcctggtgaaataaattcgaatgggctcaaacattggggccctttttgtttagcttttggagggcttatccttgggtttttggaacttaaacaccttttttaattttttttgttcctcgaccaaaaagggacgggtgatccttttcctaactgcagtacc

SEQ ID NO: 163388 - DNA, 473 bp, Zea mays
  Clone ID: MRT4577_80587C.1
gggagacgatgtcgatgtcgatgtcaatgttgtatatgtggctcttcacactcacactcgtcgggggaatgctatctatgctatctgatgccgttgatgacaaatgtgccgcctgcaaagccgtcgcggaggagctagagattgggctttccactgagaggccacgagatcacttggatatgcgccatcgcttagactccaatggccagcgcgaaggaaagctaatcgattacagagttagcgaactaagagtcgttgaacttcttgatggcctttgcgagaagatgcaagattactacactcaagatagatacaaatacctatgaatggttcagagcggatagctgggataacctcacaacatataagcaagaagctcgggcatattcaaaagatatatcttcttattggtggaaggttacttgaagaaacagaggcatgatgcttgctgagattgatcaaaaaagcgatct

SEQ ID NO: 163389 - DNA, 160 bp, Zea mays
  Clone ID: MRT4577_80588C.1
ttgatagtgatcgaactcccacagctcccttcgcatgactccatcaatcgcttatgattggctacattgccggctgataaatctattacatcgcaggactagaaacttacctgtctggaaaatttgtggttacccgggttagttttaaacttcggttttt

SEQ ID NO: 163390 - DNA, 483 bp, Zea mays
  Clone ID: MRT4577_80589C.1
atgtataacagtaatggcagcgaagggtcgggactagcgagggttgccagatcggacaagtgttgtttaagtgactcgaaggctgccgtctgctctggtccccaagtgaagtcttttgcgccgcgcaatgtcttgaggaaaggtagactgcgctctacggattttgaaatgaacctgttcaaggcggtagtcgagtatcttcccctggcgggctccaaagacacacttttcggggttgagccgaagtcatgcatcccgcatattagcgaaggtttcggcgaggtcggccaggtgatcctctttatctttgctcgcgacgacaatgtcgtccacgtagatgaaaatgttgcggcctacttgactttcgaggacctttttgtgaggcggaagaaggttgacccggcgtttttgagtccttccggcattctgatgaagcagtatgtgcctgaaagggaattaggcttacacctagttcctaaataa

SEQ ID NO: 163391 - DNA, 1432 bp, Zea mays
  Clone ID: MRT4577_8058C.1
gcacggtgtggctgctggttcaaaagggtccactgtgtggcaaggattgtggatgtttcagcagggatgattctgagactccatccgagcatgtggagcagtacgatctcgtggcattggaccaacatgtgaggtttgatttggatgaactgctcaaggcatctgcttttgtgctggggaagagtgggattggaatcgtgtataaggtggttcttgaggatgggctcacaatggcagttaggcggcttggtgaggggggattgcagaggtttaaggagtttcagactgaggtggaggcgattggcaaggtccggcattccaacattgttaccttgagggcttattattggtcttttgacgagaagctgctaatatatgattacattcctaatggcagcctctctgcagcaattcatggtaaacctgggttgatgacattcatcccgttgccatgggaagcccgaataaagatcatgaaaggagttgccaaggggatgtctgtcctgcatgaattcagccccaaaaagtatgtccatggtgacttgaggccaaacaatgtcctccttgggacaaatatggagccgttcatttcagatttcggccttgggcgacttgcaaacattgctggcgcatcaccatttttgcaatcagaccaagttgaattagaaaaggagcagattcagcaaatagatgcctcagtgagccctctcatgagcaaagggtcatgctaccaagctccggaagcgctgaagacactgaagccctcccagaaatgggacgtttactcctatggcgtggtgttgcttgaaatgatcactggccggtcgccctctgttctcttggaaaccatgcagatggatcttgttcaatgggtccaattctgcatcgaagacaagaaaccttctgccgatgtgctggacccttttcttgcccaggattctgaacaggaaggtgagatgatcgcagtgctgaaagtcgcccttgcatgcgttcaggcgaatccagagcggaggccgtcgatgaggcatgttgcggagaccttggagcgcctcaatggttgacgctaatgaagtgttcccctgataaagttgtgcgattttcggtggaatgggttctagaactcagttgttggacagaagcctaggaggagagggcatgatgctgccttagtgtactccatgtaaaattatcatttccctagtggccactgactgtactggactactgggttgttaacgtgtgaggtagtagctagttaaggtaattagtttgctgttgagacttggaaggtggtagtatcgcgtgcttacttaatattgtgggtatatgaataatgaattagtttaaccatttgtgtgctctctgttatactaattgtgtatcatcttgggcattttctttggataacgggcccgtgtttaggaatattctt

SEQ ID NO: 163392 - DNA, 345 bp, Zea mays
  Clone ID: MRT4577_80590C.1
cttcttctctttttctccttttttttttttttgtttttgtagatgtaaaaggtaaaccaagaacctcccctttacattttacagactgaaacatataggggaatttcgtaaaatttaatttaacatgttagcgcaagtttttggtcacggtaaagtttaaaacctggagggctcctgggatttcctaaggacatccttaaaaactgccgtgatcttttaaatcatgtggggctccatgaacatttttttaaccctgccataacccttttcccccatggagaccttttgtttggtgtgttttgcgagtttgacaattttttttgaaagaggggctacgcctttctt

SEQ ID NO: 163393 - DNA, 223 bp, Zea mays
  Clone ID: MRT4577_80591C.1
gatgcgtcaaagaagaaagtgcttgattaagcacagagctttatgtggaacattggcctaacccagcagggttgaatatatggctggaggagccacccagaactttatcagggttgcccaagggatgcttaaaagtagtggtgcaacaagttacatgggatgcattgggaaggacaagtttggtgaggagatgaagaaaaatgctcaagctggacgagttact

SEQ ID NO: 163394 - DNA, 525 bp, Zea mays
  Clone ID: MRT4577_80592C.1
cattgggtacctcgaggccggccgggaataatacttataataaaacataaagaaactgtctccatccgaatggagatgctgactaaggcataggcggccagaccggggatggacactgttgcactggatctttgaccgcctccgaattgaggcacgcacgccgacagactcaacgactgatccattcctccgaggagagctacatctccaccctagcgtttgtcatagatgatcaagccctggaagggctgggggggcccatgcaggtcatggtgctcatgatgggcaagtccaacgacaattacaccgcatagatatattcacccttcaacatgtcgaagatagtgtactgtcgtcacagtactgggctaataccaatgcttcccgacaaagatgatcagactggttgatatatcaccaggatgcaataaagggccgtatgacgtcataactcacctccagggttgatatgatactcaccactgatgagaatcatgactcaccaaagtttgaaagctttgaacc

SEQ ID NO: 163395 - DNA, 450 bp, Zea mays
  Clone ID: MRT4577_80593C.1
cccaaaatggaaaagcaatatgggaaaaaaccatccaaaacgccgtttttaaaaccccaggggaaaagggggggggacataaccggaagggtttacaacatgggggggggaaaaccaaaggggggaaaaaagcagaaaaaaagcctgacaaagacagaataaggaaccttttaggactaaaaacaataataaccttcctaaccctaaaaaaactaaaaaccaacctcttggaagtccttttggggggcggaaaaaccctaaggggcctaaaaaaattggcctttttcaataccctaacggaaatacaagggcaaaaaggccccctgggggaaaaagagggcaaacttgggggcgaggggggaaaacacccccaaacacgggggggggggggaaaaatgcaaaaaggggggtgaacttgggccaggtccccaccaggccccaaactggggg

SEQ ID NO: 163396 - DNA, 272 bp, Zea mays
  Clone ID: MRT4577_80594C.1
atggggcaggctgcctaccacctctatggctcctgcatcacacgtagctcgggaccgctgttagcaactataacatacacgggaggcgccatgccctcaacaacgccaatatacgggcgtacagaaccaatatcagaatacaccatttcatatacaatatcatgagaggacatggtctacctgctatcaaaacacgactgatgcgcttcttatgcctatacatcgttcctgtatctgccaatatgatccctgccattaactgcctaacttac

SEQ ID NO: 163397 - DNA, 129 bp, Zea mays
  Clone ID: MRT4577_80595C.1
gcccgtgcacaggttttcgcccgccgttacctgcggctcggtcggggtcctcataaggctccttagaacaatcgcaggacatccaagagctcagcaacgctttctagcaagaaacccgaccctaccaaa

SEQ ID NO: 163398 - DNA, 534 bp, Zea mays
  Clone ID: MRT4577_80597C.1
gtggtttttttttttttttttttttttttttttttttttttttttttttttttttttttttttttttttttttttttcaacaaaactaacgggtttaaagcttcttttttggaagaggaaagataaatacaatgtccaatgaaaaggaagggggcggggaccaaggcattcatggaacctttacacaccagggggccattaaacgttaaaaacatcctacaaaaaatctgaacagggtttcaaacctcaattaatgcccacagcaaaggggacgggcaaaaaaaggcaaccatgtctataaacaaaatccaccctaatttgccacccggaaaacaaccaacaacattatgggcgaggggaaacccgtccttctatctgaaaacaaagctggcgttttgaatatggggcacaagtttttcataatcaaccattgttttatgcagaaaacatgggactggggaccccatacaaggggtcctaaaaggtctttagcttataaacccccccggggatattatgcaagcctaattttcc

SEQ ID NO: 163399 - DNA, 319 bp, Zea mays
  Clone ID: MRT4577_80598C.1
cccaggcgtacgcactcgcaagccaggactcgataccactatcatgcgcttgctaagtgccaagagaccaaagggacgacatggctcgcacgcaatctgccgtagcggatcgccgtggaggccgccgagctgatgctggcagcggcggcgacgaccatggaggccgacatgacctgcgggcagatgagctccgccatcgcgccctgccacaactacgcccgcggcacggggtccgccccctacaagacctgctgtagcggcgtcaggaaccttaagagcgccgacagcaccgacgtcgacaggcgcgccgtctgcaact

SEQ ID NO: 163400 - DNA, 410 bp, Zea mays
  Clone ID: MRT4577_80599C.1
cactctactcgcagggactatcgagctgcggcctacacttcagatcaagctctatcttctggatgtctttcgcttccagctcctgcctggaggctgcatcagatcgctaccgctccggacctccaggttgtccgcgagatgcgacacctgttcgacctgtaagcctactcctcaatactgaccctcggccgcccgcccggcggcaagggccgctacggcgctgtccctgacgccgtcggagatggctgcgagctcctgctcctgtcgactgaactgggtgaaggcgagactgactgccctggacggtagccattgtgaccgcggagctagctgctcttagtaaagattcctagggacaagcaatgagcaagatgcactcgcaaggaaagattcgatgatatcgattggtg

SEQ ID NO: 163401 - DNA, 859 bp, Zea mays
  Clone ID: MRT4577_8059C.1
tcgcgatctagaactagaagacattgtggacatgattgtggacatgactgtgatgcaactatttggattcctaattgattctgtggttggtactttccatacacagaattttactgaaaatttatcaagaaagcaaccaaccttttatgaacctagttgcaaagttttctcagaggaagagatgttatcaagctaatgcaacttcattagtagataaaaaaatgaaatcaaagcattggatacatttgacatggtcgattcacattttgatggatacattgattttgaagaataagttgactatgatacagaggtgaaaggacaatacggcgaagactataatagacttatagggaatttggttggtagtatgaagcagaaaaacatctctacttgggacattgaccatgtgaacctagagaatgatgaaaatggaaatccaatatgctatgaaaaaacttaagaaagatcttcacttcgacaaccagtcacaacatctaattataaaaagctataggaggaagcatataaaaaggatacaatgacaaaagaaaaactaaaacatgtaccaacaatattgttagtttctacataattgagggggtaatctaaaatagctgatcacatgaaatgatagtatcaagatggccaacaaatgatacattgagggaagcattctatgaaagtagttattcatactcctatccgatgtgttgaagcttgtccctgagagaagagttctctgacctcagagcttcaacatgtagcccaagctcctcacgctcaacctagaataatcgaataagattagaaaagcactgaacaaaatcctcctaaaacatagaagatgaaattcagg

SEQ ID NO: 163402 - DNA, 783 bp, Zea mays
  Clone ID: MRT4577_805C.1
aattcggcacgaggagaagaagcagaaggcctccttcctgccaacacagcagcgccaccccctctcacccgacgacgccattcacctccccccgtcccccgtatcgccttcgtcaagtacgcccctcccccttccaccccatgacggagtgctcgattccttcatctgatggcgccacccacctccccccgctctcctccgccgccgcggctgtcgaggctcacttccaggcgcactggtccgcgctcgacgctgccgcacgccaggacccggcgcgggtcatcgccgtgggggactggcggtccccgctcgagctccccttcctgtggcttggggatgtcccctggtgtcgtctccgtcagagatcaccggcgaggacggcatcggagacaacgacctatgcttctccaagttggccgataaactccggtgtggcataccaggtccccctccacccattatcccaacggctgtgcggcccatctcactgatgctgctaagtcccaaatgaggctgcaagtccaccaattcggtgctcatctgcgacaacctcgacgcagtcaacaagttcgagcccaattacaggcttatcagaaggtcataagaagcgatattctgaatttatatgcagcggctgcagcacttcatgatttatggcggaagaagctttgtcaaagtagtctaaagtgtatgcctgttccaagaaggcgaccaagaggaacatacttgataagtgaagaagataggttctcgaagaacattgaccttagttccataatatac

SEQ ID NO: 163403 - DNA, 509 bp, Zea mays
  Clone ID: MRT4577_80600C.1
cacaactaccaacatacatagagaaaaaacactaaacaacataaaaaacaccaaagagaaaaacaaaaaaaaaagaaacaactagacactacttgatataaaaaaaaagagaagataacaaaaactataataaaaaaagtggtgacacctttacctgtctccagtgttagccgccagatttgaatacccatctattcttttctacgggctccaagaggccatcacagggcgcattttacaaacgttagcattgacaaaaccccagccatatcccctattgcaacatccatccttattgaatttttatctccagggaatcacagcacaaaagccccaacaacgggtgcttccaaaaattaatcaagtccttgcagcgaaccttgccgcccaccttcagcaacaacaattccttgcattgggtgaactacctggcgtgaaccctgctgcttacttgcaggcacaacagccactaccattcaaccaactcgttggtatccctgctgccatct

SEQ ID NO: 163404 - DNA, 229 bp, Zea mays
  Clone ID: MRT4577_80601C.1
gcctcactttctcacgaggggggcgccaaccaggcaggctttcgctcgccctgcgacagccagcaaagcgagacgagcaagaatactagggagagagaaacacataaacgcaccgcaaccaagaacgacgaacggacaagagggcccccgccagcaactgcaagaccattgcgggtgaagccctgcccctgcaacagggcctagccacccggtgcctacactgcgcagg

SEQ ID NO: 163405 - DNA, 325 bp, Zea mays
  Clone ID: MRT4577_80602C.1
ctgctgcttcttgcatcatgcgacaaggaacaaccggtggtggcttggcaatgtggtaccttgtgcatactaagtgttcgacgaaatatctaggaggctaggagaaaagaataggtgctttatttcaagtatcgttaagcacaaacatgacctaattaaatgagtacgaactttatagctagtttttacatcttttattataatcccgacttcatttttgcaaaacgaacggaatggaacattatttgttccaaacatgtaatatatgtataatagtcctggatatttgtttttataattaatatacgttcacaaaattgtcacc

SEQ ID NO: 163406 - DNA, 319 bp, Zea mays
  Clone ID: MRT4577_80603C.1
ggaccctgagctgccggaccgccgcagcctgcgccgactctccgccgcaccgccgcgtagagagagaggatcttcatgcttggactgcttgaatcgttgcagttctgatactacatgtagtgaaacacctcgctttgcgcgacaggaaccggggctcgtggggggataaagtgccgggtagtgttgctgaatggaggggggagttaaatatagggatagatgtaaagactttacactacaatgtgaaatgaacatcaacagacatgattgtaagaagccatttaatggagacgctgataaaatagtaaatatatatgaa

SEQ ID NO: 163407 - DNA, 555 bp, Zea mays
  Clone ID: MRT4577_80604C.1
ccggccgggaccactcccgcccatcccttcgctccaccacctctgagactcctccttcacaggccggcgtcgtcggtggtcggagagatggggcaacaacgcacgttggtgtatagcttcgtggcgcgaggcaccatcgtcctagcggaccatgctgaggtctccggcaactttgcctccgttgctgcacaatgcctacagaaactccccgccaacaacaatcgcttcaactacaattgtgatgggcacacattcaactaccacatttatgatggattcagtaatgcaccttgttcttgcttcgctctctctctcccacacgcttataagtcaacaaatgtgatcctattgcctatgcaagttttacttgatgacacaagtaattaaaacctggcatcttacaatcttttacttgataatgataatgaagaaagcaagtccaaagttgcattgtagccccgcagggggttgtttttaattatatcaacaagcgtggctttaattgtagtgtcaaactttaataaaagtaaaaaaaaaaaaaaaaaatttgcggcc

SEQ ID NO: 163408 - DNA, 469 bp, Zea mays
  Clone ID: MRT4577_80605C.1
ccggccgggatgccgcctactagcaggaagctagtggaggactccaaagggatcgcattgatctaacctgccgatcgacgccgacgtacgtacgtgcccgaggacaagcagatcagtcagtgcaatccctttggaattctccacttagcgcctccatccccgcgccgccctccagctgtgcagaccaacatggcaaccaattacatcgatcttgaggactcttatggaccaacatgccaagttcttcattgcttgtactaccattcaagttgtcaaacaattaccaattaactcaagtattcgagagaagcatatatgttagtcaaatagcaaattctttactaactgatctatgtaccgacatgtcaacttcttgcataccaacgtgtcaagaaggtaatcattgttcatgaataagattatcactacaagattgccaacacagaaaaaaaaaaaaaaaaaagcggcc

SEQ ID NO: 163409 - DNA, 616 bp, Zea mays
  Clone ID: MRT4577_80606C.1
gccggccgggtcgggatgccgcctactagcaggaagctagtggaggactccaaagggatcgcattgatctaacctgccgatcgacgccgacgtacgtacgtgcccgaggacaagcagatcagtcagtgcaatccctttggaattctccacttagcgcctccatccccgcgccgccctccaggtttcgcttcgatccatccatgtttccttcgtttaaattagttcgtttgttttttttttattatttatttgattcgccgccgccggtctatctactctgtttgcaacgcctttcgatccatcggcttctactgtatgctataattaagggtttttttacattggtccgatgcatgagaggagctgtgcagaccaacatggcaaccaattacatcgatcttgaggactcttatggaccaacatgccaagttcttcattgcttgtactaccattcaagttgtcaaacaattaccaattaactcaagtattcgagagaagcatatatgttagtcaaatagcaaattctttactaactgatctatgtaccgacatgtcaacttcttgcataccaacgtggcaagaaggtaatcattgttcatgaataagattatcacta

SEQ ID NO: 163410 - DNA, 369 bp, Zea mays
  Clone ID: MRT4577_80607C.1
ccccaagggaaacattgatttagtagatggttgcaataaccgtcattataacagatttttaggagatttttatttcaacaatgattttgaaacataataaatttaactccttttaaataaaacattattttaactagcccctgacaaatgtggggaaagtttttcactgccaagttttttatgcccctcaaatgagttatttttatgcaactgataagaatcatcatcaacatcctcaatttcattggtttgatgattattggtgcccttgtttggagggatgttgcaaacttttgaatactcagggggcataacatttcccttttttcgggactcacaacgctttttcaaatcatttttttttttcag

SEQ ID NO: 163411 - DNA, 310 bp, Zea mays
  Clone ID: MRT4577_80608C.1
cccacgcgtccgggcaccaacacggcggcgctgagctagccagtcactcaatctaagggggctacattcacataagaggctaataccttctacaccgttatctgctcatccttctacttcactgataacctcatggcctacatacactactcatcgtaacactatgaactctcctcgttctatctcaacactaaccttctacaccctatctactacatcttccagctacttctacattcccagaaccatatacgagccacactccacgactctaaacacagatcacttcacaaactgtttcacatggcat

SEQ ID NO: 163412 - DNA, 453 bp, Zea mays
  Clone ID: MRT4577_80609C.1
aaaactgtcattaaaaccaattatttgatagtatatagattctgtctgtaaaaatcctttatacaaacacacgcacaccgtattcaactttgctcatatcaaatctctttgccactaacaagttctggcgattagacagatatcccgcaatcccaaaactccaggtgtaaaaccttgacaagtatatgaccggttatccactgtgcttagcggtcaatgaaggacttattcatcagctcgacagcgttgtccatgaacttcccaagcattttcagctcctttcccactggttccaaaaatttaaaaacaacttcaacaggccacaccttaacaccaagtaaccgaaaaggggttacttggccaggaacaacgcattcagggcctgcggattcaagtacagctttcatcgcaaacccacctcccacaggattcggatgcttcatgacggaaaag

SEQ ID NO: 163413 - DNA, 290 bp, Zea mays
  Clone ID: MRT4577_8060C.1
cggacgcgtggggctcaagcttgatatgctcatgtggtggttcgggtattgacttaagtctctggcaaagaaagtgaaacccctagggcttctcctatattatatatgtagcagtttgttttaaccattttgtgaagagttttgttttttgtttttatttctctgatatagggaaatatagagagatgagagatatgcatgccccctaggatatatggctttgtgtttgtaacgtttgtgtagtgttataattcgtttgagttgatatgacatatatgctttgttttgtg

SEQ ID NO: 163414 - DNA, 186 bp, Zea mays
  Clone ID: MRT4577_80610C.1
ccactcgtccgcgttcgcgtgggcggtcgcgtgggtgattatgtttgtaccgcgttagacccggaaggccggaagattgtacacgcggcctgatctggaaatggtactctccatcgggtagggtggcgggcataacagactcatataaccagcttgctcaacttaatctgtctgtcctgtatcaga

SEQ ID NO: 163415 - DNA, 502 bp, Zea mays
  Clone ID: MRT4577_80611C.1
cttggcccgaaaaaacccaaatcactttgccccccccgaaaaacagggggggggcattcccaaaatccaaagtaacaagagcttttcactttacccacagaaaaagctcaaaccggggggaaaaactttttcaaattgatgggggggaaaaaaaacccctctttttttgtttcggccctgaccaaccggaatttgccccaccaaggggaccctgggtctttcctgactgaagtttaatccctgaaaaaaggggggcccaaaaaatttgccacaaacccagaaacaaaccctttggacaaaaatatcacattcattttttcgggaaaccattttgaatgggggggaacaggcccttaccccgcaataggggggtcccctttgaagttttggggaacaaaagggcccatgaaaactgaaaacccaggggtaaacttggccctaaaggggtgggggttacaaaactgaaggaacccgttcccaacaaaaccggtttaggcaaaaa

SEQ ID NO: 163416 - DNA, 479 bp, Zea mays
  Clone ID: MRT4577_80612C.1
agcagtggtaacaacgcagagtacgcgggtgctgtatatttttttccatcggacaaaatatatcttttttattgaacataaacgagcggaaaggtggagtttatccgtgtataaacaagcattagtggtgtacaaatctcttgatagacgcccgtgggctcgcaagtcgatgatatatgtacatggccggtgaagagaacctggccggtgggtattgcttggttggtcccacgcgcctagcctgccacacggtaccaccgcctaccactagcagcatcaccgcccggtcgttgaccaaaacacgcaagtgctcgagtgcgcgctactcctgtttttactaccctttcatcagcacctcaggaaatagaaaggaatatatatccttggttcctgcaagtagataagccacgcaatccgacccgtccaaaaaaaaaaaaaaaaaaaaaaaaaaaaaagtactctgcgttgttaccactgct

SEQ ID NO: 163417 - DNA, 108 bp, Zea mays
  Clone ID: MRT4577_80613C.1
ctttttactaatcctgacttgtttgagttttgcaagccaattcactgaaagtttgggttgaacagaatgtgttgcttgaaatattaaaactcgcatctatctggtttt

SEQ ID NO: 163418 - DNA, 988 bp, Zea mays
  Clone ID: MRT4577_80614C.1
cagtattgatcatacatatttctctcttctggctgaccaatcatcataattacagcactgtcaatataaactcagaccatgcttgggccaatgcttcagaaaattgagtgctagccgcatttgcaggaaccctcttgtgttctagacttaaagaagtcccatattgtttaattaaggacctgtgaagatcactaactaaggaaccaagcccaggaaatgatgctgaaatggtgttgagctctatttgaagaagagaacttgtttctgaatccagcatataatctgatcggtgcaaccccaagcgaatattctcttccttatttatttccatcattttcctgtgaatttccaagagcctagatgtgaaatcatcaacctgccttgttttggacaaagcattctgcaagaaattcccgtccatgctaacacggtccacaagctcgttaaaaacgggagcgagctcgcacgcctgcctccaaaaggactctggaaaatgtgctgggagcaaggagaatggagcatggaccaaaccaacaccagggaccgttgctgatctctggtcggcgcggtccccgacgacgaggccgtgcagcgagcaccacgcggcggcctcccgcgccatctcccccgccgccgcggggtccatcgccggcggcatggcggcactcatcgcaggtattggcagtggaatcaattattaggtggtggagcgcagaggtggaggaaggggcgatggcaatccacgcaaactgactctctggttattatttattgtgtgttttatcgatggatttggagggggctgcgcggaactggcaggccaagtcaaattggctacccgtatctttataaaaaaaaagtgtgtgccattaccaatcgcctcctcgcactcgcagtcgcaccatcggatcggaagttgggtacaaagaaaaagtttttatgtacgccttttcaacaacagaacaatagagagatagagattccttat

SEQ ID NO: 163419 - DNA, 475 bp, Zea mays
  Clone ID: MRT4577_80615C.1
gtagtttaaattaagcacaggtactgtattttttctttcattagacatgtatgaccagatatacatacaaacacatgggtagattactaaccacatggaaaacaaacaaccaagtacaaaaaccccttgcaaagattagaggtagtaccagtaacatgactgaacttgtaactagtgatgtctaccctaacaggctaacactaggctaagtatatgatttccaatcctttactgttgcggtgttggtcctaagagacctatccaatttaattacatgcacgacctattcagaggtttgaaaagggccaatttcaatttataagaaaaagttggatgtggaaaccatcaagaaagccgagaccgggggttcggactatgttgccttcttttaccgccctacaactgaattttgtaaccaaactgcggatgaatgttgccatcaaaaccctgctaagatcagcgccaacgcaaacct

SEQ ID NO: 163420 - DNA, 133 bp, Zea mays
  Clone ID: MRT4577_80616C.1
aggattcggctctagatcgcaagttttctttggtcggtacatatctgtgtttcttgctactgagtcacgaaaaagtccagaagacatacgcgctgaatctagagtaagacgttactctggtcatgaaggtcgc

SEQ ID NO: 163421 - DNA, 332 bp, Zea mays
  Clone ID: MRT4577_80617C.1
cggagccagaaacaacgcccgcgacccacacgcaacactagtcagccgcctccctttgaaaaacacgatgccgaccacacaatatgtcaaaccattatgtctgggcataacctatcccggaaccagccgctctaactcccgaacaacctgacaaccaaacaaaaaggcaaaccctaccacaacaccactgctgatgagaccgacaagtcgagcaacaaaaagcaacaacacccccaggtacgtgcaaatggtagaaggacaccgcctacatgcttgaaccaccaacatgctaacacacatgcagccatcgattacccaactctgaggcaaca

SEQ ID NO: 163422 - DNA, 481 bp, Zea mays
  Clone ID: MRT4577_80618C.1
gtcaagactacctagtactctcaatgtaccagaatacgtgctcgatcttcactcccatggtacatatactatcacttggcttagatctaagtcaaaatcaccgactgagcacgcattgccatgctggtatgctacacactatgcagaatcttctatggtgaatgcagccgacaaagacgacacctcatccataatttctcgacccttgacctgtgctttactgcgattacggatcaaactcgcactactaacctaaatgcgataatcgacataactgcgaaccccagacttgaatcgagattcttacccctcacgagaatattgagctcggtgctcgactaacagagctggtacctactttacatgaaaggtggactgttctgacatgaccctatcttggcgctctggtgagcaaccattcatagcagactgtacacagtatgacctcttaggttgctgcttctaatgctgcatatgatga

SEQ ID NO: 163423 - DNA, 388 bp, Zea mays
  Clone ID: MRT4577_80619C.1
aaaaaaaaatccgggccaaaagcaagagtcaaattcttgcccaatcctttacctcacagacgggggggcccccctttttttatgggggcctaggccgggaacaaaaaccggccggacccctttttggggtcatggtcatggacaggggttattctagccccacaaaaggaaaacacacggggtactcgctccctggaaaaatactagttttctactttggggccctaggaaccggggaaacccttttttttataatagaaaccattttaagatttcccccccccctaattggcgggaaacgtcccttcggcccccccgggtgcgtttgggttcagggggccccgggcccccggttaaaagaggcaaaccggggggggcgggtccaaac

SEQ ID NO: 163424 - DNA, 452 bp, Zea mays
  Clone ID: MRT4577_8061C.1
ggaatcataaattcaatcatacattgcaacccccccccccccccccccccttaaatagattagcaacaatctttagtcaagggcctgacagccttttaacaacaacagttataccaatacccggttccgattttgaaaggggggaaaataaaggggggggcaaagcactcactttgtttccattttttttggaggggggtcaactaccctaggacccactcaaacagaggggaccaagggcccaacaataccttataatcatataacagtagttttttgcagggggggtcaaagccttacagggccacaagcaaaacacccccccacccggtttttttttttttatccataggaggacccagtttgggatcttgcgccgttagcagtaaaaatagttaacaaacaactgccagggccctgtcctcttttcccttgaactgggccgccctaaa

SEQ ID NO: 163425 - DNA, 194 bp, Zea mays
  Clone ID: MRT4577_80620C.1
gtgttgtcttatacatacccctccggttcctgttcagtttcttaaggttcttctagactcggagtcgtttttcagccgatctaaatttcgaccaaaaatctttaatacccctgcttcatactatgactctcctggtccactgacaaccactccctacacaacgccttcatcacctacagcgaggtcctcaaata

SEQ ID NO: 163426 - DNA, 146 bp, Zea mays
  Clone ID: MRT4577_80621C.1
ccttaattttttgatttgtgtagggagacgccggactgtgcaccgctcctaggcagcggatggagctggccaacaaaggtgccaacgagccccagcattaatacgaccaactgcaagaagtggctcagctgtagggacacccggaa

SEQ ID NO: 163427 - DNA, 276 bp, Zea mays
  Clone ID: MRT4577_80622C.1
cattcgtagattggtcgcctactggattcaagtgcggaatcaaccaacagaagcctactgtcgttccaggaggagagctcgctcaaaccaaccgttctgtgtgcatgttagccaacaccaccgccattagcgaagtattctctcgcattgacaagaagttcgatcttatgttcggtaagcgtgccttcgtccactggtacgtcggtgaaggaatggcagaaggagaatttattgaggcccgtgcagatcttgccgctttagaaaaggatacgctga

SEQ ID NO: 163428 - DNA, 1461 bp, Zea mays
  Clone ID: MRT4577_80623C.1
cattgggtacctcgagggccggccgggaaggaagaagcctgcaaaaggaacaacagttcagatgttcaagccgcggccaatcccaacaaccgggctgctcaacagcaacaggaaattgggagcaataagcccgtggactctactctgcaacagcagccttttgcatttgatccatctgcagtcgatgatgcaaatggaaggccgcttggcatgttgcagtttgacgaggatgacaatggatccaaggatgcagggaccggtgctcaggccacgctggagagactggtgtccaagcacaggcatcggcgtgaccctgatggccccccgtttgaaggcaggttttccgacgagtcatcatctttgctggagaggacgcttgaaatccgggacaggtcctacaggctcaagatcggtgtgatgagcgaagcgcatcctcctgtatatggtgacgatgaaagcgccgccagtgctgctgattcagatggcgaggagtttagccgaaacgtcaaggaagctgcggagatcctgaggaaggccagggcatccatggctgacgaagagaccgcagacgcactgctgtacaaatcagctaggctcctttccacagctgtggctttgaggccaacaagcctggtagcagtgggtcagctagggaacacgtacctcctccacggagagctcaagctcaaggttagtcgcgagctgaggacactcttggccagcagcggcgcctttctgaacggaagagagcgtgctccacggtccaggaaggtagacaggaggatggtaagcagagagagcatctcatccgctcttgtggatgtatgcgaggaatgcgagagcctccttgtcgaggccggcagaagctacaggatggccctctccatcgattcaggtgacgccaaggcattgtacaactgggggctggcacttattttccgggcacaattgctcgctgacatcggaccggaagcagcagccgacgctgaccgggtgtatctagctgcaatcgacaagttcgacgccatgttgtcgaggagcaacacttatgctccagaagctctctacagatggggcactgcgttgcagcagcgctcccatctgcggcctcggagcaacggtgagaagataaggcttctggagcaggcgaagagcttgttcgaagatgtgctgtatgtggaagcagacaacaagatggtgagggaggcgctgtcatcgtgcatatcagagctcaactaccatggccgctggttataaccgtgaggagctttgtagcaactagcaagcgaggggaggagggctaatgataacttttgagttttgaatgatgtattagcttctagctttttatgctgacaagaagctcaaacaatatcttgcaatacaatgcaatatgaccttttttttcttgtgtatggaacgtgtggttgaatcgattaatacaagtgaatgaaaaagagc

SEQ ID NO: 163429 - DNA, 315 bp, Zea mays
  Clone ID: MRT4577_80624C.1
ccttgctatttgtgtggtgggggctagacgagccagagtagaagatcgcccagtacttacaggaagaactgtggaagtgaggcagaaagctgatacatacaccgttcatgtacagtgtgcagagactgaaagtacacagggtgggtgtccaagatgtaacgcagttgcgtcgttagggaccgctatgaagcaagctcagcaacacacagaaattccagggtatcattggagaccgagacataatatggctactactagtaggtacagggcactggtttgctggttcacggatttggcacctagaacaacatgggg

SEQ ID NO: 163430 - DNA, 128 bp, Zea mays
  Clone ID: MRT4577_80625C.1
gacaaaggaacctcttcgagattgactttcgcgacacgaccagacaacggggcggggaaacagggttgttgcgcatatcatccccacagatctcattagaataatagaagaactgccaaccctcactt

SEQ ID NO: 163431 - DNA, 197 bp, Zea mays
  Clone ID: MRT4577_80626C.1
cccaaggtcccttttttttctcgatctggaagcgcgcgcagtagcagccatggacgtgagcggagcatgcgggaaggcgaagaagggcgcggccgggcgcaaggccggcggtccgacgaagaagtcggtgtcgcggtcctccagggtcggtctgcagtttcccgtcagccgagttgggcggtacctcataaagggcc

SEQ ID NO: 163432 - DNA, 292 bp, Zea mays
  Clone ID: MRT4577_80627C.1
tttttccaaaaaaccgggaccctggatcaagatcaatttttggaataattttgcagctggggtaacatttgccctgacagggtggaaaaaaaaaattgtttttggttaaatgaaacagggtccccgcttttaaaacttggggggctacctttgggtctggggccctgtttttgggggcagcaggcttaacttatttttgtcaggaaccgagggggggaaacccccttttacagtcttattggattagttttcattgaccaaagaaggggggacccttacccaatttgggttg

SEQ ID NO: 163433 - DNA, 155 bp, Zea mays
  Clone ID: MRT4577_80628C.1
aggcccacaacaattttatttactagcagaaaggcgcatggcccttaagaaacaaacatttcaatccaacatccagttgtttaccttgggcgggaaagggcgcccaaaggggccccccctgaactaaaagctttaaaaaaacaacagcatttaat

SEQ ID NO: 163434 - DNA, 402 bp, Zea mays
  Clone ID: MRT4577_80629C.1
gcttggaacctttgggctgatttatgtgcttcgttatgtgcttgtatgttcagtcctctcccttaaaagtacggtgcctatcgtttctctaccgtcacattattctctgactatcgcactgtccgcttcagtctgcggtaccactacagttggcgccgccgatacagtcttatgctttatcttctcattctccttcttgtagttatcctccgtatttctcttgatcttctgcttcttaggctccggggttttcatctgtatcttcttctccttctccttctccttccttttcaggttattatgtatcttgttcataatgatcttctccttatgcttacggccgggggtattcctcttcgtttgcgccttctgcttcttatggtctggagtatttttctgcat

SEQ ID NO: 163435 - DNA, 285 bp, Zea mays
  Clone ID: MRT4577_8062C.1
gcacaaatgttttccctagctgatgtggccagtaacagtgacagcttatgcaaaactgttggttctgtttcttactgaacgtttccttttggtagctctagctgtttcttgcccaataatctggcaactaataacataactgtaatagggcggtatttgagacctccatcccaaggccttgaatttcccaaccgccttaacatttccatacatcacatcttggaatctcatttccggaacctcctcttgcgatgaccgttggcactcatagaagaacacgaggtc

SEQ ID NO: 163436 - DNA, 413 bp, Zea mays
  Clone ID: MRT4577_80630C.1
atgcgccttattctccctttctgcttcccaccctaccgctctcggctttctttcatctccctccttttcgccacttgctatacctataatttgcctggcactttgcactgcctggccggagcggggcctcgtgcttccattgctcggcgatcaacgctccaacccggctagctagcgtccgtggatcagtcatgcgcagccacaggtagaggcaccgagcggacaatgacctcccggcagaaggccgccaggatgctgacacactgatgtgcgcgtcgtcgcgcgtgctgccgctcacgactcccacacgaattacagcgccatcttgaacttcggtcactcgatcaccgagcgccaagaacctgagcaccaactccgacgcctgcggagatcaccttcgactgaggacccct

SEQ ID NO: 163437 - DNA, 228 bp, Zea mays
  Clone ID: MRT4577_80631C.1
gcgaacgcttgcttgctcagaccttgaggtcagcggacacgcactctcttcgctccattggtgagcgacccggcaccgctacgctagcgcgagtgccgataatagcgtctcgcctagtgaccggcacattatcgctgcttatcagagccgctaatggaacagacgccgtacatggagcggatgttgaagcgattagaaaccaacatggacagtgatagatcattttcg

SEQ ID NO: 163438 - DNA, 221 bp, Zea mays
  unsure (1)..(221): unsure at all n locations
  Clone ID: MRT4577_80632C.1
cccacgcgtccggatgataccggccgacatcggggagagcatcgttggcgccggcgggtgcaacagctccagcgacgccgcgcagtcctcctccgaccnctccaggaccttctccgtcggcacccgggacgacaccaacgccaacatgntctttctgtccccatcaagaatcccaaggctgaccccgccgccggcgccgacgacatggtcaccaacttcag

SEQ ID NO: 163439 - DNA, 221 bp, Zea mays
  Clone ID: MRT4577_80633C.1
tccacacagaaaaccctatccgccgtcaccgaatcggcctcccatgtaagcaggatcgtgcagcccgccgcctccatgaagcgcaatcccctcgtcacgagctcccgccggaagtgccgcaaggcgcactttacagtcccgttctccgtgcgccgcgttctcatgtccgcggagctgtcgaccgagcgtacacacaagtacaacgtgcgcttcatcctgat

SEQ ID NO: 163440 - DNA, 372 bp, Zea mays
  Clone ID: MRT4577_80634C.1
caaaccagaaaaaatttatcccttatttactcaagacccagggaagcccccccggtgtgagggcccctttatgcaaaccaatttattggggatccaaaaaaggggccctcccaccaagggggaatatatttgaaaaaaaacagttattctggggaaccttttgtgtgggaaaagattgtgcccccccagggaggaaacacaaaaaggggtttaacaatggggggggttttaaaaaagtttccccttttttaaaaaaaaaaaaaaattttgaaaaattatttgtgggaaaaggaaaacacattttaaatgggtctcaagggtttcccaacttaaacaattttaaggttgtttattttttgttaaaattttttt

SEQ ID NO: 163441 - DNA, 226 bp, Zea mays
  Clone ID: MRT4577_80635C.1
aaggaaaaaatctggctccgggggccggttttttttttttttttttatgctgagcaagatgaaacatatcatgtctgatataagtttatgacataatagataattaaacccttgcctattctaataactttgaattaaaaggattagagagagagagagagagacaagagggaacacctgattttggtcgcaattgagagaaaaaattttatatgctcaaattcag

SEQ ID NO: 163442 - DNA, 599 bp, Zea mays
  Clone ID: MRT4577_80636C.1
ccccctcctcgagttttttttttttcttttttttttttttttttttttttttttttttttttttttttttttttttttttaaaacaggaaaaactttgttttaccttttaaactgttttgtttacagagaaaatttaaaaatggggggtaaaaaaaaaaataggataaaggggttgtgggaaataccctaaaaacattatttttcccccataaagggatcaacaacaacaattggtgggggttaacccacatggggggagcaggaccccccccttaagggggattttgcaaagggggggccccccttttttttttttggggggtcaccctttgaggggggaataaactgccaatttgggccccctgggtacccaaaaaagggctttatcattttttgccttgaattttgcccctggaaatgaaaaggaattaggggcccctgggaaaaaggcccccgaataagggtcggagggggcttgtaggttggacccaatcccataagtttttttgggggtttaaaactttttttttcaagtttaagtttttgtttttgggagaaaagttcgcctttttgggcctttagttttttaatttttttt

SEQ ID NO: 163443 - DNA, 373 bp, Zea mays
  Clone ID: MRT4577_80637C.1
cccccccctatatttattttccccccccccaccctaggggacggtttttttttttataaacacaaacccaaaaccaaaatattttaaaataaatttaaaagggaataaaaatctataatagcagctcctttgtttttacaaaaaataaccaagcaaaaaaaaggaaaaaacaggtattttttttggaaaagggaaaaactacaactttatcccgtaaaaaaaaataaaatggacggccaaacttcaaaggggttggttccgttttctcttaaacaacaaccaagttaaaaaaattaaccggggtgggagaaaccactttgaaaaaataaaaaattttacgacctaaaaacataaaagtgcccttttttgacac

SEQ ID NO: 163444 - DNA, 436 bp, Zea mays
  Clone ID: MRT4577_80638C.1
gaaagaggcaagatgaaggctctgcctgataacaaggatggattcatcagtcacatgttagtaacgggcgactgggtcatcatagtgctgaagaactctaagtgatctggtaattagtcatcttgcaacatttattgcctttctttggtttcacggaattctatcctttgttgaaaaaaactgttatttatgtatggtttgactgatatgttggttatttgtaattgattttattgattatggtattggctttgtattctattttttatgagtttgttttgttaatagtattttttattttattttatttttgtattgttttatttttatttttattttatgattttctcttttattttattttttatttttttttatatttttttttattttatattttatttttgtttattatttttatttttatttttttttt

SEQ ID NO: 163445 - DNA, 1801 bp, Zea mays
  Clone ID: MRT4577_80639C.1
cattgggtacctcggggcccgcggaaatggcaaaaaaataaaggccccacgccccacggactacggtaagccagcggacgagccgccatccgccacgccatggcctctctcttcgccccggcacgccgcctgctcagccttggccgccgccgccaccgccgcggaggacagctccccgtgcccccctcgtctcgtagcaacagcgcggaggagcgaccaccgccggcgcggtcgctgagccttgattccacgctgtttccgctgggccacccgagcacactccttgtgccggagatcgaactgtgggcggcgcggcccagaaacctcctccgagccgttgagctccaacgcatcgtcaaggagctccgcaagcgccgccgccaccgccaggccctcgaggtctctgagtggatgagtctcaagggtcacgtcaaatttctgccaaaggatcatgctattcacctggatttaattggtcaaatccatggggttgaagcagcagagacctacttcaataacctatctgacaaagataagacagagaaaccctatggtgcacttctcaactgctacacacgagaactcttggtcgacaaagcgttggcccattttcggaatatgaaagagctgggtttcgtgttctccacgctcccctacaatgacctcatgggcctctataccagaatagggcagcacgagagggtcccttcggtgatggcagaaatgaaaagcaatgggattgttcctgataattttagctacagaatatgcataaattcttatggcacaagagcagacttttttgggctggagaacaccctggaggagatggaatgtgagcctcaaattgttgttgactggaatacctatgctgttgtggcaagcaactacattaagggtgacctaagggagaaggcatactctgcgttaagcaaagcagaagcaaaactggataaacaggatcctgatgcatataggcacctgatttccctgtatggcaaccttggggacaaatcagaagccaagaggctatgggcggtgcaaatgtcgaactgtaagaggtacattaacagggactacatgaatatgctttcggtgctcgtgaagcttgatgagatcacagaagctgaagacttgctgaaggagtgggagtctagccaaaactcattcgacttccgtgtcccaaacgtcctgctcacagggtaccgccagaaggccttgctggacagggccgagatgctgctcgacggcttcttgaagaagggaaagacgcctccttcgaccagctgggggattgtggcaatcggctatgcggagaaaggtgatgtggcgaaagcttatgagatgaccaagaacgccctctctgtgcacgcccccaatactggctggatccctaggccttccatgcttgagatgatacttaagtacctcggagacgagggggaggtcaaggatgtcgaagctttcgttagtctgctgaaagctgctgtgccagtggactctgatatgaccgaggctttgtcgagggctcgtgcgagggaagaaatgaaggctgaagaggcaacggaagctcctcgcggggatgttattgcctgagctggttgtcggtgtttcagcgctgctgtctgatcctatgtgctagtagtagaataaattaatactgtagttagttataatccttcctttgatagctccttgttttcattagctataagttttatgttggtgtttggttcgccacttcgtaataactatagttatcatatcaatgatgcgaagcgatacccgttttggctgaacg

SEQ ID NO: 163446 - DNA, 235 bp, Zea mays
  Clone ID: MRT4577_8063C.1
cggcacgagcaattttctgctgaagctgttcgtatgagatgaccgaagttcctcttcgtgaagcttcggaatttataaaccgacataaaagtagaatgaccttttagtccatatatgtttgagtcaccgttgtaattccttatgaggggcataattataattcctcacaggccacgccctgtgcctataaataggtgaacagtacctctgtactgttcacgcaatcttgtaatca

SEQ ID NO: 163447 - DNA, 2575 bp, Zea mays
  Clone ID: MRT4577_80640C.1
tgttcacgacctccccgccgagtcgcgcactttgctctcctatacctccctcaggggcggctacgcgcgcaacgcgctgcacgaggaggcccgcgcgctgctcgaccagatgaaggccacgggggtcgcgcccaccgccgccacctacaacaccgtgctcgccgcctgcgcccgcgccaccgacccacccgtccccttcgacatgctcctcggcctgttcgctgagatgcggcacgacgcgtccccctccgtgcgccccgaccttaccacctacaacaccctccttgccgccgccgccgtgcgctctctggctgatcagtctgaaatgctgctgcacactatgcttgaggccggcgtctccccggacactgtttcttatcgtcacattgtggatgcctttgccagtgccggcaacctctcccgtgcagccgagctattctccgaaatggcagccacggggcacacggcggatgcctctgcttatctgggactcatggaagcacacacgcgtgttggcgccactgctgatgcggtggctgtgctgcgacagatgcaggctgatggatgtgcgccaacagctgccacttaccgtgtcctgctcgatctttatggaaggcaggggcggtttgatggagtgcgccaactcttccgtgagatgagaactgctgtaccgccagacacggccacatataatgtgcttttccgtgtattcggagatggtggcttcttcaaggaggtggtggagctcttccatgatatgcttaaaactggggtacagcctgatatggtgacctgcgaaaatgtcatggctgcctgtggtcacggtggcctccatggggatgccagagaagttcttgaatatatgaccagagaaggaatggtgcctactgcagatgcctacactggcctggttgaggcccttggccacgcagctatgtatgaggaagcctatgttgctttcaacatgatgactgaaatcggtagcttgccaactcttgagacctacaatgctcttgcatttgcatatgctaggggtgggctcttccaggaggctgaggccatcttttctcggatgagtaacaatgctggcattcagaaaagcaaagactcatttgacgccctcatcgaagcatattgccagggctcccgattggatgatgcagtgaaggcgtacatggagatgcgtaaatccaggtttaatccagatgagcggtcccttgagggagtacttaatgcctactgcatagcaggggtcatagatgagagtaaagaacagtttgaagaacttcaatctagtgtgactatgcccagcgttattgcctattgcatgatgctgtcactatatgccaggaatgacaggtggagtgacgcctacgatctgctggaagaaatgaaaacaaatcgtgctagtagtacacatcaagtaattgcttccctaatcaaaggggaatatgatgatagctccaactggcaaatggttgaatatgtcctcgaaaacagtaccatggaaggctgtgactatagtttccgattctttaatgctctccttggtgtgctttggtggtttggtcagaagggccgagctgctagagttctggatcaagcagtaaaatttgggctgttccctgagttatatcgtgacaccaaactggtttggtcactagatgtacataggatgtcgatgggtggagcactggtggctgtgtcagtatggctcaataagctttatgacagactagtagaagatgaagatcttccacagttagcatctgttgttgtattgagaggagaaatggagaaaagcacagttacaagaggactgccaatcgccaaagtcgtctactcctttctaaacgatacactatcagcgtccttccattttccaaaatggaacaagggacgaatcatatgcttgaagtcccaactaaaaaggctgcagtcggccgtagactcctcaaatgggtctcttgcagctggttttgtcgacatgacaaactcccgtctgccggctcccggttccaagatatacacaagcgaggaccaattggataatggttcacgccatttgcctgacgaaccgttggcggaggaaaaggagtcggagcttctcgcactgtgagctgctgcccttcgcatctacagttgtgatgccattggtctgaacaaggggagacgagatgcaggataccaagcgtattttcggagttcgtccattcagatctccgtctcggtctcagttatccagggtgggtgctacatactgcagattcacatcttgcctggaatttatttggctggggcttgacagtcaatgctgaacttgagttgcatttcaggcaggattttagctcgttgtagggagaacgagcttatggatgttgttgacccgcccgcttctgtgtatggcatccttgtgcgtccagctcaagtgctcaactctgtaaaacatgatagcctgataagtctgttgatacgatctgaatcctgatgatggggatagtgcctgtagtgtgatttgtattattaccagctgagtgaccatctgttgcttgctactaataaatctctctttatt

SEQ ID NO: 163448 - DNA, 440 bp, Zea mays
  Clone ID: MRT4577_80641C.1
gggatatatataggataaaaacatattatcggggggccaattaaaatatgggtacaggaaatgcaatggggtcaaccaaaatggggggggacacacgttcgtacatgagcacaaagactggcgccaaaaatgggggggggggtagcaaactggaaaactttggtttttttttttttaaacacaccaaaaaatacctatgtgtgggagccagctcggcctttcttattattggtcaacccccaccacaagctagatagataaaaatcatatccatgggcggcgatcgatgggaacaacaattgcagggggcgcacttgcagttgccaccccaattgcagccgggggggggcttcccggacttcgccgggggcttaaaaaaatggggggggggcttttttttcggggccaccccaaggaccaagggggcctgcgcggggggg

SEQ ID NO: 163449 - DNA, 422 bp, Zea mays
  unsure (1)..(422): unsure at all n locations
  Clone ID: MRT4577_80642C.1
ccgggtcgacccagtctttcgcgacaacaaagagtgcatggtcgccgacccgatagccgtcattccctgctcggtcatggcaactggccaccgcgcccctgctcccggctccctgcccctcccatggagcccagcgctgtgtcgaacctgccatgtccgttgccggtcgtcaattttctattcaccatggtcatcatgtcggctgtctctatccgagctagcccagctcaccagccgtcgcgccctttttgcccgttgggccgtacgttgtcgcgtccacctcgttgtgtcatcgtggacttgttggcgtgctgctgtggtatctgaatcgcgctcgcctcagcttggacgagttgtcatgccatcgtcttcgtcaaatgaaaattgttgtgctgacacgctaatgccgtcgatcgccnnat

SEQ ID NO: 163450 - DNA, 454 bp, Zea mays
  Clone ID: MRT4577_80643C.1
aacccccccggggggctttttaaagaggggaaattccacccaactgggggccgttcttaggggatccgggttgggacccaaattgggggaaaaaaggggaaaagttgttccctggggaaaatggttttcccttaaaaattcccccaaaaaaacaacccggaagaaaaaagggtaaagccggggggccctaagggggggcctaacccaaataaattgggtgggcccaacggccccttttccagccggaaaacctgtgggcccacttgctttaataaatcgcccaacccccggggagggggggtttgggtttgggggccttttccctttcctggttaaataactccttggcctcgggcgttcggttgggggggggggtttaactttattaaaggggggaaatacggttttccccaaaatcaggggaaacccccggaaaaaacattgggccaaaagg

SEQ ID NO: 163451 - DNA, 405 bp, Zea mays
  Clone ID: MRT4577_80644C.1
aaaaacccccggcccaatccaaaatttaatttatgacaaaggtttgggctaaccaaaggaaaacaaataaatttccgggcccgcttggggggaaaaaaaaaaaccgcagggggaaggtctggggcatgttaaacactttaaggttttttttgggggccaaattaaaactttcaccccctgggcctttggggggggggaaaagctcaacactgggtgggggggccccaatttaacggggacttttaataaaggggggccggaaagaccctgtttggtgggggttttttttaggttggggccaccaaaagggggggggggggggaaaaaaaccagtttttaaacccgtttttaaaaaaattggttggggggaaaccctccaaaattaacaaaaacccggaaaggggg

SEQ ID NO: 163452 - DNA, 325 bp, Zea mays
  Clone ID: MRT4577_80645C.1
aataaattcttttttttttttttttttttttgtggtttttttttttgcaactgggggtatcccttattgaaaaacacatgaatattttactaaaataaattttttcaaaagaaatgatgaccgggactttatccgaggcgaaacgtcacccgttcccaatccccacgtaccgcgctaaatgccgattcacttgaccaccaaaccggacagaggggcctccaactcaccgcccttaagcagcgggttcttggcctgcccaatggcccccagcgtgcgcttcccgagcatccccccgccattggactccaagagccatcccaccttg

SEQ ID NO: 163453 - DNA, 658 bp, Zea mays
  Clone ID: MRT4577_80646C.1
tgggaccctcgaggccggcctggccgggagacgaagccacagcgctctgcagcacacagataatatactcctccatccagctcggagcaaagagagcagctatagtcttcgtgacaataaccaaccgactgagcgatcatggcgtctctgctcggtctgtacaccagcggcagcgcccggggcaggagggtccacgccgccaggagcagtggccgccgccagtcggctgcgccgttgaagcagctgctgtcgaggttgaggtgctcctggaggagacgcgcggcgcggccgaggcgcggcgcggtcaggttcgggtatgacctgcatagctactcgcagaacttcgacgatggcgatgcctagtcagcccggcggccaggactagcttcttcagtacgtgtagctagctagctaggagtctaggacctgcaggatcctccttcatcagtacgtgtaactagctatggccaggatattagtgtggctttaattagtgctttgtcctgatcactgagatttcagtccagtgttaatttccggtgatcgattatctgctctctagctggttcatccagttattgtataaagaaattacttcatcttataattaagtttgcacaggaaagcaaaaaaaaaaaaaaaaaaggcccctagggcc

SEQ ID NO: 163454 - DNA, 541 bp, Zea mays
  unsure (1)..(541): unsure at all n locations
  Clone ID: MRT4577_80647C.1
tgctgggatacgcccttaagcagnggtaacaacgcagaggacttnntttttttttttttttttttttnnnngaggggggggggggtttnnnnnnnnnnnnnnnnnnnnnnnaacaaggacacgcagggccggaacgcacccgcaaaaaannnacaagagggggagagaacagagaagccaggagccaagggggacacacacacaggaaacgcggggggggccnaacccccacggggaagaaaacggggggggggaccccacaaccggacagaacacaaccccccacttttttttttaagnaggacaaantattaaggggggaagaggacagggaagcacacagggctgggactacgactacgagggggcatgggttttggataaccacaagagaaccagccaaacgtgggcgattgggagagacacgccggcgggcccttaatttttatccaccaataccacccgattggggcgttcggatctaacggggggtggtcctggggtccccgggggctctggggggggaccacggggtaagggg

SEQ ID NO: 163455 - DNA, 543 bp, Zea mays
  Clone ID: MRT4577_80648C.1
ttgggtacctcgaggccggccgggaaccttctgtcgtaccctctggatcgaagcctggacgacgcgaccgtgcggcggcgactcgacgcaaccagcacggcggcggcgcacagccccgacgacgactctccccactgccttctctccggtgtggccgccgccagtcgcctgcgtcgttgaagcagttgctgttgaggttgaggtcctcctgggggagacgcgcgacgcagccgaggcgcagcgcggtcaggttcgggtatggcctgcatagctactcccagaacttcgacgatggcgttgcctagtcagcccggcggccacggctagcttcttcagtacgtgtagctagctaggagtctaggatattcgtgtaactagctatggccaggatattagtgtggctttaattagtgctttttgtcctgatcactgagatttcagtccagtgtaaacttccgatgattatctgtgctctctagctggttcatccagttatattgtataaagaaattacttcataaaaaaaaaaaaaaaaaagcggcc

SEQ ID NO: 163456 - DNA, 858 bp, Zea mays
  Clone ID: MRT4577_80649C.1
gtcttcgtgacaataaccaaccgtttgtgctatcatggcgtctctgctcggtctgtacaccagctgcagcgcccggggcaggagggtccacgccgccaggagcaccctcactgagagcggagtcactcgaggccggcagggaacccttctgtcgtaccctctggatcgaagcctggacgacgcgaccgtgcggcggcgactcgacgcaaccagcacggcggcggcgcacagccccgacgacgactctccccactgccttctctccggtgaggatctgctctcttccttccctctcctatcctctgctctcgctgcccccaaactctcgccctcaatctcgctcctctacgctctcgcaccgcggcgctttgttcaaggtgtggccgccgccagtcgcctgcgtcgttgaagcagttgctgttgaggttgaggtcctcctgggggagacgcgcgacgcggccgaggcgcagcgcggtcaggttcgggtatggcctgcatagctactcccagaacttcgacgatggcgttgcctagtcagcccggcggccacggctagcttcttcagtacgtgtagctagctaggagtctaggatattcgtgtaactagctatggccaggatattagtgtggctttaattagtgctttttgtcctgatcactgagatttcagtccagtgtaaacttccgatgattatctgtgctctctagctggttcatccagttatattgtataaagaaattacttcatcttaaaaaaaaaaaaaaacacggtgccagcaatatattaaatctacattgtgtaaaaaaaaaaaaaaaaaaaaaaaaactcgacactagttctctctcgtgccgaattcc

SEQ ID NO: 163457 - DNA, 198 bp, Zea mays
  Clone ID: MRT4577_8064C.1
tcgagcatagccgctctgcatttatccataccgctagatacacgtctgaagaatcctaaacattttagcgaatgcgtatcaacttacatgcctaggacggtcgttaagttctacgtgtcgacatcactgaagaccgtgttgcctgcttagaattgctctcaggacaacactatcatgaatctgtagtgcagcacaaaa

SEQ ID NO: 163458 - DNA, 549 bp, Zea mays
  Clone ID: MRT4577_80650C.1
cctgtgcggcgctcgaggcggccgggtgctgtacccttgtgtcgtaccctcaggattgaagcctggacgacgcgaccgcgcggcggcggctcgacgcaaccagcacggcggcggcgcacagccccgacgacgactctccctgctgccttctctccgcgacgctttgttcaaggtgtggccgccgccagtcgcctgcgtcgttgaagcagttgctgtcgaggttgaggtcctcctgggggagacgcgcggcgcggccgaggcgcagcgcggtcaggttcgggtatgacctgcatagctactcccagaacttcgacgatggcgttgcctagtcagcccggcggccacggctggcttcttcagtacgtgtagctagctaggagtctaggatattcgtgtaactagctacggccaggatattagtgtggctttaattagtgctttttgtcctgaccactgagatttcagtccagtgttaacttccggtgattatctgtgctctctagctggttcttccagttatcttgtttaatgaaattacttcatctcaaa

SEQ ID NO: 163459 - DNA, 682 bp, Zea mays
  Clone ID: MRT4577_80651C.1
atggcggcgtcgtccccagcgcggctctattaccttctcctgctggttctcttcctcgccacgccctccgtacgcgcttcctcggagctccggcgccgcgtggaggcgccggcggcgttccacccggcgtggccgaagggcgcgcgcggcaggagttccacgtgccgccaacaaagggcccgatcagggaacaacggaggagcaggccgcgcggcggtggcaccggcgcgtggaccttctcagcgatgctgccccgggggttcgtgccgccgtcgggctcgtccgactgccacaacgacatgccggccaacgccgccgacccccaattcttcgcctgtagcggtgccgggacgccgtgacgacaaagaccggacgccgtggcgccaccttgcgtgcttggaccaagaggggtgcaaatccaagagtaaccgtgtccgttctctgaaactccggaatcgcgcgtctctctggtaaccttcccctgagggctctttgcaagtgtaaatgccggtgaggcctaccatgttcttgtctagttctacctcaaacattcatccatggagccttatcccaacatttgcccgtgtcacgaacgattcggtgacttggaagtcggaactcgtttgacaggaaaaaaaaatacaagctacgtacgtagcttaatataagggcttcttgtttt

SEQ ID NO: 163460 - DNA, 151 bp, Zea mays
  Clone ID: MRT4577_80652C.1
cagtgagagggacgaccgagcggagtctagactcgagagtaacctcgacctccctgatctctctcccactgtgtgagatgcgaccgatggcctcccccgacctgctcttcaagcgtgcggaacctcttctaccttggtgtgttaccaggca

SEQ ID NO: 163461 - DNA, 1078 bp, Zea mays
  Clone ID: MRT4577_80653C.1
gcgagcagggcgagctgttggactcagccttatctagtcaacgcatccactcacttcctttcgtcctcctgctctctgtgtgtgccacgcaagcgccctatccaccattagagtcgctcgttctacaacgacgtgctagctagccgatggctacgaccacgaaaccactcagatcgtccgctgctctgccgcacggggatgctggatcggatcgatccagtttaggagcattggaataacatatcttgtattcaagtgcaagtattgtaaggaacaatggaaggagggcggtgctactcgttttagacaataccttacatcacgtggacgaaatgtgcaaggttgtcgcaacgttccgtcggacgtttgcaattactttcgacgggagcttgacaagggacaatatagaagggaaagcaagaatactggaggaggtatgaaagttagcattggcgggttcacctcaatgatgacgatgttgagttgcaggtcgcattacatgctttaagagatgaggaggaacttaggaggcatgcttgcgcgagtagtggcacgtatgagagggtgatggctcctcccatgggggtgttcatggcatgtttggaagaacaccttttaggaaggagaaaccacgcatggtccgaccaaggattgataaggcctcgttttcgaaggcagtaaggaatgacgtccatttcattggtaagcctattggacccccgagtctggtagtgatagacaaggttcatcttcaccccttcttccctatatcaattatccaattggtgaagtgactcagtaacccatgaggtgggtgtatcaatgggaggagcctgagtactaaatattaatggactcatggagtacgacttctgcgtggaccagacagacttggacggagtacaagggaatgttgatgtgtgagcaaggtattatattattctcatcggaagggtataatgtgacatatgatcaatggaatgcttacccgtgggcatgatgttcaccggagggtgtattgtatctttgatgctattcatgaactatgaaattgtggcattaatgtatttgcacttct

SEQ ID NO: 163462 - DNA, 174 bp, Zea mays
  Clone ID: MRT4577_80654C.1
caaaagatggtcgtcaagcgggcgtcgtctaacaaacactaacgtgggtttgtccaagccaggcccgggcatccaaccccttcttggggttttaaaatatttggacacacttttaagcttagggaaggttaattaggttaaagggggttgtttggaaccctttggtgccttggc

SEQ ID NO: 163463 - DNA, 589 bp, Zea mays
  Clone ID: MRT4577_80655C.1
ccggccggggcatcccctcccacagagccagatgtatcgcggttacatttatctggccgtaactacgatcccgagacaagaggtcctaaactaggctttgaacaagacccaagcctcagtcttgaaaccccgacccttgaagagcaggctgccgaagtcgaggccgagattaaacaaaaggcggcagaggaggctcaggacgataagggtgtcgatctgttcaaactacaaccgaagaagccaaactgggatttgaagagggaactcgatacgaagatggaagtcctcaacgtccgaacagacaacgccattgcgcgcttggtacgcgatcgcattactggtgcacaaaaagcggccaaaaaggacagagcagtcgacgacgctcaaggcactggtgaagcgactggtatggatggtgtggcgctggtggaaggtctaagagtcagggaaaaggaggatgaggatgaggagcgtcgcgaaagggaggaggaagctgcactcggcgcataaaacaatccagccatttcgctgtacgttgaatcactatttttttcatcgtcccaaaaaaaaaaaaaaaaaacccgcggcc

SEQ ID NO: 163464 - DNA, 473 bp, Zea mays
  Clone ID: MRT4577_80656C.1
gccgcagcaggaggaggacgcggacgccccgcccgtcctgacaccgctgctggggtcgccggacggcgcgcggccgtcgacgctggccaaccgttgcttcgccgtcgtgttcatggtcttcgtgccgctggtcatcgtcgtcttcgagcggagccaggccgacgtcgtggcctacgcgctctgcctcgccaacatcatcgtcatggtcgtctggctctcgccggacaccgggtcaacggtctcggccgccaagtcgctcctgcgtctcagcgacgacgaggatgaaggcagcgggggcagctccggcgcagaggacaagtgctgcgtctgcctcgccggcatgcgggaggaccaggcgcttcgggcgctgccgcggtgcggccacagcttccacgacaagtgcatcggcaagtggctcaaggcgcacccaacgtgccctgtgtgccgggccaccgccgtgccgaattcgagct

SEQ ID NO: 163465 - DNA, 140 bp, Zea mays
  unsure (1)..(140): unsure at all n locations
  Clone ID: MRT4577_80657C.1
cgagagtgctaaacaacacgaactgagccgtttgagggttgaggaggcaagtcgagaggacccatcgatggcctgcttgaagaaccactggtcaaggacaagaagatgatgagggacaacctgtgtagncagcacttgac

SEQ ID NO: 163466 - DNA, 557 bp, Zea mays
  Clone ID: MRT4577_80658C.1
tttacgcgtgggatccaatagctgaatagggacaacaataatggcctaggtgagaaaattgttggagctctattcatagtgaccctcatcctaggagccccatgtgtgctagcaggagaaattgctgaaaaggtcagcacggtagttgccaaggcagatgactgcaacaagcaatgtgagggtaaggggacgcctgccgacatcgaccattgcaaggagaagtgtagcctcaccgagcacttcagttatgcgaccatcggtgtaggtgcctgccgtcagaactgcgacaagctaaagaatgaccaatcctccttcaactcgtgtgaagagaaatgtcgtgagaagtatgagggtaggttgtcacagatcaaacagggtcagaatctttagggaggcatgcccaaagtattatccaacgacaaccgatagaccacactcacatgggtgatgtgtcaacccaacatcaacaaccatatttttgcccaaagtgaaccgctcgacagcgaagccccacgcaatcctttgtatggcatgtctttttataaatctttgtagct

SEQ ID NO: 163467 - DNA, 462 bp, Zea mays
  Clone ID: MRT4577_80659C.1
ctaaaccggcggaactgtcgatgttcaagaactacgtgtgcacttctatgactcttatgagcttaagcttaccaacaagcttgaaggcgccggtggaactgctagctgtacaccaaacaggatctgtgcatgaaggaccagctcgtgcagcaatcactgctaaatcgactgctcaagactgacgctgcactacaataggttatgaccaggtgaaaacgcttagatgaaagacaccgctttctggaacacactccagctaacaagtatatgtacactcttgctctaataggaataaacacagacgctgctcatgaaaaacaccggtgcctgagagaggctgctgccagctgaccgtaaggcaccaatagcagtctgggtacccaggttgcagagccacaggaggactctcatagtgaggctgacgttcttgatagattgctgagatgactgtctgcatgcaga

SEQ ID NO: 163468 - DNA, 291 bp, Zea mays
  Clone ID: MRT4577_8065C.1
ggagctgcgatgtggatccatattgaccacatacacagcgcacccaatggactaattgttctgtgatcacactgaagatatgctgtaactgtacaaccaataacgcagatcaacgcaaaccataatttacagccacccgttcactctattcctcgggacgtacttgaatcataatctagactatccttcatgaagtgcgcttcccagtttagcaatcatggcatgaccctatgtcttttgccttctggcttggaggagcttctgatcttgtgctgggtgaccataaggctg

SEQ ID NO: 163469 - DNA, 361 bp, Zea mays
  Clone ID: MRT4577_80660C.1
atggacgctcgcagctctcggcgcacggcccagcttccttcaaaatgtctactgttcacgaaatcctgtgcaagctcagcttggagggtgatcactctacacccccaagtgcatatgggtcagtcaaagcctacaccaactttgatgctgagcgcgatgctttgaacattgaaacagccatcaagaccaaaggtgtggatgaggtcaccattgtcaacattttgaccaaccgcagcaatgcacagagacaggatattgccttcgcctaccatagaaggaccaaaaaggaactttcatcaacactgaagtcagccttatctggccaccttgagactgtgattttgggcctattgaagacacc

SEQ ID NO: 163470 - DNA, 822 bp, Zea mays
  Clone ID: MRT4577_80661C.1
atgtcgagggtatggtacagtcgtttcgcctcctacttggcctccattggcttcgtcgaggccaagtcggacacgtcactcttcatctaccggcgcggcgacgacaccgtctacctcctactctacgtcgacaatattgtgctcacaacatccaccgccaaccttcttcagcgcacgatcgttgcccttcagcgggagttcgcgatgaaggacctggggcctcttcaccacttcgtcggcatcaccgctgaacgtcggtcccagggtttcttccttcaccagcgccagcccgacatcgcctacaccgtccagcaggtgtgcctgcatatgcacaccccgcgggagccccatatcatcgctctcaagcggatcctgcgctacctcctcgactccctcaactacggcctccttctccgaccatccccgacgtcggagctcatggtctacatcgacgctgactgggctagctgtctcgacacacgccggtcaacctccggttatgcagtgttcctgggcgccaacctcgtctcctgggccgccaagcgacaacccgtcgtctcctgctccagcgcagaggccgagtaccgcgctttggtcaacggcgtggctgaggcctcctggatgcgccaactttttcacgagctccacagccctattcagcgcgcaaccctcatctactacgacaacgttagcgcggtctacctctccactaacctcgtgcagcatcagcgcacggagcacgtggagatcgacctgcacttcgtttgcgagcgtgtcgctgccggtgacgttcgggttctcagcgtctccaccacgctgtag

SEQ ID NO: 163471 - DNA, 157 bp, Zea mays
  Clone ID: MRT4577_80662C.1
cacagactccggcacaaactctagcccgagcgcgactgatcttcaaatcaccattccgcccaccgatcgacattcacgccagtctcggtctcttccgaaggcgtcccgcgcggttgttttagaggcgaggcggaagattagggagtgcatcttcgtc

SEQ ID NO: 163472 - DNA, 527 bp, Zea mays
  unsure (1)..(527): unsure at all n locations
  Clone ID: MRT4577_80663C.1
aactcagtcggatcctccccgggctcgcaggaattycggcacgagggcttcgatcccagcyactctcccaaagaagatgggccagttagcatccatcctccttcaatccgaaccaagcgttggctctsctsctsctccactscccaacatcctccaactctgctctsctsctcatyctctcgatctcctctcgctctccggttcccaaatcccactcctctctcgacctctcgctcggtcattcatcgtcgtcgggcaattctcggtcgtcgcctctctcctctgngtgaagtycctctctgtctctctgctcaactctctcgatctctgggtgaaatawgcycatctctatcycaaaagahctctcatctatctcccaagawcyarctctatctctctatctccgtsagtyctctctcdgtyagccamactawatytctaaagctcactctaggtyactctctctctatctccagatacaaaaagrgasagttygaaatctctcsagggatytatctctckagagt

SEQ ID NO: 163473 - DNA, 281 bp, Zea mays
  unsure (1)..(281): unsure at all n locations
  Clone ID: MRT4577_80664C.1
cnttcaattaaacnncaaaaaggacacccggnngggagcgctggggggaaaccggcgaancagccangccaacagnananaggggacgcgccaannncccacgggggcaaccagccagaggggcaacnggagcaacgcggcaannacaacaagagaanaanagccgacccagcggacaaacgaggcgggccaacaaaaccaacccaacacgaggnagggncnanaaaannccaacaacacacngcnnnncaacnggagccccaccaagnccccaaggaagc

SEQ ID NO: 163474 - DNA, 226 bp, Zea mays
  Clone ID: MRT4577_80665C.1
agccccttcaggtctagatctgcctgtgacaactgctgctgggtgacccgtgaccagttcttaccccaggatggggaccatacgcagctcagccttgatcttggcctgcttggctcttgcttctgctgcctctgagggagccttcaaggtttcagaccagagagagatgaagccagagcacctcttccagcacctccatgaagtaggctatgcagcacccccttcc

SEQ ID NO: 163475 - DNA, 175 bp, Zea mays
  Clone ID: MRT4577_80666C.1
gattaggcgtgcggggtgattggagttcttcggctgctttttatctagatggcttgccgccatgtacatataggattttacggtgatgagatagggagcgataagctctgctctgcttgctttcttttgttcctctttatatactgatgaaacagcttgatttggtcgttttgag

SEQ ID NO: 163476 - DNA, 121 bp, Zea mays
  Clone ID: MRT4577_80667C.1
cgcgtgccgatagcatggcaatctgcattgaacgataccatagctccagagtttatctacctgttagttgactttataaagaagtggtagggtatcaaattccaagacgatgtccttagta

SEQ ID NO: 163477 - DNA, 269 bp, Zea mays
  Clone ID: MRT4577_80668C.1
ggatgaccccaacgtggcatttgtcccgattcataatcacataacaactgattcctatttctctagagccatgaacgctctactaccaccggcggttgcaacaactacacgcccggctcgggctagggttccagacccatactgagttaacagcttgaccggtctgcggtctacggagcgacacggtgcgaatgaatttgaacgagtcataatctttctcatccactagctatggccggtgagggattctgagggtcgagcggaccaca

SEQ ID NO: 163478 - DNA, 238 bp, Zea mays
  Clone ID: MRT4577_80669C.1
gaccattctgaaatggttttgtccaactacaatctcaaatgtggaccttttttgcgggaagcatacaaattctgaattatgtttgacacttgcttgggaggtctgaccgtctgagctattttggctataggactcccccacccgcagttatgacttatgaaacaactgtgaatcattcactataagaaacaacaatgaaatgtaacttgttttctgttaactaattgctggtttagtc

SEQ ID NO: 163479 - DNA, 821 bp, Zea mays
  Clone ID: MRT4577_8066C.1
gccggcctggccagggcaaaccggccccacctggcctctctctcctgcctcccctttcctccaaacccgcgccgccaggagcgcagccgcccaggcccgacgccctgcccagcatcgtgtcaggccgcctgagccacgccctcccccacgccaggaccattggagccgcgcccaagagccccgacgccgcaaccccgacgtcctgcaccgcgcggccgagccccatgccgagcctaggcgacacgaccgagccgccccgagccgcccgcgaccgttcttcctctacgttaatggagcttcactgcttccatttctcctccccattactctcctccatgaaaccgacgccatcaatggcgccttgaaaccgaccggccgcctctctctcccttccccgaccgtctcttcctctcccctccctccttctataaaaaccgagccatgaagttctctctccttgcccgagctcgcccaagtctctcacgctctctctctctctcgctccattgcccaccgtcgaaccaccaccgccgaccgccggagctcgccgtcgtgcctcgccgctcgccgttcggtcaccggagacacacccgagccctgttcgagctacgccaaccgccgtaccaagccttcacctagacgcacgcccaagctcgtccgccgttcgtcgcaaggttgaagacggcccaaattatttttatgtatttttgaaatcatttttgattcaatctggggattctataatcattgggctgaaatatgagcatgttgtgattcggaattcatacgcatgtgcgctatgggaatttggggagatatat

SEQ ID NO: 163480 - DNA, 336 bp, Zea mays
  unsure (1)..(336): unsure at all n locations
  Clone ID: MRT4577_80670C.1
attccccggcggcccancatcctcccactcctccnaannaccatcaccctnaattatatntctnntcnaantngtnanctgaccatntnnantngcggctgcaacananaannctcncanctncaanaaatngttnaatntngngcctttcctttcctcnctgtcaaagctggaaaagtcaattattacagtgggaagtctgttaacacaatttcttcatctcaactccacataaaccctgatcttgctgaagctcattctctcangcagtggtttgattgtggaagaaaaaattcttctactcagtctatatccaaggattttactccttcaaca

SEQ ID NO: 163481 - DNA, 3186 bp, Zea mays
  Clone ID: MRT4577_80671C.1
atggatagaagatgggtttatgggaaacaattcacacctgcatatgtgaaaggagttgaagagttcatgaattttgttactgaaagatacccagaagacacagacattcgttgtccgtgcgtgaattgtcttaatcaaaggttgcgacctcagagtgaagtagaaactcatatacacatttatggaatgttagctacatacacgaggtggattcatcatggggagtcggcagatacagaagttgagggtatagaggaggatgtcgaaggatatgataatgactttgggatacatatggatgtggacgatgatgtttacgatgatgatcatggagtacctgagatgatcggtgaactgtttgcagcggcagaggctgatggagaagagccaatatttgcaggagttcttggagattcaaagaaggcacttagtccgggttctagccattcaaaattttcttttatggtgaggatgttgtatatgaagtctcgttatcgaatcagcaatacaacattttcagcaatgatgaagctgatgtccgatggataccctaacagtgagttgccaaaatcatataatgaggccatgaaatatcttaaagaattgggccttggatacgaaaacatccatgtgtgcaagaacaattgtgtgttgtttcggaatgttaatgctaaattgaatgagtgcccagtatgcacggagtctagatggaaagatgaaactggtttgaagcgggttccacataaggttttgaggcattttccactgttgccaaggttgaaaagaatttttgcttcaaaacaaacttcagaggaaacacaatggcacaagaaagtgaggaagccagtcgccaatgtgatgagccatccagctgatggggaagcgtggaaggactttgaccgaaagtacccaggttttgcaaatgatccgaggaacctgaggctagccttagctaccgatggattcaatccatttggcaacatgagtacccagtacagtatgtggccagtgcttgtgacaccgcttaatctcccaccatgggaatgcgtgaatccaacaaactgctttatgtctttactcatcccaggtccaagatgtccaggaaaggattttgatttgttccttgagcccctaattgaagaactgctgaagctatggaagggtgtcaagacctatgatgcatgtactggtaggaagttcgaccttcgtgctgttgtactatggtgtatacatgattatccagcgctggccacgttatctgggcgaacaacaaaagggtattatgcatgtatttattgcgacaagaatccgttgtctatggcaataaggaacaagttatgctacattggacatcgtcgttaccttaaaaggacacattcatggcggaatagcttggatttcaatggtaagcgtgaaaacaaagttgtgcctggcaggttcactgtggatgaggtcctacaagagctagagaaggtgaaagatgtcaggccagggaagcaggctgacattactggaaataaaaggaagcgtagtagtgacggtccaaagatttatagccggaaatctgggttgtggcaattgccatattggaaagatttgatgcttccacataatctcgatgtgatgcacatagagaaaaatgtatgtgaaaatattctttgcacactacttaatataccaggcaagtccaaggacacacataatgcaaggctaaatttgtatgatatgggcataagacctgaactgcacttgcaacaagatggcaactcggccttcagggctccacctgctccatatgtgttggggaaggatcagaaagtcgagttttgcaagttcctcaaaggtatcaagtttcctgatggatttgcggataacctagcaagatacataagtgaagatggttcaaaggtggttggaaaactgaaaacacattcttgccacatactcctacagagaatcatagtcgttggccttagaggactgcttgagaaaatctttccacctgccttctttgatgtcatggtgcacttgagtgtccatcttcccgatgaggcaatgcttagaggacctgttcagtatggatggatgtacccaatagaaaggtacatgaaggatgttgacactagatttaaccaggatgatgatagtggtacagagatgccattgcctaatgacatgtctgtttttaagcatggtgctactcctgttggagctactaagactgagtacattgatgatgctatcatgaataagttagtttggtatgtgctacataatgctgatgaagtacaggaatatttgactctgtacagggaggagctatcgcagcaaggtgcacgtccaaatgatgttgatcgaatggttcaacaaggatttgcaaagtggtttatgtcccatgttgagaagaagcgtaatgagaatccagaattggttagcgaaggattgtgggcactgtcatgtggcccagctcggcgagttaagactagtacagcttgcaagattaatggagtgcggtttagcacagtggatcgtgagaagttcatgcagacacaaaatagtggtgtaatgactgaaggtgaacataatggggagaacatagatttttatggtgtccttaaagaggtaattgagttacaatataactcgaattatcaagtttgtcggtcggtggttgtatttcgatgcgattggtacaaccaagtaggaaagactgtgggcattcgagatgacagtcatttcaaatccatcaatgtgcagtcattttggtacaagtccgatccttttatcttggcagaccaagcgaaaaagatattttacctgcaagacacaactccacaatgtaaagatttccgagttgtgcagaaatttgaacttaggaatatttatgatgtggctgaaaaatatgagggtagtaatgatgcgcatcaggatgattattgttctgatacagagcatatagtgcaagaaggtgatgataatcaggttctgcacaatgttgaaggtggagaagccagtctaattgaaggcaatttagaggaactaataagaaaaaagaaggaagttgctattattcttgaagatagtgaggatgaggaggaagatgatacaatgtttcaatattttaatgatggtggcgacgacaacaatgatgacatgtccatagaagatgaagatgaggatttctag

SEQ ID NO: 163482 - DNA, 728 bp, Zea mays
  Clone ID: MRT4577_80672C.1
gttattcatgtgacctgaccgccattaacacactctctcctctcttctctctgagtctgaccgccccccacaagcacaggcagcgcattggtggcgtggttgcggttgggatcgccgccggccatggccgatccgtacggcgacggccgggcgctgaggagtcatcagcaccagcagcagccgccggcgcagcagcagcggcccaggctgaagccggcgctggagatggaggacctcatcagcctgctccacggctccgatcccgtccgcgtcgagctcacccgcctcgagaacgacctccactacaaggagaaggagctcggcgacgcgcaggcggagatcaaggccctgcgcctctccgagcgggcgcgcgagaaggccgtcgaggatcttaccgaagaactggcaaaggtggatgggaagctcaagctcacagagtctctcctggaaagcaagaaccttgaagcgaagaagatcaacgatgagaagaaagcagcgcttgctgcccagtttgcagcggaggctacgctgcggagggttcatgcggcgcagaaggatgatgacatgcctcccatcgaggccatccttgctccgctggaggccgagctgaaactagcccgtcaagagattgcaaaattacaagatgacaacagggcattggaccgtcttaccaaatccaaggaagctgctctgctggaagcagaaaggacagttcagatagcattagc

SEQ ID NO: 163483 - DNA, 485 bp, Zea mays
  Clone ID: MRT4577_80673C.1
aaaaaaaagggtcccccccgagagagggtttacaaaaaatccaaaaaaaaaccttgtttaggagcaacccaaaaaaagatttaaaccgggacccccaaaaaacaaccaaactggcgacaacccatgcagccaaaaaaaagtttgctggcccccacaaaaattaaaagttttaaaccccgcccccccaggcaagcaaaaaaaacttattgaaataattttataaagttcggccattaacagaaaagcaggggggccttttaacttgggggaacccttttaataaaactcggcactttggagccactcaacaaacgggtgggaatttttgacaaccggggagtccttcccaggtgggaaagaattattgtaccagtccaaaagggtttcctcgcccaagatatttccatcgaaaagggctttgaggaaaaaggaaacctccttaaaggcctaagggttgcccttaccaccaaaagcctaaatggcct

SEQ ID NO: 163484 - DNA, 2694 bp, Zea mays
  Clone ID: MRT4577_80674C.1
atggcgctcatcatcaagagctttcaccaaatcctcaagcaaaggaggggaaagattacaaaccccactccaagagggggcaacgacaagagggggaagaagaaggagaaaaagagatactacaagaagaagggctacgatgcccacgtgtgtcgggaatgggactccgacgagagctccaccgactcctcctccgacgaggatgccgccaacatcgccgtcaacaagggactcctcttccccaacgtcggccacaagtgcttcatggcaaaggatggcaaaaagaagaaggaagttgaaaaatgtgaaaatctgactaaggagcttagcatgtgccatgattcaattaccaatcttagaactgaaaatactagtttaatttctaaggttttcccagccgccattctgcgatctgcatggttcgcctgttctgatttttttcctgctgcgatctgcgcttctgcgatcgaccgtcagatggatagaagatgggtttatgggaaacaattcacacctgcatatgtgaaaggagttgaagagttcatgaattttgttactgaaagatacccagaagacacagacattcgttgtccgtgcgtgaattgtcttaatcaaaggttgcgacctcagagtgaagtagaaactcatatacacatttatggaatgtcagctacatacacgaggtggattcatcatggggagtcggcagatacagaagttgcgggtatagaggaggatgtcgaaggatatgataatgactttgggatacatatggatgtggacgatgatgtttacgatgatgatcatggagtacctgagatgatcggtgaactgtttgcagcggcagaggctgatggagaagagccaagatttgcaggagttcttggagattcaaagaaggcacttagtccgggttctagccattcaaaattttcttttatggtgaggatgttgtatatgaagtctcgttatcgaatcagcaatacagcattttcagcaatgatgaagctgatgtccgatggataccctaatagtgagttgccaaaatcatataatgaggccatgaaatatcttaaagaattgggccttggatacgaaaacatccatgtgtgcaagaacaattgtgtgttgtttcggaatgttaatgctaaattgaatgagtgcccagtatgcacggagtctagatggaaagatgaaactggttcgaagcgggttccacataaggttttgaggcattttccactgttgccaaggttgaaaagaatttttgcttcaaaacaaacttcagaggaaacacaatggcacaagaaactgatggggaagcgtggaaggactttgaccgaaaagtacccaggttttgcaaatgatccgaggaacctgaggctagccttagctaccgatggattcaatccatttggcaacatgagtacccagtacagtatgtggccagtgcttgtgacaccgcttaatctcccaccatgggaatgcgtgaatccaacaaactgctttatgtctttactcatcccaggtccaagatgtccaggaaaggattttgatttgttccttgagcccctaattgaagaactgctgaagctatggaagggtgtcaagacatatgatgcatgtactggtaggaagttcgaccttcgtgctgctgtactatggtgtatacatgattatccagcgctggccacgttatctgggcgaacaacaaaagggtattatgcatgtatttattgcgacaagaatccgttgtctatggcaataaggaacaagttatgctacattggacatcgtcgttaccttaaaaggacacattcatggcggaatagcttggatttcaatggtaagcgtgaaaacaaagttgtgcctggcaggttcactgtggatgaggtcctacaagagctagagaaggtgaaagatgtcagaccagggaagcaggctgacattactggaaataaaaggaagcgtagtagtgacggtccaaagatttatagccggaaatctgggttgtggcaattgccatattggaaagatttgatgcttccacataatctcgatgtgatgcacatagagaaaaatgtttgtgaaaatattctttgcacactacttagtataccaggcaagtccaaggacacacataatgcaaggctagatttgtatgatatgggcataagacctgaactgcacttgcaacaagatggcaactcggcctgcagggctccacctgctccatatgtgttggggaaggatcagaaagtcgagttttgcaagttcctcaaaggtatcaagtttcctgatggatttgcggataacctagcaagatacataagtgaagatggttcaaaggtggttggaaaactgaaaacacattcttgccacatactcctacagagaatcatagccgctggccttagaggactggtgaggaaggatgtatatgaagcaattgcagagctggggaccttcttcagggaactatgtagtagaaatctacagatagatgttgtgcaacggctaaaaggagatattccattgatcctatgcaagcttgagaaaatatttccacctgccttctttgatgtcatggtgcacttgagtgtccatcttcccgatgaggcaatgcttagaggacctgttcagtatggatggatgtacccaatagaaaggcgactaggcactttgaaaaatttt

SEQ ID NO: 163485 - DNA, 3339 bp, Zea mays
  Clone ID: MRT4577_80675C.1
atggccgcagttttttgggacacagcccccgcctggcgacgcggccctggcccaccaactggaagcggtgttcccatctgtcgttctattaacaggttttcccagccgccattctgcgatctgcatggctgttcgcctgttctgattctgccttctgcgatctgcgcttctgagatcggccctcagttggaagaacggcgtcgtcatgaaaacagcgaggcagagaagcttcgggcacggcaaagcagcggcgtcgtgcgcagagctacggcgagcgtggacagaacagcggcagggcggggagaaaagacaaggctgcgacctcagagtgaagtagaaactcatatacacatttatggaatgtcagctacatacacgaggtggattcatcatggggagtcggcagatacagaagttgagggtatagaggaggatgtcgaaggatatgatcatgactttgggatacatatgattgtggacgatgatgtttacgatgatgatcatggagtacctgagatgatcggtgaactgtttgcagcggcagaggctgatggagaagagccaagatttgcaggagtttttggagattcaaagaaggcacttagtccgggttctagccattcaaaattttcttttatggtgaggatgttgtatatgaagtctcgttatcgaatcagcaatacaacatttttagcaatgatgaagctgatgtccgatggataccctaacagtgagttgccaaaatcatataatgaggccatgaaatatcttaaagaattgggccttggatacgaaaacatccattatgcaaggagtctagatggaaagattcgggttccacataaggttttgaggcattttccactgttgccaaggttgaaaagaatttttgcttcaaaacaaacttcagaggaaacacaatggcacaagaaagtgaggaagccagtcgccaatgtgatgagccatccagctgatggggaagcgtggaaggactttgaccgaaagtacccaggttttgcaaatgatccgaggaacctgaggctagccttagctaccgatggattcaatccatttggcaacatgagtacccagtacagtatgtggccagtgcttgtgacaccgcttaatctcccaccatgggaatgcatgaatccaacaaacggctttatgtctttactcgtcccaggtccaagatgtccaggaaaggattttgatttgttccttgagcccctaattgaagaactgctgaagctatggaagttcgaccttcgtgctgctgtactatggtgtatacatgattatccagcgctggccacgttatctgggcgaacaacaaaaggaacacattcatggcggaatagcttggatttcaatggtaagcgtgaaaacaaagttgagcctggcaggttcactgtggatgaggtcctacaacagctagagaaggtgaaagatgacaggccatggaagcaggctgacattactggaaataaaaggaagcgtagtgatggtccaaagatttatagtaggaaatctgggttgtggcaattgccatattggaaagatttgatgcttccacataatctcgatgtgatgcacatagagaaaaatgtatgtgaaaatattctttgcacactacttagtataccaggcaagtctaaggacacacataatgcaaggctagatttgtatgatatgggcataagacctgaactgcacttgcaacaagatggcaactcggtctgcagggctccacctgctccatatgtgttggggaaggatcagaaagtcaagttttgcaagttcctcaaaggtatcaagtttcctgatggatttgcggataacctagcaagatacataagtgaagatggttcaaaggtggttggaaaactgaaaacacattcttgccacatactcctacagagaatcatagccgctggccttagaggactggtgaggaaggatgtatatgaagcaattgcagagctagggaacttcttcaaggaactatgcagtagaaatctacggatagatgttgtgcaacgactaaaaggagatattccattgatcctatgcaagcttgagaaaatctttccacctgccttctttgatgtcatggtgcatttgagtgtccatcttcccgatgaggcaatgcttagaggacctgttcagtatggatggatgtacccaatagaaaggcgactaggcactttgaaaaattttgtaaggaacagggctaggccggaaggatcaattgctgaggcatatatggcaagtgataccttaacattttgttctaggtacatgaaggatgttgacactagatttaaccaggatgatgatagtggtacagagatgccattgcctaatgacatgtctgtttttaagcatggtgctactcttgttggagctactaagactgagtacattgatgatgctatcatgaataagttagtttgtctgtacagggaggagctatcgcagcaaggtgcacgtccaaatgatgttgatcgaatggttcaacaaggatttgcaaagtggtttatgtcccatattgagaagaagcgtaatgaaaatccagaattggttagcgaaggactgtgggcactgtcatgtggcccagctcggcgagttaagactagtacagcttgcaagattaatggagtgcggtttagcacagtggatcgtgagaagttcatgcagacacaaaatagtggtgtaatgactgaaggtgaacataatggggagaacatagatttttatggtgtccttaaagaggtaattaagttacaatataactcaaattatcaagttcgtcggtcggtggttgtatttcgatgcgattggtacaaccaagtaggaaagactgtgggcattcgagatgacagacatttcaaatccatcaatgtgcagtcattttggtacaagtccgatccttttatcttggcagaccaagcgaaaaagatattttacctgcaagacacaactccacaatgtaaagatttccgagttgtgcagaaatttgaacataggaatatttatgatgtggctgaaaaatatgagggcagtaatgatatgcatcaggatgattattgttctgatactgagcatatagtgcaagaaggtgatgataatcaggttctgcataatgttgatggtggagaagccagtctaattgaaggcaatttagaggaactaataagaaaaaagaaggaagctgctattattcttgaagatagtgaggatgaggaggaagatgatacaatgcttcaatattttaatgatggtggcgacgacaacaatgatgacatgtccatagaagatgaagatgaggatttctag

SEQ ID NO: 163486 - DNA, 641 bp, Zea mays
  unsure (1)..(641): unsure at all n locations
  Clone ID: MRT4577_80676C.1
gaaaaaggaaaatcttgggggacccattatccgggaccacttattatcgttggaccacgagctcccgatcccgaccaactaactggccacaaagcaatcgccaagaacatcgatgtccactcctgacaacccatatcccaatcaatctaccacctttccggccgttccacactgatcggatgggggccttgaccttccacccggccgcctttttcccacgaccacgagaggcagcagtgacagcgaggcagccgctccaccattactgctcgccgcctttccggaccctcgtccctagaactacaagaccgtgccttctcagggccaggtcctccaacgggctcccgcagatcggcggcgcctcgttcggcagcagcaatggtatcgcgtcgcgcgcctcgcctgccgttggaatatgcgagcgtgcatgatgaccgactgtacgcagaatcacgtactgcttcctggccgcatatgcagaggtgntggatggccccccccccccgcagatggggcaccggggcaggggcagcggggagcgagcaccgtcagcatcacggtcgtcggcgctnccggcgacctcgccaagaagaagatcttcccggcccnttcgcctttctacgagggctggtncccggagg

SEQ ID NO: 163487 - DNA, 1569 bp, Zea mays
  Clone ID: MRT4577_80677C.1
ctacttggtaatgtttttctcaggagcgaccgatgaagagggacgatttgaagaatcaggagcagcattcacgtctgcaactatgtcgttaggaacaatcacaccgggtctcctcatcaagattcgccccgtgcgaatggctttgtccatagccctgtcgcgctgggccctcaaaatagcggaagcatcttcagcagccttaatagccagccgagcagcttctagctcctggacgactgacctcttggaagcgcgcagatccttgatgatagaatctttgctcgataccaactgcctaagacgaatcatatcatccagggactcttgcagcttgtaacaatgattatccaagtcctccatagtgaaacgatggctcctctccaagatagtcaaagagttgctggcatcgcgatacaacctatcaaggttgtcgcgagaagttgcaagggcacgtttttcctccttttcagagccaagctgagcattgagagtggaattcagcatgttggcatcattcagagaagcagaaacccgagccaagtccgtctgaccttgagaatatttctcttcaagatcagagtactgtcgggccatatcagcattcgccatctccaactcagatactcgctgatgaagcagcactggattccaatgtgttagagacagagctctttctgggacagagacaccctgcgatctcagctgaccagccatctcgtcaaccaacgcctggagattggagaagaacgaatgaacccccaaatcatgggaattcagttgatgacttgatgaaggattaccaaccgaagcaatctgcagagcatcagtggggaccaattcagcatcaccagcagaaatcaaaactctatcatcaggtgcgccggcctctaaggcgacctcctgacccgaagctcgtgctgctgccatgcaaccagaatgtagaggagaagacccgacatgaacatccatggaaatgtgagaaggagaacccgctcggacatccttgggggctaggtcatagctcgcgctgcccacccgagccggatcatcaccggcaacaccctcgggggctgggtaaacgcaagcgccatccttggggaccgagttatctatatcagccacctctaaggctgaaggattttcaaccacctccatgggaacggagcaatccagatcagccgtttggctcttaaaaccacgctccaaggtcgatgaggcacgagacgctgcttgggataactctaacccgacagcaggcacatcagcacaaacctccatcgttccaccatctgccggctttgacagcagatcttcagggaccatatcttcgagagtctgatcaaaatttgccagagacaattcttgcagaccaacgagagcagacaaagctagagaaggaataccactactctccccactggctatatagcgccgactgttcttccgaattaaggggatttcctcctcctcctcatcttcatcaatattacagatagtacacccattggggtcaggatcatcaaggttacacccattggggtcaacatcatcaaggtaactgaaagtcgc

SEQ ID NO: 163488 - DNA, 1058 bp, Zea mays
  Clone ID: MRT4577_80678C.1
ccggccggggacaacccatatcccaatcaatctaccacctctccggccgttccacactgatcggatggcggccttgaccttccacccggccgcctgcttcttcccacgaccacgagaggccgcagcgacaacgaagcagccgctccaccattactgctcgcctctccggaccctcgtccctagaactacaaggccgtgccttctcagggccaggtcctccaacgggctcccgcagaccggcggcgcctcgttcggcagcagcaatgaggtgctggatgggacgccgacgggagatggggcaccggggcaggggcagcggggagggagcaccgtcagcatcacggtcgtcggcgcctccggcgacgctcgccaagaagaagatcttcccggccctcttcgccttgttctacgagggctggctcccggagcattttacagtgttcggctatgcccgtagcgagatgaacgaccaagagctcaggaacatgattagcatgaccctgacgtgccgaatcgacaaaagggagaactgcggcgacaagatggaacagttcctgaagaggtgcttctaccagtctgggcagtacaactcggaggaggggtttgcggagttagacagaaagctcaaagaaaaagaggtaaaatatctttttcgcttggtctgccaagataaaaggatcggacttgtaccaaaatgactgcacattgatggatttgaaatggctgtcatctcgaatgcccacagtctttcctacttggttgtaccaatcgcatcgaaatacaaccaccgaccgacgaacttgataattcgagttatattgtaactcaattacctctttaaggacaccataaaaatctatgttctccccattatgttcaccttcagtcattacaccactattttgtgtctgcatgaacttctcacgatccactgtgctaaaccgcactccattaatcttgcaagttgtactagtcttaactcgccgagctgggccacatgacagtgcccacagtccttcgctaaccaattctggattctcattacgcttcttctcaac

SEQ ID NO: 163489 - DNA, 371 bp, Zea mays
  unsure (1)..(371): unsure at all n locations
  Clone ID: MRT4577_80679C.1
tcacccagaacagaaggccacctttttccctgaagccgaagtccgtgagtccctcggcacgaagttcggtcgcctcaaggaacaggcgaaagacatggcctccaggcaccccgtcgctggagccgcggccgtcatcgctgtcagcgccgtgggcgcctacttcttgtggcccgtggcagccccggccgtggccatgatgagggggggtggatccgtttttttttttgncncccgcgcggcgnnncncgcgaagaaggagcngnacttcaagnncncgcccaccgggggcgnngcggcggnggncgccgnnnnggcgnagcngcgcaggcagaagaagaacaagcngnncgngaacgagcggngggccggac

SEQ ID NO: 163490 - DNA, 227 bp, Zea mays
  Clone ID: MRT4577_8067C.1
agtgactttagcaataggtgatggggcaaatgatgttggcatgcttcaagaagctgacataggggttggcatcagtggtgctgaaggaatgcaggttactaattcgatgctatataacttttgctgtttgtgcccatgattttttttattatttgtttcctatgatgttctaggctgtcatggctagtgatgttgctgttgcccaatttcgctttttggaacggtta

SEQ ID NO: 163491 - DNA, 268 bp, Zea mays
  Clone ID: MRT4577_80680C.1
ccggacgcgtgggtctccgccggcgtcatgctgtccgtcgtcttctggatggtgcacacacggcaccggcggcggcgcgccttgtgcaagtagctgtgactgaggagatcttggtggcgtgccggcgccacgatttagattgagctgttctggactgacaaccacggctctgtagatgaagcctcgtgcatccgattcagctatgtacagtatggtattgtgcatctgaaagtgaaaatcgaaatgacgcatgtggtgtggttgctct

SEQ ID NO: 163492 - DNA, 668 bp, Zea mays
  Clone ID: MRT4577_80681C.1
gccggccgggttcgggagccaaacatctaccaacgactcatggagagagagcacgacacactcacttagctaggagcaatagcatcactggcggccatgtcggcctacatgatctccacgaaagctctggcggggaggtctaacggcctgacgaacctcggccgccgcacctcctccttccgcgccatctgctccaacaagaaaatcaagaccgagaagccctacgggatagagagcggccagaccgaccacgacgacatcaacaacaccaaagggaaagggcaaggtcgagtactatgacgcccacatagtactacgagaacgtacacagatacagcccaaactacaacgaggatgactgtcactctcacaggcgagctgtacaacggcgtaactcgactgggcttctgatcatgttctcgtcatacctcactgggatcctcgtgagcggaccctcctgctcatctacaacagcacctgcacgactccgccgtaaggatatccaatgcatgaacatctatagctaatcttcatgcataaagcatggtgtactgtccatgatctgaacctgcctatggatgctcaaacttcgcgatgtaacaatgaacaatgtcactatccagtagataagctggacgcaatatataaaaaccgcccttccgctattg

SEQ ID NO: 163493 - DNA, 389 bp, Zea mays
  Clone ID: MRT4577_80682C.1
gaagaagatcatgagcagcgccaccgcgtcgagcgccaggccgcccagcagcagcgcgtacgtgatgccgacgtcgacgggcaggatctggtgggcgggcttgtcgaggaagaagaagatgaggagcgcggcgacgaggcagcaggagcagatgcagcggaggacccagccgcaggtggtgtaggcgacgggcgccttggtgtacaccatgtcgtagatgaagttgagctccacctcgatgacctcgaacgcctcccggatggaggttgtcgttgtcgtctcctctgtgtctgtgtctctgacgaagaaggcctggctgagccgcctctccttgaagctgaggatgacgttgacgaagaggcggcgggaagatgagggaagaagtcgta

SEQ ID NO: 163494 - DNA, 564 bp, Zea mays
  unsure (1)..(564): unsure at all n locations
  Clone ID: MRT4577_80683C.1
taccaattggaacaggtcaaggttcggtactgtgatggttcatctttcactggagatgttgaagaagttgaccctgcaacaaagctacattatagaggtgccaggatatggcaagctgtcatggacgacctgcttgccaaagggatggacaaagctgaaaatatttcatgaccttctgccgccggctgcgagggttaagtgcctttctgatgctgggttcttcattaatgagaaagacgttgcaggagttgggtacattgctgcctttttcaacgacgtcgttacaacacatgggtcagcaaagaatttgccgccttcatgcacttcgacgttacctccaggaacgtgctttttcccccagaacgaggtgaaacagatacagacacctctgttcatcctcaacgcagcatatgattcatggcaggtaaggaacattttggtgccaggagtagctgaccctcatggaaaatggcatagctgtaagcatgatatagaccagtgctctgcatcgcagctacgggattcaggggtgattntctgaaggaagtggcagaactagggaac

SEQ ID NO: 163495 - DNA, 1796 bp, Zea mays
  Clone ID: MRT4577_80684C.1
cgaagggacactgcgtggggagggcaagggcggagagcgctcagtcacgcggtggggggaaaacccgaaaagagaaagggctgtgtacctttcgctttcgttgcctggctctggtattgggttccccgttctgctgctcagctcagcccagccccagagcccctgacctgccgtcctccctccttccctccccgtgagtcgccgtacggcggtacgggatcgccaccgcggcgtccagggatggcggacgggagcctctacgcctggtggtgctgtgccttgggctgggcgctggcgcttgtcgcagcggacggcttcctcgtggacatcacctatgtggaaagcgccgtggccaaaggagcagtgtgtttggatggtagtgcgccggcgtaccatctcgcccgcggctccggctccggtgagaacagctggctggtccatttcgaggggggaggatggtgcaacaatgtcaccacctgcctgcaacggaagcgcactcggttgggttcgtccaaggagatggcgacgcagattgccttctccggaatcctgagtgacacgccggatgacaacccagatttttacaattggaacaaggtcaaggttcggtactgtgatggttcatctttcactggagatgttgaagaagttgaccctgcaacaaagctacattatagaggtgcgaggatatggcaagctgtcatgggcgacctgcttgccaaagggatggacaaagctgaaaatgctctaatttcaggctgttctgctggtggtttaacctccatactacactgtgacagatttcatgaccttctgccgccggctgcgagggttaagtgcctttctgatgctgggttcttcattaatgagaaagacgttgcaggagttgggtacattgctgcctttttcaacgacgtcgttacaacacatgggtcagcaaagaatttgccgccttcatgcacttcgacgttacctccaggaacgtgctttttcccccagaacgaggtgaaacagatacagacacctctgttcatcctcaacgcagcatatgattcatggcaggtaaggaacattttggtgccaggagtagctgaccctcatggaaaatggcatagctgtaagcatgatatagaccagtgctctgcatcgcagctacgggtattgcagggattcaggggtgattttctgaaggaagtggcagaactagggaactccgactcgagagggttgttcataaactcatgcttcgtgcactgccagtctgagatacaggagctatggttctcatctgactcccccgtgctcggaaacacaacagtagcaaacgctgttggcgactggttcttcgaccgcagctccttccagaagatagactgcccatacccttgtgactcgacctgtcacaatcggatctacgatgactcatcacaagcatagcaattacagtggcctcacttcgtactgccattcaccatgttattacatttgacgcttccagcattgctaacagtagggcaatgcgttgatagccattgattttttttttctttttacgaataagatcaggtgccggcggctttaactcggttgctaccggaaagtgagcgtgcatcttccgacggtacatggcatggtttatctggatggatgaatcgataatcataaattcttaaaaacacaataaatattctagaatttttatgttgtgcaaccgtgacttattttctctttgttaaaaaaaaaaagaaaaagaaaaaaaaaagaagaaaaaaaaacccagggggggcccggtaccc

SEQ ID NO: 163496 - DNA, 200 bp, Zea mays
  Clone ID: MRT4577_80685C.1
caaagaccgtggagctcaaggtgtccatgcactgctacgggtgcgccaagaaagtccagaagcacattttcaagatggactgcgttactttgtttgaggtggatttggagaagaagaacgtggtcgtgatcggggattttttttcgtacgaggtgctggcgagctcttccaaggaaaattctttgaactgtgggtggtcc

SEQ ID NO: 163497 - DNA, 536 bp, Zea mays
  Clone ID: MRT4577_80686C.1
ccggccgggccgggactgtactccgcatgatgccgccgtcttctgtgtctctagcacgcttacatcctccacttatgatcctcgctgcaattgcaaggttaatcttcacctccagtcatgcggaaggaaaacgatcgcatctgcatatggggccatgtgccgacggctactgtggactcgcgactagcacacgtacacctgattgatcagcgtctccacgtcttgatgacggcgtgatccatacgcctgagaaagacgacggtgaaatgaacacagatcgcgttgagaagttaggaggcttgacggatcaaggctgactcgaagaggtaaatgacctttgatataggtctgcgctagtttggtacaacaaagtactattgtaccggtattgatggccctggacaccgctactgtatcatgaacatgatcactgatacctcccagggtgagtgtgctgtccttatcattgactccaccactggtggttttgaggttgatatctcctgagatgttcacacgcgtgagcatgctctcct

SEQ ID NO: 163498 - DNA, 427 bp, Zea mays
  Clone ID: MRT4577_80687C.1
gcacactcggtctgggcgttatttttttaccatggttgggtcacaggtccaggcaccaccacctcacaaaacctaatgcaaagaattgtccgttcatgccaaggtatatgagcctacggaaaaaaaatgagagaatgggtggggaatgaaaactttggcacacaacacgtttttagcaccatgcagatgaagaaatgaggccattttaatggtggcccctggttaatgcacactctagaccaaataaacctaacttacctactggatcactcggatcaatctcctaaaacatacctttccaagtggggagagaagtgcctttaaataaaatatgcttcaagatgccttttacaccaccaagcgcttggatgacatatgttctgaacatatttagagtccaaagcttcccatcatgccattgatgtgg

SEQ ID NO: 163499 - DNA, 232 bp, Zea mays
  Clone ID: MRT4577_80688C.1
gagaaaatacacaatctagatgactctgccagacatttctcatgctacgctatgccttcccagacgcacatccctgtagaacctcacaaaaccctgcacttatctgccccacaaacccgagcgcgacgccgcctgtacacactagcgagaagatgcatcggcaaccctgcaggacgacatgcgactagccacgatcggacaagcgtcctacatcactgagacagtacacctg

SEQ ID NO: 163500 - DNA, 345 bp, Zea mays
  Clone ID: MRT4577_80689C.1
cgccattccgctccttcgtctatgttgaggaatcctggggtttgatggtgtgaagcgaggcccgtgtgcatcgctagccaggtgtttagtcgaagatttcattcaaagaacgtcatcgttcgtgcgattatcgagtcaaactatgttgtggtgagccgattcactattcatgttattggttcgatgcttatattggttctagatattagttgataattatcttgtttgttgcatacacgctggtggcgacgtgagagtgttcacgattgtaaaatagatgtagcttatatctatggtgaggtttaggtggcgatgcatatatctagtatttgaattggtttgatg

SEQ ID NO: 163501 - DNA, 122 bp, Zea mays
  unsure (1)..(122): unsure at all n locations
  Clone ID: MRT4577_8068C.1
gagaatcatagctctgaggctgctcacatggggccggcaccaacccctattttgggtgtgcgtcaacngcgaaggcagagatggcgtccgaggccgctgcggaggtcacggccgcggcgctc

SEQ ID NO: 163502 - DNA, 122 bp, Zea mays
  Clone ID: MRT4577_80690C.1
agggctagaagaaagatcaatggtaggggtgattatgttgtaagaaaagagctgtgtaaacaaagaagttgactattggatcaaattgctgttcaaattagttaaactgatgcacagtgaga

SEQ ID NO: 163503 - DNA, 251 bp, Zea mays
  Clone ID: MRT4577_80691C.1
tcttcctctcaccttactcattaattttctgtaccatatctatcctcttatctaatccagtctcgagagttccattgactccacttgacgttacacgatcctaaaactctaccaccgtaactagtaccgtgactttaatcatgcatcacacgtcaaatatactatcgatattaaacttatagcatctctaattacaaacaatctaactgtcatctaatgatacaaacgacaaatctttttaaataaccctt

SEQ ID NO: 163504 - DNA, 464 bp, Zea mays
  Clone ID: MRT4577_80692C.1
gggcggggccgttccgccgttctctccgcgctgattctgtgtggcgttgacctccgcagtgccctagaatcggaagttcgtggcggttggcgtgttcttcgcggagctatttgaggatgctgacccgcgagctcgctgaggatggctactacggggctcgggtccgcgtgacccccatgcgcaccgagttcagcgtacaggccacccgccctcataacgtgctctgcgagaaagggctgatgatcacggagcttgcttgtgtggttcagaagcgctacaaattgccggacggtggtgtggagctctacgcatggaatgcgatctttcgtggcctctgcatagttgacgaaacccagtcgctgcgatacaagcttcttgctggacgctgccgagtaattggcatgctgtggcgcttgcaggttcgtggtgatgagtgccgctaccgtctgtgaggctattggttg

SEQ ID NO: 163505 - DNA, 190 bp, Zea mays
  Clone ID: MRT4577_80693C.1
acgatcgacaccatgagggtgtcgctcgctgctttcgctctactggctctcggtgtcagcgccagggttacgcatacaagcggtggttgccgctgccaaccaccgtcaccggctcatctaccgtcgccggtgcatctgtcaccttcagctcaggtgccacctgcagggcatatcccacacgctggtacac

SEQ ID NO: 163506 - DNA, 294 bp, Zea mays
  unsure (1)..(294): unsure at all n locations
  Clone ID: MRT4577_80694C.1
ttgatcactgagcacaaccactggngttttttttaatcctcncgcaanaacctaggcgactatttatatcggcggcgtgggtccacctcacttttaccaatggacgtcatgtgtgttcacagaacaatgatattcttgccttgcatctgcatgtaaacattgatatctttcagtcacatactctacctggtttcacccacaaacttactaaggataaactaaaaataaaaccataaaaagttactacaaaacaatcttcaagccaaacacctatttccatcatcatcacaaaca

SEQ ID NO: 163507 - DNA, 519 bp, Zea mays
  Clone ID: MRT4577_80695C.1
tcgaggctcagcaggcggcacagtaggacgacgacgacgagcagcaggatgtcgatgacgctcaacaggacgcctcaggttctggcgcctcaggttcgaggagcatctacctgcgaggacgcctcaagaagagaggagggaacgccaaaatatggaggcgaggatggagacagagcggcaggcccacctgacagaccagcataggatgacagagatgttccaatacatgcagagccttggcgccgcacagggtttcgctccgccacctcccttgttccctacagttgaccatgttctcttccatactcctatgagtataaaaattgtagttagatgttggtaatgcatatggtataacacatgcaatctcttctctatgcagggccaatctggggtggcatccaacaaccctcatggatcgcccacctcatcgccgcaccagtccagccgcccacctcgatgagagttatgctcttagtggtgaggctttagaacttatgttgaatacttatgtcagag

SEQ ID NO: 163508 - DNA, 354 bp, Zea mays
  Clone ID: MRT4577_80696C.1
gtacacccaggcatctctggcttagcatgtgaacatatattgccagggactcctctacaccggaacagggggcccagtcggccacggctaggcttagtgggcggtcccacaactcctcatgcacgtgcagcatcggctgccagttcgcgggtgtattacaggacgcaagcgccgatattggacaggggacctgctggtggtgccgtggcccaccaatggcttaacgcctcaagacttttcgatgcaatgatggcaggggacaaggttgctcagactccgacagcctggttgtgccctgcgaggattcagcacggctagaaagagctaggacggcagctgatgaggctccttggc

SEQ ID NO: 163509 - DNA, 178 bp, Zea mays
  Clone ID: MRT4577_80697C.1
agaagcacgaacagagacccaaagcccaagaaaacagaagcaacaactggtgttgggatctcctttgacagggtacggttcctccgggatgaagttgcttcataaatgaaaaaggagggggggaacatgaggcctacggataccatgacgacggccaggggggggtaccactccaccg

SEQ ID NO: 163510 - DNA, 759 bp, Zea mays
  unsure (1)..(759): unsure at all n locations
  Clone ID: MRT4577_80698C.1
gccggccggttcgggatctttaaaannnnanaaaaaaaaatttaaaaaaaaaaatggtccttccagatgatggcccacctggtgagcgccctcctcggccacgaccgcggccacggccacgaccacggccacgatatcctccaccatggcgccctgctcctccactggaactgctgccagggtggtgctcgacctccttcttgcgtcgggcattccattcctcctccgtgaggtagagtcgaccactgtgttgcagtgatcctggggcctcctcgaaggcgtcctccgctgccctcagtctccccaccatgtcagacacagagagggtcgacaggtcgaggagagtggtgatggagaggacgatttgcttgaaccgcggcggaaagctgcgagcaatcttctccacaatcttctcttcttcaacgccagcaccaagggtggagagttccgctgccatgccgttcaggcgcagcgcgaaatcttcgacggactcaccgtcgttgaacgtcgccaagtcgaacttcctccgcagcagtacggcagcagttttcttcatgcgatcatcgccgacccgcaggtctgcaatggtcttccacgcctcctttgccgtcagcttgtcggcaatcgaagacaccaactctggtggcaccgcgctgcagagagcgtcgagtgccatcatttcttcatgaatatctgctcctccatgctcgatgacatcccacagcatcctcgccctcagcttcaccttcatcaggagcg

SEQ ID NO: 163511 - DNA, 550 bp, Zea mays
  Clone ID: MRT4577_80699C.1
cccacgcgtccgcccacgcgtccgcccacgcttacgcgcttccttcttcccccttcgtcgggctatataagtgtccagctgttgcatcttaagttcgtcgttagtttcgccatcagcgtctagccaaaagcatcgtcgtggtgaaaaagggagtcggggaggtagtgaattaggtcgtcgtcggtgatctccgtcggtgccagattttcgtcctcggtgtttggctgagaggggtcaccatcgtccgtggaagccgttcatggctgtggttggagtcaagtgcctatgtcgcggggtgaattgctcaccagagcagcggatccgcccatcgtcatggttggtctgcgccagcgataatcgacatcgacagacaagcaactgaggacccaggtgctcagtaggtggaaaatactgaccatgagctcgttgaaggtaaattgtgcccttgatcacttctatttacccaataatgttcctgttaatcattatgacctgcataggttaattttgatggtacccaatatgtcaccccagtttggctatccttttc

SEQ ID NO: 163512 - DNA, 326 bp, Zea mays
  Clone ID: MRT4577_8069C.1
tttttatccaccgatcatgatgaagggtggtagcaagaatgtggtgggcgcggtggcggtggccatactgctggttctgcagctcatggcagccccaccgacggccatggcctgccgctcgccgcgcggagccgtgccggatggctccctcgccacgacgcccaaggtgacgatgctgtcagccacgctgtgctacacgggggagacatgcaaatacattacctgcctcactcctgcttgctcctgtaactatgatgaacggcgctgctacatcataattaccactggttgttgttgaggccattctgtacgtgaaatgaagccac

SEQ ID NO: 163513 - DNA, 421 bp, Zea mays
  Clone ID: MRT4577_806C.1
atgcactcttacataagcttcgagagtctcctctttccatgatctttaaagaactccaaagcgtggaggaaggtgctcataacattttcaagaatccccaataaaaaaggcctcctgcgcaatgtcttctggatatagagtacgaaaggcaaaattgtttcacgctgtgccacacaatctaacatagaataagggtggcggtctccttcttcaggttttacagtgccaggctgagtgcgtcctccaacaaaaaccacctgcattttcacaaacatgagtctgtagtgcatgacatcagatccagaagttctagaaggaaaaatggtgatgatacaactcagattgtaaatcccaatgaatacctcatgcacaaatgggaaacccaaaaaaactgtattcaacaactttggaacagctagca

SEQ ID NO: 163514 - DNA, 438 bp, Zea mays
  Clone ID: MRT4577_80700C.1
ccggaatctcaattcccgacctacacctcccgcaacaacaacttcttccatttaaccaattgcccgcactgaacctcgctgcttatttgggggaggccatcctactgacatccagagatctctctacagaaaattgatcaagcgaccacacatacagtcctttgctgacattatacaatcacatagcagccagaacaagtgcgcacaatctattactatgagatgggggcatatattcgacttggactacccaacatctgctgcccacacagatgatgaatcatctgagcgagctgcatcaacatccagtactactgcaaacctagcacaactgcgcatttcatacactgatgaagaacttccaggtttataacgtttccggtgcatactttcaagaggaaatccatcatcagactgaagcgacacagaaaccggtat

SEQ ID NO: 163515 - DNA, 640 bp, Zea mays
  unsure (1)..(640): unsure at all n locations
  Clone ID: MRT4577_80701C.1
ccgtcactgagtgggcaggtgagcataaccttgatagctactggcttcaaacggcaggatgaaccagaaggccgcgtgtcgaaggtacctcttgtcaagcaatttactactactagggcccctattcttacagttttttgcttgcattgcaaccaaagggtgggcaacaaggtgagaatggccgacgcccatccccagcagagggcagcagcacggtggagatcccagagttcctgcgacgaagaggaccttctggcttcccacgagtttgactgtcctgtcctgcacctgtatgatatgctccacccacccttaggtcagaattagatgatcttgtatggcacctagtcttctctaggcatcgatcgtctcaagcgcggtttgttctttcaagttttctttttttcttttcttttccccgccaccgattctaatggtaatggtcatcaaaaatgtgaagctgttgtgagctctccagcgcaaaatgtaatgtagcccgtggagaatgtgttttccctgtaacactggttctgaatagaatggtagctgaaaaagtgattgttgcctgcccaaacaacaaaaaaaaaaaccaaaccaaaaaaaaaaaaaaaaaaaaaaaaaaaaaaangagggcgncccg

SEQ ID NO: 163516 - DNA, 325 bp, Zea mays
  unsure (1)..(325): unsure at all n locations
  Clone ID: MRT4577_80702C.1
naaatccagcaaaagcaaaactgagctctgaagaccacagcattgttgaatcagttcagtaatttcacccatcacccacgtctcctggagcaaagttttagatgattttcggaagataaagttgcagcaacacatccagagcttttgttagagagtttagcataaacgtgtacaattttttttctgttattttcagtgtacactaggagaagaactggactctgatgatagttttaccaggctagtcgagtcccaattggttgttggtgtctgatactctgtaaaacaaaacaactggtgacgtcagtaaattagattattggct

SEQ ID NO: 163517 - DNA, 298 bp, Zea mays
  Clone ID: MRT4577_80703C.1
aggtgatgtgcccagggcctatttattgtgtctatataaaaaaacatcatttacaatatgcttagtgtcatagcacagaggatgctcaatttcacgtccgttacgggtcagttatgacactaagcatattgtaaaagatgtttattgacactaccgccgcatttagggcttgggcccaagaccccaattggtagggctactgagtccaatttcaagggttaaaaactccctagtcgtttcttgagggccttctcgatgctcaatggggaagttgttggtgcataccgctccacaacat

SEQ ID NO: 163518 - DNA, 1015 bp, Zea mays
  unsure (1)..(1015): unsure at all n locations
  Clone ID: MRT4577_80704C.1
gcaaaataaaagatcaaacagctgttctgaaaagaaagattttgaactttagacaatggaaggtttaatgccagaagttgaagccaaanttgcaaagttggataaagagcttctctcaaaatcagagagtttcgaacaataaaaacagaaatttgatacaaagtttgcggctgaggtgtttgaaaaaattcaaatttgcaaaaatcattgagagagcttcaagataaatgtctagagttcagcaaccgatgcgtgctgcggctaaggcagatcttcaactcagttggagtcagctctgaagaatttaatccttcggttgaagacctgccagaaaccttcgaacacattgagggcgaagttgatgctcttgatgaggttatagcaggacatggtgatttctgtgccctgctagcttctcggggcacagctgttgccttcatgaagtctggttgcacgcatggaaaactgttaatagacaaaatttcagcttatcaccagcagatctgattgatatccccagtctagctcgaagcatagggaacaaatttataaagcaaatatggacgaagggtgggcggagcctagctggtgacgaagcccggagtcatctcaagccggtaaaatcattccttgtgcttaccttttccttgaaacttgaattttccttataatgctttgatatgtacaagatgacaaagccgaagaacacagagccgaagcctagctgacaatccgaagctcaacagatgatgatgaagctcgaatatctaactgtggaaagattctaagaaaaattcttgtattatccgttataaagaatattgtaactttgtccataccttgtaatatatttttacctttccatcgatgtatgaaatgctttgatgtggacgaaacttgtattttttgagccgaaggtgaaaaacaccctcccttcttttcgtacacaacgaagcatgaatctgctttttgaagctgtatgcttagagccgaagcaactttctgtatctgtatg

SEQ ID NO: 163519 - DNA, 813 bp, Zea mays
  Clone ID: MRT4577_80705C.1
gaatacccgaggaatcccactccccccttctctctctccctctctccctctcttcctccctaccctcgagacgcccgtctcgtcgctttgctccccacgaaagaattctaaattcttgcttaacaaaacgagaaagcggatcctatccttcgtgggatccgcatcggttcttgccctcgccgcgccggattcgccagctttttctttcctcccctgaatccctccgcctggccagccgccgtcgactgagccggcggttgttgggatcttgcgtcggggggcgatccggcctggggggagatggccggcgggaaggagccgatcgaggtgaagttccgcctgttcgacggcacggacatcgggcccaacaagtacgaccccgccaccaccgtcaccgcgctcaaggagttcgtcctcgctcggtggccgcaggacaaagacattattccaaaaactctcaatgacgtgaagctcatcaatgctggaaggatacttgagaataacaaaacccttgctgagtctcgagtcccagtaggagaagttccaggaggtgtgatcacaatgcatgttgttgtacgccctccccaaagtgacaaaagtgataagcacctctcgaattcccccaagcagaacagatgtgggtgcacgatattgtgacgctttcgattcagcccgcgttgtgtatttctgtatattggtgccatccatgctcacaacgattgcaagttcaccctaacacttgattcttgcaagccattcttgaaatgaaagcctagagacggtaacttaacacccatatatatttcatctctg

SEQ ID NO: 163520 - DNA, 1182 bp, Zea mays
  Clone ID: MRT4577_80706C.1
ccggccgggaacccaaaagtcctgcttttgctcacgcttatcaccactcccatctccatccaaaaccataaaaaaaagcagtgcgagctgaagcatccaggctctggaatcatcgtcaggatgtctgtgccagcatcagcccaggtgcctcacaccatacgacctgctgggagctgctgcttcaggtcgtcgcatcaactatctgcgcagaatctgggccgacgtgagttcccgatctcagctttgagtggccttctttttgaaagtgagcacaggttcttccaaagcccgttgtgttcgtgtagatcgcaggtggcgggggaccggaaagaagaagatcctttccacccgtggcgtgcttgagtccagaaacggcgcacatcctggtggccttatgaagagaaggaaggtcgtggagcacatcatcctgctcagagccaagcccaacatctcagacgctgaagagaaagacatgctggactacctatacacatcgcagtaccagatgcgagggatactcgcggtctcgctaggccgcatcgaggaccccaacagcgacaacttcacgcacgctgtgttcatgcgtttccagcagaagcaagacatcgcggagttccagagtaacgcgtactactccaaagttgtcgacgagcacgtaaagcccgtttcctatatttcgagtccgaggtggaagacgacattatacctctctttcgcaggggagagactgcgtctagagaggcaacggaggacgcattagcgtctcttgacaagttgatcagccaatgcagcgcttctattgtgcaggcaacatgtggctgctgtttggatcgtccggataacgggtacagtcatgctgcagtaatccgtttcccatcatctgatgagttgaagctgttcagggagagcgaggagtacaaggatatgtgggcgtccaagttccgcccgatcgtggagagatccctgcacctgcacttcaccgttgaccccgtggggaaccagctgatgtagaccaaccgagtggtcatccctatacatgggaccaagagcatctgtactgtacagtgtaaaacagagagatggggtaatatagaggataccgatagggtcaacaaacaaaaaaaaaaaaaaaaaaaaaaaaaaaaaaaaaaaaaaagaaaaaaaaaaaaaaaaaaagcggcc

SEQ ID NO: 163521 - DNA, 2035 bp, Zea mays
  Clone ID: MRT4577_80707C.1
acccacgcgtctgatagagatgtcaatgaggacccgatacccgataacccatgaggaattcccctattagggtacgggtatgagacaaaaattgtcccatgggtatggatatgggacaaaatctccacccattgggtaaacgggtatgggtttgggaagcaataatccgaacccgattacccatgggtatttcatacgcgtacacctgtcctgtttgtatgaatgagttgaggccgagtcggccatcaaacccggcaggctccatttcttatattggtcccaagtactgatttcttttctgatggatggatgaatggataatggtcggccccgacccgtccgcacgcttatcaccactcccatctcctccaaaaccataaaaaaacccagtgcgagctgaagcatccaggctctggaatcatcgtcaggatgtctgtgccagcatcagcccaggtgcctcacaccatacgatctgctgggagctgctgcttcaggtcgtcgcatcaactatctgcgcagaatctgggccgacatcgcaggtggcgggggaccggaaagaagaagatcctttccacccgtggcgtgcttgagtccaggaacggtgcgcatcctggtggccttacgaagagaaggaaggtcgtggagcacatcatcctgctcagagccaagcccaacatctcagacgctgaagagaaagacatgctggactacctatacacatcgcagtacaagaggcgagggatactcgcggattctcctggtccgcatcgaggaccccaacagcgacaacttaacgcacgctatgttcatgcgcttccagcaaacgcaagacaacatgggaagcaagagtgcggtctcgctttcccaagtggatgacgagcacgtaaaccccttctcctaggatgagttagttgaggaccgagtctcccaagcaaacccggaagtctccatttcctataacagggcaaaagtatgaaaatggcctaaatcgatcgataccgttctttcttttttctttttcttttctttttttggcaacagaaagaagaagaaaaaatgtggcaggatattgactacagagacgaaattatggtcctggtgtctttcttggacactgcgtctagagaggcaacggaggacgcattagcggctcatgacaagttgatcagccaatgcagcgcgtcaattgttcaggcaacacgtggctgctgtttggatcctccggataacgggtacagtcatgctgcagtaatcgcgtttcccatcatctgatgagttgaagctgttcagggatagcgaggagtacaaggatatgtgggcgtccaagttccgcccgatcgtggagagatccctgcacctgcacttcaccgttgaccccgtggggaaccagctgatgtagaccgaccgagtggtcatccctatacatgggaccaagagcatctgtactgtacagtgtaaaacagagagatgggggtaatatagaggataccgctagggtcaacaagtgacagtgctcggttacgttacattacatcacggcaaaaaaacaaataaagaaaaacaagagaaaatagcctctcttgttgctcaggagctcacagacagatagatagatagatagatagatagatgctgagcaccgaccgagttgaggtccctcttgagagttcagttgtgcagcgggtttgacccctgcggcaccttctcttagcctcggacagatcctgcacgactcgcctccagccaagtttctgccggccgtgctgcctagagatgtcaatggggacccgatacccgctaacccatggggaattcccctattagggtacgggtatgggacaaaaattgtccccatgggtatggatatgggacaaaatctccacccattgggtaaacgggtatgggtttgggaagcaataatccgaacccgattacccatgggtatttcatacgtgtacacctctcctgtttgtatgaatgagttaaggccgagtcgacatcaacggaataaagattttatatacgcagacaaaaa

SEQ ID NO: 163522 - DNA, 1814 bp, Zea mays
  unsure (1)..(1814): unsure at all n locations
  Clone ID: MRT4577_80708C.1
cnncggccgagaaaaaaaaataaaaaagaaaagatccctgcttttgcccacgcttatcaccactcccatctccaggcaaaaccataaaaaaaaccagtgcgagctgaagcatccaggctctggaatcatcgtcgggatgtctgtgccagcatcagcccaggtgcctcacaccatacgatctgctgggagctgctgcttcaggtcgtcgcatcaactatctgcgcagaatctgggccgacatcgcaggtggcgggggaccggaaagaagaagatcctttccacccgtggcgtgcttgagtccagaaacggcgcacatcctggtggccttatgaagagaaggaaggtcgtggagcacatcatcctgctcagagccaagcccaacatctcagacgctgaagagaaagacatgctggactacctatacacatcgcagtaccagatgcgagggatactcgcggtctcgctaggccgcatcgaggaccccaacagcgacaacttcacgcacgctgtgttcatgcgtttccagcagaagcaagacatcgcggagttccagagtaacgcgtactactccaaagttgtcgacgagcacgtaaagcccgtttcctatggctcggtttctgtagatttcgagtccgaggtggaagacgacattatacctctctttcgcaggggagaggattttaactacggcgtcgagtttatgctgctggtgtctttcttgaagactgcgtctagagaggcaacggaggacgcattagcgtctcttgacaagttgatcagccaatgcagcgcttctattgtgcaggcaacatgtggctgctgtttggatcgtccggataacgggtacagtcatgctgcagtaatccgtttcccatcatctgatgagttgaagctgttcagggagagcgaggagtacaaggatatgtgggcgtccaagttccgcccgatcgtggagagatccctgcacctgcacttcaccgttgaccccgtggggaacccacgttctttaaccagtttcttgtagtgcgagtggtcatccctatacatgggaccaagagcatctgtactgtacagtgtaaaacagagaggtggggtaatatagaggataccgctagggtcaacaagtgccagtgctcggttacattacatcacggcaaaaaacataaaaaaacaagagaaaatagcctctcttgttgctcaggaactcagatagatagatgctgagcaccgaccgagttgaggtccctcttgagagttcagttgtgcagcgggtttgacccctgcggcacccttctcttagcctcggacagatcctgcacctgcacgactcgcctccagccaagtttctgccggccgtgctgcctgaaagacgacgtcccctcggcgtcggattccggaacccgtcggccgtggcagaagaggcctctctgctctgctcccaggagcgagactgtgagcactactactaccatgagcctgaccaagctttgttgcggcaatcccatgctttttcaggcagatgttggagatggcaagggacggtagtttgtaatacatcacgcacaagcaacggaataaagattttatatacgcagacaacaagggcggcacagaaagtaaatccagctcggccatctggagacaccggggcaggcgtgcgcttacctcaccaattttggtttggtgcggcggacaccgatgcatgcgttttcatcaggttttggtttcgtagaaagaacaaggatacatcatcaaagtcacaacatgaatgaattcttgctactctggagaagaatgagtggtttctttgcatt

SEQ ID NO: 163523 - DNA, 337 bp, Zea mays
  Clone ID: MRT4577_80709C.1
aggggactctgtaccggcttttgtttcggtactctagtattgatcgagactgccgtccagatcaggtggataagggtgtaaattataactaagtaacacaatcatgtacctcactacatcgcaatagagctaagtgctaccctatcctaactagacctaagatcttcccgctgcgcctatagaaatcgagccaccgttcccactgtccagacatgtcatttttgaaagcactctctggattaacaagatcaactctacacactaatccatcagggcacacgtctattctggatcaatactagagtaccgaaacaaagccggtacagagtcccctagg

SEQ ID NO: 163524 - DNA, 398 bp, Zea mays
  Clone ID: MRT4577_8070C.1
gatgcaacgacaggttttattggtacttgctgatccagtacacataaaacacagcaagctgctctgctagtgagcagcgacgccgagctctctaccagagctggaaacaacaagaccaatcactaataaaacttgaagctaggcagcaactgtggggatgctccagctccaccccctggagcagttctggtccagcgagcttgatcaatgacgagagcatcgtcctcttccgaggagcgtggccacgagcaagagagcatctaccgtctacgtcttctctggcctcgtgcctacagcaaaatcaagacagacgaagtagaagtaggagaagcaaccaaaactagaagaatttgattgaattgaatgctgactgagtcgaagatagccacgaccatgca

SEQ ID NO: 163525 - DNA, 303 bp, Zea mays
  Clone ID: MRT4577_80710C.1
gtcagcgcacgcgtcggcaaaaagcacgctttggatttgcatgacaaatcaagcttcagatgtacactccccaatgttggggacctttcacagcacagacggtaattaaccgaatttcatgtcgcactgttcacgtcattgctctacctcacgatggcctactgcactcatcgcgttaaactgagatgcgtcagcttggcaaaggtgtacttcgcacggacttcagggagctcatgtgttaaatgcttatgcaaggtaccatgatcaggctgcccagcaaggcacaattgttagagtttcatg

SEQ ID NO: 163526 - DNA, 514 bp, Zea mays
  Clone ID: MRT4577_80711C.1
ctgcggaatttctcaatggttcgatcgctctgttgctcctcgtcctcagacacaagatcggagactatgtcgtcccacgtcgctggaggcaaaatggctctcctcaacgacagtcttcctgtctcttcccatcaggacggggtcgggaagctcacaaccaaggagaatcgccactgtcatgcccccactggcttctaacccaatgtaggctgacctccatgatatgatcatatgaaggggatgccgacactcctggaccgatcgagttcccccagtttgtcaaactgatgtcccgcaagatgaaggacgacaactccgactcagagcatcaatgatctttccgggtgatcgacactgaacctaaggctgttatctctgctgcgtagctccgccacctccagaacgacgctctgcaagaagttgtccgagcccgaggactaagagatgtgaccttccgtagataatgatgtccatatgcagatctgctacgatgagtatctcacggtcatgatgg

SEQ ID NO: 163527 - DNA, 1075 bp, Zea mays
  Clone ID: MRT4577_80712C.1
ggctcggccgggcctcacaccatacgacctgctgggagctgctgcttcaggtcgtcgcatcaactatctgcgcagaatctgggccgacgtgagttcccgatctcagctttgagtggccttctttttgaaagtgagcacaggttcttccaaagcccgttgtgttcgtgtagatcgcaggtggcgggggaccggaaagaagaagatcctttccacccgtggcgtgcttgagtccaggaacggtgcgcatcctggtggccttacgaagaaaaggaaggtcgtggagcacatcatcctgctcagagccaagccaaacatctcagacgctgaagagaaagacatgctggactacctatacacatcgcagtaccagatgcgagggatactcgcggtctcgctaggccgcatcgaggaccccaacagcgacaacttcacgcacgctgtgttcatgcgtttccagcagaagcaagacatcgcggagttccagagtaacgcgtactactccaaagttgtcgacgagcacgtaaagcccgtttcctatggctcggtttctgtagatttcgagtccgaggtggaagacgacattatacctctctttcgcaggggagaggattttaactacggcgtcgagtttatgctgctggtgtctttcttgaagactgcgtctagagaggcaacggaggacgcattagcgtctcttgacaagttgatcagccaatgcagcgcttctattgtgcaggcaacatgtggctgctgtttggatcgtccggataacgggtacagtcatgctgcagtaatccgtttcccatcatctgatgagttgaagctgttcagggagagcgaggagtacaaggatatgtgggcgtccaagttccgcccgatcgtggagagatccctgcacctgcacttcaccgttgaccccgtggggaaccagctgatgtagaccaaccgagtggtcatccctatacatgggaccaagagcatctgtactgtacagtgtaaaacagagagatggggtaatatagaggataccgatagggtcaacaagtgccagtgctcggttacattacatcacggc

SEQ ID NO: 163528 - DNA, 1385 bp, Zea mays
  unsure (1)..(1385): unsure at all n locations
  Clone ID: MRT4577_80713C.1
agaatctgggccgacatcgcaggtggcggnggaccggaaagaagaagatcctttccacccgtggcgtgcttgagtccagaaacggcgcacatcctggtggccttatgaagagaaggaaggtcgtggagcacatcatcctgctcagagccaagcccaacatctcagacgctgaagagaaagacatgctggactacctatacacatcgcagtaccagatgcgagggatactcgcggtctcgctaggccgcatcgaggaccccaacagcgacaacttcacgcacgctgtgttcatgcgtttccagcagaagcaagacatcgcggagttccagagtaacgcgtactactccaaagttgtcgacgagcacgtaaagcccgtttcctatgtttcgagtccgaggtggaagacgacagtgtacnntcttctctccagttttcgnnnnnnnnnnnnnnnnnnnnnnnnnggcaccgtgatggtcactgcggcgtcgagtttatgctgctggtgtctttcttgaagactgcgtctagagaggcaacggaggacgcattagcgtctcttgacaagttgatcagccaatgcagcgcttctattgtgcaggcaacatgtggctgctgtttggatcgtccggataacgagtacagtcatgctgcagtaatccgtttcccatcatctgatgagttgaagctgttcagggagagcgaggagtacaaggatatgtgggcgtccaagttccgcccgatcgtggagagatccctgcacctgcacttcaccgttgaccccgtggggaacccacgttctttaaccagtttcttgtagtgcgagtggtcatccctatacatgggaccaagatcatatgtactgtacagtgtaaaacagagaggtggggtaatccggaggataccgcgggggtcgaggagtccaaggatgtaagaactctgctcaaatggatttggatctggttctccccaagtgaagtaactcgtgtgtttggtggcctgtgcgttgcaaatgtgggcgtccaagttccgcccgatcgtggaaagatccctgcacctgcacttcaccgttgaccccgtggggaaccacctaagtaactcgtaccgagtggtcatccctatacatgggtccaaaagcatatgttctgtacagtgtaaaacaaaaaactggggtagcataaaggatccgaccagggtcccccccagctgatgtagaccgaccgagtggtcatccctatacatgggaccaagagcatctgtactgtacagtgtaaaacagagagatgggggtaatatagaggataccgattgggtcaacaagtgacagtgctcggttacgttacattacatcacggcaaaaaaacaaataaagaaaaacaagagaaaat

SEQ ID NO: 163529 - DNA, 321 bp, Zea mays
  Clone ID: MRT4577_80714C.1
cttacctggtataattagtttatagctagtggggatcgatttaactggctaggtcttgatctgcgacagcatgcagcggacgtccttggcggtgggccgctccttggggtcgttcttggtgcagaacaaggcgattcgcagcaacagcaggatctgctcgtcgtacccggcgccggctatggcggagtctatggcctgcgcgtgctccccgggcttcatgacgcggtgcagccacttgacgaggccgaccacctgctccgaaaaggggaagaactggtgagacggattcattccccgggccagcaccgacaggatgacccc

SEQ ID NO: 163530 - DNA, 502 bp, Zea mays
  Clone ID: MRT4577_80715C.1
taggggcctttttttttttttttttctttttttttttttttttttttttttgtttttttttatctttttttgtttgttattacttattctattgttacaatctctgattccatgctcccttcttcacaaatactgttacatctcctgcagcacatatactaatacgtatgtctacggtacacgcatacaagtatgcatatgccctcgctcacttgccgcccacgaagttgatagcgcaggcccatttgtttttgctgacaggcccagcgaggtgatcagcgaggttctcaacgggacccttgccggccacgatggcctgcacgaataattctaacatggagaacatggcgaggcggccgctccttgatctccttgaccttgagctccgcgaacgcctccgggtcgtcggcgacccctatcgaaaaaaatctgccgccggggtacaacgaatcgaccacctccccgagcgggtcaccgccgatgcggtaccccctcgacggcg

SEQ ID NO: 163531 - DNA, 693 bp, Zea mays
  Clone ID: MRT4577_80716C.1
ccggggcaccacaccgccccgaccatcaccgacaccagcgcctaagccccccccaaacggcaggagacagcagcaggccggaggtctcctccttctacgcatccactgagttccttcctgcgcaaagtaaatccccagttctttcggccgctgccaagttttcgagtgttgctagccccgccagagttttcttctcccccgcagtcgaattgggcgagaagttgatgggaccgggggcacactggaaggttgtgtgagatcgcgaaggggaccgtgaaatcctgagagggctgcggtgattcggctgctcggctgtatgaactgtttcgtgaacctgggactcaactcggactcgaaccactacgtcgcctgcctcctcatcttcctgctgcatttctccccccagttaaatccatccaattctaattcaactagtagttgtgaaggagaagaacagagctgcacagatggcgagcaacagctcatgtggtgaaaatgcgagaaagccacacacaccatccgctattgttattggtggtgggtttgcaggtcttgctgctgctgatgcgctcagaaatgcatccttccaggttattcttctggaatctcgtgatagaattggtggcagagttcacactgactactctttttggtttccagtcgatttgggagcatcttggcttcatggcgttt

SEQ ID NO: 163532 - DNA, 1023 bp, Zea mays
  Clone ID: MRT4577_80717C.1
aattcggcacgaggccgacaccagcgcctaagccccccccaaacggcaggagacagcagcaggccggaggtctcctccttctacgcatccactgagttccttcctgcgcaaagtaaatccccagttctttcggccgctgccaagttttcgaggtgggtctcgtgattttctttccaccatgcatgaattcgccctccgcgtcgcgtgattgcagcccgctttgcggggagacatgaaaagatgggaccttttttgaccctgcctccatagactggttggcttcacgggcgcgattccgcttcggttcaccgggttgcgtggcgatttttggaattatctagaggaccgagcatgtgggctattacctgatttttttggtgacgaattgatagttttgatttccctaatttcgcagtgttgctagccccgccagagttttcttctcccccgcagtcgaattgggcgagaagttgatgggaccgggggcacactggaaggttgtgtgagatcgcgaaggggaccgtgaaatcctgagagggctgcggtgattcggctgctcggctgtatgaactgtttcgtgaacctgggactcaactcgaactcgaaccactacgtcgcctgcctcctcatcttcctgctgcatttctccccccagttaaatccatccaattctaattcaactagtagttgtgaaggagaagaacagagctgcacagatggcgagcaacagtaagtcctgcttcttccccgggagctcttccagttttgggcttatagttgacagatggatgtttgttccaatttgaaaatatatcttaaatcgacgtgaattattaaagctgctcggctgaagaagaaccgattggatgacttgggatcactagtatttgttttcctacatgatacgttatcgggttattgattaggtatttaatttggtggatctgatgccagttcgtggcaaaattgaaattttcaacttaaatttctaattaaaaaaaatatgaaaaccgttctttcgat

SEQ ID NO: 163533 - DNA, 346 bp, Zea mays
  Clone ID: MRT4577_80718C.1
ttttagataaatctcaatcaatatattgactagaactgggaaacacacgtgggtatgagggcaccattatcgagcacatctcatatgggattttaaagatggcacctgcaacgatgggctgctgcctcgacaagacaggatttatcaaagagaactggttgtatgggaacaatggctgctgctggaggaaggcggcgacccctggggtagccactaccaatggaggacgttactgttgtcgctggtgtaggggcccatcatatttcgacagagtcaggcggccgaatgggagcagctgttgcaagtaggcaacatggcccgcctcagttagatgagtcagagctgg

SEQ ID NO: 163534 - DNA, 713 bp, Zea mays
  Clone ID: MRT4577_80719C.1
cgataataaaggaagctttattgaattttcaagtccatacatctgaggtgatacaaagtcttggaaaaaaacacatttcccccctctgtttaacgggctgcacacaacctaaggaaaaggcaaatgccacatggcagaactcaagcactaatgacaatcgatcctaagcctagactgccacccatgtgcctaggtaaaaaacccttggccactaccatcaagtgtggagatgccgcaccaaccatgtcctgttaggtataattgctcagacatgaccatgcacgaagataatgaccgtttctgtccaaacctgaagtaactgcattacgtattgattgtgatttgtgagtctcccgaggctccgccaccttcgctggagtaactgcagcttccacagtttgctcccctctcccagactgctgctgtctccgcggctccgcctgtccctgctctcttcccttggatcctcctctgcatcttcctcgaagtcgtctgggttgagcccgtagcgctcccggaagcgcttgcgctccgtcgccgcggcggcggcgcccgacggtgccgcggaggccgcaacgggaagacggcgaacgggtcttcaaacagatacgtggttaagcttagcaggatccggggacgtaagtccgggaagagacggacggaaggggaaggctggcagagtggaggacgccatgagcgaggagtggcgcgac

SEQ ID NO: 163535 - DNA, 242 bp, Zea mays
  Clone ID: MRT4577_80720C.1
tgtttcgtcgttcactgtgtttattcttttttcgtttgtggttttttttatagaaaggcttgtgtttcatggcctgttttggtggccgagttgtctggttattcaaaacatattgcctttaacatggagccaaacgtccaaactatacaactggacccagtggcgtggttccgatgtgacaactcaaggaggccgctctcacaagaactacctgcagcatcctaaggtcaaactacatggat

SEQ ID NO: 163536 - DNA, 655 bp, Zea mays
  Clone ID: MRT4577_80721C.1
accctcctcctcgcaaacaagatccccaaatccccgcgggcctgctctgctcgccctcgccctcgccggatcagccccattgcgccgccactcgccgccgcgcccggcccgcgtggaggagggctccaggccgacgcacgcgcgcgcgcgcattgcgggggaagttgtattttatagatgacctgggcagcaactcttgattatgggcgcaagacaaagaatgaggacatacgaccagggccactgcgtccagcaaatatcataagaaacaaatttcctacctacaagaacggttcaaacggcatagtgatcaagctggcagatggcccagaagtgccgcctctgaaggaggttgttgctaaggagactgaggaactgcttgatcgccgtcagcgcttctcagtccgtgagcttgcaatgaagtttgagaagggactcaacactgccactctgttgtctaaagaggttaaatggagacaagtggctttgttggagcgagacattctcctgaaaaatctaaagagtgtattggagtcactgagaggtcaagtcacgggcaaaactaaggatgaaattgaggagtctatttctatggtggaaattcttgcaggtcagctctcccaaagagaagctgagttgattcaacaaaaaacag

SEQ ID NO: 163537 - DNA, 371 bp, Zea mays
  unsure (1)..(371): unsure at all n locations
  Clone ID: MRT4577_80722C.1
agcaacggaaccggcgccgcggggggaggaagncaaagggagaagaggaaccgcccccaacccagngcaacaaacaaagcgcaaggacagaaacgngcaancaaggcgccgaacccaccccgggcacaccaaaggacaggccgcaaaagggaaccggaagaaaaacangcaaaagcgcagcacgagggcaaacgctgcaacgcgctgggccggcaacgaaaagaccnggccctgaacaccccgcctgaggcgagcagcgaacaaagcagccctaagacggcaacgccgggggggccaccccccagccgccctggccgcacgggatggaggacttcaagcccagaaagaagagcagagctccgaacagcgcc

SEQ ID NO: 163538 - DNA, 258 bp, Zea mays
  Clone ID: MRT4577_80723C.1
aagagaaaccggcctaggcctcgggaacttggggttggaaaacaaaagagggactggagggccctcaaccttgggctttcaggaacgggtttgcttgggggctgcctatagctttgcagccagaacccttgggattccaaaacaaaccgaattgcccctggggggcccttaacattaaactggcaacaacgggtatgctgggggtctgcctcaagctttggagttagcacaaaaatttttcccggtttcaagccccgg

SEQ ID NO: 163539 - DNA, 627 bp, Zea mays
  Clone ID: MRT4577_80724C.1
tattcctcacactcccatccagccgacaccaggtgcagagtctttcgtcatctcttctccggcgaagaacccccagtcgcccaccacatcacttgctaaactttgctgaggggagatggcggtttctttcgcaaacctcaacaccgaggtaggccttaaaaaggttgatgagcaccttactcactcgccagctacatcactgtctaccaagcttccaaggatgacttgtctgtctacacttcgatgtcagttgctccctcgtccaagtatatcaacgtaggaaggtggcttaatcacattgatgcgctcgaggggttgatgggaattactgcaaaggctctaggcgtgatagtatgaatcctcagcagtttcttcaaacccaactccagatgtagctgaaccacagggcccagttgctgaggaggtaggacacatgatgatgttgagctttttggagaggagaccgcaatatgagaatcaaggctcgctgaatatggagctgcagatgccaaggcttctgaggacaagatagaatctggtaagtcttcactcttacttgaggtgaagccttgccaccatgatactgacatggacaagcttgatgaatctgctatgagtgtccagatg

SEQ ID NO: 163540 - DNA, 505 bp, Zea mays
  Clone ID: MRT4577_80725C.1
gagcatagagccttacacagctagcatgtggtggcttgagcgctttgtacctttcaagaaggcatgctcgtgaactgaagaacgtactggatactgactaatggtgggaggtattctagcctgagaagagggctagacggttaacaggccttacgatgggtgaactcttaaatacaggcgcactgaggatccgtacctccttggccgagttcaggctttgacatatagctcggaccgccttaaaagcatcacttgcatgtcgtgagtcattggcacggctgagttaaacttccacatgttgctaaatattaagagagccctaacagactaaggtacttcatggcgagacttcttccagcatgctttatatctgacagacttacagtacagcccacacacccattggacatggaagtttgatctcactctgtcaatgtatagcagcgtgcaatattgcgtcatgccacagctctagcactagacagagtctaagttcattgctggg

SEQ ID NO: 163541 - DNA, 486 bp, Zea mays
  Clone ID: MRT4577_80726C.1
ctcgaggccggccgggaacctctccgcaaccggacagtaggggctcccttctccagatctccttgcttgcatcttcccggacccgtctgagagcgtgcgaacgacgcagaggagcgagcgctcactccaagactatccgatgggcttcatgcgctcccgctcaaatgcatctatctggcatgagagttgctcctaacattatggagacgattgaccagctcccaatgaagaaagcatatccgatatgctatcttcacaatcgaagaaaacgaagagcaggtagatagcggagaagacggcggccactactgaaagctatgatgattttctggcctctctcccagagaatgactgccgatatgcgctgcatgatttcgattctgtgaccgaggacaatgtgaacagaagaaaaattttctgcattgcctgctccccatcaacatgccgcatgcacgacatgatgctatgctccacctcaaaggaccg

SEQ ID NO: 163542 - DNA, 431 bp, Zea mays
  Clone ID: MRT4577_80727C.1
gggggaaagccccccacccccttttttggttataaaacatgttacatgggtgaccaggcggaaaaataaccccaggggggtcatcgcccccaaatacaggttcctttaaagaaaaagctaccctggtagttcatgggccccctgggcgtttggaaattggacacaactttttgggggcagggccccccatcctcgggaaaaatgggaaaaaaaaaagggttttttttaactggccccggttccttttatttccgggatacgtatggggggacaaaacacacatttttacaaattggatcactgggaaacttgcccagagtaaatgattacccgtccagctccttatgggggtacaggtagagggctttgggggggctttattcctttgaaagccccagcggagtctggggccccaaaaactggaaaacccg

SEQ ID NO: 163543 - DNA, 353 bp, Zea mays
  Clone ID: MRT4577_80728C.1
cccacgcgtccgcccacgcgtccgcccacgcgtccgcccacgcgtccgcttttggaatactaaatttgccagacctgatcacttctgagaaaatttgctactggagataacaaatttcagttttatttcgcatttaaagatgcctattgttatagtatctgaggcagtaggacaggacttataagatacaacttccccaatcattcatgatacaatccatgaacaacttgagttatctattaggcactaagttactgctcaactaaaagaaatggaactaaactaacaaatacaaatgctacttaagtacatatgctatatcctatgtcaacgacgaattgcacagtggaatt

SEQ ID NO: 163544 - DNA, 291 bp, Zea mays
  Clone ID: MRT4577_80729C.1
cacagtttgtataagatggcccaaaatttgacctcaagtgagcaggaggtaatgaaactcttcgacttatttcaaaattaccatgtgagaagaacagacaaattggatgtccaggaaacaaaaagggtgttgagagaattttgtccaaattttatgaaggcattgaatgcaagtggtattaagatactgaatgacttggagaaggagataacccttgatgagatttgggacatgattggaagaatggccatggcgtacaataagaagaacagcaatgccctcaaagattag

SEQ ID NO: 163545 - DNA, 533 bp, Zea mays
  Clone ID: MRT4577_8072C.1
ccggccgggatttttttcccctcgatcgcctatatatggaggttccgcaccaccaccaccaccatggacatcgacgagacgacaacaaagacgaccgcagaggcccgccttccccgatgtactgcgggtacggtgcagcctccgccacccgacaccagtacgggcgcgcgctcggtcgaccccaattcgtacggccgacctccgccccagaccgccgtacggagggggcggggacgcctattggcacagcgggcaagggtacgcgtcctctccggcctactgtgccggtggcgattacggtaaagtcactcacgtggcgctcgatgtaaggcgaccagaggccttactattgtaggcggcggcgagtggtcttggtggcgtctatggagatggtggctccgagtacggccacgagggccgaccgctccacgggggggtctgatcctattacgggctgatagacacgccagcacaacacatgcgttgcgggtgtgaggcataagacggacaggatctactgcacggctggggag

SEQ ID NO: 163546 - DNA, 922 bp, Zea mays
  Clone ID: MRT4577_80730C.1
ttgaggttttgcaaaggcttgtgaactgtcttgatcactgtgcctcaagaacaggatcactgcctgttcaaactgttggccttttaccgttacactgcagcagattttcgctgagctgtttgcagatgatgttttctttatgcagttgcatagggaacgcaaccttgtgtgctgcagcatcagaaaccagcaaagtttcaatttccattctaatgaagcgatgtgaggttatattgggtcaatttttggccgatgaaaatgatctaggagaacatcctttgcctagtgtgagggttgaagaaacgatctgtgttcttcaagagcttgctagactaattatagacattgatgcagcgaatactctcaacatacctccatatctgaagcaagctttgggggaaaacaaatcccatggacgggctcatttattgtctttgcttcccactttttctgagcttgttgtctcaagagaagctagggtacgggagcttgtacaagtgctgctcagactcatttcctcggagctgggactacatcagctgacgtaacaactaatgatgaaactctgttttctattctcttgctggaggaaaatcatataaccttgtcagtattgtccccttctcttacaaaattgattttgtatatccatcgtgacaggcaaattaggtgcttgtcacatgtatctaagaacagagctgtgtatgtaacattttgttgggaaaatatggtggctgtttctggagtcactaggtgtacaacccattctttcaacgttttcttacgcaagaaatccattctgccactcatgtattgtgtgccagttccctcactccccctgtatggccgtatctttttgacatgaacagagttgtcgtcttaatacagaaacgcttggccacgtggatcaggcgttgcaagt

SEQ ID NO: 163547 - DNA, 257 bp, Zea mays
  Clone ID: MRT4577_80731C.1
cagatagggaaggaaggagatgccactccattcacggatgtgactgtaagtgttctttttggagacttgttatactcttttcctgactcttggtcattcttaataaaagattgaattcaagggcctatgttgtgcaaaacatgctatgatccatggttattacggcaccacagcgaggtgagtcgccagtcgggcgcctggacgcctaggtgcccatttgtccagcaacaagtatgcaacatatatgatatattaaa

SEQ ID NO: 163548 - DNA, 164 bp, Zea mays
  Clone ID: MRT4577_80732C.1
agaaccctctccgtaatctccccgccatcccccgcctccacccaatggcgtctctgccgaattgtaacagcgccgacgcctctatctcatgcggcacacgccctgtggactatgatgtggacttctccaactacatttttcacgtacacctacctttaccacca

SEQ ID NO: 163549 - DNA, 201 bp, Zea mays
  Clone ID: MRT4577_80733C.1
taacttttttctatgaaaaaagatcttagatgacatgcgaatctgggcttattgacaatcctccaccggcaaactaattgctaatttctggtgaacgggacctctcgaaagccctcttataaggctagtacagaggcggttccaaaattatactagcacaatcctccaaatgtgttcttagcgcatactgctgcctcaaaa

SEQ ID NO: 163550 - DNA, 297 bp, Zea mays
  unsure (1)..(297): unsure at all n locations
  Clone ID: MRT4577_80734C.1
gaaacgagggcgcagggggcnagacaaagcaaccggggagaccacaagaacccaaacaacaagagcagcaccagagccggatagacatcaaagagcaaggcgccaaacaagacagtgctcaaaaacggcgggccaaaagaaaaagcaagccagtaggacaccaacacgaaaaatgcccccggtgcacaaaccaaaaataacgatggaagatgccaacgcaagaaccaaaagagggtcgggaaggacactcaaggatatcaagcaccattacgcatgcccactattggagatgaaggg

SEQ ID NO: 163551 - DNA, 782 bp, Zea mays
  Clone ID: MRT4577_80735C.1
attctgatcgagccccctcctccctccgcccccaccccagccgattcgattcgattcagccctccccgcgcaagatgatgccggggtcagccccgccggccgccgggagcggcatgttcgtgccgacgcagacggcgggcacggtgctctgctgcatctgcggcgtctccatgcagcccaacccggccaacatgtgcgcccgctgcctccgggcgcgcgtcgacatcaccgagggcgtcccacgcaacgccgccgtcgtctactgccccgactgcttctcctacctccagccgccgcgctcctggctccgcgccggcccggagtcccccgagctcctgcagatcctcctccgccgcctcaagcacccgctcgcccgcctcaaggtctcgctctccggcgccgagttcgtcttctccgagccccactccaagcgcctccgcctcaagctccgcctccgccgcgaggtcctcaacggcatcgtcctcgagcagacccaccccgtcgagttcgtcgtccacgaccgcctctgcgactcctgcgcccgcgcccaggccaaccccgaccagtgggtcgccgtcgtccagctccgccagcacgtcccgcaccgccgcaccttcctctacctcgagcagctcctcatcaagcatggccaggccgcgctcgccatccgcgtcgcctcggctcccggcgggctccgacttcttcttcggctcgcgctcgcacgctgcccgcctcgtcgaattccttgggacagtcgctcccatccagaccaacacagccaa

SEQ ID NO: 163552 - DNA, 280 bp, Zea mays
  Clone ID: MRT4577_80736C.1
ggaagcgtgcgcccaagcgtacggtcttaggctcctagggcatacgccggaacgcgccacatcctcaccgtagaggccaggaacgatgcctgcttaaaaataactgacattctcacaacaaggccctgagacagaatgcatgcttttctttaatggcgcaggtagtaatgggacactaagagagccaaccacatctagatggaccaatgacttatcgaggggcacctttagataatctacctatctggttctttcctgcttgcagaggaaggggacactc

SEQ ID NO: 163553 - DNA, 406 bp, Zea mays
  Clone ID: MRT4577_80737C.1
aggtattttggcatggaacgctagaatctgagatagaccgtgtctggttggtagtgctctgatgcagtttgttctgtttattcatgatgaacttgtatggtttgaatgctactatgtttttaatatgtgcaacaatatatttcttttgttctttttttatttatcacggtttagttcaaaaatgaactagcggatgataaatatttaagaacggaggtaatatctttttgtatgatgcatagcaggttatgaacttgcagtctgtagtttatatcttagaccactgaattttgtttctttttgctctttgtaactgtaggtgatcaaagtggagcaaaatgcccgtggtgtggatgcacctgaggtgcattgagaaaatcgaagcgctgacgtgagcgagaaatat

SEQ ID NO: 163554 - DNA, 301 bp, Zea mays
  unsure (1)..(301): unsure at all n locations
  Clone ID: MRT4577_80738C.1
tttttttttttttttttnttttttttntttggtgtttntttttgtttgtttttttttttttgaagccactcagcttggaacccccttcacaaaattgtttctaaccaaacattcttggttcaaggttggctttagaaaaggaggccgggagaggcccgnatcccttaggggtggaccgggaatcggggctccctttttttttggttcaaggttatatgggagctttttatttttctgggcaggaacttgggtcttggtaaaataaactcattttggcccgcactttttttttctttgtgcg

SEQ ID NO: 163555 - DNA, 565 bp, Zea mays
  Clone ID: MRT4577_80739C.1
ctcgaggccggccgggccggagcattcctcccgattagatgctctcacaatgaactccaggtaccctactagtacacgcaacaggacgacatacatggcagcgtagaacgtacacagcagacgcgtgatgctagctcgcatcatactgcgcaacgccacgcgagacctacatgctggataggcgtccactcgccaagagacaggcaacgcaccggaatggcaaagtcgtagctcccttcctggacatctgctaccctccgcattgtgcagcacctacatccagaatctgacggcagacccacatatcacaacatcagatgatgggcataggacgaggacaacaagcacccatgcccctccgccgcgcggcgacgagccgcatctcggatatcgcaggcctctcacacgccgcccaggccgagatgttcacccacgatcacatctttacgcgacgaccgagaccgatgatcctccgacatgcctgagttaaaaaccgagccaaggtcctacgcgccgctcgggacaacactcggcagaagtactcacgaatctggtgaatacagga

SEQ ID NO: 163556 - DNA, 456 bp, Zea mays
  unsure (1)..(456): unsure at all n locations
  Clone ID: MRT4577_8073C.1
agccccccccnwttatagggagaaattggatggtggctgttggtggatggkaagaatygataggggaaattggatahtrbgaaagsgtstkggbttctryycdaatttgttacgagagytgatttagatkgtydtsttagtggatttykacgattttgaagtaatttttkggtaatttttgtttkgatatkgaggaaaatctttcckattcrgggatrgtttcgamtttgggttggtrgatagaagtattahactagggtggctaggaactacraacrgcwtctayrgttgcggdargttggattggacrgatgtgsaaaatdgacctacngaaggayggttttacaaatamtdtcgktctygaaggcccaggagtgggcgatcaasyagaactrggactcccggtgaactagggaagaaacttcsaatcgktcsgaagaaaactcdatccgattg

SEQ ID NO: 163557 - DNA, 272 bp, Zea mays
  Clone ID: MRT4577_80740C.1
gtcttctgcttgcttattatgtgctacatcataggacaggtttgttttgagaatctggatgtgaggataatgtgagtatcgtgaggattacgtgatgaggaaaataaatgagtccatgaggtttagatctagaaaatgatgattttttattatctaacgactcggacaattttgtatccacgtgtgcttttggatggtttttatcaaaacgattctcaaaaaaaaaaaaaaaaaaaaaaaagggggccccccgattatggacctcttcgccc

SEQ ID NO: 163558 - DNA, 378 bp, Zea mays
  unsure (1)..(378): unsure at all n locations
  Clone ID: MRT4577_80741C.1
cggggccggaaactcccggggtcgcgcccacacgcgccggggtcgagccaactccagacccagacccatacccatccactgcccttcctctcccgttccccgagttatccacgcccaggaccggctgtctcctccgtcccctcacccgcggccgtcctatgaggcatacgccgggcgccgctaacattccctgaggaggagaaccgccgcaccaccggcacccggatccgatgggccaactaccaaccatgccgacaggagtcgtcatgcagcgaaggacgctatgcgactgctccagcggggccagtcgcacgggggatcaccaggcgtcggccctcggtggtagnagcagtgccgtctacttgcaacggatatgaa

SEQ ID NO: 163559 - DNA, 260 bp, Zea mays
  Clone ID: MRT4577_80742C.1
gtaaaatctggtaactcggaatttccgaaaacagatttgattcaattcatcaaggattttttaccaacacttgggagaggtgcttaccctttttttaggacacttcgaccggaggattagacaaggtccgatcggggtgctggggtttaagaggtaccgggtggaatagcttgaaaaatttaccatatacaacggccggaccctttagaagggccttttaggggaatggtcaagatattatggaccaggaaaggatttta

SEQ ID NO: 163560 - DNA, 868 bp, Zea mays
  Clone ID: MRT4577_80743C.1
gatcaagccaacaacatgcatagaaacataggattgcaaatgatctcagataccaggaggcggactagctccttaccggagtactcttttctgaacaatttgatcaatgcttctcctcttctgcatgatctagctcttctctttcccaaaggtttgccccacacggaagtctaatataaagaaatgtatgtgataggctgcagactgcagtatgatcctagggcaattgtatggcacctcctcatctggtttcgagctcaaaagtgaagctatgcgaaccaatcagcggatcccgagcctcaaatgtgagccaatcgacgcatcctgctaggcaagaactgggcattcctaattcgctatggatctatgagcccattcagatccataaccagtacccagcccataacaataagctctaaaatagacaatcacacgttatagccaaatcagaccacccaaaactaaatgccccgtcgccgcatccccccttcctccaaacatcacgccgcgacgtctttaaccagaaagcgaaccaggcatgaggcggtggcgccagcacgggccgagccagtgttcggagcgaggagaggaaacgggagagggagagctggagggcgagaggagatgggagagagagagagctggagggcgagaggagaaggcagagtctgacctcaacagcgacgactgcgagaggaaccctagcgcgagctccaggtgaggacagaggttgttgtgagaggaccctggccctagcgcgagctccaggcgaggcggcgacaaccctagcgcgagctccacgcgaggacagagctgcgagaggacggaacgagcgaagtttggctctccggccggcctcgagggtccc

SEQ ID NO: 163561 - DNA, 1054 bp, Zea mays
  unsure (1)..(1054): unsure at all n locations
  Clone ID: MRT4577_80744C.1
gatggcaaagtaaatgtaaaaaattaatgaagagaaggtacaccacttccatttaaatatgtcacgagcttggaatcaggaagatatgcactcagcacattaacacagacgagtttttgacatcaagaaactcgaatggctgcctcgagtggctaggtgaactattcaggaaatctccagtgcacatcggagtactcttttctgaacaatttgatcaatgcttctcctcttctgcatgatctagctcttctctttcccaaaggtttgccccacatggaagtctaatataaagaaatgtatgtgataggctgcagactgcagtatgatcctagggcaattgtatggcacctcctcatctggtttcgagctcaaaagtgaaccaatcagcggatcccgagcctcaaatgtgagccaatcgacgcatcctgctaggcaagaattgggcattcctaattcgcttggatctatgagcccattcagatccataaccagtacncagcccataacaatgaactctgaagaagacaatcacacgttatagccaaatcagaccacccaaaactaaatgccccgccgccgaatcccgcccttcctccaaacatcacgccgcgacgtctctaaccagaaagcgaaccaggcatgaggcggcagcgccagcacgggcagatcgggacgggatgagccagtgttcggagcgaggagaggagacgggagagggagagctggagggcgagaggagatgggagagagagagctagagggcgagaggagaaggcagagtctgacctcaacagcgacgactgcgagaggaaccctagcgcaagctccaggcgaggacggtcaacagcgacgactgcgagaggaaccctagcgcgagctctaggcgaggacagaggctgctgtgagaggaccctggccctagcgcgagctccaggcgaggcggcgaggcgagctccaggcgaggcggtggcaaccctagcgtgagctccacgcgaggacagagctgcgagaggacggaacgagcgaagcctggctctccaggaacggagattct

SEQ ID NO: 163562 - DNA, 2160 bp, Zea mays
  Clone ID: MRT4577_80745C.1
cctcgagccggccgggccgggagtctcatctcgtcccgtctcgctcccttccttcagttctgacgcggatttatttgtctgccgatctggtacccgtctcgagccgctttcctctacgaaaaaaccatttttcagtataaaatttcgtttttctcctctcagtctccgacgccgccgcactcatccccccagacgaccaccctcctcctcctcccccacccacctcgccggaaccctagcgccgaccgcctgccgtgcccatcgacggcgatcgcattgctgcgccccgatggcgacccgcgcctccaagaattgcctctgcgcgggcagctcttcgttcgatgaccccgacgtggtcgaggtgtctccggcaaccgccgcggctgcagggtgggcctccggccaccacaagaggaagcggagccaggttgtaccgcaagaagtgattgaaatcgatgatgatgatcctgatggagtcatacttattggtgataaagcacaggtggaaaagaataagcaaactgctgtatgtcccatggattgctcaaagcatgccaagagtggttgggttcaggacatccctggtccaagcacatatgcttcaaaatataccagttcctgggttgacctgaaagtgtttcaagacgaggcagtttacaactattctgatggctacccctttgatggatttgaagaagactatgcttatgatgaagatgagtttgaggatgatggttatgacactccactcattgaaagtgagtttcaatttggtttgtctgccaagtttgataacttcaatgttctacatggtctggaggcttctttaccgtggaagcagaagactgctattgagattgcaaataagaccaaacctagtaaggctgtagatgataaaatcgaagaaaaatacaaggccttcaaacgatttgatactgttgatgatcatagtgatcattattattcaaagccagaatcgagaaaggttcaggtggtaaaaaagccatcaaaagactgggtgaaacgtattcagcatgagtggaaagtcctagagagagatttgccagatactatatttgtgagggcatatgaggatagaatggacctgcttagagctgtcattatgggaccagctggtactccttaccatgacgggctcttcttctttgacatttacttccctcctcggtatccaaatgtaccaccgatggtgaattaccgtgctggtggtttgcggcttaatccaaacttgtatgcttgcgggaaggtgtgccttagcctcctaaacacctggactggcagtggatgtgagaagtggaacccggccaattcaactatgctgcaggtcctggtctctattcaagctttggttttgaatgcaaagccttatttcaatgagcctggctacgctatgcatgctaacacagcccacggggagaagaaatccctgacatataatgaagacacgttcctgcactcctgcaggacgatgctgtattctcttcgaaatccaccaaagaatttcgaggattttgttgctggccatttccgcaagtatgggcgcaacatcctcgtggcttgcagagcctacctggagggtgcccaggttggatgcctctccggtgacggagtgcaagacgttgacgaaggcgacaagagctgctcggtgaggttcaagcagtcactgaagaggcttcacgaggaacttctggcggagttcaccgcgaagggcgcggactgtggcaagttcctcagcgagaaggcaaggtccggagcttccacatcggcagcggacaccacgttgaggctgtaaggcggagtcgggcttgctgttggaaataaatctgccattcaagctatcctcaacacagcaagtttgatgcctgagctgccgatcatctaactgctttctgtaggtagtctatgtatatacctgtctagctcttctggtaaagacataagcgagacatattgggcgtttagggacaccattataccgtaggtatttacgtgtttataactgctggccgcagccccggcagctgtgtcgggctgtgacctcgtcctcagcttactgtgctgatatgattgggacccaccatttggatatcaaaatgatgttggtctaggttagtcaaagtcctgactgattcgtttgtg

SEQ ID NO: 163563 - DNA, 588 bp, Zea mays
  Clone ID: MRT4577_80746C.1
tccgtcgccgtcccctccctcctcctcctcctcctcctctccgtcgccctcctcctgccgccggccgccgcgcgattctccttcacctacaacttcaccgccgcctcggactcggccccatcgggcatctccttccagggcgacgccttcttcagcaagttcatccgcctcacccgcgacgagcgcgtcgggcccctcaccagcagcgccggccgggccttcttctcccgccccatcccactcctcgaccccgtctcccgccgccccgcctcgttcgcctccgccttctccttctccatctccgcccccgaaccctccgccgcctccggcgacggcctcgccttcttcctctccccgttcccctcagtcatccccaacagatccgctggcggccttctcgggctcttcaactcctccgcccgcaacgggggccgctccctcgtcgccgtcgaattcgacacctacaggaacgattgggaccccagcgacgaccacgtcggcatcgacctcgggggcatcgcctccgtggccatcgccgactggccaaccagcatgaaggacggccgcacggcgcacgcgcgcgtcgcg

SEQ ID NO: 163564 - DNA, 454 bp, Zea mays
  Clone ID: MRT4577_80747C.1
caaaaacaaacacccctttatcaggccctgaaacaaccgtaggaaaaatgggatgcaagctagtgttacattcaaaccagggcaaaagccggagtaagttcccattaatctcatattagcggagacaactttacaactttttccaaagccccaagcaagcgaactttgaaaaaacttattaagccctggatctttcactatcaggggatgcagcccaagccgggggaccccccaagcaaattcctcaggagcttttttttcttaaccttgcaaaaaaactgcggggaaatcttggacagggcctcgtccacaggtcccttgggcttccacttgggctggtagctcacccaacgcctcctgggtccctttcttgccggcggggggacaaagggttttttttcccccttcactcgaacaacgcactttttgtaaccctagggcttggcccgacccc

SEQ ID NO: 163565 - DNA, 1047 bp, Zea mays
  Clone ID: MRT4577_80748C.1
gcacgagaaagactgggtcaaacgtattcagcatgagtggaaagtcttagagaaagatttgccagatggtgaattaccgtgctggtggtttgcggcttaatccaaacttgtatgcttgcgggaaggtgtgccttagcctcctaaacacgtggactggcagtggatgtgagaagtggaacccggccaattcaactatgctgcaggtcctggtctctattcaagctttggttttgaatgcaaagccttatttcaatgagcctggctacgctatgcatgctaacacagcccacgggggagaagaaatccctgacatataatgaagacacgttcctgcactcctgcaggacgatgctgtattctcttcgaaatccaccaaagaatttcgaggattttgttgctggccatttccgcaagtatgggcgcaacatcctcgtggcttgcagagcctacctggagggtgcccaggttggatgcctttctggtgacggagtgcaagacgtcgacgaaggcgacaagagctgctcggtgaggttcaagcagtcactgaagaggcttcacgaggaacttctggcggagttcaccgcgaagggcgcggactgtggcaagttcctcagcgagaaggcaaggtccggagcttccacatcggcagcggacaccacgttgaggctgtaaggcggagtcgggcttgctgttggaaataaacctgccattcaagctatcctcggtcgatggggagttgggccacaccgatgcaacacaacacagcaagtttgatgcctgagctgccgatcgtctaactgctttctgtaggtagtctatgtatatatccctgtctagatcttctggtaaagacataagcgagacatattgggcgtttagggacaccattataccgtaggtatttacgtgtttataactgctggccgcagccccggcagctgtgtcgggctgtgacctcgtcctcagcttcagcttgtgctgatatgattgggaccacccaccatttggatatcaaaatgatgttggtctaggttaggcgaaaaaaaa

SEQ ID NO: 163566 - DNA, 563 bp, Zea mays
  Clone ID: MRT4577_80749C.1
gtctctctcaattctcatttgccactgagtatactttaacacgttatcagcacttttgcttgagagaacagagagaagtggctgttggtaggaagaaaacagatcgctcatagttggagaacgttgatgacacgacgctcgccaacgaaggccaagacgaacaagcaagatcacgattggcgttgacagaccgcgaagaggcagcatgctagcatcgctaggccggacctgctcctgcgcgactctttcagtgagtaacctattacgaaactgaagcaatattgtctctactctgcgccatcgcctcgacggacgctgcggctgcggcgctgacgaaggaggccaggctggtctcgtccgcgccacttgagccgtgtgcccgtgtccgctccctcgcataggccgctgtgcatgcgacagggcctcgcctgcgccagggacgcgcgccagggggccggggccgagcccgcgctagatagctgggactgcgcccgcgcgtgccgggcgcgccatggccgcatccgaggccgccgcccggcctgcgcgcgcatttggcctgggct

SEQ ID NO: 163567 - DNA, 640 bp, Zea mays
  Clone ID: MRT4577_8074C.1
attccatccgttattttttatttgccgtgttttagttcaaaagtgaattagcaggtgacaaatattcaagaatggagatctgcatattagatcttgattgatgttttaataagttctatcatggtgagaccacctaatgttgattagtctgatgaacttctattattataaatatcatcatttcctggtgtagaaggcgatgataccagaagccaaagtaggagcagaaggccaagaaggtactgatcccgctcactctccagttcttggtcgccctcccagtctccaagatagtaatcaatcagtgttagtttaactagatctcagaattctcaaattgaaaatccacactacccttttagatagcaactgagggaataatgacactccaggtactagcagatcaagaccctaaaaatatccatgcaccaactaacaacgtgccttctaatgttgcatcgccatgctttatttaatttatttttaacttttcaatctcgcagtttgtgtactcatggtaagacttcgttttttttgttttcttggtcctattattgatagttcgtactccgtgggttacaaattgagtaaactgcaactcagtttggtctacatgaagaaaatagcgttgcagtctcct

SEQ ID NO: 163568 - DNA, 422 bp, Zea mays
  Clone ID: MRT4577_80750C.1
ggccgcttttttttttttttttttattttttttttttttttttttttttttgttattgaactagtagcaaaacttggttatcaaacactgttaatgaagctttctctgtgggcaacaagcatttgaaatacagattggacagacttgcccccgtccgaaatgccagggagatcgctaccccaggactgaccaccggggaccacacacatgaaccgccctactgggatacacacccactttctgcggaacaaagggactgtctccccggggaaaaaaaacactgaaaaaaaaatactgcggatcaaaaacactaaccagctactattattatgcaaaaaaaaatacgtggcaccccagttttccacagctcagagagaccgcgatgtgagcagacaaaagaacactcctttaaaaccccccaa

SEQ ID NO: 163569 - DNA, 244 bp, Zea mays
  Clone ID: MRT4577_80751C.1
ccggccggactgattttcgtgttgaagaactagataatttacatatggaacgaccaagtaattagggaaggttagcaagaggagcagggtaacgtgtgttaaaaatcagatgtggcttgaaagtggtgtaatttgtattggaccaacatctaatatttatacgaaggatttaacccttaaaaaaaaaaaaaaaaaaaaaaaaaaaaaaaaaaaaaaaaacaaaaaaaaaaaaaaaaaagcggcc

SEQ ID NO: 163570 - DNA, 115 bp, Zea mays
  Clone ID: MRT4577_80752C.1
ccgggcatgatctgatctgatctgagctcgtctttggatatggattactaggacactgacgtggagtgcttctagatgcccgggtagaaagcgaagaatcccttcaccattacca

SEQ ID NO: 163571 - DNA, 1108 bp, Zea mays
  Clone ID: MRT4577_80754C.1
ggccgcttttttttttttttttttgtacatacgaagaaacaagaatcttgcttcccagaccagataacctgaacgagggataatgatcttcttgtcaatggtcttgcaggaaattagacaggcgaaaacatcaaatattgactaatactacaaaactgatctggcgacagcacaaacacaccagccattgcctataatgaacagatcctgaaggttaggttatggcttttgtagcgtgtcatcaaaatggttgcctgctcagcaaaaatacgctagtgtttttgcatcctcaggatgcctctgcatgtcattcgatgctgaggtaagctggatgctgaggcgtgggaagcgcaagaatgcggcagctcaacatcagaacaacctcctgcatggtgggccggttcgcaggcttctcttccacgcacagcagtgctatttggatgcaccttgtatctccatcttctcagattcgtcgcctagggtgcatcaacaagcttgatcaacctgcctgctctccataacttccacgccctcttattgagaaatccatgatcatctccagatcctccatttgcaagtgaaaagcaccgttgtccacttattatctcgagaagcaacgcgccaaagccatacacgtcagatttgatggagaaaacatttctttcccgacattcgggagcagtaaagccaattgagcccactatgcgcctgcagtcagcaaattcttcatctactcccggattatatgttctagacaagccaaaatcagaaatcttgggcttcatgttggtatccaggagaatgttacttggctttagatctccatgtataatatgtaatccagaaagcttatgaagataaagcaacccttcagctattcctttaattatctgaaagtgtgtaggccagtccagatgcaaccttcttctcattgcacctaagcacagtgcttactctaatcagctcactaaagcacatcattatattgtctaaaattgagatgagctcgaaaacagagaacacatgccgcggatgaaggaatcgaggcttccatttgacatatattcatagaccaaaatcttctcccttccctgcacatagtctctgg

SEQ ID NO: 163572 - DNA, 207 bp, Zea mays
  Clone ID: MRT4577_80755C.1
tcggatcgcgagcgccgcccttttttttttttttttttttttgacttactaagaaaactacgggcgcttggaaaaatgcgcgaacgacaccgtttcctcagtgtatatagcaataaaatcgttgcacatgaaatttataatataaataataaatatgatgatgaataaaatgttttggaatgtaaaattaaattggggggggcggtt

SEQ ID NO: 163573 - DNA, 7110 bp, Zea mays
  Clone ID: MRT4577_80756C.1
cttgcaggctatccatgatttttgcctacaaaaggtgattgaaaaggggggaggatggaaggggagggacaccacggagttgttttggcatgcagcatctgtgggttcctcttcgctgtccttagccctttcagcttttgggttttatgggctgtgaattggcggccatggaggttatacagttggatatatgcaaggaaatggccaacatatgttcaaggacctcaattgagcacactttgcagccttttgacactttgtgcatggcttgttgtcatttcccctatagcagttctgctcgcatggggaagcgtccttattgctcttctggaaaggaatataattggtttagctgttataatgacgggtgttgctttgctcctgtcattctactctataatgctctggtggagaacacaatggcaaagctcaaaggctgttgcttaccttctccttctggcagtaggcctgctatgtgcctacgacttttgtgctatttatgtgacagctggtgctagtgcttccgagcttaattctccatcagggttcttcttcggggtgtctgtaatatcattggccatcaatatgctttttatatgtaaaatactgtttaatgtaagtggatttgatgttgatgaatatgtgcggaggtcatacaaatttgcctattctgactgtgttgaagtggctcctgtttcatgctctcctgagccaccggatcctagtgaattatacatgacaaaatccagcagggtcaagcatttagggcttctctacattagctctctgcttgtgcttgttggttattccatcttgtacggtcttacgtcaaaagaagctcgttggttgggtgctttaacttcagttgcagttgttatccttgactggaatctgggcttatgttcatttagatttgagcttcttaaaagtaggatgatagtgttatttgtggctggaacatcaagggctttccttgtatcctttggagtgcattactggtaccttggccattgcatcagctatgcttttgtagcatctgtgcttttatctgctgctgtttcttcctggctttctatttcaaacccctcagttgcaaggatagacgccctaagaagtacagtaataaagctacgagagggatttcgaagaaaaggacaaaatagttcttcaaattcatcagaaggctgtggctctagtgtgaagcgtagtagcggtagtgttgaagctggtcaaaatggtaatgcaacggattctatgtacagaagcaactcacaaagcgatggtgtcaattggagcagtattccttttgatcgatcaaacagttgtcaagaaggccggagctctgacaagaacatagatagtgcacgtgcaagcttagctcatcggagtaattcatgcttatctgctgtccaagactctgaaaccgctgttgtttcagtagataggcatggagatcccactacttcacttgtttgttctagcagtggtttggaaagtcatggctgtgagcctagtggatcagccaccacctcaggtaatcaacagctattggatttgaacctggcagcaatatttcaggacagattaaatgatccaaggatttcatctatgctaaaaaagaacggtggacttggagatgtagaactggctaatcttcttcaggataaaggactagatccaaatttttcatacatgctgaaagacaaagttatggatccacgtattttggctttgctacagaggagcagcttggatgcagatagagagcatcaagatgacgtagatgtcacagctactgattcagatagattggataccactattgcaaatcagatttctctgtcagaagaactaaggagaagtggtctagaaaaatggttgaacatttcaaggctaatattccatcatttagctggatctccaatacgtgcttttattgttttcacagtaatgtttataatagagactgctactgtggctatctatcgaccagagaccatcaaggtgataaatgcaacacatgaacagtttgaatttggtttctcgatactgcttctgtcaccagttgtctgctccattatggcattcatttggtctctgcgtgctgaagaaatgttgatgacatccaagccccagaagtatggtttcattgcatggctactgagcacatgtgttggtttgtttctctctttcttaagcaaatcatcagttatattgggcctgtctctcacggtaccacttatggtggcttgcctctcatttgctgttcccatatggatacgcaatggttacagtttctggattcctggaagggagtttgcaaatcgtgaaaatgttagtcaagctccaggagagaaagagcgggctctctttgttatcaccattgctgttttcactgcatcaattattggccttggtgcaatagtgtcagcaaagcctttagacgctctaggctataaagggtgggatgctgataagaacagctcctattctccctatgcaacatcaatgtatcttggatgggcattgtcttcaacaattgctgtgattaccacagggttgatacctattgttgcttggtttgcaacataccggttttcaccttcatcagctatatgtgttggcctctttgcaactgttcttgtgtctttttgcggtgcatcctactggggagtggtaaattcacgagaggatggtgctcctctaaaggctgatttccttgcagcattacttcccttgctttgcattccagcatttttctcactgttcactgggctttacaaatggaaggatgatgattggaagatttctcgtggcgtttacctttttgttggcatgggaatgttgctgttgtttggtgcggttgcagctgttattgtcacaatcaggccctggactgttggagttgcttgcctcgtagccattctgttccttgtatttgttattggggtcatccactactggacatctaacaacttctatctaacgaggacacagatgctgcttgtttgttccattgcttttctcttagccttggctgccttcctgatgggtttatttcacggaaagccttttgttggagcatctataggttatttctcatttatatttcttctcactggaagggctttgactgtccttctatcaccgccaatcgtagtgtattcgccaagagtattgcctgtatacgtttatgatgctcatgcagactctgctaaaaatgttagctatgcctttcttattctgtatgggattgcattagcaactgaagtttggggtgttattgctagtctaataatgaatccaccatttgttggggctggcgtttctgctactactcttgtaattgctttcagttttgctgtttctcgaccctgcctgactcttaagatgatggaggatgcagttcattttctcagcaaggatacagttgtgcaagcgatgtcacggtctgctaataaaactagaaatgctatatctgggacttactcagcacctcagaggtccgcaagttctgctgctcttttggttggagatcctgctcttacattggacagggctgggaactttgtgcttcctagggctgatgttatgaaactgagagatcgtttgagaaatgaagaaattgctgcaggatctttcttatgtggagtaaaagattgtttactaatttgcccccagtccctgtcaaacatagattatcggaggaatatgtgtgcccatgcacgtattttggctttggaagaagcaattgatacggaatgggtgtatatgtgggacaaatttggtggttatttacttctgttgcttggattgactgccaaagctgaacaaatacaggatgaagttcgtctaagactctttttggatagcataggcctttccgatttgagtgccaaagaaattaagaaatggatgcctgaagatcggaggcaatttgagcttattcaagaaagctacataagggaaaaagaaatggaagaggaggctttgatgcaaagacgagaggaagaagggaagggaagagaaaggaggagggcattgctagagagagaggagcgaaaatggaaggagctcgaaatatcattgctttcttccattcctaatactggaagcagggatgctgcagctatggcagcagctgtcagagctgttggaggtgattctgccctggaagattcttttgcaagagatagggtctcttcaatagccaatcacatacgaaaggcacaattggctcggcgagcagaacagactggtattccaggcactatatgcatactcgatgatgaaccgaggagtactggtcgtcattgtggagaacttgacttgtgcctctgtcaaagtcaaaaggttactttgtctattgctgtcatggttcagcctgtatctggcccagtgtgtctttttggaagtgaattccaaaaggtttgctgggaaatcttagtggcaggatcagaacagggtatggaagctggacaagttggtcttcgattagtgactaagggtgaaaggatgactactgttgctaaagagtggaatattggtgcgtctagtattgcagatggcaggtggcatcttgtaactgtaactttagatgccgacctaggtgaagcaacttctttcattgatggagtttatgatggatatcagaatgggttgccgttgccaacagataacggtatttgggaacctggaactgatatttgggttggtgctaggccacccatggacttagatgcctttggtaggtcagatagcgaaggttctgactcaaagatgcagatcatggatgcttttctatggggaagatgtctcagtgaagatgaggttactgttttacatactgccatgtctcctgctgagtatggattttttgaccttgcacccggcgatgcttggcatggaagttattctgcaagggtggatgactgggaaagcgaagaagcttatgagctttatgatcaaggggatgtcgaatgggatggacagtactcaagtggtaggaaacgtccggtacatgatgctgtagctattgaccttgactcctttgctaggagaccaagaaaaccaaggtttgagacacgtgatgaagtcaaccagcgtatgctttctgttgaaagggctgtcagggatgctcttatcgcgaaaggagagagaaacttcactgatcaagagttccctccagaggatcgttctttatttgtagatccgatgaatccacctctgaaactgcaggttgtttctgagtggatgaggccttctgacatagcaaaggagatatctatcagttgtcagccttgcttgttttcgggttctgtgaattcctcagatgtgtgtcagggtcggttgggagactgttggttcctaagtgcagtcgcagttttaactgagatgtctcggatatcagaagttataatcactcccgagtacaatgatgaagggatttatacagtcagattctgtattcagggtgagtgggtggccgtggttgttgatgattggattccttgcgagtctccggggaaaccagcatttgctactagtagaaagcaaaacgagctttgggtatccattcttgagaaggcttatgcaaaacttcatggctcttatgaggcattggaaggtgggcttgttcaagatgctctagtcgatctcacaggaggagctggtgaagagattgatatgcgaagtcctcaagcccaacttgatcttgctagtggaagattgtggtcgcagttgttgcatttcaaacaagaaggttttcttcttggtgctggaagtccttctggatctgatgctcacatctcatcaagtggcattgttcagggacatgcgtactcaattttgcaggtaagagaagttgatggccacaaactcatccaaatcagaaatccatgggcaaatgaagttgaatggaatggaccatggtcagactcgtcaccagagtggacggaacggatgaagcataagctcatgcatgttccacagtcgaagaatggggtattctggatgtcctggcaagattttcagattcactttcggtcaatatatgtttgtcgtgtttatccacctgagatgcgttactctgtccatgggcaatggcgtggctacaatgcaggtggttgccaagattatgactcgtggcaccaaaatccacagtatcgacttagagtaacaggacgtgatgcactataccctgttcacgtttttattacccttactcagggtgttggtttctctagaaagacgaatggttttcggaactaccaatctagccatgattcttcaatgttttacattggaatgaggatactcaagacacagggctgccgtgctgcttacaatatctacatgcatgaaagcgctggtggaacagattacgttaactcgagggagatatcatgcgaactggtcttggatccttatcccaaagggtacacaattgtgccaactaccatccaccctggggaggaagcaccttttgttttgtcagttttttcaaaagcatcaatcagactagaggctgtttagttcaagattgagatcccatgtgtttgatggtagctgcgtctgctgggcacccgtgcacgcaggatccagctgtgggttctcgggaactagataatgggtataggaattgcctcctggacaacttcaatcaatcttgctgcatgcaagtacctaagttcggttgcttgttgcagatctgacaaacggcaatgcttcttgtgctgaagggaaaggagagaaggcatgatccatggttctttggtagctgcgcaaagtgcagggtgagaggcttggttcaatgtttgtagatagccgtggtaactgacctggtagcccatcctatgtataggtgtcccgtttaccctgtaaatgctatagagttaggttaggtagcctgtcgttcctgttaacgcatagggctcttatgcagctgtgaaatgtcttgttagcaagctgcagttttgctgatttgagcgtggagtagtcggccatagctgttcccattggtttgccctgtatgtaatcggaatctgatgtcattcaatgaacctattttttgggtgccatgcgaagctgtctaaaaaaaaaaaaaaaaaa

SEQ ID NO: 163574 - DNA, 1557 bp, Zea mays
  Clone ID: MRT4577_80757C.1
atggcgggtgttgctttgctcctgtcattctactctataatgctctggtggagaacacaatggcaaagctcaaaggctgttgcttaccttctcctcctggcagtatgcctgctatgtgcctacgatttttgtgctatttatgtgacagctggtgctagtgcttccgagcttaattctccatcagggttcttcttcggggtgtctgtaatatcattggccatcaatatgctttttatatgtaaaatactgtttaatgtaagtggatttgatgttgatgaatatgtgcggaggtcatacaaatttgcctattctgactgtgttgaagtggctcctgtttcatgctctcctgagccaccggatcctagtgaattatacatgacaaaatccagcagatgttacattaggtaccttggccattgcatcagctatgcttttgtagcatctgtgcttttatctgctgctgtttcttcctggctttctatttcaaacccctcagttgcaaggatagacgctctaagaagtacggtaataaagctacgagagggatttcgaagaaaaggacaaaatagttcttcaaattcatcagaaggctgtggctctagtgtgaagcgtagtagcggtagtgttgaagctggtcaaaatggtaatgcaatggattctatgtacagaagcaactcacaaagcgatggtgtcaattggagcagtattccttttgatcgatcaaacagttgtcaagaaggccggagctccgacaagaacatagatagcgcacgtgcaagcttagctcatcggagtaattcatgcttatctgccgtccaagactctgaaaccgctgttgtttcagtagataggcatggagatcccattacttcacttgtttgttctagcagtggtttggaaagtcatggctgtgagcctagtggatcagccaccacctcaggtaatcaacagctattggatttgaacctggcagcgatatttcaggacagattaaatgatccaaggatttcatctatgctaaaaaagaatggtggacttggagatgtagaactggctaatcttcttcaggataaaggactagatccaaatttttcgtacatgctgaaagacaaagttatggatccacgtattttagctttgctacagaggagcagcttggatgcagatagagagcatcaagatgacgtagatgtcacagctactgattcagatagattggataccactattgcaaatcagatttctctgtcagaagaactaaggagaagtggtctagaaaaatggttgaacatttcaaggctaatattccatcatttagctggatctccaatacgtgcttttattgttttcacagtaatgtttataatagagactgctactgtggctatctatcggccagagaccatcaaggtgataaatgcaacacatgaacagtttgaatttggtttctcgatactgcttctgtcaccagttgtctgctccattatggcattcatttggtctctgcgtgctgaagaaatgttgatgacatccaagccccagaaggtgatgcactaa

SEQ ID NO: 163575 - DNA, 4149 bp, Zea mays
  Clone ID: MRT4577_80758C.1
atggccactttcctcttgtccaacgtggtgattgcgctcgtcatggtgcgacgcgcggtcccttgtgttgtcactagcgcaggcttggacccggtggacaaggtgagcgtgtacgacgtgttttggttaccgggcagcggcaccgttgtgaatgatcgacaatggagggggtgtttggtggcctgcagacagactattgagaaggccaacgtggaagacatcatggagccgtgcctgatgtactcggcccagggtagccggctagccactgatggggacgatagccaacgaagtggcgcagtttggcgccaatcagcccatgaggcgcatgagctcccaccaggatgtggaggtgaagatggggtcaaggttggagaccatcaactggggcatgccatgcaggcggaccatgttggtgaagaaagccgacgccacagactgacatgtagggtggtgggtgcgctgaagccctcgtggctgtcgtcatggacaatagccaccaaccttgcgagtaggggaggcgttgggacgattagaggtggcctagaaggccaaccacaggaagacgtccttgtgaaggagcatggtgaggggtgtcgcgaggtggttgatgcattgcacaggtcgaacaacatgatgaggaactcagagaacctgttcaaatcatctgttatattgggcctgtctctcacggtaccacttatggtggcttgcctctcatttgctgttcccatatggatacgcaatggttacagtttctggattcctggaagggagtttgcaaatcgtgaaaatgttagtcaagctccaggagagaaagagcgggctctctttgttatcaccattgctgttttcactgcatcaattattggccttggtgcaatagtgtcagcaaagcctttagacgctctaggctataaaggatgggatgctgataagaacagctcctattctccctatgcaacatcaatgtatcttggatgggcattgtcttcaacaattgctgtgattaccacagggttgatacctattgttgcttggtttgcaacataccggttttcaccttcatcagctatatgtgttggcctctttgcaactgttcttgtgtctttttgcggtgcatcctactggggagtggtaaattcacgagaggatggtgttcctctaaaggctgatttccttgcagcattacttcccttgctttgcattccagcatttttctcactgttcactgggctttacaaatggaaggatgatgattggaagatttctcgtggtgtttacctttttgttggcatgggaatgttgctgttgtttggtgcagttgcagctgttattgtcacaatcaggccctggactgttggagttgcttgcctcgtagccattctgttccttgtatttgttattggggtcatccactactggacatctaacaacttctatctaacgaggactcagatgttgcttgtttgttccattgcttttctcttagccttggctgccttcctgatgggtttatttcacggaaagccttttgttggagcatctataggttatttctcatttatatttcttctcactggaagggctttgactgtccttctatcaccgccaatcgtagtgtattcgccaagagtattgcctgtatacgtttatgatgctcatgcagactctgctaaaaatgttagctatgcctttcttattctgtatgggattgcattagcaactgaagtttggggtgttattgctagtctaataatgaatccaccatttgttggggctggcgtttctgctactactcttgtaattgctttcagttttgctgtttctcgaccatgcctgactcttaagatgatggaggatgcagttcattttctcagcaaggatacagttgtgcaagcgatgtcacggtctgctaataaaactagaaatgctatatctgggacttactcagcacctcagaggtccgcaagttctgctgctcttttggttggagatcctgctcttacattggacagggctgggaactttgtgcttcctagggctgatgttatgaaactgagagatcgtttgagaaatgaagaaattgctgcaggatctttcttatgtggagtaaaagattgtttactaatttgcccccagtccctgtcaaacatagattatcggaggaatatgtgtgcccatgcacgtattttggctttggaagaagcaattgatacagaatgggtgtatatgtgggacaaatttggtggttatttacttctgttgcttggattgactgccaaagctgaacaaatacaggatgaagttcgtctaagactctttttggatagcataggcctttccgatttgagtgccaaagaaattaagaaatggatgcctgaagatcggaggcaatttgagcttattcaagaaagctacataagggaaaaagaaatggaagaggaggctttgatgcaaagacgagaggaagaagggaagggaagagaaaggaggagggcattgctagagagagaggagcgaaaatggaaggagctcgaaatatcattgctttcttccattccaaatactggaagcagggatgctgcagctatggcagcagctgtcagagctgttggaggtgattctgccctggaagattcttttgcaagagatagggtctcttcaatagccaatcacatacgaaaggcacaattggctcggcgagcagaacagatggagctaatccctgtcgctgcctccactacaacgctacatcgttggtgcgggcttgctgtccaccgccttcctccagggactcgtcaatcgggtacaccgaatgaggtgctgagcaccgacatgcgcccaggggcaagaacatattgcgaggtgcttagggtcgggacagggacaaatagggtcgagatcaagtcgacgtacttatgcctggcgagggtggtggacctagacaccgatggccacttcgacgaggggttcatctgcctatatgccacatatgccacgcttcttgaccttgactggcatgacaccaagggtggttacccgactggtattccaggcactatatgcatactcgatgatgaaccgaggagtactggtcgtcattgtggagaacttgacttgtgcctctgtcaaagtcaaaaggttactttgtctattgctgtcatggttcagcctgtatctggcccagtgtgtctttttggaagtgaattccaaaaggtttgttgggaaatcttagtggcaggatcagaacagggtatggaagctggacaagttggtcttcgattagtaactaagggtgaaaggatgactactgttgctaaagagtggaatattggtgcgtctagtattgcagatggcaggtggcatcttgtcactgtaactttagatgccgacctaggtgaagcaacttctttcattgatggagtttatgatggatatcagaatgggttgccgttgccaacagataacggtatttgggaacctggaactgatatttgggttggtgctaggccacccatggacttagatgcctttggtaggtcagatagcgaaggttctgactcaaagatgcagatcatggatgcttttctatggggaagatgtctcagtgaagatgaggttactgttttacatactgccatgtctcctgctgagtatggattttttgaccttgcacccggcgatgcttggcatggaagttattctgcaagggtggatgactgggaaagcgaagaagcttatgagctttatgatcaaggggatgtcgaatgggatggacagtactcaagtggtaggaaacgtccggtacatgatgctgtagctattgaccttgactcctttgctaggagaccaagaaaaccaaggtttgagacacgtgatgaagtcaaccagcgtatgctttctgttgaaagggctgtcagggatgctcttatcgcgaaaggagagagaaacttcactgatcaagagttccctccagaggatcgttctttatttgtagatccgatgaatccacctctgaaactgcaggttgtttctgagtggatgaggccttctgacatagcaaaggatatatctatcagttgtcagccttgcttgttttcgggttctgtgaattcctcagatgtgtgtcagccagaattgtggtaa

SEQ ID NO: 163576 - DNA, 1672 bp, Zea mays
  Clone ID: MRT4577_80759C.1
ggtgagtgggtggccgtggttgttgatgattggattccttgcgagtctccggggaaaccagcatttgctactagtagaaagcaaaacgagctttgggtatccattcttgagaaggcttatgcaaaacttcatggctcttatgaggcattggaaggtgggcttgttcaagatgctctagtcgatctcacaggaggagctggtgaagagattgatatgcgaagtcctcaagcccaacttgatcttgctagtggaagattgtggtcgcagttgttgcatttcaaacaagaaggttttcttcttggtgctggaagtccttctggatctgatgctcacatctcatcaagtggcattgttcagggacatgcgtactcaattttgcaggtaagagaagttgatggccacaaactcatccaaatcagaaatccatgggcaaatgaagttgaatggaatggaccatggtcagactcgtcaccagagtggacggaacggatgaagcataagctcatgcatgttccacagatcttgacttcaatcccccttgtctctccatccttgcagtcgaagaatggggttttctggatgtcttggcccgattttcagattcactttcggtcaatctatgtttgtcgtgtttatccacctgagatgcgttactctgtccatgggcaatggcgtggttacaatgcaggtggttgccaagattatgactcatggcaccaaaatccacagtatcgacttagagtaacaggacgtgatgcactataccctgttcatgtttttattacccttactcagggtgttggtttctctagaaagacgaatggttttcggaactaccaatctagccatgattcttcaatgttttacattggaatgaggatactcaagacacagggctgccgtgctgcttacaatatctacatgcatgaaagcgctggtggaacagattacgttaactcgagggagatatcatgcgaactggtcttggatccttatcccaaagggtacacaattgtgccaactaccatccaccctggggaggaagcaccttttgttttgtcagttttttcaaaagcatcaatcagactagaggctgtttaattcaagattgagatcccatgtgtttggtggtagctgcgtctgctgggcagggtttcttctcacccgtgcacgcaggatccagctgtgggttctcgtgaactagataatgggtataggaattgcctcctggacaacttcaatgaatcttgctgcatgcaagtacataagttcggttgcttgttgcagaactgacaaacggcaatgcttcttgtgctgaagggaaaggagagaaggtatgatccatggttctttggtagctgcgcaaagtgcagggtgagaggcttggttcaatgtttgtagatagccgtggtaactgacctggtagcccatcctatgtataggtgtcccgtttaccctgtaaatgctatagagttaggttaggtagcctgtcgttcctgttaacgcatagggctcttatgcagctgtgaaatgtcttgttagcaagctgcagttttgctgatttgagcgtggagtagtcggccatagctgttcccattggtttgccctgtatgtaatcggaatctgatgtcattcaatgaacctattttttgggtgccatgcgaagctgtct

SEQ ID NO: 163577 - DNA, 1668 bp, Zea mays
  unsure (1)..(1668): unsure at all n locations
  Clone ID: MRT4577_8075C.1
ggtacccccgggtccggccgggntaataggtgtagtagtgtagtggtataggagggtatgcacgagagagaggttgtgagttcgaatctcactatttacaaaacatataaatttgattcgaaaaataatagatagggtttgaataacctgtgaagctgctgccatccactcatctttctgccttgattgcagtcattcctcccccaagtccatagagtgatagagaatggaggataatctaccagttaatgtccgggaatatcaagaacttgctaagaaagcactaccaaagatgcactatgattatatcaacggaggagcagaagatgaatatacactgagggagaatattgcagcatatggaagaattctgttacggccacgagtccttatagatgtgagcaagatagacatgtcaacaagcttattaggatataatatgccatcgccaataattgtcgcacctacaggggcacacaaattagccaatcccgaaggggaggtggccacagcaagagctgccgcagcatgtaacaccataatgatgctttccttctcatcaagctgcaggatcgaggaggttgcctccagttgcgacgctattcgcttttatcagttatatgtatgatgccttgccattgattttttttagtaaattccactttctggtgttacctgatttctggaagttttcatcgtgtaccttaggtgtacaagagaagggatgtttcggcaacattggtacggcgggctgaaagtttaggattcagggcaattgttttgacagttgacacgcctgtgcttggcaggcgtgaagctgatatcagaaataagtacagcgcttgtatcgttaatgaaatctcctaaaattgagggaaattatgttcatttacaaaattcataattccagtttcctaacccgttgctactgaaggttaaaattttaagctactatcttataccatattgtagatcgttgatacatttatgcggagcattgcagtagcttcaacatcagaatgttgcaaaaaaacaatcccattttcttttatcttgagatgttctgtaactgagctgattgttcatgcaggatgattgctccacctctgtcaaaccttgaaggtttaatgtcattagacgactttgacgatgctgaaggcggctccaagctggaacgattctcacgggagacgctggatccatcattgtcatggtgggcaggccggtgttctttgggctggcggcgcgcggggaagccggcgcgaggcacgtgatcgagatgttgaacaaggagctggactatgcgccggccaccatctcggcgctcgaagaggtggttaaggcggtggcgggggctgtgccggtgctggtggacggcggcgtccggcgcggcaccgacgtgttgaaggcgctggcgctcggcgccaaggcagtcatggtgtccagaccgagggcgaccggatcagggccctgctgtgacttataaataagcgaccatatccgaggccgaccaccgtgctgtctgggttgcgatatgatttatatgatacgtgagggcatgtgatcgattgttgcctccacacagataagcttactattgccagagcctgggctggactatgctttcagtgattatctaaatcaaatagactgaatgctaaagggaac

SEQ ID NO: 163578 - DNA, 394 bp, Zea mays
  Clone ID: MRT4577_80760C.1
gtggggcaaaaaccccaaaaggattttcccccccccttaaaaaaaagggggggggggggcaaacaaaatccgggccccaaaaaaaaaaaaattgggaacccggggggctccaaccccccggagagaaaaatgctttaaaaaaaccaatggggccaaaacccaaaccacgaaatttgggccggggggggggacccaaagcttaaaacccggaaaaaaatggggttggaaaaaccaacctccagaggatataaaaaaaagaggggaccccccaacttggtgcaaaaggggaaaggagaattgggcccaggatttttttccttttgaaaaccccggggactgggtaaatcgcggaaacggggtgcgaacattttttaatcttgggggggagccccca

SEQ ID NO: 163579 - DNA, 287 bp, Zea mays
  Clone ID: MRT4577_80761C.1
tatagtgagtcgtattatacgatgcggcggtgcgggaggggattccacgatgccgggggccaacagcgtgggggaggctcctgatccagtccctcggtaatgcgtacgctgctggcaggaggcgagcgcgggattattgagctctaggtgggttttgcggttgccactggccttacgcatgttgcttagatgggattggctgggtcgtttcgcttcaactccttcctctcaggagttctttcaggcagaggaactgcagttcttgcggtttgcctcggcattcgagt

SEQ ID NO: 163580 - DNA, 1185 bp, Zea mays
  Clone ID: MRT4577_80762C.1
gagccagccaccaacaacaaaaaaacacgcatcgacgatacgagcaacgcagccgcccctcgccggcgacgagtgctaggccatggattccgactacggcgtgccgcgcgagctctcggaggtgcagcagaaccggactctctaccagcccgagctgcccccctgcctccagggcactactgtgagggtggagtatggtgatgtggcgatcgctgctgatcccgccggcgctcatgtgatcagccacgcgtacccccacacatacgggcagccactggctcatttcctcaggaaggcggctaatgttcccgatgctaaagtcatatcagagcaccctgccgtcagggttggtattgtgttctgtggaaggcagtccccgggaggccacaatgtcatatggggactccatgaggccatcaaagctcacaacgtgaacagcaaacttattggtttccttggaggaaccgacggtcttcttgcacaaaaaaccttggagatcacaaatgaagttctttcttccaacaaaaaccaaggtggttatgatatgcttggtcggactaaggatcaaatcagaacaacggagcaagtcaatggtgcaatggctacttgccaggctttgaagttggatgctcttgtaataatcggaggtgtcacatcgaatacagatgctgctcaacttgctgagacttttgctgaggcaaagtgcgcaacaaaggttgtaggtgttcctgtaactttgaatggggaccttaagaaccagtttgttgagacaactgttggtttcgataccatatgcaaggtgaactcgcaacttataagcaatatgtgcactgatgctctatctgctgagaagtattactatttcatccgtatgatgggaaggaaggcttctcatgtggcattggagtgtgctcttcaatcgcatccaaatatggttatccttggcgaggaggttgctgcatcaaaactcacaatttttgatatcacaaagcagatatgtgatgcagttcaggcgagggctgaaaaagacaagaatcatggggttatacttattcctgagggccttgtggagagtattcctgaattatatgctcttctacaggaaattaatggcctccacggtaaaggtgtttccgttgagaatatctcttctcaactttctccttgggcatctgcgctatttga

SEQ ID NO: 163581 - DNA, 112 bp, Zea mays
  Clone ID: MRT4577_80763C.1
ggttttgtatcttccacaacgagtggcgggcgcgcaggttgagaggatctgacacgcaggcgctgactacaaaggttggcttaaaaagtggatggttcgtggtgacagcccc

SEQ ID NO: 163582 - DNA, 324 bp, Zea mays
  Clone ID: MRT4577_80764C.1
tcggtgacgcctgggttcaccctgttatttcaagcattacttgaagcttcaaggatccttaaccttaacaacaacccatactttttcggaccataccgggaggacgttggggtcttcttgaacgactggcacaccggccctttttcgtgctaccttaagagcaactaccagtaccaccggatttacagggacgcaaagaccccttttttcattcacaacattttctaccaggggcgggttggcctcttccactaccccgagctgaaccttccggagagattcaaggggttctttgatatcaaggtcctctacctaaaacccctt

SEQ ID NO: 163583 - DNA, 395 bp, Zea mays
  unsure (1)..(395): unsure at all n locations
  Clone ID: MRT4577_80765C.1
caaaaaccatcacactccattttacttctacaaatgtagatactgttgaattctaaacaataggaaaacaatagtagcattcagcactaaaaggtgtcctctaacaaaacatccaagcacgttaaccacgcgttcaaagcatgcaatgtttttctattttgcaatgttcttctcaggagcaaccgacgaagaggggcgacttgaggaatcaggagcagcattcacattagcccttatgtcgtcaggaacaaccacaccaggtctcctcatcagaatccgcctcgcgcgaatagctntatccatagctttatcgcgctgggccctcagagtagcggaagtctcttcagcaaccttgacagccaactgagccgtctctagcttctaagcgacggatt

SEQ ID NO: 163584 - DNA, 505 bp, Zea mays
  Clone ID: MRT4577_80766C.1
ggccgctttttttttttttttttctttttgtttttttttttttttttttttttttttttttttttttttttttttttttttttttttttttttttttttttttttttttttttttattttttttttttgttttgtttgttgttttaatgttgttgggtttgaaaaaaaaagaagattaaaagggggggggggttgttgtggttagaagttgccagaagtaggggcagggtgctggttgatcggaacaactgtggttgtgtcaagaaggtaggaggggttacaccagctagctggatgaatggtagtagttgttgctgctgtaaataagggggagagttcaatgctgccccttggaggggtgggagaaaaacttgtttttaccccccagagaggtgggtgaagggccctttagggggccgcaaaaggaagcagacctcaatggggctagttggccgcatggaagaaactgctgttgctgagagcaggcagcacgggttggtagcgc

SEQ ID NO: 163585 - DNA, 336 bp, Zea mays
  Clone ID: MRT4577_80767C.1
ctgccattcgctgtcgaacccgttccattgcttgttctttcagtgaggatagcgcaacattaggtgatggcgttgtgaatgatcaggaatttatcgcaactacaaacgacccagggcttaccttaatggctgcaaaatttgatggcattcttgtgctaagctttgaagaaatctttgttgggaatgcaacaccagactggtataacatggtgaaaaaaagtctcatcagcgaccctgctttctcgttctggtataaccgacatgctgatgaaggagaaggtggggaaaacgcgttcgggggcatggattatagccactacatcgaggatcacacct

SEQ ID NO: 163586 - DNA, 954 bp, Zea mays
  unsure (1)..(954): unsure at all n locations
  Clone ID: MRT4577_80768C.1
gaattgtcttgcgacatggagtacagaaacgcggtggagggactagtttaacgccccgaggttccccggggacagaatgcggcgcggacgcgcgggtgggatgcacgttgcttttccctgggaactggaccgctctgcatcgcggcatggagcgggagcgggagcgtgagcgggagcggaacaaggaggcggacgaggtcaccgtggagctccgcgcggtggggttcggcaaggaggtggtgctgaagcagcggcggcggatgcggcggaggcgccgcctgggcgaggaggagcgcgcggccatcctgctcatggcgctctcctccggcgtcgtgtacgcctgacttggctagcaaccgcgccggcccccgagacgccgcgcccaaaggcggcgaaaggagaggagggcccgattcgctggacgtgcggcatgatctgagccccagacagatccgtccgtctggatctatgctaagttttcccggctaagtagtagctcgtcggttcgaacaaggcgagttaataatccgtgtccgcgctaggctagcagctctgttcctctctctcccctcccgttgcttgctgtgttcttgccaccgccgcctctagttgtaatcctgccgctagtagtgtgctagtagtagctgtcctgctgtaaccttctcttgcaatgtaaggagagattatatggttggtcataaaaaaaatgtcagtgtttctactccagctaaagaaggaattatgcaaggaaacggagcatggtgcgttgtagggtttcctccatgcaaagataacaagtgctactgctgcattnnnnnncgaactcatgctcgctactctacgatggctgagtgtagacatgcctgcttctaaacnnnnnttaagatcgctgttattatatacattgtaatggtaggtaatgctattaataatatatgggaattttagttttgg

SEQ ID NO: 163587 - DNA, 275 bp, Zea mays
  Clone ID: MRT4577_80769C.1
tgtgcctttcataaaaaaaaataaaaaaggggggggaaaaaacatttttgggttggtcaaaacaacaatggtaaacacaaagacaaatgattgaatacacaggcaagaaacaaggcaagtacacgacatcattaagcaaaataagctaaaacaactaagacctactttgatacgctccacaaaacaaaatgcagataaacaatccaatgtaacaactactacaaaggatgcataagatagctcaaccacagccctagagcccaacgacacaacaa

SEQ ID NO: 163588 - DNA, 2113 bp, Zea mays
  Clone ID: MRT4577_8076C.1
gattgcagtcattcctcccccaagtccatagagtgatagagaatggaggataatctaccagttaatgtccgggaatatcaagaacttgctaagaaagcactaccaaagatgcactatgattatatcaacggaggagcagaagatgaatatacactgagggagaatattgcagcatatagaagaattctgttacggccacgagtccttatagatgtgagcaagatagacatgtcaacaagcttattaggatataatatgccatcgccaataattgtcgcacctacaggggcacacaaattagccaatcccgaaggggaggtggccacagcaagagctgccgcagcatgtaacaccataatggtaactttctgatttttatgtgtgtgttgagggggtgtcttctggtgagtggtgatgtactcaactttaggccctctgtagattgttacacgtgttcatatatgtcatgcagatgctttccttctcatcaagctgcaggatcgaggaggttgcctccagttgcgacgctattcgcttttatcagttatatgtatgatgccttgccattgattttttttagtaaattccactttctggtgttacctgatttctggaagttttcatcgtgtaccttaggtgtacaagagaagggatgtttcggcaacattggtacggcgggctgaaagtttaggattcagggcaattgttttgacagttgacacgcctgtgcttggcaggcgtgaagctgatatcagaaataagtacagcgcttgtatcgttaatgaaatctcctaaaattgagggaaattatgttcatttacaaaattcataattccagtttcctaacccgttgctactgaaggttaaaattttaagctactatcttataccatattgtagatcgttgatacatttatgcggagcattgcagtagcttcaacatcagaatgttgcaaaaaaacaatcccattttcttttatcttgagatgttctgtaactgagctgattgttcatgcaggatgattgctccacctctgtcaaaccttgaaggtttaatgtcattagacgactttgacgatgctgaaggcggctccaagctggaacgattctcacgggagacgctggatccatcattgtcatggaaggacgtggagtggctcaagtccatcaccagcctgccgattctgctcaagggcatcgtcaccgcggaagacggtaatgaataactagcacaaaatgtactctaccagcggttggatcactggcatgcttggtgctgaaccggagaactggttacctgtatggtcactgtcttgtctcactgaactgtgacgactctgtggcggcgtcgagcagcgaggaaggccgtggaggcgggggcggccggcttgatcgtgtccaaccacggcgcccggcagctggactatgcgccggccaccatctcggcgctcgaagaggtaaggtaactgaccgccggccgggcggcggcaggccagccacatttattctcctggcctgcagggccacacatgcaaaacgcaacggacgggctggacctggacccggacccgatcgctccctgtgcgggacgcatgcagtcggcccggccgtgctgctgttattgcgacgtgcggcggccgtgaactgactaggaccgccggggtgtcggggtgtcgtgtgcgttgcattgcaggtggtcaaggcggtggcgggggctgtgccggtgctggtggacggcggcgtccggcgcggcaccgacgtgttgaaggcgctggcgctcggcgccaaggcagtcatggtgggcaggccggtgttcttcgggctggcggcgcgcggggaagccggcgcgaggcacgtgatcgagatgctgaacaaggagctggagttggccatggcgctctgcggctgccgtagcgtcgcggaggtcaccagggcgcacgtccagaccgagggcgaccggatcagggccctgctgtgacttgtaaataaacggtcatatccgagtccgaccatcgtgctgtcagggttgcgatatgatttatttatatgaacgtgagggcatgtaatgtgacatcgattgttgcctccacacagataagcttactattgccag

SEQ ID NO: 163589 - DNA, 734 bp, Zea mays
  Clone ID: MRT4577_80770C.1
acaggaggttggcaaaggagacggcgacgacgaagaacatcttatagcaacggaaaaaagttagcacattccaaaaacttcaaagactgctgtgtacgacatcctatattaccgactgcttctgtttgaattgaacggcatcttcagaatctcggcgacgctaatttctaactcatatgggagagtgacatgaacatctaaccatattcaagtttgccctcatctcaatatccagatatctccacctcatcgactcaatagttaaccatattcaagtttgcccctttgaaaccatctgcttggattttatcgattccattacctaaaaatatggtacaatttcagtacgccagtacatattatgcaaatgaaacacaattaaaatcagcattgtgaactttattgtttgcccatttttttgataaattacccattttatgattctactgggcccttttcgcctttgccctacaattattcctcctcttcgctcttttgtttcattgtttgttctgctttgcacttctattcattgcattcttcgtcggtgattgtgctcgtccagttcgtcggccatgtgttctatcattttcgtcagaaatcctttcttaagccctccacttttctccttttttgttaccttcgcacttcgttttaatggtcatggtctctgtcgtcgagatctactgtctcagggttattctggctttcatagtaaataaattggctctctt

SEQ ID NO: 163590 - DNA, 681 bp, Zea mays
  unsure (1)..(681): unsure at all n locations
  Clone ID: MRT4577_80771C.1
agcaaaggagaggcgacgacngaaaacatcttatagcaacggaaaaaattagcacattccaaaaacttcaaagactgctgtgtacgacatcctatattaccgactgcttctgtttgaattgaacggcatcttcagaatctcggcgacgctaatttctaactcatatgggagaggtctatttctagaatttttgtttttctttaatagatttgccacctacattggcattttttcccactgcaatcgattataaactacagttttgcaacctttcagtgacatgaacatctaaccatattcaagtttgccctcatctcaatatccagatatctccacctcatcgactcaatagttaaccatattcaagtttgcccctttgaaaccatctgcttggattttatcaattccattacctaaaaatatggtacaatttcagtacgccagtacatattatgcaaatgaaacacaattaaaatcagcattgtgaactttattgtttgcccatttttttgataaattacccattttatgattctactgggcccttttcgcctttgccctacaattattcctcctcttcgctcttttgtttcattgtttgttctgctttgcacttctattcattgcattcttcgtcggtgattgtgctcgtccaattcgacggtcatgtgttctatcatt

SEQ ID NO: 163591 - DNA, 134 bp, Zea mays
  Clone ID: MRT4577_80772C.1
gccggcacgtgcttccaggcagagtgggatgactctgtgcccaagctgcacgatcagctggctgggaagtaggggcgctgcagagcccgcagccccggggaccccacagtacagtcaagtcgtataaagcatgt

SEQ ID NO: 163592 - DNA, 247 bp, Zea mays
  Clone ID: MRT4577_80773C.1
caaaaattagagaaaggggggctgaacactaaaaaaaaaggcgaatgggcggagagggcagtcggaggtttctgtgtcatgagatgagagggcgatcccatgtctagagaaaacgataagggtcgcccgatcatttctgcacaaaaattagagaaaggggggctgaacactaaaaaaaactaccctctcgaacaaaaaaaataaaaaaaagcttctcattcttttggcatccccctctgggcatgtg

SEQ ID NO: 163593 - DNA, 256 bp, Zea mays
  Clone ID: MRT4577_80774C.1
tttgatgcgtgcgcgcatactgacttccgtctgtgggaccatcatcaagctcacagcagatcgactgaccgcgatagtccatgcggccttggccatgggctgcgcaaggcacacagtcgcgctgagggagttcctgactgccctgtcgacgttgtaccacctgtgcatcaggaaggccacggagggcttccagatgaccctcgacgtggcggcgatggtcagatggaagctgtggatcttcttggccctgttcaag

SEQ ID NO: 163594 - DNA, 357 bp, Zea mays
  Clone ID: MRT4577_80775C.1
gcggagttgaacacacggacccccttgactaattatatgccagaaaagaagaacggcgggtcacacccacccactacaataaacctacggcaaactcaaccaaaagatacctccgacggttaaccggattctagatgcgattacacacgggctgcaattaccatgacaaacctatgaccactgagcatttataagcgaagaactcctggcctggcttggccttgttgaatactggagccagttttttgacgcatacaggtgatcacacagtttctggacggagacagattgtgtagcgatttcgcatgctacttccggttgtaatagagaaaataaaaccgtcgttcttaccatggt

SEQ ID NO: 163595 - DNA, 385 bp, Zea mays
  Clone ID: MRT4577_80776C.1
atattttttttttttttttttttttttttttggttttttttttttttttttggtttttaaagagaagcagaacccctttatcaaaagcaattgctataatctgctaaagagttcggttgcagttggggtcccccgcttacccattataagcgaaccattctttcgccatctgcgctctgctaaaatccttggatgccatttccaaaaattttcagctgcccagggggttgcttcggcagggtgtccattcacagcaaataggctttctttttggcgaaggggtacataaaaaaaatgcctataggcaaaggggaagggaattctagccctcccatgaaaaaggggggggcccaaaacaagggagctagctgactggggcccgaaa

SEQ ID NO: 163596 - DNA, 189 bp, Zea mays
  Clone ID: MRT4577_80777C.1
tcgttgatgctgactgaagctggttggtgagtatgggctgaggagcaagcaggcgctttgtacggtccagaaggcccggacgaagcatcacggagaggaagaaggacacttgctcacggcttgacagagaagaagcccccgacgtatcgtttgaggagtgagggcacttctttcgacgtcatgaactcg

SEQ ID NO: 163597 - DNA, 252 bp, Zea mays
  Clone ID: MRT4577_80778C.1
cccctcttcttttttttgcccctgtttggtttataaaaagaaaaaaatggcaggttccaaagtaaattacaagttggggccttggttctaaaccccaggattggcccccatttaaaggggtctggccttttaaaaatcttcttttttccaagagccccaaataaggggtgggttccaacctacgggctcaagttttgcaaaagatactgggctttcgattcctgggagaccgaaagggcttttaaagctggg

SEQ ID NO: 163598 - DNA, 170 bp, Zea mays
  Clone ID: MRT4577_80779C.1
tcggtcgacccagcgtcggggtgcggccatggttgccttgccttcactcacacactgcaaatgcgcaccctgctgatggtctccttcctgtgatagagtcaatgcatcgcaccactacctcttcctgtctaacaaacagcacccaaactatcaacaaccggacagaagga

SEQ ID NO: 163599 - DNA, 893 bp, Zea mays
  Clone ID: MRT4577_8077C.1
cgattgggtacctcgaggccggccggggcggcttactactggctttgtcctctaccttagtttctgacatcatcacatcgcaccgagggcgaggaggcaaaggaataacctgtgaagctgctgccatccactcatctttctgccttgattgcagtcattcctcccccaagtccatagagtgatagaggtagatgattatgttagatgctgctacaaatcttgaatgctgcccaactgcaagcaataaaagaatggaggataatctaccagttaatgtccgggaatatcaagaacttgctaagaaagcactaccaaagatgcactatgattatatcaacggaggagcagaagatgaatatacactgagggagaatattgcagcatatggaagaattctgttacggccacgagtccttatagatgtgagcaagatagacatgtcaacaagcttattaggatataatatgccatcgccaataattgtcgcacctacaggggcacacaaattagccaatcccgaaggggaggtggccacagcaagagctgccgcagcatgtaacaccataatgatgctttccttctcatcaagctgcaggatcgaggaggttgcctccagttgcgacgctattcgcttttatcagttatatgtgtacaagagaagggatgtttcggcaacattggtacggcgggctgaaagtttaggattcagggcaattgttttgacagttgacacgcctgtgcttggcaggcgtgaagctgatatcagaaataagatgattgctccacctctgtcaaaccttgaaagtttaatgtcattagacgactttgacgatgctgaaggcggctccaagctggaacgattctcacgggagacgctggatcatcattgtcat

SEQ ID NO: 163600 - DNA, 653 bp, Zea mays
  Clone ID: MRT4577_80780C.1
aaaaaaaaaccaccactcccagctccccaccgaaactctagggtttcccaaccacccccgcaaccgcaaacccccacccagccacgactcgatccgaaaaccaccaccccaccaccaccggcgatgtcgacggcggcggcgcagggcggcgagaagccggcgctcaggaagccggtgttcgtcaaggtggaccagctcaagccgggcaccaacggccacaccctcatcgtcaaggtcgtcagcgccaaccccgtccctggccgcgtgcgcactggtgcgcccgcctcctcctccgcccgcgccccccgcatcgcggagtgcctcgtgggcgacgagaccggctccatcatctttactgcccgcaacgaccaagttgacctgttgaaggctggtgctacagccatcttgcgcaatgctaaaattgacatgttcaaagcttcgatgaggcttgcggtggacaagtgggggcgggtagaagctacagaacctgccagctttactgtgaatgaagagaacaacttgtcgcaagtagagtacgagctggttaacgtggccgagtaattgttgaagtttccctgcccttttcccgccataaaaacgaagcactatgaatgaatattgtcaagccgttggtaagcttgtttatttcttat

SEQ ID NO: 163601 - DNA, 321 bp, Zea mays
  Clone ID: MRT4577_80781C.1
agctgcgctacgcgaggcatctgcactgtatgatgctatgctcaggagtggagcctggccttactacattccacatactaccttggaccagacctataagatttgacacctgccatgattgcatggtccttttttaggccgggagtctaacacaatgtattaccaaccagaccaaatgcaacacaacttgacaccttttggaagcaaagcctgcactggctatgctgcatgttacaattctgccacgacagtatgaaaaacctaaacataccatgcaacacattggaatgaaagacactagccctgcacttcaaattgaac

SEQ ID NO: 163602 - DNA, 486 bp, Zea mays
  unsure (1)..(486): unsure at all n locations
  Clone ID: MRT4577_80782C.1
acttgaacatagatatagataaagattacagatgattgatgacgacatgataacaaaaaatagatggtgtaggctgagaataggacctacaaatatgaggactttgagctgaatanactctattgactaatgaaacttaggtgaactgtaactaacaagagagagtatgctactactattacactagactataacactatacacgcatagggcagctgtggacagctgtgacatcaaatataccatgatcttatatatgccaagagccttaataccagtcacaacactggaactttacatgctgcataagatacacaatgaagtactactagtgccttattattccacattattaatattattattatgcataggctggatgatggtaagcaccagcaatcactaaagactagagaacacagctggagatgataatagccaacttttatgacagttgcggatagagctaccagtgagagaagatga

SEQ ID NO: 163603 - DNA, 608 bp, Zea mays
  unsure (1)..(608): unsure at all n locations
  Clone ID: MRT4577_80783C.1
tccgtgnatctcgtcgcacaacacatgccggccatggtagaggaggggctcgtcaggcgggcggcgcccgagccgcacttcctggtggtgaccttcccggcgcagggccacatcaacccggcgcgccacctcgcgcgccgcctgctacgcgccacgggggcgcgggtcaccgtctgcacggccgtgtccgcgctccgcaagatgttcccgggcgccgaggcagacgcggaggagggccaccgcgacggcgcgggggtgcggtacgtgccctactccgacggctacgacgacggcttcgacggcgccgtgcacgacgccacgcgctacatggaccaggtcaaggtcgtggggtcccgcacgctgggggacgtcctggcccgcctccgcggcgcgggcaggcccgccacgctcgtcgtgtacacgctgctgctgtcgtgggtggnccgacgtggcgcgcgcccacgccgtgcccgccgcgctctactggatccagccggccaccgtgctcgccgtctacctgcacttcttccgcgccacgggcggcgtcgacgcggccgtcgccgcggcgggcggcgacccgtgggcgggcgtccggttcccgggcctcc

SEQ ID NO: 163604 - DNA, 1727 bp, Zea mays
  unsure (1)..(1727): unsure at all n locations
  Clone ID: MRT4577_80784C.1
accaatatgatttaccaccccgcaacattctttcgaagccagttatagttgacccctctctgccaataactcgtcccattttcacagaaggcacatctaagactgacaggatatcggcttcaggaacataaacatcagcctctcccacgcgtccgccttttcgtccttgttcctcaacgtccccggtccgccccccccccgccgcgctccccccccgcgggccgcccacccgtcgtcctcgtgtctctttttgtccttgttcttctccgtcgccggtgcgctcgcctcctgcctccctccccctttgcgagcgatcgtgaggggatcgagatggcctcagcctcacaccaatccgagcccctcgactccgctgccaccagcgacaccgacgccccctcagataacatcccagaattaccatgccccccctatcatatcgttaccaaacctggtcaactcccagtcgagtttcttgaaccctcagctgcccagaagttggtaattggatttgactgtgaaggtgttgatctctgtcgcaatggtgctctctgtattatgcagcttgcattccctgacgctgtttacctagttgatgctattgagggtggaaaagaacttattcaagcttgtaagcccgcacttgagtctgatcatatcaccaaagttattcatgattgtaaaagggacagcgaggctttgtattttcagtttggcatcaaactgcacaatgtgatggatacacagatcgcttattctctgatacaagagcaggagcaggaaggaaaaaagaagacatctgatgattacaattacatatcttttgtcagtcttcttgctgataaacgatactgtggcatactatatcctgaaaaggaagaagtccgtacccttctaaggcaggaccctaacttttggacaattaggcccttgtctgatatgatggttcgagctgccacagatgatgtccgcttccttctcagtatatatgcgaaaatgatggaaaagttaagcaaagtatctttatggcgtctggcagttcgcagtgagctgtactgtaggtgcttttgcttaagcgacaaccagtttgcagattggtcacctcttcctcctgtccctgatgacattgaggctgatgtttatgttcctgaagccgatatcctgtcagtcttagatgtgcctcctgggaaaatgggacgagttattggcagaaaggggtcaacgataatggctgtgaaagaatgttgcaaggttgaaatacatattggtggtgctaaggggcctccagacagggtgttcatcattggaccagagaaggaggtcaggaaagctgaggccatctttcgaggccgaatgctggagttctagagatgttaccctttgcgatacaggtttcaactgctttatattttgaacgtaaaaaggggaatatccaaaaggtgtatgcgggaccgtggatcccttgaccgtctgtgaatcatgaaaacaaaataaaggatttcaacttggcacttaaaaaaaaaaaaaaaagagccccaaccgtgccgcgtcaggatgcagaagcaagaaaaaaaaaaaaaaaacnnnnnnnaaaagnactctgctttgttcccactgcttatgggcgatttctgccgttttccttccccctggcggccgttcgtgcttgcttttttggggcccatttcccccttttgtgggtcgttttcctttttttggccgccgttttt

SEQ ID NO: 163605 - DNA, 184 bp, Zea mays
  Clone ID: MRT4577_80785C.1
tcgaggccggccgtttgtcaaaaagcggcgtcccttacctatattacatagaaaagaccctcgtactgtttccgtggaatgggaattgcaccctcgctttcgccttcgagcaagccgaatgtacaaatgtaatatatattatgtatcactttgtcaatatgtgatatggatctaattattattt

SEQ ID NO: 163606 - DNA, 1457 bp, Zea mays
  unsure (1)..(1457): unsure at all n locations
  Clone ID: MRT4577_80786C.1
cggtcggcgagcaccgacctactcgacccttcggccggcatcgcgctcctagcggtaaccgtcgcccgcttccgcagcaccggcgcggcgactaggagctatagccgagtaggcgcagccgcgcacggcgcacccctcgtgttcccttttcgtccttgttcctcaacgtcgccggtgcgcccgcctcctgcctctctccccctgcgagcgatcgtgaggggatcgggatggcctcccaccattccgagcccctcgaccccgccgacgctgacgacccctcagataacaacccagaattaccatgcccctcctatcatatcgttaccaaacctggtcaactcccagtcgagtttcttgaaccctcagctgcccagaagttggtaattggatttgactgtgaaggtgttgatctctgccgcaatggtgctctctgtattatgcagcttgcattccctgatgctgtttacctagttgatgctattgagggtggaaaagaacttattcaagcttgtaagcccgcacttgagtctgatcatatcaccaaagttattcatgattgtaaaagggacagtgaggctttgtattttcagtttggcataaaactgcataatgtgatggatacacagattgcttattctctgatagaagagcaggagcaggaaggaaaaaagatgacatctgatgattacaattacatatcttttgtcagccttcttgctgataaacgatactgtggcatactatatcctgaaaaggaagaagtccgtacccttctaaggcaggaccctaacttttggacaattaggcccttgtctgatatgatggttcgagctgccacagatgatgtccgcttccttctcagtatatatgcgaaaatgatggaaaagttaagcaaagtatctttatggcgtctggcagttcgcagtgagctgtactgtaggtgcttttgcttaagcgacaaccagtttgcagattggtcccctcttcctcctgtcctgattgacattgaagctgatgtttatgttcctgaagttgatatcctatcagttttagatgtgcctcctgggaaaatgggacgtgttattggcaaaaaggggtcaccgataatggctgtgaaaaaatcttgcaatgttgaaatccatattggtggtgctaaggggcctccagacagggtgttcttctttggcccagtgaaggaagtcaggaaacccgaggccttcttcagaggccgaatgttggagttctaaaaatgttcccctttgtgacccatgtttcaactgctttatatcttttgaatgaacgcaaaaggggggaaatatccaaaaagtgcgtgcggtcccgtggatcccttgcctgcccgtgaatcgtgaaaccaaaaataaaggttttcaacttggcctatgccaaaaaaaaaaaaaaaaaaaaaaaaaaaaaaaaanaaaaaaaaanaaaaaana

SEQ ID NO: 163607 - DNA, 724 bp, Zea mays
  Clone ID: MRT4577_80787C.1
gcccgcccctgccccctcgccccccgccaccgcctcagcgggagaagcagcagtgcccgccaccgcctctgctcccgccgaagaagcagcagtacccgccaccgcctctgctcccgccgaagaagcagctgtacccgccaccgcttcccctcccgccgaagaagcagcagcaccatcacccgccaccgcctctgcccacacttccgccgaagaagcggctggcgtcaccgcctctgctgcccggaagcgagaagcagtgggtcatctcctccccgtcggagccgcggttcgtcccgctgccggtgtgggctctgatgtccggctccgggaagcgcaagaagcggtcaggctgcggcgggcgcgtccccgccctccacaccccagccgccgccgaggagacagggcgcgcctgagaggccgagacgatagacgacaccatccctgctactggtatccatcccctgctccttgatcatgccaatctgatgaccgctcggtcgatcgatgctaatgtgaagagcctgtaacctctctgtctctctctctctctctctctctctgattcatgcaactgatgatttgtgtacatatgctgctggtgctggagccgcagcaggtgatgaactgatctgtgaaacctgatgaactattcatgtgtaataaataagtatctgttgacatttttcgacccgaacaaaaaaaagtagaaaaaaaaaaaaaaaaa

SEQ ID NO: 163608 - DNA, 397 bp, Zea mays
  Clone ID: MRT4577_80788C.1
gggaaaggggggattccattgcacgtagcccttcatcaccaaacacaaatagatccaaagggaaaaccctaacttttacaaccctttttgcctattttggcaaacatttaccttactgtttggggcctatttgggtgttccacgaccctgccttgttagatctgttcaaaaaaaaccccccacagaaggccacctgcaagcttgcaaccccaatcgggcacgtgctctcctttcctcattgaaaacctgcttgactctgaacaacctacattttcatgcgcacaaaatgtttattgggagcggcaaaatgttcatgaaaaaaaaaaaataacgcacaatcccgttcataccgtttcaggttaaaaaccgaaaacacggggccaaaatcttttttttt

SEQ ID NO: 163609 - DNA, 462 bp, Zea mays
  Clone ID: MRT4577_80789C.1
tcgtacagtatactaggacagcggcctttgtgaaggaccttgacggagcctacccacagggtctactacgacatctagagcgacggcgagcccccacgccggattgacatggtgctttttgggaagactgttcctaataccgcacgtattgcgaacttgctattaacaattcacacctatcttcttattttgcaggagataactaatggaccctacttattgttctcctacagagaactaccgagctctttgcacaggaaagaaaggggtcggtaagagtggcatagccctccactacatgggaagtatgacccacataatcttccccatcttcatgctccagggaggtgacttcactcttggcgacgggaggggtggagaatctatctaccgctagaagttttgcgatgagaactaccagatcaagctcactggtgcaggccttatgtgcatggccaatgc

SEQ ID NO: 163610 - DNA, 556 bp, Zea mays
  Clone ID: MRT4577_8078C.1
acaagcttttttttttttttttttttattttttatttttttttttttttttcctttgtcgtttcctctctttgggcttttttcttttctctggtggtccctccgccgggaccccccctagggcccaatccaggcccctggggggccatacctggggcccccgggaaagtgccaaccgtgggcaattccacgcaacatacggagccgcggggcgaaagtgttaagcctggcgtgcccaacgagcgagctaacccacattaataggggtgaacccccgggcccctttccaggggggaaacccgccttgccagcggcgtgcatgaagcccccttcccacggggggaagcggttggcccattgggcgctattacgctgcccaccccccgggcggggtgggctgggtattggggcctcttccagcggcttcagctcagtcaaagggggctatgcggttatgctcgggggaggggataacgcaagaaagacgggggagccggggctcccaaaggccggggacccccaaggacaacatgctggcaaaagccatagctgccccc

SEQ ID NO: 163611 - DNA, 504 bp, Zea mays
  Clone ID: MRT4577_80790C.1
tggaaacgaaaaacagtgggtcatctcctccccgtcggaaccccggtttgtgccccttccggtgtgggcttttatgtccggctccgggaagcgcaaaaaggggtcaggcttcggcgggggtgttcccgccctccacaccccaaccgccgccgaggagaccgggcgcgcctgaaaggcttagacgatagtcgaccccctccctgttaatggtatccatcccctgctccttgatcatgccaatttgatgaccgctcggtcgatcgatgctaatgtgaaaagcctgtaacctctctctctctgattcaagcaactgatgatttgtgtacatatgctgctggtgctggagccgcagcagttgatgaactgatctgtgaaacctgatgaactattcatgtgtaataaataagtatctgttgacatttttcgacccgaacaaaaaaaaaaaaaaaaaaaaaaaaaaaaaaaaaaaaaaaaaaaaaaaaaaaaaaaaaaaaaaaaaaataa

SEQ ID NO: 163612 - DNA, 428 bp, Zea mays
  Clone ID: MRT4577_80791C.1
gggggaaacccagatttttgctggataaatttgaacaactggagcaacagcacaaattacctgctaaattacgggttttggattttttaaaaaaaaaaaaaaaagcctaaattcaaagggagccccctcccaaaggcccccctgtagaggaagttaataccccaaccaacaacccttggggaggggggactcatttttttgttgcgccactgaaatttttttacccaaaaattttggggaaaccaggcgaaaaaaaaactccaacttttacccccccatggcaaggaaagtctgaggggccttcttgacttcccactgaagaaagctctaaaacttgctgctccttcaatgaggcaaggataaaaaaagggtctgattcaactaaactagctcctggtggggaacactctccccggaaacccccccct

SEQ ID NO: 163613 - DNA, 312 bp, Zea mays
  Clone ID: MRT4577_80792C.1
gtttgtttttttttttgttgattctttgcttgcccaacaaattgggaagacttgcccattccaaaatagaccctgggggggagggccaacaacgggaaccagttattaccgcaaaaaacttccggcggggggtctaaataccccacgaaatggtacccttaccgcgctaaaagggggtctcgagctaaacacgttagccttattggccaaagaaaagagcggccgagcacatatggtcccccgtcagataaacgaggccgctttaataaaaagatggccccaaatttttgttccagcgcgcaaaaactgggg

SEQ ID NO: 163614 - DNA, 392 bp, Zea mays
  unsure (1)..(392): unsure at all n locations
  Clone ID: MRT4577_80793C.1
ccattactattttttcaccccaaccanaaacttttntccatggtgggtttctttaaaaaagcgtgcttgccaaaacaaaaacttttttatcntatnntaaacaacatacaacaattatcaattttttcactatatccacattacagatttcaattcttttttttaaacacattttccataaaacaactacataaatcatcttcttactattttattcttacttttaaatacaattcttccataactaactcattattttttttatacatctaatatctttactaataaactatacactcttatttatacttctgctctagatcatctaattcaatattctcatccaccttcaatactacctatgattacttcttccctcatattacttctca

SEQ ID NO: 163615 - DNA, 141 bp, Zea mays
  Clone ID: MRT4577_80794C.1
ttatttttttttattaaaataaaaagtggggccttggccattgaaattatagatttatggggattaactatggggccaggacgcacgagggcgagaacggtatacaatttaacagtaccgatacaaagataaggggagggg

SEQ ID NO: 163616 - DNA, 222 bp, Zea mays
  Clone ID: MRT4577_80795C.1
atggccagcaaacgcactggcgtcctctgtgttcacggaagcgcaggcgtgttggaggatacagatctgtccaccatcagtttcgttgatgaaggtgagaaggctgtggcaaacattgccttcttacaacaacaacaacaattgctaccatttagccaactagctctaacgaatcctaccaccttattgcagcagcccatcattgatggtgccatcttctag

SEQ ID NO: 163617 - DNA, 359 bp, Zea mays
  Clone ID: MRT4577_80796C.1
gtggattattattgttatgttttatattattgtgttctttttttttattttacatgtttcaagaaaaaaaccaggggcaattgttaatttggtggggcccgcctttttttttacaaagggcccacaaattccctaaaaaaaaatttgcccccattttgattgacccaacttatggaaccggtgcgaccgccccaaaagagacattttttaaaaacgcgggagggggtatctctgggaaccgatggaaccggaccaaacattttttggggaaagataggaacaagcgggcccccaaaactttttttcaaagggtaagacccctactaacggtaaaaaaaagggggggggccccccgaaaa

SEQ ID NO: 163618 - DNA, 302 bp, Zea mays
  unsure (1)..(302): unsure at all n locations
  Clone ID: MRT4577_80797C.1
cgcgggcgcggccccgagggcgggacccttggcagcaccgtcgggggcgtgctgctcgctgcggctggacggcggtgagccggcgctgcccccactggtagaagcggactgcgcggcgccaccggagaccgacggcggcgtggcgagggccgtccgggccccggcctgagtaagcggcggcgggcgctggggtattngggcggccgcccccgacgggttgggcgccgtgccggagaccatggccgagcggagatcgctcgaatcacccaaggacagaaggaagcggagcgcgggatcaaccc

SEQ ID NO: 163619 - DNA, 268 bp, Zea mays
  Clone ID: MRT4577_80798C.1
cccacgcgtcgggaccaatgacgcagattttgccctgaaacttgtcgccgacgcaaacgtttacattaatgacacgatcggatctgtatacacggcacatgcaataagtgatggagttacaaaaatcttgaagccttgtgttacatggttccttttatagaaggagcttgactacctggttgaagctctcatatgcactgcacgcagatatgctgacatagaggttggttcatacatgtcatccgatatcaggggcattgaatccttg

SEQ ID NO: 163620 - DNA, 424 bp, Zea mays
  Clone ID: MRT4577_80799C.1
gtaagctcggaattcggctcgtgccttgctgctccggggtcgtatgtggtgaactatacgctggctccttggttttgttttatgacttgactcctactttcctcgccttcccccttgccttagggtttatcccgcgctccgcctcgctccgtccctccctgattcgcgcgatctccgcgcggccatggtctccggcgcggcgcccaacccggacgggggcggcgcccaaaacacccagcgcccgccgccgcttactcaggccggggcccggacggccctcgccacgccgccggcggtctccggcggcgccgcgcactccgcttctaccagtgggggcagcgccggctcaccaccgtccagccgcagcgagcagcacgcccccgacggtgctgccaagggtcccgccctcggggccgcgcccgcg

SEQ ID NO: 163621 - DNA, 1634 bp, Zea mays
  Clone ID: MRT4577_8079C.1
ctcatcgcgccgtgagcggccagccccaggaattgggtacctcgaggccggccggggtctctacgttagtttctgacatcatcacatcgcaccgagggcgaggaggcaaaggaataacctgtgaagctgctgccatccactcatctttctgccttgattgcagtcattcctcccccaagtccatagagtgatagagaatggaggataatctaccagttaatgtccgggaatatcaagaacttgctaagaaagcactaccaaagatgcactatgattatatcaacggaggagcagaagatgaatatacactgagggagaatattgcagcatatggaagaattctgttacggccacgagtccttatagatgtgagcaagatagacatgtcaacaagcttattaggatataatatgccatcgccaataattgtcgcacctacaggggcacacaaattagccaatcccgaaggggaggtggccacagcaagagctgccgcagcatgtaacaccataatgatgctttccttctcatcaagctgcaggatcgaggaggttgcctccagttgcgacgctattcgcttttatcagttatatgtgtacaagagaagggatgtttcggcaacattggtacggcgggctgaaagtttaggattcagggcaattgttttgacagttgacacgcctgtgcttggcaggcgtgaagctgatatcagaaataagatgattgctccacctctgtcaaaccttgaaggtttaatgtcattagacgactttgacgatgctgaaggcggctccaagctggaacgattctcacgggagacgctggatccatcattgtcatggaaggacgtggagtggctcaagtccatcaccagcctgccgattctgctcaagggcatcgtcaccgcggaagacgcgaggaaggccgtggaggcgggggcggccggcttgatcgtgtccaaccacggcgcccggcagctggactatgcgccggccaccatctcggcgctcgaagaggtggtcaaggcggtggcgggggctgtgccggtgctggtggacggcggcgtccggcgcggcaccgacgtgttgaaggcgctggcgctcggcgccaaggcagtcatggtgggcaggccggtgttctttgggctggcggcgcgcggggaagccggcgcgaggcacgtgatcgagatgttgaacaaggagctggagttggccatggcgctctgcggctgccgtagcgtcgcggaggtcaccagggcgcacgtccagaccgagggcgaccggatcagggccctgctgtgacttataaataagcgaccatatccgaggccgaccaccgtgctgtcagggttgcgatatgatttatatgatacgtgagggcatgtgatgtgacatcgattgttgcctccacacagataagcttattactattgccagagcctgggctggactatgctttcagtgattatctaaatcaaatagactgaatgctaaagggaacatccaatggtgtccatctatatagcatttgttggagtcatgtagccatttgactgcccatcattaagaacagtggattctcatgctaaaaaaaaaaaaaaaaaaaaaaaaaaaagggcggcccccgactagtga

SEQ ID NO: 163622 - DNA, 1725 bp, Zea mays
  unsure (1)..(1725): unsure at all n locations
  Clone ID: MRT4577_807C.1
aattcggcacgaggcgcgatacgggatccttccagaagaagcagaaggcctccttcctgccaacacagcagcgccaccccctctcatggccctccccgacgacgccattcacctccccccgtcccccgtgtcgccttcgtcaagtacgcccctcccccttccaccccatggcggagtgctcgattccttcatctgatggcgccacccacctccccccgctctcctccgccgccgcggctgtcgaggctcacttccaggcgcactggtccgcgctcgacgctgccgcacgccaggacccggcgcgggtcatcgccgtgggggactggcggtccccgctcgagctccccttcctgtggcttggggatgtcccctggtgtcgtctccgtcagagatcaccggcgaggacggcatcggagacaacgacctttgcttctggccggggttattttattttggagatcacaactcactgtaattgttcatgataattatttgtaaactgaaaatccaattatctcgctatcaaacaccttcaaagaaataaattattctcgcgcgcagggcgcgcgttagctactagttcgtcatgtgaggcggaggctccgctctcgccaccgaggaggaggctctgagcgaggtcacaagaagttgtgatggaagttgcgtccgaaagtggaagctgtggtggattggataagagtataagaccttcgctcacgaatatttgagggtgagtggagctcgaatgcgggaagctaataatttatgggaaattgtggtgggtttgggggaagacccctcccgctccacaccccttttttatttctccatctccatgctccgatgccgctgatgatcttagtaccaacagaggtggaaatttgcagtcaatggatacctgcacggcgngtctattctatagaccgttcttctgattcagtcaatatccttcatctgacttgctggcacgaggccgccgctgctgcttgctcaaaaaagtgcctaacaattatccaacgaccccagccaggcccacgttgaatttagtagaaccatgtttgaacccttattgcccgcacgccgaacaaagaggtcacctaatcacttaaaaattcagcgcccatacaaccgtaggcgccatcttcttggcgtgagcgcgacaacaatgctagcgagcgctgcagactgtttcatctcttccaggcaactcaccagctgagactgagaccggcacaagatggcggctctgaccagccaccatagctccatgtcgtcgtcgacctcacaaatggcgtcgctcgccgtgctcgtgcttcctggtggtctgcgcaacgcttgcgtccggcgccgccagcgtccgcgttgggctcacgcgcatccactccgacccggacaccaccgcgccccagttcgtgcgtgacgcgctgcgccgcgacatgcaccggcagcggtcccggtcgttcggccgcgaccgcgaccgcgagctcgcggagtccgacgggcgccaccagcaccacggtgtccgcgcgcacccgcaaggacctgcccaacggcgngggagtacctcatgacgctggccatcggcacgccgccgctgccgtacgcgggccgtcgccgacacgggcagcgacctcatctggacgcagtgcgcgccctgcggcacccagtgcttcgagcagccggcgcccgctgtacaacccagcgagctcgaccacgttcagcgtg

SEQ ID NO: 163623 - DNA, 386 bp, Zea mays
  Clone ID: MRT4577_80800C.1
ttcgacctcaaccacccgtgcaactgacctatccatgtgaactaccgtctatctagcatctgtaaacccaatgagacagccctatatgatccaacatgcaatcgcagctagcatattacctgcatcacatcttgttcctacaacactcatgatccctattacagcagttacctttggcgcatttattgtaacaaaacatgatggcacaacaactacgacaacttgtgctagcaaaccttgctgcctactctcagcaacaacagtttattacattcaaccaactagctgcattgaactgtgcttcttattagcaacaccatcaactaccattcagccagctatctgctgcctaccctcagcaatctctttcatgcaaccaactgaca

SEQ ID NO: 163624 - DNA, 249 bp, Zea mays
  unsure (1)..(249): unsure at all n locations
  Clone ID: MRT4577_80801C.1
ttgtggacggtttcccttcccgcttcactcttgcccgcgccctgtcccggtgggcgcgaatggttctcgcgcgagtccttccgctggccggcccgtnggtcgggccccaccggcggttacttctggcgacttagcggggccggacccgccgggtgtgcttaccgtgcgggccgtcggctggcgcgcaacgaacgccatggcgggcggtgcttttgacccgnccttggacggttccagccccgcagaggt

SEQ ID NO: 163625 - DNA, 162 bp, Zea mays
  Clone ID: MRT4577_80802C.1
aaaacaaatatttggaattcagtaatcgatgtgttcaacggctgaagcaggtcttctattcggttggagccagcagcgaaaaatttaatccttcgtctgaagacctgccaggggccttcgaacatatcgaaggtgaaattgatgaccttgacaaagttatag

SEQ ID NO: 163626 - DNA, 346 bp, Zea mays
  Clone ID: MRT4577_80803C.1
cgcacgcgtggtgccagaagggccatgcgcgtgccgctggcgcatgtgagtgcggaggccagaaacaagatgggcactaactggggacctgaggctgcatggatcaagaccggaacctgcatgctggacgggaacaccctaagctacttcggtaacagcatccccatcaacctggtggaggacgagatcgcagaggtaatgctagctgtcagtgccgagaactaccgcatcaccaaccgactggaccttgacgacaagctgcacgctggtggacccttcgaccacgtgggcctggtcagcgacaacaaccaggccgccatcctaaaggtgaaggagaacaacaacg

SEQ ID NO: 163627 - DNA, 1094 bp, Zea mays
  Clone ID: MRT4577_80804C.1
cggacgcgtgggtgttaggggtaatttacaataccaatttaaatagtttaaaatatttttaatttaaataataaaaaagatttagttaaatatcttataaaaggttacaacttgcttcatgattttttggagcacctaatgatctgttttgctaacttcaattttttttgagcaggggctatctctaacaggcctttcacagtactccctcctgtacttagtccatcaaaactaatcatttatgtttcctaggtatgttttgatcaaaattacccctaattaatacatatagaattcgaactaaagatgtgtcgtgaggctacattaatctagcatggcatagacgtccaccttcttgtatggctggctgcatgcagactagaactcctcacctcgcatgcgtttgttcatatatcgacgtctgttcacatatactggatccttacctcgcatgcgtctgttcatataccgacgtctgttggcctatatcgggctcactccttgttcacatatactggcgtacatcgagctcactcctctgccacgacctcgcagtatgtcagcccctgccacacaagaattcaaagaccaagcaacgaaggagctgtcgacaatgtgagcaataagcagtcatcagatgagaagaattcaaagaccaagcaacgaaggagctgtcgacaatgtgagcaataagcagtcatcagatgagaaaggaacatgccaagagcagtcttcaagagctggcatgcctgctttagtgattgttggggaaaggcgtcacatgcggttagtgggtcgtgtagagagatgtagtggctggtgtcgggcccgtgccggcacggcccgataggtagtgccgtgtctgggccgagcatcaggcacgctgggccgacacgggcacggcacaattagcccctaggcatggttagacacgattatgcatgattagatccaaacacgactagttagctgtgtgttgtactcttttttcttatctagagttttctcataagggtgagtttttacctaaataggtttttaatgagtcatccattgcactaaacagttcaatattaactattttagtatgtttt

SEQ ID NO: 163628 - DNA, 336 bp, Zea mays
  Clone ID: MRT4577_80805C.1
agttgggccgcttggtcaaggacatgaagatcaagtccctggaggagatctatctcttctccctgcccattaaggcatcagagatcattgatttcttcctgggggcctctctcaaggatgaggttttcaagattatgccagtgcagaagcagacccgtgccggccagcgcaccaggttcaaggcatttgttgctatcgcggactacaatggccacgtcggtctgggtgttaagtgctccaaggaggtggccaccgccatccgtggggccatcatcctggccaagctctccatcgtacgcgtgcgcacaggctactggtgggaacaagatcggcaag

SEQ ID NO: 163629 - DNA, 183 bp, Zea mays
  Clone ID: MRT4577_80806C.1
ctgttcttttttttttatgccagagtcacacatgtttttcctataacaccggagcacacacaaggaagacaggaagagtattcttaggagggtttctacctcgaggaaagcatgcggaggcactcggcgtttcaccataatgggaaggaggaggtgtgcatgcattacacaacactattcatt

SEQ ID NO: 163630 - DNA, 107 bp, Zea mays
  Clone ID: MRT4577_80807C.1
ttttcgaacgcggcacactggcgggcgcgaggactgtattttatagttccaaatggctcctagtggagtggatcacataagactgtccgacggtcgtaaacaacaac

SEQ ID NO: 163631 - DNA, 650 bp, Zea mays
  Clone ID: MRT4577_80808C.1
cccgggcgtccaccccatttctattagccagcccacctctgctatgcgggcgcttcaggatgcggcactagccatttgggccgcgcctcgccgtccgggcgcaggtactcccaactccgccgccccggaaccctcgccgtcaccgtcaccaccacagccacagttgcatgccgccccctcacggcggcctccatggacgccgccgttggccgcccgagccgcgcgcctatccgctgcaccagcgcggagacggactcggtggatgaggtcgcgacgagctcgcacgccgcggaggccaacgcggggggcaccacggagcaagagggcaacgggagccccgtggccgccgctgccgcgtactcccccgtggtcgccggcgtcgacgggataaggatccggcggcggcccgtgacggggcccgcggtgcactacgtgggcccgttccagttccgcctcgagaacgaggggaacacgccgcggaacatcctcgagaaaatcgtctggaacaaggacgtcgaggtttcgcagatgaaggagaggaggcccctgtacatgctgaagggtccgcttgaggctgctccccccgctagggacttcgttggggcgctcaaggcgtcctacgatcgaactggcttgcctgctctgattgc

SEQ ID NO: 163632 - DNA, 437 bp, Zea mays
  Clone ID: MRT4577_80809C.1
cccacgcgtgcgagaatgcataggcatatgcttgtccccactttcctgtcttcaatgtttctatcctttttgcggctggttgtaccattaacggcgccagcgcctttgtttaatttgatatagcgagtcatgatgaatgttgtaaaacttagcaagagggcaggtgttgtgcgcactgaagggaagggtaacttgcgcatgaggacatacgcttgccacatgaggtacatgcactgatgacaagctgcttcaaagcacctcgaaaagagtaggtgtgaacaacttttatgggtttcaagatgcgataatttttttagatgatgttgctattcattttgctataggctagtgctctcgcgatgataggagctaatacatgggtcggtagaggaactctgcagacaaagaatatggaagaggtgcttccgtcgtattgt

SEQ ID NO: 163633 - DNA, 1287 bp, Zea mays
  Clone ID: MRT4577_8080C.1
gtaggcaagagtaaagttagcataggccagtttttttttttttttgacatcgaaacgacgcaccgaagtttctttagaactagaagtcagtacaaattaaagtcaggcgaacaggctgagtacacatatataaaggatgtgcacagaaaagctaaccaaaaatgaaaaaaatgtgtcactaggtaaactacaacagctgatccacaccacccaaactgctcggtacataggcttcatgtcaggtactttacccgagtcataatgctgacagcctctaacgtttgaattaacaagaaaagaagcgacatttcactggtatcaactatcgaaatctgactgaccgacatttaactggtatgctgctaattttctctttcccatgaatttaggcagcaacagcagcagtctctggcttatctattccttcaatgttggttattctcagttttgtcaactcctgacgatggccctttgtccggcggtaattttttctccgtttcttcttgaatatgatcacttttgcatctaaggcatgctcttccacaacagcatgaacagcagcatcaggtagtattggcctcccaataactgtttgagtttgtgaaccaagcatgagaactcggttcaagaacaacttgtcgttcacatcacagaacttcaacctctccgtgaagattgagtcgccattgctcaccttgaattgatgcgagccgatctgtacgatggcgaagacgggctcgtagggcttgaagggtttctcgtcagccccgagcggtgcgagcaccttgtagccgatctccgccgcctccgctaccttctcctcttccgtcttcccgctcggtttcttcgccgccaccgcctcctcatcgtccccccattccccctcgctatcctcctcgtcgtagtgctcttcttcgtcttcatattcgtcgtcctcgtcgccggaggagcgggtcgcgaagtggcagcgcgagaggtagtacagccgaggggaggggagggccccgggagctggggggccgagggcctcggacgaagtggtcagggttctggtcgcgatcgagcccggtgcaaaaggttgagatctctgagggacgaggcggctcgagagtaggcggaggaggcagcgccgcgacgccatggctgcggcgacggcggaggcaggggaacggaggccacgaaagtgtagaaatggaaatactcggtgacagcggttttgacgagactacaccgtgatagcccagactacacataccacagtgacagatcagacaatcccgattaaag

SEQ ID NO: 163634 - DNA, 901 bp, Zea mays
  unsure (1)..(901): unsure at all n locations
  Clone ID: MRT4577_80810C.1
ctcgaggccggccgggcttcctctccctcccacgccaccgtcaacgagctccagagccccgcaccgcgccgcccgccagcaaccaccccctcctcacccagatgccgcggctgccgggatcgcagcctgcgctggagcggcaactcgccgtgctcctgtcccacttccacccgtgttgcgaacctccacgcaccatcgcctgcgtcgccagcgcggagtgcctccggaccgcagccgaggaggaggccgagatgcagttgagcctctccacgtcgccctgcgcaggaggtgagaaggggggatcctcgggtggcgggcactgcgtgttctgcaacatcgtcgcgggcaccgcgcaggccttcaagctctacgaggatgatatgtgcttgtgcatcctggatgctaaacctctaacaagcgggcattcccttatcattccaaaaagtcattatccatcagtgcaaacaacaccaccaactgtactagcagctatctgctctaaattgccactcctgggtactgcaatcatgaaggctactcaatgtgatgcattcaatgtgctaatcaacaatggagagaaggcagggcaagttatttttcatactcatgtgcacatcattccacgtagcaaagatgataacctgtggtcttcagagacctactcaaggagccatatttcacatggccaggaaactacgcatcttgttagcagcatcaaggaaataatctcttcttcccccgaagactacagtactgtaatgtcatccacgccaaaggaactctgaaacaaattgaaaagaatgtagacnaccgattaaaagggcatcttttacttttcctctcgttcagcttgaagagcattgctgcgagatgaattgatgtacagctttgtctcagtcat

SEQ ID NO: 163635 - DNA, 375 bp, Zea mays
  unsure (1)..(375): unsure at all n locations
  Clone ID: MRT4577_80811C.1
gctttctcgagctccaccggcagccaagctacgtgttcccaccctagtctactctagcggcccttgtcctgctgcttgccttgcttgcgcctgtgatactgagcgggagatggaagcgtacgcggcaatggcgtcgccgcccacgaaaggcatgggcgtggacaagctcagctacgagatcttctccctgctcgagagaacgttcctcctcggccccggcacgcctccccgggcgcttctggacggcgggcgcgtgcgggtactggcgatcgacggctgcggcgcgggcgccgaggacgcgctcctggccgncgncgcgctcgcgcggttcgaggccgggctgcgcgaccgcaccggcgacccggacgcgcgcgt

SEQ ID NO: 163636 - DNA, 579 bp, Zea mays
  Clone ID: MRT4577_80812C.1
cttctcgcgatggcgccgccgcgccgcgctctactcgtcctcgccgctctcctcctctccctctcccttgaggccgcctccttccattccgacgagctcctcctcaacgatgacgaagagttcgagggcgtcgtcgaccaaccctacatcccctctcccacctagctccggagtactacacctcccatcacatatatgtgaacgcgaacgtggccgtccacaaggagatgaacgcacaagttctacacacgtccacaccgatcttctctagaacacaccttccgctccatcggaatcttatccaaccagctcgtcaacgtcggcatcatcacgaagaccatccatgtccttcgcttaacatgtgatgacgttactgtgcacagaagagctccgcctgaagaaggggtacaatgaccatgttaatatacatgccaaaatgcgatctaatgttatcaacactcaaaaggaagcctattgtgtgcctcttccatcattaatgagatgagttcaacaccatctgagaccgatagactcccattcgcatacgactgtggacgatgatctcatggttgggatact

SEQ ID NO: 163637 - DNA, 265 bp, Zea mays
  Clone ID: MRT4577_80813C.1
tacaccaatcaaatattttatgagtcctacagaagtagggggggaatcaaataatcaataaaacacctaatcctgctttttacacgaaccgatgctgccgacacacatgtcacaaccgctggtagtagcccaagagctaatcaacatactacgcttattgagggccactacactgtcaacttcctcctcctgcacccacctattcatcgatgcggtctccgccacaaggataacgttgaggtcaaaattactgagaccgacgccc

SEQ ID NO: 163638 - DNA, 170 bp, Zea mays
  Clone ID: MRT4577_80814C.1
ctttcgtcctgcggctcgcgcagatgcgatctcggcaggacgtgaagatgtaacccccgagtctcaagcctactcgccactcaagcctcgcagaggactcctgatggttgcattggaaactggaggtaagagcttctctatatccgctgtactacatagctgctcatgca

SEQ ID NO: 163639 - DNA, 1505 bp, Zea mays
  Clone ID: MRT4577_80815C.1
acccccacgcgtccgcggacgcgtgggcgggcgtctccactcgcgctcgcgcaccgcttggcctctcctccgccgcctcctacttccgtgctccccgctccggcgaattggtgcccacctgcgagctcgccccgttatagtgcactgcattaaaggcactgcgatccttccttttgtatctgggttattcttgaagaattaattttcactctggaggaaaaatgagtggtcctccaaagaggttgcatgaggagaatagccactctacacctgcaaagcggcctttggacgacaacagcttgtactcaagcccttccgggaaagctattcagtcaagcagcagtgatttccatggttcttttgaacatgatggtagatttgccaaaattcaacgtgttgaggctcgcgatgataagaggccaccccttttccatcggatgcatggtagctccaactttgttgatcacactgtcttgtctgacagcagattagaaccaaagcacaataaagatacaagggacaataaggcggatgatcgtgacacaaaagctgatgctctggatgtctatagtgatcccagtattgagtttcagtttaataaaattgacagtgatgtaaaaatagacaatagagctgatggaaatgaaataagggctgacaggaggggtcaccacgattacaaaggtgatactaaatttgacaaggataatcatcctattgttgcatcgagcttaggctggaaagacaacaaagaacataggggcaaaaggtactttgagcagccatctgataatgcggattggcgtttcccccgtcccggtttgcaaggtactgatgaaactctcaaaggtctaacttccatggaagaccgtaattcaagagatgcacatgattctgctgttgacaacaaagctgaatcaaaaggtgaagataagtttagagacaaggataggaaaaagaaggatgagaaacatagagactttggttcaagagaaggtgagagaaatgatcgtcggaccggtatccagcttggaggtagtggagttgagcgaagagaaatgcaaagggaagagagggatgctgaaaaatgggacagggaaagaaaagattccttgagagacaaggaaggcaatgatagggaaaaggattctgctaagaaagatccatctatggtaatggaaaaggataacacaatagttgaaaaacttttatctgatggacctgttaaaaatgctgaacatgagaatacaacaacagaaactaaggtgcttaaggacgatgcatggaaaggtcatgacagggatcctaaagacaagaaaagagagaaggatttggatgcaggagacaggcatgagcaaagaagcaaatataatgacaaggaatcagatgataatggcaccgaaggtgatacagaaaaagataaagttgtttttggaagtgttcaacgcaggaggatggtgcgaccaaagggaggtggtagccaaacatctcaacgtgatccccga

SEQ ID NO: 163640 - DNA, 309 bp, Zea mays
  Clone ID: MRT4577_80816C.1
ccggggttatttctttctttttattcgcggggcccccacaccggaaaaagaaattttcgccccccccaacccacaaaaaaaaaaggggtttgccgttcccggacccaaattaccgcactttcaaaaaaacaaaaaaagggagcggcggaaatgcccccgggggggccccgcttcccccaattttacccccgaaaagactaaaaaaaaaacccgcgaaccccccccgggggccagtaaaaagggcaaattctggaaatacccataccagggggggcggccggaccaaaggttaaaagggcccaattcccc

SEQ ID NO: 163641 - DNA, 230 bp, Zea mays
  Clone ID: MRT4577_80817C.1
gtgccagcctacgtctcacccttcgctccttcaacacaaactaattaaggagaaggatcgtgccctctttcctctgaccatcgacaggggaggacgggaacgtcacgtagacttcaccctgtagggaaatagtggcctctgattccggcatccggacgactgattaccgctcgtcgttaatctctatgccgaggtggtcctctatcaccatgtgtcgcggactgaccact

SEQ ID NO: 163642 - DNA, 203 bp, Zea mays
  Clone ID: MRT4577_80818C.1
aaaaaacaacgcgactgcattaaaaacccagcgtgatgcgtgctatataatataacgggcgtaagcagtaaaagtgtcatactagtaataatgggtgaccagtaggcatattgcttgagttggcactactagtgattgatgcggtagtagtactgtgtagagctctgtacaaatggtggactactagttaaaggtactgtggg

SEQ ID NO: 163643 - DNA, 972 bp, Zea mays
  unsure (1)..(972): unsure at all n locations
  Clone ID: MRT4577_80819C.1
ggtaccctcgggttcggccgggagtcgaggcgggacaggagccagacgcaacgcaacgcaacccacccccctctctgtcctctccgtcctgaactcgcgcctcgcttcgtctctcccattcccacccgctgaagcttcaaggagcttctcgtctgagcccgagctaacgagctcaccggcgggcaggatgctggcggcgtccaccaaggtcggctctaggctggcctctccgcacgcctccttgtccgccggtgctgcggcggcggcgctggctagctcccccgtgctgggctctgggatgctcccaggcgccgggttcggcgagacggggagtcaccacgcggcggacgcgccgccaccgctgccttgcagttcctcgggcgattcaagggaatattatcagtggaagagactggtgaatcaaaggcagtcaatgctagatggaggcaaagtgcctgctgcattgggccaccatgtttttggtgcgggctgttcctcacggaaccaacatatctacagatatttttcatcttctcatcaagggagtatatgggccaggagcaagattctacatgacctgccaggatatgtaaaaattgtggaagtagggccacgagatggtctacagaatgagaaggacatcgtgccaacacctgtaaaggttgagcttatacgaagattggccacatccggattacctgttgtggaggcaacgagttttgtatctccaaaatgggtacctcagttagctgatgcgaaggatgttatggaagcagttcggactattgggggtgtacgttttcctgtattgactccaaaccttaagggatttgaggcagctattgcagctggggcaaaagaaatcgcaatatttgcatcagcttctgaaggattttccaagtcaaacataaactgcaccattaaagagagcattgcccgntataatgacgttgctcttgctgcgaaagagaa

SEQ ID NO: 163644 - DNA, 204 bp, Zea mays
  Clone ID: MRT4577_8081C.1
tagcgagagcgcttcaactcgcgagattcgcccccttctggtgtcataagaagcgtgtaggaggcccatcgctcgctgagcgccaacgccgattgccgtcccgtgtgcccatgaatctctggagggtggagacccgcggcaaggccgcccccgctactcccgacgacccccttctcgtactggtgactgtgaccgtcctcgcta

SEQ ID NO: 163645 - DNA, 233 bp, Zea mays
  unsure (1)..(233): unsure at all n locations
  Clone ID: MRT4577_80820C.1
gttttctccccaccctcctccgcggctgccagtcccgccggagcgcagcgcgtgctgctctacggacgccgcgcgccgttcgcgggaccgctcctggaattcagcatcggcgccgtcagcgctgcggtcgcggtcaggacagggtgcgccatcttccaccgacgtcccctcttcctcggggcaagaggtctcagntcaactaggttggagtcagcttcgacacagggccatca

SEQ ID NO: 163646 - DNA, 191 bp, Zea mays
  Clone ID: MRT4577_80821C.1
ccggccgggccggggttgccaaccggcggccactcgcttcgactggcaggctcctaccattgcagacaaaaacgcaaacacgaggacgaggacgaaggttcgttcagttcaagaccagaggaggaggaagagaggcgcgcaagcggtccggtctcatatggcggccttccccgccctccgctcatcgtcgg

SEQ ID NO: 163647 - DNA, 439 bp, Zea mays
  Clone ID: MRT4577_80822C.1
catatccgatcccctacctctccagcatcctcccgtatccgtcgtgtgggctccggtcctgaccttgccagccatgggcaagatcaagatcggattcaacggtccctgacggaccggcaggctcgtggccagggtcgccctgctgacgccagggacaagagctcggccacgacccagaccacggagggcatccctccagaccaacatacatgtcatctgtgctgagaagcagcttgaggacggtcgcacgcttgccgactactacatgcagaaggagagcacccttcacttggtgctgcgcctcaggggaggcatgcagatcttcgtgaagaccctgacccgcaagactatcaccctcgaggtgggagtctttagacacccattcgacaacgtcaaggccaagatccaggacagggaggccattcccccagaccagcag

SEQ ID NO: 163648 - DNA, 955 bp, Zea mays
  Clone ID: MRT4577_80823C.1
cattgggaccctcgcattcggccggggttagccggcctctatccttctctcctttttttattcttctttccttgtcagccgcacgttccctctccccttttttctctccttcatttccgctcggtggatggacgactgaggctgtggcggtggcgctagccagcctcgcatgcgttgttccgggccggtgatggcagtgcccgcacgcgcctgctcccagacgacgacggcagccaccccgcgcgcctgctttggggccgcggcatggccagagcgcgtgctcgcctacccatggcgatgacgcagcccgattccgcagcgtggccagatcccgtgctcgcctgcttgcgcggcgggggcggcccgcgcttgaccgcatctgctcgaccagcgctcacatgcctgctcacggcggtggcggggacggcctgcgcgcctgctcgcatgctgggcggcaggggcgctcgcccgcgcgctcgcggccatggcggtgctcgcacgtgtgcttgtctgcgacagcacacgcctgcgcgcttggttgtggcgacgcccgcttgcgtttcgtgctcgttgtctgctcaaagcgcggcagcatagcccggtgctggcagcagcagggaccgacttcagtgtctgcgaagcgtaagcatgccttctcgtggcagtgggacgccggtgctcaagtagaaaatttgtgtgtttggcatctcagacagcttcaagctgcgataaatctgcagagatgtttttcttttattttctatgtgtacgtatgtttatactcgaaggtcgaaagaagctgaaaatatagaaattacttagtgcgagtgaaaaaaaaaaaaaaaagttttgtgaactcctagattgcaagagcaatcgtgctgataacgtgttaagaaccctttgctattgaatgtagtccaaatgcttcttaacacataaatataggagacat

SEQ ID NO: 163649 - DNA, 112 bp, Zea mays
  Clone ID: MRT4577_80824C.1
cagtatttgaatgtgcttctcttggtttctattctagttcctatgatcatttccaccagaacttgaacctcgacataaggaagctgtctcttttaaagtacaaaccgctgaa

SEQ ID NO: 163650 - DNA, 251 bp, Zea mays
  unsure (1)..(251): unsure at all n locations
  Clone ID: MRT4577_80825C.1
aaataaatataaaactaaataaaaaaaaacaaaaaattaaaaaaaaaaaaaaataaaaaagaggggggaatataaaaaaatgggcttcttcttttaatatttctaaacttgctgacccctttatacagattcaatttttcttctttagccccccctaattataattttctaggccggtanccacaacttatttctctggcaaatctcttacataacccaactttaattacctcctgataatcccctttttt

SEQ ID NO: 163651 - DNA, 564 bp, Zea mays
  Clone ID: MRT4577_80826C.1
tccaccgcggtggcggccgcccttttttttttttgcctaaacacgtagtttataatctctcacccactccattcttcaccatccttacatacttggcctctctttacgcacaatctagcaaccagtatgaatgacatccagcgtgccctgcctgtagattgcactaatgcaacaaaggttcaatgccttctgactgcaccctttctttaaacgtattccatatatcactatgcctttcgtaaggtccagattatagtacaccaccacatagggttagtcaaccagagacggcctaaataactccagtcccaagccaactgcctcagactcctatactggctggagcgcaaaaccatcaccgacatgcaccactacaaagcatcgctcactatgccttacgaactgatgacccataccataaccaccatgagcgccttccaggacgccagcaaggtcagcaactaccattgtagcatcaaaatctaatgacaccacgcctaagttcggtagccatgtcgacaaaggataatacgctatagctggctcggcagtactaataacgct

SEQ ID NO: 163652 - DNA, 450 bp, Zea mays
  Clone ID: MRT4577_80827C.1
gcggaatgaatactgtaaaggaagaggcggattttactgctgactgcgaaatgactgaatcagctatttgggcctgaacgttctggatacctgatgcgctcacttacatgaatattgatgtgcaattcgtacgaaatggtggctttactaatgatcactgactatagtgcccgtactccggtggttaagagacgacttggaggcttgctgacatagctcatgacatcgttctgtttgagaccattgctcacaagtgcgttgaatctgcaaagggatacatccatggtgaacaatatacatcatactgcaaaacagttgaccaacaagcttacttttatgccaaaaactctaaaatcgatcctaaggacacatttgcgttcaatatatatggtaccggaccctctaatatttcatactactctagttgcaactggaagtgaagacaaaagc

SEQ ID NO: 163653 - DNA, 1052 bp, Zea mays
  Clone ID: MRT4577_80828C.1
atggcagcgtccacggcctcgcgcatcttcacgcccttcctccaccggcaccagcggcgcacgaaggcagtcgtggtcgcagccgcgagcccgcccgacgccgaaccgactcctgcgacggcggacggtgcagggccggggaagaagaagacggtggacaccaggatacactggtccaaccccgacgaagggtgggtaggaggcaaggccaagaaggaaggcgacggccgcggcagcagcaagaacgagccgttgggagggaggttccttggcatagcgccagaggcggacatcgaggagatcaagacggcgtaccggcggctgtccaaggagtaccacccggacacgacgacgctgccgctcaaggtggcgtcgcagaagttcatccgcctgcgagaggtgtacaacgtgctgagcaaggaggagacacggcggttctacgactggacactggcgcaggaggccgagagccgccgcctgcagcagctcaggtccaggctcgaggacccatacgagcaggacatcatcaactacaaacccgtgccagacatggttgaccgcctcggcggcaagaacatgaagcttagcgatcaggccatgactgcgctcaccatcgatatcgttatcatcatcatctccatctgctgcatcatctatgctgttttcttcaaggagcagtactgacagcagcataccagcaacagcagcaaggttgcaggagtgtaccatagacagaacattatagctgatacaccagctgcccactggtgaagaagagaaggatggcgaagcccaagaggaagcaccatgctggcctacgagggagacaagggtacaaggctcaacctgtgatatcttggtttggtccaagtggatcaacaaatgaaccatactgtgaggacatatcaaatatgctcgtccgttgctacggatgaatagcacatggaactgatcatgtgttgatcctatttctatatcccatcccctgtgacgagtgttcaaataagtggagacacagatgacttcccaaaaaaaaaaaaaaaaaagcggcc

SEQ ID NO: 163654 - DNA, 1136 bp, Zea mays
  Clone ID: MRT4577_80829C.1
cattgggtacctcgaggccggccgggagcgacacctcatcgcctcgccctcctacaccacgacaactggaacgtacgagcctcatcacctcccgactcccctccacgccttggaatgctgctgcctgcgcagacgctaacacacacgtttcccatggcagcgtccacggcctcgcgcatcttcacgcccatcctccaccggcaccagcggcgcacgaaggcagtcgtggtcgcagccgcgagcccgcccgacgccgaaccgactcctgcgacggcggacggtgcagggccggggaagaagaagacggtggacaccaggatacactggtccaaccccgacgaagggtgggtaggaggcaaggccaagaaggaaggcgacggccgcggcagcagcaagaacgagccgttgggagggaggttcgcggacctcatcaacaacgcggccgagtctcactaccagttccttggcatagcgccagaggcggacatcgaggagatcaagacggcgtaccggcggctgtccaaggagtaccacccggacacgacgacgctgccgctcaaggtggcgtcgcagaagttcatccgcctgcgagaggtgtacaacgtgctgagcaaggaggagacacggcggttctacgactggacgctggcgcaggaggccgagagccgccgcctgcagcagctcaggtccaggctcgaggacccatacgagcaggacatcatcaactacaaacccgtgccagacatggttgaccgcctcggcggcaagaacatgaagcttagcgatcaggccatgactgcgctcaccatcgatatcgttatcatcatcatctccatctgctgcatcatctatgctgttttcttcaaggagcagtactgacagcagcataccagcaacagcagcaaggttgcaggagtgtaccatagacagaacattataggtaaattaactgataatgccctaagattgtcttttgggatgttatcatgcactgcatcatgtaatgtccaatagaataaggtaggaacgacgattattcatggtttgttgccaacaatcctatatttgcataatcaaatcataattccaaaaaaaaaaaaaaaaaaaaaaaaaaaaaaaaaacggcccctagggcc

SEQ ID NO: 163655 - DNA, 1219 bp, Zea mays
  Clone ID: MRT4577_8082C.1
gcaggcaagtgtaaagtttgcataaaccaggtcttacagttttcagacatcgaaacgacgcaccgcggtttcattattacactctagccgtcaacatgtaactgatatatcaggagttgagaacacatgtaaaggatgtgaacagaaaagctaaccaaaaatgaaaaaaatgggtgccactgtaaactacaatagctgatccacaccacccaaactgctcggtacattggcatcatgtcagatatcgtaaatgctgacagcttctacggttctacccttcaaattaaaacaagaaaagaagcgacatttcactggtattgactaacacaacccgccagaatgattgcctaggcaggccttgctgccataaacaaaaggcactgttactttctctctttgccctgggtttaggtagcaacagcagcagcctctggcttatctattccttcaatgttggttattctcagttttgtcaattcctgtcgatgacccttcgtccggcggtaattttttctccgtttcttcttgaatatgatcacttttgcatctaaggcatgctcttctacaacagcatgaacagcagcatcaggtagtattggcctcccaataactgtttgagtttgtgaaccaagcatgagaattcggttcaagaacaacttgaattgatgcgagccgatctgtacgatggcgaagacgggctcgtagggcttgaagggtttctcgtcagccccgagcggtgcgagcaccttgtagccgatctccgccgcctccgctaccttctcctcttccgtcttcccgctcggtttcttcgccgccaccgcctcctcatcgtccccccattccccctcgctatcctcctcgtcgtagtgctcttcttcgtcttcatattcgtcgtcctcgtcgccggaggagcgggtcgcgaagtggcagcgcgagaggtagtacagccgaggggaggggagggccccgggagctgggggggcgagggcctcggacgaagtggtcagggttctggtcgcgatcgagcccggtgcaaaaggttgagatctctgagggacgaggcggctcgagagtaggcggaggaggcagcgccgcgacgccatggctgcggcgacggcggaggcaggggaacggaggccacgaaagtgtagaaacggaaatactcggtgacagcggttttgacgagactacacagtgatagatcagactacacgtaacc

SEQ ID NO: 163656 - DNA, 1084 bp, Zea mays
  Clone ID: MRT4577_80830C.1
ggcacgagccaaggtcagcgccgacggtttcgctcgccagtcgtcgtccagttccagcggcggcgacgggcctgaggccgcggacgacgcgcaggagaccgagaacaagaagcccgctcgctcgctcactgcgtcggagagtgtcctcgtgctcgacggcgcgatcgctctagactgctgccacgttttcgatgaggcgtgggcggaagcggggacggaggaggaaggggggcgacggcctgtgaggttctgctgttccaccacgaggacatgggcatcccgtacgagatcgccaagctgggcatcaggcaggggatgtgggggtgcgtgaagaggatcgagccggggctccgggcctaccagcaggcgcgggccgcgggggcgccgccgtcgcggagcgccctgatggcccggatcaacaccaaggtcagcgccgacggtttcactcgccagtcgtcgtccagttccagcggcggcgacgggccggagaccgcggacgacgcgcaggagaccgagaacaagaagcccgcgacgaggagccacgcagcggcgaggctcctcgtgctcggcggcgcggtcgctctggcctgctgcacccttgaccaggggctcctgaccaaggctctcatcttcggcgtcgcgcggaggttcgtcgggcagaggaagacgttgtagcgtcccacacaccttgtcgctcgtacggtcgtgccgtgtgctgatcgccgacgtcgagaagcgggggaaggaggtggtttgtgtgggctttgtggatgtgtaattggtgctgatgccattgtggctgaaagagagcggacgaagagcgttttggtgtctacgtgtgtatacgctgccggctgtcggatcacgagggagaggggtttcctactatatacatgtgtaaaaatttgtttcatgtaatcttgtatctgagtgaccagatcaggtgattatgcagatgagaagaacagagttttttttcggtctaccttagctgttcttggtaaggatgagaacgaaccgggggcagtatcgtcagacagattgttttaatccatattctaggcgctgtttctttaaaaacccc

SEQ ID NO: 163657 - DNA, 446 bp, Zea mays
  Clone ID: MRT4577_80831C.1
tcttccccccaaggaaaggaatcctggggtggttttcccccagttaagcctcccttccttggggcctgggaccaatttcggccccccaggtgggttaacccttattcatttgggcgggggaaaaaatgggggtttaaaaccctttggcaaaaaaaccgggggggtttgggctttaaatccaaaaaaaaaaggccctggcccccttgtccttttttcccaggtttaaaattaaaagggtccccaggcttttgatttcccaacctttcccccttttttaccattggccacttgttcctagcaccaccggggggtcctttcaaggttgttcccccccccagggggtaaaatttccttaaaggggcttatttttgtcccccccccccaataaaaaaatttttgttaaagccctttcctttttttcccccgccaccaaaaaataatttttt

SEQ ID NO: 163658 - DNA, 949 bp, Zea mays
  unsure (1)..(949): unsure at all n locations
  Clone ID: MRT4577_80832C.1
cgatgaagtgcattgggtccgngagttccccttcgtcttcgacacgagggagtacataatcgcccggcggatatggaagctggggggcgcctattattgcgtcacaaagggcataccatgctcatccattccacggcgtagcagacctcggagagtcgatctgtattactcaagctggtgcatccgcgcagtggagtccaggagagggaacggaggaggaaggggggcgacggcctgtgaggttctgctgttccaccacgaggacatgggcgtcccgttcgagatcgcctagctgggcatcaggcatgggatgtgggggtgcgtgaagagcccctcgccgtcgctcgctccctgggtcggctccgatggggtacgtgctgtcggcggtgggcagggtgctggagcagcccacggcgtggggggcggcctgggagatggcactcctcgcggggccagttccagcggcggcggcgacgggctggagaccgcggacgacgcgcaggagaccgagaacaagaagcccgcgacgaggagccacgcggcggcgaggctcctcgtgctcggcggcgcggtcgctctggcctgctgcacccttgaccaggggctcctgaccaaggctctcatcttcggcgtcgcgcggaggttcgtcgggcagaggaagacgttgtagcgtcccacacaccttgtcgctcgtacggtcgtgccgtgtgctgatcgccgacgtcgagaagcgggggaaggaggtggtttgtgtgggctttgtggatgtgtaattggtgctgatgccattgtggctgaaagagagcggacgaagagcgttttggtgtctacgtgtgtatacgctgccggctgtcggatcacgagggagaggggtttcctactatatacatgtgtaaaaatttgtttcatgtaatcttgtatctgagtgaccagatcaggtgattatgca

SEQ ID NO: 163659 - DNA, 541 bp, Zea mays
  Clone ID: MRT4577_80833C.1
ggacgatgaaagtgcattgggtccggaagttccccttcttctgcagcgacagggagtacataatcgcccggcggatatggaagctgggggtccgctattattgcgtcacaaagggcataccatgctcatccattccacggcgtagcagacctcggagagtcgatctgtattactcaagctggtgcatccgcgcagtggagtccaggagagggaacggaggaggaaggggggcgacggcctgtgaggttctgctgttccaccacgaggacatgggcatcccgtacgagatcgccaagctgggcattaggcaggggatgtgggggtgcgtgaagaggatcgagccggggctccgggcctaccagcaggcgcgggccgcgggggcgccgccgtcgcggagcgccctgatggcccggatcaacaccaaggtcagcgccgacggtttcactcgccagtcgtcgtgcagctccagcggcggcgacgggcccgagaccgcggacgacgcgcaggagacagagaacaagaagcccgcgacgaggagcca

SEQ ID NO: 163660 - DNA, 967 bp, Zea mays
  Clone ID: MRT4577_80834C.1
gggtggggtgtgtttttttttttttttttcccctgaaaaaaaaattattcatggatcctccaatgcatgcagaaagacatctggaacgacgaggaagacagtgttctgatacaagcgcacaaggaggtaggcaacagatgggccgagatagccaagcggctgccgggccggacagagaactccatcaagaaccactggaacgcaaccaagaggaggcagttcgcacggaggcggagccgtgccagcgcctccacctccacctccaagggccctcctaaaccaggcacccttctgcagaactacatcaaaggcctcggtattggcccagtaagcaaccggagcgccgcaccgcttcctgagcctaccacaccgccgccgccgccgccgtcttcgcctgaaactcccggcggggcgaggtcagcgaagcaggctggtgaaagtaccacgctggaggtggaacgccgcagcccgtcgtgcgacgtgctggtggattcttcccagtgcaccaccattcttccacctactagcgtgcatgggtacgacgagtacagcaactgcagcggcgagtcccaccagtcctgcgaggtgctcctcgcccctatcatcagctgtggcgacgacgcgttctcggttggaatgtgcggcggcggcggcggcctgttcgacacggacgacgcggacgccttcttgcaagcgtacggcgtggccgccgacgacgtcgtcgacggcatcggcatgggctactacgtcttcaacgacggccatgtcgaccacgcggccacggtcgacgctgagatcgacatggagacgatgatgatgatgtgggacgacgacgacgactacgccgccgccctagggttagggtgtgctgctgggccggctggtgtggagagtgctgtgcgcgtgaaggaggagatggacctgcaggtggagacgatggtggcggccacgcacaagtgcggcgatg

SEQ ID NO: 163661 - DNA, 375 bp, Zea mays
  Clone ID: MRT4577_80835C.1
ggttgacccacccgtccgagaggagctcgcacagggcacagcgccatcgtctggcctccctgctgttttcccgaccgctcgctcgctccaggggaaggaatctagcttttaccatcgcgtctctggcgctctgaatcaccgtagcggggaccgcggcggctacctctgtgaggacgcagccggcacgccggtccgagctggtcgtgccggccgctgacagcatgggcggcccggcgcccgccaaagaggagaaaggcctcggcgagaccatcttcagcttcatcttcaagaaagaccaactggcggagacggacccgctcctcaacaaggtcggtgccgcgccggccgactactcccgcgccaagacaaccgccg

SEQ ID NO: 163662 - DNA, 809 bp, Zea mays
  Clone ID: MRT4577_80836C.1
tgggaccctcgggccggccggcggtaggccggacgaacaggggcggaattactgccttccctttccctttgcccgcactcaagggagcgaggtaccgtcaacgccgggccggcgcatgcccgtctccccgcgccgccacctccgccgtatcgcccgtcgtgtccgagccatgcttcccttcgccgcggagccggaggtgtccgacggcgacgctgccgcgggcgccgaccgccgcgcgtgggagccgcccttcgacgcgtcctcgcccgcgccgcccatgtcctacccgatcacgggcctcgccgcgctcgcctctcgcgcttacctgtccgccgaagccaacttccacctccccttcaacagggcttccgttcccgcgccagcctcgccgctcccgcagcgccgccgcgtcctcgtctgccacgacatggaaggcggataccgcaacgacgcggcaccgcagggcggggacaagccggacgcctacgcgctctggcattggcacctcgttgacgtcttcgtctacttctcgcactacctcgtcacgctcccgccaccctgctggatcaacgccgcccaccttcacggcgtcaaggttttagggacgttcatcgcggagtgggatgagggcgtgaagatttgcaaggagatgctcgcgaccgaggcttctgcacagatgtatgctgaaaggctcacagagctggctcataccttgggatttgatggttggctgattaacattgaggtcaatctttggcgttcacttcatcgataacctggaagaagttcgtcaagcatctaaccatgac

SEQ ID NO: 163663 - DNA, 575 bp, Zea mays
  unsure (1)..(575): unsure at all n locations
  Clone ID: MRT4577_80837C.1
cggtcgcgtgggcggncgcgtgggcggncgcgtggngaaaaaaaaaaaaaaaaaaaaaaaaaaaaaaaaaaaaaaaaaaaaaaaaaaaagaaaaaaaataaaaagagaaaaaaaataacaaccgcgtgcatgcgacgggctgcctctttatggtgccattttattcaagctactgtccgtggttttccacctttttgactgggacaatccctgggtttacccaccttatttgcgtcgcaaaaacttccgggtttcccccggtggttccctagctaaatggccggaaaacactggcccttcccaacattttggcatcttgaaggaaacctggttcccgccctgggtcgccacattaaccgccccttcagtggcgttttcgcccagctttgccgctccttttgccaggggcctagcgcccttttcttgcccttttttccctttttttttggctgttttctccggctttccccttcattttttaaaccggggtttccctttaggtttccgttttttccctgtatggcccctaagcggggcacaattttgaggaggccgttttttagcgtgggggccct

SEQ ID NO: 163664 - DNA, 165 bp, Zea mays
  Clone ID: MRT4577_80838C.1
atattttcttttttttttttttgaacgccatgggacacttagggaacatgttggattgtgcggcaaccctacatatgctgatcaacctaggttgctttccaggggttgacaataaagctgtaggaacgaatgttatggcaatcggattgcccaacctcgataaaa

SEQ ID NO: 163665 - DNA, 394 bp, Zea mays
  Clone ID: MRT4577_80839C.1
cagtccccaaagcattatcaggaatcccaaaacaaaacgggggaaacacgaatcaagcaggggccccgggggggtcacagacccacccctaacccggtaaataaaacgggggggggtccaggataaactaagcccccccctcagatcaccccctttttattcaaacccaaaggaccggccccggggggggccgccaatgacgggggggggggggcccacccgcccagatcagggggacctgggggggcggcccgaagtcagggaccttgaccaccttggggggggagccgtggcgggggcccaccttctcgagggcctggacaacgtccatgccctaaacaacctggccaaaaacacgggcttgccgtcaagccaaggggtcgcgacggggcaa

SEQ ID NO: 163666 - DNA, 701 bp, Zea mays
  Clone ID: MRT4577_8083C.1
tcccacgcgtccgattggaagatgggcatgatagcgcactgcaaccttgttcaatgagtgaaagagatagtgccatgggtcttgctagcctgggagcggatactcaatcatgtgttgatgtccattctgacaattggacatctgtcagcattagtggccgtgatgaagttttaactgctgccaaaattgcatctaggaaaaggagcaatcctggagacagaatagaagatttagatgcttcacttgtgggaagcccaaaccaagatgagtgcagcggagggagatgttcagttcgaccgagattgatactagagatttcctcagattctgattagcacacatttgtgttggctgatgcctgcatgacttggagaaaaggaaggggggtggatgtgatgctgtctaacgcggtcagcgaactggcaagcagctagaggcctctcctctatcctgtaattggagatcccatctctgttaggtggtagaacgtgacaccaggagcaacatatagagtggcataatagagctgaaccatatatacatgcagtgtaggcaattttgtaccatatatatgtcatgaaccgaggtggcagttagtcgatgtaaatatgctccctctctgtttttctatattattggctgaaaggagaggggaggatgcatgcttagtccggcctggttatttatcatttatttatgat

SEQ ID NO: 163667 - DNA, 601 bp, Zea mays
  unsure (1)..(601): unsure at all n locations
  Clone ID: MRT4577_80840C.1
gggttcccccgggctgcnggttttcggctcgnggggtggggggggggggggtgttngctgctatcccctccgttttttgttttgtcgcgtttttgttctgngctgcgctcgcgggtgtctggtgttctggagcgggggtggtcttgtgtctttctcttggtcctggcgtgtttttgtggctcttctcttgttgtggggggggggggggtgtctttctttggggccttggcgcctagatgctgctgtttgtctttgtgtcgtgagttccggtcccttggngcttgcttctgacctttggtggctttggcgtgcttctctcttgatttgtcttgcctgttcttgctctcattcttggtggctgttcntgtggctcgctcttcctggtgccttgnggcgctctttctgccttcttgttgcttgnctgtccctcttctngcgctgccgcggttgtgccgtcctgctggttgctgctttcccccgcgtccttgttgtcctctgctctctgccctctcgttgcttcgggccctttgcccccggcttggctttctcttctgccccccctttcctcctgccttctgctttcccttctttctcccccttt

SEQ ID NO: 163668 - DNA, 197 bp, Zea mays
  Clone ID: MRT4577_80841C.1
aaaaaaaaaaaaaaaaaaaaaataaaaaacctcccaagccaaggccggatcccaaatcgggcacaggggcacccactcccgcttcggtccctttcgttcaccccccatcatccatccatccatccatccagccatgggcggcaaggactgcggcaaccacggcgaggacgacctgcggcgatttatccccgccccta

SEQ ID NO: 163669 - DNA, 649 bp, Zea mays
  Clone ID: MRT4577_80842C.1
gcgttcgctcgtccgcccccaccactcccacacgcacaagccttcccaccccctccccctctccatcctccggccatcccctccagcaacccgacccagaacccactccacttccccggtgaggctgagcgatccaccaccaccaccacggcaacgacgacgacggctaggagccaccgcgcgcacggtggcagcaggtttgttctctgaacccttctcgtagaatacaagctaggaaaaaaaaggaggcctttcttgctgctgctatttgatcgagcaaggaagtgtgaacgaaaaagactggagcttttattgcaaaccgttcgtcttcctctttccttgcaagtaggaagaacagagatccggagaacctttttttgcctcctggattaagctgtctgttcttgcacgcctttttgttgttgtttcttttagcttcttttgttttggttattccttttagcaagcaagaaagggtcgtttttaagccccctttcaggctgcaccaaccaaaccattgaccaaaccaaccatcctcctgttcttcgcttttatactgaggaaacaggccttatttttccaattttttcttttagatagttccatctccagctcagttttgcaaacaaacacaaaaaaaaaaaaaaaa

SEQ ID NO: 163670 - DNA, 503 bp, Zea mays
  unsure (1)..(503): unsure at all n locations
  Clone ID: MRT4577_80843C.1
ccacgcccgtccgaaaaaaaaaaaaaaanaaaaaaaaaaaaaaaaaaaaaaaaaaaaaaaaaaaaaaaaaaaaaaaaaaaggaaaaaaaaaaaaaaaaagaaccaaaaataaaaaacaacaaacatgcaacaaaaataagcctatactttaagagacacgctaaaatatcatttacactggaccgggcgttgtgacaacgtgggggggctgggctaacccgtggccctttccccccttccccgccttgcggcgcttcccttttttttcggggggccccaatagcaacttggcccgcccggttttccctccccaacgtttgggcaccctgggtggtgaccgggtctcgccctgttgggggctctttcccttccggggtgggggggtttcgcgcggggcgccccctacgctcccctcccccttggggcccgcttttttgggtttcttggctccccttctttcccggtttcctgttttccggggggggtgtttaccggggggtccc

SEQ ID NO: 163671 - DNA, 759 bp, Zea mays
  unsure (1)..(759): unsure at all n locations
  Clone ID: MRT4577_80844C.1
ataacgatggaaatcaaagatatttttttatttgcaaaaaataatagttataaaagttcttacagcacactcattcattctttgcctatagagatctccaggtaatcccatatagcatagcttagtcgactcgagaccacacacattccactaacctgcagcaaagcaatacatcaatgttgcacaggcagcacgatggatgatcgcctgctagctccaactggacgagcaggaacacttgcccatccatgatcctttaaaggctcttgcctcttggcctccggtcggcgacgacgacgggtcgacggcgaggcacaaggcgagcacgcagcggacgctccataaagttgaacaggaggacgctgacatccgagcggagttccacggcgtgctcaccctccgccgcctctccccactcgaactcccgcacgaggttcgccatgaagtagccgatgtggagcaacgacatgcttatggcagggcacatcctcctgccagccccaaagggcatcatcttcatcgtctcgtccccggcggccatggacagcagcttctccttggcagtagtgctttctccgcctccgcatgcacggaagcgttctggcttgaactcgccagggtcgtcagaccacactgtcttgtctcgctctcgccctagagcctccaacgagaagacgatcttggtgcccgtaggaacacgttgaccatcatgaaccacttggggtctcttcatcacctttnttatatttctccatattc

SEQ ID NO: 163672 - DNA, 532 bp, Zea mays
  Clone ID: MRT4577_80845C.1
cagcaaaccttttaaaaaggggggatccttatgctggctttccctggctatatgcattgtagagctcctgatctgcatcaagtttgggcatggtaagtgttgctccaacttctctgcgtatgcaacttgcaagtgctgtttacacctccttgaagcacgctgactacacgggatcctgtgcaggtctgtttccgaggtcacgagcttggtggggcggggcgttctggtcagcagtcgccttgcttcttgcgctctttgtgtggacatggaaataccgaacagtgaaaaggaaaagggtataattgttacaaaggaatgtttattttgcctccattctttacccaattcggtgttaccgtgtacataaaaaatctattcaaattgtgtacatgtagcagtagtagtcagttttggtgatctgaagaggattatccatggtaatttttttttgaaaaaaaaaaaaaactattatccgtcagcaaagtattttgaccggctctcaaaaaaaaaaaaaaaaaaggcccctagggcc

SEQ ID NO: 163673 - DNA, 429 bp, Zea mays
  Clone ID: MRT4577_80846C.1
cccacgcgtccgcacaaaccatggctgcgattatcacaaccatgtcgacacccacgcgcgcgcgggttgtcatggctgacgtggctgacttactggtcaggccatcatcgtacgtacttccgaaacggcccgcacacaggaacatcactgtcacctatgggaaggactgactggacgctatagcgacatgatatggcaagccgacggttgccgctcctgaccacaacggtgctggctgcaggtacaaggacgtgaacaagcccgccttcaataacatgggcgcatgcagcaacatccgcatcttcaaggatggtctgggctgcgggtcctgcttcgagatcaagtgcgataagcctgtggagtgctccggcaagcccgtggtggtgcacattacggacatgaactatgagcctatcgcggcgtaccact

SEQ ID NO: 163674 - DNA, 249 bp, Zea mays
  Clone ID: MRT4577_80847C.1
tttactgaccagaacggccccaagagcacggggggaattttatattgagactaggattcatcaagggcgagaagcaagatgctgtacgccagctcgaccggcccagtcaagagggagctgcatggaaaagaggtggagctacagaggaaccgacccgagcgaaatgagcattgacatagctgaaccgcgagcccaacggatgagcctggccgctgaggacctctctacatgggcgcatcgggttattta

SEQ ID NO: 163675 - DNA, 174 bp, Zea mays
  Clone ID: MRT4577_80848C.1
aaccaacgggggcacagccaacggggccccaggacaagctcgaggagaaggggaagaccaagcctgaacagcagaggacggcactgttagacacacgagaaatgtcccccacgagcctcccagagcagcacactagcatgcggaccgaaaaagcgacggcaagtcaggcggcac

SEQ ID NO: 163676 - DNA, 206 bp, Zea mays
  Clone ID: MRT4577_80849C.1
gaaaatggaaacggacttgtttcttttatgttcattttataaaaattccaatttttgtatttcttgtctcatgaaaatctaacaaaccagggatgctcagacgcccttttataaaaacctcaaatgatcaaacaagttcccggacgcatttttaacaaaacaaaacggcttttaaacccaggttacctaaaacctagacaccaaca

SEQ ID NO: 163677 - DNA, 994 bp, Zea mays
  unsure (1)..(994): unsure at all n locations
  Clone ID: MRT4577_8084C.1
gggtgccactgtaaactacaatagctgatccacaccacccaaactgctcggtacattggcatcatgtcagatatcgtaaatgctgacagcttctacggttctacccnnnnnnnnnnnnnnnnnnnnnnnnnnnnnnnncactggtattgactaacacaacccgccagaatgattgcctaggcaggccttgctgccataaacaaaaggcactgttactttctctctttgccctgggtttagagaacagacaccttgctctctggcttatctattccttcaatgttggttattctcagttttgtcaattcctgtcgatgacccttcgtccggcggtnntatgatcacttttgcatctaaggtatgatcacttttgcatctaaggcatgttcttctacaacagcatgaacagcagcatcaggtagtattggcctcccaataactgtttgagcttgtgaaccaagcatgagaactcggtttaagaccaacttgtcattcacatcacagaacttcaacctctccgtgaagatggagtcgccattgctcaccttgaattggtgcgagccgatctgtacgacggcgaagacgggctcgtagggcttgaagggtttatcgtcaggccgaagcggtcccaacaccttgtagccgatctccgccgcctccgccaccacctcctcatcgtccccccattccccatcgctcccctcatcgtcgtagtgctcttcttcgtcttctccgtcgtcctcgtcgccggaggagcgggtcgcgaagtggcagcgcgaggggtagtacagccggggggaggcgagggcccggggagctggggagccgagggcctcggacaaagaggttagggtccgggtcgcagtcgagatcggcgcaagaggttgagatctctgaggaacgaggcggatcgagaggaagcggaggagacagcgccgcgacgccatggctgcggcgacggcggcggcggtggcgggggtaggggcgaggaaag

SEQ ID NO: 163678 - DNA, 448 bp, Zea mays
  Clone ID: MRT4577_80850C.1
cattgggtacctcgaggccggccgggaataaataagatgctatgttatacttctcttctgaaaaaattaaaaaaaaaattattacttgtgtttctttcttttgttttgttgattattgagaataatgatgaatcacgtcaggtggctgtcggatgagtctgcaaactcttagggctgtcggcgtgtccagggggcaaaaaaacagagaaaaggcattgaaagaaattgtccatacatgaagaagaccatcgtcatcctctgtgtataggaaggcattaaaaaagatgctttgttttcttctgcctttctttgctttgcttgtgttcccgttttgacatatgagaaatatcgggtaaacacactaccttccctattatacatttcccttcattttattatacatatatactctctctctctctccaaaaaaaaaaaatagaaagaggcc

SEQ ID NO: 163679 - DNA, 315 bp, Zea mays
  Clone ID: MRT4577_80851C.1
acaaaaaaacttaatctactcttctgggctaacggacggcgtcttttaaggacaaaagatgcatcttcagtacatcaaaagtttcaaaggaagtgcatacaccctttgcctcttacagatacaacgaatgcacatgacacgcccacttcttttgtatacccgaattattgacatggaagcctggaaccggggactatcacaatcgcaatgtgattctgaggatcgcctgaaaggtatgacagcttctgactacatgattcagaccgagttcatggttcaaaaagtttcattcgcaaccagcgacataacggttca

SEQ ID NO: 163680 - DNA, 838 bp, Zea mays
  unsure (1)..(838): unsure at all n locations
  Clone ID: MRT4577_80852C.1
gatctccaaactcttctggtcctcntcaagagagttcctcctaaggggaaaaacttgcttgtcgttggaacaacaagcgaggttggcttcctagaatctgttggaatgtgtgacgtgttctctgtgacctaccatgttcccaaactgaaaaaggaggatgccaaaaaggtattgcatcatcttgatgtgttcgatgacggagatcttgacgcagcagcagaagcactggacgatatgccaatcaagaagttgtacacacttgttgagatggctgctcaggggccaaccggaggaagtgctgaagcgatttatgccggagaggagaagatagatatcaaccatttctttagcatcttgagtgatattatccgttactaagcccgcatggagccgaaatgaaccctataagtatccagtaggagtttgtttgcacccgtgcttcatcaaccatttctgtagattggtttgatgtgttgtttttgtttgatgcacctactagagctgttggattagatcagaggcgaattacacggtatatcatttttgtattgtatgacgatgtttatacagttcttaatgggatccagcttaattcctgagcatatttttttgtatcaaaaggatatatattgcttaattgaaaatccatggaaggccccttgttttgtttagcaaaaaaaaaaaaaaaaaaaaaaaaaaaaaaaaaaaaaaaaaaaaaaaaaaaaagaaaaaaaaaaaaaannnnnnnnnnnnnnnnnnnnnnnnnnnnnnnnnnnnnnnnnnnnnnnnnnnnnnnnnnnnnnnnnnnnnntagagctgttggattagatcaaaggcg

SEQ ID NO: 163681 - DNA, 2655 bp, Zea mays
  Clone ID: MRT4577_80853C.1
gccggccgggtccagggccttagcagaactgactccctcttcttcgtcttcgcgagcagcgaggcatcacacgcgcctgcacgatctcctcctgcgagcgagatctcaccaccgcagcggcgccgtggccatggcgggaaggtactaccagggccagggcggtggcgggggcacgtccatggaggtagtcagcacgccgaaccaggagctggccctcaccaactgtgcatacgtctgccccgcggacctccgtcgcttccccaacgcgctcgccgtcgtcgccgactcctgggtcttcaccctacgtgaacacaatgctgtcgcaagcgggcgcattgccttgaatgctattcagcgtcggcaggcaaaggtttcagctggggattctgttactgttagcagttttgtcccccctgatgatttcaagttggctttgctcactttagatctagattatgccaaggcaagagccaaccgaaatgacgagctggatgctgttgtgcttgcccaacaactccgtaagaggtttctgaatcaggtcatgaccttggggcaaagggtgccatttgaatttcatggaacaaactatgtattcaccgtcaatcaagctttgctagagggtcaagagagttctacaccattggatagaggattcttgtcaagtgatacatacatcatatttgaggctgctcctaattcaggaattaaggtgatcaaccaaaaggaagctgctagcagcaaacttttcaaacataaagagtttaacctggaaaaattggggataggtgggttaagtgctgaattcactgacatatttcgtagggcattcgcttcaagagtctttcctcctcaagttgtcagtaagttgggcatcaaacatgtaaaaggtatactgctatatggacctcctggtactggcaagactcttatggcacgacaaattggaaaattattgaacggaaaagatcccaagattgtgaatggacctgaagttctgagcaagtttgttggagaaaccgagaagaatgtgagagatttgtttgctgatgctgaaaatgagcagaggacacgaggtgatcagagtgacctccatgttattatatttgatgaaattgatgccatctgcaagtctagaggatctacccgcgatggtacaggtgtacatgatagcattgtaaaccagctccttacaaagatagatggtgttgaggcgttgaataacgtattgcttattggaatgaccaatcgtaaagatttgcttgacgaagctttattgagacctggacgattggaagttcacatcgagataaacctgcctgatgaaaatggtcgtttccaaattcttcagattcatacaaataagatgaaagagaattctttcctatctccagatattaatcttcttgagctagctgcgcggacaaagaactacagtggagcagagttggaaggtgttgtcaaaagtgctgtctcatttgctttgaaccggcagataaccatggatgacctcactaaacctttggatgaggaaagcatcaaggttaccatggatgattttgtgaatgcacttcatgaaattacccctgcatttggtgcttccaccgatgatctcgaaagatgcagattgcgcggtattgttgattgtggcaaggcacataagcacatttatcaaagagctatgctcctcgtagagcaagttaaagttagcaaaggtagcccactcgtgacttgcctattggaaggtcctgctggaagtgggaaaacggctatggcagcaagtgttggcattgacagtgattttgcatatgtgaaaattatatcagcagaaacaatgattggtttcagtgaaagcagcaaatgcgcacagatttgcaaggtttttgaggacgcatacaagtctcagttcagcatcatagttcttgatgatatcgaaaggttactggagtatgtagccattggaccacgtttttcaaacttgatctctcaaactcttctggtcctcctcaagagggttcctcctaagggaaaaaacctgcttgtgattggaacaacaagcgaggttggcttcctagaatctgttggaatgtgtgacgtgttctctgtgacataccatgtccccaagctgaaaaaggaggatgcgaaaaaggtattgcatcatcttgatgtgttcgatgacggggaccttgatgcagcagcagaagcactggatgatatgccaatcaagaagctgtacacgcttgttgagatggctgcacaggggccaaccggaggaagtgcagaagcaatttatgccggagaagacaagatagatatcaaccatttcttcagcatcttaagtgatattatccgttactgagcccgcatggatcctaggtatccagtgggaggttatttgcacctgtgcttcatcaccccttgtggcatccttacagcgtgttaagagtggtttgatgtgttgtttttgtttggtgcgcctactagagctgttggatttgaccagaggcgaattccacgatatagcgttttttgtattgtatgacgatgtttctacagttgataataggatccagctatagacctcagaaaagaaatgaatttcattctccttttacaaaaaaataaaaaaaaaaaaaaaaaaaaaaaaaaaaaaaaaaa

SEQ ID NO: 163682 - DNA, 249 bp, Zea mays
  Clone ID: MRT4577_80854C.1
aaaaaaaaagcacaatttccccacaaattgaattaaactcacaaacccccccgggggatttatttttaaccacaaaatccccggaaacttatttaattttacccccccctcggtcaaattttgcaaaaaccccgggggggtttattaaaattcaaaaaagtttccttaaaaccccacacaaaaaaattttttcccttaacccaacaaaaatattaattcccaccccccgggttactttttcaatctccc

SEQ ID NO: 163683 - DNA, 722 bp, Zea mays
  Clone ID: MRT4577_80855C.1
attggtacctcgaggcggcggggactttttctaactcttggcagagaaccgttttcccagtcccaatcctgggctacaaggaaaatcgcccacaaagacgacataagattaaccctccgcgaacccatgtaccttggccttaacaagctggaaatccacgacaaccacaaactacacgccttgtatgacccaaggatctcccaggatgtcagcggggatgttctggtcgaggagtttatcggcattgacttcaccaacaagaaccgcatgttaaacactaagcttgcctcttatgcttatcaggtcatgactatctagtccgtgtcgcaactatagctgcagaacagggactctttcgattttttattatgacacaactaatgtgatccatctaaattaacactggattgcacttgtccttggcgcagatgtaatatactttgctttcaaaaatcacaatgagagtgagattgaccatcttgacagactggactcttggattgcgatatgaacaattactttgaatggctattaatgcagaattggattcatcacgttcttcttgcctaggggtgcaccaaacgggaaaaatgccgctcttccttgacacctactctgtgaactctgtgactacgtctcataactggctaatgcataagtcccctttcttgataaagtcgatttcctctagagctcctgtctcgaaaaatatggtccctaag

SEQ ID NO: 163684 - DNA, 172 bp, Zea mays
  Clone ID: MRT4577_80856C.1
cgggtcgacctcacgcgttcgaaaaaaacataacaacaaacaaaaataaatttaaaaaaaaatttttaaaaaacaaaaaatggtgaaatataaggagatttatcatatgacacatacatcatatattaacaacttataccaatctacacaaactttgatgcttcaactattt

SEQ ID NO: 163685 - DNA, 111 bp, Zea mays
  Clone ID: MRT4577_80857C.1
catctacgttattaaggttgggacaaaattagcattttggcgttcttccccacagggaaatatatgtaatcttttccttcccatttaaaacatgcccacgggcggccccgg

SEQ ID NO: 163686 - DNA, 778 bp, Zea mays
  Clone ID: MRT4577_80858C.1
gcagcacatcagcgctcagcgggcgggagcagctcagaccgcagcgatgcaggggagcggcgcactgccgggccttaccggcaccgggcgcggcggcggcctcctcccgtgcggcagcctcggcaggcgaactcccgctggccgacgcggcgccaccagcgttcgcgccgtcgacggggcttccgttgcagtatgcgccggctcgagcagcccctgcacccgtaaagatgcccgacttcatcgggcagattgatgactggggtgtatttggtgtgacgcatttcgtcgttgcaggagtcgagttcggcaaaagattcatcgcacagaagaaatgccaagtctgcggaggctctggtcttgtaacgaagaacgactattacgttcgatgccaagagtgtggtggttttcttccgtggcagtcttggcgaagattcttcaccgggtgaacgtggtccctgatcagtggtcttcagtacttgtaactaaagatacaatagatggacatcaccgtgctttaaaatgcctcctcactagaccataaatgaagcaatatgccgtagacatgtagaattacccgcgtgcatgttgtcccacaggaaaatgagtgtttgcaaaaggcatcctacaaaaactatatttttgccccttatgtaacatccagtgaaacaggtgatgtgtctgaagtttggtataatgcggttaatgaaaccaggcagacttatagttgctacaaatacaaaaaaaaaaaaaaaaaaggcccctaccaccgcgagtggag

SEQ ID NO: 163687 - DNA, 241 bp, Zea mays
  Clone ID: MRT4577_80859C.1
gtggggctgttaatttcaaatcttgacccgggggcgaaccaacacccccccttgggagaccaacttgagctaaaccgagaaattctaaaaggtgcccccggggggaaaatagtttcctcttggggggacaaattaacactggaccaaaaccgaaaaaaaaaaagctccggggggaaaaagggaaaagctaacaaaaacaaaaaaaaatggggccccagacaaaaatggggaaaccaagggg

SEQ ID NO: 163688 - DNA, 472 bp, Zea mays
  Clone ID: MRT4577_8085C.1
aagccaaaccaatcaaaactttattacaaacttctttattgtacatccatgtccttctcttcacggaggacagaatcataccataactttatttcaacttaaactagtattaggaattaattgaagtaaaactgtataaaaccgcaatatcaaggttttaatattttacttattaggcaccttaatataccccacatgtgaggaattggcccctctagtaagggtttgaagatcataagctacccaacaccttgaattctccttgtggtagaaataacccacacacttgcaatccttggtgcatttgtttccacaagtactctcactcactctatcccctgtagtgtatttgctcatgtaatgctcaactccttcaattttgtagtagtggaaatcactagccttgcatgatgtcacagccttggcagtgcaattgttgctccaccaagtagtccattttccaatggacaag

SEQ ID NO: 163689 - DNA, 1170 bp, Zea mays
  Clone ID: MRT4577_80860C.1
ctcgaaacgaggcgtgcagcacatcagcacattcgcgggcgggagcagctcagaccgcagcgatgcaggggagcggcgcactgccgggccttaccggcaccgggcgcggcggcggcttcctcccgtgcggcagcctcggcaagcgaactcccgctggccgacgcggcgccaccagcgttcgcgccgtcgacggggcttccgttgcggccgccgcctccgcggccgccgattccccgctcccgcccgtgcaggtcacctggcagattgccgtcggtgctctagctggggtgacgcctttcgtcgttgcaggagtcgagttcggcaaaagaatcgtgagtgctagaggctagagctgggcctgtttcttctcgctctttagcgtactgctttcttttttcaactaagttttccctatagctgaataaattgtcgtccttcggaagttgggaccaaccaagaggcagaaaatgtttttttaaaaaaaactgcataactattgttagccgaaatttactacagtagcactgaatttctgtcagttccataaataatgccgttatgcaaatgatcacagcggcactgtccttcattcatggtcgtcgtttctttcctgattgttcagatcgcacagaagaaatgccaagtctgcggaggctctggtcttgtaacgaagaacgactattacgttcgatgccaagagtgtggtaagaagagccccatgatggcatacttgtggagaatcaaatgtgacaatggtttgctctccatgtttcttccgcaggtggttttcttccatggcagtcttggcgaagattcttcacggggtgaacgtggtcctctaggaccctgatcagtgatcttcagtactcaactagcgatgtaactaaagatacaatagatggacatcaccgtgctttaaaatgcctcctcactaaaccataagggtggatttggtgataaagggatcacgggaggattagagggattaaggggaaaataaactaattttcctcttaatcccctccaattcttccgagatcctgggtcaccaaatcagctctaaatgaagcaatatgccgtagacatgtagaattactcgtgcatgttgtctcacaggcacccagtatttgcaaaaggcatcctaaataaccagtttttttgcccctaaaa

SEQ ID NO: 163690 - DNA, 442 bp, Zea mays
  Clone ID: MRT4577_80861C.1
cccacacgcacggggacgccggggcttcttctctgtttgctacttaggcggctcccggctgcttctgctggtcggcgcccagatccacgtataagagaaataacggccaatctgggtgcccgacgctgacccatcatctgcgatggaggatacagctgtgacaaagggaacggtcactgctgaggatgcatgctccggagaatcgggataacgcctcagggactgaggttagaagtgacccggatgccattagcgaagaacgctgctcaagagcacaacagatgctatcaaaatggcgctgaagggcattcatggtgaagatgcgaatatggcaaacgctgaaatcactgagtatggtgctggaggctatgctgctactattaatgagggggcttctgtaatagtcaacacggatgccgatactgaggatgatgccaccgcc

SEQ ID NO: 163691 - DNA, 554 bp, Zea mays
  Clone ID: MRT4577_80862C.1
ctcgaaagcgcaggggaactgcgccttaaatatattaagaagaaaggtctatagcagaccagaggttacaacattgaactccttacggaggccagtaccacacataagtgaaagagtccaaaagaagccggactcaaaaaactactaaagtaaaaacagggggggagggggttcagtcatcaggcaaagaagcttagacaaaaaaaaacagcacaggaatatacaattaagtaattaacaaacaggtatgcctacaatttgttgattcaaattaactcaacaggttaattcatggattagagtgaaataaaataagtgcgtactgcgtaggccttatgcaacacaccatctctgagtattattaggtgaaaaaggggtgtacaatagcagataccttgatatcatctctaggaattcccctggatggtgcaattgggtcattatcagcctgcacatactaaattatgattgaagttataacagaaaagacatgctttgaccttcacaatatatgcacataggcacactaataattgaatctgacaaatcttttt

SEQ ID NO: 163692 - DNA, 258 bp, Zea mays
  Clone ID: MRT4577_80863C.1
acattacattttttttaaccaaacaacactccgaagcacaggggcacccgcgcatacacaggggtattcctttcaaaagggggacggcaccccatatgggtgggcccactggaaacgcttagattccccccaatcaaaacaaaaatgcacgccccgaacccgttttttaggcgggaaccccccacatagcaaaaaaaccgggttatcccaaacccccttcgagctcccttagggtaagcaactcccaaacccccaagc

SEQ ID NO: 163693 - DNA, 311 bp, Zea mays
  Clone ID: MRT4577_80864C.1
agaaaaaaagcggcacatggcaaaacagaaacaaagcgctttctggtgccacaggtatggcggggcccataaatttggaaacttcagggcaagaactttatggcgttgggccctacaaagggcatttttgggagaggaaagtcccttgaactggctgttaaaaacgcagggcattggagaataataaatgtgccttccaacttccaaaaaaatcaacaggggttttctgttccactggcacagggaatcaaatatattcggcacaaaagcattcatttcccttttcccggacaggttccattggtgcctcc

SEQ ID NO: 163694 - DNA, 154 bp, Zea mays
  Clone ID: MRT4577_80865C.1
atgcattctatacaatccacccatgcgttcggattttgctcgtggaggccacatgggggggctaagctaaagccttaccggcacagtttctacagaattcggacatggctaacttgaactgatagctaatcatttcattcatcaaattgtcgaa

SEQ ID NO: 163695 - DNA, 165 bp, Zea mays
  unsure (1)..(165): unsure at all n locations
  Clone ID: MRT4577_80866C.1
catttagctnttattcattgaacacatactctgtttctgtattagctcagtcacctgttatgtactttattataacaactggcacacgtaactagtaagtgttcttaatcggttgattgtgattgctggtgtctggctattaggaaactattgttacagactaca

SEQ ID NO: 163696 - DNA, 310 bp, Zea mays
  Clone ID: MRT4577_80867C.1
aggcaggcactcctgccagcgcaccggccgactcaccgaaggcacgcagtcctgcagctcctgccaaggatctcgaatctgctgccacgagaactgcacccgctaatgcacctcaagccgcctccatctcctccgttgctgctgctccatcgtcgtcgtcgtctatgaagtctggtccacctgccgcacctatcagctccgcctctacaccgtcttcttccaccgacgaagagttgagcccttccccgtcggtatccatcgacgaagttgcgtcccctgtgtctgatggggcagcttatggatcgggagc

SEQ ID NO: 163697 - DNA, 2853 bp, Zea mays
  Clone ID: MRT4577_80868C.1
ttcttcacgcgtccggagagagttctcctgagaagcagacgagctaccagtgccgtggctcgttcctcgaggtacataacgagcagatcaatgatctgttggaaccatctcagcgtgacctacagataagagagaacgctagcaatggtatccatgttgagaacttgactgatgaatacgtgtcaacagcagatgatatcagtcagatcttgatgaagggactgtcaaacagaaaagttggtaccaccagtatgaacttaaaaagttcccgctctcatgtgatattcacctgcgttattgaagcatggagcaagggttcatcaaatgggtttagcagctcaagaactagcagaatcacctttgttgacctcgctggtcctgacactgatgaacttggtgcagcaaagcattccacaaaggaagaaagacatcttaagaagtctctttcaaggcttgggaaactagttaacgttctttcagaaactccagagtcacataaagttgatttaccatatgagcaatcccgtttgacacatgtgctgaaggatacactaggtggcaactccagggttatatttttgtgttcgatttcttcagagcacagatgcagatctggaactttaagtacactaagatttggtgagcgagcaaagctaatgccaaacaaacctgtgataaatgagatatcagaagatgatgttaatggtttgagcgatcagatacgtcagttaaaggatgaactcataaagaacaaatctggagacaccacaacttgcaaggctaggtacttcagtgcacaaagtgcccgtgaaagtttgcatactttgcgagtgagcctcaaccgctctcttatctttcctcacatagaagttgattcagaggaagaaatggatgttgatgaagaagatgtgcaagacctgcgtgatcaaattagcaagattcactcttcatctgaagatacattggatgactttatggatgcagaaagtggagacgaaagcactccttgttctgtgggaagaagtgaagatgatcaagtaatcatagatgattttgaaggtccacaacaggaagagcaaaaagaagtatctaacaatacaaatgctaatgaagacctcggttctgacagaaaatctaatctatcaattattgcctccacacggttatcacctattcaggatccaacattgtgctcttctccaaagatccacaacaaggcaagaatgagcatcacttcactggggctatcaccaaacaggatgacaattggggcatgagcatttgattacgaccttgaaatgtggtctaatagtgcgtatcggacctctattcgatcaagcaagatagtttctatgtatactgcttgtatgggaactgaatttgaacgagttttaatagagtaccatcaacagaatccagccccaagaaaatcatttattggtctttcatttgaccatttcgctcgtcagtcagtagcaaaaatcagttcagctgttcaggctctaccagaggaccaaggaaacaacctttgttcattctgcaagaagccaatgaacacaaatgataatcagacagaaaacgtaaatttagacaaacagattaaggatggcaacataactaaggaaattgcttccaagaaagaaactgagcttgaagctttatgcgaagaacaaagagcaaagatccaggagctgagcagtttgattgaccaatataagaacaggtcagaagaactaactagtgaaggcaaggtttctgtctcactcagtgtgaatgagagggaggtacttcttgctgaaatccagagtctgagggagcaactcaaaaaccagactactgtatcaactactggtagccttcttgaccagttaaggaacggcagcacagaccaggagtatgaacttgacaaagaaaggcagaaatggatggagtctgagagcaagtggatttcacttaccgaagagttgagggtcgatctagaatcaaacaggatgcacgcagagaagaccgagatggagctctgcaacgagaagaagtgcacagcagagctagatgacgctcttcaacgagcgatgtacggccacgccaggatggttgagcattatgttgagctgcaggagctgtataatgatcttctcgagaagcaccgccgagtgatggaggcgatctctgaggtgaagagggcggctgccagagcaggcaggaagggctgtgggacggccttcgctgctgccctcgccgccgagctctccacggtgagaatcgaccgagaaaaggagagggctcagctgaaagaacaaaacagaaggctccgcattcagctgcgagacactgccgaagctgttcatgctgctggagaactgctcgtcagattgagagaaaccgaggaagcatctacactagaaaaggagaggactgccgcgttgttgcaagagaacgagaagctgaagaagcagctggagaagctgaggaagaagcacgagatggagctggagacgatgaaggtgcaccttgcggagagccggctgccggagtcggctttgggtgccttctaccaccacgagaacgagaggacgccggacgacgatctgtcctggcgggccgccttcgcttctgcgtacagtgactgaagttacctgactggattgcttgggagttgagtctcgtcaactgagacaggttgacaattggggcatgagcatttctacgacctttgtttgattttaagtacatgactcgattggggcatggggcaaagtttttatgtatactgcttgtatgggaactgaatttgaacgagttttatgtagtctttcgagtatttttttggtcgaaaaaaaaaaaaaaaaaaaa

SEQ ID NO: 163698 - DNA, 954 bp, Zea mays
  unsure (1)..(954): unsure at all n locations
  Clone ID: MRT4577_80869C.1
gatcaagtaatcatagatgattttgaaggtccacaacaggaagagcaaaaagaagtatctaacaatacaaatgctaatgaagacctcggttctgacagaaaatctaatctatcaattattgcctccacacggttatcacctattcaggatccaacattgtgctcttctccaaagatccacaacaaggcaagaatgagcatcacttcactgggggtatcaccaagcaagattagagtatcagacagcccaggtgatagaaatgttgaaatgtgtacaaatagtgcatttcgttcctctctacaatcaagcaagcttagccccactgactcactggctgcaagtcttcaacgtggcttgcacattatagagtaccatcaacagaatccagccccaagaaaatcatttattggtctttcatttgaccatttcgctcgtcagtcagtagcaaaaatcagttcagctgttcaggaccaaggaaacaacctttgttcattcgaagagttgagggtcgatctagaatcaaacaggatgcacgcagagaagaccgagatggagctgtgcaccgacaagaagtgcacagcagagctagatgacgctcttcaacgagcgatgaacggccacgccaggatggttgagcattatgttgagctgcaggagctgtataatgatcttctcgagaagcaccgccgagtgatggaggcgatctctgaggtgaagagggcggctgccagagcaggcaggaagggctgtgggacggncttaggtgctgccctcgccggcgagctctccacggtgagaatcgaccgagaaaaggagagggctcagcttaaagaacaaaacaagaggctccgcatgcagctgcgagacactgccgaagctgttcatgctggtggagaactgttcgtcagattgagagaaaccgaggaagcatctacactagaaaaggagaggact

SEQ ID NO: 163699 - DNA, 136 bp, Zea mays
  Clone ID: MRT4577_8086C.1
gggcgtgcgctggttaccaagatagataggcgatccggcaaggatctgtgaacggagcccaaatttctcaagaacggagatcctggtatggtgaagatgtctcccactaatttcatggtggaggagaccttttctc

SEQ ID NO: 163700 - DNA, 882 bp, Zea mays
  Clone ID: MRT4577_80870C.1
cattgggaccctcgaggccggccgggataacaatgtgaaagaagtccaagaccccgcaagagttcttcgccgacttcatgatgggtggtgtctccgccgcggtcgccaagaccgctgccgcccccattgagcgtatcaagctcttggtccaaaaccagggtgagatgctcaagtcgggtcgccttgctaccccttacaagggtatcgccgactgcgccacgcgcacctacgccgacgagggtctcgtcgccttctggcgaggaaacacggccaacgtcatccgttacttccccacccaagccctcaacttcgccttcaaggactactacaagtcgctcttctcctactcgcaagccaaggacggttacgccctctggatggccggtaacctcgcctcgggaggagccgctggtgccacctcgctcctcttcgtctactcgctcgactacgcccgtacccgtctcgctgccgacaacaagggcgccgccaagggaggtgtcgccggtgagcgtcaattcaacggtctcctcgacgtctacaagaagaccctcgccaccgacggtatcgccggtctttaccgtggtttccttccctccgtcgtcggtatcgttgtctaccgtggtctctacttcggaatgtacgactccctcaagcccgttgtcatgcaaggttccctccaaggatccttcctcgcctccttccttctcggatggggagtcaccaccggtgctggtatcgcttcttaccctctcgacaccatccgtcgtcgcatgatgatgacctcgggagagaaggttcactacaacggtatgctcgatgctggtcgtcaatcgtcaagggcgagggtgtcgcttccctctcaggggagctgaccaacatcct

SEQ ID NO: 163701 - DNA, 439 bp, Zea mays
  Clone ID: MRT4577_80871C.1
atcgatctaatcttttcagctctctccatcgtcgtcgtatctgtgactctcgtgatcatcgcctgaaaaaaatttgagataatggccagaaagttcttcgtcggaggcaactggaaatgtaacggaactgctgaggaggtgaagaagattgtgaacactcttaatgaagctcaggttccttcacaggatgttgtagaggttgtggttagccctccatatgtttttcttcccctggttaagagcacattgaggtctgacttttttgttgcggcacaaaactgttgggttaagaaaggaggtgctttcactggtgaagtgagtgcggagatgcttgtgaacttggatattccatgggttatccttggtcactctgaaaggagggcaatccttaatgaatcaagcgagttcgtcggagacaaggttgcctatgcacttgctc

SEQ ID NO: 163702 - DNA, 448 bp, Zea mays
  Clone ID: MRT4577_80872C.1
gagagagagagagcgagctcggttcatcagttgcattgcgttcatctgctgccccagctcgtgctctctcccagtcgtccctcgcaagctgacctctgcgttccttcagcactggcactgacagtgaggcgctgtgctgctccagtagctgtagctgtaaggtaataactgaagctcctcaacttgtgtttctggtttcttggaattactactaataatcatatcaagtggtgagttttttaaaaaaacggtgattagtagtactaggaggagtaggtgacagtgccagcaatctttctgccgagcagagatgatgcttggttaacctgacggtgcaatcgctgtgcagccctgttgccagttcctgaagaaagggaccaaatctggggtgcctgcaggagggggaggaggaagaagggagaggcattggcatccagtgcttgcttgc

SEQ ID NO: 163703 - DNA, 516 bp, Zea mays
  Clone ID: MRT4577_80873C.1
ctgtgcggcgctcgaggcggccgggtccggacgatttttgtctgcatcgctgtcagtgccgtagctgccactcctatctccggtgagctctctccttctctcttcttcctcaacaatggcatcatgatagacagctcgccgaggcaggccatggcgaaggggtgcgacagcacgctgcggcacgtgtcgagcaccttgttgaaatggcgcacgacctcgtcggggaggccggcgtccagcgccgccaccgcggcggtggaggacgagcttcacgtgcgcccgcagctgcgacacggactccgcccttgtattggcgggcgccagcaggttcgacaggggcgggaacctgtcctccgaccagcacacgctctcgcgccggaacatcgcggaggcgaggcggcggtcggtttggagaagcaccaacgcgtcctccatcaggccgaggtggaagcaagcctggcccaggaccaagtacctccactggtggtcgtggatgctggagaacgtgccgaccac

SEQ ID NO: 163704 - DNA, 776 bp, Zea mays
  Clone ID: MRT4577_80874C.1
gccggccggatccaaatatgtgaaccacgtcctccccaggcgctccggctgtacaacctgatcaacgccaagggccggctggcgaagctggcgctcgccctcgcggtgtccgtgttcacgtcggcggggctgtacctcctgccgttcgctgtgccgtgcacgccgtgcgacccggcgttcggcgacgcgtgcccgacggtgggcaagtccggcaacttcaagcagttcaactgccccaccggctactacaacgacctggcgtcgctgctccacgccaccaacgtggacgccacgcgcaacatcttctccacgggcaccgccggcgaattcaggctcgactcgctgctcatcttcttcggcatctactgcgtgctggggctcttcaccttcggcatcgctgtgccgtcggggctcttcctgcccatcatcctcatgggctccgcctacggccgcatcctggcgctcgtgctcgcgcgcttcgtgaggatcgaccacggcctctacgccgtgctcggcgccgccgcgctcatgtcgggctccatgaggatgaccgtctcgctgtgcgtcatcttcctcgagctcaccaacaacctcctcctgctccccatcaccatgttcgtgctgctcatcgccaagacggtgggcgacgctttcaaccccagcatctacgagatcatcctcgacctcaagggcctgccgttccttgagcccaagccggaaacgtggatgaaggacctcgcagtcggcgagctcgcggccgccaactagtgagccct

SEQ ID NO: 163705 - DNA, 500 bp, Zea mays
  unsure (1)..(500): unsure at all n locations
  Clone ID: MRT4577_80875C.1
acacactcacnanacacngcncngcggcagcaagaaggaagaagcnagcgccncccnagcncgcgngggcagcaagggccaccaccgccgcgnccagcccccncaagnccnccnncgcgggcncccggcncccnncggccacgcgcaccaccaccccgncgnccgnggccgnggccaccccgcgcgcggggggcggccccanccgcgcgnccancnccnccncccccaccccgcccaacgaccngacgnccnnccggnncagccccancaaggagnccaacgngncccgcgagaagacccggcgcnacangacggacangancacccacgccgacaccgacgnggngaacgagggcgccgggaccgcgggcccgaccggcgcgaacgagcngaccaaggacccnancgagagcgacgacaccgcggagaagaccgagaccccgggcggcggcgcgaggaagggcgggcagaggaacacggacaaggaggagcgcaggacg

SEQ ID NO: 163706 - DNA, 368 bp, Zea mays
  Clone ID: MRT4577_80876C.1
aatggctagggagagatagttccgagcgccaccaccgcgaagaggagagaggagggtagccaccatggttgaatcacgtgtacgacgccatagagacctcaatgattggtctaggtgcttcgccatcatgtatagagcgtgagcgcggagttgttgggggcggatcaaccgaaacaccatggattcttcgccggagtctgatcctcaccgccgagccgctatttgctatggagagccctccccccaccgatccattatgtgacgagcaagtgactgaggaacccggagctctgcaggtggaagactttaaggaggagctcgcagaagaacatgaagaaccatctgggaaaacagtgctaccacaaggg

SEQ ID NO: 163707 - DNA, 465 bp, Zea mays
  Clone ID: MRT4577_80877C.1
gtctactgcgagaatgaagaccattctcaccaatcagactgcccacattccagaaaatgtcgacatcactctgaaggggcgcacagccattatggaagggccccagaggaactctgaggagggacttcaatcacatcaatgtagagctgagtcctcttggctagagcgagaatgaagactattctcagcaatcagactgtcgacattccagaaaatgtcgacattactctgaagggacgcacagttatcgtgaagggccccagaggaaccctgcggagggacttcaatcacatcaatgtagaactcagccttcttggaaagaaaaaaaagaggctccgggttgacaaatggtggggtaacagaaaggaactggctaccgttcggactatttgtagtcatgtacagaacatgatcaagggtgttacactgggcttccgttacaagatgaggtctgtgtatgctcac

SEQ ID NO: 163708 - DNA, 141 bp, Zea mays
  unsure (1)..(141): unsure at all n locations
  Clone ID: MRT4577_80878C.1
tctatcaaacaaagcttgccnnnnccctgttaggaatcccctaatgaccaattgtgaacctatttattcaattcaccattcccttccttgacccattctttgccataaaactttatgggattcccccttattcttttcatt

SEQ ID NO: 163709 - DNA, 504 bp, Zea mays
  Clone ID: MRT4577_80879C.1
gatcctgtgcggctgtgccatggcgaacaaagggtcagaccctgcctccccggcgtcggcgccaccgccgccaccgaagcggcgaaagatcgagccgcccaggaggtaccggtttcgaccacactcccaaattctggtggcgagattcctagcaacatgtgttgcgactgctacgtgctcccaacgcccatgtccgatttcgtccgaacgagcagcgctgctcttctagtttcgatgggtggattggagaggttccgtcctagctagtagtggagtgttgggcaggggtctcgtgggcatcttttaggcaagattccggactaggcatctcgtgggcatcctcatacgttaggtgttggtgttcttgactataactgcaggttgcctttgttggggccattgataagcacctcaactccagctgtggattgcaaggcagatatgtttccgcttctttacccatttttatgatcattaatccatcgcaccagaaccatccatcct

SEQ ID NO: 163710 - DNA, 359 bp, Zea mays
  unsure (1)..(359): unsure at all n locations
  Clone ID: MRT4577_8087C.1
aacgagaagggcaccctnncgngcaaaggacgacacnaggaggtgcganccggnccaaaagncggccaggaacaagtccgnnggaaacaagaacagaccgaccgaagaccgnaaactctccaccgccagggagttaccaccccaccagcttccgcgacaatgaggacgccagcagccatatcccagggctaaagtcggtattcccaggaagcttcgggaataccaagtccaaggtgggacaggtcagcagcagcagacccaagccttcgcactccccggctaaggtcgagaaattcctggaacagattcatatgggccgtccaggcatcatcgggttcaaatccaaaacccgggacgag

SEQ ID NO: 163711 - DNA, 3003 bp, Zea mays
  Clone ID: MRT4577_80880C.1
cagggcgtcggagcgagctcattctcaactcgactcaagagctctgcctcctccatcttcccttctctggcctccggagccacgctgatcagagatggaggcgaatccgaagaacaccttcacgatcaaagtggaggacgggaagcccgggaaggacggccggctggcggtcggaccggtgttccggagcgttctggccaaggatgggttcccgcagcttgagcctgacatgaagacatcatgggacgtgttcaggtaacagtaagacacgcacggcggctggctgaaacaacagccaagaactcgctcgcacgtctagctactctctctgtttttctttattgctctttggatttttcagttacagaatctgtaaaatatcagacacacgtagattatctatacagtgctcagaaaaatcttggtgatggttggtgtgtttataattttatattatatgcacttgtgcagggtagcagcagtcaagtatgccgacaaccggatgctcggatggcgtccgttcaaagatggagtggtatgcaaacttgggttaaacgacagcaccatgagtagtgttctacatcagttcaggtcttccttagctttacaatttccatctgtatggctggtaaaaaccgctacgtttccgccttctagccagggccctacttgtggaaatcatacaaggagatctacgacgaggtgctgcaagcaggctctgcgttgcagaagctgggagtgcagccaggttcccgggtggggatctacggagcgaactgtcctcagtggatagtggcaatgcaggcttgcaatggctatagtctagtctgtgtcccactgtacgatactttaggtgcgggagctgtcgactacatcatcgatcatgccgagatcgatgttgtcttcatacaggacaagaaaataaaagagatactgtccccaaactgcaagtctgccaagagactgaaagcattggtggcgttcacttcggcgacaactgaacagaacaaagaagcggatcaaattgggatcaaaatgtatgcctgggacgatttcttgaaagtggggaaggataatcctcgtcaaccttgccctccgcaagcaagtgacatctgcactgtcatgtacacgagtgggacaagcggacagcccaaaggtgtgatgctgacccatgaaagccacgccatgtatgtgaaaggggtggacctcttcatggaccagtttgatgataagatgacaacagatgatgtcttcctgtcgtttctcccgcttgctcacatccttgaccgcatgatcgaagagtatttctttcacaaaggggcctcaattggctactaccacggagatctgaatgccttgagggacgacattgtggagctgaagccgactctactggttggggtgccccgagtgtacgaaaggatttatgaaggtatcttgaaggccattgcggaactcagacctctaagaagggtcatctttaatgctttgtacaaccgcaaactggcaagcatgaaagcaggctactcgcacaaaaccgcttcacctttcgcggacatgctggcttttcgcaaggtcaaggcaaggcttggaggtcgtcttcgcttactgatttcaggaggggctccgttgagtaatgagatcgaggagttcatgagagtgaccacctgtgcatacttcatccaaggctatggtttaacagaaacactgggacctagcactgtctgctacatcgacgacatggccctggtcggaagcgctggtgtgcctgccacctacaccgaaattcggctggaagaagtgcccgagatgggttataatccactcggcgttccttcgcgtggtgaaatctgcatccggggaaaatccctcttcgctgggtactacaaaagtccagaactcacaaacgaagccatcgttgatgggtggtttcatacaggtgacattggagagatgaccccagacgggatcttgaaggtgattgacagaaaaaagaacatatttaagctgtcgcaaggggagtatgttgcggttgagtacctggagaaagtttatggcttccctccactcgttgaagatatctgggtatacggggacagtttcagatcaagtttagttgcagtagtcaatccacaccaagaaaacacaatgaagtgggcagagtccaatggctacaagggttcttttgatgaaatctgcaaacttgaaggactcaaagagtacatcctgaaagagctggcagccgttgcgcagaagaacaagctacgaggcttcgagtacatcaaaggcgtagtgttggatcctgtgccttttgacatcgagagggatttggtgactgcaacaatgaagaagaagagaaagaatatgctgaactattaccagtctgagattgacacaatatacaaaaagctggaggcgcagaagagtgctgccagagctaagtgaagagatgtgccctattcgaccatcagctgaaaacaagggaaacgacaccgttgtaaatttcacattaatattgcgaagtaacaactcagggctatgagtaaggaataaaatgtatattgtgcctttgtcttgtgccttttgacatcgagagggatttggtgactgcaccaatgaagaagaagagaaagaatatgctgaactattaccagtctgagattgacacaatatacaaaaagctggaggcgcagaagagtgctgccagagctaagtgaagagatgtgccctattcgaccatcagctgaaaacaagggaaacgacaccgttgtaaatttcacattaatattgcgaagtaacaactcagggctatgagtaaggaataaaatgtatattgtgcctttgtctatagtaccggatgattcccaaatcccaactagagttgagaagagtgaaggccgtcaccaacaagatggcaatctggaccgaacctcacccgctcacccccactactgttcaaaagcatagcatcctaactgaagggggtgtctggatatcgccact

SEQ ID NO: 163712 - DNA, 2387 bp, Zea mays
  Clone ID: MRT4577_80881C.1
cctgccggggcatatatagggaaggaggagcctcgaggccggccgggctcccatcgccagggcgtcggatcggagcgagctcattctcaactcgactcaagagctctgcctcctccatcttcccttctctttctggacgttgagggcctccggggccacgctgagagatggaggcgaatccgaagaacaccttcacgatcaaagtggaggacgggaagcccgggaaggacggccggctggcggtcggaccggtgttccggagcgttctggccaaggatgggttcccgcagcttgagcctgacatgaagacatcatgggacgtgttcagggtagcagcagtcaagtatgccgacaaccggatgctcggatggcgtccgttcaaagatggagtgccagggccctacttgtggaaatcatacaaggagatctacgacgaggtgctgcaagcaggctctgcgttgcagaagctgggagtgcagccaggttcccgggtggggatctacggagcgaactgtcctcagtggatagtggcaatgcaggcttgcaatggctatagtctagtctgtgtcccactgtacgatactttaggtgcgggagctgtcgactacatcatcgatcatgccgagatcgatgttgtcttcatacaggacaagaaaataaaagagatactgtccccaaactgcaagtctgccaagagactgaaagcatttggtggcgttcacttcggcgacaactgaacagaacaaagaagcggatcaaattgggatcaaaatgtatgcctgggacgatttcttgaaagtggggaaggataatcctcgtcaaccttgccctccgcaagcaagtgacatctgcactgtcatgtacacgagtgggacaagcggacagcccaaaggtgtgatgctgacccatgaaagccacgccatgtatgtgaaaggggtggacctcttcatggaccagtttgatgataagatgacaacagatgatgtcttcctgtcgtttctcccgcttgctcacatccttgaccgcatgatcgaagagtatttctttcacaaaggggcctcaattggctactaccacggagatctgaatgccttgagggacgacattgtggagctgaagccgactctactggttggggtgccccgagtgtacgaaaggatttatgaaggtatcttgaaggccattgcggaactcagacctctaagaagggtcatctttaatgctttgtacaaccgcaaactggcaagcatgaaagcaggctactcgcacaaaaccgcttcacctttcgcggacatgctggcttttcgcaaggtcaaggcaaggcttggaggtcgtcttcgcttactgatttcaggaggggctccgttgagtaatgagatcgaggagttcatgagagtgaccacctgtgcatacttcatccaaggctatggtttaacagaaacactgggacctagcactgtctgctacatcgacgacatggccctggtcggaagcgctggtgtgcctgccacctacaccgaaattcggctggaagaagtgcccgagatgggttataatccactcggcgttccttcgcgtggtgaaatctgcatccggggaaaatccctcttcgctgggtactacaaaagtccagaactcacaaacgaagccatcgttgatgggtggtttcatacaggtgacattggagagatgaccccagacgggatcttgaaggtgattgacagaaaaaagaacatatttaagctgtcacaaggggagtatgttgcggttgagtacctggagaaagtttatggcttccctccactcgttgaagatatctgggtatacggggacagtttcagatcaagtttagttgcagtagtcaatccacaccaagaaaacacaatgaagtgggcagagtccaatggctacaagggttcttttgatgaaatctgcaaacttgaaggactcaaagagtacatcctgaaagagctggcagccgttgcgcagaagaacaagctacgaggcttcgagtacatcaaaggcgtagtgttggatcctgtgccttttgacatcgagagggatttggtgactgcaacaatgaagaagaagagaaagaatatgctgaactattaccagtctgagattgacacaatatacaaaaagctggaggcgcagaagagtgctgccagagctaagtgaagagatgtgccctattcgaccatcagctgaaaacaagggaaacgacaccgttgtaaatttcacattaatattgcgaagtaacaactcagggctatgagtaaggaataaaatgtatattgtgcctttgtctataaaaaaaaaaaaaaaaaaaaaaaaaaaaaaaaaaaaaaaaaaaaaaaaagggcaaaaaaaaaaaaaaaaaaaaa

SEQ ID NO: 163713 - DNA, 256 bp, Zea mays
  Clone ID: MRT4577_80882C.1
ctccaatcatattggattttaacttaacacatttcctgagctaacggatacgatcactaaacccacccatacccacagaggactattatatagagcatgtccaaacccttcccctcccaaataaatgcttccagacccagcctaaccagccacacaagacaaatctggtaaatccaaggaggcttgctgcgaccttactcaaactgacctaaccttggtacaaacaaatgtttgccacaacacaagcaaagctggg

SEQ ID NO: 163714 - DNA, 318 bp, Zea mays
  Clone ID: MRT4577_80883C.1
ggggggaaaacacattttttttcggctcgatttattagggccgcatgttcacaagatgcattattggccgattccggcttaaatgccgggaaataggtcaacatttgcatccccctgggattgctacaagggttccaggaccaaaacttaactttttggggggatttgcggccttccaggggggttgggcataggaattggtttgttttccaccacccacattttttggacgtttttggctgccaatttccttcagggcctcaggtgggagcttcacctttaagggggcaacggtggcatttagggtttttgtttttg

SEQ ID NO: 163715 - DNA, 669 bp, Zea mays
  unsure (1)..(669): unsure at all n locations
  Clone ID: MRT4577_80884C.1
tggtacgcctgcaggtaccggtccggaattcccgggtcgacccacgcgtccggatgcaagnangngncnanaggcngtngnagagactccaangnngngactgaaagtnttnnaggctnganctgacantanaacctanntaagtnaaggangcactanacaccagctnnatggnngcacaaacagtgcngntnannttnctnacactnttatntntangcnnngacttntggagtcccatcctntnantgcggcccgnttgggacaggtcnagcagnangcgacatntnggatccgngatcaangtagtgaagatggnctttaagcntgcgtattattggctagccttgngaattttganagngctcngnctggcnaattanaccttnaantggggcnnttgccanccaaaggttgcatncnaantcggtatgntgggnggancaattttnaantgggngggtnggcccttttgnncnntttnaagtcccnataanaggcccttttgnnnccnnccncggggntcannnnttttgctccttttnnnttttagnccnttttcngntgaacaantttttggggtnngnnaaaancttnttttaaggtggtccnngcccancntcnttggtaatgnggnacctntnntnntnttgaaaaatttnggntngc

SEQ ID NO: 163716 - DNA, 383 bp, Zea mays
  Clone ID: MRT4577_80885C.1
cgcctaatgggccggcccgtaaaaaatgtaacaaagcacggcccgacacagctgatttaattcgggttagcacgacacgaattgcgggccgggccgtgctttgaatgttggcccgtcgtgctacaaggcccggcacgtcactgtgggccgggttcgtgccggcccgtcacgaaaacaggacggtccaaccgcagaagcagtcacacactcacgcagaccgtctcacttatcactgcagacgtagtcacgcaggcaccgcacccattttctcccacttccctccgccggccgccgccatccattcggatctcgctgtggatctcgacctcgtccgtcttggcctcccagggaggacgcagcatggaggtcggactcggcccggg

SEQ ID NO: 163717 - DNA, 435 bp, Zea mays
  unsure (1)..(435): unsure at all n locations
  Clone ID: MRT4577_80886C.1
aacccccgggcgagaagagaagaggccggcaagggcgaaggcccggctagcggcancgancncggcacgacgcacccnggcgncggcgcgcggcagcacgaccgcggcgagaacanggccaacgaccagggnaaccgcaccacgcccncgnacgncgccgncaccgacnccgagcgccncancggagcagcggccaagaaccagggcgccaggaaccccagcaacaccggccnngaggccaagcgncccancggcaggaggcncagcgacgcgnccgnccagagggagancaagccgcggccccccaaggncaannccgggcccggngagaagccaacgaanggnggccagcacaagggngaggacaaacactttgcagctgaagagaactcctctatgggtcttaccaagaagcgcgagaatgctgaagcttac

SEQ ID NO: 163718 - DNA, 258 bp, Zea mays
  Clone ID: MRT4577_80887C.1
cgaaagatcaccactgcactgcccctctgccgtgctctctcagtctcactcgcctgggttgagcggtcatggagccccagcactgccagaaggaactccatcttctactccttcccacaaccacgccttattacgctgtctttcttcacgctctttgtgcattggttggttatttatctcttttatcacccatagctgaatctgtatttgttcatctatattttgttaatttactccattttcggtatattaagcaat

SEQ ID NO: 163719 - DNA, 583 bp, Zea mays
  Clone ID: MRT4577_80888C.1
ccggccgatagttttctccttgttttgttgaaggtgacaatgatttttgcgggcgccatctacctgcccggccggggatcccggccggacagaatgcagaggcagctgagcgtctcctcgatgcccaagctcctgccggaggaagccgccctcggtggcgacgacgacgacgtcgaggccaagcccgagaaggcgccggccccgcgcccgtcggggaaggagcggtcggtgcacctcgtaccgctcatcgtcctcctctgcttcctgctcctcttcctctgctcccacgccccctctccctctgacatgtcgagttttgggaagaaggatgggagcatgaaggccaggttgctctgatcgtgggaccaaggactggacaaattaatgatgcagcaagaacattcgagatatttggttttgttttcagttcctctcttcatacaaatcgtgtatttggtgatttcttctgagatacgaagcataaacacgggcctctgtggagcttgtccctgccggtaaataaatgcaaagcacaccgatagtatcagaagctcaaaaaaaaaaaaaaaaaaaatttgcggcc

SEQ ID NO: 163720 - DNA, 246 bp, Zea mays
  Clone ID: MRT4577_80889C.1
atggcggtgcgtggagcgctacaatctacgagtctctgtgtcgccggaaggtttggccgcgtcgtggtcattggatccggctaccacgacggcgatcagactgtgtacatacgtcgcgaggaggccggaaaagggcacgtcctggacatgcgcatcgccaccaccggagttctccagacatgtgcaagcctcctacttgtgaaatccgagctcctcccccagctatgcactccacgtgttcgatga

SEQ ID NO: 163721 - DNA, 435 bp, Zea mays
  Clone ID: MRT4577_8088C.1
gtgtcgcctgccatctgtgcggttctagacttccggatcttttagagattgatgcatacgactaccggaatgaccgcggcgtccccatatgaatgagccgcagtgcaggagcattcgcctatcgagcaacaactacgtgcaggcgagggcctggaaatggagacggcgggggcaggctaatggtccgtcctgggccggtgatggctagacttggccatcgggagggttagagtgcctgaaatggcgggagctctggttgccgacctgctggccgtgtgcacgctctctgtcctgctgagggcggaggactaattacgcggcgatgaacacttgcataactccctctctgaagctgtggagacgaagaaaaaatgagctgaagctctgttagtcttaaacgtcaggtgacgatacttaccgggactgatctggtgt

SEQ ID NO: 163722 - DNA, 599 bp, Zea mays
  Clone ID: MRT4577_80890C.1
ggttgagatgtatgacactgaatactatatgtgggttaaggtttcatctatgcattttgttggtcgtgctgaacgctggttacaatcggttgagcgacgtttgcgtcagttctcttgggagggattttgtagtttgattcatgaccgatttggtcgcgagcagcatgagacactgatcagacagttatttcatattagtcagtctggatctgtgtcagattacgtcgaacagtttgcgtcgctggtagatgaattgggtgcttatgagtctagaacagatcctttgtattatactatgcgatttgttgatggtcttaagtatgatatcaagtcagttgtcatggtacaacgtccccaaagcctcgatgctgcttgtgcgcttgctctcgtgcaggaagaagcgttggagcccacacgacgccggcgtgctgagcctttcatccaccggaaggcttggccgcaggcgacggcgtctgagatcaccaaggtggagcgtgttggtaaccaggggcaaccaacggagaagcttattgttgactcaacccgtcacacttcgccaatggacagagtagcgactctgaagagctatcgccgtgccc

SEQ ID NO: 163723 - DNA, 306 bp, Zea mays
  Clone ID: MRT4577_80891C.1
gtttgaggttttgacgtgcgcattctgattattatagaagtcgaggtgacgacacttcaaacaaaaatagaacccgggccatgatatgtaaaaaaacctcaatcgcaatgtggcgtacggccgggagagcatacgttcaaatgcgacggcgggtatgattgatgcgaagagcacctgctattgagcgaaccgagcgctcgctaggcttagggtttggcgggcatgcgtaagggtttgggggcacgagggggcgcacacaaggggtgctgctgtataacaaggacaacatctgacgctgggacctac

SEQ ID NO: 163724 - DNA, 274 bp, Zea mays
  unsure (1)..(274): unsure at all n locations
  Clone ID: MRT4577_80892C.1
gcctccgacatcgtcccttcgtccccacgagnaaccgataatccgccggcgttgagatgttggttcatcaggatctcctatctggcgacgagctcctgtcggattcattcacctacaaggagctcgagaacggcgccctgtgggaggtcgagggaaagtgtgccacccaaggacctgttgacgcgcacatcggcgacgatccatccgccgagggaggtgaggacgaaagccgttgacgacacagcctgcgaaggtggttgactcttgctgacac

SEQ ID NO: 163725 - DNA, 920 bp, Zea mays
  Clone ID: MRT4577_80893C.1
cattgctccctcgagcctccattgggtccctcgggggaggccggcacgcctcgtcctctccgtcccgaccagaatcatcgcttcttcctgctccggcgatatccgccgccgcctgcggtccggcagagatgggaagcacttcctctatgctcacccaatacgatatcgaggaggtccaggaccattgtaaccacgcattctcgcagcaggagatcgtatcgctgtaccaccgcttctgccagctcgaccgtaacggtggtggcttcgtctccgctgacgagttcatgtcggtccctgagttcgccgtaaatcccctctcccagaggctcctgaggatgctggatgggctcaacttcaaggagtttgtagcatttttgtcagcttttagcccccgcacaagcctgcagcaaaagattgaatttattttcagggtttatgatactgactgcaacgggaaggttgcttttgatgacatcttgagcatcttgcgagatctgacaggttcatttatgacagagcaacagagacagaaagtcttgattcatgtgttagaagaagctggatacacaaaagattcacattttacactcccagactttatgaagattattggcaattctgagctcaagatggaggttgaagttcctattgactaaaaacctaacaagcatcatctagttgcttcaggcctgtatcttcatttgtgttaaattaagtagatggtatatttatatccttgcaactcaaatcatgatcagagatgtaattaaggaaacatatgtacctgctatttggaggtttagttggctcgcacttatactcaacgcttgttatacgccgtgatatcttccagatacccttacggatgtaaggttcactacaaatgtgtcaaaaaaaattaaaatatcaaggcatttctg

SEQ ID NO: 163726 - DNA, 884 bp, Zea mays
  unsure (1)..(884): unsure at all n locations
  Clone ID: MRT4577_80894C.1
tgggaccctcgaggccggccagattcgccctcgcataacgccctctccgtccccgaccagaatcgtcacttcctccggctccggcgatctcctccaccgccgttgtcagcggtccggccgagatggggagcacttcctctatgctcacccaatacgatatcgaggaggtccaggaccattgtaaccacgcattctcgcagcaggagatcgtgtcgctgtaccaccgcttctgccagctcgaccgcaacggaggtggcttcgtctccgctgacgagttcatgtcggtacctgagttcgccgtaaatcccctctcccagaggctcctgaggatgctggatggtctcaacttcaaggagtttgtagcatttttgtcggcttttagcccccgcacaagcctacaggaaaagattgaatttattttcagggtttatgatactgactgcaacgggaaggttgcttttgatgacatcttaagcatcttgcgagatctgacaggttcatttatgacagagcaacagagacagaaagtcttgactcatgtgttagaagaagctgggtacacaaaaaattcacatttcacactcccagactttatgaagattattggcaattctgagctcaagatctataagactgttcctccttacacttgngtgttatggcaagttggcagcttagcaagtattggaacacatgttgttttagatgatcagatccgttattggaaggagtgatttttctgtggaagagctttattatttgtaaagctgtgaaaaaatccatataacagtctacacagtacctataaaatcattaggaggcttcacaaatattttctgaataaagaatctccataattggattgtcgcgaaccttttttttta

SEQ ID NO: 163727 - DNA, 936 bp, Zea mays
  Clone ID: MRT4577_80895C.1
cattgggtacctcgaggccggccggggagtcctactctgggccgttgcgtaggcctcatttttttcctgacccggtgcgtcagtattttctcctgcgacgctaatccgacggtcgaacctgcaccgggctcgctatataatactgctgcacctctcgggcccggccgggctagcgctggcgccgcagacccctccccttcgcttccttccctagcgccgacgcccaccagacgagatggccccgaagaaggacaaggccccgccgccgtcgtcgaagccggccaagtccggtggtggcaagcaaaagaagaagaagtggagcaagggaaagctaaaggagaaggtaaacaacgcggtgctgttcgaccaggctacctacgacaagctgctctcggaggtgcccaagtacaagcaaatcaccccttccatcctctccgagcgtctgaggatcaacggctcccttgctcggagggccatcaaggacttgatggcgcgtggcctcattcggatggtctcggtccactcaagccagcagatctacaccagggcaaccaatacataaggatggggaagaggtctaaaatgcattgtctgccctctctgcaggaggagctcgtctttagaacagttgccatctttgtcaagagttgccaatgttatgttactggtgatgagttccaggtgacggcaacattttagagattttgagtatttctattagttggtactatggtttgccaattataagttacttggcctaaatggtttttgttttatggatctatggtattttacatgatttaaatcaattctagggcgtagaggcaaagtaagattagccaagagattagtcagctttcgctcgaaaatgtcgaccttctattaaccccattaccaaaaagattgagtggtaaaaaaaaaaaaaaaaaggcccta

SEQ ID NO: 163728 - DNA, 371 bp, Zea mays
  unsure (1)..(371): unsure at all n locations
  Clone ID: MRT4577_80896C.1
gagagagcccggctgggaggaagaaccgatcgaacaacacagctactagctagctataggagtggcaacgtcgatcgatcgatcaatcgacatggacaggccaggccaccaccagcaccattttttcatgccgccgccgccgcagcagcagcagcagcagctttgcgtgccgatgatggacgacccgtcgtcgttcttggcggagctgatgggcgtcggcggcggaagcggaggtgggccgtcgtcgtccgcgaggggggagaggaagcggcggttcacggaagagcagatacggtcgctggagtccacgtttcgcgcgcgccacggncacgccaagctggagccccgggagaaggccgaactggcgcggg

SEQ ID NO: 163729 - DNA, 332 bp, Zea mays
  unsure (1)..(332): unsure at all n locations
  Clone ID: MRT4577_80897C.1
atcaattgtaaatagacatggtaataaccgagaactgatcgggcatagtacgataaagcagcatgtgaaatcagtgccagctccagtacgtgttgttaatgatagtgtcaagtgtttcagcatgcctagagcctctaaggtggagattccttggcctgcctattcaccagcggaggatcctttgcttgataaatctaatacagaggtaattctggagcttgaggataaagttcatgatggtgatgacaaanagacaaaaactgttgtaaaaaaggtggtttcaccattcccaactaaagcggncttctctgaggaatcctttgaagcacggg

SEQ ID NO: 163730 - DNA, 204 bp, Zea mays
  unsure (1)..(204): unsure at all n locations
  Clone ID: MRT4577_80898C.1
tatagtgagtcgtattatanccatccgctgagggcgtcggccttctggcccttctccccccggccgactccgcctctccggcgctccgtccgcttcctgaactcgtctccctcagggccgttcgcgtccctccgcgcgtcgcgcctcagctcgtgtatgacaccgccgttctgtcggtcgccacgtggggcccagcgtcctcgt

SEQ ID NO: 163731 - DNA, 744 bp, Zea mays
  unsure (1)..(744): unsure at all n locations
  Clone ID: MRT4577_80899C.1
gtacgcctgcaggttccggtccggaattcccgggtcgacccacgcgtccggttaattcatccaggaaagtgggtgggaagggctgtggggcacctgtcaattcgccaccatgaatgtggtctttgctgtgaagcagtatatttccaaaatgatagaggacagcgggccgggcatgaaggtacttctcatggataaagaaacgactggtatagtgagtatggtctacacacagtcagagattcttcagaaggaagtatacctcttcgaacgaattgattctcaaaatcgagagatcatgaaacacctaaaagcaatttgtttccttcgacccacaaaggagaatgtggaatatctgatccaggagctccgaagacccaagtacagcatatattttatttatttcagtaatgtgatcagcaagagtgacgtgaagtcactggctgaagctgacgagcaggaagttgtggctgaagttcaggaattttatggtgattacattgcggtgaatccacatttgttttctctcaatattttgggttgctgtcagggtcgaaattgggatccagcccagctatcaagaacgactcaagggctgacagctctccttttgtctctgaagaagtgccccatgattcgttatcagctttcatcagaggctgcaaagagactggggagaatgtgttaagcaagtgataagtaaagagtacgaactctttgaaattccgcgnacagaggttcctccgc

SEQ ID NO: 163732 - DNA, 440 bp, Zea mays
  Clone ID: MRT4577_8089C.1
cattgggacctcgagccggccgggaattaagcagcggctaggtgaagacgcatcgaggactgttcttcttcgtcctcaagatgtagcctgtgggaggagaggccagagggctcgcatggagttcccccactcatcacctcttggtcctcccctgctgttcgtttccctcaggtagttagctagagaggatcttgctgatctcttactagctcgtggagaaactcaagcacggggcgatggatttgtctctgttcgtcctcatgctgtccctctattgtgtcttgatttggatcaatgcagacacagacagatcatctcatgctgcctcttgtatcttgatttggatgaatcaatgcagacaaatcatcgatgaagaaggatccatccaaccgcatgtacatgtttcttgaagttgttttactagctatattcgatcgtta

SEQ ID NO: 163733 - DNA, 283 bp, Zea mays
  unsure (1)..(283): unsure at all n locations
  Clone ID: MRT4577_808C.1
ccactccctcctcgagcacactgatgtggctatcctgctggacaacgaggccatctatgacatctgccgncgttcccttgacattgagcgcccaacctacaccaacctnaacaggcttgtgtnccaggncatatcatncctgactgcctncttgaggttnnatggtgctcttaacgtngatgtgaatgagtttcagaccaacttggagccctacccaaggatccactttatgctttccttctatgcttcagacatctcctgctccgaaggcctaccaccagca

SEQ ID NO: 163734 - DNA, 293 bp, Zea mays
  Clone ID: MRT4577_80900C.1
tggcgtcgtacgacgcgccgggcttcggtgtcgggtcgggtacccgtagtacgggagcggtggagctctgctctagggctgtctatgtagagaatagagccctcgtgtcgtgtagatctcgtattagccttgcgtttcagcatgaatgaatgactaagactactagttcagtacacaaccacaacgcagccagccggcttctatactataccgtgaatgacattcgacgaataaacaggctacacggttattgtttgcttgcttgcttgcttgcttctggtatgttctgatag

SEQ ID NO: 163735 - DNA, 4368 bp, Zea mays
  Clone ID: MRT4577_80901C.1
ctctgaagtcaggtggccctttgtatcccagctggtgccacacttctcattaatgaacttgacaaagtcatccaagtcccggccaccatcataatcttcaccggctttgtttcccttaggatagaacttcaatgtagggaaaccagaaacaccatatttttcagccaagtcagtgtgcttgtcagcatcaagattggcaatcacaataccgtcgtcctgcttgaaaactgaagccagcttctcataaatcggagcaagatgcttgtagtgaccacaccatggggcataaaactcaacaaggacatctttggtttcatcaaggacaattgagtcaaaggtctctgaagtcagaaccacgacgcttgaaggaatggcagctatcttgacattggtaccgtcaaccctgcatgatccaccaatgtctatcacctcattcatgaagaagtcgagcaaccgttctcggacattttctatctcatcaggcaataatggacaggttgcaaaaccagcacgaccctgaaaatgtttccatataactgtgcgaccaaaattcttgttatggcgaccttttttgtcgacataagcaccaaaagccccttcctggcaaacaacaaatatgcactccttgtcctgctgagcaagcaatgctttcacaatgtatgcttcgacttcatcagcctcttcattgattctgtttaaaatgatcatctctggatctaaaaagccaactatgcctctgtatttgtctatcttcctcatgcataacatccaactccgatgtaaggatatgtcaagggcaagatcgttgtagatgtgaaatacatcactgaattctactgcatagaccccagatttttcaagaaaatcatgttcttcgtatcgtaccatgaagtgtgtggcactttttcttcgagatgttggtgtggtcataacaaaataccatttgtggaaatattggctctgtttacccatcctcttaagaaatgcactagatactaaaggctgccctagcacaaattgtttattattttgaactgatggtggagatcgttgatgaaaggggggagtccaaaggggatcaagaccatcatcttctatgtttttctgttgtgaatttttttgctccttctctttgcttttgttatgttttttatgcttatgtttcctcttcttgctgacattggaggcactatgtgtgacatctatatcctcggtacccattgttggtgttggcattttgtccttttcaggtgtgtgatggagtacctgaggcgatgtgtgtgggacttgttgaggctttgcatgaactgttgtttcctctgctagttgtatgcctgacttaggccataacacaaatgaatttttggcttcgccaagagtgaacatatcaccaccagtgataggtatagggagtggaaattccaagaagttgtcaaacacaaaatcaacctgcacttttgtgtggtcatctcgccgctcaatcccatggacggttacaacatcctttggagggtaagcctgccctctagcgaccacaaaatattgcggacctatctgcaccaccaacttgtatttcatcacctcttgtaatgtgtcaactgaatgatgtgttgcatggtctggtgtatcaacaaattttgaagatgagcaactctcagaattgtttaatcgacgctccatactctgacacagggctgtcagtttctcaaacttggcctcgtactcatccacaaacctcttgacatattcttttgttgttctacgtttcttcttacgagggccatcaccttgagcaagacccatccctaaacccacataagcactcactcctgttgtcctccctggatgattactccctattgctgttgcaagtatgtccatattatccaatggtgtaaaggtaccagctactgacttttcatttagatatacaattttctttatgattggatgcgactctgttatgttcacatcgccagaaggattcctcgcccttgcccaatccttatgacgaccatctggcatgtcttgaaatggaatagatttaccctcagttaatgcttgtgcatcttcctttgcccattttctcttttgtacagtatagcttcgccgacctagtttttgacgaaacttattcatgctttggcttttcttgcccttttctcctagaacaatatactcatcagaggtaacccacttcacaaagtctggccaccactctttcttgagttctggatagtactcaaatggagttttgtccttcttgacataatttatatttagtttccacttgaaatccttcttcacactgagggtatgggtttcatcccttggcatgacaaatttctttgacacatcctcccataggtttgattttaccactgtaggcacttttcgccaatcctttatccttagcaaatgtgcaagagacatgttacatttgaactcaattattttcaacaccaacaattcttcttttccccctgagcaccactcgatgatgcctgtttgcaagatcatcgatatagaaaactttgcatgctttgcaagaataaatggatcatccttgtaagcgtctcgtctaaaatctatagtggtaaccccatattttgggtcaacgacaacacctttagggttgaaccacttacaaagaaaaacaacttgtttgaaaagtgtgtagtccaactcccagatgtgttctaattgtccataatatgtgtccttccttagatatgacaattttttattgcgatcaaacacctcagttatcgcgtcgttgcaaactccactattttgtcgggtgcttttaccatcttgttgtactgtgtagaaagtgtatccattaatgtcgtaactctgccatgtcgctacgatggacgagggtccctgtgccaaccgtttcacagtgtcattctttggtaccttgttttcacaccgcttttgaaaccaatcacaaaactctttgttatggagcctcacaatgtcttcgtccaccatttctgggtttttctttctcaatcgtttcttgtgtttgtcaatgtactttgaaacatcttcagtagattgaaggatcaagaaatgagctttatggagcaattcttgatctggtatctctgtgctcaatccaagtcccccttgccctttaagtcttccctcatggtgtgacagtggaaggccaatcggtgccacctcatccatgtagtccacacagaaatcgatgacactctcaattacataactttctgcaatagaaccctcccggcgtgccttattccgaacaaagcttttcaagattcccatgaacctttcgatcggatacatgtaatgtaagaaatgcggcccacaaatcttagcctcttcaactagatgcacagtcatatgtaccatgatgtcgaagaatgaaggtgggaagtacatctcaagttggcataaactttgaaccaattccctttgtaagttgtcaagggcttcaatataagcatcccaaactgcaacaccagtttcccatagcttcaacaagtcttgtaccaacgactcaagatacacatcaatatcattgcccggctgttttggtccagggatcaatacatcggtgctgagagcgaatcggatattccgtgattcttttgcaaatattatatacttattatcaatttctctccattgtgaagcatttgcagggtgcctcaactttccatccttcttacgttcgtcagcatgccaacgcaaaagttttgcacttgctggattagcaaaaagtctttctaatcgaggtatcacagggaagtaccagaaaacctttgtaggaatctttttcttctcattggtgcccaattcctctaggttatcaatcttcttgtagcgtgatgtgtcacatgttgtacatgatatgttgttcttatgctttccccaatatataatgcaatcattggggcaaacatgtattttctcatatttcaactcaatgggacacaaaatcttctttgctttagttgtgcttcgtggcaccatattccctttaggcagcttgtctgctaaaaaatttaacaaatctgtaaagctcttatcactccatccactagccacttgtgatgcttgagcctcactcaaattatgagttacagtaacatcatgtatcatgtattccagatgatcgatgggcacatgaacaatcgtcgcgtccgcaaaatgactttttgtatcttggatatgcacacaatggtcattcgcctcattagtatccataggaccgccattagtatctaaatgacccttagtgtttccattgttatcaccaatagaacattcgccatgatttgtccagcatgtgtaccgatcaattccatacatccatttctctcggtccat

SEQ ID NO: 163736 - DNA, 1139 bp, Zea mays
  unsure (1)..(1139): unsure at all n locations
  Clone ID: MRT4577_80902C.1
gctctctctttgaatgccggccgagtgctactacctgtcacagatgctgtgggggagggtcataatggatgtggtcaccaagagcaggcgtgcatcgtagattcacagtacacaactctaaggtaccaatgtcaagatagctgccattccttcaagcgtcgtggttctgacttcacagacctttgactcaattgtccttgttgagttttatgccccatggtgtggtcactgcaagcatcttgctccgatttatgagaagctggcttcagttttcaagcaggacgacggtgttgtgattgccaatattgatgctgacaagcacactgacttggctgaaaaatatggtgtttctggtttccctacattgaagttcttccctaagggaaacaaagccggtgaagattatgatggtggccgggacttggatgactttgtcaagttcattaatgagaagtgtggcaccagccgggatccaaagggccacctgaatcaagaggctgagcttagcaacatcctcttctattttagagaggacttccttccgcttgtcatcagcagcattgagaaactccttcacaagaggattcaagcttggcacaagcncagcctctgaagtcaggtggccctttggatcccggctggtgccacacttcttagtaatgaacttgacaaagtcatccaagtcccgaccaccatcataatcttcaccagctttgtttcccttagggaagaacttcaatgtagggaacccagaaacaccatatctgggataatgcaatcatgcttgtggacaaattatttatcctgcatcgcttgtcaattgagaggttcatcttggtagttggccccagcattccccttcttttcctccctaacttcttgataacagcccctgcacagaagttcttccaatgccaacaaaccacggagatgatcaagtggtccaggaacctgatgcggtcgcaaatgtcgccggaggtcgatgagaagagcgccgtcggtggtcacgaaaccctaagcatccctttccgaaatcttcgccagtggaagctgtctcggccggcccaaacccttggcgtcgaggctaggcgtcaagtgcttctagagagaacgggagaaatccatcaggccaggccggc

SEQ ID NO: 163737 - DNA, 2763 bp, Zea mays
  Clone ID: MRT4577_80903C.1
gtatttcctccctttaaaataaccaagtaactgcacttctccccgattttcgattcgaactcgcatcatggcgttccctcagatctcccgcagagccctcggcctcctgctcgtcatcgccgcagcggccgcgatcgtctcgcccgccaccgccgacgaggtggtggccctgacggaagccgacttcgagaaggaggtcggccaggaccgcggcgccctcgtcgagttctacgcgccatggtgtggccactgcaaaaaagcttgcccccgagtatgaaaaacttggcgccagcttcaagaaggctaaatctgtactgatagcaaaggttgactgtgatgagcacaagagtgtatgcagcaagtatggagtttctgggtaccccacaattcaatggtttcccaaaggttccctggagccaaagaagtatgagggtcaacgttctgtggaagcccttgcagaatttgttaacagcgaagcaggtaccaatgtcaagatagctgccattccttcaagcgtcgtggttctgacttcagagacctttgactcaattgtccttgatgaaaccaaagatgtccttgttgagttttatgccccatggtgtggtcactgcaagcatcttgctccgatttatgagaagctggcttcagttttcaagcaggacgacggtgttgtgattgccaatattgatgctgacaagcacactgacttggctgaaaaatatggtgtttctggtttccctacattgaagttcttccctaagggaaacaaagccggtgaagattatgatggtggccgggacttggatgactttgtcaagttcattaatgagaagtgtggcaccagccgggatccaaagggccacctgaatcaagaggctgggcttgtgccaagcttgaatcctcttgtgaaggagtttctcaatgctgctgatgacaagcggaaggaagtcctctctaaaatagaagaggatgttgctaagctcagcggttctgcagccaagcatggaaagatatatgtgacagctgcaaagaagatcatagacaagggctctgactacactaagaaggagactgagaggcttcaccgcatgctggagaagtcaatcagtccttccaaagctgatgaattcatcgttaagaagaacattctttcgatattctcttcgtgaaggtgatgatccacagccacggcctgccagtgacttgaactgatagcgaaccaccactttacggaaaacagaacaaatcggatgatgtgagagaaaggtggtagtgaagtccagtagtggcagagctacttcgtgcacgtagatctcttttgcattttctggttccagggattgacttcgtactcacagtttacttcacacagaaggtttatgtagccatcctgtgataacatctactttctttttgatccaataaattggttattcagcttccgtgaattattttgccctaatgtaatcttggtgcatcttgtttggattggtcactcttagctggcaacatgggaattacctaaattgttgttggctagagggtcactcgtagagatgtcaatgtaagggcttgttcggttagctctcaatccacgtggattgagtgggattgggtttcaagatatagtggggtgtctgccttcaattttcttaagatctatcgctgagtggagaaagttcattgctcgacggttcatgaaaacaaccaagattttcactctctgctcgatttcaagaacaatatcaccaatgatccaaaaggagtcatgaacagttggaccaacaacacccacttctgcagtggaacagtgtgaagtgcaccttgacgccaccatatggtggcacggagctcaacctctcctacaacaacttagctggccaaatctcctatcttggaaacctgacctatcttaatttgctggctctaccaaataatagatttggtggcctaatcaaatatgtgctgggatcaagtctcacacatatgatgactcatggtacaggatcgaatgtcacatctttactatataataggagttctatacaaaataaataaataattacattataaggagacaacgatccagcaacccaaagttgactgggagacgacggcctagaccactcacgaactcatcacagcatcctccatgcgcctcatcctgcggtacctgttcttgacctgggacttgagattccaggtaccaacttgctcttcatatgactcgtgacctcacgcagggttcatgccgaggagaccctcaaccatggtgcagcggttcggtgatgaacactggattgaaggaattccgccgaggctccctggcattcacccgactcccgacgacggcgagcacggctccgcgtaacggcaggactcctcggctgtaagctaaggccacggcgcgggcaggtcctccgcgcccaaccagcgaaggaagaagggggtcggggacgccgagaccggccgtgtggcacagacaggaagctccccgcgcagacgaacggcgcccaaacaccaagacctgtcgcagagaccccgacggggcgaatccgcggaatccccatggcagcttggatcttcaccctaggttcgcggcggtttgagctgttcagagaagaacaccgaggtctgcttatatatcctgggcacaaccaaaacccaacgaacccagccgatcccgtagagtccgcgcaggggtcaattggttgacaggggtgggaaaaccccgagatcccaggcgcggccatccccggccgg

SEQ ID NO: 163738 - DNA, 342 bp, Zea mays
  unsure (1)..(342): unsure at all n locations
  Clone ID: MRT4577_80904C.1
gggggtgctgggttgtgtttgtctgtgcggttgttttgttgcgcggtcttctctccgtggcgcgttcggtggtgngctngccttcttcttcgtccttttttggtcgcgccctcggtcgcggcgggtttctttcctttgtcgcccttttctctggggtggggtttgtgttgttcttggggtggctttggcgcgttcntcgcgtcggtgctttgtggtgcggcggctgccgcgccctgtgtcttgcccccttgctgtttactctccccgccggcggtcgcttcggttccttgctgtctctgggtcgtggtctgctggctcttccccccccccccccctcccctc

SEQ ID NO: 163739 - DNA, 502 bp, Zea mays
  Clone ID: MRT4577_80905C.1
tgggtccctcgaggccggccgagagatcgtttcccgatggcttggctacttgcttgcttgctgagttgctgactaatggcggccattccgagcggagcgatagcccaagccggagctgagcgtccggcggcctgaacaggagaggcgagagagagcagggtgcaggtaccagaacaatgggtccgtcgccggaggcgcgcgaggacgctgcgtgctcgacgaacctggcgtccatcatggactgcgacgacaccgtcgtcgtgtacgcgcagagctacgcggcgcagcgccagggcgactgccagctgatccactccggcgggccctacggcgagaacctcttctggggctccgccggtttcttctggtccccgcccgccgccgtgggctcctgggtgtccgagaagcagtactacgaccacgacaccaacagctgcgcggaggggcaggtgtgcggccactacacgcaggtggtgcggtgcgatgtctccgccctcgtctg

SEQ ID NO: 163740 - DNA, 1682 bp, Zea mays
  Clone ID: MRT4577_80906C.1
ggccctaggggccttttttttttttttttttcgcaaacgtaaagcagatattttattaataaagaatatatatatttggcatgccgcgacgacaaggcagtgcagtgcagcgcagcgcaggccgtggtgccagatgatgacagcttacaagatcacagacacacaccccaacagttgatttatacatgcaaataagcaagagaacatgggaaagcagaatggttggtattcatgcacgcttcactggcgacaaaacacatcaacaaaaaacggaacttccacatcgtcgacgactgtccatggacgcttctctctggcaaggaatctgagccatagggatccaatgtaaccaaatagagaagcaaatttgtcggcaagaataaacatcatgcagtaagggggccctctgcattgctacgcccattgagctgctctgggtggatcttcttccccaacatcttcctcatgaccccgacttaattttcttgtcgctttcagtggttttggtgttggcttccttggtttcttttgatgcatcttttccatgcatgatgcatgctttgaagtggatgccacagcaacgtcaatgatatcctggcaactatactcccttggagaacttgatgagaatacttctgctgcaaataaatcagcaagtgtagttcttactttctccaccttttctaacatcagaagtggtcgttcctggatattagcacctcccccatcttccacctcacgtatcaggatttcttctgctacaaagcatgtaaagttgtcttctttcattgacaatgaatgcatcttagcaggctcaacaataggccatactggttcacatggctctgtttccaatgcaacatcttctttcacctgatcattcctgggttcctcatcatctctctcttccacaattgctttctcatcatccatgataaagagatcatcttcttcaatgcaagccacagggcaaagtgagtccacgtgatggccaagtgtgccaattgcaagtataccattaagaagcacatcatggagcagaagggcttcagtatctttctcaaccacactatgaggcacagagtccttgtcctccatggctttgctaccatggatgctgcagtactcagtattaggatgcatcctccgattcaaccaatgaaacacctttaggcccatgtctctagaaccaatctgaaatcacaggagagaggcagacagtagcattgacgagcctcaaaggcatggcatggctttatatgaagaactagccccataattgaatggtccaggagacaaaagatggagttttggttgcactggcttggcctgactcaagccaagtaaattctttcactgaggcctcactcgccccataattgaatcggggatgatgacgcgagtgaacggcgcggggaccttgggggaggtggagagctgctcaggatcctcgggggtagtagtggagggtgcggcgggaggggggcgccaggggaagcggaagcggtggaggcgacggagcgagacgtggaataacgcctcggtgaagaagggcaaaagggcgacgaggaggtgccgggactggcaggcgagggccccgcgggacggcgggaggacgtcgcgataggcgcggcaggaggcacgcaaagcgaagaagagtcaggccccggccggcctcgagg

SEQ ID NO: 163741 - DNA, 656 bp, Zea mays
  Clone ID: MRT4577_80907C.1
gtaccggcgccctccctgcgagtttttttttttttttttttttttttttttttttttttttttttttttttttttgtgggggcaagaatggaccaccaaatattaaacccccgcggtttaagcccggggttctttgacaacccatcatcgccttcacatttcctcgctttaaaaggccccactgcaaatggaccaataccgattttaaattcccggagccaaaaaccctccgaggggggggaccccatgtttttttctaaaaggggaacaaaccgtattcccttattcccaaccacctacttacacccccctccgttcatccagttaccaacgaccaaggatcctcggaggttgtcactcaggacgctcaaagcaagcgttgggatcgagggttttgggccccaggattgacgccaaccccttgcccataacccataccagcttgcccctcgttggctggaccattttaacaggcaccaaagcttgagccttaagaccttccgccatgggaaaaaccgttatgtgaacaacctctgctttgcccttaccggaggacactattggaatgttcgatgctgagttgaacagtgggccattgaaggggatcctctcaagaggaggcttcgaagagacccaaatgtatgtcacccacccgg

SEQ ID NO: 163742 - DNA, 277 bp, Zea mays
  Clone ID: MRT4577_80908C.1
cgcgtccaacacttgcttgccttcgccccttctgtctcgcttcgtccgtccttgtcccggttcgcccgttgcgccttcgtcttcctgctggtgctgctgtgcggctttggtgttctctgtgggtcggcgtgcttgcgtggctcctggctggtgtttgcgggttgtcctgtgccccttgtccttcttcgtggttttcctgtgcctgggctgtttctgccttgcgctgtgttctgcttctctttggctgtggttgtgtgtccgggctggctgtctgttc

SEQ ID NO: 163743 - DNA, 339 bp, Zea mays
  Clone ID: MRT4577_80909C.1
atgcgcgtgcctgaactgggagggcaggcacctgctggatgcagctggactcgcaaagatttcctgcagcaaattgggcaggcaggcaggcaatttgcaggggcggcaggcacacactactgcacttgtgagaccgaccagcggaagcagatgggtctgttcactttcaaggtgtacatgttggccggcatgccaggacacaggtgcgtgccacgcactctagcattatggctacaattgattgttggacgaagagtccaggggcctatttgtatctgttcgtggggagaatctagttaccatagagattacttgtgttaccatggagattatgtgtga

SEQ ID NO: 163744 - DNA, 349 bp, Zea mays
  Clone ID: MRT4577_8090C.1
agagatgattggcacaatatcataaatgtcattattacatagcggaagtcttataaaaataaatgattataataaagcgaactaagttttattctttagcgccacaaagctgacttggagaccccacctagatcaactcgtactccttattggatggctcctcctggaccacctttttttttccttcaatgagctcctgctcagcaaacctgctaaacacctagatccttggtcactggctcgtcgaccacccaggagattgtgggtgagccggcaccacccgcagtggccggacacggagatcccacgacggcggcgagtttccgaccaggcgaggacccaccataca

SEQ ID NO: 163745 - DNA, 247 bp, Zea mays
  Clone ID: MRT4577_80910C.1
acttgctcgctcctctttgcggagagagaccagcatctgtcatggcacacgtcgctgagacaaaggctgggcgagcatccaggtccaggggtagaaagacctccacgagagacaaagccgaggggccagcggaggtagaagaccgtccaggtggttttagctcatagggcgaaggcgcgcaagatgcatgccgagtcacactcagaaacccttgaacacaggttggtgcgggcgttactgaacatca

SEQ ID NO: 163746 - DNA, 1056 bp, Zea mays
  Clone ID: MRT4577_80911C.1
cacgcgtacgcggacgcgtgggcggacgcgtgggcggacgcgtgggcaaaactgaagtttttggccgaaggaggcattttcttgacattttctcaacacgaaccattaataacttttgttgtagagttcatatagagttgtttgagcaagatgacaaggtttgtttgaatttaaaaatttgcatttgttgacacgcgcagtttcaagcacgcctagtatttatcttctcatgcgagcagttggttcaacttcgagaaatatttagaatacactttattgggggccttcgtcttccgaaggtcctaacaaacatgatttaacaatgtttcccggagtgtgaatatatgaacagggtatgttcaaactcggatcggaacgacagtgggagaagcacgaacaatacaaaaattgatgcagagccgaagctacgcgcgagggagcttcggcatagtgacacgccttgagacgaagggtgacaccgacttaaagatgaaaagaccgatcagcccatgttaatctgtgtcgtgattgtaataagttataaaggacatgaatgtaaatccacacatgttacgtcatgtgcctataaatagatgaacagtacccctgtactgttcacgctaacttgtattcacttgcgcgtcacactcggatttttaccttctatcaagccgaaggtacaaatataattcaacattgtttatattctttcatgattaaataacagtatattataacattattctgttattcatgttgttccccatgtttcatatgtttcgtctttcatctgagtatgttatgatcatgaaggtatgtctttcatgaccttcgtccgaagatcgttatatcctcagggaaataacctatcgaaggacgaagggctttaacttttaacatcttgtgttgccttgttcttaattcatagcatttgggaacaagtccccaacagtagtccttcaccttttttgttcacctttttcatctgtctcgtcgattttcatcggtagggttgttttcacctattggaacccaactccctacattgtgaacccg

SEQ ID NO: 163747 - DNA, 304 bp, Zea mays
  unsure (1)..(304): unsure at all n locations
  Clone ID: MRT4577_80912C.1
tccgccatcccggtcgaccccgcgtccgccccgcgtccggcatagcttagcttgcttccccatgccaatgtcatcgacagcacaaatggcttccctcgccgttctcatcatttccctcgtctttgcggcgcttgcctccgacgccgccgcaggcgtccgcgtcgagctcacgcgcgtccacgccgaccccagcgtgaccgcgtggcgggtcgtccgcggcgccctgcgccgtggcttgcnccggcncaacgcctggaagctagccctagccgcgtcgtccggcgccacggtgttcgcgccttcc

SEQ ID NO: 163748 - DNA, 1693 bp, Zea mays
  Clone ID: MRT4577_80913C.1
cttgagagtccttttctttagacgggtaagtcttgtgaaagtacacttcatactcagggtttttgaacccatgttgttccaggtactagaattgtgttgctgtggatggtgttaagcgccggtgggcacggccttcctataagtcaaagtacttcttctatacttcttattgaggattgtcattgagctagcatatatttcaaaactataaataatttataaaagttcaaaattatttctttgaatcacttttgtaatcactctaatgatgtacattgtaaacttgatgtaacttgtagaatttggtaataagatttccgttgcaaaaatgttggtgtgtgatttgtgtttacttaatcttgcgatcctggttgtaagtggtttatccggggtccttgggatactcaaacagatcctgttaagttatccggtgcacatgcatagccgtctgaggtctttgagataagggcaggtgcatgtgggcccaataacttgggaggttctaccacgtagatatcttccttgatctacactctataaatcttgtatagagattgaggtgttttgggcactggttagggagttatggacccattaaaattggtttgtcagtggcttagaaatcaatggaaacttgtgaaaactgagtgtcaaaacatgtcaaacgaaatcggatgaatgccatcttttaatatgttgtgcctctattagttattaacatcttttatattttgtgaaacttgagttgttcaacaaaaatttgggaacgcgagacgtcaacccgaacgacactgattctagacttagaaggatttcaaatcctgaaatcagatttttattccgtcttgagggcactgtttgggatacatataaattgaataaagggtaggtgtatataaaatttgttgtataacataggttctacaacttttattaaaggtcaaaccttatatcttggttggaaattaaaattccactttggtcaatgtattatcattataagctcaaaactgaagtttttggccgaaggaggcattttcttgacattttctcaacacgaaccattaataacttttgttgtagagttcatatagagttgtttgagcaagatgacaaggtttgtttgaatttaaaaatttgcatttgttgacacgagcagtttcaagcacgcctagtatttatcttctcatgcgagcagttggttcaacttcgagaaatatttagaatacactttattgggggccttcgtcttccgaaggtcctaaaaaacatgatttaacaatgtttccggagttgtaatatatgaacaggtatcttcaaactcggatcggaaccacagtgggagaagcacgaacaatacgaagattgatgcagcgccgaagctacgcgcgagggagcttcggcataacagcatgaaagggaaccgacttaaaggggaaaaggctatttagacctcgatgaattattttatagtcattagcaaatgtaaagggcatggatgtaatttcacaagggctgcgttccatgcctataaatagatgaatagtacccctgtactgttcacgctgacttgcatttgctcgtgcatcacacttgtacttttaccttctatcaagccgaaggtacatttgtaatttgatatcatttatattttctatgataataaaatagaaatgagctgataatgttacat

SEQ ID NO: 163749 - DNA, 370 bp, Zea mays
  Clone ID: MRT4577_80914C.1
tacatctataatcccagtgcgccaaagaacgtacatatatttattgctagtgcctcatttgtgtctcactcatcaaatgggaaaaggtgtcaactgtcaagagccacaaagctacctgtcgttttccctgaactagtctcttaattagagtaccaaatggatgggatggtggcccagtcatcaaattgaaaaagccgtaaaaatgccacaaggctacatatcgttttcccccaaatcagtatcttggttagataattagtggacgggaacgccacatatgcagacatgctattagaaaacttctgtgaagtggagaagctactagtgcagaactttgcccaaaatatctacgtgctcgccgacagcaacg

SEQ ID NO: 163750 - DNA, 266 bp, Zea mays
  Clone ID: MRT4577_80915C.1
gttgaagataagctggaattaagacggagacaatttcacgttcttcttagtaccatccattaacttcaacagacattggagaatgacgacaagctgtcagaggtggaagatgatcaagagagcgtcatggaggcagaccctaagccatagatggtgacgtcgctgtccgtccgcccgcaaggacaggcaatagctgcatgggcttcctgggttcgatttcaacttcggcagtgaaatactttgctttcaaatattaattcatgcct

SEQ ID NO: 163751 - DNA, 373 bp, Zea mays
  Clone ID: MRT4577_80916C.1
tttttgtggtttttttatgaattttttgtgataaatcaatattgagaacgaatgattaaggacgaacgttacagggggacccaaaacgggggaagaaaagcagcgaaagcaaccccccgttcggggccccctgggcaggaaccaaaggggggaaaaacaaagaaaacataaagacagcacggacgggaagacaaggggggcccccctcaggcaaacagccggggggaactggggagaagaaagaccggggccacaggcgacaaggccacgcaaacctgctggagcaatcgggcgagggctggtatgcctgagcatatagaggggaagaaggggcccccaggaaaaaagcccggggccacccccgggtcgtgga

SEQ ID NO: 163752 - DNA, 560 bp, Zea mays
  Clone ID: MRT4577_80917C.1
ctagctctcctaaatctttagatgcgttccggcctgtggctgctgggaagtgatggcgattgccccagacacacaggtaactagccttatcggagcactagtacaggccgttaggacaccaaccgggcagggctgatggggctgcttcagtgagtacctggtgctgaccttgctgggacacatagttacacggcccatccaccgttgccggcacgctcggatctttcaccttgcaggcctggcagcaccagatcatcaccatgcactgcatgcactccaggatgcacggaggcatgctcacgttcgtctcccgttccatacccaccctcccccacgagtaccccatcaagatctctaacgcattcaatatgctgacgacagagtacctgctttttcgttcataatgacatgtgccgcctgaactatggctaaaagacaaccaaaaactcttgtgatgaacgaattagataacggcttcatgtcaagacaatgaataccgactgacaacgatactctaatcttctttgtctctactctgtgggctgattaactgttattac

SEQ ID NO: 163753 - DNA, 129 bp, Zea mays
  Clone ID: MRT4577_80918C.1
gttttcccttttcggtgggattaccatgctcgtgggaccaattgaaactcacatggttggtggagagagttgctacatgagtggttctatgcttaatgttatatggattcggggcggagggctatcttt

SEQ ID NO: 163754 - DNA, 195 bp, Zea mays
  Clone ID: MRT4577_80919C.1
atcatcctcgtcctcatccgcccttgggagctaacaagcaagcaagcaaacgggcgaggagctggatagaggccggcgactcgaagcaaccgccgatcggagccgcggctgaggaggaggagcaagctcgagatggcgggtctcgtcggaggcagcacggtgcgggcggagcacgtcttggccaacgtcggtgga

SEQ ID NO: 163755 - DNA, 321 bp, Zea mays
  Clone ID: MRT4577_8091C.1
gcgcaatcaaaaccactgttataagtacttaactgctattgtgaatactaaagaaagacacccggccaccgagtcaaaattaggagcgcaaaaaaaaaccaacagacaggggaacgcccgggaaaaactgagccgggacctaagggcacacagatttgcccataggggagaaaattaaggggggggggaaagaagaccaaaaacgatggcggggggaaaaggggctcggtgacaaatacacccaggaagcaaaccggaaccaaaaaagggaaaaaccggggggccccaaaggggggcaacaaaaaaaaaaagggggggggg

SEQ ID NO: 163756 - DNA, 268 bp, Zea mays
  unsure (1)..(268): unsure at all n locations
  Clone ID: MRT4577_80920C.1
tccttaccancttaatctaacacatatcttttctccttgtaactcatcattcatcagcaggcttattcagaattttacacacacancacactcatatcttctatcaccaccatttnttctctcatcatctcctctcatcatcatcatcaacctcactccttatacctaccttacccatctcatttccacatcacccctattctcaacttttctaatcttctacactccctattctttcacttcaccttcatcaacacctattacaacc

SEQ ID NO: 163757 - DNA, 316 bp, Zea mays
  Clone ID: MRT4577_80921C.1
attcaaacgtcaaaaattcaatcttttatggtggcagcaatgttgtactttgctccttacacaaagcaccccctgatgacaaatttttcagaatatggattttaactgcccatcagcttggcaggatctacccatctaaatcaaaaacggaacacggatttaaccaaattcatggaaacggaagcccagcctccctcgacctatgcttcaatccgaatgttccaggtaatggtaaaacttttcccgagcggcaatgccagccagccaatctccaccatgacgccgttcttattatcctggacgccttcttccccct

SEQ ID NO: 163758 - DNA, 524 bp, Zea mays
  Clone ID: MRT4577_80922C.1
ttttttttttttttttttttttttttttttttttttttttttttttttttttttttttttttttttttttttttttttttttttttttttaaaaataaagggacatttgaaaaataaaataaaaaaatggggggggttttaaaattgagaaagggaaggaagaccatttttttttaacccccccgggggggggaaaaaaaaaaactgattgggggggaaaattacccaaaaaggccaaaaaaaaaatcgcgggggggggaaaaatggaattttgggggaggaaaccacaaggggatccccaaaacttttaaaactggaaaaaaacggggccggggaagttaaaaaagcaggaccaacccacaaaaacccggggagcttttttaatccgcccccccatttccggggagggggaaaaaaaccccgttgggtaaatcaaacgttattggaaaaaaaaaagaaaatcctgggggccaaacctttggggccaacccacaggaaggggaccccaccctgggttcaacctt

SEQ ID NO: 163759 - DNA, 321 bp, Zea mays
  Clone ID: MRT4577_80923C.1
gagaacggggggcataataactttccggcgtgggccgccaaaaaaaacaaactccttttgtatcctgaattatacatacggaagcgggcgcatgcttccgttgtgctggaataaaggactggagtacaaaacgcattctatgtagggtttacaggtaaataccaacagtgagctttcactgggggacaggagaaaaattgagcccggcgaagcgccgttatttaggtgctcacaatggcttcagattactgacgaaggtattgctctcaggatgggccataacctggttgatcatgctgggccccatcttaagaaacagac

SEQ ID NO: 163760 - DNA, 2393 bp, Zea mays
  Clone ID: MRT4577_80924C.1
ggcaatctgacagcaacagtgttaaatgcctacacgatgagctgaaggaaaatgcttcttgttggtactggatgatctctgggtcactcgtgagaatcaggaggagcgcgctattctacttaatgtgctcgatgctgggcagagtggaagtcgggttctggtgacagctcagaagaaagatgtagctgcagcgataggcgctgaggagcagatcccgattccggatatggaagagaagcagtacttttcgatgttcatgcactacgccctagaaggcaagcgtgttggtgacggaaggtttatagcaatagggagaaaaatcgcgaaaaagctcggcagatcacccattgcagcagtcacagtggcagcacggcttcggagcaacagcagcatcgatttctgggagacaacagcgaaccttgacatgttggacgaaacaatgggagctctgtggaattcggcacgagggataggtgtagacgtccggcgatgctttgcatactgcagcacttttcccagaggatacaggttagtacgaggcgagttggttcacatctggatagtgcaagggttcataaacaccagggttaatgcaactgagcaaccagaagatataggcctgcactacattaacgaactgcggaccttctcatttctgcagatagaaagaacagtttttggcactgaaacggaggcgttcacgattcatgacctgctacacgagttggcagagagggtcagcggaagcgaatgcttcagagttgtttcaaatagctcaccaaaacatattccgcaggaggttcgccatctctttgttggcactgggactgacagtagagcagctatcgcaaagaaaattctaggtctggtaaatctacgcactctcatcatcgtcgaagagtacagcgaaaacaagaggaaaacatttgcagctgaagatgatgaggaacggtcaggccgcaccttagttaacgaggaagtcttgggcagaatgttcaggagcctgaggaaactgcgggcgctggtcgttacaacgaaacagtaccatgaaccagcgttgttagtcccagcatctatcgattagatgaagcatctgcgttatctaagctttaatctggactgttctcatcgcagtgtggagcttattttcccaagcacatttagcaaactttaccatatgcagagcatatatagtgagaaaatttcctgcgccaaagacgtgacacaaaatctcacttccttgcggcacagctcttcgtcgtggatgggatttgcaaacgttggcaggctgacgtcgctccaatcgctacggtacttccaagtgaagagagaacaggggcacgaactgaagcagctgaagcacctgaacaaccttcgaggcactctggcgattgacggtctgggggtcgtcagaagcaaagaggaagctcttgaagcacacctagccagcaaggaacaactaaggaaactggagctgacattctctgtccgttaggcgggggatccgaacgccgtggcagagatacttaaccgccttttaccgccggaggatccaaccaaccataggtaccatggctggatgatgggaggccaggctccagacgttgctgcagaggtccttgagggcctttgccccccgaaggatcttgcaacactcacaatcaaccgctacaagggttcgaggtaccctagctggatgctgagtagccagagtccaggagcgctgaagtacctgcaagagcttgagctccataactgcaaccgattggcatcttttcctgaagaagagaccgagctgttcagttgtctgcgtgagctactgagcttcgagttagcttgtgcgactgggacagcatgccagaaaatatggagccccttgtttcgctccagagtgtattgattatgaggtgcgataggatggagcgccttccaaccctgccccggtcgcttgcgaaggttgaaatccatgggtgccgcgtcctcagtagaacctgccaatcagagggacacgagaactggcagaagatcctgcacattccagagaaaaatatatccccaagaaggagcatggcgcagtgagggagggaggacgatgagaccactgtttccatgtttaccagcgacaactgacctgggattgtaatatgcatccattaactgaggattgttcttatacgtttgtgatgaatccacctgacaatcttttttttttttgaaaataggtacactagctattattatcagtattattggaagtgtacttaatggatgatcagatcttttttattctctctatttggggaactttcttgtaagactttttcgtctctctaaatatataaagatgtgcagctttcctgctcgttcgataaaaaaaaaaaaaaaaaaaaaaa

SEQ ID NO: 163761 - DNA, 863 bp, Zea mays
  unsure (1)..(863): unsure at all n locations
  Clone ID: MRT4577_80925C.1
cattgaggccggccgggccggccgggctagccgcctgcctctcctcctccagagctcgtcgccaccggccaccgccaccctcgatcacgccgtccgtcgaggtaaagttagtctccacgcccctttccctccgccctagtcctccgtagctctccgccgcgtcgtccgtcgaggtaaggttagtttccacgttgttggtgattcttaaacatttaaccgcagtgtgccggcgttttctcgtcagatgtgttatcagctgagtttctcgtggagtcgtggttagattagacggtgcaatgttcatgaatcttagtttttgttgatcaaagcaggctaacttcgaactagatgatgttagcgcggaatattagtagggtctttggtttcaggaatgagttggtccatcatctgctcactcattttttttgtttggtttgtggaatggaatgtgttgatacatcactaactcattccttatagttagttagtactaatatgatatgaagaatgatgttatcccaccaaatttgatgaatagatccatgatgcatcaccatcattttgtatggagtgattactcgaaccaaacaccccctacttgtcggtctgttatttttgaacaaaaataggtttatcctgtacaatcggattagtgaaacaaactaatgcacgtgtgatgagtagttattttacaagcactagagccgatattgctgttattgttacatgttatgtgttgtggtatggctttatatagtttccactttctctatgtggntaagcttgctgtctcctgtagncatagcactctatgttgttaagcttgctgtctcctgtagcaatatcaatgtatttctctacat

SEQ ID NO: 163762 - DNA, 458 bp, Zea mays
  Clone ID: MRT4577_80926C.1
gagcacaaggaaccctcaggggggtacctcgttgggaaaagggggtacattttacacccccccttgggaaaattggggggggggccggcggtctcaaatatttggcacccactagttcattttgggactaaaccgcgacaaataaaaaaggagcgggggggggttataaaataaaaaaactggcgtcaagctgaaactgaagtaaagtatcgggcccagcccaaaatgaatgactggacccaaaagggggagagaatttgctcaccggttcgaacaggaggggcacattcatatacataactgcatgactgaaattgctccccccaccccaaaaggggggataacagcagggcaaaaatctttgggggaaaccagaatctactcatgggcgcaacatattcttccaaaatccaaacaaatgaggttgtaaaaaacaacaaattgggaacgatgcaaac

SEQ ID NO: 163763 - DNA, 192 bp, Zea mays
  Clone ID: MRT4577_80927C.1
ttatatggggaggcgaaagcccgagcagtggtgccaaacctcgagcgctcgcgccggtgaccataacacagaggacgccgcggtagcactgctacgcgcgacagtaggggggagatgtcttcggcgttcagcggagatgagacccgccttttcttctttttttcttggcgggggcgctgcgcctcggcttct

SEQ ID NO: 163764 - DNA, 548 bp, Zea mays
  Clone ID: MRT4577_80928C.1
gtggtgtttttttttttttttttttttttcacaatgatatatgtttattccatcgactggcaaaatattagagagcagaaacttcaataatccgtcattttgaacggtaccttgttctctcgagcattttaccatctggagacatttgaactagccttatattctacacaatcatacagaatgggtgctacaaaatggtaggcagctgataacactgaaaaggaacaaaatctcaaacgaaagtaatctacagcaataaacactgctactggcagttgctccgtttctgtgaaactcaagcaaagattctcgcaggtcgaacactgacccaatcaaattgggcagtctgattatgtggcaaagcttctgtcgccagcatcccccagtcctggaactataaaacctttctcatttacttctggatcaatcattcctgtgtacacgtggagcccagggaacttgttattgagcttttgcagggcagtacgtgctgcattaacaagtcaatagcagcaaccattgtcccaccagtggccagcattggtaca

SEQ ID NO: 163765 - DNA, 505 bp, Zea mays
  unsure (1)..(505): unsure at all n locations
  Clone ID: MRT4577_80929C.1
gccggccggtccgagatctgtcgtctatatttcgatttctttcaaacggcccctactgtcaagtccaagaagaacgccgagtccatcaactctcgtctccaacttgttaccaagtctggtaagtacactctcggttacaagaccactttgaagaccgttcgtcaaggaaaggccaagttgatcatcattgctggtaactgtcctcctctccgtaagtccgagattgaatactacgctatgttgtccaagactggtgtccaccactacaacggtaacaacattgatctcggtaccgcctgtggtaagctcttccgtaccagtgttctctccatcactgatgctggtgactctgatatcttgtctgcccaataagttttttgaatgcaagaagctatttccattgatttaataaaactgcggaaatcttatatatacnaaaaaaaaaaaaaaaaaaaaaaaaaaaaaaaaaaaaaaaaatgaaaaaaaaaaaaaaaaaaggccccta

SEQ ID NO: 163766 - DNA, 313 bp, Zea mays
  Clone ID: MRT4577_8092C.1
gaactcccacgcagaaacctccaggttgtctttgtataaggttacaatcttctgcgtccgcagacttatatctcattacgcacgcagggtcacaccttgtcttcttgtttctaagaattctcattacgcacggagggtcacaccatgtcttgtttctaaaaatctaataggatcctggcatgcctcagcaaatttaggccttgttcggttaatcccgttacatatggattggacgggattggaaaaaattgagaagaactttgacttgtttgggattgaaacccgcccggtgggcgctgggtgggcgtgggtt

SEQ ID NO: 163767 - DNA, 951 bp, Zea mays
  Clone ID: MRT4577_80930C.1
acataacattaattaataaaaatgatataatacacaaacattaagtaagaattatagaaagttgaggcaccagtttgtatgcaggattcttcctcctaagatgtggaaagctaattagttttaaaccataatccacctcaatatatatgaattaaagtgcatagatgtggcaacaacggggaagataaacatctatttgtacagcaaacgcaggcttcccaaagcggcatggtcagttcgagctcgccctggggatgccgccgctctgcccatcgcagacgccgtggagcatcgacggcgacgtcgcaggacatgaggtcgcctaccagctggtgacccgaaacacccaggcggcccgccgccacgtcgagataacggccctgacggtgccgacattttggggcagcgggcattgcccggagccgctcgtcatcctaagaaagggcagcacggtggcctgctagtacgtgacgggatctggcagcgcagggaacggagggacagacggcaagagcatgcaccacatcgacgtgaacatggagtgagcgagccaacggagaaatggcgatgggaatggaggtgcagctggtgggagcagttggcacgccgatgaccggacgaagcaagtgaggcaagggatggacgtcgcactttaatacgtgcctggcggcaccgacattccgatgcagcggctacccccggagccactcgtcgtccatgaaaagggcgacgaactggcctggcaagatctggcggcgcggggatcgaatggacggacgacaagagcgagcgaagaagtcctggcggcttggtgagaaaatggtggcgctgggggcgatgggaacggaggtgcggatggtggcagcagtggagtgagcgagcgtggcctggtttcttcttgaggaaatggcattgcagaggcgatgggaatggagatgcgaatccggccgg

SEQ ID NO: 163768 - DNA, 553 bp, Zea mays
  Clone ID: MRT4577_80931C.1
attcggctcgagccaatgctggccactggtgggacaatggttgctgctattgacttgttaatcgagtgcggagttactagcaagcagattaaagttatatctgctattgcatcacctcctgccctgcaaaagctcaataacaagttccctgggctccacgtgtacacaggaatgattgatccagaagtaaatgagaaagggtattgttctaaacttatcagctcattgcaaaactcatggagaacatattagtaattattattgctgcataaataccccatttggttcttgcttctattgattaatgacttccattgttgttttgtgcccacagttttatagttccaggactgggggatgctggcgacagaagctttgccacataatcagactgcccaatttgattgggtcagtgttcgacctgcgagaatctttgcttgagtttcacagaaacggagcgactgccagtagcagtgtttattgctgtagattactttcgtttgagattttgttccttttttcagtgttatcagctgcctaccattttgtagca

SEQ ID NO: 163769 - DNA, 492 bp, Zea mays
  Clone ID: MRT4577_80932C.1
tccggccagctacctgttgcaaataacaagcagtttgttgccattcaaccaactgggcgtcgttggcaccctgctgcttctttacagcaggcacaactgctaccattcagcccggttggtggtgtgagccctgctgccttcttggcccagccgcagttggtggcgttcttccagcacgctgcgggggggggtggcgccctcttccatctgccacaattgctgccattcaaccaacttgctttgacaaacctagcagtgttctacctacaacccatcattggtggtgccctcttttagtatttcttatgagttattgttcaataataaagtttttatgtctgatgtttgtggcttcccacaaataagaacgtccatttctaaatccattggcagtggctaaaaaaaaaaaaaaaaaagggggctccatcttgaggatccaagtcgttattacgcgtgcttgcttacgataaatctttttttttgggggcccta

SEQ ID NO: 163770 - DNA, 264 bp, Zea mays
  unsure (1)..(264): unsure at all n locations
  Clone ID: MRT4577_80933C.1
cgcaccactcaacgtctcaacctgagaagctagctagctccgggngcccgcagcatggccacgaacagccaccgcattattgcgcccggcctcctgctggtcgnnnnnnnnnnnnnnnnnnnnnnnnnncgcantcgcngcgccggctgccgcctgcncctactgcccgangcngacgcngcnccctccnnncccggtggtgaacccgccgcngtcgtccangcngtgccctccgcctccctactcgcctccacgcngacgggc

SEQ ID NO: 163771 - DNA, 244 bp, Zea mays
  Clone ID: MRT4577_80934C.1
aacaattcattatttgtgatgtcattgaggcatcctttgctgtcttctcatttttgtgtgtgaacaattatatgttaagatgttcaatcatttcttcgatggggttattaagcattgtactgcatgttctactgcaaattagtagaccatattgtcaaacttacaaatgttcatcagaatatatccttcacttttttcctataaacaattatggtgttcatatcaatgaaaggtactattgtac

SEQ ID NO: 163772 - DNA, 352 bp, Zea mays
  Clone ID: MRT4577_80935C.1
gttcagcttgatccaggacgaagggaacggtgagccgccatggtgaaggacagcgcgtactacgacgtgctggagatcagcactgacgcctccatggccgacatcaagaaggcctattacctcaaggccaagctggtgcacccggacaagaatccgggcaaccctgatgctgcgcgcaagtttcaggaactaggcgaagcctatcaggtcctaagtgatccagtgaaaaaggagtcatacgataagtatggaaaggaaggactttcacacgactatcttgaagattatgttggccaacttgcgctagcatctgttgcctctgtagagattgaggaagaatcaaacacacctg

SEQ ID NO: 163773 - DNA, 1437 bp, Zea mays
  Clone ID: MRT4577_80936C.1
ccggtctcgcggcctggtgggcctcggcctctccgactctgggttcattcgcctgcgctgcaacccatctcggaaccctccctcgcctccctcgcgttcagtttgatccaggacgaagggaacggtgagccgccatggtgaaggacagcgcgtactacgacgtcctggagatcagcactgacgcctccatggccgagatcaagaaggcctattacctcaaggccaagctggtgcacccggacaagaatccgagcaatcctgatgctgcgcgcaagtttcaggaactaggcgaagcctatcaggtcctaagtgatccactgaaaaaggagtcttacgataagtatggaaaggaaggacttccacaagataatatgattgatccaactgctgtctttggaatgctttttgggagcgactattttgaagattatgttggccaacttgcgctagcatctgttgcctctgtagagattgaggaagaatcaaacacacctgaggcaaggacaaggattcaagagaagataaaggacgtgcaaaccgaaagagagcaaatacttactcaaagtctaagggatcggctgcaaccatatgttgatgggaagcaagatgagtttggtgattgggcaagtgcagaagctcagcgtttgtctcaagctgcttttggtgaggctatgcttcacacgattggctacatctatgttcggcaagcagcacgagaacttggaaaaagcaaactgtatatgggtgtaccttttattgctgagtgggtaagggacaagggccaccacgtaaaatcacaggttaatgctgccgcaggtgcaatttctctgatacagctacaagaagggataaaaaagattgaagagggtgacaaggaagagcagcttattaagagtatcgaagagaaaaaagatgcaatgctgaattctttatggaaaattaatgtggtcgatattgagtcaacgctttcacgggtctgccaagcagttttaagagaaaatgatattcccagagacgtactcaagttgcgagcaagaggactgaaaaagctagggacgatatttcaaggcgcaaaatcaaactaccgtcgtgaaaacagcctgcgtgttgaagatgacgcggcagaagccacaccgtcgcactgaggatggtggacaaatctggatatgatgtcatatactgcgtcaccggctcaccgagactgagcccgaaagccgaccactgtggaaggagacaaacgatgctgtttttccaaagatttttgtacggtataagcgcaaggtattgctaccatgccatactttatcgctgtccgcactgcatatagttctgttggacgaaaaatgtaatatttgaagtcaaaatgtgatgcgtaatgatttaagcgcatgatcataggctttgaatgtcaaatctctggaaatagaacgaatagag

SEQ ID NO: 163774 - DNA, 1386 bp, Zea mays
  Clone ID: MRT4577_80937C.1
acgcgggatcctcgccggccgggccgggatcctcagctcagtctcttccactctcccttgacctgtctcctctcacctgctgactgctgtgccgctccgctccggtggcatctgcatctgcatctccatccctcgatctgtcttctctcagggtggaataagcgtgacaatggaggctccacccgtggcgctgttcgacaccctcaaggcagccaaaccgttcttcttgttggctggtcccaacgtgattgaatcggaggagcacgtcctgaagatggccaaacacatcaaagcaattacgaccaagcttggaattccgctcgtgttcaagtccagctttgataaagcaaaccgtacatcatcaaaatcattccgtggtcctggtcttgaagaaggtcttaagatccttcaaaaggtgaaagcaacatatgaccttccgatagtcactgatgtgcacgaaagccaccagtgtgaagctgttggaagagttgctgacatcatacagattccagccttcctctgtcgccagactgatcttctagtggctgctgctaagactggaaaaattatcaatatcaagaaaggacaattctgtgcgccttctgttatggtgaactctacagagaaagtaaggcttgctgggaatccaaatgtgatggtctgtgagcgtggtaccatgtttggctacaatgatctatttgttgacccaaggaaccttgagtggctgagggaaagcaactgcccagttgtagctgatgtaacacatgctctacagcaaccagctggaagaaagcttgatggtggaggtgttgcaagcggtgggctacgagaactaataccgtgcattgcaaggacttcggttgctgttggtgttgatggtattttcatggaggtacatgatgaccccttgaatgcaccatgcgatggcccaactcaatggccattgcgcaatctggaagagctgttggaggaattaattgcaattgctcgagttaccaagggaaagaagccattcaagatcgacctcactccgttccaggagtgatctgctttggttgatagaaagcacaatgccaccatccatggaattccacagggtggatttcaatatgaattgagtacttgctattgttgggagcatacctgcagtggatgacttaggctatctctagcagatttttttatctcattccgtattttatttcctttttcaaactccactctgcaaacagtgtcaaacagtgttgtcatctacagtttcgcattccctgttttaccctatctactcgagacagtcttatcaccgaacaaactattgtgttgaaacctgccggattggtttgtgttatttcaccagttgtgccatgttggactaacaatatcgct

SEQ ID NO: 163775 - DNA, 541 bp, Zea mays
  Clone ID: MRT4577_80938C.1
ctggctcttgggttgttactgggtaaaaactgggctaatgcaccaaatctttttgaccggccactgcttcataacaaacattaattctttgcaccaacaattcgcgctgacatagcatgaaggatctctctaacaggggaaacaatgttcgaaagaaacacaacagtatgtgacaagtggaaaacccatataggtcgaaggaaacaaataatataacctgcatgaagctggcgccacttgagttagacaaacgcacatcgaaccaatcagaagagcgggcacataataatctaccacgcgtggtgtgactcactcctgccagtcttttcgctgaaagtcgccattgctaccctgtgagcggcgagatgtgcctcatcttgacaatggaacgcgcgaagcgctggaagaagatatactgaatgacgacccagaacttgacaaggtcagcgcaggcttcgctgccggtgaggcagcacctcgtctgagctgaggacgccacaggatgcgaagatgttcttgaagaactggttgtcgagatcta

SEQ ID NO: 163776 - DNA, 314 bp, Zea mays
  Clone ID: MRT4577_80939C.1
gtgcagtctgtcttgggttccctggtgcccatggtgggtaccatagtgaaggggtccactcaaacatccccagaacatgatcacatagcacccctgtttaactgcagccttctagatcagatggtgcgccatatactaagctaaatcgaacccttgttgctgcttctatacacatacattgatcatatttgcactcaaagccttatttataggactgcaggctaactcaataacataatcaagggccgccgccttctagatggctcacagatccagcaagatattgcggaccgtgaccctcggacataccaact

SEQ ID NO: 163777 - DNA, 173 bp, Zea mays
  Clone ID: MRT4577_8093C.1
gctcctcgctcctgagcaccctttgccggcttgctacgaggactcctttctcgcgctttagggggtatctgccttgggcggtgacccctgtctgtctcgccatggctacatgcccctcatcaaactagccaactacagctccttctacaacatcgttcacaacttatccatga

SEQ ID NO: 163778 - DNA, 740 bp, Zea mays
  unsure (1)..(740): unsure at all n locations
  Clone ID: MRT4577_80940C.1
tttttnnttcaaatcaatagcggtttattatcagtataaagaccgaatcctttggcgtcgacatattgcaaataaacatgtaaatcctgaccctagctactagtattaactactctaaaatatcacttattccaacagccccaaaaaggctattaacctcaaatcgacacaataaatgaatactagcagtaacataacattgcaaaaatgacaggctcaccaaccgacgaccaaaactaaaactacatctgaataggtgtctattctacaattactcaattagtaatcacttttttagcttttgttgcctgcaaaaatagtgatgaacaggaactccaaaaatttgtatccagccttttctggtaaccccgcactcgaccaattgatggatctctatgccaacttcaaaacaatctgagggccaccgaacgacacaggagacgtgcaacagctatgttgtccctcattttgcaggtgcaccagcggctactgtgcggccaccacgaccaccagcatatccagcatggtcaaccctctggtagccgacatcagcaccacgtgctgagacacctctgccaccacttctgccaccgtaatccgacctgtaactaaactcacccctcccgtagccccttcctccaccgtagttaccacggcctctggtaccttcacttctgaagttgttgcccctgcctggtacaaacctgccacctctgctggagcctcgtgaaccaggtgtc

SEQ ID NO: 163779 - DNA, 830 bp, Zea mays
  Clone ID: MRT4577_80941C.1
ggttcggccgggacacctaccatctacccacaccttgatctacttgagccctcggatctccttggcgcatatccccatagacggatcggttcggattcaccatggtcaagttcaccatcgctgctgtgcctctcgcacttgccgccgttgctgcggccaagcctgacttcgagaagcgtcaggccgcctcctcttccagctcggcatcccgaacagccagctctgcttcgtcttcggtcacgggtggcgcagctgccgtccccaccacatccactttcactggaaccttgcctgcttccgtctcgtccatcctcgctggaatctcttcgggcttcggtgacactacgtccaccacctcgctcttcaccacctacgccgccggcgcttccaacccgcaggtgaccggtgctcccggacttcccaacctcaacacgatcctcccctccaacttccctgcgctcgatgtagtgcctcctaccgactcgccgcaggttcagcaatggatgtcgcagatcgacttctcccaggtgcccaacgtcaccaccaccgtcgactcggcttcgtgcagtggtaaccccaccaaccttgcccaggctggagcaagcggcaactgctggtggacgtgcggtcagtgcacccgttccaccgacatcaccacctgccccgacacaaacacttggggactctcgtacgacgacggcccttcgccctacacccccacgttgctccagtatctcaaccagaacaacatcaaatccaccttcttcgtggtcggctcgcgtgtcatctcgcgtccgcagatgctgcagactgagttccagcagggtcac

SEQ ID NO: 163780 - DNA, 458 bp, Zea mays
  Clone ID: MRT4577_80942C.1
attcggctcgagatcatcgaggccaagtcggacacatccatgttcatccaatggtgggacgacgacaccgtctaactcctttttcggccctctccgacttctgagctagatgtctacaccaacaccgactaggctagctgcgtcaacatgtgccggtcaacatctgactacattgtgtttttgggcactagactcatctaatggtactcaaagcggtagcccgtggtctcccactccaacacggaggccaagtatcgagatatggccaatgacgtggtcgggacgtccttgctctgttaacttcttcatgagctccacagccccatcgcccgcgccaccctcgtctcctgcgacaacctcagcaagatctacctctccaatctggtgcatcatcagcgcacgaagtacgtggatatcgagcttcacttcgtccgcgagcatgtcgccgacggtgatgt

SEQ ID NO: 163781 - DNA, 254 bp, Zea mays
  Clone ID: MRT4577_80943C.1
ggttgggttctttttttttttaaccacgaaaaaatgctttttccccgaagggaaaattttgttcttttatggctccccccctcgggcccggggggggggacctttggggcccctacccatcccctggttccgggggtaacctgaaatttgggggccgaaaagggtacaaatttcccccggtcaaaacaagcccctcacgaacaacactcaacacttgtttggttctcgccctggaaaatgctaagatccccccc

SEQ ID NO: 163782 - DNA, 347 bp, Zea mays
  Clone ID: MRT4577_80944C.1
tcgctgacgcgtctgcggacttatgattgcctgcaaaccctgccccatctcgggagatcggagataagcgcaagatgttacactttatgcaccactgccatcatggtctgaaccctgcggcgcacggtggcgtgcaccagcccaccttcaagatcttctgcaaggacgacgatgggtactgccttaccgtgctctacagccacacggtgctggaccctgacgaccggtgcgactagcaccaatactggttcatggacatgcgctttagcacctatgtcaaggactaggagggcaaccctgcgttcgccctggtctacaaggccactgggctaggcttcaagcactcc

SEQ ID NO: 163783 - DNA, 117 bp, Zea mays
  Clone ID: MRT4577_80945C.1
gggacgcgtgcgctgagagcggttatagttaagctcaatgaacccgcacggggtgcttgaaatcaaaatgtgttgcacaaacatatgccggagcgcagaccgtacatacaatgacag

SEQ ID NO: 163784 - DNA, 427 bp, Zea mays
  unsure (1)..(427): unsure at all n locations
  Clone ID: MRT4577_80946C.1
nnttnntttntnttttttttttttttttttttttggtttttttttttttttttttttttttttttttttttttttttttttgggaacccgacaaaacttcttttgggtcccaagtaaccttttacaccaccaggacattagggtttggttttattttgaaaaaaaccctgggggggggggggaagaattccgacccggggaacaccccttttttttttttaacagggggtaataaaaaaaaaaaaaaactttaatcgatgaaacccatgctgccggggggcaattttacctggggtgggcttggaacaaccccaaacggggaactttatttttttaacctactggggccccaataatgggtgtgatttacccccaaaattaaagaaaaaccaatttttgagccaccaccttgaggtatccatttttg

SEQ ID NO: 163785 - DNA, 370 bp, Zea mays
  Clone ID: MRT4577_80947C.1
gaagaccagctcccctctcctgatcgtcctgttcctcacagcagcagccatggcggccgagccggagaagcaggcggcccccgcggcacaggagacggccgtgcacatcgggtacgttgaccgcccctaggacgccaaccctgaggagtccaaaatcggaaccttaaccccggtcttgggcaccaaccataaggccagggcccacaggttttacacattcacaggacacgcctccgagggttcttcgcgaaaagttaaccccacaacatgaaagggatctaagggcgaccccatgtgctccacattgtgcccagacacactctcccgatacacagggctgggtctcggactctccacggcgcgacacaca

SEQ ID NO: 163786 - DNA, 497 bp, Zea mays
  Clone ID: MRT4577_80948C.1
tcgaggccggccgggtctcctctgtccgagacgctgaggataccgcggattcgtgcgacacaaatacctctacggatcgctgggcgcagactacagagtcaaaccgcatcggaatcggaaaacccgcggagcacctgcatgtggaactgtactcgctggagcagaatgtggctcagaactacgtctgacgatatcttcgcgatgcgtgtcgagtgcttcgacttatagactaccccgttccagctctacggctgggagtatcgaactctagttgagtcgcgcgagtgcgagactcatgcacgagagatgggccttgctcgccaccctggtcgacctcgccgtgtagtgggtcagcgatgacaactgggaggatgctgccgaggtggatgtgtagcgtggctcctcctacctggtgcagccgatgtacgttcaccatctcgacgttcactgggatctaatagctcgggtgcttgtacatgcgagtgtccagagcaacg

SEQ ID NO: 163787 - DNA, 353 bp, Zea mays
  Clone ID: MRT4577_80949C.1
ggtacacgggctcccccctcgagtttttttttttttttttttttttttttttttttttttttttttttttttttttttttttttatagttttaattgatcatctacacatatatttaccttttttttatcttaatgaaactaaaaagaggagcaggacaggccgagccgcaggctccatgaactctacaccgaacactagaaaaaaccttgccaccccaacaaaagacagggatcagggtcgactcctatgggggagccacatagttagaaaacgtcgggatctcctaaccaatggatcaatcctggccgaagaccagaactgtagcaacccgccaacaccggcgggctgcga

SEQ ID NO: 163788 - DNA, 281 bp, Zea mays
  Clone ID: MRT4577_80950C.1
attgcatgcaagtttgctgagctgaaggataagattgatcgccgttctggtaaaagctggaagatggcgctaaattcttgaagtctggtgagtgctgccattgttgatatggagcctggcaagcccatgtatgttgagagcttctcagactatccacctttgggtcgctttgctgttcgtgatatgagacagacagttgcggtgggtgtcatcaaagcagtggacaagaaggctgctgtagctggcaaggtcaccaagtctgcccagaaagctcagaaggc

SEQ ID NO: 163789 - DNA, 326 bp, Zea mays
  Clone ID: MRT4577_80951C.1
tgctcgagaggggcgggccggcggctcgcgcacggagcgggccacaccgcgcaggaaagtcaggaggcacacggctacgcccgcccaccacacaccccctggtaccacgggcacggtctgggccagacgggcgggggacataaccctgcaccgcagtccacagccagggagcttctcccggctactgaccgccggggcggatccaccccgtcggctgctgcggcctatgatgtcgggttgactggtggcaggtcatgactggtatgacggcacgcctcactctgtcaatacacatagctggactgataactctcgtaactatccac

SEQ ID NO: 163790 - DNA, 717 bp, Zea mays
  unsure (1)..(717): unsure at all n locations
  Clone ID: MRT4577_80952C.1
caacgatgccctcntcggattcactgggaaaagctagatatcttcaggtgcagcgaggagttaaaacagtactgcagggggttagagggaaccatcccagaactcttaatacactgatccaagggaggagctgaaacagcagtgcagggggttagtgggaaccatccccaaaatcaaatagacatcattgactactgatccaaggacgatgccttggagttcccttgtacattcctctagccttgtagagctcttcccttcccattcaaacacatgcatgacacaacgaaggccttgtggctgtggccttccttcctctacttaaatctggtatttgttcgatcttataggcttcttcatattttgcaattaaatttgggttattgttattcatcaagacgtggcagtctactcccctattttgggtgtcactatcaaaatagcagtaggacatcagtatggaataaatgagacttcgggccaagctactgatattaaggtgttcttatgtttgtttggtggctttcaagccacctgtgtttacattttgtccaaaactcatgaagactgaaggtgtgtccggaaaatgttcagttttagggatcaaagaatcatcttggcataattatggaaaacaatgaattttcagtgttttgctgctgatcatgtttgcagttttgcttttcagatgaatctcctcagaagcaacagattgag

SEQ ID NO: 163791 - DNA, 307 bp, Zea mays
  Clone ID: MRT4577_80954C.1
aactaactacatacatagcacgctcattaaccaaccatcgctggcaaactatatagcctgcctacgcatgctgctcggtctgcatgcgcttgctccgacagcaaccatccgcaatgctcgcacgctcgtatctatagctttctttcttcgtacgtatcactaaccatctgtgtcgtatgtgaaagcaaacttatttaaccatacatgctcgaaccagcaagcaatcgtagcatgcaacctatatcaatcacgcttgttccacaaacaatcatcatatcacaaccgacacctacggtgcatgcattga

SEQ ID NO: 163792 - DNA, 401 bp, Zea mays
  Clone ID: MRT4577_80955C.1
gcgggggtggcacttagctccctctctgaggtgcctccctggactggggaagtgcaacccgtctcagagagatggaggtgctctcgggcgcggcccctgggacccctccgatagatctgccctcttgaaaagcaaactgagggctctgctcgctggccctcggagcctgcgaaggtcaagctgacttcgggggtaggattgacaggattggagcccagagcggactaggctgcaacagcttccggtaccgaagataacagccaaatctgctcgagcagatcgcaaaagctctcaagcacctgcggagctctcatacagcttggtcgcattgccactgagaggtggtgaataccctcctggagctgcagcttcctgtcttcatctatcacgatcgatgttaa

SEQ ID NO: 163793 - DNA, 477 bp, Zea mays
  Clone ID: MRT4577_80956C.1
ttcctcgaatctagagctagcatctccgccgggtcggtaaaaccctagccaggatcttccttgggttcccgatccggtagaagtaagggcaaggtcatggtaaagcccaagtgttcggccagagggcaagggtgaggtaaaggaaggcgctggattctgatatcgatcaagttggaagagaatgcgaaagacagggggggaattgacagcacaccacggggtgagagagggcaagtatgtgggtgcagatatcacgaaggatgccgtacaaaaaggatgggatgatatgtatgcagatccatcaaagcaggaggcgagcctcgaaggagtagcctgcgagacagaatccaaacctagatcatttcttgatgacgaagaggaagaatcacgctgaaacgatttcctaccgcgattcatatcgcaataagggtgattccaatgcataatcggagaaggcctactccaaaaatgagaagg

SEQ ID NO: 163794 - DNA, 1475 bp, Zea mays
  Clone ID: MRT4577_80957C.1
acatatgtcatctttcattgggaccgtcggggccgggatgtctgcccgcttctttcctttctctctctctctctctgatccgcggcaccgccgctggcgctcgcggtgaggcgtcgaaggtcaaccccctatcttccacctcgggggactgcctacccggtggatcgacgcagcagctttattggttccccggagacctgcaagtgcaaggcgagctagacctagcaaccgctccctgccgaccttcggcgtcttgggagtaaacatttctgtccaaccaataccgaagatctcccatcggctctgtcgatttgcaatggagcccggcagcccagccccgaagaaatcacggctggtgcactcagcggactgcgaaatggaggaggcgcaggcgccttccagttccaatgcagcggggggcgtgaaccagagctcgcactggacccagtggcagatcctggactccatcctcccgaccggcggcttcgcgcactcgtacggcctcgaggccgccatgcagtcccgcgtggtgaacgaccaggaggacctgaggtcgttcgtcgtccaggtcctggacagcgccggcagcctgctgctgccgttcgtgcactgcgcatgcgcaggcaagtcccccggcgacgcagcggcgtgggccaagctggaccggttgctggacgccacgttgacgaacgaggtcgccaggaaggcgtccgcggctcagggctcggctctgctgcgggtggccgcgtccgtcttcgccgaggttccggcgctgcaggagctccggcggacgttgctgggctccaagagcgtgtcgttccaccacgcgcctgtgtttgggctggtgtgcggcttggttggattcgacggcgagacggcgcagcgggcgtacatgttcgtgacgatgagggacgtgctctctgccgccacgaggctcaatctgatcggcccgctggctgcttcggtgctgcagcaccagcttgcgccggatgccgagaggatggtgcggaaatggagggaccgtgatgtctctgaggcgtcacagactgccccgctgctcgatgccgtgcagggctgccacgcttacatgttctccaggctgttttgttcgtgacaacaagccatacatgatacatttccctggacaaaactggcagccttccatggccatggctgatggctccaagtgatctccaacgtagcagctaaatggacagacaaagctaaaatagctgcccacgagctactgtagcagtataaaacaccttccaacagggcagctaaacgagacaggcaaaaaggatggaaagagagaggaaagccataatagcttgtactgtggctggcagccatttcctttttctgtgtctgagaacatgacctcaccatagcttgtactgtggctggcagccatttcctttttttgtgtctgagaacatgaccccaccatctccatctgcttcatttgttggact

SEQ ID NO: 163795 - DNA, 715 bp, Zea mays
  unsure (1)..(715): unsure at all n locations
  Clone ID: MRT4577_80958C.1
aattcggcacgaggcccggacggggacggctgaactcgagctcgagtcctcgcgcgaagtcgctggtgctgctgctataccccggccgccgccatgcgcctcctcctcaccgcggcatggccgtgcgctatcctcctcatccttgccagtgcgctacagtcggcaacggtggcgagttccggtgccgctgctgcccgtctggagtggcaggtcctgaccagggccaacttctcgtcccagatccggctccgcccccacgtcctcctcctcgtcacgatgccctggtatggtgagtccagatcactgatggctgacatagaacgtttggttggttccaatgaggagcttagtcgcctcaagctgatggttgtatacaagaattctgaaaagttgctgacagatgctattggtgctgctgaaggaataactgtggtatactaccaacgttccatgcaattcaaatatcaagggaagcttcgtgcacatgatattctgtctgcagtgcgctatatcatgtcacttgaccatgaggagtccccttttgaggttntgcatacacaagaagatgtcgagaccttcatcgaatctaccgataaatccatactcctttatgaatcatgtggatggttcaccagattggctcatggcgggggcaaccaaagttatgaggcagcgtcatcaaataacaacacagaaaacgttgacatttctggga

SEQ ID NO: 163796 - DNA, 387 bp, Zea mays
  Clone ID: MRT4577_80959C.1
ggacgcgggggccggactcttgggtggggacccgggctttacctgccccaaatttaattaagggtcgcgcaacctctagttggggtctcaaaaaccccagctttaatggtcgaagattatataatgcgggtaccaaacccgcaatattgattccgaaaaccaagggtcacttgggaataaaggtcacgccatttgccttggaaaacctgagtttatgggactcaccacaaaccattttatcccacggggagtcgaccaaactaacttttggacaacaaggcaagggccagccccttagtgagggaattaacaccctttcgattaaaaactgggttgggtgaaggttagaccccccccccccggagggttgcccccttggtttaagtt

SEQ ID NO: 163797 - DNA, 496 bp, Zea mays
  unsure (1)..(496): unsure at all n locations
  Clone ID: MRT4577_80960C.1
aattcggcacgaggctccacccttcctcagttcctctctcgtctctcatctcatccactcccgtcccagaatctccgtacacgcttcctcctcgccgtcgtgccaccccaccaaaccacgcctgaactgccatttcccccgttttttcccctctcgcgcaaggcgtaaccggtgcgtcgtggggggtagtttcggccgagggaagcgcggcgcgggaccgggcgcgtttcagaattcagaccggccggccggccgcggggagggcgccgcgagatcgcattgtggcggacgcggccgggtcaccgcggcattccgctccgggggtgtccgtggctgctcgaggcttttgcttgtttgtctcttacctcttgcgttgcgtcgggcggcggngctcgaggttggtggccggccaggcgcagcgtctncttttcgcggtcgcctttccggagcggctgccgccgctgctggtgcctggtggggacgcgcttcgcctttc

SEQ ID NO: 163798 - DNA, 298 bp, Zea mays
  Clone ID: MRT4577_80961C.1
ccggccggcggagaccggccggcactatagagaactaaatcgaatgatggtgtactcgatcactacgtactgacgtgtatgagtttgtgttgatgtggagaacaataaaggcatgtgtacgcgtttgtatatcctgtactcagttcatgtgcgatatatatatatgctagctatgcctgcttgagctacaataaaagaataagaaaaaaaaataaaaaaaaaaaaaaaaaaaaaaaaaaaaaaaaaaaaaaaaaataaaaaaaacctaaaaaaaaaaaaaaaaaccccgcggccctga

SEQ ID NO: 163799 - DNA, 1032 bp, Zea mays
  Clone ID: MRT4577_80962C.1
ggattagtgacatcactcaccaatttgtgttttgcagaattgggagaaatcaaacaacttcacaacagatcaggaagctttagagcttggcaatggagatgagagcccgggaatctgtaagcatgtcgaaggatctaactggggaaatcgcaccttttgccactgccctacatgatgtgttcctccactcccattgctcatcatgcttcaccaagttacttccacaagccccttgtgtcatgtcttgcatgacatgctgttctcttcgatactgctgttcagagtgcttacgtgcggattcagtggtgcatgtttcctctggtgaatgttgcttttttatggatcacctcaagagagcctccccttcctatgttactgaaggaacaagtgatttgcgtgctgccctccgccttctgtgtgtgcttgagatacatggtcttgtttcgcctgattcaatcaatcactacagtagaattggtggactttcaacaagtggtattgaggaagctttgaaggaaggtgaggttattgctgagaggatactggaggggagcttattgatgtcatctgctagaaaatcgagggcacagacttctgctattttttcagacaggcttaaacttgagaagatggcattatgggcagtgattatcaatagcgtggaggtgcaacttagtgaaggggtagctttgggagtggcagtgtatggcccgagtttctcatgggtcaaccataggtgctttcccagtgcttcttaccggtttgtactggctccaaggaatgaagactgtgcttcacagaaatcaaaatccagtgtagtccctgctagcaaaggagttgcagctgatgtgtggcatgcttggcaatacgaagatcattctactcatggtacttcattacgttctacgaagcaagacattcggatttgtgggcaaagtataaatttatttggtcttgcaggcgatgtattgcatcaccagagccatacactgatcttattctgaattgggatgggagggacttggataaagc

SEQ ID NO: 163800 - DNA, 602 bp, Zea mays
  Clone ID: MRT4577_80963C.1
ggccctaggggcctttttttttttttttttttcctttttttttttttttttttttttttttttttttttttttttttttttttttttctcttttttttttttttttttggaaaccccccccttccaaaaaaaggcgggggcgtaaaaaaaaaaaaaggggggggggacctatgactcccccaggggcccggaaacggcgggggccccaaaaaaccttttttggtccccccggcgggaaagaatttttttttccccaaggggacaaggattggggatttccggagctgcaaaattattgggggggggggaactcccccccataggggcttgggtcgaactcccccgaaggggggtttatctcgtctatggcagccggggggttggagttttttatggcaccccggggatcctggaattcgcccctggactcgaaaatttccgggtccccccccgggggggagggggccgggaccggcacggcaaaccccccgggagggaattgctcgcctttgggctcccaagccattttgccggtttttgggggagccccgaacctggtcttttttgagagagaattgaaattggcccccttccggggggca

SEQ ID NO: 163801 - DNA, 3105 bp, Zea mays
  Clone ID: MRT4577_80964C.1
ataagcaagaaaggcccactaaagggcaattgacgctgggcctagcagctagcgcgtggcggcgacggcgacggcgacggcgggggaagactgagcggccgaggagccggtgcggcatcggtgcatcgcagcggcctgaggtcgcgagcagcacagcagggtgcgccaggcgccgacgcggcacggggcaccgcgcgacgcgtgagcgcgtggccggtctcagcaccaagacgcatcaaagccggcgctaggcagggcactatcgcgctgctgcgcagctgtgcctgcgctggtccctggaggattagtgacatcactcaccaatttgtgttttgcagaattgggagaaatcaagtaagtactaactaggtgtataaatgcaattacatttcactgattcaattagcccctattcaattagtccgtggatagtgctgcattggtttaaggaagaacctcttcctgaatctaccatttcttagttttagcctttggggtaaggtccgtaaggatttagtgtttctagacctaagttagtgactctagtaagggtttgtgggagcttatcaatcatttttttacttatccaaccgctacaaatagatggtgtagtgatttgtctgatcaagtttgcttttgtcctgttttctataatcatatggtgatttggaggaaaaaaactgggatgttatttttcacatgttgcgggatggttgcagtaaaggtggttagattactttggaacaaatagttcaatgttgataagcattgggttttctcaagttatggtcctgaattaattctgattagtgttggagcacaggagtgggattcaggtgtacgcaacttacttcaaaatggcgaacaaaagaacaagagatattaataaaaacaagttatgttctctttgtcaaagttctttctatgctatgtgcagccaacttcacaacagatcaggaagctttagagcttggcaatggagatgagagcccgggaatctgtaagcatgtcgaaggatctaactggggaaatcgcaccttttgccactgccctacatgatgtgttcctccactcccattgctcatcatgcttcaccaagttacttccacaagccccttgtgtcatgtcttgcatgacatgctgttctcttcgatactgctgttcagagtgcttacgtgcggattcagtggtgcatgtttcctctggtgaatgttgtttttttgtggatcacctcaagagagcctccccttcctatgttactgaaggaacaagtgatttgcgtgctgccctccgccttctgtgtgtgcttgagatacatggtcttgtttcgcctgattcaatcaatcactacagtagaattggtggactttcagcaagtggtattgaggaagctttgaaggaaggtgaggttattgctgagaggatactggaggggagcttattgatgtcatctgctagaaaatcgagggcacagacttctgctattttttcagacaggcttaaacttgagaagatggcattatgggcagtgattatcaatagcgttgaggtgcaacttagtgaagggttagctttgggagttgcagtgtatggcccgagtttctcatggttcaaccatagttgctttcccagtgcttcttaccggtttgtactggctccaaggaatgaagactgtgcttcacagaaatcaaaatcctgtgtagtccctgctagcaaaggagttgcagctgatgtggtaaaggagaataatgaccattttgtttaggacctgctacaattttgctcgtgtcatacaaagaataagataaaatatttgaatactgttcacaacatactttcattatcataaacaagtgctatttgaatgtttatacagaaatggttcctcaaacactttcataggctgaatctaaatattcatgaatatactcatcaactcatgtttaaatttcaatagttagacaatatttatatagcatttacttgagagaaaatcattaagcttattattgtgcttgtttttattgcagtggcatgcttggcaatacgacgatcattctactcatggcgctgtattgcatcaccagagccatacactgatcttattctgaattgtgatgtgagggacttggataaagcagaagcagagggtactgttacacctccagcaattgagaatttgggtgatgtttttgagtggtttgaagcaagaggatatttcagggagaaaacatatactacagcctcttcaccatatctgtcttactgcttacatgacacttgcctctgcttaccggtttcgcgccttaagtttagaagaagctgtccgttcagatggagaaaatactgatgacttttttagaatggctaaagcagcagcagcgtattccctggtacttgcagggagtgcacaccatttgttcctatcagaatgttctcttatgatccccctgtctcattttttgttaaacactggacagtctctgttatatcttgctgagtctatcaagggaaagacaaggcaaaatatatccgaggccaggctcagcttttcttcatgtccagcaagttctacagacaatgattctccaccgtaccatgtgttcagatcaacctgtgaagcgtttggcaagcaaacgttatccctgtcactgcggtgctggtcatttctagtgcgaggtttaccctgcctggaaaagataaagagccccatggaatttagtatgcccggaacaacaatatttcagtctgtcctttctgaggaagaccatgccaacctttccgcgcacgagccagtaagtttcacggagagacaagcggggtgcatccttagtttggctctatgttgtatcacctactgcaaatatcttgctaccatatgctacggcccacatcattatctggcagaccatgcaaaatatctacttgaaggtatcgatcctgcacaatgaatcttctttcttggcataggtgtgttgtgaaatcttatgctcttatgagttaatgtaaaacgtgtcgtgattatcaaggctgttgagcttattttctatatgattgtatgctgagctcgttatttattattttgtatggaagcaccatttttct

SEQ ID NO: 163802 - DNA, 431 bp, Zea mays
  Clone ID: MRT4577_80965C.1
cagcgacagtgcaggcgagcgatgaagctgtcgagactttgagaaggtaaattcgacaagggaagagacggacagctcagacgtttatcccgtgattctatctttctatctcctcaaccctcaagacgcaataactataacatgcactagagtatgaagaaacgcaagacgtccccgacatctactccgtctttgcaaaaactgtctcaatgatatctccatgaagacatcctaaggctaatcactgatcatgtctaatgactcatatcgcacagtcattaacgcaacagcatatgtctccaaagagctcaacgccaaggacactaccatgtaggcaggtcatcagcggcttccatagaatagacaaagtgcccactgcagggcaaacggtcctccatgggcaaggcctaatcaaagcatctgtatatgca

SEQ ID NO: 163803 - DNA, 193 bp, Zea mays
  Clone ID: MRT4577_80966C.1
cggacgcgtgggcggacgcgtgggaaaaaaatataagtcatgaatagcaacaagaacactggcggggcgacagctaccgttgcggtgttgttactagtagcggagacgctgctcacaacggtggctattgcacggtcttgcttgaacgggatgctgccttcgtcgacgacgtcacatggcatggttggggatc

SEQ ID NO: 163804 - DNA, 694 bp, Zea mays
  unsure (1)..(694): unsure at all n locations
  Clone ID: MRT4577_80967C.1
ctgttgtaccggtccgnattccgggcggtggagcttcgccaagccgaggagcagcgtgtctggctccgcccggaggccctccgtcgccgccggggagctgtcgcaggtgcgcccgtgcagctgcggccttgagcgcgaggtggaggccgccgccgtcatccagaaggccttcagaggctacttggctcggaaggcgctccgcgccctcaagtcgctcgtgaagctgcaagccctggtgcgaggctacctcgtgaggaagcagacggccatgacgctgcgcaggctgcaggccctcatgcggctccaggccaacacggcggcgtcccggagatccactgaacaagagcgtatcgttgcgcgggtgaggccactggccgtgcctgctgctgcggtgcaccgccggcggctgtccgacggcggggacgccgctggcggcttcgaccgcagcccgaggatcgtggagatggacacgtgcgagctccgctgccggtcgtcccggatcacgagccggtccgccggcggcgacccggcgggcgactcaccgctcctcctgcgctgccacgagccggcgtggtgtctccaggggcgagagctcgagcccccgcctccgcctccgcctccgcaccccaagacgacgcacaacacgccccgcctcggcgcgttcgcgggctacctcggctcgccggcgaagcgc

SEQ ID NO: 163805 - DNA, 273 bp, Zea mays
  Clone ID: MRT4577_80968C.1
tcgtagacgcacacgcgagatagctctgcatatggatagcacacaagtgccggcgctggtgtctaagaactcaaagatcgaaagagctcagaggaagaggtgtcttacccacaggaagaaggggcttacagaaaaatgatgaacaacggtgtagcggcaccgggggccagctcaagattaaggacaggaagtgggtacatggacaggacggaccatgctcttcttaggtgactgatgaaccacattcttgctctatgctgataacaagacatg

SEQ ID NO: 163806 - DNA, 458 bp, Zea mays
  Clone ID: MRT4577_80969C.1
gcacgagctccatccaccgtgctgatccaccaagcactcgcagaggaaccgcccgtgtacccccacaggtttttccgcactcttctggatttggtgtttgcaagggcaaaatagctatctcacatttatttttctttttacgcgttgcgcggtcgtcgtgcacatcagagcagagcagaagcaaccctccacggacgtcaagtcaaaccaacacgtccgggccacaatatggaaagctagctatacaagtatcgtggaatataaactctcaaacttaccaagttttcatcacatcattaatatagaggtttagttctcgacattgaaatcagcagtaaaaggattgggtggactgaatgatgcagcagcttatcatcagtgtgtacccatcaaatctgtcattgagttcttgactcttagggcatctatagcctacataaatatacagtagcatgttc

SEQ ID NO: 163807 - DNA, 1950 bp, Zea mays
  Clone ID: MRT4577_80970C.1
cagaaaactacaaccatcaaaacaagtagaagcaatccacaaaggaacatcaagacagaaggtttttgtgatcttcggaggggacacttcagaacggcaagtatcacttatgagtggtaccaatgtatggcttaatcttcaaggttttgatgatcttgacgtgacaccgtgtttgcttgcacctgcacatggatatttctcctcacgtgatcaagatttcagtgacagttcaagagaagtttggacgttgccatattcattagtgttacgacataccactgaagaagttcatgctgcatgtgttgaggcaactgagccagaacgagttgaaataacaaaacgtttgcgtgatcaagtaatgaatgaacttgggtcagcattgagcaaacatgattggtttgcgggctttgacatagcttatgaacaacctatcaaatactctctgcaacagtggatcgaccatgtaaaagaaactgaagctgtagtctttatagcagtgcatggtggcattggcgaggatggtaccattcagacattgttggaatctgcaggagttccttacacaggaccaggaccaatagcgtctagaacatgcattgacaaagttgcaagttcacttgctgttgaccatcttgctagttatggaatccgtatcattccaaaggatgtaagagcaacagaagaagtactgaagtcatctcttgttgatatctggaatgaacttaaagcaaaactagaaacagaaacagtatgtgtgaaaccagctcgtgacgggtgctcgactggtgtagcaagattgtgctgtccaaaggacctagaagtctatacaaatgcattgaggaggaagtttcagcatctgcctgctaattgcctgtccagggcacatggtgtaattgagatgccagtcccttctccagagtcactaatatttgagccttttattgaaaccgatgaaattatcattgcaaataaattagaggatggtagtgcccgccatcttgtatggaaaggtgaaaatgactggcttgaaataaccgttggtgtagttggcaaacgtggagaaatgcactcattaaatccaagtatcacagtgaaagaaagtggtgatattttatctcttgaggagaaatttcaaggtggcactggaatcaacttgacaccacctcctgcaacaattatgggcgaggatgctctgcagaggtgcaagaagagtatcgagaccatggcaaacgctctaggtttggaaggcttctcacgcattgatgcatttgtcaacgtgcgaagcggggaggtgctgctgattgaagtcaacactgtacctgggatgactccatccaccgtgctgatccaccaagcactcgcagaggaaccgcccgtgtacccccacaggtttttccgcactcttctggatttggtgtttgcaagggcaaaatagctatctcacatttatttttctttttacggtgcgtcggtttgattctgtatcagtcgagtagtatttttatttatatttgtgggaaaaaaatcgtcttctccgtgttgatgcgatgaaaaataaacatgtatagcgttgcgcggtcgtcgtgcacatcagagcagagcagaagcaaccctccacggacgtcaagtcaaaccaacacgtccgggccacaatatggaaaactagctatacaagtatcatggaatataacctctcaaacttaccaagttttcatcacatcattaatatagaggtttagttctcgacattgaaatcagcagtaaaaggattgggtggactgaatgatgcagcagcttatcatcagtgtgtaccacatcaaatctgtcattgagttcttgactcttagggcatctatagcctacataaataaccagtagcatgttcggttgcaaagtgtttgaaaattgaatagaaagatatttaatcttcttcaaaaaaaaaaaaaaaaa

SEQ ID NO: 163808 - DNA, 878 bp, Zea mays
  Clone ID: MRT4577_80971C.1
aattcggcacgaggtttcgcactcggcggcacatggtggcgcgccttgctccacgttctcggcatatgctatggcccacaaggggaaggcgacatccgacgtcacctacaacccggaggagggccgaggcatatagcaaccccgccgtctacaaccgcctaagtgagtacactgccatgtcacaggaggtccatgggccagattacgatccgaggaccgaggatatcgacgtagatgtcctcacaagggtcggaggaggcaagaggcatggcggtactggattgccgatggacaatcgactcgtcgtcaactcccactctatctcaggtgcgagcaaggagcacgagcgcgagcccagccatacgacctcgggaggacaactcacatcatcggatacaacaactccaggcccagctagaagaagagaggagggaacagaaggagatggaggcgaggatgacggtggaacggctggcccgcttggtagatcagtagaggatggcggagatgttccagtacatgcagagccttggcgccacacaagggacaatctacgacggcatccaacaaccctcatgaatctcccagcctatcgccgcaccagtccagccgcccacctcgcccatgatcttctcttagcttagttgtgattgtgagacttgtgtgataaacttgtcttgaacttatgtttgttaaaaacttatgtttgagagttggtaatacttatgttggtaaaacttggtatgaacatagacatgtttatgaaaaacttgtgagatttgtgtttttttgtgaaatatgtggtctctattatgtatgtgatgattatgtgatatctgtgatgtatgtatcatgattatgttatatatgttttgtct

SEQ ID NO: 163809 - DNA, 294 bp, Zea mays
  Clone ID: MRT4577_80972C.1
cccacgcgtccgaaaaaaaaaaaaaaaaaataaaaaaacaaaaaaaaaaaaaactaaaaaagggcataaaaaaaaaagaacaatgaaaaaaaaaacgcatgctcgcttttcagtccccatccttacttactcttgcctgcaacattcctacctttttttttagtcgctccctaaatttacattcacatggccgttcttatccaactttatcactgtgaaaaccctctcattccccatgttattctccctgatatacctccccctttctccagttgtctcaataacgtcaaggcc

SEQ ID NO: 163810 - DNA, 223 bp, Zea mays
  Clone ID: MRT4577_80973C.1
cccacgcgtccgtaagcccctaaagcaccagcagaacaccataggctgctctaatacacaatagcctgcaagacaacttcgaatcttggccttactccttcaaaaacacaggcattctgatgcttccaaagttcccaagcaaccaagataattagggaatcaaagccttttttgacttccttagaagccccctttgcagcactaaaccaccagctagaaaata

SEQ ID NO: 163811 - DNA, 461 bp, Zea mays
  Clone ID: MRT4577_80974C.1
tttttttttgggttttttttttttttttttattttttttttttttttttttttttttttttttagtttatgaaaacgggccaaatgaacccttttttcttagaaggggggggcgtaaaaaaccaaattaccctaaaaaaaggggggggatggacgaaaatgcacaaccctaaaaaaattttacgggggaaagggcgcaaacggtaaaaagggggcacaaaaaacgggggcataaaattaaaaagggggattacaaaatttcggcaataaaccggcaaaaaaaaccaaaagatcctgggaagcctccaagaactcaaaaaaaaaatattccccgggggggggggggggaaaaaagaaatcttcaaaactcttctaaagcgggggaaggaggaaacgcccaccgagaaaaaaccctaataggaaaaaaaaacaaagggccaatgggccaagaagggtggccct

SEQ ID NO: 163812 - DNA, 251 bp, Zea mays
  Clone ID: MRT4577_80975C.1
cacagacctacgcggtattggtccattttttttaagaccaacatttgtttaagaatacaggaatattaggaagactgaacattcttccggcattattcccataacctaacaaactatacaaagagtgccttcagctagaccagatatggtagctgatccactaatgtcacaccaaaacggtgacaccatagaccctcacaacacactaaggttgataatgagcttatgatatattccccaacaaattctac

SEQ ID NO: 163813 - DNA, 205 bp, Zea mays
  unsure (1)..(205): unsure at all n locations
  Clone ID: MRT4577_80976C.1
taaanaaatggggggggttgttttgcaaagaaacatgacacgtgatattttagaaatagttaaattaaccatgctgtgtgatcaggcatgtacaatggatttggactaacagatttacaatttgttcttccctaagttctatggcatgttacacgagttttgcatatggttaatctaccatgattcccaaagcgtccctgggttg

SEQ ID NO: 163814 - DNA, 2344 bp, Zea mays
  Clone ID: MRT4577_80977C.1
cccgccttcggcccgggcggcgcgcccgatctggtgtggtcgctcatggcagcgtccgcggtgtctctggccaaaggtttgataactgaagggctcggggggcaccaggcccgtgtgctagctgcgtcccctccctgccggccgggtgaccctcggggcccgcacccggcccctcgtgatcctgcgtcgcctcggctcgggctgggccaccactcaccggtccgggaagaggaaggtgacctggttgtcgtggagagtggcagtgctaggtttgggcaggaggacgtcattaaggaggttgtgggaagccagagaagggcagatggatctggtgagcccggggatagcatggaggtggacgagcagaaggcaaaagaagttgggatagagttgcctcacgcaactgatgtgctgcacaaaaacgggtcagatggactagaaatgaacgatgtttctggattgcgcactgttggaatcctgaatacatcttctgcgaaggaaagtgacgttcatagtttatccaataagatgaaacatcctaatatttccagagagcagcaaacaaggacaagtaacagtaatgctgctcaccatgcaacaaatagtattactgatcaaaccacagctttgccagatgctacaattcgcatcatcaagaaccagcttacgacagcaaagatgtaccttggattgtttgcttctaggggtaatcatggcttcacaagggagctccgtgcacggatgagggatatacaacgagcactaggcgatgcaaggagtgatcggcaattacctcataatgtccacagcaaaactagagcaatggagcagacactggtgaaggtcaggaaaattcatgatggctgctcaagtgctgtgaataggctccatactgtccttcactcaacagagcagcaactcgaatcaaacaaaagacaagctaactatctagcacaagtggctgcaaaatctctacccaagggtctccattgccttacactgcggcttacaaatgagtactatttcactaactcaaagaataaagactttccctacgtggagaagctggaagaccccaaactctatcattatgccttgttttcagacaatgtattggctgctgcagtggttgttaactcaactcttgtccatgctaagaaaccagaaaaacatgtattccacattgtgacagatagtcttaactatgctgcaatgaaaatgtggttcctggctaatccctttggtaaagccgctattcaggttcagaacattgaagagtttacatggttaaactcaagctacagtccagtgctgaagcagttggaaacgcggtttatgattgattactacttcagaactgggcatgctaggcacgatgaaaatcccaagtttcggaaccccaagtacttgtcaattctcaaccatctgaggttctatctccctgagatcttcccaagacttaacaaggtgttatttctggatgatgatactgtagtgcagcgagacctaagtgcgctttggttggtagatctcaaaggcaaggttaatggtgctgtcgagacctgtagacaggacttccataggtttgataagtacctcaacttctcaaaccctcttattgccaagaattttgatccacatgcttgtggttgggcatatggcatgaacatgtttgatttgtccgactggagaaagcaaaacatcactgaggtctaccatacctggcagaagttgaatgaaaacaggctattgtggaagctaggtaccctccctgctggccttgtaaccttttggaaccgcacgttccctctcgatcgttcgtggcatcaattaggacttgggtacaacccaaatgtcaacgttaaggatatcaggcgagcggctgtcatccactacaacggaaacctgaagccctggcttgagattggattgccgaaataccgcaagtactggtcagcacacgtcaattacgatcaagtgtttctacgggagtgcaacataaacccctgaacagcaaatagtggtgcatggtttatatccttttcttttcaatgatttcttagaccaattctttgtgctctaggtaatttaaattgcctagagtgcttattctttgtaactgatgtctttcctgatgtaaaggtgccagcaggttggcggtaggcttggatcatacaaacagttagtagccaaaggcatatcccgttttgtgcttataaatgctaatatggtagataatttttgactgtatgtatgaattgaatgctatgttagatgccctcgcaaacagtacagtttgcgacgacccatttccactactgcatcctgtgatctgttgtctgtt

SEQ ID NO: 163815 - DNA, 278 bp, Zea mays
  Clone ID: MRT4577_80978C.1
ccaggaggaacaaaacaccgccagcgtggattttccaaatttccctggaaagtaagtctcgctcttgccaaagaaaagtctggcttggagagtctctggagcccaggatgccagcatgtgccaatgactgtcaccttcatctcttcaaaagaaaagccatagccgaggactgtcccgcgacccccgtggactgcgtctaggtcatgtgattctgttttcatttctcatcccatccaatttgtccttttctcctgtcattttcttcctctgtggtccct

SEQ ID NO: 163816 - DNA, 1056 bp, Zea mays
  unsure (1)..(1056): unsure at all n locations
  Clone ID: MRT4577_80979C.1
ggnacagaagtaaattcatcttcccttggatgggctatgtcagctgcctcttctcgtgcattccgtttgcatggtgaagtcccaatgttgttgcctcttattgagatgtgcaatcatagtttcaacccaaatgctaggattgtccaggaaagaagtgtaaacagcttagacatgtcagtaaaggttcttgctgagaagaagattaagcaaaatgaagcaataacactgaactatggctgctacccaaatgatttctttcttcttgattatggatttgtgataacacagaatccttacgatcaagtggaactaagttacgatggagcccttcttgatgctgcaagcatggcagctggagtctcttctcccaatttttcagcgccagccaagtggcaacaagatatattgtcacagctaaacctacatggagagggtgccgttttaaaggtgagcttaggaggccctgacgttgttgatggacgcctgttagctgctctaagggtgcttcttgccgatgatccagaggctgtgcacaagcatgacctgaatacattgatgtctcttgacgtgcaagttcctttaggtcccactgttgaagcatcagcactccggacagttcttgcgctttgcgcgattgctctccaacactttcacacaaaaataatggacgaccaggccattctaggcggtgggccgcctcttatcacgcaactggccgtccagtttagattgcagaagaagttcacgatcgttgacgtgatgcagaatatcagcaggagaatcaagatgttatcgccgcagaaatccactgggtagttctttaatctgtcgtcagacagtcagttaccattctgtactggctactgcagatagcacaaatcccagttgtgattctgtaccatgttcttgttatgatacttccagtgcctgtcattgaaaagttacatctgcgtcgaacagttaattacttccctgtactgattattgcgtataataataagtcccgattttgagtcttgtaccaaaaaaaaaaaagcggcaaaacccaccccccag

SEQ ID NO: 163817 - DNA, 446 bp, Zea mays
  Clone ID: MRT4577_8097C.1
gtacgtaagctcggaattcggctcgagggtcgtttcgaagcaattagtgcgcacccacagggcggggacagcacgggggggccatatggcggccggagggggtagcaaccctgcctccgtggggcattacttcatactagccaggtccgtggagctgctactactacaccaataagcccgcctccaagactaatggccatataagagacgtcggtgggcctgtccatcacgcggaataccactgcctacatgggctcttactgcacgacaacgtgcgcctggcggctcaccacgggctcaagtgcgactaaatgttgctacacctggcacgagagaagaactacaggcacgatagaatgacccagcactgccaacagctgactgatagtcatggatgcgatctaccaagattcgaaggcacgaatgtgattgaacagatacagaac

SEQ ID NO: 163818 - DNA, 338 bp, Zea mays
  Clone ID: MRT4577_80980C.1
gcctgttccgacctgttcaggctcctcccgtagcgcgcgggcgttcgctcttcgcatgtagcctctccgcggcgcgggccaggagcttgttcttgagcttgggcctggcgaaggaagggggcggcggggaggagggcccccttgagatcgggatggatgccaggactgtatctggggtcagtgggcctctgcgatataggatgaagtagagggccccaagtaccaataagttgcgtgcaagaggctcggagatggcaccaatcgccgggggcatagtcgctggaaggtgttggccggacaggtggagggcgggggtgtgagggaccttgtggaatggg

SEQ ID NO: 163819 - DNA, 227 bp, Zea mays
  unsure (1)..(227): unsure at all n locations
  Clone ID: MRT4577_80981C.1
ctcctccgtcctcgtcgactccnaanaggagaggagagcacgaattgttgtagttggacgccaccggcnagtctcctttgggccacacgtaaggcggcgtaaactgnagaggttgtttggtgtgaataagcaatgcacgccggacgcgccattaccagtttggttgccaagtgaagagaagactgtgggtgtaagtgtggttgtgttcaaaggggaaagggaccggg

SEQ ID NO: 163820 - DNA, 374 bp, Zea mays
  unsure (1)..(374): unsure at all n locations
  Clone ID: MRT4577_80982C.1
tatgtgcgggggggggggtgagcgttataaaaaacaaagtcacacctttcttttttttcttatgcttgcattgttcgttctcctagctctttgtgcatgcgccgctagtgcgacccatattccagggcacttgttttttttttatgccattgtgtggggggggggggggcgtncactactncctnatncaccattttcttggggggggggtggcatctccctccctgatgctncanctnctgttggccttaccgcttcagacgttgcctgtgctgatgcctcttgtgttgacgcctttcatgttgtcnccattgntgatgccgtgcggtggtgtcccttggtcttgttttttcttgtgttctccctgttgttgc

SEQ ID NO: 163821 - DNA, 733 bp, Zea mays
  Clone ID: MRT4577_80983C.1
cggctgatatttcttcttcgctcggtcgtcgctatccctctcccccctgatttttccagccgccgctctagtggaaaaatcctgccgcccagccgtcgttatctccggttgcctgctgccgagcccttcttcgttgccgcgcgttccatcttcttccccagttgtgcctcatctcctgcgcacgctccatcctgcgctcggcgctcggggctctgtttctggcgcgcaccctgctcgctggtgccgcgcgcagcttccctgctctctccccctgtccccagctcgctcgcccccttcctcttctctagctccggcgccctgccgagcgactcgctctcacggcactccatttttcccctgcgtgcgagctctgcgtcaccaacgcccagctcttccttcacgcttggattccagttccctgtgtcgcgcgccctgttcttctgcgcgcgctcgctccgggtcggattccctcttcccccagctcgccgtccttgctccgatcctcgtcctggccgcgcatgctcgcccctagctcgccggatttcctcgccccgtgctcgcccccatggtgcccggcccttcgctgtcaaccaagactgtcgtatctgctctgccgttcaagttcttcagctcgcccaggacggcgtgttgctcgctccccagctcggaccgcgcggctccctgcgccggatccccgtgcccctgtggtgcatgggcgaagctcccttcctct

SEQ ID NO: 163822 - DNA, 297 bp, Zea mays
  Clone ID: MRT4577_80984C.1
ggttccaaaaaacattattgacggtactgtattaacggtcggtcaacaatacggccaaaagattcctggtaaccacaactaaagaaatagcgaaagctcatgccccatgggggtcgtactgacgcaacgaacgcatagaatacgcccaattcttttcaattcgacccgtcttgggatctgaatcggcaagcagcggactgatggaatgccagagggccatctaggcactgctgaaagctttcacctgtatgcagtacatgattcaatcaactatcatgggccagagattgttgatct

SEQ ID NO: 163823 - DNA, 772 bp, Zea mays
  Clone ID: MRT4577_80985C.1
cattgggacctcgagccgccgggatccggccagcgggcgggagtagtccctgtcgtctgtccaccaccctctgcgagtacgtctcctcctcccgtctgtctctctctgtgtgtcggtctgccgttcccgccgcccgcagatgggcctgttcagctccccggccaaggtgtacaagccggccgccgacgtggacctcggccccggcagcgacgagctctacatcagccccaatgtcaaagctcctcgggtcgccgggctcctggtgaagatcttcgtgtggatcctggagatgcccatcgtcgggcagatcgtgctctacatcctgaagaaggacaacctcatcaacaagctggtgtccgacgccgacatcccggagccgccgctgttcacggcatcgcacagctgggaagacaccccggagcagagcgtgcggctgaccaagcccgacctgtcggcggcggagcgggtccaggaggccgtgggctgcctcccggcgcggctggaggccgcgctggccgccgacgcgcccggcatcaggcgctggaccgtccgcgacttctccgacgcgtacaggtccggcgaggtgacccccgtccaggtggcggcgaggttcctcgcggcggtgagggagagctcgggccctggcgtgagcaatatggccttcttcatcagctgcgaccccgacgacgtcatgaggcaggccgagggatccaccctcaggtaccagagaggggcgccgctgtccgcgctggacggcgtgctggtgggcgtg

SEQ ID NO: 163824 - DNA, 368 bp, Zea mays
  Clone ID: MRT4577_80986C.1
cgggcccggaatccccgggccgaccacacccgtccgaagaatcacagaacagggagggcattccccaaaaccagcaccgtttgatttttgcggccaggcgcttgaaggatggccgaactttcccgaactacaacatccaaaaggggagcacccttaacctggttttccgcctaaaagggggtttgcaaatttttgtaaagaccctgactggaaaaaccataaccctggaggtggaaagctcggccacaatcaacattgtgaaggcgaaaatccaggacagggagggcttccccccggaccagcagcgtttgattttggccggcaaacagttgaaggatggccgaaccttagcagactacaccatccaa

SEQ ID NO: 163825 - DNA, 419 bp, Zea mays
  Clone ID: MRT4577_80987C.1
cctgcaccatcctctccatggatgtcacgcggcgtctctcgcctgcccgatgccgatctagatgcgcctatcgagttgatgcttcactgcgacatccgatttcgggtgcccttgtagccccggtgtcctctgtctctagcgtagatggaactctgaccttgcttactgccgttgtagctcctgtagtccctgtgtttagcgcgaaagggttgtgggtgttagtcacagctctgattaggtgaacggaaagcttcgccggacacacatcttcggcgtggcagcaggttgctcgtgttgtgttaggtagtacctgacccattctcgtggtgggttagaagcattgcgtattcgcgtgtaatgaacaaagaatatctgttctctcttctcaaggtatgaagcattgcgtattgcgtgggaca

SEQ ID NO: 163826 - DNA, 370 bp, Zea mays
  Clone ID: MRT4577_80988C.1
cgaagaccaccattaatcgggttagggtgagggagaagcgctgtcaccaagagcaatgagagagggagcaagccagccgccgccgcggattctcgttgccaacccggctcgagctcccgcgtggctgcctgggggtggcctggccgcatagaagctgtgggaggggtcaatcgaagaggaaactggctgaagcatcactgattcatcgctggagtatcctcaccgccatggagacgcgcacaagcgtgggcaggaccgtccgcaccgtcaaccgaggcgagaacttccccaacatgcccgtcgtgatcttcgctaagtgttgcacgcttttccttaggagctgggactctggggggctagttgggcagtc

SEQ ID NO: 163827 - DNA, 195 bp, Zea mays
  unsure (1)..(195): unsure at all n locations
  Clone ID: MRT4577_80989C.1
acgaataaaaaaaaaaaaaaaaaaaaaaaaaaaaatatatattancaaatattgtaaaataattggggagggaagattattaaatatacaggcttaagaacttataaaatggggcgtcctttttaatatatccaaacttctttcccagtgcatacaatggtaaaaatttaatatattgtcccttaaattaaatta

SEQ ID NO: 163828 - DNA, 927 bp, Zea mays
  Clone ID: MRT4577_8098C.1
ctctatcccattctagctcctctctcgaaggccttggcacctcgtaacagggagttatacttggacttgaagaataatggctggtaataatggtgggaatatccccaaatttggtgagtggaagaccactgacggaggctccccttataccatgtacttcgacaatgccaggaaacgaaggaacaacagtggcataacagttgcccctgaggcatctccagttcgcacgaacactgtcccaggtggcaaggacggtgtcaagccactgaaccaacaggacggtgccaaccgctcacgaaaccaagccaaagctgcacaaggtagctcagtgccaacatggggccagtggaacgaaagcaacagcggggcaggcgcacaccagtatacgcttttcttcgaccagctaagggaggaaaggaagagcgctcctccaacgcctagcgtcgagcaactacaaaaacctcatcagactcgacccactcatcgtgatctctatgaccatgtacccaagggatctaaatgctgtgggttgttttgagagaatagccagcccgccccaatacaacgcaaatgtgatgtgtaaatggcatagttgaatctcacattctccaaatacttcaatatttgatcaaggccttaacaggttgtcaagatggtatacatggatcttgagactttcaacgaccttagtaaaattttgaaagtggtgataatgaatgtgtattcgcatgtgccaaagaactgtttccgtggacaatgagtagtttcatcaatctatatcagcttgctagaaatttacatttgatgtaagcttttataatgatgaatgtgtcaagtgataaatgatgttgtatatacaattcccttgttatgtttcctctcttatcaactttgtttttgcaaacacgttaaatttttctatcattt

SEQ ID NO: 163829 - DNA, 421 bp, Zea mays
  Clone ID: MRT4577_80990C.1
tggcggacgcgtccgactcaataccactgcattcatgcaatatcatgcataaatcatcaatgcatatgtccatgggggcgcttgtacccagaaggggtgcatacaccatggcaacaccaaaatctatgcaacccactacggtgcttttcatggatctgaaccccttccatcagaaactacgcactgtcccatacaaacatgaacaacaacctctcctctaacttcatataactcaaatacaaagttaacatataccataacaatatctatatattaactagatttaaactgaactaaaaatggccattatataatttctcaatttactttcaacttaaaaatcactgaacatgatacttacatcggacacatgctaaacctgtttaatacatggctacttttttacacgaactgcagaact

SEQ ID NO: 163830 - DNA, 160 bp, Zea mays
  Clone ID: MRT4577_80991C.1
gtcctgggtcgcatttatcaaggataagttccaccacattttgttgctcttttccagcgatgggtattcttaaaggtggtacccacttttggtattaaaaattttttgaaaaaaaaggtcctgaagaataaacattttggtcttattgccttggttttat

SEQ ID NO: 163831 - DNA, 322 bp, Zea mays
  Clone ID: MRT4577_80992C.1
cccacgcgtccgcccacgcgtccgctgtcgcgtgggcggacgcgcggtatcattggggggattgctattgaggtgatatctatatcatggtggtatgtaccgttgttcgttgtcatggatcttggctcaattactctgcaaagagcgtagagggacgtcttcactcgcttgctatgaccatgtccacaccgtgagttgccgatccagatactatgctgaacaacatgctcatgtgctacaatcatgtcgagatcatctgctaggactacgacatatactgtaatacttgtctttatggcgctgatcaagtctttgttctgca

SEQ ID NO: 163832 - DNA, 351 bp, Zea mays
  unsure (1)..(351): unsure at all n locations
  Clone ID: MRT4577_80993C.1
ccgaaaagannnagtaaataataaaacatgagtctctttttcataattctcaaataaagntgttttttttaatattactcctgactaagatgtatatattaatcatcctattttaatatatattaatcatcctattttaattaggttctaatccaattaatactaactattttcttttttatttaataaccatctgactatcatataataaagggtagaacaattctttcttctacagattctacaaaaactgaaacaaaatgcatcgaaaaaattttctttgtataaaaattatctctatatcatatctaaataaaaaggaaatcaaaaagaacggaagttgggattaca

SEQ ID NO: 163833 - DNA, 175 bp, Zea mays
  Clone ID: MRT4577_80994C.1
ctggggcttgagctgaggatgggacgatgtgcccatggagggacacatcagagcacaagagaaggtggctacctgggggtgtcccagggactctgtcagtgccttcagcccagcagcaggagcttggagtttggggagtggggatgagtccgtcaagcacaactgttctctgagt

SEQ ID NO: 163834 - DNA, 321 bp, Zea mays
  unsure (1)..(321): unsure at all n locations
  Clone ID: MRT4577_80995C.1
ctacctaagctttgatcctctaccacggccgcccgttttttgttttaaaataattttttttttttttttttttgcaaacatatatcttaaatcccaaaattaattcttcatatcacattaactactccaagaacatagtgtctccccatacctaaatccaataaaccttaaaatcctctaaactgggggatcctaacccaaaanatcaaatananctcantcttctcaaccatcaaacattacaccatttaaaccaaanattacacttctcacccttaaacancnacccttccanccacttnntccaaatcaccccttccc

SEQ ID NO: 163835 - DNA, 1016 bp, Zea mays
  unsure (1)..(1016): unsure at all n locations
  Clone ID: MRT4577_80996C.1
tcccccgcgggcggcgaggcgccccccgtccccngcgcttcgaccgccacgacgccgcntcgggcgaggcnacctacgtctcccaccgcggccgggcggcttcccccnccatccgcgnccttcgatgtggccgaccaccgcgggcgtgggctgctccggngctcgcttcggtgtgtcccggcgccaagggcngttcccacgcctgggaaattgattgcgtcccccgcgctgcggcggccgcctcggcctcggccttcgangtgtacgtcgccggggtgtacgccggcgngccccgcgngtcacgnnacgcctgcggctagccaccccggaggacgctgctgctgcgttggttcggcgccgatcgggngcattgccggctgctagggatgaaggcgacaatgatctgcacactggtagcacgcaataccctgaaggttggtactctgacgatgacgacgggcagctctcatggttcaacgctggggtcagagttggcgtaggcatcggcctgggagtctgtgttggtgtaggcataggcgtcgggctcctactgcgctcctaccaagcaacaaccagaagcttgaagaggcggttcttctgacagttgcagctggtgtagctaccaatgatgaccagagcagagttctgcctcacatacttgtatagttcatgtgtttgttgtgcaggagttttgttttgtttttaggggaaagtgtagatgctgtgttaatgtggttgtgtacatggctctcgccgtttcttgtatggcatggcatgcatgtaaactgtgaagttggtcctcggacatgtgaaggaaatggtttctagttttgagaacggagcagctgctgcatgtgttgcaactcgctattcggtcatctagtacactaatgtgaaatatttagtctattaataaattattagctgagaaaagctagctaatgaagatattagttgagtgtatttggaatctctataagattctatttgtttcgttcgaattgaattctattcta

SEQ ID NO: 163836 - DNA, 476 bp, Zea mays
  Clone ID: MRT4577_80997C.1
cttccccctcccccctctcccctctccccctatcgctactttattatgttttttttgtttttttttttttttatacaggctattgtaaatctgcaccggcgaacaagacttagttgcggaagaaccaaaatgacaaccccccccctaccaacctagcaagaacctgggggaatgctcgagactaggaggacacagatgtcccttccaggaggctattaccggaggaggaagccaattttgttgcccacataaagggaaccgcagccgggcggcagttgcacataagccttcttgttgccagggggcctgaccagggtgttgaccttctttgctaagaagaaatacatgttcttgaccgcacgctggaactttttttagtctgccttgaggtcaacattaacgaccagagggtcgggatattcaatctttttccttgcagattcgggggcgagggggcacttgagacttagggactg

SEQ ID NO: 163837 - DNA, 276 bp, Zea mays
  unsure (1)..(276): unsure at all n locations
  Clone ID: MRT4577_80998C.1
cggacgcgtgggcgctccctcgcttttatccaccggcggcggctgaagtgctgagcggcgaggcatcnagcgccactgcgacctgcntnctgctgtgctcctgcgcggctgcgcgccggcggacgaccgggccgtcggcgtggttccggctctccgcgcctgcgcggctgcgtcgcgacgagcagtgcatcggcacagtggcggtgcgccccccgcggcgaggcggctccacggaccgcgcttaccgagcgccgtcgcgccgaacgggcgcgggcg

SEQ ID NO: 163838 - DNA, 589 bp, Zea mays
  Clone ID: MRT4577_80999C.1
aaattaccttctatacgggtcttgctcaacccagttactaatatgaagctttgcagcaaaaaaggttcgacctgttggagatacaagtcaataggcggtgccatcgctgtcaaggagatctatcgatctacaaattctttgttaaagaggtcctgggggtgctctcttccagaacgttgaacataattggacattcttgccttaactcaatgggacaaggatatgacggagtggtcacttttctacgtgccacccaagcttgcccaggagacccataggggtctctcaatagttgcttgtatatgcctcatggaatactgctaacctcatatatacgggtgctcatgctggtcagaatggttaccactcaccgctctgatatgaacattaaagcatacaacatacccaagacttgacaatatacccacaatgcttcctcagaaatctacacgactgataaatatattactcccatggaaggctgtcaccattatggtatctagaaaggtgactacctggtgatcacagtctgctgattcaatccaaagaacacggtggtgacactccatcagtctcttctgaagcaaac

SEQ ID NO: 163839 - DNA, 817 bp, Zea mays
  Clone ID: MRT4577_8099C.1
gccggccgttccgggctcttacttgccagttctttaaaagtcctcgaacagtatatatcaaacatgtcgaagagagaatccaaggccgcttacttccaaaagctcaatgactacttgaacacttaccaatccatcttcattgtcgacgttgacaatgtcagctccaaccaaatgcaccaaatccgtgtgtctctccgtggtgaagctactgttctcatgggtaagaacaccatggtccgtcgtgctttgaagggtctcattggtgaacgccctgaattggaaaagctcttgaactttgtcagaggtaacattggtttcgtcttcaccaacggtgacctcaaggactccgtaacaagatcgtctccaaccgtgttgctgctcccgctcgtgctggtgccgtcgctcccgctgatgttatcgtccctgctggtaacactggtatggaacccggtaagacctctttcttccaagctttgggtatccccaccaagattgctcgtggtaccattgaaatcgtctctgatgtttccttggttcaagctggtgaaaaggttggtgcttccgaagctactcttttgaacatgttgaacatctctcctttcacttacggtatgggtgttgttcaagtctttgacaagggtaccatcttctctcctgaagtcttggatgttgaagaatctgctttggttgccaagttgatgtctgccatccgtgaaatcgcctccatctctttggctgtcgggtaccccactttggcctccgttcctcactccgtcatcaacgggtacaagaacttgttggctgtctctgttgcctc

SEQ ID NO: 163840 - DNA, 375 bp, Zea mays
  Clone ID: MRT4577_809C.1
ctactaatccccacccgctgcaatacggctcgccgccgccgagcaaggtggggttgcctctcaagctgccagcgaccaaagaaccacccgcaactacacgagacaaacaccgccgcggagcccaccggaaccacgaccagggcaccgcgtcataacaaagccgcaccgacactctccgaaaccgcggcgccatgcgcggaagcacgcacagggtgacccgccacgagcgcaccaaagagacacccaagccctggaagatcagagccaccgacgaccatgaaaacgacgaccatcgaccgacccccggctgccaggtcacgaacaacaactcacaccaagccggcggccacaccgacgaactcggtgccgggaaga

SEQ ID NO: 163841 - DNA, 436 bp, Zea mays
  unsure (1)..(436): unsure at all n locations
  Clone ID: MRT4577_80C.1
ccgggnngctgncgctccgcgcgcgctcttctcntggtcntgcngtgcctgggcgccntctgcggcgccggcgtcgtcttgggcttcctggtgggcctcctcctgggcgccggcggcggcgccttcgccgtctnccccgggttctcctatgggcgcgggctcggggcggggggggggggctttttttttttcttcctcnccgncttctccgcctccggcgccgtgcgcggtgcccgcgtctccctcgtgccctttctcgcgccgctcccctttggcttcgccgtctttctcgtgctcctggcgaccgtccccttctccggctccggctttttccccgcgtgctgcctctgcgcctccttcttctcttctggtgccgcgcgtggtgcgtcccctgggttctctggtgtggcctcttgctcggtgctgctcttgccgc

SEQ ID NO: 163842 - DNA, 378 bp, Zea mays
  unsure (1)..(378): unsure at all n locations
  Clone ID: MRT4577_81000C.1
gccgggggggttttttttttttaaaatttttgggtgtgtaatttgggtaggaaacactccataaaatgtcggcgcaagaactaagggtcaacaggtacgggaacagaaaccagtactgggtcgcatgtcgcagcgagactgagtcaggncctgggggggggggggggggggataatattcctacttctcaaccatcaacttctccgtgggaaaaccggggctcgtcagggtttgcattttttttaacaaggacgggaggaggggataaagggtcaagcaacaggcggggtggacagacacggggtggcgcggggggagggtcggaggggagaggcggcgttgggctcggcggaagcaatgcgcgaatgaaagggggaa

SEQ ID NO: 163843 - DNA, 3531 bp, Zea mays
  Clone ID: MRT4577_81001C.1
atccgaacctagccaaccagccccagcgcccaacgcacgaactgtaagaaaccctagcggagcaactgacacactcgcctacatcctcggccgccagctcgccaccatcgcctcccggtcggccgcgccacctcccggaagattggataacaatatcatgccattaggtggataacatttgacgtgctcctggtttgttcatttccgggcatcatcaaaatgtcaggaccgctgaattcaaacattagtggggccccctcgaaccttagagattccacaggaaggccatttacatcaccgttttctggtcaatctggatcacttccaggttttcatcactcaggcattccgtctgcaggggttcaacaacccagtggtggcatttccagtggccgtttccctccaaataatcttcaagcttccttgtctcagattcctcatgggcattctgggattagcaacagaggagcttctccagtcttaggaaatttaggcccaagaatagcaagttctgggaatattttgggtgggagcaatattgggagaagtataagctctggaggactgtctatgcctggtattgcatctcgcatgaatttaagtggcaactctggtagtggggctatcaacattcaaggatccaaccgtactggtatgcttcaacaagcatccccacaatttatgactttgcttgggagttcttagcccagcgcccccgccgccccatctcgctcctcttctgacccaaccaccccctgtgcgagcctctcagattgggtgtgttccaagcgtctccgacctgacacttgcccacatcttcggtcgccagctcgcagctatcgcgtcccggtcgtccatgccacctcccgatagattggttaaccatttgatgtcattactggcatagctcttcacctgcgctagggttctgcctttccggccagcatcaaaatgcttggaccgctgaatccaaaaagtagtcaggcccactcaaaccgtacggttccctccacatgaacaacgtcagcgtcggtttctgttcgatctagatatcttccgggttatcttctgtctactcttgttcaattctatcacgcggaaaaggtggtgtggcggttgggtgctttggaacatcgcagtatctcaatgacaatggttccttatgctgcatttcctaaaacccggtggtggattttccagtggccgtttccctccaaataatcttcaagcttccttgtctcagattcctcatgggcattctgggattagcaacagaggaggtatgaatgttggcggaaatcctggatttggtagtagcatgaatgctattggtggttcaatacaacgtttatcctcaatctcgggtagttctgacccaacacctggagggtcactatctcagaatcaagtacagtcaggaagtggttctttgggatcttctggaatgctatatgaaggaagctcgggtgacaatgctccatttgatattaatgactttcctcagttaactggacgacctaattctgctggaggtggtcaaggacaatatggatcatagtggaggcatggacattgcgtcaatgccattgtacaacaaaaccaggaattcagcattcagaatgaagattttcttgctttggttggcaatacaattgcctgatgaagttattcaatagaattaaatagccatttacattcttatgctacaaagattgagattcaaacatgaaaaaatctcagtccacagaattctgctagtaggttgggacaccgatcctcgttttttgttttgacaatattttatccggttgttttgttattcactatctatcttatgttattgcacagcaggactagttccttagtgtatctctaattacatagaacaatgtcgttgttctcacgactttgccttagcttgggaagcagttatccaccccgtcaacatcagtagagtgctaattcagttcaaaatgctgggctggaaactattggactaagaccggcaaattctccaagtctgtcaactaattcaggggtttatgagcaattcatgcagaagtaccattagccacagactcaaaattcacttaggttgcaggcatcttcagatcctcaacagtacaaggatcagagccaaaaatccgttcaaggaacacaggctgtgctggatccatatagcttacttggattgttgagtttaataggaatgaaagagcctggaccaacaactcttgctttagggattgatttgacctcattggggttgaatttgaactcccaagataatctttacaagacatttggctctccgtggtcaagtgagccagctgtaggagaacctgattatcagatcccagcttgtttctctacaaagccaccaccagcactgcaaaagtttcaccctttgacactattctacatcttttacagcatgcctaaagatgccactcagttatatgctgctaatgaactatacaataaagggtggttttaccacaaagactaccgtgtctggctaacaagagcgcctaattccgcacctcttgtgaaaactccacttcactcaaaacatctagcactaatgtgaaggccattttttgagcctgctggactggaccccgttgtgttcttccgatgatcaatcagtcaatcacaaattcaaaccatacaaatcaactcaatatccagcgtgcttttggaagtctgttcaaggggtggagtgaggagaagatatattttgctcccacatacaagtactcttgcaattcagattcttatgctggagagactgccacatcaaagaaaaagaggagaaccccagcctggtgtgaaagaatactatggcatggagatggtattgcacagttgtcctacttccgggggggatctcaattctctgaccatcgtcgtgtttgtcggacatttactgttgaggttaaaaggctagatggccgatcaatgcggcgcccatcaaacaccaacattagaatcgatgctgaagagttgttaccgacaagagacaagcataactaaggtgatctagatggatgaaattgtcgacaaggccattagcatcatgcaggttacctcaaagcatctcatgtatatccgcaaggagaagctgcacccagggaaggcattgagtgcaatagaggtgaaggaactgcgcgaagcccttgaagcgattgctgaaggtttggaccaagattcactcttgtgccagagtttggcgtagtactcgattacaaactgtgtactatgttaatgtaatgacatagtttgtatgatacagatcgtagtgatgttgtttgaagctgtttgtatgaactgtttcctactatcttgtatgaattatgatgtctgatgtagtttgtatgaactatgtcatattatgttgaatgaagctattgcatgcccttattctaaaaaaaaaaaaaaaaaaaaaaaaaaaaaaaaaaaaaaacttaagggcttggatgccactggtctgtcttatggtgaccttgtcaagagggtgcttctgtgctt

SEQ ID NO: 163844 - DNA, 644 bp, Zea mays
  unsure (1)..(644): unsure at all n locations
  Clone ID: MRT4577_81002C.1
gtttcattatattttcatgctgactcataacggtcaaaacatttattatcatcacggtgactgcnnnnnnnnnnnnnnnnnnnnnnnnnnnntcacaacattggtacaacaatggccctactaaataatgccaacaaattatgaagaaaatctaaatctcagctacatttctacaactgccacctnnnnntcataagttcttatagaatcattttgtatgaactcagcccatccatgacaacagctactgatcaaaccaaattaacttcaaatgcaggagaaccttatagttctcgcctaatattttggccagcagaaggaaggacaggtctcttctccactgcttcgtaatggagaacaaagttgtccttatgaacagtatcccagatgcttggatcaaaacaaatggagcattgtcacctgagcttccttcatatagcattccagaagatcctaaagaaccacttcctgactgtacttgattctgagatagggaccctccaggggttgggtaagaacttccaagcaagttcataaattgnggggatgcttgttgaagcataccaatacggttggatccttgaatgntgatagccccactaccagagttgccacttaaattcatgcgagagcaataccagcat

SEQ ID NO: 163845 - DNA, 2689 bp, Zea mays
  Clone ID: MRT4577_81003C.1
gctccgcgcagcaccagccgccatccccgcccgccatctgcgcgcgtctggcgtctccctcgcccccgctctcctctctgctgtccacgccctctgctcgcgtgtcttccagccacccacgagcagagccttcgcccccggatcccacgcccgcgagcagagctgctgtccatgccgtcggatccgctcctccctcggaaggagaatctccaaatcttgccaccatccccgcctaccatctgcgcgcgttggccgtctaccggctacgcgcatgtgactgtcgttggatcccaggtctcgcccaattccaagcgcccccgcttcgagcgtcgcccccaacaagacgtccggatctacgctagccctagctcgcgaggtcgacgccgatggatccaaggacaccagcgtcgcccctctccgagctcccccaatggccgccgcggggatgttctgctggtccacaccaagtgcgccgtccacaccaagctcctcgccaacgacttcctcctcttttccatggccgcgagctccgctagacaccgctgtcttcgaccctgctgcgccaacaagtgttcgaagaagatggaaatcgagcgccagatggccacggccaagctattcgcggaggaacagctcgccgaggatgtcgccctcaagagaggcatcttcgtgggggctggttgttttgctgagaaaaaaataccgatcatggagatacatggagccaaatgttatctgatataccagcttccatcgcttgggtttttcttgttggctacctgtaatgaatcagtggttagcaccttctgttggtttatccaaggtttttagttaagtgcagaaactacacttattttttcgctcaaacaagcatttataagctaccagctcctggcttccgcttcaaccatgcacatatctctgtccgcagaatttgactactcggttggcccaacaattgccggaggaaggatatcaatattatcaaaaaggcatttataagctaccagctcctggcttcagcttcaaccatgcacatatctctgtccgcagaatttgactactcggttgggccaacaattgttagtgcactctcaagaatagttgcttattctaaatttcggcacacatgattctgtagatggctagaccatttggctttagcttgggaagcagttatccaccccgtcaacatcagtagagtgctaattcagttcaaaatgctgggctggaaactattggactaagaccggcaaattctccaagtctgtcaactaattcaggggtttatgagcaattcatgcagaagtaccattagccacagactcaaaattcacttaggttgcaggcatcttcagatcctcaacagtacaaggaccagagccaaaaatccgttcaaggaacacaggctgtgctggatccatatagcttacttggattgttgagtttaataggaatgaaagagcctggaccaacaactcttgctttagggattgatttgacctcattggggttgaatttgaactcccaagataatctttacaagacatttggctctccgtggtcaagtgagccagctgtaggagaacctgattatcagatcccagcttgtttctctacaaagccaccaccagcactgcaaaagtttcaccctttgacactattctacatcttttacagcatgcctaaagatgccactcagttatatgctgctaatgaactatacaataaagggtggttttaccacaaagactaccgtgtctggctaacaagagcgcctaattccgcacctcttgtgaaaactccacttcactcaaaacatctagcactaatgtgaaggccattttttgagcctgctggactggaccccgttgtgttcttccgatgatcaatcagtcaatcacaaattcaaaccatacaaatcaactcaatatccagcagctcaatatccagcgtgcttttggaagtctgttcaaggggtggagtgaggagaagatatattttgctcccacatacaagtactcttgcaattcagattcttatgctggagagactgccacatcaaagaaaaagaggagaaccccagcctggtgtgaaagaatactatggcatggagatggtattgcacagttgtcctacttccgggggggatctcaattctctgaccatcgtcgtgtttgtcggacatttactgttgaggttaaaaggctagatggccgatcaatgcggcgcccatcaaacaccaacattagaatcgatgctgaagagttgttaccgacaagagacaagcataactaaggtgatctagatggatgaaattgtcgacaaggccattagcatcatgcaggttacctcaaagcatctcatgtatatacgcaaggagaagctgcacccagggaaggcattgagtgcaatagaggtgaaggaactgcgcgaagcccttgaagcgattgctgaaggtttggaccaagattcactcttgtgccagagtttggcgtagtactcgattacaaactgtgtactatgttaatgtaatgacatagtttgtatgatacagatcgtagtgatgttgtttgaagctgtttgtatgaactgtttcctactatcttgtatgaattatgatgtctgatgtagtttgtatgaactatgtcatattatgttgaatgaagctattgcatgcccttattct

SEQ ID NO: 163846 - DNA, 405 bp, Zea mays
  unsure (1)..(405): unsure at all n locations
  Clone ID: MRT4577_81004C.1
tccacacctgtccttcctccccccagttgctagttctccagaggtttggcgctgctcatcactgntccttcttcagtccactcatgtagtcatgtccatggatgaggttttttcctcttgaattcagtgggacaaccgttatgttgtgtttcttggaaaaatgtctttcgttagtgttggtcttctaaataagcgtcacttcataccactttggatctgactacttatcacaagaatgatcaggttagtgcactctcaagaatagttgcttattctaaatttcggcacacatgattctgtagatggctagaccatttggatttagcttgggaagcagttatccaccccgtcaacatcagtagagtgctaattcagttcaaaatgctgggctggaaactattggac

SEQ ID NO: 163847 - DNA, 730 bp, Zea mays
  unsure (1)..(730): unsure at all n locations
  Clone ID: MRT4577_81005C.1
acgcctgcaggtttcggtccggaattcccgggtcgacccacgcgtccgctatccatggagatacacctatgagcgaattgatgggcgagtacggggaaacctgcgccaggcagccatcgaccggttctgtaagccagactcagaccgctttgtctttcttctgtgcaccagagcgggaggcctgggaatcaatctcacagctgctgatacctgcatcatatttgattctgactggaacccacaaaatgacttgcaggctcaggcccgatgtcatcgtataggccagagcaaagccgtgaaggtatatcgcctaatcactcgaaactcctatgagcgggaaatgtttgacaaggccagcctgaagctgggcctggacaaggctattcttcaggacatcaaccgaaagggcagcaccaatggagtacagcagctctcaaaaatggaagtggaggatttgctccggaaaggtgcttatggggctttaatggacgaggaagacgaaggctccaagttctgtgaggaagatatagaccagatcctgcagagaagaacccacaccatcaccatccagtcagaaggcaaggggtccacttttgccaaggctagtttcgtggcttcaggaaacagaacagatatttccttggatgaccctaattnttggcagaaatgggctaaaatagctgaattagacactgaagcanataatgaaaaggaaagcttagtgattgac

SEQ ID NO: 163848 - DNA, 224 bp, Zea mays
  Clone ID: MRT4577_81006C.1
attcggctcgagcatgagcgtgctggacgaggtttttcgcatctcccgcgcgcagaccctaatagggctctgtggtacagacccgggctactgggtcaccgtagcgctcatagacgctgtcggtcgactggccatgcagttgctgggcttcttcatgatgaccgccctgatgctcggactgggcatcccctacaaccactggaccacgccgggcacccacatcg

SEQ ID NO: 163849 - DNA, 551 bp, Zea mays
  Clone ID: MRT4577_81007C.1
ttctttgttttctggagctgcgcctatgtaacattccagtgggtccttcatgcttgtggaagcttatcctggtggccatacccgtttctggacctttcatcatctggagctcctctatggtacctcggcatggcaatcgctcatatcccctgcttctttttgtattggttggtcgtcaaggcgaagcacacttatttcccacggatgtttccacatgcttatgttaggacagtatagatctaaatatcagtagcatactatttcaacacctgcttggctcaagtgtacacccgtatagtctcattgaattcgccgcacctttgagatgggtctgagctctgaaaacaagccggtaccggcggcttgatcaatgaaatgcagaggttcacaatcacctggaaacagagtcttgtcctgtcttgctccttctcttgtaaagcatgtaatcagccacaactactgcatctgttcgaaccctaaacccttaaaatactgcagctgttcgactgctgctgtagttacaatctatacaaataaaataccgtacacag

SEQ ID NO: 163850 - DNA, 935 bp, Zea mays
  unsure (1)..(935): unsure at all n locations
  Clone ID: MRT4577_81008C.1
gcccgccatctgcgcgcgtctggcgtctccctcgcccccgctctcctctctgctgtccacgccctctgctcgcgtgtcttccagccacccgcgagcagagccttcgcccccggatcccacgcccgcgagcagagctgctgtccatgccgtcggatccgctcctccctcggaaggagaatctccaaatcttgccaccatccccgcctaccatctgcgcgcgttggccgtctaccggctacgcgcatgtgactgtcgttggatcccaggtctcgcccaattccaagcgcccccgcttcgagcgtcgcccccaacaagacgtccggatctacgctagccctagctcgcgaggtcgacgccgatggatccaaggacaccagcgtcgcccctctccgagctcccccaatggccgccgcggggatgttctgctggtccacaccaagtgcgccgtccacaccaagctcctcgccaacgacttcctcctcttttccatggccgcgagctccgctagacaccgctgtcttcgaccctgctgcgccaacaagtgttcgaagaagatggaaatcgagcgccagatggccacggccaagctattcgcggaggaacagctcgccgaggatgtcgccctcaagagaggcatcttcgtgggggctggttgttttgctgagaaaaaaataccgatcatggaggccggaggaaggatatcaatattatcaaaaaggcatttataagctaccagctcctggcttcagcttcaaccatgcacatatctctgtccgcagaatttgactactcggttgggccaacaattgtaagttaccagctccttctatttttcttgaganactctgatcttggttgaaatgtcaatgtcattccaaaagagagtaatcactaacaagaagtttactgattcctttattagacatttcctttcg

SEQ ID NO: 163851 - DNA, 599 bp, Zea mays
  Clone ID: MRT4577_81009C.1
ccccgggtttggggattcggtttttgggaccaccccaagtgcgccgtccacaccaagctcctggccaacgacttcctcctcttttccatggccgcgagctccgctagacaccgctgtcttcgaccctgctgcgccaacaagtgttcgaagaagagggaaatcgagcgccagatggccacggccaagcgattcgcggaggaacagctcgccgaggatgtcgccctcaagagaggcatcttcgtgggggctggttgttttgctgagaaaaaaataccgatcatggaggtgtgtccacacatttcttggccttggaatctttctgagcctgctgacttgctctaggcatattgctactgaaattgcaaatggtcactgcctctattgtgtatcctttagttgatagatacatgttagacgttgcttaatatacctcgcgagattgattgagtttgcttgctgactacctatggttaattactagatacatggagccaaatgttatctgatataccagcttccatcgcttgggtttttcttggtggctacccggaatgaatcagtgggtagcaccttctgttgggttatcccagggttttagt

SEQ ID NO: 163852 - DNA, 386 bp, Zea mays
  Clone ID: MRT4577_8100C.1
cctttttatatttttttttctttccttctttttgggggggatacttacaaactggggggggatcaacactttctgcaacaagcacaaaacaaaaccttcctttgagaggctgaatcactctcacatgggcaacacactgcccaagtgtggatctttactattggcaccccaaaaatcttgccaaaaagaacctggccccaggccaacatcttctccctgactcggatctgacaggccgtccttttttttaacaggacagctggaccgcgcagaccccacgacaccttgtccctaatgggccaccaatatacaaccagcaggggaataaacagctccagaatgaacaaaataaatgaaattacaaaaacaccccgaaaacacaaaac

SEQ ID NO: 163853 - DNA, 610 bp, Zea mays
  Clone ID: MRT4577_81010C.1
agtgaacatttgaggagctccaataatctgatgtgggaacatgagctggcatgtttgaggataagaagataggtgatgagttcttttcctttattgttgactataaagatctgaaggcatgtactattctattgaggggagcaagttgaaaattggtgcccactaatagtctggtgatctagccgaatgaaattgtcgacaaggccattagcatcatgcaggttacctccaagcatctcatgtatatctgcaaggagaatctgcacccacgaaaggcattgagtgcaatagaggtgaaggaactgcgcgaagccccttaagttatttaagttattgctgaaggtttggacctagattcactcttgtgctagagtttggtgtagtcctcgattataaactgtgtacaatgttaatgtagtgacatagtttgtatgatgcagttcatagtgatgttagaaggtatttgtatcacctgtgtcctggacatagtttgtatgatgcaattcatagtgatgttgtttgaagctgtttgtatgaattatgatgtctgatgcagtttgtatgaactatgtcatattatgttgaatgaagctattgaattcccttattc

SEQ ID NO: 163854 - DNA, 330 bp, Zea mays
  Clone ID: MRT4577_81011C.1
gatccactgtcgttcgtcggtgtttacgcgaggggcagataaaaagcttgccagtaggatagtcttgtatgctgatgctgtcgttatgacgctaacaactacgctagcgaaataacccacgcgagcagtgcgtggacacatactgcatgatttctattatactataacggaacatacggccacacaccacacaggcggggttcaaaatcgaactagttgctgagtacaattacgagcctttatcatactgattgactgcccgtatatgatttatcttaaccctaacgtaaacaccggaggacacgtagggtccacccggtatttacgaac

SEQ ID NO: 163855 - DNA, 2470 bp, Zea mays
  Clone ID: MRT4577_81012C.1
cattgggtacctcgggcccggccgggatatccgaacctagccaaccagccccagcgcccaacgcacgaactgtaagaaaccctagcggagcaactgacacactcgcctacatcctcggccgccagctcgccaccatcgcctcccggtcggccgcgccacctcccggaagattggataacaatatcatgccattaggtggataacatttgacgtgctcctggtttgttcatttccgggcatcatcaaaatgtcaggaccgctgaattcaaacattagtggggccccctcgaaccttagagattccacaggaaggccatttacatcatcgttttctggtcaatctggatcacttccaggttttcatcactcaggttcacacaacattcatggaaatcttaatcttgcaaatatctctggatcattagcaccacgaaataattcaatggcaggcattccgtctgcaggggttcaacaacccagtggtggcatttccagtggccgtttccctccaaataatcttcaagcttccttgtctcagattcctcatgggcattctgggattagcaacagaggaggtatgaatgttgggggaaatcctggatttggtagtagcatgaatgctattggtggttcaatacaaggtttatcctcaaacttggctaatgtgggtaaccgcaattctgctcctgggttggcagcttctccagtcttaggaaatttaggcccaagaatagcaagttctgggaatattttgggtgggagcaatattgggagaagtataagctctggaggactgtctatgcctggtattgcatctcgcatgaatttaagtggcaactctggtagtggggctatcaacattcaaggatccaaccgtattggtatgcttcaacaagcatccccacaatttatgaacttgcttggaagttcttacccaacacctggagggtcactatctcagaatcaagtacagtcaggaagtggttctttgggatcttctggaatgctatatgaaggaagctcgggtgacaatgctccatttgatattaatgactttcctcagttaactggacgacctaattctgctggaggtggtcaaggacaatatggatcactgagaaagcatggagtaagcgtcaatgccattgtacaacaaaaccaggaattcagcattcagaatgaagattttccagctttaccaggaaataaaggtagttcctcagattatcctatggatattcatcacaaggaccaccttcaagagaatataaatattatgcaagcacaacattatcctatggctagaccatctggctttagcttgggaagcagttatccaccccgtcaacatcagcagagtgctaattcagttcaaaatgctgggctggaaactattggactaagaccggcaaattctccaagtctgtcaactaattcaggggtttatgagcaattcatgcagaagtaccatcaaccacagactcaaaattcacttaggttgcaggcagcttcagatcctcaacagtagaaggaccagagccaaaaatccgttcagggaacacaggctgtgccggatccatatagcttacttggactgttgagtttaataagaatgaaagagcctggaccaacaactcttgctttagggattgatttgacctcgttggggttgaatttgaactcccaagataatctttacaagacatttggctctccgtggtcaagcgagccagctgtaggagaacctgattatcagatcccagcttgtttctctgcagagccaccaccagcactgcaaccatttcattttcagaagtttcaccctttgacactattctacatcttttacagcatgcctaaagatgccgctcagttatatgctgctaatgaactatacaataaagggtggttttaccacaaagactaccgtgtttggctaacaagagctcctaattccgcacctcttgtgaaaactccacttcatgaacgagggtcctacatttgttttgatccaagcatctgggatactgttcataaggacaactttgttctccattacgaagcagtggagaagagacctgtccttccttctgctggccaaaatattaggcgagaactataaggttctcctgcatttgaagttagtttggtttgatcagtagctgttgtcatggatgggatgagttcatacaaaatgattctataagaacttatgacccccaggtggcagttgtagaaatgtagctgagatttagattttcttcataatttgttggcattatttagtagggccattgttgtaccaatgttgtgacttgatttgttgttgttgttgttgttgttgacgcagtcaccgtgatgataataaatgttttgaccgttatgagtcagcatgaaaatataatgagacttttgatttgagatgtatgcgcctgtttgatgattggggaaaaaaaaaaaaaaaaaaaac

SEQ ID NO: 163856 - DNA, 3014 bp, Zea mays
  Clone ID: MRT4577_81013C.1
ctcgaggccggccgggtgaatcagtgggaaaccgttatgttgtgtttcttggaaaatgtctttcgttagtgttggtcttctaaataagcgtcacttcataccactttggatctgactacttatcacaagaatgatcagaaaatagcaatattcttggtcctcacttagatacatgtctgaaaactttggtattttctgaagagtggtctgaatcagcagtcttacttgtcctatcaggttagtgcactctcaagaatagttgcttattctaaatttcggcacacatgattctgtagatggctagaccatttggctttagcttgggaagcagttatccaccccgtcaacatcagtagagtgctaattcagttcaaaatgctgggctggaaactattggactaagaccggcaaattctccaagtctgtcaactaattcaggggtttatgagcaattcatgcagaagtaccattagccacagactcaaaattcacttaggttgcaggcatcttcagatcctcaacagtacaaggaccagagccaaaaatccgttcaaggaacacaggctgtgctggatccatatagcttacttggattgttgagtttaataggaatgaaagagcctggaccaacaactcttgctttagggattgatttgacctcattggggttgaatttgaactcccaagataatctttataagacatttggctctccgtggtcaagtgagccagctgtaggagaacctgattatcagatcccagcttgtttctctacaaagccaccaccagcactgcaaaagtttcaccctttgacactattctacatcttttacaggtactttagagttcattaaactgatcttttgatgtaaataggttgtgcatcatctaactgtgttctttgtgcagcatgcctaaagatgccactcagttatatgctgctaatgaactgtaagcatagaaactgcacaatttgtagtatcactatttgtattcttgatgtatagcttgcagtcttgcactaatgcactctaccacagtttttaagtaaattgctgctccatgttttcagatacaataaagggtggttttaccacaaagactaccgtgtctggctaacaagagcgcctaattccgcacctcttgtgaaaactccacttcactcaaaacatctagcactaatgtgaaggccattttttgaggtaatataatagaacctaatttgtgttgtcatttttgtgcatggctttatggaggtatcgacaacaacgcccaaaggaacccgtcgcaatttttattctaggctttagtacaattttttataattttattagtatatgcttccttgataaattatttcccaatttatctgtttgtgctaatatacatgggtgctctttttcttttgtttgtaagcatttttatggcctctcttttcatgatcttatttttccagacatacaagtacaaggattaacttttcagaacattctgcaggcactttcacatggatgtttaattaatttactactttaagaagcaatcccagatccacatccaattgtgcctccctgtattctgtatgatctatggagattatgttgtatcttcatggatccacaacagctcaacatgtagctaaaaatcagctgcatcagaaatattaagcaaatcagacatgcgggcctatcaacttatttctggtataaaaaactgagatccttaaaaaagaataaaatattttacttttgttgcagcctgctggactggaccccgttgtgttcttccgatgatcaatcagtcaatcacaaattcaaaccatacaaatcaagtatgtttttattttatattacggtgaaatgatactagaatttcaatgacatgttacacaatttttcttagctcaatatccagcagctcaatatccagcgtgcttttggaagtctgttcaaggggtggagtgaggagaagatatattttgctcccacatacaagtactcttgcaattcagattcttatgctggagagactgccacatcaaagaaaaagaggagaaccccagcctggtatgtactacaatgtttgagatagtttcagagagttcagatctcattctcatatgttaacactcgtcagtggctatgaagtatcctagagtccacaaacctctttgcaacccgaaaaccttgtgtttcccctttctgtaccacaagaaccatcttttgagatgagttaaatcagatttggacaacaaggtaagttgtaagcgtggggaaacacaaaagaggaatcattctcatgtgcaataaataaacaaatcaagataattcacatattcagaattcaggaatcacacttcccaaaccatgaatacataatactattaatgaccggtttgttgcaaatgttcaggtgtgaaagaatactatggcatggagatggtattgcacagttgtcctacttccgggggggatctcaattctctgaccatcgtcgtgtttgtcggacatttactgttgaggttaaaaggctagatggccgatcaatgcggcgcccatcaaacaccaacattagaatcgatgctgaagagttgttaccgacaagagacaagcataactaaggtgatctagatggatgaaattgtcgacaaggccattagcatcatgcaggttacctcaaagcatctcatgtatatccgcaaggagaagctgcacccagggaaggcattgagtgcaatagaggtgaaggaactgcgcgaagcccttgaagcgattgctgaaggtttggaccaagattcactcttgtgccagagtttggcgtagtactcgattacaaactgtgtactatgttaatgtaatgacatagtttgtatgatacagatcgtagtgatgttgtttgaagctgtttgtatgaactgtttcctactatcttgtatgaattatgatgtctgatgtagtttgtatgaactatgtcatattatgttgaatgaagctattgcatgcccttattctatg

SEQ ID NO: 163857 - DNA, 775 bp, Zea mays
  Clone ID: MRT4577_81014C.1
aaccgcaggcccgatccctttccgcgtatcgtttgcgtgcgagcgaacctggcagagtggcagtctggcactggtctggtaggtggtagccaccgcgcccgcgcgccgctcgcgtgcacgtgaaccgcaccggcgccaccacccgccgccgcccgcccgtccgatggcacatccagcccccaccgcccagaaaaaacctaaccgcccaccacccatacccagcccccgccttatcctcctccaccgccgccgcccccgccccccaactactcgtcctcacctccacccttatcgccgcccgcccccagatctagatctgagcctcccgtgaccgaggccgcgggtagacaggcatacgatggccgatgagcctccaccgccgccgctagcgaggaagagcgcgccggcgcagccctggtcgcacgtcgagaccacgcacctcatcgacgcgtacgaggagcgctggacggcgctgcgccgcggccagctcaaggctcaccagtgggaggaggtggcggccgaggttgccgcccgctgcgccgccacccctggggtcgtcgcccagcgcaagacgggcacccagtgccgccacaagctcgagaagctccgcaagcgctaccgcaccgagggcgcccgccccgtcacctcgctctggccctacttccgccgcatggatcgcctcgaacgggggccactcgccgtcgcgtcttccgcctacccggccgcgactggttctccgcctgccgccgacggcgacgaataaggagagaggaag

SEQ ID NO: 163858 - DNA, 411 bp, Zea mays
  Clone ID: MRT4577_81015C.1
agcgcccctgctcctctcccccatccgtacccaatctaatcgacacccggccgagatgggccgcaagttcttcgttggtggcaactggaaatgcaatggaaccgtagatcaaggtgagaagattgtcaaaaccctgaatgaaggaaatggtccctcttcagatgttgttgaggctgatgtcagtcctccttatgtgttactaccggaggtctagagccagctgtgccgagagttaccagttgctgctgaaaactgctgagtcaagaatggtatttcatgacctgccattagtaacgacaaggggttggaccctcttgatgatgcttgtgatatgggcagacagttagtcatcatcaccgggtgagggactcccaaatcagtgaatcttggctacttagttcaagtcactct

SEQ ID NO: 163859 - DNA, 582 bp, Zea mays
  unsure (1)..(582): unsure at all n locations
  Clone ID: MRT4577_81016C.1
cactatcacntatttgacatgcgaaactatcgagaagcttgcatacttttgacagtcatgaggcggaggtgtttcaggttgaatggaatccaaatttggctactgtattagcttcatctgccgcagacaagagagtgatgatatgggatattaataggattggcgatgagcagtcagaggaagacgcagacgacggaccaccggagctgctgttcgttcatggaggccacacagacaagatatcagagctgtcgtggaatcctagcgagaaatgggccattgccagcgtgtctgaagacaacatcctgcagatatgggagatggcagaaagcatatactgtgatgacctctccatgcaggttaactgactcgtgcctcgaagcataaagagtgggcatctataagaactctttaaattcgtgacatgcattaggctatctccagcagatcctctatcacatcctttatgttatcccctattttcaaacttctctctgcaaacagttattgacttgagtaatcttgatagtctgaatctgattgagcctttaggcataaatgtaactttgaaattgtagggtc

SEQ ID NO: 163860 - DNA, 854 bp, Zea mays
  unsure (1)..(854): unsure at all n locations
  Clone ID: MRT4577_81017C.1
cccaaaatcggcgattgactcactcgaggccggccgggatacaattctcccacccaaattcgtctctacactcaacacgcctcaatacgtctttgtgactacatcaacaccacaaatccctttcttctaaattcatccctcagagcacaatcaaaatgcctaaggctgctgctcccgccaagcgtgcgaccagaactaagcgggccaagaaggaccccaacgctcccaagcgcggcctgtctgcctatatgttctttgccaacgaacagcgtgagaacgtccgtgaggagaaccctggtatctctttcggtcaagtcggcaagctcctcggtgagcgatggaaggccctcaacgagaagcaacgtgctccctacgaggctaaggctgccgctgataagaagcggtatgaggacgagaagcaggcctacaatgccgatcaggaagaagaggagtcttcttagaatggagcctccgatgtcaaacccaagcgtcgctcgcagaagaagtctgaatcggattagtcccagcaccagcgccgtgttgtagattctggccaggaagtccttcctctttgcattttggtctgggcggtgttgtatgatggcacaggaagagtgccttgttttttactaggaattttctcgggttaaggccgtccccgatgttatgatncttgagggcgatcgattgagctactggctttctatttcagtgtccttggccatgggnaaacagatcgtggaactcgnaggatcatggggacgagggaaacgcaatgcntttgtacaattaaagggaactcccgacccanataantcgaaactacgnnaaaaaacataaacgtcatnctacca

SEQ ID NO: 163861 - DNA, 1635 bp, Zea mays
  Clone ID: MRT4577_81018C.1
gcgcgagcctcgaccgtggccgggacattgacccatccgccgcttcgtcccaaatcccttttggcgggagacgagcagcaggctgcctccacttcccgcgcaaagcagtaaatcggagtaaccatggacggcggatcctccacaccggcgagccccccaccgacggtatccgcgtcggcggagaatatggaggagtaccggaactggaagaagaacgcggcggtgctttacgacctcgtcatctcccacccgctcgagtggccatcgctcaccgtgcagtggctcccatcggagtcctcggcccgcagccaccggctcgtcgtgggtacgcacacctccgacgaggcccccaacaacctcatggtcttggacgcggtgctaccgctcccacctcgcctcgctgcagccgtcgctgcctcgggcggcgccgtcccgttcccatccgtatccgtctcgcgcgtggcgccacaccgtggcgaggtcaaccgcgcgcgctgcatgccgcagcgtccctatacggtggccaccaaaacgtgcgtcgacgaggtgcacgtgtaccatctcggcgatgacgacggcagcgggaagagcggcgccgaagttgtgctcaaggggcatgaggcggagggttatggcttgtcatggagcccgatgaaggaggggtggctgctgagcggctcgtatgataagaagatttgcttgtgggacatctcctctgggagtggcgctcctgttctggatgcacaacaggtgtttgtggctcatgaggatctcgttgaagatgttgcttggcacctgaaggatgaacatatatttggatctgttggggatgactgtaagttgatgatgtgggacttgcgtacaaacaaaccagaacaatctattcttgcacatcgaaaggaggtcaactctttgtcattcaatccattcaatgaatggatattggctacagcatctggagacacaactatcaacctatttgacatgcgaaaactatcgagaagcttgcatacttttgacagtcatgaggcggaggtgtttcaggttgaatggaatccaaatttggccactgtattagcttcatctgccgcagacaagagagtgatgatatgggatattaataggattggcgatgagcagtcagaggaagacgcagacgacggaccaccggagctgctgttcgttcatggaggccacacagacaagatatcagagctgtcgtggaatcctagcgagaaatgggccattgccagcgtgtctgaagacaacatcctgcagatatgggagatggcagaaagcatatactgtgatgacctctccatgcaggttaactgactcgtgcctcgaagcataaaggtgagttacctgaccaatgatgcaagcgtatctggaggggttatatacctgtatgatttgagagatttcaatttcgctatttttgttcactgcagagtgggcatctataagaactctttaaattcgtgacatgcattaggctatctccagcagatcccctatcacatcctttatgttatcccctattttcaaacttctctctgcaaagagtcagttattgacttgagtaatcttgatagtctgaatctaaataagcctttaggcataaatgtaactttg

SEQ ID NO: 163862 - DNA, 634 bp, Zea mays
  Clone ID: MRT4577_81019C.1
aattcggcacgaggctcgccccgactccgcgctagcttctctgagcatcgcagcgccgaacacaaaagctcaccaccaccaccaaaaacctcgcctgcacgtcacagataccgagggcgcttccgaatttctccctctccctcactttgcacaccgccagccctaccggaggccaggaggcaagcaaaagcggcgacatcttcacagatgccgcagggcgcggcggctgcggcctgagagtgagagcgcgctgtcgaggtccgactccgggtcaggcgggggagcgcattgcgatggcggagtcggcggcgacggacggcaaggcggataaggtggcgaacggaggagggggaggcggcgatgcggcgggggaggggaagaagaggggggaccaggccgtggcgttccacgagcttttctcgttcgccgacaagtgggacctgatgctcatggccgcgggcagcctgggcgcgctggctcacggcgccgccatgccgttcttcttcctgctcttcggcgacctcatcaacggtttcggcaagaaccagaccgacctccgcaccatgaccgacgaggtcgccaagtatgcgctctacttcgtctacctggggctggtggtctgcgtctcttcata

SEQ ID NO: 163863 - DNA, 803 bp, Zea mays
  Clone ID: MRT4577_8101C.1
ccggccgggccggggtaaactccgtatctctcgtgcctttttcctttcctggttgcgacgagccgacgactgggcggacgccgctgccgccctacgccaggtcttcgtcggccccttcgacgagcacacacaagattcagtcgggaatgttgaatgcatagtgtaatttctgcgcaaaaagatggcatcagacgagttcatcagccttgacgcaccttgtgaggctgatgcgaaagatgaagggggagacgttcaggttaaagctcctgatgtgagtgggatggagcctctggtatcggatctccaaccagaagggaaagctggtgctgtgggtagtaatcccaagacatctgctgggaacctggatcttgaagaggggcaagtggaagatatggacctcgcggatgatgacgtagtggttggaaaggatcagctattagatgcttccattcagcccgagatcagtgttgcagctgtgcagactgtgattggttttgaggtcaagctggacaagggggacgggactgaaaatgaaataatttatgagtcaaacagcatctctattgaagaaagtccctcaagaggagttaaaagagcccgtgtggaatcaaaggaaccttctgttcgtgtcatctacagtgacttgacaagggaaagcaaacgaaagcttatgcaattgatgcaacaatggtctgagtggcaggctagaaggatgcaccatttggaggaagctgtggaagtgaccttagaaagtggtgaagagacttattatcctgcattacatgttggttctgagaaatcct

SEQ ID NO: 163864 - DNA, 450 bp, Zea mays
  Clone ID: MRT4577_81020C.1
agggaggaattgtacattgatttaccatgtgcaatacagtttccggtctcaataagatcaatactagtttgttgttacaggcagcaggctggccatgcatgaatcatgaccgatgcaacgcttcaggttcctttacaacatgcatgcatctagctttccacagcaaacaactttctagtggaacttgaggctggtgagcacgttgttgttgacggggtcggcgaggtggtcgagcaggttctggaacgggccgacgccggtgacgagcccctggatgaagtaaccgaggatggcgagcatggcgagcctgccgttcttgatctccttgagcttgagctcattcatctccttcttggtcttgccgaaaccgaacgggttgaagaggggcccgcccgggtaggacgggtcgccggagccggcgaggaacttctcgaggccgaggaagtactg

SEQ ID NO: 163865 - DNA, 938 bp, Zea mays
  unsure (1)..(938): unsure at all n locations
  Clone ID: MRT4577_81021C.1
gcggcctcatctccccggcgcggtttagatttccctgggccccgcacccctctcgtggcacagtacatactttccgcgcctcttcttctgcgcccctctcctcccaaactgcggatagagcagcgagccatcgacacgatcgcgagcgcaagcacgtacgttgtcggaagctcaagttagaagaagcaccagtgcctacgccatgctgggcgcggtgggcgccatcgccccggagatcttcggcaagatgggcatcatccccccggagaccgcgctgccgtggttcaagacgggcgtcatcccgcccgcgggcacctacaactactgggccgactcctacacgctcttcgtcttcaacatggcgctcatgggcttcgccgagcaccgccgcctccaggactggtacaacccgggctccatgggcaagcagtacttcctcggcctcgagaagttcctcgccggctccggcgacccgtcctaccccggcgggcccctcttcaacccgctcggcttcggcaagaccgagaaggagatgaatgagctcaagctcaaggagatcaagaacggcaggctcgccatgctcgccatcctcggttacttcatccaggggctcgtcaccggcgtcggcccgttccagaacctgctcgaccacctcgccgaccccgtcaacaacaacgtgctcaccagcctcaagttccactagaacgttggtgcatcagcatacctgctgccgccgccgccagttgtttgctgtggaaagctagatgcatgcgtgttgtaaaggaacctgaagcgttgcatcggtcatgattcatgcatggccagcctgctgcctgtaacaacaaactagtattgatcttattgagaccggaaaaaaaaaaaaaaaaaaaaaaaaaaaaaaaaaaacctcccccaccaaaaaaaaaaaagggccctan

SEQ ID NO: 163866 - DNA, 814 bp, Zea mays
  Clone ID: MRT4577_81022C.1
ggcagcgacacgatcgcgagcgcacgcacgtaagcacgttgtcggaagctcaagttagaagaagcagtacttcctcggcctcgagaagttcctcgccggctccggcgacccgtcctaccccggcgggcccctcttcaacccgctcggcttcggcaagaccgagaaggagatgaatgagctcaagctcaaggagatcaagaacggcaggctcgccatgctcgccatcctcggttacttcatccaggggctcgtcaccggcgtcggcccgttccagaacctgctcgaccacctcgccgaccccgtcaacaacaacgtgctcaccagcctcaagttccactagaacgtggtgcatcagcatacctgctgctgccgccgccgccgccagttgtttgctgtggaaagctagatgcatgcgtgttgtaaaggaacctgaagcgttgcatcggtcatgattcatgcatggccagcctgctgcctgtaacaacaaactagtattgatcttattgagaccggaaactgtattgcacatggtaaatcaatgtacaattcctccctagatgcggacaaatttctcctaaggccatgaccatggtggatgcacgtgggacgtatttgtagcagaagagagtatgcactctgtgtgtatatccaacggtgatgcgcatgggagcatgtgtgcttagagacaaaaacaacattggctttcattctgttctatcaccaatatttgcggacagtgagagagagcaaggtcccttgtaaaaaatgagtatatttggtgtagctaaagcccccatgttttgggggtttgagc

SEQ ID NO: 163867 - DNA, 370 bp, Zea mays
  Clone ID: MRT4577_81023C.1
gtgttccggtctcaataagaggaatactagtttgttgttacaggcagcaggctggccatgcatgaatcatgaccgatgcaacgcttcaggttcctttacaacacgcatgcatttagctttccacagcaaacaactggcggtggcggcggcggcagcaggtatgctgatgcccctggatgaagtaaccgaggatggcgagcatggcgagcctgccgttcttgatctccttgagcttgagctcattcatctccttcttggtcttgccgaagccgagcgggttgaagaggggcccgccggggtaggacgggtcgccggagccggcaaggaacttttcgaggccgaggaagtactgcttgcccatggagcccgg

SEQ ID NO: 163868 - DNA, 312 bp, Zea mays
  unsure (1)..(312): unsure at all n locations
  Clone ID: MRT4577_81024C.1
gaaaaacggggngggacccacgcgtcacgnatgtattcaaccttttttaaaaggatttgcctccgactggcgcacggaagccacgggggcgaggggtttaacactcagctgggcagcaaaaaaaatcgagacgcaggagtcatggccaccgtcagcgccgccgtggtgaccaccatcgttgcccgcgccgcgatcgccaggcccaatgctctagggctgcctgccctgagggcaaggagcgagagggtgcggtgcatttactccaaggacgcggccccagtcagcaccaagggcgcaggctcgtcgctgttc

SEQ ID NO: 163869 - DNA, 764 bp, Zea mays
  Clone ID: MRT4577_81025C.1
tacctcgaggccggccgggactgcggaatacacaaagaggcagcgacacgatcgcttgcgcacgcacgcaagcacgttgtccggaagctcaagttataagaagcaccagtgcctgatcgatggcggaccagactctcctctccggccggcagttgatgggccgccccgtgcagtcggccgtctctaggccgcacggcgaggaaggcgcccttcgtcgtcagggccagctccagccctccatccaagtaaggtgccgacaggcagctgtggttcacgtccaagcagtccctctcctacctcgatggcacgctgcccggagactatggcttcgacccgctgcgcctctcggacccggagggcaccggaggcttcatcgagcccaagtggctgggctacggcgaggtgatcaacggacgctacgccatgctgcgacgcgttgggcgccatcgacccggagatcttctgcaagatgggcatcatcccgccggagaccgctctgccgtggttcaagacgggcgtcatcccgcccgcgggcacctacaactactgggccgactcctacgcgctccttcgtcttcaacatggagctcatgggcttcgccgagcaccgccgcctccaggactggtacaaaccggaatcgatgggcaagcagtacttccttcggctcgagaagttcctccccggctccgccgacccgacctacccgtggagacccttttcaaccgctcggattcggctagacccataaggagatgaattgagc

SEQ ID NO: 163870 - DNA, 718 bp, Zea mays
  Clone ID: MRT4577_81026C.1
cattgggtacctcgaggccggcgccggccggaaactgcggatagagcagcgagccatcgacacgatcgcgagcgcaagcacgtacgttgtcggaagctcaagttagaagaagcacctacaactactgggccgactcctacacgctcttcgtcttcaacatggcgctcatgggcttcgccgagcaccgccgcctccaggactggtacaacccgggctccatgggcaagcagtacttcctcggcctcgagaagttcctcgccggctccggcgacccgtcctaccccggcgggcccctcttcaacccgctcggcttcggcaagaccgagaaggagatgaatgagctcaagctcaaggagatcaagaacggcaggctcgccatgctcgccatcctcggttacttcatccaggggctcgtcaccggcgtcggcccgttccagaacctgctcgaccacctcgccgaccccgtcaacaacaacgtgctcaccagcctcaagttccactagaacgttggtgcatcagcatacctgctgccgccgccgccgccgccagttgtttgctgtggaaagctagatgcatgcgtgttgtaaaggaacctgaagcgttgcatcggtcatgattcatgcatggccagcctgctgcctgtaacaacaaactagtattgatcttattgagaccgaaaaaaaaaaaaaaaaaaaaaaaaaaaaaaaaaaaagcggcc

SEQ ID NO: 163871 - DNA, 462 bp, Zea mays
  Clone ID: MRT4577_81027C.1
ttcattaagagcagcagaggtagggacacgttcccgagcgcacgcacgtaagcacgtgtgtcggaaggtcaagttagaagaagcaccagtgcctgatcgatggcgggccaggctctcctctccggtcgggagctgctgggccgccccgtggagtcgggcgtctctaggtcgtcggggaggaaggagcccttcgtcgtcagggccagctccagccctccaggcaagcaaggtgccgacaggcaggtgtggttcgcgaccaagcaggccctctcctacctcgatggcacgctggccggggactatgggttcagacccggtggggctctcggacccggagggcagcgtggacttcatcgagctcaagcggctgggctacgtggagggggtcagcggtcggtacgccgtggtggttgggggggacggtatcggcccggagatcttcggggagatggacatcatccc

SEQ ID NO: 163872 - DNA, 1386 bp, Zea mays
  Clone ID: MRT4577_81028C.1
gaagaaatgtttggcatcttcttattagattcatgctagaagcttccttgagagctctaaacaatctctaagcattctgtactatgagtaaactatactggttcgtacgtagatcctcaaacccccaaaacatgggactttagctacaccaaaatatactcatttttttacaagggaccttgctctctctcactgtccgcaaatattggtgatagaacagaatgaaaggcaatgttgtttttgtctctaagcacacatgctcccatgcgcatcaccgttggatatacacacagagtgcatactctcttctgctacaaatacgtcccacgtgcatccaccatggtcatggccttaggagaaatttgtccgcatctagggaggaattgtacattgatttaccatgtgcaatacagtttccggtctcaataagatcaatactagtttgttgttacaggcagcaggctggccatgcatgaatcatgaccgatgcaacgcttcaggttcctttacaacacgcatgcatctagctttccacagcaaacaactggcggcggcggcagcaggtatgctgatgcaccaacgttctagtggaacttgaggctggtgagcacgttgttgttgacggggtcggcgaggtggtcgagcaggttctggaacgggccaacgccggtgacgagcccctggatgaagtaaccgaggatggcgagcatggcgagcctgccgttcttgatctccttgagcttgagctcattcatctccttctcggtcttgccgaagccgagcgggagggtttttttttttttttttttgttgaagacgaagagcgtgtaggagtcggcccagtagttgtaggtgcccgcgggcgggatgacgcccgtcttgaaccacggcagcgcggtctccggcgggatgatgcccatcttgccgaagatctccggggcgatggcgcccaccgcgcccagcatggcgtagcggccgttgatcacctcgccgtaggccagccacttgggctcgatgaagcccccggtgccctccgggtccgagaggcccagcgggtcgaagccatagtcgccgggcagcgtgccatcgaggtaggagagggactgcttggacgcgaaccacagctgcctgtcggcaccttgcttggctggagggctggagctggccctgacgacgaagggcgccttcctcgccgacgacctagagacggccgactgcacggggcggcccagcagctgccggccggagaggagagcctgggccgccatcgatcaggcactggtgcttcttctaacttgagcttccgacaacgtgcttacgtgcgtgcgctcgcgatcgtgtcgctgcctctgctctatccgcagatgggagcccggccggcctcga

SEQ ID NO: 163873 - DNA, 698 bp, Zea mays
  unsure (1)..(698): unsure at all n locations
  Clone ID: MRT4577_81029C.1
ccggccgggaattgagcatcgcagatataagcgtcttcgaagtcgcctacctccgcggctcagacatttccgccttctcccgattccttcctgcggccggcgctccacccgtacaaagacaccatgcatggagtgcattatcgatccacatctggcgggtcgttatacatcaccagaaacgcgtgctgcgagctggactgccttgagcatgccattcatgctgacgagcaaatgcccgctgacaagaccattgctgggaagtgagtaatgtctttcatacaccatatcgttcgaactgaccatctggctgcatggagatagcactgtcgccaccgncgcctgtcttatgtgttgaacctgtagaactccacgtgtgcatcggatgacgtgatgaactggcacctaccgacagctcttccagcctgagcaaatcttcatcgagatacgacgatgcggacaacaagtttgcccgtggtcactacaccattgacaaggagattgctgacctgtgccttgataacttctggaacgcttgccgacactgcacaggcctccagagtttcctcggattcacttctgtgtgcaggaggaacgggctctgggcttggctgcctcctcctagagcgtctgacatgagactacagcgagaaatcgaagtgtggattcactgcgtaaccttcccgccaaccgtctacttc

SEQ ID NO: 163874 - DNA, 567 bp, Zea mays
  Clone ID: MRT4577_8102C.1
cctcgaggccggccggggtcatcttttctcacctactacagagcccgccgccgtaacagtccaccaccacctcctttcccaactcctccgcgtacccccgccctctccgtcggcccgcgtaaccacccgcgcagatggcgacggcggacacggcggccgggaggggggcgacccgcttcacgctcctagcgggcggcggcctccgcagccgtatcagccgactacgcaacgccgcgcgggtccagcgccatcgggggctcaccaccactgggctcctggaaaacgccgacctccagcccaacgagcatggcaaggcagatatgctcgattaccgcgtgttcctccgccacgatttttttcttaacgcgccgccgcggcaggatgtcccactgctagctggtgacggggtgcttcactttcacagggagatacccaaagagagcagcgcccagatggagggggccacctgagaggccttgacgtccatcaagtacgacaccaatgacgtcaaccgtccatactacccgcacaacattaagtggaactatgggcgacttcctcgaacat

SEQ ID NO: 163875 - DNA, 472 bp, Zea mays
  Clone ID: MRT4577_81030C.1
aaaaaaaaaacaaaccctttccttggtttttatagggggggaacaaaaaaaaaagggtttttttaaaaggggcgagggttttaccccaacccatttccaagggcccaatttgttaaaaaacctgggggggcccccacacccaaccaacacccaaacataaaaggaaaaaaaagggggggcttccgggtttaaaacaaaaaaaatttttccaaaaaatcccccccccttttttttttaattttctgggaacccgggggcacaaaaaacgtttgggccccaatggaaaaacccctttgcccttttggggaaaaaaaaaaaaaccatttccccccttgttttcaaggaaaaaatcgtttttggggcccaggccccccttgttttcggggaggaaagggccggcccccttaaggatttgttggcccccacggaccccggttggtgaagtggtcccccggccaagaatcggaataac

SEQ ID NO: 163876 - DNA, 2058 bp, Zea mays
  Clone ID: MRT4577_81031C.1
cggggtagcggcgagacgaggccgtttaaataggtgtcaagtggaagtgcagtgatgtatgcagctgaggcatcctaacgaccggacgactggaaggatgcatcccgattactatctgccgagccgaccagcggcaccagaacccacaaggttcactcatggcgcccacgtccatgctcccgttcgcgccctccaatacgtcgctgccctattcctcccgcgccacaactgccgccgcgttcgctcctcgtgggctccaccacgccgcggccggaaggagcggcggcggccaacggctcgcgtgcgctgcgcctcgacgccgccgcggagggggtcttgtggtcagggcgtcggccgactactacgcgacgctgggcgtgccgcgcgccgccagcaacaaagacatcaaggccgcgtaccggaagctcgcgcgccagtatcatcctgatgtcaataaggagcctggagcgaccgaaaagtttaaagagataagtgcagcatatgaggtgctgtcagatgaaaagaagagggcgttgtatgaccaatatggtgaagctggagttaagagtgcagttggaggctccggtggagcttacacaaccaatccatttgatctgtttgagacattttttggagcaagcatgggtggtttttctggtatggaccagagcgcgtttaggacaagcaggcgaagcactgctattcagggtgaagacatcagatatgatgtgattctggggttcacagaggcgatatttggaacagagaaagatattatattatctcatttggaaacatgtgatacatgtggtggttctggatcaaaggctggctccaagttgagaatatgttccacatgtggtgggcgagggcaagtaatgcgaactgagcaaacaccatttggtctgttctcccaggtttctatttgccccacttgtgcaggagagggcgaagtcatctcagagtattgtaggaaatgttctggagaggggcgtatccgtgtcaggaaggagatcaaagtaaaaatccctccaggagtgagcaaaggcagtactcttcgtgtacgtggggaaggtgatgctggaccaaaaggtgggcctcctggagatctctttgtttgcctcgatatagaggagccatcagatatcaagagggatggtataaacttgtattcaactgtgtcaataagctatcttgaagctattttgggcactgttatgcaagtcagaactgttgatggaaccagtgaccttcgaatacctccaggtatccaacctggtgatgtaattgtcttagcgaagcaaggggttccatcattgaataagccgactatacgtggtgatcatctgttcactgttaaagttgcaatacccaagcgcataagtgggcgtgaaagggaattacttgaggaacttgcatctttgagtaatggtggctttgctcgaacagatgccaagccaaaacctgcccagccaaaacgtgtacatctagagaaagaagttggtgctagccaagaagatacagacaaatctaaagcagcgggtgattggttgaagaaacttacagattttgctgggtcaattgctaatggtgctgcaaagtggctgaaagaaaacctgtaggctgtaaatatttactgcaggatagaagatttcttcagttaccatggtgctgtagtccaatctccaattcttagattcattggggtccccaagagctcttacatttttgttttgttttgttggagagtttcaagattttcaggctgtgagtaacaaccgagggagtgagaattgtctactaatactgtcgccgcggcatattggtcccttgtcattcttgcaaagcaattattttttatgtagttggagttattttcagtttggcaagtgcatgcagcagtgtgaaagagtgaaagttcgccctgaaagttaggggatgctgctgctggtcccaaaccttgaggcttagacaacactgtaaatatgtctctgttcctgattctgtacttgaggttttgggttaatcaaattcaagatcaacgggcgtctttttttg

SEQ ID NO: 163877 - DNA, 1437 bp, Zea mays
  Clone ID: MRT4577_81032C.1
cattgggtacctcgaggccggccgggaggacattttttacgcgactcttcttctgcgcccctctcctcccaagctgcggatagagcatcagaggcatcgacacgatcgcgagcgcacgcacgtaagcacgttgtcggaagctcaagttagaagaagcaccagagcctgatcgatggcggcccaggctctcctctccgaccgtcagctgctgggccgccccgtgcagtcgggcgtctctagggcgtcggtgaggaaggcgcccttcgtcgacatggccagctccagccctccagccaagcaaggtgccgacaggcagctgtggatcgcgtccaagcagtccctctcctacctcgatggcacgctgcccggcgactatggcttcgacccgctgggcctctcggacccggagggcaccggcggcttcatcgagcccaagtggctggactactgcgaggtgatcaacggccgctacgccatgctgagcgcggtgggcgccatcgccccggagatcttcagcaagatgggcatcatcccgccggagaccgagctgccgtggttcaagacgggcgtcatgccgcccgcgggcacctacgactactgggccgactcctacacgctcttcgtcttcaacatggcgctcatgggcttcgccgagcaccgccgcctccaggactggtacaacccgggctccatgggcaagcagtacttcctcggcctcgagaagttcctcgccggctccggcgacccgtcctaccccggcgggcccctcttcgacccgctcggcttcggcaagaccgagaaggagatgaatgagctcaagctcaaggaattcggctcgaggaacggcaggctcgccatgctcgccatcctcggttacttcatccaggggctcgtcaccggcgtcggcccgttccagaacctgctcgaccacctcgccgaccccgtcaacaacaacgtgctcaccagcctcaagttccactagaacgttggtgcatcagcatatctgctgccgcccccgccgccgccagttgtttgctgtggaaagctagatgcatgcgtgttgtaaaggaacctgaagcgttgcatcggccatgattcatgcatggccagcctgctgcctgtaacaacaaactagtattgatcttattgagaccggaaactgtattgcacatggtaaatcaatgtacaattcctccctagatgcggacaaatttctcctaaaaaaaaagccgccgccgccagttgtttgctgtggaaagctagatgcatgcgtgttgtaaaggaacctgaagcgttgcatcggtcatgattcatgcatggccagcctgctgcctgtaacaacaaactagtattgatcttattgagaccggaaactgtattgcacatggtaaatcaatgtacaattcctccctaaaaaaaaaattatagttaaatatt

SEQ ID NO: 163878 - DNA, 337 bp, Zea mays
  Clone ID: MRT4577_81033C.1
tcccgccgtcctttgtgggctctcggccttcttgtggtgctccacaagaaggaggagggggagcaccacaagaaggacgacggtgagcataaggaaggcatcttggagagatacaacgacaagatcaccgacgagcacggaaacaagtccggcgaccacagcgaaagaagggacaagaaaaagaagaccgacaagccgaagcacggtgagggccacccccacgacggcggtcattgtacctgcagcaacgacagcaactgagatctggtgtgcgagcacagatgcaacacaggtatgcgttcatggatggaggatacataccagctgatgctgatgt

SEQ ID NO: 163879 - DNA, 432 bp, Zea mays
  Clone ID: MRT4577_81034C.1
cagtgaaaggtaagtgggttgaaaacctgacagaaggtcactgaaggcaaaccggacacaaaacgtccagtgaaaggacagttaaattacagaccaaaacaagttaagggtacagaacattacaatcgggttcaaacccaataattggccagggacctgaaacaaatctatgcgacacccaaaccatggaaagcaccgaccccctcaagcgtagagggggccttaacctacgaacgggggggaccaccactaatgacggaccggggcatgcatggcatcggacaccaccacgggccgacccgatggctcctgcccggggggccactgcataggtcccgagcgaagccagaccggtcagggaacgaaacccgacccaggcgaggcgcagccaatcacggggcggggaagccctggaagcaaagcacgggggga

SEQ ID NO: 163880 - DNA, 242 bp, Zea mays
  Clone ID: MRT4577_81035C.1
tgcggtgtagaccgagcatccagggcgtcagcttaccatgaaaacaaggagctacgctgatgctgatgcttaaccttgatgaacagagtgggcgtacacctggtcatattctgtcccaccggcctggagactctgtggatgagggcacagacgaaagataaactgatgtgaccgtctggactcgcaagttgaacaactccaccgacatgacatcctgaaccggacgaaaggagaactggctc

SEQ ID NO: 163881 - DNA, 260 bp, Zea mays
  unsure (1)..(260): unsure at all n locations
  Clone ID: MRT4577_81036C.1
acctctttctttctccccacactttgcacaagcttagaccaaaacgctcctccccccccacctggtacccccccaccgcatgcaccagtgactaaccgcatgagcggcgaaggaccatntcttcttggtatgcttgatacgctagtttgcncaacacangacctcttgaaatcacatagtctaaaacttttctacacgttctgctcctcgctttcacaccattgcaccctccccttatcngtccatcccctcccccacct

SEQ ID NO: 163882 - DNA, 214 bp, Zea mays
  Clone ID: MRT4577_81037C.1
cttttgtttaatggatggctttgtatcgctggcatgccggaggtatcaatacctttagacggggacaagatacgaactttcacaggatctgtgagatgccaaaaggatttggaatgcaactgaactatggaattgtagtgacctcaactactggtggatgttaacagcgacgaccacatcattcaccgttgagaagcccatattctaagggcag

SEQ ID NO: 163883 - DNA, 233 bp, Zea mays
  Clone ID: MRT4577_81038C.1
gggcaaaaacaaggctttcaacaatcaagccttgcaaaggggaaagccaaacaaataattaggcgcagcaccccatccgatacttaaacgaagggtttggttgcaaaaaaaattgcccgccggacaaacgaaggggaaaccctatgaccactaaagggtttgggggcccggggcccccccctaggaggaaagttcccaggggtgggagaactaaacccggcacccggggggcc

SEQ ID NO: 163884 - DNA, 449 bp, Zea mays
  Clone ID: MRT4577_81039C.1
ggccatacttagcttcatcccaatcattgttcgtgcagttgttcgtgggagcgtgtgaccatgcgcgaggatgctggccgcgttaagggatgaggtgccgtcggtacttgcagaacgtggtgtgatcaaaccctagcacacctaccagcaggcaagaaacccccgcttctattaccacgccttcatccatggcggcgctctgcttgccccttcacgcggcctccagatcccgggccctcatagtatgaccccgtcaaggttccgcgccttaggagcaatggttcagcccatttcggacggaccttcccctccgatgaagatatctatgtctctgcgagacatttggcgccgataagagcgatagctacacgacgcgcctcctagtatccacaatatctgagtggttaaaagacacacattcgctttaatggctttgggctgattgacag

SEQ ID NO: 163885 - DNA, 504 bp, Zea mays
  Clone ID: MRT4577_8103C.1
ggaagatgtttgcggggcaaggtgcagctgaagcggagggagaactattgatcaaccggcaggtgaccttctccaagcgcaggtcggggctgctcaagaaggcgaatgagatctccgtgctctgcgacgccgaggtcgcgctcatcatcttctccaccaagggcaagctctacgagtacgccaccgactcatgtatggacaaaatccttgaacgttatgagcgctactcctatgcagaaaaggtccttatttcagctgaatctgacactcagggcaactggtgccacgaatataggaaactgaaggctaaggctgagacaattcagaaatgtcaaaagcacctcatgggagaggatcttgaattcttgaatctaaagagctgcagcagctggagctgcagctggaaaattcgttgaaacactttagatccagaaagaggccaccaatggctgaggtccattaacgagctttaacgggaggaaaagtccctgcggaggagaataa

SEQ ID NO: 163886 - DNA, 238 bp, Zea mays
  Clone ID: MRT4577_81040C.1
agtacatcctcctctactctcgaaacctttctgtagactacctctactgtcaacacaccggcgacttccagggcaagattactgcgaccaccggcctatatctaaactacatttctagatctttacacctactctgatggcgactgatcaaactatcgagaactacaccatgcaaaaccataatgactataacctctacaacccctacatcgtcatctacatatataagtacttaact

SEQ ID NO: 163887 - DNA, 425 bp, Zea mays
  Clone ID: MRT4577_81041C.1
gagctcacttgtcggcggccgccctttcgtggtcttttttcactagacccaaatgacattgctgttcctcttaaccctgcaccaacctaactaccacatacaggagagtgtaccttgttgtataactcccccatccagttggcctagatgaacaagaggacaccatcatgtgcataagaggatttacagctgttgccaaactcaaacccagaccctactagggaagagatacggagggcgatttttcctaactgggcaagcagcactattagctctttgatgcaacatgggaagctttatttcctgaagcactagctgggaaggtagtgagacggaagcctacaagggcaggtgccaggggactgatctttccagcacctggaaacgctgcctaagtatacatgcgccttttgaagactacctgg

SEQ ID NO: 163888 - DNA, 277 bp, Zea mays
  Clone ID: MRT4577_81042C.1
ttcctccttaccaaaacacactttttcatttttttgatggatttttgtgtaataagacaagaagacatgcggacccctttgaatgatggagacggataaacggacccagaaaggcttgcaacttataggtgggcgttacacaacgacttgagtccagcgcacagggtctttactgggcgactattccttttcaagttccggggggggcacctctccgccgccgagattacccgggtattggtcacgccccttggtgggggccaggtcgtactccgcc

SEQ ID NO: 163889 - DNA, 243 bp, Zea mays
  Clone ID: MRT4577_81043C.1
aaagacatcaacagctttttagggaaccaaaacattcacgggccttcttggatcacattgaacaatactttgggaaaactaacatatttggaaaaaaactggcatgtcacacactcaagtatgtttaagtgatccaggagtgggagtccagggctaacgcctctttcttttgggggtcttaaggagcttttttcggtttcccgtcttgccatggcatttgctaaaacccccattaattttctt

SEQ ID NO: 163890 - DNA, 384 bp, Zea mays
  Clone ID: MRT4577_81044C.1
cccacgcgtccgccttcttcgctttccccatgccccattcctgctgctagcataatccatgcaccgtcgcttgccaaccatcgtgctgggccaattcgacgccgtcgagcctccctcgctgccagcaacagcttacccagcatctcctcgcctctgttctactcgcctgccgctgctcgctgtcgtcgccgtcattgctgctgcatcgcttgacgtcgccggtgctccccaccgaagagcctcgtcgcattcctacacgttcttctccgcgcctgctgctgccgtcgcgccatcgccacacctaacaccgtcatcatcacgagaaagatccgtccctgcgcctagcttggccgcaccgctaaaaccggcgatccgctccatgta

SEQ ID NO: 163891 - DNA, 368 bp, Zea mays
  Clone ID: MRT4577_81045C.1
cacagtataatactgagctatgccgactagaaaaccatttattagtgaagcctctggtacagactctgttggctttcaaaaagaattacaaagcatatttgacagaaaagaattcgctacgccatttctatttttcttttacatgacaaacaatttacagattagagaaagcctaaaaattgacacagctacagtctacaaggtacaaagtgaatgaattatggatgctaaattaaacgcttgtaaaactaccacttctagtgttcttttatcttggggattttgtggaaatgcatcttccacacaggataagccgcgatatagctcgtgaccttccacttccagtcctgaccctaaacgacgagagc

SEQ ID NO: 163892 - DNA, 534 bp, Zea mays
  Clone ID: MRT4577_81046C.1
tttgtttttttttttttttttttttttttttttttttttttttttttttttttttttttttttggagggcaaaaaacggattttctccattttatatgtatctactccctccatccctgtagcttggtacacggactgcacccaagaggggggcccctcatttgacatcacacattgatttggtaccggcacccaaaaccgcactgacacactcgggcgtcacaggaggggacatctaacacccttttacattaggaagtccccacaacatgtcaccagcaggaaaaccactgctcggcaaaaataaaatgcaaaaaaaacccattttcatcctatctatctgacgggctataacccaggcccggttttcccttctggggatttgcggaataacattcctgttcaggggtggtatttgttgacacttcgatgttgactaacatatatgggttcaattgccacaatcaaagagtagacaatgttaagtagagtatctattattccctccatttcaaaatataaatatagttcttt

SEQ ID NO: 163893 - DNA, 702 bp, Zea mays
  Clone ID: MRT4577_81047C.1
actcaccatcccctcttaataacagcaaactaccacacccatgaccgcctccgtctcctgccgccgccgtggccggtctggttgcaccccgcatccggccggaggacgacgacggcatctcgcgtaccgaagatctgccgcggaagaatcggatccaaaacccggatcttctctgcttccccctccatgcacagtgtgttcgcacgacgctgcctagtgcgccggcggtgcctcccgcaacaacgacaatgcctccaccgagaagaactaggttgtcctcaactcctacgaggatctcatgagccatactcttgcggaaacgatgccttacatgttagagaacggcgccacccagaggatggccttcacagccacgatatgtggtccagcgctcatgcaggtacgctcgaaactgaaatgacgggcgcactcttggatacactgcgagtgaactgagcgacgcgtgcatatgggtggaggacacgtttccgcgcaatgacacatgacgaatatgatgtacatgctcgcctatgatcggggttctcgtctcaaggtcgacgattccgcccggacaaagatctgttatgaacgataggtgtggcctctgcaagatcggccgagctgtactaactggagtacgaaagcgatggccaagaagtgcctgatggcgatgacagcaagctgcgcatttaccacggtaga

SEQ ID NO: 163894 - DNA, 221 bp, Zea mays
  unsure (1)..(221): unsure at all n locations
  Clone ID: MRT4577_81048C.1
cacgcgtcccccacctcccccacctccttaactcttgctcncataccaggacaggctttagacagagagcggcttcatccttcttactctcttcttctaagtgctgaatcccttctataacatcagtctccttattcttttaccaaacaactaatggcgccgcttttccctacctattacttggtaggtatgatggtcctctgtactgtcgtccaccctag

SEQ ID NO: 163895 - DNA, 163 bp, Zea mays
  Clone ID: MRT4577_81049C.1
cccgttcttctatcttcctctttattcatttttgctccgaaacttgttttgttaggtgacctgttacattttcatctcgactcgtctcgactatactctcaccgtcaccacctacactctatactacctagctattaactacggccaaacaaacaactcgatc

SEQ ID NO: 163896 - DNA, 2389 bp, Zea mays
  Clone ID: MRT4577_8104C.1
gccggccgggtcggggggatcgcccgcccagtccacgcatcaaatttccattccggtgggtcttacctgcttgagtactactctcccgttcaccacgttcactccgtatctctcgtgcctttttcctttcctggttgcgacgagccgacgactgggcggacgccgctgccgccctacgccaggtcttcgtcggccccttcgacgagcacacacaagattcagtcgggaatgttgaatgcatagtgtaatttctgcgcaaaaagatggcatcagacgagttcatcagccttgacgcaccttgtgaggctgatgcgaaagatgaagggggagacgttcaggttaaagctcctgatgtgagtgggatggagcctctggtatcggatctccaaccagaagggaaagctggtgctgtgggtagtaatcccaagacatctgctgggaacctggatcttgaagaggggcaagtggaagatatggacctcgcggatgatgacgtagtggttggaaaggatcagctattagatgcttccattcagcccgagatcagtgttgcagctgtgcagactgtgattggttttgaggtcaagctggacaagggggacgggactgaaaatgaaataatttatgagtcaaacagcatctctattgaagaaagtcgtatcctattgaatggaatattatgtatttcttctaatatacttgtgcaactgcaagtgtctatgttttctgaagattcatttgtttccattgaatccttggaactgtacttgcataagaagtgcagactcttgcttatactcctgggaccctaaacatgttattgtgatctggggggaatttatagttgttgttgttccttgatgtggcatttttagcctcaagaggagttaaaagagcccgtgtggaatcaaaggaaccttctgttcgtgtcatctacagtgacttgacaagggaaagcaaacgaaagcttatgcaattgatgcaacaatggtctgagtggcaggctagaaggatgcaccatttggaggaagctgtggaagtgaccttagaaagtggtgaagagacttattatcctgcattacatgttggttctgagaaatcttgtgccgtgtccttttgggtggataaccaagcaagggaaagtgatacagtagatgatggttctgttccactgtatgaccgggagtttaccttgcactcgactcctctaggtggttcatcaaacactgaaagggtggataaggacgattcacgctgcttcaattgtggttcttatagccatgctatgaaggattgcccaaagcctcgggacaatgttgcaattagcaatgcacgaaaacagcataatttgaaaagaaaccaatctaatgttaaccgtgtacaaaaccgatactaccagaaaacgcccggcaaatttgatgatttgaaagctggagtactgggacctgaaactagacagtgcttggggatcggggagaatgatcctcctccttggctgcacagaatgcgtgagttaggctatcctccgggctacctagatgtggttgacgatgaagatagaccttctggtatcaccatatttggagatggtgaggtgaaactagagtatgaggagggagagctttcagagcaaggcgaagcatctccgcctaagaaaaagatgacagtggaattccctggaataaacgcccccatcccagaaaatggtgatcagtggctgtggggtagcaccccgccccagtcctcaggccgccaccactcattggattcgagggatttccatgatagagggcctcctggcgctgatcattattcaccgagataccactcccacgattttggacctttgcgcccaagcatagggagatcacactcagacagggggtggagaagcccacctcgttatgataatccgcctgcagatgatggtgcctggaccccgcattcataccccagcaggcagcacttgggccattacagctcgagctctgagatgtcgtcacgccattccagggacaaagacagagataggcatgatagcaggcactaccaccaccgcagatgagtcaagcctgtagctgatttgtatcatattcttttgctgaagaatcctctacctgacgcattcgatctgacatagaaatcagtcctgctatagtttcttaagttacgaaatttcctttccttccaatatatttttgcagcagtgctcccaaacccatggtagagagtgaccttatctcgtctggtccgtgagctgtatctgaattatatgactgccttcctcacatatgcaactcttgctccttccttgactgttatgggcctgcttggttcagggactaactaatgtttagtcaggggactaaagttatacctgtttgattac

SEQ ID NO: 163897 - DNA, 2957 bp, Zea mays
  unsure (1)..(2957): unsure at all n locations
  Clone ID: MRT4577_81050C.1
gccggccggtccgggaactaggtctcaaagtgcattagagtcacctcagtgtactcgaagagatgacaataaggattcaactacagatagcacaacaagtgaatcgtttccagaggcatgtctgagcatgaacctaggtattgcaaacaatggaaacaggatggaggctacttcaacagcggaaagacctatgctatcgccaacgacagccattgctgaaggaagagaacttaccactgcactgtccccctttcagcacgcacaaagggctcggcatttcctgaccagaccaccaagggttggtgagggtgcagcttttgatccaactagagacatgtttctgcatcttcgtgttgctaggccacctgctgaaggaaggggccgcaatcaattacttcctcggtattggccaagaataacggaccaagagctgcaacaaatatctggagattcaaattccacaatcgttccattgttcgagaaggtcctgagtgcgagtgatgcaggccgcatagggcgccttgttcttccaaaagcttgtgccgaggcatattttcccccaatttctcaaccagaaggacgccccttgacaattcaagatgcaagaggaaaagaatggcattttcagtttaggttttggccaaataataacagcagaatgtatgtcttggagggtgttacaccatgcatacaatcattgcaattacaagctggcgatacagtgacctttagtcgtatagatcctggagggaaacttgttatgggctttcggaaggccacaaatactgtcagtctgccagactcacagatttcagctattgcaaatggttcccttctcagtgagacactcttttctactgcaaatgaaagcataggagtagtaagtggttatcctggatttcttcactcaataaagggagctgcagatttccatccaagctctctatatgatcatcatattaactcagctgacggggatgtcagttggaataaggcagataaatttggcagcaggccagatgaggggtctttgcaatttctacaaaaacgaagtcgcaatattggttccaaaagcaggaggttcttaatcgacgctgaagatgccatggaactaaagcttacctgggaagaagctcaagagttgntgcgccctgctcccactgcanaaccaactgttgtgatgattgaggactatgaatttgaagaatatgatgaaccccctgtctttgcaaagagatcaatttttaccatccgtgcaacaggggaacaagaccagtggattcaatgtgacgagtgctcaaaatggcgccggttgcctcttaatgttattgttgcatccaaatggacatgcaccgacaactcatgggacccaaaatgctgctcctgctctgcgcctgaagagttgaccccaaaagagttgcaaagtgttatgcagcagtatgaagaaatgaagaggcgaaagggcagctatggtctgaagacgaatgtcgctgaaatggatgcatccagctttgacgccttggccacgggtgcagtattcggtgaagtcgggaaccaaggtacggcttcagtcgcgacgaccacaaggcaccccaggcatcgccccggctgcacatgcatcgtgtgcatccagccacccagtggcaagggcccgaagcacaaccctgcgtgcacctgcaacgtgtgcatgacggtgaggcgccggttcaagacactgatgatgaggaagaagcagcggcagtcggagcgagaggaggcggaggcaagcaagaagatcgcgtgggtgaacagagacgagcccgaggggagcagcctgtcgagatccccgcagacgctggacacgacccgagacagcagcgatgtcaccatgttcgacaaggtggccgccgacgtgaacaaggggcacatcgacctcaacttccaccctgcagcccctgccgtccgtggcgctggcgaccagggacagaatggcgcgcagcagccccgggcggtgagcatgatgggcctcctggaagtggcgagccggccccttgataactacatgaagcagaacggcctgacgagcctggcgggggagcaaggaggtggcagctccagcacggccacggtcccgccggctccagtggagagtgaggaccggacgtccgatgagggccgtgtcgcgtcagcagagcgggaagcagacgccatggccatcgacgaggccggcgagaaccagcaggacaagcctgccgactctgccgctgccgctgctacttgacggcgtgcgtctgttgtgaatgttgggtgttgtcagcgtgctttgatgtgcgtatcttatcggctcctcttggtttttttcttcttttctttcaggaatagctggtgagtttttgatgtgaaagttctaaactaaatttctgtagggtttcaaggtgttgctcctcctggaggctggagttacttacttacgtgtacgtatgaggctgtgcaaccaacccccaggttgtatgttgtagaagttctgtaaaccacgatgctcttgtgttggttgctgctgtaatctaaaaacgcttagacctttggattcaataactcaccacatacttgatctgtactgtacatctcatctaagacatcttttggaaaacaggaatttcacaggagtgcgtgcgtctgttgtgaatgtgattgatgggtgttgtcagcgtgctttaatggtttcaaggtgttgctcctcctggaggctggagttacttacttacgtgtacgtatgaggctgtgcaaccaatccccaggttgtatgttgtaaaagttctgtaaaccccgatgctcttgtgttggttgctgctgtaatctaaaaacgcttagacctgtggattcaataactccccacaaacttgttttgtactgtacatctcatctaagacttttttggaaaacaggaatttcccaggagtcccggacggactcagtgc

SEQ ID NO: 163898 - DNA, 3472 bp, Zea mays
  Clone ID: MRT4577_81051C.1
ggggaaaagcgacgagctatcgccaagcagaaaatttgaacaaccaccctctcttatgttgtattccagaaatgatgatattgctattgtaaataagagcaatcacctgttcatggtaaaaggtatagaggctggacaaagcagtaacatcttgagacaaaaagagatagagaatggttcaaggcagattaaatgggaacaaccaacccttagttttggggacatgggaaggcctttcctaactaggtctcaaagtgcattagagtcacctcaatgtactcgaagagatgacaataaggatccaactacagatagcacaagtgagtcattttcagaagcatgtctgagcatgagcctaggtattgcaaacaatgtaaacaggatggaggctacttcaacagcggaaaggcctgtgcggcttttcccgacatgacgaacagccctcgaggacgtgttcacgcatgttgaaattgcttttggcaaccggacgttgcacgagctggtcaagggaagaggctaagacggcatcggcatgggccaacgagaaccagcaggacaagcctgccgactctgccgctgccgctgctacttgacggcgtgcgtctgttgtgaaagtgactgatgggtgttgtcagcgtgctttgatggtttcaaggtgttgctcctggaggctggagttacttacgtgtacgtatgaggctgtgcaaccaacccccaggttgtatgttgtagaagttctgtaaaccacgatgctcttgtgttggttgctgctgtaatctaaaaacgcttagacctttggattcaataactcaccacatacttgatctgtactgtacatctcatctattgtatctatcggacaacaggaatgtcacagaacttgccaccacacaatctccctttaaacacgcacaaagggcacagcatttcctgaccagacctccaagggttggtgaaggtgctgcttttgatccaacaagagacatgtttccacatcttcgtgttgctagacaacctgctgatggaaggggacgcaatcaattacttcctcgttattggccaagaataacagaccaagagctgcaacaaatatctggagattcaaattccacaatcgttccattgttcgagaaggtcctgagtgcgagtgatgcaggccgcatagggcgccttgttcttccaaaagcttgtgccgaggcatattttcccccaatttctcaaccagaaggacgccccttgacaattcaagatgcaagaggaaaagaatggcattttcagtttaggttttggccaaataataacagcagaatgtatgtcttggagggtgttacaccatgcatacaatcattgcaattacaagctggcgatacagtgacctttagtcgtatagatcctggagggaaacttgttatgggctttcggaaggccacaaatactgtcagtctgccagactcacagatttcagctattgcaaatggttcccttctcagtgagacactcttttctactgcaaatgagagcataggagtagtaagtggttatcctggatttcttcactcaataaagggagctgcagatttccatccaagctctctatatgatcatcatatgaactcagctgacggggatgtcagttggaataaggcagataaatttggcagcaggccagatgaggggtctttgcaatttctacaaaaacgaagtcgcaatattggttccaaaagcaggaggttcttaatcgacgctgaagatgccatggaactaaagcttacctgggaagaagctcaagagttgttgcgccctgctcccactgcaaaaccaactgttgtgatgattgaggactatgaatttgaagaatatgatgaaccccctgtctttgcaaagagatcaatttttaccatccgtgcaacaggggaacaagaccagtggattcaatgtgacgagtgctcaaaatggcgccggttgcctcttaatgttattgttgcatccaaatggacatgcaccgacaactcatgggacccaaaatgctgctcctgctctgcgcctgaagagttgaccccaaaagagttgcaaagtgttatgcagcagtatgaagaaatgaggaggcgaaagggcagctatggtctgaagctgaatgtcgctgaaatggatgcatccagctttgacgccttggccacgggtgcagtattcggtgaagtcgggaaccaaggtacggcttcagtcgcgacgaccacaaggcacccccggcatcgccccggctgcacatgcatcgtgtgcatccagccacccagtggcaagggcccgaagcacaaccctgcgtgcacctgcaacgtgtgcatgacggtgaggcgccggttcaagacactgatgatgaggaagaagcagcggcagtcggagcgcgaggaggcggaggcaagcaagaagatcgcgtgggtgaacagagacgagcctgaggggagcagcctgtcgagatccccgcagacgctggacagcacccgagacaacagcgatgtcaccatgttcgacaaggtgtccgacgtgaacaagcaggggcacatcgacgtcgacctcaacctccaccctgctgcccctgccgtccaggctgcgcagcagcagccccggccggtgagcatgatgggtctcttggaagtggcgggccggccgcttgacaactacatgaagcagaatggcctgacgagcctggtgggggagcaaggtggtggcagctccagcacggccacggtcccgccggctccggtggagagtgaggagcggacgtccaacgagggcctcgtcccatcagcatcggcagagcgggaaccgaacgccatggccgtcgacgaggctggcgagaaccagcaggacaaggctgccgacgacgacgacgacgccgtcgctgccgcggctacttgacgtgattttttttcatggagctgcttctcctggaggctgggagtaacttacgtgtacgtatgaggcttgtgttggttggtgttgtaatctgacgcttaaacattggcttcaataactcatacagagtgagaacctgaaagtatcagtctagagcaagttctttttactggtgctgagtcttcccaaaaggaggaaacaaaaattttagacccttcctttaatttttaatcagccatgtcgtgaaacagacgccatggccatcgacgaggccggcgagaaccagcaggacaagcctgccgactctgccgctgccgctgctacttgacggcgtgcgtctgttgtgaatgtgactgatgggtgttgtcggcgtgctttgatggtttcaaggtgttgctcctcctggaggctgaagttacttacgtgtacgtatgaggctgtgcaaccaatccccaggttgtatgttgtaaaagttctgtaaaccaaatgctcttgtgttggttggtgctgtaatctaaaaacgcttagccccttggctccaataactccccacatacttgat

SEQ ID NO: 163899 - DNA, 437 bp, Zea mays
  Clone ID: MRT4577_81052C.1
ggatcgaatgtcacatctttactatataacaggagttctatacaaaataaataagtaattacattataaagagacaacggtccagcaacccaaagttgactgggagacgacgacctagacctctcacgaactcgtcacagcatcctccaagcgcctcatcttgtggtacctgctcttgacctcaaatctcgctggggaacgcactccctgcgacgcgcgatggccagacaatggcgagcttcgggtgcagccgattccggcactcgtgtccacagttctcaccagccgcaggcacgagaagttcccagagagcgccaccaagcgcccaggataatcgccgcccagcagctggccacgacgccgcagccacttcctcacttgttctctctctgccctgtctctttcgtcggtagcaatgcatcatgactaaacggtct

SEQ ID NO: 163900 - DNA, 410 bp, Zea mays
  Clone ID: MRT4577_81053C.1
ccacgctttcggcggcctgtacgcacacaaaaaacttgactaatcggatatgcaaagaccagccaatatgaagttaacccacatgaaagtaaccctgtttattacacaggttgttaacacattgaacaagaaggaattcaacacaggaagctgcctcttttatttgactaggggctccgacacatacgcgaactaggtaacggtgcaccgtatggggaggacaacccctctaggaggccgacacgaacaactgtatggctgcaacgctattatgcaacgcatggcgggcaagtatggcttccaaccaagccttgatgtgggggcggacggctacgagcccaaccttgagggtcttgctgaggtagagcacgtaggacttctaggttgacgtcgtcgacgcgtgaactcca

SEQ ID NO: 163901 - DNA, 984 bp, Zea mays
  Clone ID: MRT4577_81054C.1
aagaacaaacattcaagttcatagatatctatataaaaaataattttgttttttttgttcctaagagtaggtctcctattcctaaaggtcactttaagcacaggatttcaaagtgtgatatccaagtttgtctttagaaggaaaaagataagagtaatcagagtaaagcggaaatagatgagaaaagattaagaaaagtttagaaagaatcagagtagcaaaggtaagtagataatggttgtccagttctatctaggtttcgtcctacagtcaacattcctctgataccacttctgtcacacccggattttaggggtccaaagcccgggcgcgaacataatcaccaggtgtgctgggaccaagtctcacacatatgatgaatcatggcacaggatcgaatgtcacatctttactacataacaggagttctatacaaaataaataaataattacattataaggagacaacggtccagcaacccaaagttgactgggagacgacgacctagacctctcacgaactcgtcacagcatcctccaagcgcctcatcttgtggtacctgctcttgacctgggatttgagattccaagtaccaggatgatcttcaagatgactcgtgacctcgctgctcaaatctcgctggggaacgcactccctgcgacgcgcgatggccagacaatggcgagcttcgggtgcagccgattccggcactcgtgtccacagttctcaccagccgcaggcacgagaagttcccagagagcgctaccaagcgcccaggataatcgccgcccagcagctggccacgacgccgcagccacttcctcacttgttctctctctgccctgtctctttcgtcggtagcaatgcatcatgactaaacggtctattgtgctttgatgaaacgaagggatgcgattgcagctagcatatatagtcaggtcgggagggcggctagccccggcccggccggcctcgaggtaccc

SEQ ID NO: 163902 - DNA, 146 bp, Zea mays
  Clone ID: MRT4577_81055C.1
gtacaccagatccggagcagctcgtcgccgaacccagcgctgaaccgacggggagaggcgtggccgcgctttatcccgggaactacgatgcaacgacggtgtgactgagcaggcggggaaatgactgtgatcaaggcagctggagc

SEQ ID NO: 163903 - DNA, 1107 bp, Zea mays
  Clone ID: MRT4577_81056C.1
ccttgaaggtaaaagtgttgaaggtattagaaaagcatcacagatgattgcagatgttcttgaagaggctgttaaaagtcgacagctcgactactctcatttcatatcacttccattggctctccgcccatatcttgtcgagaaacggaaccacttccagagttgaatccttggggaagaagacagtgacaaagatgagagccgaagaacatgtttgaaacttggtctctagcttggtgggaatatccaaagaaaccacaaagcaccatcttaaacaaaatctctagaaagttttccttgtgattaggatttgaaatatcacctctgttctatgaatttctaaaatctaaatttaaatgtcttgttcccttcaggctttgagttgtttatttgtcacctgtagattttggcattgacaagtcaatatttatcaaaccgaaaacatttcacctgacggttcttatgttgaagttgtggaacaaggatcgtatagctaaggccgcggatgtgctccagtcagtatctaccaaagtaaatgaagctttggaaaatcgacctatctccatacagcttagaggtctgacatgcatgaaaggttctccagctaaggctcgggtggtatatgctccagtgctggaagttggtggcgaagggcgcctagcacgtgcttgtaaagtcataactgatgcctttgtcaagtcaggtctagtttttgaaagggacgcaagagaacttaagttgcacgcaaccgtaatgaacgtgcggcataggaagaggaaatacgggaacgaggactggggcgaatatcccatccatgaggtccacctttctcagaggttcaagtttgacaaaagtggatactactattgctgcccttgcctgcagagatgcacacagagtgagatttgtagctgtgatcatgttttagggttgttgcataataataataataataataataaaactgctgttcatgaggcgtttaactttgttatcagcggtatgcccttaggtcaggtgttactgtgtatcaattgttttgaatcaccgatgagcaggtgtatctactgtcttgagtcaccgatatgagccatgtgttgtcgttgg

SEQ ID NO: 163904 - DNA, 711 bp, Zea mays
  unsure (1)..(711): unsure at all n locations
  Clone ID: MRT4577_81057C.1
cgctcttctttctctcatctatctgccggtcgccggcatgtcgtgtggcgcgccgaggctagcctacgtcgcggtctctgcctgcggtcaagctcgagctgtccgtcaagaaagcctcccttggtctcggcccgccagctcgccggtaggtcttccgtcacccgaccgttgtcacccgcgcaccgctctgtctcgtggnngcggcgccgcccgccggcggcggcgtggtctcggactcgcccgcacgtccacccgtgcccagacgccgtgcctctcgcgccgcccggcactacaacatataactcggcagccgtacggccccgtctggncgcgcgatccggctgcaacctcancctcggaggtcnttccacgccgacgcgcctcncgtcagcacggtgcgcgcgcgccgcctagccctccacggcctcgtcgcggacctcgaccggcagcggcgcgcgtccggctccgcggtgctcgcggcggagagcctgcgcgcggccatgttcggcctgctcgccaccatgtgcttcggcgtgggcgtcgacgagggcgtcgtgcgcgcgatggccgacgcgcaggacgacctcgtccagtgcttcctcgggctgcgcgtcttcgccacgctccccgcgctcacggggctcgtctaccgggaccggtggaggaagctgctccagctccggcggcagcaggaggaggcgtacctcccgc

SEQ ID NO: 163905 - DNA, 895 bp, Zea mays
  Clone ID: MRT4577_81058C.1
ggcgattgggttcctcgaggccgggcaggagggcacaccatacctgaaacttcactgcctttttaattgtcaggcacactggtctggaaatcagtagcctgttggctgctgttgctattaatcagttgggagagagggagatggccaggaggaacatcggagtcgcagtggacttctcgtcgtgcagcaaagcggctttgcggtgggcgtcgacgaaccttgccaggaacggcgacaggctcatactcatccacgtgaacagctcctgccagaacgagcggggcgccgttcatctctgggagcagagtggttccccattgatccctctggccgagttttcagacgtcgccaggacatacggtgtgtcaccggacaaggagacgatcgagatcctcactcaagcggcaaaccatagagggatcgaagtctttgcaaaggtgttctacggcgacccagcaaagaagctctacgaagcagccgacctggtcccgcttagctgcatggtcgtcgggagcagaggactaagcacgctcaagagggctctgatggggagcgtgagcacgtatattgtgaaccacgcggcctgccccgtgacggttgtgaaggagatggtgtagcgtgttgaacaccgctgtttacaagcttcaccctagccagattgaataagcgtgcttgataagcactgatcaggggggatcttgctacttatacgacattttgtgcttggaatttgggtaactaggaccgggcagaacatatctatgtcttgggctcatggcactgacatctgaacatatgccctaagtctgttgtaatcgcaaaatatttttgcttataaaatcagttaagagaaaaaaaaaaaaaagcggccccgggtttttttaaatgataacat

SEQ ID NO: 163906 - DNA, 363 bp, Zea mays
  Clone ID: MRT4577_81059C.1
tgcaagcaagccacatcaggccctacttggctcggggcgctgagccacgcgtgcctggtccgatcgatgggcaactgccaggcggcggaggcggaggccgcgttgaaccaccaccccgacggcagaggagagcggctggacggtgcggccaccgaagggcacgtcatggcgatggcaaccgcgggcactacgggaccgctcgaggtgctcccaagaatgagcaggcggggagaagcagggcagcggatccagacccctacgcgtgcccggagcccggcggtgctaccgacggcaccatgatcaccaaggctacacttcttgaaccaagggacttgctgctactgcggcagggctaccagctca

SEQ ID NO: 163907 - DNA, 646 bp, Zea mays
  Clone ID: MRT4577_8105C.1
aatctcaccggcagcacccgcggtggccgccatgcacgcctccgcccgcttgctccgccgcctctcctcttcctcctccgcccgctcgctccgccgcctccctcgccacccatcaccctcgccgcctccacatccatctcgtctgccgccccttcgaaccgtgacccgcgccctcctcccccacctcgctgccccccgcttctccaccatctcttgcgcatccacaccctctctccgcctaggtgaatgcggcgctcccggaaccccggcgataccgtcggcggaggtttccgagggagaggaggaggtggagtctgcggcggcgcggcatgacaccgacgcgttcgcggcggtggagctcgcgctggactcggtggtgaaggtgttcacggtgtcaagtggccctaactacttcctgccgtggcagaacaaggcccagcgcgagagcatgggctccggctttgtaatttctgggaaaaggatcgtcacaaatgctcatgtggtagctgatcatacttttgttcttgtgaggaagcatggatcacctgcaaagtacaaggcggaagttcaggctattggtcatgagtgtgatttggctcttcttacagttgagagtgaggagatttgggaggggatgaaaaagcct

SEQ ID NO: 163908 - DNA, 293 bp, Zea mays
  Clone ID: MRT4577_81060C.1
cgcagaggaatctcatttagggtcttatcatccaaggtaacgaagccctggagcacagggaggctggtggccaggcccgcgatggacccattctctgtattaataactgtggcttttttcgccgcgcgccgacaataaacatgtgctgcaagcgccacagggagaaaagtacaagtccagatctggccaagctggctggcttctctatctaccgcatggtgaacgggaggcaccctctcatggtgccggttgttgctgtgcgaaccacggtaccatggtgtgtcccagttgtg

SEQ ID NO: 163909 - DNA, 260 bp, Zea mays
  unsure (1)..(260): unsure at all n locations
  Clone ID: MRT4577_81061C.1
tgctggatcttctccggcggcgtccagcacttgctaccaggggttaaaaataaagtgagagacggcgcgacgtgcattgcgcatcatgtgttctgggcgcgtgcacatccagtttgtcgtttctctgtcgtgggctcgctttattctggcgtgttcgtcacaattttgatgttaactgtgaggaatatagttgggtatgccgccagtgccagttagttctggcgccggctctccgtnacggatggtgtgttcattgccct

SEQ ID NO: 163910 - DNA, 766 bp, Zea mays
  Clone ID: MRT4577_81062C.1
tctatataagcatgtcataaatcgactttattcgtcaaaaaaaaaaaaagaattgaatgacggcctctatataagcatgtcataaatcaactttattcgtcaaaaaaaaaaaaaaaattgaatgacggcctctatataagcatgtcataaatcgactttattcgtcaaaaaaaaaaaaaaaattgaatgacggcctctatataagcatgtcataaatcgactttattcgtcaaaaaaaaaaaaaaaaattgaatgacgggcctctatataagcatgtcataaatcgactttattcgtcaaaaaaaaaaaaaaaattgaatgacggcctctatataagcatgtcataaatcgactttattcgtcaaaaaaaaaaaaaaaaaaaaattgaatgacggcctctatataagcatgtcataaatcgactttattcgtcaaaaaaaaaaaaaaaaaaaattgaatgacggcctctatataagcatggcataaatccacttttttcgccaaaaaaaaaaaaaaaaaattgaatgacggcctttatataagcatggcataaatcgactttattcggcaaaaaaaaaaaaaaaattgaaggacggcctttatataaacatggcataaaatcgcctttttttcggcaaaaaaaaaaaaaaaaattgaaggacggcccttttttaaagcatgtaataaaacgactttatttcgccaaaaaaaaaaaaaaatgggaggccggccctatattaaccaggcaaaaaccgctttttttgcc

SEQ ID NO: 163911 - DNA, 2101 bp, Zea mays
  Clone ID: MRT4577_81063C.1
acacgattaacatggtttcccaagtataatatatgtacaggaaccttcggacatgggatgatgttgtacataatatatagagcgcggttcgagagaaggatgaaccagtgccgaagcgacccgtggaaaagcttcggcttagcggtggaaaaagaaatcgacttaaaggggaaaaggctgtctagtcctcgatagattatccctaagtcaatagtaaatgtcaagggcatgaatgcaattctacacaggctgtgtcctgtgcctataaatagatgaacagtgacaccgtactgttcacgctgacttgtattcattcgcacgtcacactcggatttttaccttctatcaagacaaaggtataaatgtaattcgatattgttcacgtttattcatgatgatataataaaaaatattctaaagatgtcatacgattattcatgttatctcccatgtttcacatgtttctactttcattattatatatcgagatgatgaaggtatgtcctttataaccttcgtctgaagatcattatatcctaaaggagataatgtttcgaaggacgaaggactttatttattaacatttcgtgttgccttgttcttaactcatagcatttgagaacaagtacccagcagaaaggatatcaagaaaatcatcccgcgccccatctgttctcgcttcggcctccgaaggctgaaggtggctattgaaggtgacgtcgaagcatgccagaaggactttagcaatgtttgtgccttcattggcacaagagatatagtccaagagcacatagcctataaggtgtggccacttgtggatagctgggaaatgtcgaaggagactactgctgaatccagtgaaggtggcctagttcgattgaaatataccttcagatttagagagaggtttgacgaacctaatgatgactggttgaaatgcattgaagctaccagcgacgaactgcttgggacatactctaaggccgaagatgatgccttgtccgcagccttcgggggtcggggcaagaaaagattgaacagggtgtttgatgcaattggcttcgtataccctgattatcactacccactactaaggcaaggaaagaagagaaaaattgtcacttcggccaacactgttgtgccgaagggcaagaaaatgaagacagaattgccgaaagtgcaaaatgctcctgttgcaactcccaagagaaggaggatggccagcgtgttagacgctgtcatggagaccacaaagtccttgagccctgctcctactaagaaagttgccaaagctatcaaagtccaggccgaagccgatgctgggccttcagtgcccattgagacgaaggctgccacgcctgaggataaagctgagcaacaaacttcagatactggcatggcagcggggcaagatatgatagaaaaagcaaaatctcctgcccccaaagctctggccgaagatgttgattacattattcgacatgcttcggggaaaaaattatccaaagaggaaatcttagaagccagacactatgcccagaagctaaaatatccgaagggggctttggtgttcaatggcactgacgaagatgacttcctatactatctcctggacaacaaagaaatattcgtttgccgggagatagccaaaagtatgggatttccgaagattgaggacggcctttcggccatgtcgaaggatgatcttgctgatagccttgcatacaatagtataaagggcttaattcttagcaatgccttgagggctcaaaagagcgccgaagatgaaagctgcacaatggctctcagtaaccttcgctcagaggagaacttcattcgaggcgaccccgaaggtgttattgaatggataagcagggaagccgaagcttttgaggaaattatgaacgatcccagagatatttgtgctttctccggcgcccggggaatcgcagctattctggagaaggctggatgcgatcacgtgaaaattgcggctcaagccgaagccgccttctccataggcgacacaaaggacccgtcagccgaagcaactttagtgggcggaaagttttgttctgatgtctgggtgaacggtggctga

SEQ ID NO: 163912 - DNA, 176 bp, Zea mays
  Clone ID: MRT4577_81064C.1
tgcgaacgagcctccgtgcatatcaccagcctcctcgcgcacggtacccgcttgcttttccccacctactcgccgtcgcgggccgtgcgcgcgtgctggccagtctaggttttcggccctcgcccgccgatccgtcccccccgccggccatgtcgaagcaaggagggaaggccaag

SEQ ID NO: 163913 - DNA, 310 bp, Zea mays
  Clone ID: MRT4577_81065C.1
ggaaaaaaaataacaaatgtcccttcggcttgatagaaggtaaaagtccaagtgtgatgcccgagcaaatgcaagtcagcttgaacagtacaggggttttgttcatttttttttaggcctggaacgcaccccttgggaaattacatccatgccctttacatttgctaagggctataaaaaaattcattggggtttaaaaagccttttcccctttaagacggttccctttaatgcggttatgccgaaccttccttgggcgggaattaggggctgcaataaactttgtattggtggggcttttcccaacggg

SEQ ID NO: 163914 - DNA, 398 bp, Zea mays
  Clone ID: MRT4577_81066C.1
gacttgtggtaggaggctcttcttttggcagggcgctggacgtgatgcaatatatatatcagctacaacaacggctggctgaattacaaacgtctttggggttgttcaagcataaagccatactggcaggagctactttacaaacactcaggctataatatatgtaagatgattcaagcgatacagaaaaggctagtaacagcaaaaagaagaattccatgccatccttgaggggggtgaacttaaaggggcacatgttcttgtgtatgcaaataagcaggatcttccatgtgcactggatgataatgccattacaggggcattagatctacacataattaagagccaaccatgggcgattctcaaaacatctgcattaaagggagaggggctctttg

SEQ ID NO: 163915 - DNA, 288 bp, Zea mays
  Clone ID: MRT4577_81067C.1
tagaatcctatataccggacagccctttttttttttttttgctaaaacaataagactgaaaccaatctgtaacaacagaacatggggttgcatatataaccactaaacaatccaaataaaaaaacaagaacataataactggactttaaaactatacgccacatgctaagggaaacaccatgtccaaaccaaggacaacttcactacatataaaaaaaagtagagactgttccgaaaccgctgaccccaccacgcccaaaaccacaccttcttaatgaatcgtggaac

SEQ ID NO: 163916 - DNA, 662 bp, Zea mays
  Clone ID: MRT4577_81068C.1
accgaaacagttgcagtgattggccgttacataagtgagaactacaatggtgttgctctgcatccaattgattttatagatactagttctgggaagcttctggctgaggtgatggaccctgacataataacaatcagcccagtgaacaagctacatccgcaagatgacatcctagctacaggaagctcaaggtctattttcatatggaagccaaaaattgaagatgaacttactgaagaaagagccaagcatgacaatagtagtgatgacgactcaggtggtgattctggcggaaagaacaagaaagcaaagaagactcgcttcactcatgcagtaaagggaaagggcaaatccaaagtctgatgcttggtgtacatagtcggcagcattttgacaagaaagcgtccattaaccagctcctgatgcatctccttttgtaccatcttgccaactccctcaccccccccagctaaggtgctgaagacccgtatgaaacgcatgctgatagaccccatagttgtctcctgcatcaatgctcctaaggagttagccagttaagtttcggactcttttgaatcctgacatgcttatgatcacttgtcatttgtcaacgaggccttttaacggtttaatcctgtatcaacatataaatctcctgttca

SEQ ID NO: 163917 - DNA, 284 bp, Zea mays
  Clone ID: MRT4577_81069C.1
cccactcgtccgactagatgcggggccgcccttttggtacttttatggctccatttttgggcattccctattttgctggcccaaaaggaaccgccccccgtgaagcacaaatccaggcaccaaacacccctggtcgtgggaaaggctggagaacatgaaaagggcaaccagaaaatccacaacccaaaggggctataaaaataaaaccatccaaacccgacctgcttcgaagaaaaaaaaaaacctggggggggcccccaacaagaacaaggtgtcccccttcc

SEQ ID NO: 163918 - DNA, 145 bp, Zea mays
  Clone ID: MRT4577_8106C.1
accatgagcaattacagttacactcttcttttgctttttaggagcgggttaaattgggggcggtaggggaaaataagctctttatttttttgaataaacacaaaacttggcttttgtatgtatagtttaaaaagattgactaata

SEQ ID NO: 163919 - DNA, 323 bp, Zea mays
  Clone ID: MRT4577_81070C.1
agcagtggtaacaacgcagagtacttttttttttttttttttttttttttcccaagaaatatgatgcgacaggttctttcaaatattagaaagaagctggacacttttttaccatagctacagaaacaaccaattcttaccagaacattccttgacacgttcaaaaaaaatgcgaaacacacaacccaaatattgaattacacaaaccacagccttgttttgttacatctaacgcatagcccgtttttaaacaaaataaggttaggcctacttccaccgacactctttcgagaccccgcgtcctctgcgttgttaccactgct

SEQ ID NO: 163920 - DNA, 552 bp, Zea mays
  Clone ID: MRT4577_81071C.1
ccggccggggtgcttccttcctccgccaccccggcgcgatctccttctcccggcgagacgtcatggcgcgtgactgcaccgccacatccgtggcagagctcggtccctggatcggagacctcctcccgctcctcgtctgtcctcctcatcgccatgccacatactcgccctcggttactggatctacaggctcgacacggacggacccagtcagtccgcacggagcaataaccactgaggtgattgcgcccgtgttcggatagctgtgaacactcagcttgttattacagttctgtatccttggattgttgatctcccaccttccaacgacagaagatggcgtgcaaagatcctgacagaacgaggacaggcaaacgatcttatatcatggattgctcagatgatggtgtgagaagcgacgatagctgaatagctgatatgcggaacgacgcccttttgaacataaatagtgtttcgggtgctggagaggatagacatctctcgacctctccgtgtaaagaataggatctagacagatgtgccgcttcatat

SEQ ID NO: 163921 - DNA, 776 bp, Zea mays
  unsure (1)..(776): unsure at all n locations
  Clone ID: MRT4577_81072C.1
ctctctctctctctctctctctctctctctctctcttcggacatcaaaatcgcagctaccccttttctttctttgttgctgcttggtcagagctctctttttacctgctatgcctcttttgccaaattgatatcggtcgttgaagcggaatgtcgatcgcgttcgtagatcaatgaatgaatttgatgtgtcacgcctgacggaagctcaggattacagaatctttgcctcgacgtggaatgttggtggtaaatgcccatcaagggggttagatttagatgactggctccactcttcacctcctgctgatatctatgtgcttggatttcaagaaattgttcctttgaatgctggaaatgttcttggtaccgaagacaatgttccagcaaagaagtgggtatcacttattaggaggacactgaacaagaaccctgagcctagcagtcatggtggctatcgcacgccatcccctgtccctgatccggatgtggaactagatgctgattttgagggatcattgagaagacaggatagctcatcatttttccaccggcgatcattccagaaccttagtcggagtttaagggtttcaggaaatgatatgttctcacaaccaagattggaccgtangtttagtgtgtgtgacccagttaacattggaggccgaccaagtgattttgatggaaatttcagtgtatcggatcaccagcgatgaatatatggacgaggatacagtaatggagcatattttcaccattccatatggctatggtact

SEQ ID NO: 163922 - DNA, 247 bp, Zea mays
  Clone ID: MRT4577_81073C.1
attaaaagggaaaggtccctcgggggaacggaacacaacttttggggggtaggacaaaacccaatcacccccccccgggggaaaaaagggagtttaggcccccgcccgagggggtttttttttgggatcaagcggccccccgggtttttttagaaaagccccaacaggcgggggggacttttaaacaaaaacggaaatgggttgccactttacaccaagctttgggtttgctccctccgggcccggg

SEQ ID NO: 163923 - DNA, 171 bp, Zea mays
  Clone ID: MRT4577_81074C.1
tcactacttaggagctggccctgcgtccgtccgattccggtcacaccgtcggatgtttttactaggactgaggtgacaactacactgtacagaccatacttgcgctgtacaccctcaacatgcctaattgtgtatagctgggatgtctacccatcttgtgttgcttttcgt

SEQ ID NO: 163924 - DNA, 712 bp, Zea mays
  unsure (1)..(712): unsure at all n locations
  Clone ID: MRT4577_81075C.1
cattgggtacctcgaggccggccgggacgtcatcatagtttctcgatcgctccacaaaacccttctccccttcacacccttcgttcgtacgacgctttccccaaatgatgctccttcgcctctgcaacaaccaaagaggagcaccatcgtccctgtccagagcgccatcgcctgcagtgacctcgccgcctatgagcgcttcttggaccgccccttccttcctcgagaataatgatcagttcgtggagcccaaaggagctacctatgaagaccctgagcactcatttgttgaaggttggcatctatgcaaccattgattaggagaaagagtcgaagcggatctccaggagttccatgacttcgacgaattcgaagactaggctagtggcctcctagtcagatgcatgtggaaggcccattttatttagtttacgttccgcttgagcacttcaaactatgtgatctctatgactctagtctgtaataatattacctactctttatgatcattcaaagcgttgtggcgatgacgtggcatttatgtaataactgtatatgtgattcggatcctagaacatacatatttcatattcggtttgcccttgtgaaaaaaaaaaaaaaaaaagcggccnnnnnnnnnnnnnnnnnnnnnnnnnnnnnnnnnnnnnnnnnnnnnnnnnnnnnnnccnnnaaaaaaaaaaaaaagggggcc

SEQ ID NO: 163925 - DNA, 332 bp, Zea mays
  unsure (1)..(332): unsure at all n locations
  Clone ID: MRT4577_81076C.1
tcacctgaacgccctaacccacttgctgctccggggcatgaaggagatactagtgcgtacgctagcgagctaacttatcatggggggtggcattgaggatacgtattcagcacccaacctatcacttcacgcaatgggggaaaaaacaacncactgtcagggtgctggaaatgctacgcctgtaaagatatgcaacagcatgagcatgtctttaccaatgttgggaagtgacatgacgtctatgtacttgtgcaataacctaggcaccaaatcaaccactctacacatacatctggaacagtgcaagcgctgcctgctctacctgatataca

SEQ ID NO: 163926 - DNA, 235 bp, Zea mays
  Clone ID: MRT4577_81077C.1
cttcaaatacttataaaaacacaattctactcaacttattatccttacccctaaactctatgggggggggggcgtttttttttttaaacccacattaatcgcttttccctaaatatccgctttctaatttgcaaacctacgctcccttttgcattaattaattctccaacgctctgcttgattcggctcacgttaacgatacacttacgattgctctatcactgactcctttcgc

SEQ ID NO: 163927 - DNA, 359 bp, Zea mays
  Clone ID: MRT4577_81078C.1
ctcgagccgaatcggctcaataaaagaagaacctcgttaggattaagtgtaggacaggtggaaggaacaacatgctcaatatgtacggacacttgtgtttgacatgcactcaagatacttctggatatgctaggaaatgatcgatctgcattactatcatttctctgttcctgagccctggcaagcttgcacatatatgttatccacaatcatttctgacaaaatgactgacgagccacttgtgctttcaaacatgcagggttactttgatgctgctttcgatttagcatcacatgtcataactcgctagcggcgttatgcaaacatctgtcaaactattgtgagccatgtggggccat

SEQ ID NO: 163928 - DNA, 326 bp, Zea mays
  Clone ID: MRT4577_81079C.1
ctcgaccgcggtcgcccttttttttaaaaggtttttgcaaattcttcaaaatgccgggagacatgggcttggcgttgagggggagcttctttcttcaagaccatctaacacttacataaaaatcacgaagttttgaccacacttagtggatatttcaaacataccgaaatccaattacccaagcctgcccttcgatttagggagaagcaacacacagattttgagcccctatgttataactaaccaacatatataaatttaacccgacagaagaaaaaaatgccaccataagaaagatatccttatttcttttacagcaaaagaca

SEQ ID NO: 163929 - DNA, 142 bp, Zea mays
  Clone ID: MRT4577_8107C.1
aattaaattcttttacatcaaaaaaagctgtcctatttctttccgacacaacaaggaaggggtgatctttggtttcggaaagaacgcaactgccatatataaaaccgcatcgacttcccacctgacgattctactcttcaac

SEQ ID NO: 163930 - DNA, 324 bp, Zea mays
  unsure (1)..(324): unsure at all n locations
  Clone ID: MRT4577_81080C.1
ggcgaacggcanagagnnngccagagggggacggaagacaacnagggcggcggaacgngcaacaaagggacacccagaacccnnaaagccgganangnancaacaggaaaccaagaaagaaggaagcacaacnanagaggaacaaaccaaaaggacnacncaccgaaaaaaaccgcccacccagacancaacaggacagcaagnngnganaggccaaccanngcgccanccaacccggccgaacangaagaggagcaancaacaccgcaacgacgaacangnnnncaaaagcgagnangggcgacaacacaccacgnggagcac

SEQ ID NO: 163931 - DNA, 319 bp, Zea mays
  Clone ID: MRT4577_81081C.1
ttttaaaccctctaccacagaccgtgaggggggggaatttagaccacctttcggttatttccgcccgaccccgcaccacggcgctagcgcgagagccaataacaacgcccgacggggagaccggcaccattagcgcatgccatccgagccagctacggaccagacgggagagatggagcggaggcggaccggatcggcaagcagcctggacagccagcagccaactgtcccatgtactcgaggtgctacaccgggtgggcggcagctgtgccggcccggctgcatactgatgaagcccggcagcggcaccgcccgcgac

SEQ ID NO: 163932 - DNA, 321 bp, Zea mays
  Clone ID: MRT4577_81082C.1
gatgtacactgaaggggagaaaccgccgcttggttagattgaccttagggagaacacaaatgtataaactgcatccaaacaagattattacaaacaagaacaaacggtgatttacgaacgctatcaatgcatacaggaagggccacccatatctcgtatgtgcgccgatctcaaaggaaatgaagccttcgacaacaacatacacctatatggtggggacaagcaaatgacaacacattatctatcgagacgctcagacatcaacaatgggcataatacggactgaatgggcttgtatagcaagccggtccatggggggta

SEQ ID NO: 163933 - DNA, 2744 bp, Zea mays
  Clone ID: MRT4577_81083C.1
ggaatcatgaatcattttttaaaactgtatatacggaccaaaaatgtaactgtgacgctgttatctcagcagcgcagaacaagaccgttaggaagagcaacaaggcattcttcaagtcaaaaagaatctcttattttgtagagagctccaaagaggatgatttgtctctctccctgctaacttggcgccagttaccaaggagaaggccggcacaacatcgtgagttcctaattctttttgcattgtaggattacagaggtccagggaaggtgccattttcacgctgctcgttccagcgttcaacccattcacctgggcacagggatcgatagtacttggcaaacttatcacactcaggtgcatcctcaccttttgcagccacacacctgtggtattcaacatagcgtgtgaaacaatgcctcgtttgatttgttgttgggaaacgaaaatctgctggagctgtttcaatcttgatctcaggtttctcagcctcttcctcctcggcagtctcacttgcttcctctgcagcagtgttagtttcttctgcgtctgacttttcagcagcatcttgtacttcagacgtttcattcttatcttctacagatgaaggagtctcatcattggttgaaggagcagattcagtctcagtaccactagagggcttctcctcagctgccttttccactggaacttcctgtggtggaagtgaatattcctcagcgagggacggcgtcttggcttccgcggccatgggcgcagcagcagcctcgaagcttctacagtggcggctgcgagagcgagggagagatcagagagatagggagggagggggggtgctggactccggcctcgacccggccggcatcgatggaaagagctttagcaacgaacagcaagcccaacaaaagaacccagacgcagtgacaaacagtgttccgagccaaggccaggagcccttgaacacgtttccagattcagacgatggaaacacgaacaccggtccgttgaatggccatgcagcagctcatgtgaacatggaagctgccatctctacggaggacgtcatacgggctggcgggttcggagcgaaggatgacattggcagcctcctcccgacggcaattgattccaccgattttgaggcctcgctgcgggatgcccgtggtttcgagggcgagaaagcggcgccgtcgcatcctggactagggtggaagggggagaaagctgatggtggaaccaaactggcagatgtggcggagcagtgatcacgctttcctcttctgtagcccagctccagccttcagaaaaccttgttttctgccacgtgtgtctggagagctgccctgcgtatgaactttctttgtcacagtgttttgtgtgacacataacattctgtgtatgaacatgaggatgtcggttctatgctgtctgtcgtataaaaaaaaaaaaaaaaaaactcgagtttttttttttttttttttaataaactgtgatgtgaatcattaattactcacatactcaacatttgcctagaggacaatttcactgacaacgtcggaacacaacctccgcattcatggttcaggatcatacaaacaatgcgggaaaacaaataaaaaaatactttacaaccgggtaataattcagttgtctccaagaattgctagtgaaatctacagctttaaaatgtggccgcaattatttagccgacaatgcaaaggttcataaattgcggtaggtaatgaattcatggcaacttagtgatcagctcttgaaaatcaaaaaccacccagtcagcttgtgctgcgactggctctctcatctgaaccccggcgtaacagatgaacaagtctgctccgccaggttgccgagcctccagatcagttgcgccatcaccaatcataacaactgtcttgtagccatggtcctgttttatttgctgcactgcttttgctttacccccactgcgtgaagtgggctctgtgggatcaaatccggcgtactcccccaatgtgccaaataacaattggtttgcagtgatgttttcaggaggaatgccaagctcaaatgccactggcttgatcatttgtcggaagcctcctgacacaaggaacacgtcaatattattggattttagcttattaaccaaatcagccattccaggagaaatccttggtggcctcttctccaggcactcctccacctgggagagagatggcttgattaaagacagcctggctgccagcgcctcctcaaacggaacagtccctgtcatggcctttgcagtccattcagcaacagctttccccgccccgcagaaatcagcaagctcgtcaatgccctcgtccaggatgacggtgctgtcaacgtcgaaacatactgcatcggcattccgcagcgtctcgatagccccttgggaaggcaggctgttggccagaaccgcggcggaaccgtccttagagatctccagtgctgctgccagtagactacggctcctacgaagtttggcacagcgaaacagtgggcttggcaaacgaaccgccacctgtgaagccggtgatggtgatgcccaggcggacgacgaccgggcaagtgacggtgaactcctcggaccggcgcgcaagctgatcaggccggccataccatgcgcacctgggttaggagattagaagaatcgaaggaacgaacgccgttgcgctgctcgtggaaatcccagacccagacccgagccgaatggtggcaac

SEQ ID NO: 163934 - DNA, 403 bp, Zea mays
  Clone ID: MRT4577_81084C.1
ctcctataccatcaccagggatcactatacgcgtgtatgcacacgcacttggtacgagcctgtgtagcgtgcccgtgcttgcttgttgccgagagcagggtgaagaagggcgtgttcggacgcaagggaggcgctcttataaagaagtcggtgacgcgagtccgtaaaggccgggctgcagttgcccgtcggccggatcgggcgctacctcaagaagggccggtacgcgcagcgcgtgggcactggcgcccacgtctacctcgccgtcgttctggagtacctagccgccgaggttctggagttggcagggaacgcggcgaaagacaacatgaagactcgcattatcccgcgccacgtgcttctggcgattcgcaacgacgaggagcttgggaagctgctgtcc

SEQ ID NO: 163935 - DNA, 598 bp, Zea mays
  Clone ID: MRT4577_81085C.1
ggtacccgggcccccccctcgagtttgttttttcctttttttttttttttttttttccttttttttttttttttttttttttttttttttttttttttttttaaaaaaaaaaaaaaaaagggtttttggtaaaatttcccccccttttttgggaaagggtttaaaacggccttttttgggggctttacttttaaaccttttaaaaattttgggggggaaaaaaacccccccccccccgggggaaacccctttttccatttgggcttcctggcccaaaaaaagggtttttaaaagacccgaaacccaaaccggctttgttggttgaattttgggggaataaaccctaacctttggccccaccttttcccccctaaaaatttgggttttgaatttggggcccaaccccaaggaaaaaaaacgggttaaaaattttttttgccttgggaaacccccccggattaaccccggaaaatttttccaagggttaaaagggggctttttttgaaggggggattcgaacaaacatttgggaaaccggctttttgttttttttaaaagggtttttaatctttccggggcccaataaccttttttaaaa

SEQ ID NO: 163936 - DNA, 739 bp, Zea mays
  Clone ID: MRT4577_81086C.1
cccttagctcgtcggtaccactgcgcagagggatttcgggtattggagtgtcggcgccgccattgctgcgctcagaaattcgccgtggccgcgaccttgtgactagccaccggagttaaccgttgtgcaccgtgcacttttgtatcgggtgtggggcacggattcagtgcatcaggagtcaattccttgccggtgtcgaggagggacttcgttcgcgcatggccgagcttgccttcgcccagggatcctagattgcaacctcgctgacggagagtacgtgcttattcccgagcaaggagctgtccacgaggaagaccaggagccagctcccgagcctaccacaaagaatctccccgcagccccagcatttgaagattgtaatcttgccgacggagagtacgtgctcatccccgagcaaggacctgtccaagaggaggaccaggagcaggcttcagaggctgctattgaggatctccccgcagccccagcaattgaaggtaccatgcaggatgtagttgatggtgtgacttggcctaccaccctgccaccgggttggacggtcgagtgggatgttgccccggcaggagaggagcatgaggagtagtgggctaggccttgcccatttcctcgttaccgacgacatcgattatccgctgcactttaatttgtgaactttatttgctactccaaaaactccgatttatgtaataactccgtacttaatttgagtttcctggtg

SEQ ID NO: 163937 - DNA, 532 bp, Zea mays
  unsure (1)..(532): unsure at all n locations
  Clone ID: MRT4577_81087C.1
atccggacacagcccacagttatggtaacatggccttgttctatcatgggctcaaaaactgaattggcactgcggcacatgtcccgtacactgctgctgctaagtttggcgtcaggacctgatcatccagatgttgcagcaactctcataaatgttgcaatgatgtaccaggatgccagtaatatgaatactgctcttaggtatcttcaagaagcccttatgaagaatgagcgacttcttggccctgaccatgttcaaacagcccatgaaaagaagacctatgatatactggtaaaacaattaggggaaaatgactcacggactaaagattcagaaaattggttgaatacatttaagcttcgagaagaacaggtcaacgcccagaagcagaaggaccagggagctaatgcatctgataacgctgttaaattcttgaaggcaaaccctgcatttttacaagcaatgaaggctgctgcgctccaatcaggtgacaggtcagcanatgtcaacaggtccctcaatgctgcagtag

SEQ ID NO: 163938 - DNA, 336 bp, Zea mays
  Clone ID: MRT4577_81088C.1
gggaagcgtcttcacgcgactgctcgtgatcttctgacatcgtcgactcagctgatcctggcgcgcgccaacaatcagaccttcacgtcataccgcatcctccgctcgccgacctcccgcgcccggtccttgagcacccgcagctggccggcggcgtcgtgctgcgcgaacatcttcctcacaaaccatggaggccacaggaggtagcgcaagaggccgctcctgcggaggtgcacgtcggggttgccgcggtacacgtacttgtcgatgcagttgttgcagtcgttggcgaggatacggacctggttcatccacgtgcgcacctgcacgccgtgc

SEQ ID NO: 163939 - DNA, 2133 bp, Zea mays
  Clone ID: MRT4577_81089C.1
cccacgcgtccgcaaggatatactgaggcaaagtttggatcatgatattgggccagctattgctcatttcttgaactgtttcatggggaaagttttaggtgcttctacagagggtagtctaagtgacatgcagtcaaagactctgaagggccatgaaaatagccaaactcaaaagtctactaaaggccataaactgagcaatgctgctgcttcaagaaaaagcttgtcagcttattctcatctaacctctgatggaatttggtttagcattaaggaatttgcaaaatcaaaatatcagtttgaagtgccagatgatgcaaggctttcagccaaaagggtagctgttctccgaaatctttgccaaaaggtaggaataacaattgctgcacgtaaatatgatcttgatgcttcaactccatttgaagcctcagatattttaaatctccaaccagtcgtcaagcattctgttccaacctgtacggaagcaaaaaatcttatggaagcagggaaagtcaggatggctgagggaacattgaatgaggcatatgcattgttttctgaagccttttcactgcttcaacagataactggtcccatgcacaaggatgctgcaaattgttgccggtaccttgctatggttttgtaccatgctggtgatacagctggggcagttgtgcagcaacatagggaactcatcataaacgagagatgtcttggtcttgatcatccagacacagcccacagttatggtaacatggccttattctatcatgggctcaatcaaactgagctggcactgcggcacatgtctcgcacactgctgctgctaagtttggcgtcaggacctgatcacccggatgttgcagcaactcttataaatgttgcaatgatgtaccaggatgccagtaatatgaataccgctctcaggtatcttcaagaagcccttatgaagaatgagcgacttcttgggcctgtccatgttcaaacagctgtgtgctatcatgctctagccattgcatttagttgtatgagcttatataagctttcaattcagcatgaaaagaagacatatgatatactggtaaaacaattaggggaaaatgactcacggactgaagactcaaaaaattggttgaatacatttaagcttcgagaagagcaggtcaacgcccagaagcagaagggccaggaagctaatgcatccgataacgctgttaaattcttgaaggcaaaccctgcagttttacaagcaatgaaggctgctgcgatccaatcaggtggtgtgtcagcaaatgtcaacaggtcgctcaatgctgcagtcgttggagaaggtgtaccacgactgagaggagtggatgagcgagctgctcgagcgactgcagaagcacggaagaaagctgctgcaagaggccttaatgtccgtaatggccctgtggcaaaccatgcgtctgatgaactagctcagattctcaaactcatcaacgctgtttcggggtcttccactcctggctctgcaaagactgaggtatctgcctctgaagggcaggcaacgaatggatgtattcaaaatggaactgacactgaaccgaaggctgcggataccaacgggctatctgcatcggttaagtccactgtcaacgcaccatttggactggggacaacattggagtcgaagaagcagaaatcgaagcaaaagtcgtagaaaacctgtgcttggaatttcctttagcaacagttttggactgtagagtgatttgggtttttgacctttataggattgccacgttcacgtggtggaagagttcatttgtttttgttggaggttttttaggaggtctcaataatcattacaagaaagaagacaattgtttcgaatcatcattgatagaccactgatgagatattggctaatccttaagttaataaatcttcagtcgatacaatacctgtttaaagcatccttgtgatggctgctattgtttgtcgtacggcatatgctggtataccgttaatgtagttcttgatcatcgttctttttctagaaggtatacccgtacaatgttgccaactattttattattgctatcgataattattgaactaggctgagcgctgttgcttggcctggccgtg

SEQ ID NO: 163940 - DNA, 843 bp, Zea mays
  Clone ID: MRT4577_8108C.1
cattgggtacctcgaggccggccgggaaaaagatgcctgaaattctccgcccatcaactcagtcagcaggaagcaacccgcctagcgccctcgatccaaggacctcagagattcggccgtcgccactccggggccaagaaatgctcctcctgctcttcttctctgtcctcgccgccgttgccgccttcctcctcttcaagttcgccaccgtcgtcgatggggacttgacgctcgtatcccgcggtccgccgctgcgggagagggtcgacggcaaggtcgtgtggattactggagctagccgcgggattggggaggttcttgcaatgcacttcgcaaatttaggagcaaagctgatactatctgcacgtaacaaggacgcgcttgcgagagtgaaaaaaaacatcctcactggtgaagaatctctgaaagaagtcgtacatgtggcagaatcatttttttctaatgcaggcgttgactatatggtccataatgcagccttcgaacgtcctaaacggagggctctagaagaaagtgaggaaggtcttaaggctacattgaatgtcaatgtcttcggaactattactttaactcgccttctagcaccttacatgcttgatagagggatgggccattttgttgtgatgagtagtgctgctggaaaggttcctgctcctggtcaggccatttactctgcctccaaacatgctcttaatggttactttgcttctctgcgatctgagttgtgtacaaaaggcattaaggtcactgttatctgccctggaccgattgaaacactacaatcttctgctgcagcttcttcatcgcaaacacattctgctgagc

SEQ ID NO: 163941 - DNA, 518 bp, Zea mays
  Clone ID: MRT4577_81090C.1
gctaaggctacctctgttgaaggagatgacaagtctgaagaaagctctgttcatacacacgaggaaaatgacaactcaagctccgagattcttttcaatccgaatgtgtttacagagaaatcgctgctgacgaagagttggtaaaaagggctggtacatatcttgtagatatagtgatcccaaagtttgttcaggatctttgttcccttgatatctcccctatggatggacagactttaacagatgcattgcatctccatgggataaatattaggtatctgggcaagattgcaggcatggtcaaacatttaccacacctatgggacttgttttctactgagataatagttagatctgcaaagcatgttatcaaggatatactgagacaaagtttggaccatgatattgcgccagctattgctcatttcttaaactgtttcgttgggaaagttttaggtgcttccacaaagagtagtcttagcaacgcacagtcaaaaactctgaagggtcacgaaaat

SEQ ID NO: 163942 - DNA, 1107 bp, Zea mays
  Clone ID: MRT4577_81091C.1
ctgaaggaaaagtgcctctatgggaggctttatgtgaaaagcacaatgcagtgatagagctgttagtagagagtggtgcagagctatcatctggagacacggccttgtatgcttgcatcgctgttgaggaaaatgatgctgagttgttgctggaacacggagctgacgtcgacaagcaggacagtaatggctggtcgccaagagatctagctgatcagcaaggccatgatgacattcaggctctcttcaaatcacgaaaagcacacaggaagcatgcctcaaatggcagagtggcacctatgctgatagggagattcaacagtgagccctcgatgccagatatgagccatgaaaacgccagagtacgcagcgaagttgttccgcagaagctcctccgaaagagggtgagtttccagaattctcttttcggcgtcatctcttcgtcccacgcccaccaggacaccggccgtctgctctcgaaaggcctcgctggaacagagggtccaaattgccgtcacgactccctcatcagggtgacaatcagctgccccgagaagggggggaacgccgcagggaagctcgtgcgcctaccgcggtcgatggccgagcttctcgaactaggtgcaaagaagttcggcatcaagcctggcaaggtcctgacagttgggggtgctgagattgatgaggtggagcttatcagagacggtgatcatattcttctcgtcagtgatgaatgggtgccagatgttgagcaaattaggccttaacaataagtgagccagctgtggtgctcttattgcaatttgacatgatatggggaaacatgcccctgtgaccctgtgtgcatcagtgcatgtcccccatttaaactgaagtgtagcttatgatggttttgaagctgtaggatgtatccagcttggaaatgaatttgtagtcagctggtctgtatgtagtttcgtcatctctttccatgggaagggattcacaaaatgtaattacatgatttcttttttttcctgtctttagatcaagctttctctggaagtgagaaatattcgtgagtcatgaattttgagatattgatcctatcagttcattttagttgct

SEQ ID NO: 163943 - DNA, 3474 bp, Zea mays
  Clone ID: MRT4577_81092C.1
ccgcccacgcgttcgtggctctgttgataatggcaagaagatatcttggaacgaaacattccattcaaaggtagtcgaggctgcaaagcggctccatttgaaggagcatgtggttttggacggttctggcaatcctataaaattagctgctacagtcgaatgcaagggcattgttgggagtgatgacaggcattacattttggatctgatgagagtgactcctcgagattctaactacattggacaagggcaccgcttctgtgtgctgagacctgaacttatagcatcatttgttgaggctgaatccatgaaacaatcgttgaagcagaaggttccagatgctccagttgcaagtacttctgatgctaaggctacctctgttgaagcagatgacaagtctgaagaaagctctgttcatacacacaaggaaaatgacaactcaagctccgagattcttttcaatccaaatgtgtttacggagtacaagcttgatggcagtccagaggaaatcgctgccgacgaagagttggtaaaaagggctggtacatatcttatagatatagcgatcccaaaaattgttcaggatctatgctcccttgatatctcccctatggatggacagactttaacagatgcattgcatctccatgggataaatattaggtatctgggcaagattgcaggcatggtcaaacatttaccacacctatgggacttgttttctactgagataatagttagatctgcaaagcatgttatcaaggatatactgagacaaagtttggaccatgatattgcgccagctattgctcatttcttaaactgtttcgttgggaaagttttaggtgcttccacaaagagtagtcttagcaacgcacagtcaaaaactctgaagggtcacgaaaatagccaaactcaaaagtctactaaaggccctaaactgagccatgctgccgcttcaagaaaaagcttatcaacttattctcatctaacctctgatggaatttggtttagcattaaggaatttgcaaaatcaaaatatcagtttgaagtgccagatgaagctaggctttcagccaaaagggtagctgttctccgcaacctatgccgaaaggtaggaataacaattgctgcacgaaaatatgatatggatgcttcaagtccatttgaggcctcggatatgttaaatctccaaccagttgtcaagcattctgttccaacctgtacagatgcaaagaatcttatggaagcagggaaagtcaggatggctgagggaacattgaatgaggcatatgcattgttttctgaagccttttcactgcttcaacagattactggtcccatgcacaaggatgctgcaaattgttgccggtaccttgctatggttttgtaccatgctggtgatacagccggtgcaattgtgcagcagcatagggaactcatcataaacgagagatgtcttggtcttgatcatccggacacagcccacagttatggtaacatggccttgttctatcatgggctcaatcaaactgaattggcactgcggcacatgtcccgtacactgctgctgctaagtttggcgtcaggacctgatcatacccagatgttgcagcaactctatgttgcacttatgatgtaccatatgaatatactcatctaacctctgatggtatctggtttagcatcttatgaagaatgaacgaaaaatatcagtttgaactgccagatgaagctaggcctatcatgctctggccattgcatttaggtgtatgagcttatataagctttcaattcagcatgaaaagaagacttatgatatactggtaaaacaattaggggaaaatgactcacggactaaagactcaaaaaattggttgaatacatttaagcttcgagaagagcaggtcaacgcccagaagcagaagggccaggaagctaatgcatccgataacgctgttaaattcttgaaggcaaaccctgcagttttacaagcaatgaaggctgctgcgatccaatcaggtggtgtgtcagcaaatgtcaacaggtcgctcaatgctgcagtcgttggagaaggtgtaccacgactgagaggagtggatgagcgagctgctcgagcgactgcagaagcacggaagaaagctgctgcaagaggccttaatgtccgtaatggccctgtggcaaaccatgcgtctgatgaactagctcagattctcaaactcatcaacgctgtttcggggtcttccactcctggctctgcaaagactgaggtatctgcctctgaagggcaggcaacgaatggatgtattcaaaatggaactgacactgaaccgaaggctgcggataccaacgggctatctgcatcggttaagtccactgtcaacgcaccatttggactggggacaacattggagtcgaagaagcagaaatcgaagcaaaagtcgtagaaaacctgtgcttggaatttcctttagcaacagttttggactgtagagtgatttgggtttttgacctttataggattgccacgttcacgtggtggaagagttcatttgtttttgttggaggttttttaggaggtctcaataatcattacaagaaagaagacaattgtttcgaatcatcattgatagaccactgatgagatattggctaatccttaagttaataaatcttcagtcgatacgacaggtcagcaaatgtcaacaggtccctcaatgctgcagtagttggagaaggtgtaccacgactgagaggagtggatgagcgagctgctcgagcgaccgcagaagctcggaagaaagctgttgcaagaggcctgaatgtccgtaatggccctgcggcaaaccatgcgtctgatgaactagctcagattctcaaactcatcaatactgcttcggggtcttccacttcggcatctgcaaaaaccgaggaatctgcctctgaagggcaggcaacaaatggatctgttcaaaacggagctgcaaccgatgcgaagtctgcagatatcaacgtgccacctgcacctgccaaccaaccagttggattgggggcaacattggagttgaagaagcagaaatcaaagcaaaagtcgtagaaaacccgtgcctggaatttcttttatgactgcagttttggactttagggtgatttgtttttttacatttatagaaattccacgttcacgtggtggaagagttcatttgtttctgttggaggttcttaggagagttcaataatcattacgagaaagaagacaattgtttggaatcatcattgatagaccactgatgagataatggctaatccttaagctaataaatctgtagccggtacaacacctgtttaatttttttttgtgcaagattagtatgctaatttgttgtccaaaaaaaaaaaaaaaaaaaaaaaaaaaaaaaaaaaaaaaaaaaaaaaaaaaaaaaaaaaaaaaaaaaaaaaaaaaaaaaaaaaaaa

SEQ ID NO: 163944 - DNA, 240 bp, Zea mays
  Clone ID: MRT4577_81093C.1
tcttgccttctcgaatcggctgcaaccccacctcataccccacctcctcctccgctagggtttgggtgcgaggatcgacagtgtcgaccgctcctagtcttgcctaccgaggcccatgtgcctttctgattgtaacgtcactctatctcagttgcttctactctgttcatactaggctacttcgcacccattcattaaccaacatggtctatggctcgattgattctgttacttctagtc

SEQ ID NO: 163945 - DNA, 3132 bp, Zea mays
  Clone ID: MRT4577_81094C.1
aattcggcacgaggttgaactctcctccctcgcccgcgcgtctccgccgccccaccggccaccgcccgcgcctccgccgcggcagctgtccaaaagctgaaaatagatagaatcacgagggggggattgcctagacaacgatccttagttaatcaaacacgggctgccagattcgggggggcgttcgcgttcctaccctctcatcactctccccgtaaaaccccggctgggtttatctcatcgccgccgggcggcgagcggtgggaggcaatggcagggtgggggccctccaggctgccgacgtgcgggccgtggggccgcggcgtggcgctggagagggagctgtcgcgggacggcagccactacagcatctccagcggcatcctgccgtcgctcggcgcgcgcagcaaccgccgcgccaagctcaggcccttcatcgtctcgccctacgaccgccgatacagatgctgggagacttttctcataattcttgtgatatactctgcatgggtttccccatttgagtttggcttcattcggaaaccgacgggcgccctagctgcagtggacaatgtcgtgaatgctttcttcgcagtggacatcatcctgaccttctttgtagcttacttggatagaatgacatacttgcttgaagatgatccaaaaaggatagcttggcggtatactaccagttggtttgttcttgacgtagcctccaccatccccagtgaatttgctcggaagatactgccaccaaacctcaggtcatatggatttttcaacatgcttcgactatgtcgtctccgtagcaatcagcttctcttagcaaggggggagcaacatagacatttccattacttctgggtggtcgatgtccagcccatatgtgtcacgctttttgaggtccactgttcggcatgcttctactatcttctcgctgacaggtatcctaactcaacggatacgtggattggtaattcgatgcctgattttcgtcagcggggtatgtgtattcgatatgtagtgtcagtgtatttgtcaatcactacgcttacaactgtgggttatgtgcatttgcacgtggagaacacaagggatgcccctgtgaccctgtgtgcatcagtgcatgtcccccatttaaactgaagtgtagcttatgatggttttgaagctgtaggatgtatccagcttggaaatgaatttgtagtcagctggtctgtatgtagtttcgtcatctctttccatgggaagggattcacaaaatgtaattacatgatttcttttttttcctgtctttagatcaagctttctctggaagtgagaaatattcgtgagtcatgaattttgagccctaaggctataagatccagcatttctcagtatctatttttcaatcttgtccaaaaggtttacttgtttgaaggggtgtccaatgacctcatttttcactggtttctgagatgaaagctgaatattttccacctagggaagacgtgattttgcagaatgaagcacccacagacttctatattttagttaccggtagcgcggagttgatagagttgcgaaatggcggggaacagatggctggagtggctaaggcaggagatgttgttggagaaattggggttctttgctataggccccaactattcacagttcgaacaaaatcattatgccagcttctgcgtatgaatcgcactgcatttctcagccttgttcaatccaatgttgcagatggaacaataataatgaacaaccttatgcagttactaaaacagcagaaagacaacagtgtaatggtgggtgttcttaaggagattgagaacatgctagcgcggggtcgtctggacttgccagttaccctctgttttgcggtaaataaaggagatgattttatgttacaccaacttttgaagcgtggtttggatccaaatgaatcggataacaatgggcatacagcactgcatatagctgcttccaaaggagacgaacaatgtgtcaagcttcttctagagcacggagctgatccaaatgctagagactccgaaggaaaggtgcctctatgggaggctttatgtgaaaagcagaatccagtggtagagctgctagtacagagcggtgcggggctatcatctggagacgtggccttgtactcttgcgtcgctgttgaggaaaatgaccctgagctgcttgagaacattatccgttacggcggcaacgtaaacagctcaatgaaagacggaaccacgccgctgcaccgcgcggtctgtgacgggaacgtccagatggttgagttgttgctggaacacggagctgacgtcgacaagcaggacaacaatggctggtcggcgagagatctagctgatcagcaaggccatgatgacattcaggctctcttcaaatcacgaaaagcacacaggaagcatgcctcaaatggcagagtggcacctatgctgatagggagattcaacagtgagccctcgatgccagatatgagccatgaaaacgccagagtacgcagcgaagttgttccgcagaagctcctccgaaagagggtgagtttccagaattctcttttcggcgtcatctcttcgtcccacgcccaccaggacaccggccgtctgctctcgaaaggcctcgctggaacagagggtccaaattgccgtcacgactccctcatcagggtgacaatcagctgccccgagaagggggggaacgccgcagggaagctcgtgcgcctaccgcggtcgatggccgagcttctcgaactaggtgcaaagaagttcggcatcaagcctggcaaggtcctgacagttgggggtgctgagattgatgaggtggagcttatcagagacggtgatcatattcttctcgtcagtgatgaatgggtgccagatgttgagcaaattaggccttaacaataagtgagccagctgtggtgctcttattgcaatttgacatgatatggggaaacatgcccctgtgaccctgtgtgcatcagtgcatgtcccccatttaaactgaagtgtagcttatgatggttttgaagctgtaggatgtatccagcttggaaatgaatttgtagtcaaaaaaaaaaaaaaaaaaaaaaaaaactcgagggggggcccg

SEQ ID NO: 163946 - DNA, 394 bp, Zea mays
  Clone ID: MRT4577_81095C.1
ggacctaacatgcccatttactctccaaatacgcagacttgagttaactctctggggcaaaaagccctctgctaaaacatgcaacacgtgtcgggcagacggcatagcaccaatacgagctctcacgggggtgattacagagtgggggccataccagacctaatcatctatggcgtccatttttcggtaaccttgatcgcccatttcttcctagcgaaactaatgttcgcggtgccctctctggcaaccgttgttatatatggccaggcctcgtctctctggaccttcctagcttgggtttttgtcaaagctgctactagaatgtgctcaaatggcccagagtgtggaatcggtccacataaactattgctttgaacatcgaccactttgagac

SEQ ID NO: 163947 - DNA, 1053 bp, Zea mays
  Clone ID: MRT4577_81097C.1
cctcgaggccggccgggggcttaccactcgccattcctaagtcctaactacctccacccccgcacgcacaactggccgcaccaaggcaaagctagaagaagacaacgcaaagggagaggacagaggaggagcagaggacgatgggcagcggcggcgctaacactgcccccctcatcaccccctacaagatgggaaaattcgatgtttcccacagggtagtcctcgcaccactgacgagacagcggtcctacggcaacgttcctcagcctcatgccatactgtactatcagcagagggcgactaaaggaggtcttctgatagctgaggccacgggggtttcagacactgcccaagggtgcgtctgtcgtctgctagaccatcaggctactacggctgcttgaaatctgtgtggtcatgctaaatttcatcattcagtagtttagtcgatgtctgaataaagatgtgttttctgtatgcgcacaaggtacaaggacactcctggcatttggacccatgagcaagtcgaagcatggaagccgatcgtagacggggttcaccagaaaggagggatatttttctgtcagatttggcacgtagggagagtctccaattccagtatgtttacgacctctaacgcagatcggttctcaaagctataaatttaacggcagtctagctagtcagcttgcaagagaaaattggattcagagttatccatgaagtcttcatggcaacattagctgtgtttgtcatagaccaagatgtttatgaaagcgctcatactatttgtactacagtttttttttgtaataaaagtgccattataccgaccaatgttaaatgttccaatgcagcttttcagcctaatgggcaggctccaatttcaagcaccgataagccactaaagcctcaagtgagagccaatggtatagacgtggctactttcgcagttcctagacgcttagagactgatgaaatccctttggtcgtcaatgatttcagggtagctgctcgaaatgcgattgaagctggatttgatggtgtcgaaatcca

SEQ ID NO: 163948 - DNA, 529 bp, Zea mays
  Clone ID: MRT4577_81098C.1
gcgaacaaattttgttatctctctttttggtggtctagagaccatgttacagctgtttgaactatagagtctgaatctgtccaaatctggacagcaatgtgtgtttgaattaactgactttgatacacattgaatcaccttgagatgattataaatgaattgtctacaatcatattagctttctaaaaagtctaggatcacctgatttggatgtctgaaactccagttatggaattttaaagtgagtggccgaattctgtccaaatctggacagaaattgcgtttagtactgtttgacatttctatatgtcgaatctcactgtgatgataataccaaaattgtggaggactttctaagctttccagaaagtcatagtttactatttttggatgcatattttgtgagttatgaataaaacagttaactgttgtgctgctgtctagaaaatttgcatgtgttaaactgatttcttggagtcatttttgtttgcctaggaaggattagttaatccttggtccttgattgata

SEQ ID NO: 163949 - DNA, 842 bp, Zea mays
  Clone ID: MRT4577_81099C.1
ggtccgtggccatggcgtcgtccatgctctccgctaccaccgtgccactccagcaggggggcggcctgtccgagttctccgggctcaggagctccgcgtcgctgcccatgcgccggaatgccacctccgacgacttcatgtccgccgtctccttcaggacccacgcggtcggtacgagcggcgggccgcggcgggcgccgacggaggcaaagctgaaggtggccatcaacgggttcggccgcatcgggcgcaacttcctgcggtgctggcacgggcgcggcgacgcgtcgcccctcgacgtcatcgccatcaacgacaccggaggcgtcaagcaggcgtcccacctgctcaagtacgactccacgctcggcatcttcgatgccgatcgggtgcccaccccgaacgtctccgtcgtcgacctcgtcgtgcaggtctccaagaagaccctcgccgaggaggtgaaccaggcgttccgcgacgccgcggccaacgagctcacgggcatcctcgaggtctgcgacgtgccgctcgtgtccgtcgacttcaggtgctccgacgtctcctccaccatcgacgcctccctcaccatggtcatgggcgacgacatggtcaaggtcatctcctggtacgacaacgagtggggctactcgcagagggtcgtcgacctcgctgacatctgcgccaaccagtggaagtgaagcgttgcattgtaatagcactttgtaactcctcaccctccacagggctttgggattcaccccgaaatgactcactttcggtgaaattcacccgtttcggcgaggtcgtccgaatataccggccaaatgtttccattggatttc

SEQ ID NO: 163950 - DNA, 466 bp, Zea mays
  Clone ID: MRT4577_8109C.1
ctgcagaggagcacgacgccaggccgcgggaaacgagctgcgcgggggcaccccgcatcacatcgaccgagccggcagagccaagagacctgccacgcggaggcgcacacgcccgaagagggggctgctgccgcctccatagcaggagcccctgtacgcacagctagacgtacagcaaccaggctggcagacaggagcgggcacacggactacgacaggcaagaggacctgaaccgcgctccaagcgaagagctgcaaccagcggagccgctcgagcagagtgagcacacggtcgggggccgcacggagctagaggaaacgagccaggaggagcagaccacaaagagaccacgcacgcaaatgggatggagcagaacactccaacacagccagaatagcaaataagaacaaactgcaaaagccaccgcccaggtcaaaaaagcaacggccaaaaccacaaacgact

SEQ ID NO: 163951 - DNA, 488 bp, Zea mays
  Clone ID: MRT4577_810C.1
gctgcgcgcgtggctcctggtcccgcacgcgaggctcgtctccaacgaactgtacccagcccggagcatgcgagcattgaatcttgccccgcacgtggcagcttggcacagcctcctggtacgcattctgtgtcatgacgagcgtggccgcgtcgtgagggaggccaccctgtaggatgtggtgaacgcgtaccacggcgaggataacgacgccagaaaggccaagccgtctgcctcctatattgacagacaggtgaacaggagagaatgcgtcatggagccgagggtaggggagacaaacgcgctggtacagtggcgtgaaagtggatctgaaaacaaggaaggtgcatcattccggatgggtggacggaccgaaccagggggatggcgggatgaacaggagtgggatgaattgagaaaacacggcgcaggaccaaaagtaggaggattgaacgaccttgacaatgaagccatcttcggtgatggag

SEQ ID NO: 163952 - DNA, 669 bp, Zea mays
  unsure (1)..(669): unsure at all n locations
  Clone ID: MRT4577_81101C.1
cgcgcaccacaaacgcgcgcgcccccaatccgccatctcgnatcgnatatacgcgcggggttgtgggctagcatcgtccccttgtcttcagcgtccggtccgtggccatggcgtcgtccatgctctccgctaccaccgtgccactccagcaggggggcggcctgtccgagttctccgggctcaggagctccgcgtcgctgcccatgcgccggaatgccacctccgacgacttcatgtccgccgtctccttcaggacccacgcggtcgggacgagcggagggtcgcggcgggcgccgacggaggcgaagctgaaggtggccatcaacgggttcggccgtatcgggcgcaacttcctgcggtgctggcacgggcgcggcgacgcctngcccctcgacgtcatcgccatcaacgacaccggcggtgtcaagcaggcgtcccacctgctcaagtacgactccacgctcggcatatttgacgccgacgttaagcccgttggcgacaacgccatctccgttgacggcaaggtcattaaggtcgtgttcgaccgtaaccccagcaacctgccgtggggcgagcttggcatcgaccttgttattgagggcaccggagtatttgttgaccgtgagggcgcggggaagcacattcaggcgggtgccaagaaggtgctta

SEQ ID NO: 163953 - DNA, 367 bp, Zea mays
  Clone ID: MRT4577_81102C.1
ctgttgcccattctgctgccgcataaatcttcttgagcacactgaaaatgtacgtgtaaggagtaacaagccatgcaagaggcacatggagcgaccagtcaatagatcctgatggtccctatctgtttgactgagcgacacgtcacacacacattgatggtgcaccggctgcatacatggtgccatgaccatggcttccggcttgctcacactgaggaactgtatccaattgttcaaacaagtggacaacgaaccaatgttcatcaagaggtgattccaagttaaccccatggacaaccaaccataattcaagcttgggatacggacgaatagcaagggcaaaaataaaaactccggcccaaccctt

SEQ ID NO: 163954 - DNA, 1119 bp, Zea mays
  Clone ID: MRT4577_81103C.1
atgcgctggaatgccacctccgacgaattcatgtccgccgtctccttcaggaaccacgcgatcggcaccagcggcggcaggttgaggcgggcgccgacagaggcaaagctcaaggtggccatcaacgggttcggtcgcatcaggcgtaacttcctgcggtgctggcacgggcgcgacgacgactcgcccctcgacgtcatcgccatcaacgacaccggggacgtcaagcaggcgtcgcacctgctcaagtacgactccttgctcggcatcttcgatgccgatgccgagcttgtcggcgacaacgccatctccgtggacgacaaggtcatcaaggtcgtgtccgaccgcaaccccagcaacctgccgtggggcgagctcagcgtcgacctcttcatcgagggcaccggcgtcttcgtcgaccacgagggcgcagggaagcacatccaagtgggcgccaagaaggtgctcatcactgcgcccgacaagggcaacatccccacctacgtcgtcggcgtcaatgccgaccagtacaacccggacgagcccatcatcagcaacacctcctgcacgaccaactgccgcgtgccattcgtcaaggtcctcgaccaaaagttcggcatcatcaagggcaccatgaccaccacccacttctacacctgcgatcagaggctgctggacgcgagccaccgcgacctgcgccgcgcccgcgccgccgcgctcaacatcgttcccacgtccaccagcgccgccaaggctgtcgtgttggtgctccccaacctcaagggcaagctcaacgggatcgcgctgtgggtgcccaccccgaacgtctccgtcctcgacctcgtcgtgcaggtctccaggaagacgctcgccgaggaggtgaaccaggcgttccgcgacgccgcggctaacgagctgcagggcattctcgaggtctgcgatgtgccgctcgtgtccgtcgacttcaggtgctccgacttctcctccaccatcgacgcctccctcactatggtcatgggagatgacatggtcaaggtcatttcctggtacgacaaagagtgggggtactcgcaaagggtcgtcgacctcgatgacatttgcgccaaccagtggaagtga

SEQ ID NO: 163955 - DNA, 271 bp, Zea mays
  Clone ID: MRT4577_81105C.1
cccacgcgtccgtgcatagtttattaatttctaatgtttaatttaagtctagttaagttaagaaaaacattaatgttgtacttagtggtatattaatatcttgtattgtttgagtgttgtaatgtctcgccactaaatatttaatcctctttggtgtagcaataattagtcatgtgctattcctatttatattcattcatgtgcattatacagcttattaggtgcgctagttgatcgcgtaatacggaagacgagccaagtcgatcccaag

SEQ ID NO: 163956 - DNA, 1498 bp, Zea mays
  Clone ID: MRT4577_81106C.1
gtcatcttgtctcgatcctctgctccgtgttcatggcgacgtccatgctctccgccaccacggtgccactccagcaggtccaggggggcggcctgtccgagttctccggcctcgtcaggagctccgcgtcgctgccgatgcgccggaatgccacctccgacgacttcatgtccgccgtctccttcaggacccacgcggtacgtgcctgccggccgatcgatccgcgcgcggtcgtgccgcatcgtagcgtaggaatgtgttagtagcagcacgatcgaacggcttggggtcggattcacatgtctgcgccgctgctgcccctggctgcctggctcgcttgcttgtgcttgtgcatcgatcaggtcggcaccagcggcggcgggccgaggcgggcgccgacggaggcgaagctcaaggtggccataaacgggttcggccgcatcgggcgcaacttcctgcggtgctggcacgggcgcggcgacgactcgcccctcgacgtcatcgccatcaacgacaccgggggcgtcaagcaggcgtcgcacctgctcaagtacgactccacgctcggcatcttcgacgccgacgtcgagcccgtcggcgacaacgccatctccgtggacggcaaggtcatcaaagtcgtgtccgaccgcaaccccagcaacctgccgtggggcgagcttggcgtcgacctcgtcatcgagggcaccggcatcttcatcgaccgcgagggcgcggccaggcgggcgccaagaaggtgctcatcacggcgcccggcaagggcgacatccccacctacgtcgtcggcatcaatgccgaccagtacaacccggacgagcccatcatcagcaacgcctcctgcaccaccaactgcctcacgccattcgtcaaggtcctcgaccaaaagttcggcatcatcaagggcaccatgaccaccacccactcctacaccggcggccagaggctgctggacgcgagccaccgcgacctgcgccgcgcccgcgccgccgcgctcaacatcgtgcccacgtccaccggcgccgccaaggccgtcgtgctggtgctccccaacctcaacggcaagctcaacgggatcacgctgcgggtgcccaccccgaacgtctccgtcgtcgacctcgtcgtgcaggtctccaggaagacgctcgccgaggaggtgaaccaggcgttccgcgacgccgcggccaacgagctgcagggcatcctcgaggtctgcgacgtgccgctcgtgtccgtcgacttcaggtgctccgacgtctcctccactatcgacgcctccctcactatagtcatgggagacgacatggtcaaggtcatctcctggtacgacaacgagtgggggtactcggagtctcgcagagggtcatcgacctcgctgatatttgcgccaaccagtggaagtgaagcattgcattgcattgtaatatcttgtaaacaaagcacaagaatggacacattgtcacaatgaaatcgttttgtggac

SEQ ID NO: 163957 - DNA, 1792 bp, Zea mays
  Clone ID: MRT4577_81107C.1
ccggccgggatcgtcatcttgtcttgatcctctggtccgtggccatggcgtcgtccatgctctccgctaccaccgtgccactccagcaggtatgcctctcgtgccgcgtctctctctctctctctctccacccgtgctgctacgtaggatcaatggtttggcttgcactctagctgctccaccggacaagcgagtagtgatggttctttgatgtgtactccaggggggcggcctgtccgagttctccgggctcaggagctccgcgtcgctgcccatgcgccggaatgccacctccgacgacttcatgtccgccgtctccttcaggacccacgcggtcggcacgagcggcgggtcgcggcgggcgccgacggaggcgaagctgaaggtggccatcaacgggttcggccgcatcgggcgcaacttcctgcggtgctggcacgggcgcggcgacgcctcgcccctcgacgtcatcgccatcaacgacaccggcggtgtcaagcaggcgtcccacctgctcaagtacgactccacgctcggcatcttcgacgccgacgtcaagcccgtcggcgacaacgccatctccgtcgacggcaaggtcatcaaggtcgtgtccgaccgcaaccccagcaacctgccgtggggcgagctcggcatcgacctcgtcatcgagggcaccggcgtcttcgtcgaccgcgagggcgcggggaagcacatccaggcgggggccaagaaggtgctcatcacggcgcccggcaagggcgacatccccacctacgtcgtcggcgtcaatgccgaccagtacaaccccgacgagcccatcatcagcaacgcctcctgcaccaccaactgcctcgcgccattcgtcaaggtgctcgaccaaaagttcggcatcatcaagggcaccatgaccaccacccactcctacaccggcgaccagaggctgctggacgcgagccaccgcgacctgcgccgcgcccgcgccgccgcgctcaacatcgtgcccacgtccaccggcgccgccaaggccgtctcgctggtgctccccaacctcaagggcaagctcaacgggatcgcgctccgggtgcccaccccgaacgtctccgtcgtcgacctcgtcgtgcaggtctccaagaagaccctcgccgaggaggtgaaccaggcgttccgcgacgccgcggccaacgagctcacgggcatcctcgaggtctgcgacgtgccgctcgtgtccgtcgacttcaggtgctccgacgtctcctccaccatcgacgcctccctcaccatggtcatgggcgacgacatggtcaaggtcatctcctggtacgacaacgagtggggctactcgcagagggtcgtcgacctcgctgacatctgcgccaaccagtggaagtgaagcgttgcattgtaatagcactttgtaactcctcaccctccacagggctttgggattcaccccgaaatgactcactttcggtgaaattcacccgtttcggcgaggtcgtccgaatataccggccaaatgtttccattggatttcaattattagtcaactctagagttgaaacaaacatacaagttcttcattcaataatcaatatagaagtgcatatctgtttcctcttcatgcctcttgaccaagttttggccaaaaactcagtcaaatcttagttaaatctgtttcctctttttttctctctatcacgtgaattgtaataggtttggcctggtaggcctacatctgcagatagtttgcgaagggatttacatacggatttcacaagctcagttacactgc

SEQ ID NO: 163958 - DNA, 372 bp, Zea mays
  Clone ID: MRT4577_81108C.1
ggcaaggtcacccgtccgcacggcaactccggcgtcgtccgcgccaagttcaagtccaaccttccgcctgagtccatggggcgcaaggtcagagtgttcatgtacccgagcagcatctaaggttttattggagtacagatggactaggagtggccatgcttatttcttacttttctctgagcttaaaatgccatgtgttggcaagttagattgttcaagtactgaacctgtggaagtcctgccaaaatttgttgtcaaacggatgaactattgtcgtaatgttatgccagcagcatatctcattttgccccgtgccatcggtgtctgattgcagtattttcaaattcatatagccatattttacacttgttt

SEQ ID NO: 163959 - DNA, 626 bp, Zea mays
  Clone ID: MRT4577_81109C.1
ccggccgggatcttgtcttgatcctctggtccgtggccatggcgtcgtccatgctctccgctaccaccgtgccactccagcaggggggcggcctgtccgagttctccgggctcaggagctccgcgtcgctgcccatgcgccggaatgccacctccgacgacttcatgtccgccgtctccttcaggacccacgcggtcggcacgagcggcgggccgcggtgggcgccgaccgaggcgaagctgaaggtggccatcaatgggttcggccgcatcgggcgcaacttcctgcggtgctggcacgggcgcggggacgcctcgcccctcgacgtcatcgccatgaacgacaccggaggcggcaagcaggcgttccacctgctgaagtacgactccacgctcgggatcatcgatgccgacgtcaagcccgtcggcgacaacgccatctgcgacgacgggaaggacatcaaggttcgtgggcgaccgcaaccccacaaaccgtggcgtggggacgagctcgggatgggacctcggcatcgagggcaccggcgacttcgtctaccgggagggcgcggcgaaccacatccaggcgggggacaagaaggtgctcatcacggcgcccggcaagggcga

SEQ ID NO: 163960 - DNA, 1479 bp, Zea mays
  Clone ID: MRT4577_8110C.1
tccggccggggtttgactggccccggcttcgcctgcgagacactggtcaagcgacgcaagggaaggatgtggttagctagcagcctgaaattctccgcccatcaactcagtcagcaggaagcaacccgcctagcgccctcgatccaaggacctcagagattcggccgtcgccactccggggccaagaaatgctcctcctgctcttcttctctgtcctcgccgccgttgccgccttcctcctcttcaagttcgccaccgtcgtcgatggggacttgacgctcgtatcccgcggtccgccgctgcgggagagggtcgacggcaaggtcgtgtggattactggagctagccgcgggattggggaggttcttgcaatgcacttcgcaaatttaggagcaaagctgatactatctgcacgtaacaaggacgcgcttgcgagagtgaaaaaaaacatcctcagcaagaatccagatagcagagttgaaatgttacccatggatttatcagctggtgaagaatctctgaaagaagtcgtacatgtggcagaatcatttttttctaatgcaggcgttgactatatggtccataatgcagccttcgaacgtcctaaacggagggctctagaagaaagtgaggaaggtcttaaggctacattgaatgtcaatgtcttcggaactattactttaactcgccttctagcaccttacatgcttgatagagggatgggccattttgttgtgatgagtagtgctgctggaaaggttcctgctcctggtcaggccatttactctgcctccaaacatgctcttaatggttactttgcttctctgcgatctgagttgtgtacaaaaggcattaaggtcactgttatctgccctggaccgattgaaacactacaatcttctgctgcagcttcttcatcgcaaacacattctgctgagaaacgtgagaaacgtgtttcggtggaacggtgtgttgaactgacaattgttgctgctactcatggactgaaagaagcatggatatcatatcagcctgtgctgactgttatgtacttggtgcaatacatgccaacaattggttattggctaatggacaaggttggtgcaaaacggctggatgcggccgcaaagaaagggaacacgtatagttggagtctcattttcagcagcaagaagtcagcatgaccaaattgctcgtagctgctatcaccatctttctcgattcatatggtcacgtgacttatattgttgtacgcaaaaaggtcggcctgaaaaggatcagatcatgtatagaaacaatatagtttagtgaaaaattggacccgtcactatgaccaataattatgattcagttgtgttagatttattgtgtggcgtaatgatgtactgtgtgtaatatatctttgtaataagcatatacccattttactctattattaatacagctttctaccctgtctagggctaaagttttcattct

SEQ ID NO: 163961 - DNA, 818 bp, Zea mays
  Clone ID: MRT4577_81110C.1
ttgggaccctcgaggccggccgggaaacgcgcgcgcccccaatccgccaactcgtatcgtatatacgcgcccgcttgttggctagcttcgtcatcttgtcttgatcctctggtccgtggccatggcgtcgtccatgctctccgccaccaccgtgccactccagcaggggggcggcctgtccgagttctccgggctaaggagctccgcgtcgctgcccatgcgccggaatgccacctccgacgacttcatgtccgccgtctccttcaggacccacgcggtcggcacgagcggcgggtcgcggcgggcgccgacggaggcaaagctgaaggtggccatcaacgggttcggccgcatcgggcgcaacttcctgcggtgctggcacgggcgcggcgacgcctcgcccctcgacgtcatcgccatcaacgacaccggaggcgtcaagcaggcgtcccacctgctcaagtacgactccacgctcggcatcttcgacgccgacgtcaagcccgtcggcgacaacgccatctccgtcgacggcaaggtcatcaaggtcgtgtccgaccgcaaccccagcaacctgccgtggggcgagctcggcatcgacctcgtcatcgagggcaccggcgtcttcgtcgaccgcgagggcgcggggaagcacatccaggcgggggccaagaaggtgctcatcacggcgcccggaaagggcgacatccccacctacgtcgtcggcgtcaatgcccgaccagtacaaccccgacgagcccatcatcagcaacgcctcctgcaccaccaactgcctcgcgccattcgtcaaggtcctc

SEQ ID NO: 163962 - DNA, 410 bp, Zea mays
  Clone ID: MRT4577_81111C.1
caccaaggaggacgtcgcgtggtacgccggcaagcgcatggcgtacatctacaaggccaagaccaagagcagtgagacccgctacaggtgcatctggggtaaggtcacccgcccgcacggcaactccggtgtcgtccgcgccaagttcaagtcgaacctcccgcctgagtccatggggcgcaaggtcagagtgttcatgtaccctagcagcatctaaggttttgttggagtaaagatggactagaaatggccatgcgtatttcttacttctctgagcttaaaatgccatgtgttggcaacttagattgttcatgtactgaacctgtcgaagttctgccaaaatttgttgtcgaacggatgaactattgtcatattgttatgcccgcagcagagcatatttttgccccgtg

SEQ ID NO: 163963 - DNA, 2054 bp, Zea mays
  unsure (1)..(2054): unsure at all n locations
  Clone ID: MRT4577_81112C.1
ccggccgggatcttgtcttgatcctctggtccgtggccatggcgtcgtccatgctctccgctaccaccgtgccactccagcaggtatgcctctcgtgccgcgtctctctctccacccgtgctgctacgtaggatcaatggtttgcttgcactctagctgctccaccggacaagcgagtagtgatggttctttgatgttgtactccaggggggcggcctgtccgagttctccgggctcaggagctccgcgtcgctgcccatgcgccggaatgccacctccgacgacttcatgtccgccgtctccttcaggacccacgcggtacgtgcctgccccggccgatcgatccaccctcatgcagccgcgtaggaaagtagctttgtatcgtattgcacgtacggccggctttggggattcacacgtgtgtgtatgcgctgctgctgcctggcttgctcgctcgctcgctcgtgcatcacatcaacaaccaggtcggcacgagcggcgggtcgcggcgggcgccgacggaggcgaagctgaaggtggccatcaacgggttcggccgcatcgggcgcaacttcctgcggtgctggcacgggcgcggcgacgcctcgcccctcgacgtcatcgccatcaacgacaccggcggtgtcaagcaggcgtcccacctgctcaagtacgactccacgctcggcatcttcgacgccgacgtcaagccccgtcggcgacaacgccatctccgtcgacggcaaggtcatcaaggtcgtgtccgaccgcaaccccagcaacctgccgtggggcgagctcggcatcgacctcgtcatcgagggcaccggcgtcttcgtcgaccgcgagggcgcggggaagcacatccaggcgggggccaagaaggtgctcatcacggcgcccggcaagggcgacatccccacctacgtcgtcggcgtcaatgccgaccagtacaaccccgacgagcccatcatcagcaacgcctcctgcaccaccaactgcctcgcgccattcgtcaaggtgctcgaccaaaagttcggtgcgtatcgatcttcttcactcaactcgagtcgagcgccgcaaacttgatgctccctccttgtgattattgcaaatcggacaaacctataataacggtgtatatatatatatatatatatatatgcatggatcaaggcatcatcaagggcaccatgaccaccacccactcctacaccggcgaccagaggctgctggacgcgagccaccgcgacctgcgccgcgcccgcgccgccgcgctcaacatcgtgcccacgtccaccggcgccgccaaggccgtctcgctggtgctccccaacctcaagggcaagctcaacgggatcgcgctccgggtgcccaccccgaacgtctccgtcgtcgacctcgtcgtgcaggtctccaagaagaccctcgccgaggaggtgaaccaggcgttccgcgacgccgcggccaacgagctcacgggcatcctcgaggtctgcgacgtgccgctcgtgtccgtcgacttcaggtgctccgacgtctcctccaccatcgacgcctccctcaccatggtcatgggcgacgacatggtcaaggtcatctcctggtacgacaacgagtggggctactcgcagagggtcgtcgacctcgctgacatctgcgccaaccagtggaagtgaagcgttgcattgtaatagcactttgtaactcctcaccctccaccgggctttgggattcaccccgaaatgactcactttcggtgaaattcacccgtttcggcgaggtcgtccgaatataccggccaaatgtttccattggatttcaattattagtcaactctagagttgaaacaaacatacaagttcttcattcagtaatcaatatagaagtgcatatctgtttcctcttcatgcctcttgaccaagttttggccanaaattcagtcaaatcttagttaaatctgtttccatctttttttctctctatcacgtgaattgtaataggtttggcctggtaggcctacaactgcagatagtttgcgaagggatttacat

SEQ ID NO: 163964 - DNA, 2565 bp, Zea mays
  Clone ID: MRT4577_81113C.1
cccacgcgtccgcccacgcgtccggaagaagaggaagatgaagttgttaggatgaggaacactcctgatttctttaataagatagttgatagcatatgtcctaccgtatttggtcatcaagaaattaagagggccgtgcttcttatgcttttgggtggtgttcataagataacacatgaagggatcaaccttagaggtgacatcaatgtctgtattgttggtgacccaagctgtgcaaagtctcagttcctaaaatatactgctggtattgttccaagatctgtttacacgtcagggaagtcatcatcagctgctggtctgacagcaactgttgctaaagaaccagagactggtgaattctgtattgaggctggtgccctgatgctagctgataatggtgtttgttgtatcgatgaatttgataaaatggacattaaggatcaggtcgctatacatgaagcaatggaacagcaaacaattagcattaccaaagcaggaatacaggcaactttgaatgcacgaacatcaattttagctgcagcaaatccgaccggaggccgttatgacaagtcaaaaccacttaagtacaatgttgcattgcccccagctattctttcaagatttgatctggtctacatcatgatcgatgaacctgatgaaaacactgactaccacattgctcatcacattgtaagagtccatcagaaacgtgaagaagcacttgcccctgcatttagcaccgcacaactgaagcgttatatttcttttgcaaaatctttgaaacctcagcttagttcagaagcaaagaaagttctggtggagtcgtatgttacgcttcgtaggggggacagtactcctggaactagggttgcttataggatgacagttcggcaattggaagcattgattcggctgtcagaagctattgctcgaagccatttagaaagagttgttctcccagctcatgtccgcctggcagttaaattgctcaagacatccatcatcagtgttgagtcaagtgaagttgatctctctgacttccaagatgctgaagatggaacaaatgtaccttctgagagtgacgccggacagccagctgaagaagatgctgctcctcagcagcagggtgcagaaaatgaccaagcagcggataatggtaagaagaaattggtaataactgaagaacacttccagagagttactcaagctttggttatgagactaaggcagcatgaagagtcagtcaagaaagatggagatggtttagctggcatgaagcaaggggatcttatcatctggtatgttgagcagcagaatgccaaaggggcatatagttctactgcagaggtgaaggaagaagtgaagtgtatcaaggccattatagagagacttatacagcgggaaggccatcttatagtcattgacgaaggtactgcagccgcagccgaagatggcagtggcgcaaggagaacatcagagagtagaatactggcagttaacccgaactatgttattgattagcaacggcatcttaacatgctgttaacccaagccagttgatgtggtttgctaactgaagctatgattctggtgatgtgtccgttgtgctctagagttgttgtaccatctccgtcactggtgtgctcgttccaagggagcacatgatctccaaaactacatactacgtttagtgatgcaggataattagcatctgtagtcttactaattttgacccgtgtttccctagtgaattttcgtagcaacagctttgatttatcagtcactgagtgctgcaattttcctcgtgccgaattcggcacgagcagaagtggaaggaagcaggcggccaccatggtgaagggacgcacgggacagcgcgtcaggctctacgtccggggcaccatcctcggatacaagaggtccaagtcgaaccagtacgagaccacgtcgctcattcagatcgagggggtgaacaccaaggaggacgtcgcgtggtacgctggcaagcgcatggcgtacatctacaaggctaagaccaagagcagcgagacccgctacaggtgcatctggggcaaggtcacccgcccgcacggcaactcgggcgtcgtccgcgccaagttcaagtccaacctcccgcctgagtccatggggcgcaaggtcagagtgttcatgtacccgagcagcatctaaggttttgttggagtaaagatggactagaaatggccatgtgtttatttctcacttttctctgaacttaaaatgccttgtgttggtaacttagattgttcaagtgctgaacctgtggaagttgtgccaaaatttgttgtcgaacggatgaactattgtcgtaatgttatgccagcagcagatcttaatttgccccgttacatcgatgtctgattgcagtatcttcaaattgaaaggagttccgtttggtatgaatgtgtaatgttctacgctgctctgggatgcttctttcaatatcatttctgcaaaatttattggcaaaaaaaaaaaaaaaaaaaaaaaaaaaaaaaaaaaaaaaaaaaaaaaaaaaaaaaaaaa

SEQ ID NO: 163965 - DNA, 392 bp, Zea mays
  Clone ID: MRT4577_81114C.1
agggccggactgcccttatttgccaaaaaaaaaacaaaccctggccttagttaaaatcccggcccgaaaattgtgggtcccattacattcccgcccccccacccttacaaaatttttaaatgggttttttctccctaagcccaagctccagaattttgaaccttaaaaaacagcttaggaatgggggcccccctgcctgacggccgggcccttgggcctgaaaaggaaagggcccaccccgccccaaagcagggaaaagaggggggccaccggaatggaccaaaagacaacaggggggggggttctggttcggccccccatgagccctttggggaacggggtgggggggccccctcccccaaaggggaaaaatagcttgccggaggggggcc

SEQ ID NO: 163966 - DNA, 859 bp, Zea mays
  unsure (1)..(859): unsure at all n locations
  Clone ID: MRT4577_81115C.1
ttgggtacctcgaggccggccggggctactatcttagtcccagcctcgcctcctctccacgcaacgcagccatctccctaccccgagcccaaatcgacgcccagacgccaacccgtccccaccgccggtgcgaagctggaggaaggggagcatgagctgagcatcgtcgacgctctcctcgaggtgttatcgggccgctgcgagctgcgacgaacctccttcgactcttggcgcctgtaccagcgctttagcttcacctccatgggggcgccgctatggggaagacgcgtgcgctcctcctcgctctccgccaagtgataaattttctcaaatctctacttctccaggttttcaaatgtatctgtagatttgttttcccctgatggttagagtattcaaggttgtgaatatggtgggccgtgcacgctgcccgcggcacggaggcgtcgatccgatcgagagcccttcgcggtggacaaagccttcctcctctccggcaatgagggcatcgtcgctaacgtgaccacgtggcagagctcgctgccccatccttcttcatcttcaccaagtacacagtttacaagattacattttcattacaagatgcttgattgcaaccaatattttcatttctttggtgcttgtgtagaagtatcgccttgcaaagtatgtaccagactctcatgctgaaggtttcaaggacggcaagaaagttcgaggattatgtaccgtaagtgatttttttctcacttgtatcatgtaccaaatgttagttggcgcctggttctcatgaattacatggttgacaaatattctgaaatgtgtttagaggattgcnnaatcatganngcactaagat

SEQ ID NO: 163967 - DNA, 445 bp, Zea mays
  Clone ID: MRT4577_81116C.1
ccggccgagacttgccttccacctcgggtccgaggccatggcgtctcccatgctctccgccaccaccgtgccactccagcaggggggcggcctgtccgagttctccgggctaaggagctccgcgtcgctgcccatgcgccggaatgccacctccgacgacttcatgtccgccgtctccttcaggacccacgcggtcggcacgagcggcgggtcgcggcgctcgccgacggaggcaaagcctgaaggtggccatcaacgggttcggccgcatcgggcgcaacttcctgcggtgctggcacgggcgcggcgacgcctcgcccctcgacgtcatcgccatcaatgatttttttatgcgccacgcacgcgccccacctgttcaagtacgactccacgctcggaatcttcgacctcgcacgtcaagtccgtcgtgcgactacgtcatctc

SEQ ID NO: 163968 - DNA, 889 bp, Zea mays
  Clone ID: MRT4577_81117C.1
cgtccgactctcggcaacggatatctcggctctcgcatcgatgaagaacgtagcaaaatgcgatacctggtgtgaattgcagaatcccgcgaaccatcgagtttttgaacgcaagttgcgcccgaagccttctggcggagggcacgtctgcctgggcgtcacgcccggcggcggaaggagaagtgcaaggaagcaggcggccaccatggtgaagggacgcacgggacagcgcgtcaggctctacgtccggggcaccatcctcggatacaagaggtccaagtcgaaccagtacgagaccacgtcgctcgttcagatcgagggggtgaacaccaaggaggacgtcgcgtggtacgctggcaagcgcatggcgtacatctacaaggctaagaccaagagcagcgagacccgctacaggtgcatctggggcaaggtcacccgcccgcacggcaactcgggcgtcgtccgcgccaagttcaagtccaacctcccgcctgagtccatggggcgcaaggtcagagtgttcatgtacccgagcagcatctaaggttaggtttttgttgaagtaaaggtggactccaaatggccatgcttatttcttctctctgagcttaaaatgccatgtgttggcaacttagattgttcatgtactgaacctgttgaagttctaccaaaatttcttgtcgaacggctgaacagttgtcccaatgttatgctataaacagagcttatctttccccgtgccatcgctgtctaattgcagtatttttctctctccaaattttatagacatattttacacttgtttgcccatgttcgtctaccacatctgaaaatgttggaaacggctttcgtttggtgtgaaaaaaaaaaaaaaaaggcccctagggcc

SEQ ID NO: 163969 - DNA, 1341 bp, Zea mays
  Clone ID: MRT4577_81118C.1
tggggtccataatagcacgcatctggccggcccgggagcccgcgatgtggcgcctctgtacacgcctacacagaaaagcgtctcccatcttgacgacccgtcttcgacctcgctcccacctcgccgcccgatccgacgggctggatcgccggcgaccgaccgttgtcgatacgaagtgcagctgtaggctcttcctgccgatcccctgcgtttgcgttccataatagcacgaccagcgcatctcaccggctcaagagcatccgtggatctgaccggaggaggccgcggctgctactgctcctgctctctcgccgatgtcgagggttcgggacaggacggaggacttcaatgaggccgtccgagtagccgcactctcccatggatacacggaggcccaactggctgcgctgatgtcttctttcatcatccggaagccgtcgcccaaatcgccgttcactaatgccgccatcaagacgcttgagagcatcagggaactcgagaggttcatagtgaagcataggagggattatgtggacctgcatcgcattaccgagcaagagagggataacattgagcatgaaattggtgtttttgtaaaagcatgcaaggaacagattgatatcctaaagaacaggatccaagaagaagagaagaatggaagtggaaagacatggcttggcactagggatgggagttcccggttggacttgatagctcatcagcatggtgtggttctaattttaagtgagcgtctccactcggtaactgctcaattcgatcgtcttcggtccatgcgttttcaagatgctattaacagagctatgccaaggaagaatcagaagagaccagaaaaaaaacctgctgaaccgtccaagtccagtcttgttctaaaatctgatgtatcaaagattgtagatcaggaagcgtccacagcacctatgagagttcaagaacaactactggatgatgaaacaaaagccctccaggtggagttgacaagtcttcttgatgctgtccaagaaacggagacaaagatgatagaaatgtcagcacttaaccatcttatgtcaacacatattctacaacaagctcaacaaatccagtatttgtatgaccaggctgttgaagctacgaataacgtggagcgtgggaacaaggagctatcccaggcgatccagcgcaacagcagcagtagaacctttctcctcctcttcttctttgttctcactttctcggttctttttcttgactggtacaacaactgagttagcatatgaagacattgtatgctgttcatgggaaatggttaaattatgaaagctggtctgtcttgaagtccaa

SEQ ID NO: 163970 - DNA, 756 bp, Zea mays
  Clone ID: MRT4577_81119C.1
ctcgaggccggccgggacgagctctctctcgtctccggcggcggaaggagaagtgcaaggaagcaggcggccaccatggtgaagggacgcacgggacagcgcgtcaggctctacgtccggggcaccatcctcggatacaagaggtccaagtcgaaccagtacgagaccacgtcgctcgttcagatcgagggggtgaacaccaaggaggacgtcgcgtggtacgctggcaagcgcatggcgtacatctacaaggctaagaccaagagcagcgagacccgctacaggtgcatctggggcaaggtcacccgcccgcacggcaactcgggcgtcgtccgcgccaagttcaagtccaacctcccgcctgagtccatggggcgcaaggtcagagtgttcatgtacccgagcagcatctaaggttaggtttttgttggagtaaaggtggactctaaatggccatgcttagttcttctctctgagcttaaaatgccatgtgttggcaacttagattgttcatgtactgaacctgttgaagttctaccaaaatttgttgtcgaacggctgaacagttgtcctaatgttatgctataaacagagcttatttccccccgtgccatcgctgtatgattgcagtattttttctctcgccaaattttatagacatattttacacttgtttgcccatgttcgtctatcacatctgaaattgttggaaacggctttcgtttggtgtgaatgtgtaatgctcttctacgattc

SEQ ID NO: 163971 - DNA, 403 bp, Zea mays
  Clone ID: MRT4577_8111C.1
aaaaaaaaaaaaaaaaaaaaaaaaaaaaaaaaaaaaaaagaaaaaaaaaaaaaaaaagaaacaaaaattaaaaaaacccaacttaccaaaaaaaaaagggccacatttatggccaccttaatttcttcaccttggccggttgttctgcgccgccttttttggaaaaaccctggtggataaaccggggggggcgccctttcttagtcccccttttttccccccctcctttctcccccttgtttttttttttttgggcgccctttccttttttccccccccccgtttgccaacccggaccccccctggcccccctccttaccccccgttttcttgtttggggtcgatgcgccctttcccctccgtgggccaaatccctttggccccccccttcccccccctccct

SEQ ID NO: 163972 - DNA, 176 bp, Zea mays
  Clone ID: MRT4577_81120C.1
atctctagcattatttcaaacacatcaatcagcggtcagcggatattttcgggccttaaagaacacatctctaacattttatttcttctaacccccccccttcaattgcattgtattatcacaacaattaataccatcatatttattctaccatttcaaaataacattactcttaa

SEQ ID NO: 163973 - DNA, 278 bp, Zea mays
  Clone ID: MRT4577_81121C.1
catatcgtcaaatgacagctatgtttatgccgaaggggaaaaatgattcaacggtctaccgatcgatacgtccatggagggtgttggttatgttttgatgacaatgctgttcgaaagcagtcttcgtccgtctacaaggactactatgtactatcatcgtcaagagagatagagagatgacgaccacatgaacagtgcgattatcaagtggaagtttgcttgtaccgatgatgatagttgccggtggaatcgactaggctcagttcagtgtgatctct

SEQ ID NO: 163974 - DNA, 247 bp, Zea mays
  Clone ID: MRT4577_81122C.1
cctgccttatctttgaatgatttagaactgtgtgctaaggaaacatggggggcagggcacggggcctggccaatcatatcctctacatacataatggacatgtcatttactgcttcttgtacaggtggatcgatgggcttaatggtcattcaacatcaaatgtgacttacaatatcctgtcgaatggaaaggttatcttcccacacaatactgcggcgcaccaagggtgcctactactacagggtgg

SEQ ID NO: 163975 - DNA, 435 bp, Zea mays
  Clone ID: MRT4577_81123C.1
cggacgcgtgggctagaatcttttgacatgttaggttttgaagaagtgtcaacgacaggctgcttagtgaaataacacatttttcatttttcttttgttaatcagttgaggtactttatagtactccattccagtatttttaattatgtccacttgattatgaaataaaggtttccttcttaattgaaacttggaattgggaaggtcgctcttaatggctattacttggatccttatatattaatctttaaatagtggagcgagccccaacccatatgtgtacactgggttttatttgagactcaaatatttttatatctccatatccgtgagcgtttcacatttcatttcacgaaaaagcgctattcttctagaagcccacaacagatcactctaacattgcctagccacaacattctttcgactgacggtgat

SEQ ID NO: 163976 - DNA, 362 bp, Zea mays
  Clone ID: MRT4577_81124C.1
cgggttgtcggaatcatcaacacaccaagcgaagctacctatcaacgtcttaacaacaatggctaccaagatattatgggtccgttctcttctttgcctggttgttatccccacaaatgcggtcattatttcacaatgactgacttgcttctaatgccattataccacaaattctccaaccaactacttcaatgggctgtccaaaaaatatctgtgccaacctacaagctacaacaagcgcttgctgcgaacgtcttacaacaaccaatttaccaattgcaacaacaatccttggcacatctaaccatacaaaccattgcaacacaacagctacaacaattcctaccagcactgatccaact

SEQ ID NO: 163977 - DNA, 574 bp, Zea mays
  Clone ID: MRT4577_81125C.1
ccggccggggctcgcctcttcgcttcctgtctggggtgcctctgtccctccatctgtcgcctgaatgaatagcttcactgacgacatggcctagagcgagtgctaagatgtcatggagccgacataggcctgtctactccttcgagtccgccaccaaaggacacccaatcaacctgcttgatcgcaagtgccagccggtgatgcacatttgtcatggctaggactgctgagattaacaagcgactgcttcaactgcacctgaccgaccctcaaggtgatgcccgagcaggacatcaccatggctattgttgacgacgagaggatggacatcaccacctaccactgcatcgccgttatcggcgcctacggacaactcgactgcgtcacgaacatgatgacctggtacgctctcgagcatgactgctcgtgtgatataccaagagactcgaccactgcacggctctaaccatgacaaggacaaggatgtccacacccgaggccatgcagtagagttcttcaccgtatatatgaagcagctgatgccgtatagccacagaggtggataccaagcttc

SEQ ID NO: 163978 - DNA, 624 bp, Zea mays
  Clone ID: MRT4577_81126C.1
agcacaagtctgttcatcttgctgtctttgttgctcatcgtgctccagttctgttcctagctcgctacatatagcgttatactgcatgcccaaaacggaacacatgtttgtgctctcctggccggccagtctcttcattccttgcacagttgcaaatacagttgtgtgacagagataaacagagagtcaaatacgtacataaagagggagccggcccaagggaggaagctatagccaaactggtgtgtggattacaattttgtgtgcttctcctcaccggccagtttgccagaataatggcagcagcttgctcagctccgagaagaaaccagctgtgaggttatcaggaacttgtatggtttcaatttgtttgtggtttttaacacatggcagatcgatcatcctttgcctcaaatgaagtacacatatcgctagtagctcgccttctgcatgctttgggatatgtatgcttcaatataccatcgtgcgtacgtcgtgtgatccctgaattccagaaacatacacacaacatttttttaccatcgatctttattttgatctagactgtattattaatctgaattgagtatatacattgtcatttgtcaaaaaaaaaaaaaaaaa

SEQ ID NO: 163979 - DNA, 334 bp, Zea mays
  Clone ID: MRT4577_81127C.1
ccccctgctctcgagtcgctcctcgcgggcggctctagggcgacaaaccctagctctcacaggcctcccccctcgcttcccctccccgccgccacccgagatggtcgccaacgttcccgcgcggctgccggtgaaggtggcggcgaggttcctgctgccccgcatctcgttgggagctttggtacgacggggcggcggccctggatgggaaggcggcgtcgacctcgtccaacgggtggcgctgcaggtgttggctggccctcccggtcgcgtgggcggcggtggcttctcgcggcatggtctgcctcggcggctgcgccagatctggatcccg

SEQ ID NO: 163980 - DNA, 208 bp, Zea mays
  Clone ID: MRT4577_81128C.1
gtctaacctagctgaaggcccatgggcctattgactgatgcacggggtagcacacgattactatagcgtttcggtactcgaagattcaaaaggttaagagacaacttgcacatcacaaaaacgaagttcacgacacgtccaatgccctgaccactactgctgttgagacgacttagcacaataacgatgagacaccacctgccgagaa

SEQ ID NO: 163981 - DNA, 233 bp, Zea mays
  unsure (1)..(233): unsure at all n locations
  Clone ID: MRT4577_81129C.1
gagagatggaacataaatcttattaataaaagggctagctcattatgggacatcttgcaaatggctgcgaccaaattatgcggttcattacggctagcctaaataaatcatttggaacctttatttggttctataccaactaaagtttagttagcagtgtgatgtttgtttccttagatactantagattagctattacaagtaanaaaaacatgantatctttntatttgag

SEQ ID NO: 163982 - DNA, 229 bp, Zea mays
  Clone ID: MRT4577_8112C.1
aaactgttgagaattgcatgcactcgcaactgctaatccatccacaacgggaaggagatcggagacctaatatatagtgacaaacaaacaaagaaagaattacagatggaggcccaagctaacggtctccttctggcggcccaattcgcacctacctagcttcttcttctccggcgacgcggacgagcacgacgagagcgagggcgagggggacaacaagcccatcgag

SEQ ID NO: 163983 - DNA, 440 bp, Zea mays
  unsure (1)..(440): unsure at all n locations
  Clone ID: MRT4577_81130C.1
aatctcacactcccagccgctgcacctggcttcttcgccactctctactctcctcgntcactctgccaggtagtcggccagcccctgctgccaatctcccaaaggccgccgccaacctaagttcctaagccacctccaatgggcctcgtctacctgctgaagcaaagccaaccaccgtttcctgcagcctcaatagctccccccccacccccccccaatgccgtccttgttaactttaccttagtcctccgtccttgaaccccttgctaggctcccaacctccttacgccgtccacaatgctgcccatggaaggagctccaatcggcccctggtaaccttggaactgggcggggttccaagaagggccttttccccaaggaccggctcaccgacagccgctagctcctctccttaacggcccctacaaacaaccaggggg

SEQ ID NO: 163984 - DNA, 996 bp, Zea mays
  Clone ID: MRT4577_81131C.1
cattgggaccctcgaggccggccgggtcgaatttatgccccgcttggccgcgcccttgtcgcatggttaaaaaaaaaaaaaaaaaaaaaaaaaaagacatcctctctctctctcttcctggccggtcgatccttctgttttgttttcctccacaaacctctttcaattccaccatagacgacgacgaagacagcgccgataagatctcgccttcacaacgacgagcggagggtacgtacttggagatccaagaagctaagaaatgtcagcccagtttgcatccgagcatgcttgctatgtcaactgcaactattgcaacactatcctggtggtgaatgtgccaagcagttgttcctacaacgtggtgactgttaaatgtgggcattgtacaatggtgctgtccatggatctcagtcccttccatcagcaggcacgcactgtcccagacaaccaggttgtccagaacagagggtttcaatataacaatttcgggagctacgagcaagcctcgtcaagaaatctacgaacgcctcccatgtatccagtgtcaaacaatctgccacaagtgccaccaatacgaccctcagagaagagacagcgtgttccatcagcatacaacagattcatcaaggaagaaatacaaaggataaagacgagcaacccagagattagccacagggaagcattcagtgctgcagcaaagaattgggctcatctccctcggctccatttcggcctcagcgtcgctgacggcggcggcggcagcaactagggaagacgatgattacggatcgagctcttcgccttacacatatatatatgcagtgtgctatgtcgtgcttggattttgtaagccttattaagttttttgacaacctgtgttttcagacctgttgcgtacttgcatgcatgaatcctgcattgcgtgcagtaattaacatgtttgatgctatatatgatatatgcatgcatggtgtacaacattactaaataaat

SEQ ID NO: 163985 - DNA, 779 bp, Zea mays
  unsure (1)..(779): unsure at all n locations
  Clone ID: MRT4577_81132C.1
actcaccanacacctttcctcctcccccctgaccccggcccattcaggttattatcctctctctctctcttctttcttggtatccttctgttttgttttcctccacaaacctctttcaattcaaccatagacgacgacgaagacagcgccgagaagatctcgccttcacaacaacgacgaacagcgggtacgtacttggagatccaagaagctaagaaatgtcagcccagtttgcatccgagcatgcttgctatgtcaactgcaactattgcaacactatcctggtggtgaatgtgccaagcagttgttcctacaacgtggtgactgttaaatgtgggcattgtacaatggtgctgtccatggatctcagtcccttccatcagcaggcacgcactgtcccagacaaccaggttgtccagaacagagggtttcagtataacaattttgggagctacgagcaagcctcgtcaagaaatctacgaacgcctcccatgtatccagtgtcaaacaatcagccacaagtgccaccaatacgaccctcagagaagagacagcgtgttccatcagcatacaacagattcatcaaggaagaaatacaaaggataaagacgagcaacccagagattagccacagggaagcattcagtgctgcagcaaagaattgggctcatctccctcggctccatttcggcctcagcgtcgctgacggcggcggcggcagcaactagggaagacgatgattacggatcgagctcttcggcttaacatatatatatgca

SEQ ID NO: 163986 - DNA, 395 bp, Zea mays
  Clone ID: MRT4577_81133C.1
cccactcgtccgcttcccttcttcccctataccttccatcaattatagcttcagtatgtgaaaacccagctcttcaaccatataggcttcaacaagcaatcgcagctagcaacatacctttatcgaccttgttgtttcaacaatcaccagccctatctttggtgcagtcattggtacaatccatcatggctcaacagctgcagtaactcttgctacctgtgatcaaccatgtaactctggcaaacctttctccttactctaagcaacatcattgacttccattcaacctactgactacactgaactctgatgctaattggtagctgctactatcaccatttaaccagctagctactgcctactatcagcatcaacatcttcttccatttaaccaa

SEQ ID NO: 163987 - DNA, 970 bp, Zea mays
  Clone ID: MRT4577_81134C.1
gttatccttctgttttgttttcctccacaatcctccgagaaggtcagaggaacggccgctacacgccctccctaatccttccatttatagggcacaggagacatcgtcttgctcatccatatcgcttgctggctttgctttcttccttcctccctctagatctcgccttcacaacaacgacgaacagcgggtacgtacttggagatccaagaagctaagaaatgtcagcccagtttgcatccgagcatgcttgctatgtcaactgcaactattgcaacactatcctggtggtgaatgtgccaagcagttgttcctacaacgtggtgactgttaaatgtgggcattgtacgatggtgctgtccatggatctcagtcccttccatcagcaggcacgcactgtcccagacaaccaggttgtccagaacagagggtttcaatataacaatttcgggagctacgagcaagcctcgtcaagaaatctacgaacgcctgccatgtatccagtgtcaaacaatcagccacaagtgccaccaatacgaccctcagagaagagacagcgtgttccatcagcatacaacagattcatcaaggaagaaatacaaaggataaagacgagcaacccagagattagccacagggaagcattcagtgctgcagcaaagaattgggctcatctccctcggctccatttcggcctcagcgtcgctgatggcggcggcggcagcaactagggaagacgatgattacggatcgagctcttcgccttacacatatatatttatgcagtgtgctatgtcgtgcttggaatttgtaagccttattaagttttttgacaacctgtgtataaaaaacccgtgcgtacttgcatgcatgaatcctgcattgtgtgccataattacatgctgatgctatatatgatatatgcatgcatggtgtacacattactaaataaatggaaatattttgcccc

SEQ ID NO: 163988 - DNA, 328 bp, Zea mays
  Clone ID: MRT4577_81135C.1
gcaatatataatgatgagcataacacaaaacacgctcctgtacacaacaacgggtggtgttattgaaaaatcattactaagcacacgcgcatcaactaagaaataaacggttctataattacatctaattgtaattctatgtctgtctctctcgaacatcaatacattgaaaactttatgcatactcaaattaatcacaatcatactaaaacacttgtcctcatacggataaatagccaagacgtgcttattcagaacgtgctacaaaacacttgctgcatcatttaaacgttaatgttaacggtctctaaacctacacattaactgc

SEQ ID NO: 163989 - DNA, 1282 bp, Zea mays
  Clone ID: MRT4577_81136C.1
cattgggtacctcgaggccggccgggaagcatctcaatccaaaccagacaagcaaggaatcccccgatggatcatcgcgttctcctcctcctctctctcgcgtcggccgcgcgcgagttgccgccgccgtcgacgcggaggacccgctgatccgacagtgtgtttccctggtggatatgacaacgatctggagatgaacgcggagtcccgcttcctgagcttcgtgctagcgcgtcggggagtgctacaaggacgccgacgagcacgcggaccggctgtccgttttcaaggtcaacctgcgccgcgcgcggccccgaaaaaacctctttcaattcaaccatagacgacgacgaagacagtccattgggtacctcgaggccggccgggatcatatcgcttgctggctttgctttcttccttcctccctctagatctcgccttcacaacgacgagcggcgggtacgtacttggagatccaagaagctaagaaatgtcagcccagtttgcatccgagcatgcttgctatgtcaactgcaactattgcaacactatcctggtggtgaatgtgccaagcagttgttcctacaacgtggtgactgttaaatgtgggcattgtacaatggtgctgtccatggatctcagtcccttccatcagcaggcacgcactgtcccagacaaccaggttgtccagaacagagggtttcaatataacaatttcgggagctacgagcaagcctcgtcaagaaatctacgaacgcctcccatgtatccagtgtcaaacaatctgccacaagtgccaccaatacgaccctcagagaagagacagcgtgttccatcagcatacaacagattcatcaaggaagaaatacaaaggataaagacgagcaacccagagattagccacagggaagcattcagtgctgcagcaaagaattgggctcatctccctcggctccatttcggcctcagcgtcgctgacggcggcggcggcagcaactagggaagacgatgattacggatcgagctcttcgccttacacatatatatatgcagtgtgctatgtcgtgcttggattttgtaagccttattaagttttttgacaacctgtgttttcagacctgttgcgtacttgcatgcatgaatcctgcattgcgtgcagtaattaacatgtttgatgctatatatgatatatgcatgcatggtgtacaacattactaaataaatggaaaatatttgttcaaaaaaaaaaaaaaaaaagcggccaacattaaaaagcgcgccc

SEQ ID NO: 163990 - DNA, 1285 bp, Zea mays
  Clone ID: MRT4577_81137C.1
tgaaattttgttaggcacactatttgacaattcttatccacttacagaatgttgactagctttcagaacaccttaacaaaaaagatcttttctaaatttgcctttcaatggccaaaatcccatttttatgcaaatgagaaatgaacagcctacaaactatttttgttgtgcatctccactgttttgggcttccaatcttttcttgagtatttttttactttcaattaccccctcttatagtttcatcattaaaaagtattgttttttactttcaattactccctcttataatttcatcgtgttacacaatgttgatgtcgatatagatatacacccagaccatctaaatgcgagttcttatcaaagcaaacttaggttcctttttttgatacaaagtcgtctggtttctcttaaacctatctagtattttgtttcctactaatgtcaataccgacctgcaagcctctcctacctcactcttttcgggatcactatttcacatactttaaaccacatatgaaattatgttatacattaggcacactatttgacgattcttatccacttacttacaggatgttgactagctttcagaccaccttgacaaaaaaatctggcatccccacctaagaagtatgtttaaaaaaaagaggagagcaaatgcaacccgagcaacaagttgcttccttttttacactatgtaccatagtcctttctaagttctaacattgcagaacacatacatgatcaaaactagcaggcttcaaaaacatcaaaaagattttacaggccctgaaagcgatgtccggtagatcaacgtcattctcatcaaggcgcgacataattttacacctcttctctacacacaacttctaatcaatataatttgtgcattgttcttcactctcctttataacctttgcgcaaaaatagaatagctcacaaactcttcaacgacaactgatctgtccttttttctgtacagataattgctttgcgtatctacaacgaccatcactacttttgaagcgcaaacgcttttatgtacatataaccaaaccgatgaaacttctctagcttagtatttgtttatgcgatcctcagctctgctttctgtacctatgacgatcatcgtcacttttgcaaagcaaatgcttttgtgtacatattaccaagttgatgaaaccttgccagtttagcgtctgtttattatgatccttagccccttggaacacactgataaaatccaatgtaatatgtatagtcctctcagtcatataaaaag

SEQ ID NO: 163991 - DNA, 386 bp, Zea mays
  Clone ID: MRT4577_81138C.1
acctacgcttttcgcacacacacacagacaagtgtgtttcaaagccaagttgtgtgtacttagcaaccatgctagcttgggcggcagtagggaggcatcatgtcacgaggagtattcactattttttgttcaaccaccacaagacggacgaggaacaccccgccggtgagtacttatactaccacacctttgtggacatagccaccggcgaagccgatttttagaggtacaataaggatgtgaatgagcacaagcacaagcttcacctgggcgaggaaggggctatttttggcggcgccttaaaactctaccagatgcacgacgcaaataaagaccctgagcactctcacacgcacaatatcactgatgaggtcgctgccgcggcg

SEQ ID NO: 163992 - DNA, 918 bp, Zea mays
  Clone ID: MRT4577_81139C.1
actccatagggcgattgggttcctcgcggccggccgggaggggatatcttcgggaacatccatccatccccaatccccaaaggcgaggagagaactagcaaagggaaaatggctgcttccacaaacaacactctcagggtgctgttcaccctaatggttgtatgcgccgcagtatgcacagcgaaaaggaccgtagcaaagacaggagacttggcgccagcccctgctccattaggagcaggaggcgccaccgcagccccagaaggtgcggctagagccagcaggacgttcgacatatcgaagttcggcgcgaccagcgacggcaagacggactcgacacaggtggtccaggacacgtggacgtcagcgtgcggagcgatgggagacgcaacgatgctcatccccaagggcgactacctggtgggccctctctacttcagaggcccgtgcatgggggacatcaccatccagctcgatggcatcctgctgggatccaacgacctggccaagtacacggcgagttggatccaggtgtcgcacgttaacaacatcgtcatcaacggctccggcacgctcgatggtcagggcaccgcagtatataccaagagcaagactgacgtcgtcaaggcgatgcccaacacactagtgttgttctacgtgaccaacggcactatttccggaattaaactactcaactccaaattcttccacatcaacatcgacacttctaaggacatcaccgtgaaggacgtgaacatcaccgcgcccgcggacgtcgagaacacggacggcgtccatgtcggcgggtcctccaatgtacgcatcaccaactcaaccattggcaccggcgacgactgcgtctcatcggccctgggagcgacggtgtcatggtgaacaacatcacctgtggccccgggc

SEQ ID NO: 163993 - DNA, 202 bp, Zea mays
  Clone ID: MRT4577_8113C.1
ggtgtccccgtcggcgccgagctcccaccgtcacgcgggcggcgagggcagcttgtgctgcctattttcgtccccgtgcgcggccccgcgggcaacggcgcacgaggagcttagctcgctctggcacaacagaaaccatgcgcactcctcctttgccgggggcattcgtagcaggtactacttgtagcctcagtacgtaacc

SEQ ID NO: 163994 - DNA, 828 bp, Zea mays
  unsure (1)..(828): unsure at all n locations
  Clone ID: MRT4577_81140C.1
attacgccgttcctctcccgtgtgggtgcactctccccacctccgccgccgtttccccgcgtgctttctctctctctcgatcccgagcgacaactcggttacagccgccgtcctacgccaggttccaggtcttcgtcgggcccttctccggcaacgagcaccaacaagatttttgtgtgtaaagatttgcgagcaccattcacttttacatcagtgtgaaattaaaacacttcaagcatgaggtcagtattcctagtttccccatctctgaatttctgttacaaacagtttatggagtctgatgcatgtagactagacccattcttttgtaactcgctctctacctattcattctcagctagtactcatgtctgaacttaacaattcgtaagcaatggataagaaaaaaaatgccttctagtcctatggtatatttatcatttctctgctggaatctaacatgtttttttttctctcttctaatctatttaagcaatgctacacttgtctaagtacgacctactttactcctactttaatgtaccagtgttacagtttacattggacataaaagaggattgggatctaaattaagtgctaacagaatttgcatgtatatgaccaatggaccatattgtttcaaaatgtttatacactttggaataatattgtataatgtttacttattgagatttttctgtgctctacctcatcctaagtattgtgaaagagtatttanacggggtatgtatggtcagtggttgctaatcatttttgttatgcttagtgcttcccttggctttgtgcatgccgaggttgacaaatatt

SEQ ID NO: 163995 - DNA, 142 bp, Zea mays
  Clone ID: MRT4577_81141C.1
gctgcgtcaacgcatgctctgtcagtctcacgtgtgttgatgagtgacgagcagcaggtccatgacgcgcattctgctgtacatgccattgagcacctgggcagtaatctggctatcataaagcagtcatgcctgcatatgg

SEQ ID NO: 163996 - DNA, 294 bp, Zea mays
  Clone ID: MRT4577_81142C.1
gttcttaaaattactacatgtttgatgccaatttgggtgaatgtacacgcctcggaggagacataactcaagacatatgcctttatatcactgatgacatatacacacatgcaggccagggcctcagaggatgccaaatgcaacgatttgggagcaatacgtcaattcacggtggttgcaatcaacagatgcgttcatcttcagccttctgaagccctaacgtgcttaacacctactaccctctgtttcaggtaacagtatacatgagctttttatgcctctttaggaaagcaa

SEQ ID NO: 163997 - DNA, 1447 bp, Zea mays
  Clone ID: MRT4577_81143C.1
tctcctcatatttttccagaaattcctttgtcttttttgtatctagacccttgccccaacattttttgggcttcagagaaggcaactgtatatttgctcaaatatttgttgtctcaaatgttcacatttgctctgtttgtagttgtgaggttaaataattaacaaatgtcaccttggtaggagatgcaatccatttattagctttgagaagcttctcattaagaagtcacgtgaacttggttgcattgttcttgcttattattgtaagctttggtgttacagatccttaatgaaaccaaagagctgcagcagataaccaacgacaagcataaaaatcaggttgtactcatccaacattttactttcatatttgctgaagatgtcaacaaacaaaatagacaagcagtaagtgtggcactactttgcatgtgctaacagtatggctaatggtttttcaatcttaatttgcgaaaataggtccactcaacttttacaacagacatgtttgtttttgacaattttggaacactgcaacatgttgggttaaaagtatttttgctaaagtatacattggatatcatggtcgtctatgaaccaattgtagtgtctccatattttcatgctatcttaccattttgtttcagtgagttgaactaatcattatgaatatgcatgggccatggtagaaaacctggtttccttcgtttagtaagagaataaattatgtagatattactatttatttagtaagagacgaaattatgtagatattacaggttggttaactttgttttttgcttttatacacttatttacttcctaatatacatacaatcgtcatacattatattatgctgctaaatgaattggaacgcgcgcataggcgcgcgacatacactatatataataacgcctgcaaattgtgcaagctgtcatttgcattcaccgtgggtatagcactagcactacaccagcactagcgcatgcatatatagacacttgttctttgccattctctatcatttttcctggaaatatacgtttatatatacaggagaatttagaacatgaagaatatattgtatatgtaactgtaaccaaaatatatgctctaaatttacaatacaactgaaaactgcatgcatgctgtgtgtaggcagagagcacagatgaaactaattaattaagtgcccccgggccataatggccactagaatacacaagcacaacgtaacgcaagggaaagaaaagctctagcggaactgcactgccccacgatgagcatgaaaaaaaaaaaaaaaaaaaaaatacatgtctccatgcggaaagaaataaaaggcggccacaacgaccacaactcatgcgcttgagaggcgcgcagacagccgaccgagacgacaccactgatcaaggtcgtcgtcgagcaaaggcatgccctcatcatgca

SEQ ID NO: 163998 - DNA, 821 bp, Zea mays
  Clone ID: MRT4577_81144C.1
ccccgcgtccgaaatattgatataatatacatgaatagttcttgtatgagcatgttcagatgtgtctttgagatgttggaggaacacaaaggagaaaatcgctttagtcacattatgatcaacatgtcgtgttagtatattttttatatttgaaagtataatgtgttatctaactataaggtgatcttcgtctctattggcattatgataaaaactagcaaaaaatgtcgtgagtctaatgttatcattagagtcaaatgttatcattaaatatatatagataggactgtacttgcgttggactctaggcttaagctatgtatatatatatatatatgctagtattaggacatcatattataataagtattatttcaagaagaccatccgattggtgcggctacgtcaaacgttcgcgccatgactgcaacattctagtggccaatgttgttgacttcaggcaaatcacgatggagatgctctctcgactagagctcgggacgacagggctcaagaccctcacgcgcgaggtgatgggcttgctcatcgacaagcccaagcatgtgacgctcagcaggtggacaaaacgttcttttggcccccacaggtctagtacgtcgtcgttgttgatgtctatgggttctacaaggttggttttctgttgttcacgacggagcgcacgcacaaccgatggaaggtcgccgccgtctatttgcattaagttgctgttagagcatctccaatataagttctaaatggagttgtattttgaattttagtactttaacaataatatttctttaatagtgatgctattttac

SEQ ID NO: 163999 - DNA, 731 bp, Zea mays
  Clone ID: MRT4577_81145C.1
tacgcgtagcttccatctccattgccacactcccgctcccccgccatggccttggccatgacctcctcgtccccgcagccaccgtcccctcaccaccgccgccgtcgccgctcgcaacctgccaccgccacccccaatgccaactccaaacctaaacccaaacccagggccaaggcgctccccctactctccgacgtcggcgtcggccgcgaccccgccgccatcaagtactacgcccgcgtcgcatctaacctcgcgggcgccggccgcctacgagacttcctcctagccgccgagggcctccgcgcagccgcgtgcaacgaccccagcttcgcggcccgcatcagcgcccgtctcctgtcgtgcggcgtcgccgccgctgtccgcgagcgcggactgcccttcatgctcgagttcttccgagacgccgagcgcgtgcgcgtgccggtagtcgagatgctcgacgccgacgcgtccaacgctgtcgccggcgcctgccggatgttgctggaggagcgacgaatggtggagttcgtggaggtcgtcgaggcgctagctcgatatggattctatgttcaagacatcgtgaaccccatggatgtactgaaaatatttgtcaagcagcgtgacccagatatagctataaggtatgcacgcatatttcctagttcccaacttttactctgcaataccatggaagcttttagaaaaaaaaaaaaaaaaaagcggcc

SEQ ID NO: 164000 - DNA, 458 bp, Zea mays
  Clone ID: MRT4577_81146C.1
gcggcgctggtctggccggccatgtcctgcctcgcggcgccgtcggctgcaccgacaaaggcgggggagcgcatgctccgcgccggcgctcctttgcactcgactttgccgtgccagggcctgcattacacggcgcggtggactggagggcgagaaacctggtgcgggcggcggcagatagctctgctgcgcagactaccatctggcaaagtactggcgaccagggacggatggtctctccactttctgaataagtgaaggtccagagacgatccaggactccgctcaaatgctatcggaggagacagaagaaacatcatgagccgacgcaccaaaaatcttcttctgatggaacaggctatgacggctgctagtgccgcagcgtattcgaactagtgaaagctaagattccaaccctgaacgaaatgaaacgcctgagattccatcaagtattccat

SEQ ID NO: 164001 - DNA, 627 bp, Zea mays
  unsure (1)..(627): unsure at all n locations
  Clone ID: MRT4577_81147C.1
tgtgtatgtgttccctaaccttcaccatcgtgaggtgtcatggtgcccaaagttgatatttgaaccatctcttccaagtgccttttattggaaattgatgcatgtggtgagatcttgcaaggatggacagcctcacattcacaaataaaccttaggccaacaagaaggttaagcttgcagttctgtgacttatcattttcaaggggggaccaacttcatttttttagctccttaagttcacttaagttcctgacagtaaggtcatgcgaaggtctggacacttggggagaaagtataggaacattaaccagccttgaggtgttggagctttcactctgtgatataccaatgtttttgggaagaatcgcttcgttgcagagtctgagtattgaaatgtgccatctaccttgtgatttttctcattacttgctacagcttccattcttgcggcagctacaaattgtttgttgcaacgctaagttagagttacctggtgaaataaccagagccatcttggctcgtattccaaatatcagcatacacaatgtcgngatgtgtcaggcatatagaacaggagaatggtatatgccaaaatgtttcagttgacaaggtcggatgtacgagctc

SEQ ID NO: 164002 - DNA, 1075 bp, Zea mays
  Clone ID: MRT4577_81148C.1
cattgggtacctcgaggccggccgggagtccctattcccgaacaagagcgaggccgcactcccccacgagtccactctccgaccgcacgctccgcgacgcgatggccgcgctccgcctcgcctccttcaccctccgcgctgtcggaggtggccgtcgagaacggcaccctcgagcagacggtctccgacctcgagaagctggagaagatcttcaccgacgaggccgtcgccgagttcttcgacaaccccaccgtcccgcgcgaggagaaggccgagctcatcggcgagatcgccaagtcgtccgagctgcagccgcacgtcgtcaacttcctcaacgtcgtcgtcgacaacttccgcgcgtccatcgtgccgcagatcgtcgtcgagttcgagaacgtctacaactcgctcaccggcaccgaggtcgccaccgtcacctccgtcgtgcagctcgagtcgcaggacctcgcgcagatcgcgcagcacgtccagaagatgaccggcgccaagaacgtccgcctcaagacgcagctcgacccggcgctcatcgccggcttcaccgtgcagtacggccgcgacggctccaacttgatcgacatgagcgtccggaagcagatcgaggagatcgcgtccgagttcgagttgcccgccgtcccgctcgaagtctgaggccggcttgaggcgtccatcctcgccctcgaagctatagctgcggctactgtctcaaggaaccaagcgggaatgttggcactgtccccttcagtcagacctgcggatcaacggcggtggctccaaatctccaatactactacatatgaacggacactatttttgtgcgtttctgttgacgggaacctgtgtagttctttctcctttttttccctgtggttgacagacacagacactgtaatatgtttattaaaaacactcatctatatagctgagtgtgcacctcttctctcaatcatatacaagctgagatagagtcatgggatgaagaaaaaaaaaaccgggaagtaaagaccatgtcggctgagtgtgcactgacaaaagggggcggccgcttttaaaggat

SEQ ID NO: 164003 - DNA, 200 bp, Zea mays
  Clone ID: MRT4577_81149C.1
acctcgaggccggccgggagaatgctcctccgtcgttccgtgtccgcgttccagtgtgtcctgctccccctcagtcctagctgctagcgtgccgcagcgagagagacctcacatcgctgacttccacgccgacgaccacgacgccggtgaccacgatgtcgtcgacgttcatcgccgttgacactccccccttcttcgct

SEQ ID NO: 164004 - DNA, 474 bp, Zea mays
  Clone ID: MRT4577_8114C.1
tcgggttttgccgggccggtacggttgggtccatactgtgccaagctcgttcagagaattgagcccgtcgggcagcctgacccgactcggatgattattcgggcctaaccgtgtcgaactaggcggctcgtttggacatccctacccacggcgccggccgccgggtgcagcaacattaactactgtgcttgcatagttagcatgcatcagcaaaaaacatgaaacgaagcaaacgaagaagacatgtataattttttttttttaaaaaaaactgcactcggcacgcgttacacgtaacaaccagcgatccacgctgctaccaaactgcatgcatcgccctactttgtccatccgaattcgacaataaaaaaaagaagaaaaggaacaagtatgaacagacgaactaaactaaacagaaagaaaagaagaaaaaaagaacataccaccatacacatgcgcactccattctctctc

SEQ ID NO: 164005 - DNA, 727 bp, Zea mays
  Clone ID: MRT4577_81150C.1
ttttacttccattcaaatatatttttattgatatggcgggaccgggttctagtcccgtggagaattaacagttaacactagtgtatatacaaacctacttcaaaaatattccggccaaaatgcttatccctaacaatagcgagcgctaatccaccttcccaccttcctacctggaacttgtacaatagcacgatctaacaccagagagatctagaggagatgccgatcatctccacacggtttcatttgcgtcggtgaagatggcattgtgatgctcgatcagacactggataacctcaatggagctgtagtctggtggtgaagcatcgtctaaggggatctgggatgaagcatcctcgtcatcctcatctgcaatcgattaagcagctagtgtgtttataacagttgaccaaagaagggatctttgcctacaaataggattgtagttcctagtgaaaaaaaataactaaatattttatgaaaaaaaataattaaatagtctacttgaactgaacaaccaaaaaacttttggtgaataatccctggcccacccaaataaggcctactattcagataaaaatcatccagaactttttatttgaatattacctaagactgatatctgctcaagaagcacaatatatcaatggctacaagccaaaacatgcacttggtgggaacagcctaacctgaactctgataacatgcttttccctcgtgccgaaaa

SEQ ID NO: 164006 - DNA, 493 bp, Zea mays
  Clone ID: MRT4577_81151C.1
cggacgcgtgggcggacgcgtgggcggacgcgtgggcggacggggctcatcgccggcttcaccgtgcagtacggccgcgacggctccaacttgatcgacatgagcgtccggaagcagatcgaggagatcgcgtccgagttcgagttgcccgccgtcccgctcgaagtctgaggccggcttgaggcgtccatcctcgccctcgaagctatagctgcggctactgtctcaaggaaccaagcgggaatgttggcactgtccccttcagtcagacctgcggatcaacggcggtggctccaaatctccaatactactacatatgaacggacactatttttgtgcgtttctgttgacgggaacctgtgtagttctttctccttttttcccctgtggttgacagacacagacactgtaatatgtttattaaaaacactcatctatatagctgagtgtgcacctcttctctcaatctaaaaaaaaaaaaaaaaaagcggcc

SEQ ID NO: 164007 - DNA, 979 bp, Zea mays
  Clone ID: MRT4577_81152C.1
cgacgcaagcctctagcatgcgtcgtgatacgatggccgcgctccgcctcgcctccttcaccctccgccccgccgccgcctcttccggcgcgacctcatcggctccccggtccgcctccttctccagcgcggcgcgggggctcccctctctctgcctggccccgccccgccgccgccgcggggacctcgccaagccccgcgccgcggtcgaggccgcggcggagagctacgcatccgcgctggcggaggttgccgtcgagaacggcacgcctcgagcagacggtctctgacctccagaagctggtgaagatgttcgtcgaacgaggccgtcgccgagttcttcgacaaccccaccgtcccgcgcgaggagaaggccgagctcatcggcgagatcgccaagtcgtccgagctgcagccgcacgtcgtcaacttcctcaacgtcgtcgtcgacaacttccgcgcgtccatcgtgccgcagatcgtcgtcgagttcgagaacgtctacaactcgctcacgggcaccgaggtcgccaccgtcacctccgtcgtgcagctcgagtcgcaggacctcgcgcagatcgcgcagcacgtccagaagatgaccggcgccaagaacgtccgcctcaagacgcagctcgacccggcgctcatcgccggcttcaccgtgcagtacggccgcgacggctccaacttgatcgacatgagcgtccggaagcagatcgaggagatcgcgtccgagttcgagttgcccgccgtcccgctcgaagtctgaggccggcttgaggcgtccatcctcgccctcgaagctataggtcctttttctgctgcctctctccctgctctgctattcatctgtatcattctctggttgttgaatgttttgagtgaatggtgaatgctgcatacctggattttaggattcatatttgaatgaatggtgaatacactgcaaaaaaaaaaaaaaaaaaaaaaaaaaaaa

SEQ ID NO: 164008 - DNA, 705 bp, Zea mays
  unsure (1)..(705): unsure at all n locations
  Clone ID: MRT4577_81153C.1
acggcgtatacatcctatgggcgattgggttcctcgaggccggccgggatagcttgctgctgtgcatcgcgccgccgcacgctcctcccgtcgactaccggcgaacaccacatctgatatgcgcccagccgccgaaccagacgacggagccagcaccacccgccactgaggcgcgtcgcgctccaacgaccgatggaagaacaaccatccgagattcgtggatgcgacgaagtcactacgtccgcacattcgacgcctgctagctctcccccacccacagcaaggacagngtggactcgtcacagactgttcgtcgtatcgcatccgccgtcgcagacgcgctctcgcgcgaagcacacgtctgcccgagcattcacccactgcacgctgtatgcgtacgacatctccgcgctacacccgcgccgtggacactgctcggctcatgactcgcagtgctatatagtcactactaccagatggacttcgatccggagaaggctgcgtgctcgtcctaagagatccgcctctacgatgacaacatagtagatgtatctgtcggaactactacttggcctatctcccgattcgcaaagcgtcacgctgatgtctcctgagaccccgcctacagacgcccgcatcacggaggacctcgtcgtgactgtatcgaggtttacctgcgatctcagcggaagcatggtgatagct

SEQ ID NO: 164009 - DNA, 1733 bp, Zea mays
  Clone ID: MRT4577_81154C.1
ttgggtacctcgaggccggccgggattcccgaacaagagcgaggccgcactcccccacgagtccactctccgaccgcacgctccgcgacgcgatggccgcgctccgcctcgcctccttcaccctccgccccgccgccgccgccgcctcttccggcgcgaccccatcggctccccggtccgcctccttctccagcgcggcgcgggggctcccctccctccgcctggccccgccccgccgccgccgcggggacctcgccaggccccgcgccgcggccgaggccgcggcggagagctacgcgtccgcgctgtcggaggtggccgtcgagaacggcaccctcgagcagacggtctccgacctcgagaagctggagaagatcttcgccgacgaggccgtcgccgagttcttcgacaaccccaccgtcccgcgcgaggagaaggccgagctcatcggcgagatcgccaagtcgtccgagctgcagccgcacgtcgtcaacttcctcaacgtcgtcgtcgacaacttccgcgcgtccatcgtgccgcagatcgtcgtcgagttcgagaacgtctacaactcgctcacgggcaccgaggtcgccaccgtcacctccgtcgtgcagctcgagtcgcaggatctagcgcagatcgcgcagcacgtccagaagatgaccggcgccaagaacgtccgcctcaagacgcagctcgacccggcgctcatcgccggcttcaccgtgcagtacggccgcgacggctccaacttgatcgacatgagcgtccggaagcagatcgaggagatcgcgtccgagttcgagttgcccgccgtcccgctcgaagtctgaggccggcttgaggcgtccatcctcgccctcgaagctataggaatcatatttgattaaatggctgaatgcactgcataccggattcaaggaatttggtttcaaataaggaaagttgtagaaatgaggagggtgtgaccataaatttcacatgaacggtgtaggaagtagagaaactagtgtccagttcctataactgcagtgctcccttggaacgcaacgcaggaatttcgagtttcacaagcaaaaaacatcccgcattccaaagagggcattaaatggttggaaatgatgtgattattcttcagcaggaagaggaatgtatagaatgctcacacaactgcggctactgtctcaaggaaccaagcgggaatgttggcactgtccccttcagtcagacctgcggatcaacggcggtggctccaaatctccaatactactacatatgaacggacactatttttgtgcgtttctgttgacgggaacctgtgtagttctttctcctttttttccctgtggttgacagacacagacactgtaatatgtttattaaaaacactcatctatatagctatagctgctactgtctcaaggaaccaagcgggaatgttggccctgtccccttcagtcactcagacctgcggatcaacggtggtggctccaaatctccgatacatatatgaacggaccctatttttgtgcgtttcggttggcgggaacctctgtagttctttctccttttttttcctgtggttgacagacacagacagacactgtaatatgttttaaaacactcatctatatagctgagtgtgcacctctcctctcaatcgtatatacaagctgagatagagtcatgggatgaaaaaaaaaaaaaaaagggcggcgctcgcgatttag

SEQ ID NO: 164010 - DNA, 931 bp, Zea mays
  Clone ID: MRT4577_81155C.1
ccatatgttgtttttaatatgcacttagaaattagacgtcggtgttcttccttaaacgctgcctttaagatacgttgttgtcaagattcatgactcttgggaccacttctgtgattatttcatgaaacaggaaggagataaaaggctgttggcgttcaccaaaagaggcacacacatccattcagtaagtagccgctgcttcttcaagtaggactgtagtatatcctcgccgtcgccacaatgaaaactgtcgctgatttctcctacaggccaggggactggctagtcttcggttccgaaacaaaagggttgcctcagcaagccctcgaggattgctgcagagaaggcctaggcggcgggaccctccggattcccatggtggagacctacgtccggtgcctgaacctctccgtcagcgtcggagtcgcgctgtacgaagccgctagacagctgaactatgaacagcttcagtaccagcctgatgagctcccagaggaggcgcaggagcttttcccggcagaggacatttatgcgtgaaaacctctgcccgagaacaattacacgttacacgcattgatcacctcatttttgtgtgtgtgtgtgtactgtttgccgtgacacatgattgagctggagggaccacgcactgcacgattctgttgcgaattcaattccaggccgagtccttgtccagacggtgttgacatgctcattcaaaatggtgtacctgatctgcttggaagaatcgttttagtgccatgtataatttcgcagtcagaactcagaaggtgattagagtatgctgcgatggggtctcgttctgacttcttttttgtgtgtgtactggttactgaaccataagctttgttaactgcaactggacgctgcgtcctgttgcttctctgtcaaaaaaaaaaaaaaaaaaactcga

SEQ ID NO: 164011 - DNA, 575 bp, Zea mays
  unsure (1)..(575): unsure at all n locations
  Clone ID: MRT4577_81156C.1
cggnacgcgtgnggcggacgcgtgggnntgtgttgaagataagaggcgtttgctagtatatgagtacatctgcaatggctcactagattcgcatctttacgatcgtaacaaagaaacgccggagtgggctgccagacaaaagattgccgcaggagctggcggcttcagaacgagcgttgccaggagcagagcagcccagctcaacgtgaacgtggttcgcagtcacagcgtgctcagaaggccgccggaagcccgtggagtcgagatcggcagaacttgtctcacagatactagcattggtatccctgtgcaggatcgccgtggaatctgtattgttcctagcttagctactcctttctgcgtagtggcctcttcttcctcttccttgttcttggcgccaggtttgttgatgcttgtggaagccgtgtgtatagtatagtggtggagactgtagtgataatggtaggcttaactcggcggcgtcggcgtacggggcaatgtttcttgggtcctcgacaccggttggagcaaagcaactgtggaaaaccagagcaccgccaagggtccgtttcttc

SEQ ID NO: 164012 - DNA, 371 bp, Zea mays
  Clone ID: MRT4577_81157C.1
ggggtctaaaacacttatgggggaaaataaatctcactgaatacaccaataaaaccttcacacccacgtaaccacatataattactggaacccaaatttccttcttgaaaactcaaaaaaaaaaatttatcttgtaaatcaagaaaaaaagtacagacatggaaaggcagacttttacctattaacatcaaaaataaatggaaagaaaaccctccccgaaaaatccaacgcataacacatgaaatgaacgcctttaactaatctaatgtgccataaatgccacggcttagtggcaatctgtaacaaaaaacggcaacacattaccggtgcaatcaaccctattacccccctttggtccagcatggggactt

SEQ ID NO: 164013 - DNA, 816 bp, Zea mays
  Clone ID: MRT4577_81158C.1
ggatatcacagcagggcatcgactacatccattaaccaaattgacataataacactaaaacatctatttttattcctagctttttattaactgccgacgaggccgtcgccgagttcttcgacaaccccaccgtcccgcgcgaggagaaggccgagctcatcggcgagatcgccaagtcgtccgagctgcagccgcacgtcgtcaacttcctcaacgtcgtcgtcgacaacttccgcgcgtccatcgtgccgcagatcgtcgtcgagttcgagaacgtctacaactcgctcacgggcaccgaggtcgccaccgtcacctccgtcgtgcagctcgagtcgcaggacctcgcgcagatcgcgcagcacgtccagaagatgaccggcgcccagaacgtccgcctcaagacgcagctcgacccggagctcatcgccggcttcaccgtgcagtacggccgcgacggctccagcttaatcgacatgagcgtccggaagcagatcgaggagatcgcgtccgagttcgagttgcccgccgtcccgctcgaagtctgaccggcctgaggcgtccatcctcgcccatgagttgctactgtctgaaaggtatggcaagaatcaagcgggaatgtcgttggtcctgtccccttcaggcctgcggatcagtggtggtggctccggatctgcaatacatatcaacggacattcttctgtgcgtttctgttttccattttttggcgggaacctgtgtaaaagtttctcctttttgattgtggttgagagacactgtaatatggttaaaacacacatatgtagctgggtctgc

SEQ ID NO: 164014 - DNA, 1617 bp, Zea mays
  Clone ID: MRT4577_81159C.1
gtgtccagttcgtataactgcagcgctcccattgggtgcctcgcggccggccgggagtcctctccgccctggacctttccaagtctcaaaccagagcgaggccgcactgcacgcgagtcctccactccgaccgcacgatggctgcgctgcgcctcgcctccttcaccctccgccccgccgctgccgcggcctccgcctcctccggcgcgaccccagccgcgtccggctccgtctccccttcgcccgcgcggcgcgggggctgccctccctccgcctggccccgccccgccgccgcggggacctcgccaggccccgcgccgcggccgaggccgcggcggagagctacgcgtccgcgctgtcggaggtggccgtcgagaacggcaccctcgagcagacggtctccgacctggagaagctggagaaggtcttcgcggacgaggccgtcgccgagttcttcgacaaccccaccgtcccgcgcgaggagaaggccgagctcatcgacgagatcgccaggtcgtccgagctgcagccgcacgtcgtcaacttcctcaacgtcgtcgtcgacaacttccgcgcggccatcgtgccgcagatcgtcgccgagttcgagaacgtctacaactcgctcacgggcaccgaggtcgccaccgtcacctccgtcgtgcagctcgagtcgcaggacctggcgcagatcgcgcagcacgtccagaagatgaccggcgcccagaacgtccgcatcaagacgcagctcgacccggagctcatcgccggcttcaccgtgcagtacggccgcgacggctccagcttaatcgacatgagcgtccggaagcagatcgaggagatcgcgtccgagttcgagttgcccgccgtcccgctcgaagtctgaccggcccgaggcgtcctccatcctcgcccatgagatgctttggtgcttcctgctgcctctctctccctgctcttcatgtgtaccattctctggtttgaatatttgagtgaatggtgaataccgcatacctgtatttcaggattcacgaaaaaaaaaaaaaaaaaagcggccatcaaaaaaaaaaaaaaaaaaaaaaaaaaaaaaaaaaaaaaaaaaaaaaaaaaaaaaaaaaaaaaaaaaaaaaaaaaaaaaaaaaaaaaaaaaaaaaaaaaaaaaaaaaaaaaaaaaaaaaaaaaaaaaaaaaaaaaaaaggcccccaaaggcccgggccccccctaaaaaaagggggcccccccgggctgaagaaatccgtttccaggtttgcgggccccgccacccccggggggggccccggaccccattcccccctataggggggctttttacccccccccccgggccggggtttacccccgccgggccgggaaaaacccgggggtaacccaacttatcccccgggggggcctcccccctttcgcgggggggaaaattggggaaaagccccgaccggtccccctttccaaaaagtggggaagctggaggggaaaagggaattggaacccgcaatttttttgtaaaaacccgggtaaatttttggtaaaaccggcccttttttttacccattaggcggaaaccgaaaaacccccttaggccggggggtggggcctttt

SEQ ID NO: 164015 - DNA, 303 bp, Zea mays
  Clone ID: MRT4577_8115C.1
taaataatttccccagcaagttccatcatgcgggaggtttttatatccatttggggtttaaaaccaacctagcgggctgcttgacaagcattacattacagcacacaacaaattgagttctaatgaagcactggattgcaagatctgaaatcctatagtaccttaaatgtaaatatatctttgacgaaatcaattctttgggctgctacgttatcaaaaccaaacctcttggtaccaaccatgtctatggtcgggacccggtttcttctttgtttccacagaccatctcttgcatggttttga

SEQ ID NO: 164016 - DNA, 246 bp, Zea mays
  Clone ID: MRT4577_81160C.1
ttctttcccgagggctgaggatatccttcaacccatccacctcacgaggaatcagcactcgcttttgctccgcgatttattgctcagggttcttgctgggtggtggtggccggtggcaccagcagtagttcacaagagcaagctgttcttgtgtgcgtgggtctatgcctgcttgcttgcccaggggaggagaaggaggccgagttctgggaagtggggagttcaagtaccggcatttcttgggcg

SEQ ID NO: 164017 - DNA, 202 bp, Zea mays
  Clone ID: MRT4577_81161C.1
gtgcattttcgctgacgtggatggttgacatctaagggctagtttgggaacatcaggttcccaaaggaaaatgaactaatttcccttggtaaaatagaaatcccttgagaaaattgggttcccaaactagccctaagtgttcattttaaagaaaaagtatgtagaggtacatacccaacaatgtgacaaggtacaaaagggg

SEQ ID NO: 164018 - DNA, 282 bp, Zea mays
  Clone ID: MRT4577_81162C.1
aatttatatgtaaaatagattattgcttcctactttgataaatacacagcacagtcatatacacagaggcagagagcatgaactatgactgtgctgtgtatttatcaaagtaggaagcaataatgtatatgtaaaaaaaatggccaagcaatataaggttaaaacttacgtaagtaaccattaccttatcttgtattgtctagtgttttttaaatctgcttttccaaatataacactatgttaaacatatgtgtatgtaaaagggggggccccctcctggta

SEQ ID NO: 164019 - DNA, 281 bp, Zea mays
  Clone ID: MRT4577_81163C.1
ccttttatttttttctgtagaagacatggattgcttctttttactgatgcaggggtactatagcttcttccgttcgcaaggcaggcgagaccagtaagaaacagtagacccgaggaggacaaggcccgtcagctgttaaccgtggttcggaacggacgctacctaaagaagggacggtacgctcagggtgtggacactggtgcccccgactacctcagcccacgtctagaggacacaccccccgacgttatggagctgggagctaacgctgaaaaagacaa

SEQ ID NO: 164020 - DNA, 317 bp, Zea mays
  Clone ID: MRT4577_81164C.1
ctcggccgtggaacgccgctcctagcagcatttcgagtactacattgagcacgacgatgggacccctcgctaataacatcatggtcctagggcgacgtccttgcgatgcttgtcgtccgtggatcgtgagggccccccaaggcggcgcccggcctcagcatcaccatcaactacagcggctagtggctccccgacagggccgcccggtacgcacaccccacctaagccggcgctcctgacaacggacgagcgtgcaggcatcaagaacgcgaacctgccaccctacagcgttatgacgccttgcggctacgtcccca

SEQ ID NO: 164021 - DNA, 287 bp, Zea mays
  Clone ID: MRT4577_81165C.1
cggtccggaatacctcgcgcgaccctcgcgtgcagggacgcatacgaccatacattttaatatggtctgaaattacaggtcttagtgccgggtttgtctgaccgtgaggcggaaaatataactctctacgaggcctcagccgtcgtctacggacttcctaacgtcgacgtctgccgccacgtcccggttcgggaaatcttaacccgagctccctttccggtgacacgcgtgatcacgctatctgcctagattcccccgtcccttaagatcggctgacccatgtgcaa

SEQ ID NO: 164022 - DNA, 488 bp, Zea mays
  unsure (1)..(488): unsure at all n locations
  Clone ID: MRT4577_81166C.1
gtttactaggnatatctgtgaaaacccagtatattaaggtatagtaagtaataacataaaatcgatnatatgcctttgtgattctatgataaagataagccgtggttataagcaacttacctgaatgtccagaacaatgcagcccagcatgctttgtcatttgctttgtgtgcaatgtgtgaggtacataatcatcttgggttgtggtagcggaatctctagaacaggaagcagattagaacaaagttagctatgaaccactgctttctgaaagggaaatagtcttacaccttttcctaattgattttggtggttgaattgcccaacacaaataattggactaactagtttgctctagattataagttttataggtgccaaaggttcacaacaaaccaataaaaagaccaagaaatggttcaaataaaaagagcaaaagactatcgaagtgtgccctggtctggcgcaccggactgtccggtgtgcca

SEQ ID NO: 164023 - DNA, 592 bp, Zea mays
  unsure (1)..(592): unsure at all n locations
  Clone ID: MRT4577_81167C.1
ggcacgagggtccgartcgcgcccargtccctcsctyaggagtttcgcccarggccctcccscctcccctagattcacsacggagatkgcgtccgagctcacctaccgcsgcggcggggcgtccacbgccscccgcgggggggscgggggatactcacccaaaccstccaaacccctcccmtwgcttcccctctyttccccctactccctcycccarcatckccccctcttccchctcccccggattcttatcyccccckccttcatctccatctcctccccytcckcctcctcctcchccycamccyccacctccaccmnnnncnnccctcgtcctactccaacaacaacaatyytctctccctcttccycctcgarcccccccaccacckckacttttccaccccrcacttcstcsrccgcaaagttcccctbkgtcctcaaacggaaggcgctccccttcctcttyaccttcwgcgccnctttcdtcggyaaccaccttttkraccgcctcctchaacbargccacaccttaatcctcctcsataacttcttcaccccccccaargacaaccttcttcaccacctcaac

SEQ ID NO: 164024 - DNA, 525 bp, Zea mays
  Clone ID: MRT4577_81168C.1
aataaaaaaaaaaaaaaaaaaaaaaaaaaaaaaaaaaaaaaaaaaaaaaaaaaaaaaaaaaaaaaaaaaaaaaaaaaaaaaaaaaaaaaaaaaaaaaggaagggcagttgggggggcccgctttctaggttccaagttcttgcccccggggcggcccctttttttgtgtttttttatggtggactccattgggccgggggggggggccccctgttttccggcttgggccctggggaaacccctgcggttccccttgttttgcgccccgctccccttcccctttttgccggcggggggaacagcccaggggccccttcctttcgcttttccaacctgtttggcaaggggaatggcccttggcccgcccctttaaccgcgcctttaggggggggggggttcggggttcccgccccgttgcccgttccctttgccaccgccctagcccctgccttttttgcttttttcccttcgttcgcggcccgtcccgcggttttcccctttgagggctacattgggggttccttt

SEQ ID NO: 164025 - DNA, 580 bp, Zea mays
  unsure (1)..(580): unsure at all n locations
  Clone ID: MRT4577_81169C.1
gcatctgtggaagggtggaccggtcttgacaccggtagcaccaccgctcccacggcagctaaagctagctaggagggcgggagcaccaccatgggctggcccaagcattcccataggcattaaaccgcggcgaccacgaagaagtggcgcccgatgaggctgggctgtgcgaggctgaattcgctcgcgtgcttgctggggcgactggcaaccggcctggtccattgcgaatgaacagacgctgcttcaggcgcaggcgtgcaagcgaacggtgcgggagggactgacgtgttccgagcgttgcacgccatgaaccacaccgcggcggcggcggaactgggccaggtgctgggagtacaccactaccagcagcactcattgatgacagaatgagaaggagaaggagaacaagcctgtggatctgcgggcagcagggacaaggtatgctacctggagaccattgagggcatggaagtcgacgccggcgacgttcacccgcacctngaacgggctgacggtgaggggcgctccccagatgacatggagatacgcaggacaatgccataggtaaaaggaatgc

SEQ ID NO: 164026 - DNA, 399 bp, Zea mays
  unsure (1)..(399): unsure at all n locations
  Clone ID: MRT4577_8116C.1
cgtactcaccacctccctcattttcgccgcccccgccgaaatcaccatggaggggtgcatgcataggancncggctctttatgtggatggcccacttcgtcaggcgcccatggcccatgaagaagtcactgttccaaacgccctactagaggaacgttcacaggctaattgtgtgtctcaggagattgactatcagaaatgggtgaaaaggattnctgacaactatactgagcgcagacactgtaccgttattacttcgattactgaaatgngtcacaagaatgacgagaaaatcactatgaattttaaaatgacctattgtcctcattnattcaactaaagttgagtaaaattgaaccacttnataggcctatatactattaaggcacttaatatttt

SEQ ID NO: 164027 - DNA, 437 bp, Zea mays
  Clone ID: MRT4577_81170C.1
gtttgatcagaattatggatttatcttattttatgaaaatgcagaattgagacatcctggcgctaaaagcctaaatgctagctcatgcactatgggacggacggtatacaaaacacaccagaaggacatcatctgatcctgctatggacagatctgaacacaccttcttttttatattgctgaaagaaaagagtgttcacgccacccgttcacacaggtagtgacacctgttgtttgacagcatgttgagagggtcccggagtccttctttatcaatcggactttgctggctcctctaggatcacctctgcgggagcgtgcctagctcctgctactagtagggagattttcagctgggccccagcatgcggaacaaagacctctcatacacccttctcggacccccttggggaggaggccaccacgagatgtggaac

SEQ ID NO: 164028 - DNA, 512 bp, Zea mays
  unsure (1)..(512): unsure at all n locations
  Clone ID: MRT4577_81171C.1
gactcaaagaagcactacgtcaaccctcagtcaagtacactcatatctacctttctatccaatacatgtgacnttagtaaaaggggggctgctaacaacccatacccnaccccatctattgtatatggatgtacatttaaacctccgactctatgctcatcttctgtctctccaccgccgtcatattcgtgttccttttcttcattttcatgtccatctgactatggtggtactctccacgtattcgcatcttcagtctcgtctgcttcaccaccctgattcataacctgtactacaccttcacccttttccaaatcatcatgtatgccctctataatgttcgtactctctcctgaaaccacttattacatttcttcttaatattaattctatttaatctaccacttttttaactctttacctatttaactttcccttccttttacacttttaccatttccttcctctgatacttactccttctctctttcttctattacttactctcttta

SEQ ID NO: 164029 - DNA, 780 bp, Zea mays
  unsure (1)..(780): unsure at all n locations
  Clone ID: MRT4577_81172C.1
acccagcgtctccatctcgcgctctctcctccccaaaaaacctcaccttcccccgctcgtctgcgtgctcggccatcggtactctccaccggcgctccagagttccaggtaatcgcgctccctctctcgccctcctccacctcacccctccatcccactccggtttcccattgctagggtttagggtagacacggcggcggcggcttccttctgcgtgctcggccatcggtactcctctcctccctcaccttgtgcgccgccggacgtcacggcctcgcgcggctcccgctcccgcggtgaggaggaggaacacaaccgtcgcttctgcgtgaacgacgcggcttccgccgggtccgcgagctggtgttcggacccgactagtggcggcttcttccccgagggcgcgaacggtgggacgcgctccgccgcttttcccccggctgcttgccaacgcgacccaccgcgctagtatattcaaatcaacagacgtacaagctaaagtgtgtcgtgagctagcagctttttcttcattacctccctcgctgaggccgagggcgccgcggaagcccttgccgggctggatgacggccttggtcgaggccggtgacctcctcgtcaacgaagcggacgcggtccccgagcgccccgatggcgctgaagagagtgaagaggatgagnaacaggagcaggggctcggcctcgntaagatggggatgccccgtctccaggttcagctgcgcaagatgccntttccccggtgatgacctctccgagcagca

SEQ ID NO: 164030 - DNA, 172 bp, Zea mays
  Clone ID: MRT4577_81173C.1
aaacctcagtgttatggtttgcaagggcttaggcccccacttttctctactggtcaaaaataatgatatgcagctgtcccgcatttatcagaaacaaacaatacctttagaagccctgcctggatactggcctaatcatgctccggatcgcccttaccaacccactgtttta

SEQ ID NO: 164031 - DNA, 287 bp, Zea mays
  unsure (1)..(287): unsure at all n locations
  Clone ID: MRT4577_81174C.1
atgggacctgagattagctttttgctgcttgtggtgaggttgcatattagcgagccnnnntggggtcgntgcttaggctgcttgggcgttctgcatgtgttgcttcctcttcattntttccttattgctcacaagctcctatatcttcccttcttcccccatacctttcatcaatgattgcttcagtttgttttaactcagcttttcgntcttgtttgcttctacaatcaatctcatcttgcatcatacctttatcacccttgttgttttaactatcgcctgcccta

SEQ ID NO: 164032 - DNA, 2395 bp, Zea mays
  Clone ID: MRT4577_81175C.1
ggtttgaaagtgctattaccgcaggtgggctccatgttactgagggcagcaagctatgggcagcctatagagaatatgagatggccattttgatcaccatcgctgatgccaatgatgaggagagggaaaagcaagttcagcgtatacgcatgctattccaccgccagttatctgttcctttggctgatatggaatctacacttgctgagtataagagctgggaggctgagcaggggaatgcaaatgatcctggtgcagattttgatggtgtcccctcaaatgttgtatctgcttacaaaaaggccaatgatatgtacaatgaaaggaagcaatacgaggatcaactaagcaatgcaggcacatttgaaggtgacaaactgcagcaatttatgaagtacatcaaatttgaggaggcttctggtgaccctgctcgtgttcaagttctgtatgagcgagctgtttcagagcttcctgtttcaagtgatatatggatgggatatacaagttacctggatagaaccctgaaggtgccttctgtagtcagaagtgtttattacagagccacaagaaattgtacatgggttggtgagttatgggtccattatttgttgtctttggagcgtattcgtgcttctgaagaagagctgcagcatgtatttgaacgggcaatacaatgtaccttttcaaccatacaagagtatttcaatatttatcttactcgagttcatggtttaagacggaggatttctgatggcttggattttcaactgattaggcagacattaacggatgctgcagaatttctctcatctcaactgagtaccaaggagttactgcgcttatatgcttattgggccaaactagagcttagtctcggcaaagatctttctgcagctcgtggagtttgggaaaacgcgatcaagaaaagtgggtctgtttttgaagtttgggagcagtacattttaatggagataaaaatggaccatgtacatgaggcgagatccctttataagcgttgttatagcaaaagatttgctgggtctggatcagaggagatatgctactcatggataagatttgaagaggagaatggcaccttggatgattatgatcttgctgtaaagaaggttacccctcggctaaaggagcttatgacattcaagtctcaagaggaggctaaagttgaggcttaccctaacctcaatgataattctaatgcaaatgattcctctcagaaaagaaaaccaagtaacaataaacagcagccccctgctaagaaaagaaaagagaatccaccaaaaagtaccatgccatcagatgaccaaggatcaaatgtgcaaagtgggcacagtggtgctgttactgatgtagaagtcggaggggccagcagggagaaggtcatggcatctatcgagatgaaagtggacagtgacagccgaacagggaaatcaagttcaaatgaaccaaagccatccttttataatgacaactgtacagtttttgtgtcaaatattgacttgaaagcaaatgaggatgatctcaggcgattcttctctgatattggtggtgccacagcaataagattgctgagggacagattcaccaaaaaatcaagggggttggcctatgtggactttttagacaacaagcatcttgaggcagctattaagaaaaacaagcagaagctgcttggaaagaaagtgagtatcgcgcgatcagatccaagcaagggtaagaagagccgtgaagcaggtcaaacaagccaggataatttacctccgagtggtggtgatgatgcaaaagcaacaggatccagtggaccagacaatgaagtacccaagggtgatgcaaaaaccatagggaagaataccctttttgcaccacgagctctggttaaacctcttggatggacaaacaaggatgagaagaaaccagatgttgcaggggagttgaaatcaaatgaggagttccgaaatctgttactaaagaagtgatatcagttggcaggtgtggatctccatgccccaatccagtgccaagatttgtggtgccttcatctctatgttagaatgatggacctgtagtagcagcttgaactggggatctacaaccgttatgtcttaccccgatgtagacatgaatatttctttctgctagggagattatacaagccatgccgaattgcagggtggtgaaggtgaaaacgggacgttgcgttcgagcagaaaaaccctgcccatgtgaaaagaaaacactgaccttataatatgtgctcactttctttttgaaccatacgtacgcattgctggtgaaacatcactgcatctcaaaaatgtgtaatctactctacgcggcttgattggagatgcggaaattttgattgtacgttgggacc

SEQ ID NO: 164033 - DNA, 256 bp, Zea mays
  Clone ID: MRT4577_81176C.1
gtgttactcttttttttgtgtgtgtctcctggcaatagctaattatgtcaaaactgtcattgataccaccttttccattaatcattccttaaaagaatgtgtaaatagattcctatgtgtggtccatgatgcagatgcccttcaaaaaaaaaaaaaaaaaaaaaaaaaaaaaaaaaaaaagggcagccagttttaagggtccaaacttacattcgcgagggtgccaccttttaagtattcaatcttgccaccttaa

SEQ ID NO: 164034 - DNA, 459 bp, Zea mays
  Clone ID: MRT4577_81177C.1
cctcgagccggccggggacaaactacgtaacgaagtctacgaatttgctgctttccgaccccgagatacgaagggcgttgcaccaggggcggtccccctcgcgtgtgtgcgatacggcgatgacgaattaggggaccgctgactaccccatattcaatatcgtacatcatcagcgatggggtaactggtaaaactacgtctcgcggagaggatgctaactgagcagcaacggaagaagtaggaagcacaaaggtgtgcccaaaatcctccaccaagatctaaagatagttgtgggtcagagcgagcccaaagccacgagagttgagcttagcgagaaggccgactctttcatttttttttttatctcccaccgcccacaacaatgctaagaggtagattgaaaggggtattgctttcccaacatgagtatccgtcaatgacacaggtcgccacttctca

SEQ ID NO: 164035 - DNA, 872 bp, Zea mays
  unsure (1)..(872): unsure at all n locations
  Clone ID: MRT4577_81178C.1
agtctctagggtttccactccgccgcgccgccccctcctcccaccctgcctcgtcgcggaacagtgctcccaccgccggcgccatgagtaagttgcagagtgacgccctgagggaggcaatcacaaacattatcaatgactgccgtgagaagaaccgcaagttcgttgaaaccattgagctgcagattggtctgaagaactatgacccgcaaaaggacaagcgtttcagtggttctgttaagcttcctcacatccctcgcccaaagatgagggtttgcatgcttggtgatgcccagcatgttgaagaggcagggaaaatgggcctagactgcatggatgtggaatctcttaagaagatgaacaaaaacaagaagctagtcaagaagcttgcaaagaagtatcatgctttccttgcatctgaggctatcattaagcagattccccgtcttcttggacctggtcttaacaaggcaggaaagtttccaactttggtgtctcaccaggaatcccttgagtccaaggttaatgagaccaaggccacagtcaagttccagttgaaaaaggtgctttgcatgggtgttgccgttggccacctgggtatggaggagaagcagatcttccagaacgtgcagatgagcgtgaacttcctcgtctctctgttgaagaagaattggcaaaacgtgagatgcttgtacctgaagagcacgatgggaaaggtgtaccggttgttctaggctctagtcttctaggatttccaggagattgacaacttggaacttttgttgctttctcaatatcaaattntcgtgcgcgacgagtgacaattattgtcttgtaccgagatggtttggtctattgtctggaacttgatg

SEQ ID NO: 164036 - DNA, 569 bp, Zea mays
  Clone ID: MRT4577_81179C.1
ccgggtagcacgcccagcgccgagctactgtaccaagacgattgatgtggacgctcgagcactccgtcgttgggtcctagagcggcgatgtgcagcgcagccattggagctgaggggaacagtatgttggagggaaagagcaccatccttgctcggtgctcacgtgcaaggccaggatgtctactgggagctgagcagctaggcgaagaacgtcaaacatcatctcacgttgttgaaacactccatcctcggcaagcatgcaagagtggcacaaactcagccagcttgaaaggacatgtgtgtgcacctctactataacaagaccaacatgaccaatgtacttgctgaggtcatgcacaagcttgtgatgttcactgagcaaaaaatgagggacagggctgctaaaaaccaagcactcgaccagtactcaaggccagatcagaccacagcagatcgaggtagactaagcctaggggtacaggaccatgcatgttaaaaaggccggaggcaagaagactaacacgcagccctaagagctaactaggaggcttgccatagggcatgacgat

SEQ ID NO: 164037 - DNA, 340 bp, Zea mays
  Clone ID: MRT4577_8117C.1
acgccgactagtttctgcggctcgccgcgccagtcgttttttttttgttcaacgcggtcgtggtggccgccgacgcggcagcggacgccgggagcgcggagttcagcgacgaggagaacccgtatgagctcctgggcatgatgccggttgataggtcggatgacatgaaaatggactacaagaagaagcgcaaggacacccaggagactggagacgacaagttccttgacaagttggacagggcctatgacactgtcatgatgcatgagatacagcatcagatgaagggtgtcacatacggatctgctcaggtgtccaaggatatgaagtatgctgacaa

SEQ ID NO: 164038 - DNA, 373 bp, Zea mays
  unsure (1)..(373): unsure at all n locations
  Clone ID: MRT4577_81180C.1
ggcagccacgcaccngcagacaccacccccaagccaggacccacagaccnacgagcggggggacgcaagggccaagagacgaaacggccggagggcacgcacgcaancagccgaagcggaagccggggaggccgcggagccgcagcgggcagcggcggcgacaaccgcggaggccgacaacaccagcagacaggagagcaccgccaacgcgggggggcgggcaacacccgcggcaccgggaccggccccaccgcaaccagcggaaacgacgacaggaaccaaaagagcgcccacagaaccgacaacgacaggcacgccgacagcaacagagcaaaaaaacaccggcaggggcagaagaagaacagaacgccgg

SEQ ID NO: 164039 - DNA, 604 bp, Zea mays
  Clone ID: MRT4577_81181C.1
ttgggtacctcgaggccggccgggattaccgtatgataatatatcatcagcagcaacaatcttctcttatgaataccactgcctcagaaacatccatgggtgactcgcatgagtccgtccctctgtggctacctatgctccgttccctacttcccaggggactgctatgcgcaaccctgatcgagaactggtcgcatcatcgtcatgatcattccggcaccaaccctagatggagtgtgaactgaataacccgacacgctgcagcccagaatcaccaggacgccgccaactactagccagactgtatgtcgactaatggttcactcacacttggaacggtacggcgttctcagatcacacgagcagcatacccattgcgaatcctggcaagcagagctccacctctgcgacctctccgacgggctcacacacgattaagtttgttcttgacggatagacaggtcctctccgtcgcctgcgccgacgacgaccgccagagcgtctccgattccagcgaccagaccattaagctcatagtacacactcgccgattggaagtacacaatcgctcgtgaccatcatgcagggctacgaccacgacatg

SEQ ID NO: 164040 - DNA, 236 bp, Zea mays
  Clone ID: MRT4577_81182C.1
acccgtcacggcgtgcgcttgactcgcgatctaatctacttttcgaccagagtgataatgttcatggctggggagctcgctatccccggtggggtcttcaccgtcgcagtgccgacgcggctgacggcgccagcggtagatgctgttaaccgtggctatttctccgtcacgcgcgcatgcggacggtctgggactgtctctctcagctcttgagaaggactctatgcaaaaccgct

SEQ ID NO: 164041 - DNA, 757 bp, Zea mays
  unsure (1)..(757): unsure at all n locations
  Clone ID: MRT4577_81183C.1
ttgggaccctcgaggccggccggggcaaacgccccagctctggtagccgcgcgtccactgcttgcctccatggcgcgccctccatctcggagccccttctgttctctctctccatcgccatagtcgcccggccccttcagcgctcggcgtccatctccagccagcgcttctctctctgtgctgcgtctggatccctggatgcttgccctgctccctgaccggcgcgtggtctcgagctccctgcgcgcgcgttccctggatccctcctccagccgtgagctccctctgctcgactttcctcctcccatggcgcgtgtgcgcagctccagctcgcccagcctctctgttccccttcttcctctccccatggcgcctaactcccagcttctcccatggcgtcgtccccagcccctgttcagttctgcgcaccgagctcgcctgcttccctgccggtgatgcccagccggatttctgctcgctcggtgctcctccatagccggcgctcgccccaacaccagngctcggttttgtcctctgccagcgtccagccccaactcggattcccggcgtcctttccaattccccaagctccctgctcagctctccagagcgtgcgcgccacctgctgctccgcttctccctgtgttgcgcgccgtgctctgcttgccggagctctctgtcgcgccgtccatcgttaggcacaatctgctctagctcgtggacgtcgtatcctggctctggtcgctggatgccgcac

SEQ ID NO: 164042 - DNA, 217 bp, Zea mays
  Clone ID: MRT4577_81184C.1
gcagccagaagggcttcaacacgctcagcagcagcgagattgtcgggaggagttcgaagctcgcacagtcaatagcactgtacccgagtccaagcacatttactaaagaatatcctacactggctcatctttgtcttttccaccattttactttcttgtaagaaaaacaattcacgaaggattaaattccaatttgatgtaataatattgtcggctt

SEQ ID NO: 164043 - DNA, 290 bp, Zea mays
  Clone ID: MRT4577_81185C.1
aaagataataaatgtaaaagtcctgatgatgcggagatgggtccagcgaaaggaaagaagcccaataaaagacagaaaattgttgttctcaactagtaaccttgtcttctgtaaaactaagaacaagggcttgacggcagtggtgaatgtggtggtgctgtgatatcagaagttaaggagggactctctctggtcttttttaatttgtcacggtttagtttaaaaatgaccaggggacaaatattcgagaagggaggtgtatttttttcatggtgtgcaatgttcaggcc

SEQ ID NO: 164044 - DNA, 570 bp, Zea mays
  Clone ID: MRT4577_81186C.1
ggtgacacactaagattttctcattgtgtcccgcattatttgtttagcttaactgaaaaagaaggcattccagggggatctcttgaacttgatcctgcagcgcttccctccaacttggaagaggcttttccttctgctaacccagaatgcagttctgtaagaagtaaggagcataactccaaacatgctggtttgtccagtgaagattgcaaagaaaccatgaatgtggggcagcggcaacagacaaaatctgtgaatgcagggatcgctacaaaaacaccaaatgaagagaaaatcaagcataacactcatctgcctgaagttacagatgtcgatgacgataacatttgccaaacagagtatgtatgcgctgaatcagaattctatgatttttcaagaataagatttctccaaaagttttcatctgggcaaatctgggctctctatagtgatatagataaaattccccaattactatgcattcatacagaaagtcgatcttaaaaatggtacagtacacgttagattgctgggatgtctatcctcgaggagaagtggagaaaagattgt

SEQ ID NO: 164045 - DNA, 461 bp, Zea mays
  Clone ID: MRT4577_81187C.1
catgcgccctgcccctcttgacgcttcatgcggcccgctgggtcctgagtcggttttcgtcctttccgtgtgacccttattcctcttttgcgcgggtcatcgccttcctgtgtttgttcaccctcttccgcttcgtctggctctggtgcgggacgatccctgtctgctcgagtgcgttgcatctgaccgcctgtcaacagcggtagagtccttccgagtcttccgcccgaagttccttttcccttgctgagatcttgcaatgttctgggttgtagcgcgctgttatgctttttggaccccggtcgtgcccagcttagtcgctgcctccgctgttgtttctgtgactttgctgagtcctctccagtctaagaagttcatgcttggggtgccttgactgtgtgttctttttactgcgcgtgtcttaccctggctgctttctatggggtctgctttctttttga

SEQ ID NO: 164046 - DNA, 289 bp, Zea mays
  Clone ID: MRT4577_81188C.1
gaaatacctgctgcgtaccattcagtactgcactatgcatcgtactttgttcacattattacggaaatcgcaacaacgaaccgtggatagacgctgaacgatgagctggagtccactttctcatcgaccattccggatgacgcgcgtgtatgggtgctgtatccttataccgactttgcacgaggttggttgtaagaggcactgcactgcaatctaccttccacaatgtctgtgctgtgagatactctgtacagatctactctgaaactgttcacaagaattctatacc

SEQ ID NO: 164047 - DNA, 864 bp, Zea mays
  Clone ID: MRT4577_81189C.1
atacgctgcagagcatttttagtgataagaaattcaaaggttgtctcaactccctcatggatgctgatgcaacaacgagcaacattcaaagatttctgtacgtttccagcagcttgttggttctttcttcataacatctataattaaacatcaatatgtgctcagctgaatatggacaagcaattttttttttcagtttcagagctgtgtcatatatggacatggaatctggattcctgtcggtagaaagcttcctaaaggccctttcttccatgcagaggcaacctaagatggacagcttacaagattagaaagtaaggagcaaacctcatacaacttcaccagcataatgaaagatccatacaagacgcctataagacttctgataaatatgcaagcaccgtttgttttagggcctttgagcacctttcggatcgtgagctgattagttttggtgacaatagatggagaaaccaggcgcttgaataccgacctgttaagctcctcatatcctcccgcgagctcgctgagtccctcaagctgaacaccacctgccccgctgtactgcagaagctgtttgatcgtgaaagatacatgtagaatctcctttcagatggccgcgcttcacctgacttgagtcgccgctttcatgtttcaccgggttgtcaagttcatgtttcactgtaaaccggcgattgtattagtatcttgtccactgttcgctggaaaaggtgtgggccgtgtggccaactgcccagcgtgagtcgtgacctgcctgtcaatcgcttgagtcttgaccataggccacacggaattagatatctgtggtgcactgattttgggctaacgacccgatttctatct

SEQ ID NO: 164048 - DNA, 432 bp, Zea mays
  Clone ID: MRT4577_8118C.1
cctcacgctctttctctttttttgcctttttttcctccctcaaacgtttttttttttttaacctttctttcaggggggcaacgccctcttcaaaaagctctcttgcttaagggggggtggccaaggccctgaacttttggctttcctcgaaaagctgtttagaatcatcccatgttgaagaagctgttttttccttggtggggtccaaaagatctgaaaaattttcacccaagcgctggcgctttttagcatccttttgctttttttccttgggcctttcaagctggtcgtcttttacaagcttgatgttggtggtggattttcctttaagagcatcatcctccacagtagcagtttggaattcctttaatggccatgaggttgtcctgggaatctttccggattttgccacttctttaatttggatcttgt

SEQ ID NO: 164049 - DNA, 2652 bp, Zea mays
  Clone ID: MRT4577_81190C.1
gagaacgggagtcttcgagcagcgtcgttccgaaaagaaaaaagaaaaactcagccgccggccgctgcccctctcggctgcacgacgtccgtgagggcgtgccccctggccccgtcccttgtcgcctgcccgccggtgcccgcacaggctgccagtgccatactgccatccctccgtccggccgtctgcccaggctgcctgcccggcgccctggcctcccggtcgctggctctctgcccaggcgccaggccgcaggtcccaccgccccagaccacccgcgaaccagtccgctgcaggctgcaggccaccgtccctccagttcgccggtcagattattaaccattcagattcaaaaccccagctccgcctagacgcgtatcctccgccactatggtggcagcggtgtccctgccgagccaagcacaggccgtgcttcggagccggctctgcgacccggtcttcatccactccgccctcagtagctccctggacactaattacagcaagctgaagtacctcgtcgccagctcggtctccgaggcctgcaacaattctgtcctcctcttgggtccccgcgggtgtggaaaagcagcggtggtcgacatggttcttgatgatctgaaggaggagcacccagatgcgatttccgtgatcagactaaatgggatgctacataatgacgacaactgtgctatgaaggaaattgccagacaactttgttcggagcatcagttatcattttcaaaaatggcttcttcagatgacaacactgagttcatgattgacatgttacgggagtgcggactagctcacaagacaatactatttattctagaagaattcgacctctttgctcagggtaaacagagattgctttacagcttacttgatgcaatgcagtctctaacatcacaagctgttgtcattggtgtgagttgccgcttggatgcagatcaactcctagagaaaagggttagatcccgattctctcataggaaacttttatttatttcgccttcgttggatgatatgcaacggttggtggagcatttgcttatactggccaaagactcaggtttaccatcaaagtatatcgccgattataactcaagacttactagcatttttagtgataagaaattcaaaggttgtctcaactccctcatggatgctgatgcaacaacgagcaacattcaaagatttcttttcagagctgtgtcatatatggacatggaatctggattcctgtcggtagaaagcttcctaaaggccctttcttccatgcagaggcaacctaagatggacagcttacaagatctctcgattttggaattatacattcttgtgtgcatgcacagattagaaagtaaggagcaaacctcatacaacttcaccagcataatgaaagaatacagatccatacaagacgcctataagacttctgataaatatgcaagcaccgtttgttttagggcctttgagcaccttttggatcgtgagctgattagttttggtgacaatagatggagaaaccaggcgcttgaataccgacctgttaagctcctcatatcctcccgcgagctcgctgagtccctcaagctgaacaccacctgccccgctgtactgcagaagctgtttgatcgtgaaagatacatgtagaatctcctttcagatggccgcgcttcacctgacttgagtcgccgctttcatgtttcaccgggttgtcaagttcatgtttcactgtaaaccggcgattgtattagtatcttgtccactgttcgctggaaaaggtgtgggccgtgtggccaactgcccagcgtgagtcgtgacctgcctgcctggcaatcgttcgttaaaccagcagggcatacacggaattagatatctgtggtgcactgattttgggctaacgacccgatttctatctcgcacaagtttagcagcgtggtgacagtattttggtagctttgaaatgaatgcgctattcggagtttacagatccatacaagacgcctataagacttctgataaatatgcaagcaccgtttgttttagggcctttgagcaccttttggatcgtgagctgattagttttggtgacaatagatggagaaaccaggcgcttgaataccgacctgttaagctcctcatatcctcccgcgagctcgctgagtccctcaagctgaacaccacctgccccgctgtactgcagaagctgtttgatcgtgaaagatacatgtagaatctcctttcagatggccgcgcttcacctgacttgagtcgccgctttcatgtttcaccgggttgtcaagttcatgtttcactgtaaaccggcgattgtattagtatcttgtccactgttcgctggaaaaggtgtgggccgtgtggccaactgcccagcgtgagtcgtgacctgcctgtcaatcgcttgagtcttgaccataggccacacggaattagatatctgtggtgcactgattttgggctaacgacccgatttctatctaaaaaaaaaaaaaaaaaaaaaaaaaaaaaaaaaaaaaaaaaaaaaaaaaaaaaaaaaaaaaaaaaaaaaaaagagcataaaaagaaataacaattataataagcgtcacctaaaatcaaatcaatggccaataaaatacaacaaat

SEQ ID NO: 164050 - DNA, 318 bp, Zea mays
  unsure (1)..(318): unsure at all n locations
  Clone ID: MRT4577_81191C.1
agtgaattgcgtaccgtngtgtgaaaattgagtgtgggcggggccttngcaagcgccatctgtgttctacgggttntgaaacccttttccactcatgggggggggggggtataaaacttctcatgggatccactcctactgcttccctacacacagggcgtgtatggtcctgctagggcggcttcctggttttgcgaaactaactcagaacgggggtctggggggggattgtgcacacatcatgggttgcatctgtttatcaggggggggggggaccaaccattcttaaaaatttcatcccctttattctaatctaac

SEQ ID NO: 164051 - DNA, 2402 bp, Zea mays
  Clone ID: MRT4577_81192C.1
cctctctctctagcaaaccaagaacaagggaagaagactggcggaacccaacagccacagtaaaaacagatggcagtggtgggtagatccactcaggacaggactcacttgcgcaagggaggtgtggaaaaagaacctcttttggctaccaacctaacgactagtactagtacactgcttgaactagaaccaaaccgaagaagaaacagcagacccacagccccgcccgtccccgtccgtccacagccagctccgcctcccatccagcgcccgtccacagccgccgcagttccagtgagatcgagcgaggtaagcttagatctgagcgatttctctcgcgcgtcgcaggtaaagttcactcgacttcgactctctcatcctcttctgttcttcctggttccgtcttcttcctcgagcagacagcgagaaaaaaaaaaaaaaaaaaaaaaaaaaaaaaaaaaaaaaaaaaaaaaaagaaaaaaaaaaaaaaaaaaaaaaaaaaaaaaaaaacctgaagtttcggcggcggcgtaggtagcggcggggggcttgggatctcaatctcaaccccaggggagttgggttccggtcacctgtcactctacgcaaccatgtcaaggaggaagaccagggagcctaaggaggagaatgtgacccttggccccactgtccgtgaaggagagtatgtctttggtgttgctcacatctttgcatccttcaacgacactttcattgagggaaacactggttcggatcactggtgcgatgaaggtcaaggctgatcgtgatgagtcgttaccttatgctgctatgcttgctgctcaagatgctgcacagcgttgcaaggagcttggtattactgcactgaacattaagcttcgtgccattggaggcaacaagatcaagacccctggacctggtgctcagtctgctctcagggctcttgctcgttctgggatgaaaattggacgcattgagaacgttacccctgttcccactgacagcatccgcagaaagggtggtaggaaggggaaggaggctgtaggcgtatttgacatctcttggaggtggccatcaagcagctagtcctctctggatagtgttgctgtttctatgcttgtcaagaggagctttgattttgctatatgttgatgaccatttaccgtggttgaggaattgagttgtcatatttatcttctagatatgcattttcacttataaacgtgggttcccgttagcttaattgcgctgttttgcttatatcttgctgaccccagaacattcgttctgagtgttaaattttagcatcgggtgatgatcgtgtggtaattgcgtcgtcgaggattactttctagtttctgaagatgtggccgtttgcctgtattgagcatctcaataaagattgcggcaagggagaagcgatatacaaccaaaagcaatcgtgcatgtatttgtttattatattccacaaatatttgaacaaatgcgaatgctagtacaattgtacaaatgattcctcttcactggcaaaagaaaagagcacgacacgtgggtctcatgcggcaagcatggcgaaaccgatgaaggcgccgagcgagccgacgaagcccgcgacaactggggcagccgtggaaggctgtggcggcgttgtggagctgccgccctcagcggccggcgcgctggcggaagcggctggcggtggggagcctcctcctgctggtgttgtcggagtcggcgccggtggcgaggtaggagttgtcgtgggaacgggcgccggtggcgagctaggggttgtcgtgggcgggcagagtgggtggagcgtgccgggcgccggctccgagccctacaacacctgggcggggcgactccggttccagatcggcgaccagctgctgttcgtgtaccccaaggagacggactccgtgctcctggtggacgccgccgcctacaacgcctgcaacacctcgtcctacgtctccaggttcgacgacggcagcacggtgttcacgttcgaccgctcgggggccttcttcttcgtcagcggcaacgaggccagctgccgtgccaacgagaagctcatcgtcgtcgtcctcgccgaccgctccggcagccgcaccccgacgccatcatccgcgccgctgccgagcccgccctcgcctcctgctgctgcccccgcacctgcgacgagcccatcctcgtcgccaccctcgtccgctgctcccgcagccacccccacctcgccgacgtccccagctttagctccggcgcctgcccccacgacaacccctagctcgccaccggcgcccgttcccacgacaactcctagctcgccaccggcgccgactccgacaacaccagcaggagggagctccccaccgccaaccgctttcgccagcgcgccg

SEQ ID NO: 164052 - DNA, 615 bp, Zea mays
  Clone ID: MRT4577_81193C.1
aacccaccggaccggcccttggtttaaaaaaagggaaaaaccacccttaccaccggccgtttttttttggaaaaacctttaacccaaccctggggggggggtttccccccaaaaaaggaaaaagggggttttggccaattttcagggaattttaaaaggggttttgggaaaaacaaacaaaaaccaggggtcctttttgggccgccccaacccctaaattttggtaaatcccccaaaaaaatccgggggggggggccctcctttggggaaggcctatttcccaaaaggggaaaaggttttttgacccctttccaaaaatggaagggcccccccccccccccaacttaattggcccaaaaaaaagggcccccccccaaacttggaaagggccactttaagtttaacccaaaccccaacggggaaaaaaaaaaccgtgggttccaccttttgccacaaccgggggggggagggtcccttgaaaaccctccccttcccagggaaacctttaaaaggcccaacccccttttttttgggccctaacggggcgggggggcaaaacaccgggaggggccccatatttccttaataaaaattaaaaactctttttaaccccca

SEQ ID NO: 164053 - DNA, 854 bp, Zea mays
  Clone ID: MRT4577_81194C.1
cattgggacctcgattgggtacgtggaggccggccgggacaagcggcatcctggtggcaacgaacgcgggcgcacatcaaagacaccccgtcccgccgctggcgcagaagctctctgcgccggccgacgctccgaaggccgcgggtgccaacctccctcaggctcagccgaagaactcgatggaacatcgccggattcagattgctcgttttaatgcgctgaagcagcagcagctcctgaagcacatgcgggagcgggagctcgccgtcgctacggcggcggcgtggggcacgagcgtcgcggggtctcatcgtgccgccgggtaccgtgcgccggcgccccatgtcctgagctcgtccgcgtggcccaccctccagaagcagcagcagcagcaaagggcggcgtccccagcgggcatgcgcgccgtcttcgtcgcccctcctggcgccaagcgcgagcgcgccggcaccggcgtgttcatcccccgccaggccggcgcccccgcggagcccaagaaaaggccagcagcgtgcgcccctgtccttctcccggcgcgcgtcgtgcaggcgctcaacctcaacgtcgaggacctcggggcccgtcccatctacccgggcggcttcgtcctcgaccacgatgcactggtgagccggagcaacgctctgctggcgagccgcgcgtcccagcagctccatggcgcttcgtcgcgcgaggtgaatctcccccaggaatggacgtactgagggcgccgattcgccaccgcaccgctgcaagatgactcgacgatcactccagattaacggggggtgtcaaaaaaaaattactattgctattggtagcaataggtattatag

SEQ ID NO: 164054 - DNA, 246 bp, Zea mays
  Clone ID: MRT4577_81195C.1
acgcactgatgtctatggagttctcaattggatgttcaaatcatctgaaccacaagctttggttcaattgcattcaactctgtggtgaatacacagaatggtaatacaagaacatatccactcgctctctctaaaagacttcgtctagaagcacaaagggatctgtaagatcgtgctcaggtcatttcacattggacaggcatcatgctgagatctcgtcatgttagagaatgtgaaagtcacatc

SEQ ID NO: 164055 - DNA, 252 bp, Zea mays
  Clone ID: MRT4577_81196C.1
caacaccccaccacactacccagcggattccgcccacccgcacccagaggggaggtgagatgtcgttttttaaggccccaacgtcgaggaaggaggaagtggtcaccatggagcacaccataaaccaacacaagcgcctgcaccgctgctcattcaagaataaggcaccctacgccattaaggagatctggaagtctgcgcataaggccatgggcaccactttcatcctcgattggtgaagaaactcaacat

SEQ ID NO: 164056 - DNA, 412 bp, Zea mays
  Clone ID: MRT4577_81197C.1
cccacgcgtccgcccacgcgtccgcccacgcgtccgcggacgcgtgggttaaaatatgttaatactagttagaaccgtacttatcgcacccacccataaattcaccattaggactcacaataatagccacaattgaattaataagtatttacgcgattagtacgtaattaagatatgattagtgcgataggttaatgtgtgtttaatgacgtattggtgtatgtttatgaatggtgcatgtttatttattggtgtatgttttatttttgtatgtgcgctatgcgactctattagaagcggattgtgcggtagacgatccgaactcgttcgaggacgatccacaggactcgcttgagcaaggcaagtggattctccctctgcatattctgtttgtacctattcactgcatata

SEQ ID NO: 164057 - DNA, 364 bp, Zea mays
  Clone ID: MRT4577_81198C.1
tcgcaagaatcaaatcgttgtcttctcttggagcaagagaatctcgtcgatgacaagaacccggacagagcagcgaagccatctccaatctctcggaacaagagcagactcgcctggatcaccgtttcaaaggatttttttttcaaccgctggatgaagacagtgttatggcctcttctgcgagcgatcccttcttttccttgttgcgagcggcatattctcctcctttctccaacagcaatttctatctgtctctcgattgagactacgtgctgataacgtgttgtaatactcaatggttaatagtgaaaagtccttagcccattgactgggccagcactttccttttttttaaaaatttttt

SEQ ID NO: 164058 - DNA, 369 bp, Zea mays
  Clone ID: MRT4577_81199C.1
ggaaggggaatttgccgctttttccatgggtcagttccaacaagggcaacagctttttcgggtgaaattgggctaaagcctttgttcgaaaagaaaaagggaattgtctgacaaaaacccacatgggttcccatttggaattgggaagcaccccctttggtggggaggggcttacgacgaagcccttgaccggcgggaattaatcacaatcaatcccttttgcgaggaccggtcctggtcgtcttcggactggaaccgcggtaggaacttaaactttcggcaagtgtcccggggcgggaaccggattgcaaagaaattcttggtctttgaaattggaccggagggttggaactttacaacctttcccac

SEQ ID NO: 164059 - DNA, 303 bp, Zea mays
  unsure (1)..(303): unsure at all n locations
  Clone ID: MRT4577_8119C.1
ccaaggcgtccgncaacacttccgttaattttaatccccgtacttttctttccaacctcccaatcaacccaggggccctttaaatttttaagggggcaaaccataacaaaatccatccttccaaatcaaaatccccctttatccacttttaattttcccaaatcaaaagtcaaaatccatttaaccatccccaacccaaaagtaatcccaaaaatttccttttcttctccaaccacaaaaaataaaccatttttatttatcctatctccctctcaaaaaatgtattttttcccttttatttct

SEQ ID NO: 164060 - DNA, 200 bp, Zea mays
  Clone ID: MRT4577_811C.1
aacgaaacctttttgttaaatggaccccttgaaggccttttatttttagaggggccaccccaccgggatgcttggcctttccagcttcgataaaagtatcagaacccttattgtagcatgcatgcatgcatttgccggttttggaagaaggtttttcctaacatggacagtcccacacatgccgggcggaaacaagtacc

SEQ ID NO: 164061 - DNA, 190 bp, Zea mays
  Clone ID: MRT4577_81200C.1
attcggctcgagcgcgagtcctccgtctttttgccgctgggagccacgtccacctcgggggcctgtatcaacccgaccgcctaatccttaacggagagctcaaacctctgatcaaagctgtcctggatagctgcaacatgttgcaccagctattctgactccggctgcttcaccaagaagcccgcagatt

SEQ ID NO: 164062 - DNA, 306 bp, Zea mays
  unsure (1)..(306): unsure at all n locations
  Clone ID: MRT4577_81201C.1
tccctccccccatccgncgncgncggntcctcntctagntccctccttaccccgagntttaagntcggggtaccggcctacctatccggagggagagagagagagaggggagaaggggcgggcggtggggcggggggtctcggatggtcgcggtgcctccccgattcttcgtagggatctcgctcgattccgggccatggaagacagtagagacacaaggggacccgggagaacgcggggacggaaacagggaaccggaaacgggctgatgatccggaatcacaagaacgaacgaccatgaggggg

SEQ ID NO: 164063 - DNA, 516 bp, Zea mays
  unsure (1)..(516): unsure at all n locations
  Clone ID: MRT4577_81202C.1
ataaaaaaaaaaaaaaaaaaaaaaaaaaaaaaaaaaaaaaaaaaaaaaaaaaaaaaaaaaacttgtacctaaggccgagacctcgcttctgggggcaattctcgcggatatggcgtaaaacttgggggatctctcctaacatgtgtcgtagaggtgcccaattcctccctataggggcccaattattccaaattaactgggccgtattatatacaacgtggccgactgggtaaaaacctggggttacccaaaaaaattggccttgcaccacattacccctttttgccagcatggtcgtaatattcgacaaaggtgcgcgtaccaatcgaacctgtcccaacactgtgccgcacctctccaaaggggatatggaaccccccactgtgagaggggccttcaacctcggcngggtgtggttgagttacgcccagtgtgaccggttacaccttgccagcgaccctatacacctcgctcctttcccttattctcccccttcctttttcttgccacgccctg

SEQ ID NO: 164064 - DNA, 446 bp, Zea mays
  Clone ID: MRT4577_81203C.1
ggcgcttctcaagagtaatgacactagggctctcttcctgatggccatcgtggtcatgggcatggccatcgtgttgacaccctgccctgtgcacggacgaaatgatggtagctatacatgtgcatcatgcccactctaaccatatttatttagtttctaaaagattgtatgcattggatattggtattgtcattattgactagttttttttatttcaaaaaaaacttttgtgtagagaggtgcacgcatatgccggggtgcactatcagccgttgcctcagccagtgcaagcagtgggggtatgccaaccctgtgataaactgctggaacacaccaccgaatacagttttggacacatgctgctgctttagtaatgctgctagaaaattggcttgattttatcactgacagctctagctgttggatcttgactgaacaatccaaat

SEQ ID NO: 164065 - DNA, 1279 bp, Zea mays
  Clone ID: MRT4577_81204C.1
gggagaggctccaaaccctagccacacacgacgcaacgcaacgccgatggggtgcgcgcagggcaagtgctgcctacggcggcacccgaggaggggctccgccgctgccgccgttggcggcggcgccacgctcggccgcgccgcggtgcccggggccgggctggtactggagtacgccgcgctggctgtggcggggctgtacccggactccacagcccgggagtcccaggacgcgcaccttgtcgccacgcgcttcgcgggcgacccggacctccacctcttcgctgtcttcgacggtcatggcactgccggcaccgcctgcgctgggttcgcgcgggacgcgctcccgcgcctcctcgcgtcgctctctctcgccagcgccgccgaccccaccgcggcgttccgcgaggccatgctgggcgccaacgccgagatgcacgcggctcccgaggtcgacgactccatgagcgggaccaccgccgtggccgccctcgtctccggcggcgctctccacgtcgccaacgtcggcgactcgcgcgccgtcgccggggtctggcgcgccggccgcgtcgtcgccgaggacctctcctgggaccagactccgttccgcgccgacgagcgcgagcgcgtcagggcctgcggtgcccgggtcatgtccgtcgaacaggtggagggcatgcgcgatccggaggccgagcgttgggcgcccgacgagggggacccgccccgcgtctgggcgcgcgacggcctctaccccggcacagccttcacgcgcagcctcggtgacctcgccgccgaggccatcggggtcatcgccgagccggaggtcaagagcgtcgagatcactccatcgcacctcttcttcgttgtcgccagcgatggcgtgttcgagttcctctccagccaggaagttgttgacagggttgccacgtatcaagatcctcgagatgcctgctcagcaatcgctgcagagtcatacaaactatggctggagcacgaaaataggacagatgatataacgataatcattgtgcatatccgagacatggaaagtgtaggtgcaccaaaattttaaattctgcaagcataaacagaagtaacttattcagtgactggctgaaaatttgttgttcttcccaaaatttactgtcaggccctgcagggagtgacaaagcggactacggtagcgtgggagcgtcaatagctgtgcacgcaatacagtcagaggtacctgtatttgtagaatcagaagcaagtcacatgaacagatctttctcct

SEQ ID NO: 164066 - DNA, 355 bp, Zea mays
  Clone ID: MRT4577_81205C.1
gaacctttgggctgatttatgtgcttgtttatgtacttgtttatgtgcttgtccatctccttgcccatactgtggtcgattatgtaggccccaatatactcgacacggatttaatcacacaccgcaccttcaccaactcgatacctatcaagtcaaccgcgccccccttaaacaaaataaatataataccctcctccacaaaatgtataccccaatgttgcttgtctcagacgactcaagtccatgcatgtacgtacgtgatacaccattatctccacactgctattcaaacctaacataactgttgggtacacataataccgccatcatcaaaatttctttccaatttaatcca

SEQ ID NO: 164067 - DNA, 267 bp, Zea mays
  Clone ID: MRT4577_81206C.1
gcgggggcggcaagcaaccacgggcggagctcggagcgtcctccgcctcccgtctatagatggcgctgtttgtcttcctccatatataggggccatcagatccaagaagagggaagagcaccaaggaccttcggcgcccgttcaggatccacatcttgccgagcgggttcttggttggccttttcctcttcggaccacctcagaggctcttggtgtagcttgccactctcaccagtcgaagtgtggatggctgatctcgacattcag

SEQ ID NO: 164068 - DNA, 567 bp, Zea mays
  Clone ID: MRT4577_81207C.1
caggacgaacgaggggcccaaggcatttaggtccttctgctcgcatacctgctactggaaatcagcctttccggagtcagagatcgggcacgctaggaacaccggcatcgggagttgcatgagcacacatcatggactcggctactactgcggatacctgtgccattgtaaacgctgggccaagtaaagactgctggtggctgacaagagcatttgatgatgggcaaactgatcctaatcgataagcagcagaccatggaggcttggatctacaacggagttcctcggtatcagggccgcatgtctgtgctacagcaactggtagacgctagaaggagggcaccaagtgcccctgggcgtaacgattctccgagattcaagcttcaccatcggcgcatgcgagcgatatgtaactatagtgtcatcttaaaccaccccataggctcggcatttaaatactagtatacatgctaaaaccccgcccgtacctaaattaggaatgctgccagacatacctccatgctctgctgtgagccaatcgaaaaagcgaggatcactaggcatggc

SEQ ID NO: 164069 - DNA, 211 bp, Zea mays
  unsure (1)..(211): unsure at all n locations
  Clone ID: MRT4577_81208C.1
gacccacgcgcttttacttatttaatgtcctcaagatccccaacggacgggaagacttaaacactgctgccgaaccacatcccaanccgcggacaagggcggcagggccacagaccaggggggaaggcggcccaccccaaagaaggggcgccgttatggataaaggaaccgtaaaacaccccggccatggggaaagcatagatgggacagg

SEQ ID NO: 164070 - DNA, 348 bp, Zea mays
  Clone ID: MRT4577_81209C.1
actttttaagtgaaccaagagggcaggcctgtatgattccatgataattagggtaggacagaaaaaaaaaagtaaaactaaatatcaattatccttgttaggcactggtacaggttgagactgagaattaaaaatgttaaatgaacatgaacgggaaatacactcactgatcacaacagctgttttcctttcgtttccttactttttttttatctttgctgctcttcacataccggggttagtagattgttactaatgacagtattctcgggaaggcgctacccccataacttttgagttgataccgactcaccaattcgacttactacctctgcacgtatactttta

SEQ ID NO: 164071 - DNA, 261 bp, Zea mays
  Clone ID: MRT4577_8120C.1
cgtggtcctttttccttgggtttcgcgttgaggcggaaacggaacgacaagcctccaagggcagggggcgagccccggcgggtctgcttcggccggcgggggcagagccggccaaacggcgggggggggggacacggacccaccgccgcagggccagggaggagacgcccccccgcacaagcccacgcccacaggggggggccgccgaacgcagcaatcgaagaggcagagcagggccccaagagaaccaacaggcgccgg

SEQ ID NO: 164072 - DNA, 912 bp, Zea mays
  Clone ID: MRT4577_81210C.1
tgagggactaactagagacgacggaggacctcgctcccccttttataccatccttgagtgaggccgggggctcacttcgtgctcgagctccagctcagcagcaaggcgccaaggtagcaagctctgggtcgccactactgcaatggaaggcctgattccgttggtgtaccggaccatcgtggagtacaggaaggcgaggcaccaggtcgccatcgcaagccgcctgctgtacggcgaccaccaccagcagccgtgtggttcgtcggcgctcttccgcgtcgttgaccctgcagcaagcagcagcagctggcacgccgcgtcgtcgtcgatgtccccggccacgtcgccggcggcagccagggccagcggcagcctggcatcgccgctcctccgctcggcgtcgcgccgccagctcgcaggttagtctgctgctcgtgatgggcaacaagttcgagtggtgctttgtggtatgcgatcgaggcacttcttggcgtgtacaagactacaagtgtacgtattacgtacttataccaggtatattaataagccgtagagagagagaaaagggtttattttgaagaataagggcatagtcagagggtggtccaaaggagcgcctcaactgatgagaagagaaggcaaagcttctgcttcaagcccagctggtggttgtatactgtgcctgtactgtaatactatcctgtagctgctgctctagtagcggccatgtattcgtattgtgtacgtgctacaggttccagcaactgagcttgtcgttcaactgcacatatacatagcaaataaggatgtgcatgctcaacctactcaactgtatatatatgtcacaaagacgcgtcccgtgccaagatatatatatatatatatatgagatcccactgtacgctggcatgc

SEQ ID NO: 164073 - DNA, 508 bp, Zea mays
  Clone ID: MRT4577_81211C.1
cgggttgtacccagcgttttttaaaaaaaaaaaaaaaaaaaaaaaaaaaaaaaaaaaaaaaaaaaaaaaaaaaaaaagggagaaagaaaataaaagataaaaaaattaagaaaaaaaagaaataaaaaaaaaataaaataattagggggggacagtttaaaaggaataaagtgtaccgtaggttttacatggtgagggaatggttatttttttggggggggcgaaatttaattgaattgcaggacttttaaaattggggggatggggaaaaacttgagaggcccaaatttattgcctttgcaaaaaattcctttttctgaatggggaatggtacggaaggggtaggtgacggattgactttggaaaatgttggtggttactgaaagggaaagggtatcactttttaaggggctaattaagggtggttgttgttgggttatttcgtttgtggacaggtattttggctttccccttaaagctgtaaatttggggttggttttatggtttt

SEQ ID NO: 164074 - DNA, 506 bp, Zea mays
  Clone ID: MRT4577_81212C.1
cttccaacatataacccctcctccactcccttcttctcctggaaaacatcgtttccttgttcctccctcttcaagttagttctccttttttcccctactacgcacatacaaaccgtagtcatggcgaactccacaatcatctccaatgctgccaacctacagaagtaccttgacctcccccaaaagggcaatcgtcatggccgagtacgcatggatagacggctccaacggcattcgctccaagtccatgaccctgaagaagaaggtcgagagccttgaccacctcccagaatggaacttcgacggtccctcaactgctcacgcgccctgttataactcccatgtctacctccgcccggttgcctacttccccgaccccttccgtcaaagagacaacgtccttgtcatgcgcgacacctacatgtccgatggcacctccaacgtatacaacttccgccacgatgctgccataatctttgacaagtacaaggtggccgacttctcgg

SEQ ID NO: 164075 - DNA, 285 bp, Zea mays
  Clone ID: MRT4577_81213C.1
ggagcagctgaagctggaggcggagcttggcaacatgaaggagctgatggaggacttcaagaacaagtatgaggatgagatcagtaagcgtacagagatggagaacgaatttgtcctcatcaagaaggatgtggatgaagcttacatgaacaaggtagagctggagtctcgcctggaagggctgaccgacgagatcaacttcctcaggcagctatatgaagaggagatccgggagctgcagtcacagatctcggacacatctgtggtgctgtccatggacaacag

SEQ ID NO: 164076 - DNA, 212 bp, Zea mays
  Clone ID: MRT4577_81214C.1
cgcgcaaagctcttcctcgtgtaaagacgacgagaaatttatgtactctcgcaccacctcacaaacagacctgatcctctccgtttctttttgtttcccttttccctcttccgcgattccgtcgcccggttcaatttggacgcgcgcggcgtaaggcgcccggcggaaaccgccgaattcccctcttcctcgcgcgtgctcagcgattcgag

SEQ ID NO: 164077 - DNA, 303 bp, Zea mays
  Clone ID: MRT4577_81215C.1
atacacaccgtcggtacgcattatgtgcttactggagaaatgacccaccctggcattgaaccagagcgtatacgatctagacggctaacttgccagtttcttttgtacggcaaaagcgactaggaacttttggtagcagaggggatccaacaacttttatggtgtgaacgggctgctaaccactatctacccactgcatgcattaaatactactacaaacacattctgctgactagcgcccccaatatcgagcctggaacgacgacgacgacttacagtgtatttacagctaaacctcacttc

SEQ ID NO: 164078 - DNA, 128 bp, Zea mays
  Clone ID: MRT4577_81217C.1
aaagagaccatagctggttggaacaggaacccccgtccaagagaaaactccggtctagttctccagggaacaaattttaaaacctgacgagcgcccaccacggggcatacgcttttttaaacacccga

SEQ ID NO: 164079 - DNA, 618 bp, Zea mays
  Clone ID: MRT4577_81218C.1
ggccggcctggcccgggattttcaaaaaagaaaaaaaaaaaaaaaaaaggtccctagagacctcaagatccagctttccgttccctctatcgaggtctaattgttcgttccttgaaagcatgttcatagctggttcgtgtgaggaatggttatagcgttctctcttgcgcaaaattttcatcccgtcaccattccactgtacatactgagcctgcaagaatgaaaggagctaacgccgcgtctaacctgaaggagctgatctcatagctccgcatttactctgtcggtgaaactctgctcgccgtgcattttgcagttaagtgaaaccgtggcaccgcccgatgcataaatgaatcgcgcattgcgcggtgataggcttcctgggtcattgactcacctgcctcttcctcgctgactggactcgagtggggatcggtctctctgcttggggcgagtacgattatctccatcatcgggggaaaacgcactatccaacaagtgagtaaatggccaacgaaagggcatgtaacggaaaagccacccgttgccggcgaccttactaaggtccgccggctggagttttttcataaccaccgcccccctggccagagttgcaaa

SEQ ID NO: 164080 - DNA, 259 bp, Zea mays
  Clone ID: MRT4577_81219C.1
gaaccttgctgactaagagtgatacagcaacctggtcgcaacgtatgacctaaacgcgtaggtaggggagtattgctggttgacaaaagacactgttcggacaacaaattaaaccataccagactgctgtgagcgactacccgatggagatagatacagatccttgagtcccatgtccctactgtcagctcactaagatgaatcgtcatatacatctagcttcatacaaatagtcagacatgacctattgctgcccacg

SEQ ID NO: 164081 - DNA, 840 bp, Zea mays
  unsure (1)..(840): unsure at all n locations
  Clone ID: MRT4577_8121C.1
gcccgctttttttttttttttntagtgaatgacaaggaaattatttagactccattagccagttgtcatgtaggaaatccaatcacgtacagagcgatgttacagcgtaaaacattttcagggcaaagcgacatttttattaactacacattgttcggattacaatcatctcggatgagatgcagcaagaacgcaagcccttgtctcaaacaagcaagggcgagtatgtagagctttgaagtgcttcggatttatttattttacggaacgaagcttgacccaggaacgtctccggtttcgatcgcatcatgtaggcagggtttgctgaggtattgcacgataaaatagaagtagactgcaaatcatggtctctgttcacttctcattccctgcaccagcgctagtaacctctaggccattgccgtcagggtcgaagaagaagacctggcgcgtgcgcccatccggctgcgacttttcgaacacatcggtgccgcgcgccttcagcccggtcacgaacccgtcgtagtcagcgacggagaaggcgaggtggagcgcgacgtcgggggagctcgggaggcggagccatgcgacctggaagcccgagtaggtgggcgaagggatgcgctcgaaccccagcacggcctcgtagaaggcggcgagtcgggccacgtcggaggtctcccgcgcgatgtggttgagctgcagcgtcgccatcggagaagagggtggggacaaggaagaggatcagaggagttgggcgcggcgcggccggcgaggcgtctcgtaatgttgggagttggacactgagttcccgcccgctcgaggtctcgaggtcccaat

SEQ ID NO: 164082 - DNA, 231 bp, Zea mays
  Clone ID: MRT4577_81220C.1
ccttcatgttgtatccagttctccctatcaaatgcggggtattatctcgacgctaaattggacctatttgttctctgaaagagagaggtggccatttaaaacatctcacaccctcggacttagtacaagaagagtgcgtaatccacacaccctgaaaagaactccttatctcatggattaataagcactatcggcacatttaccatacataaatccaactaaccgggccga

SEQ ID NO: 164083 - DNA, 357 bp, Zea mays
  Clone ID: MRT4577_81221C.1
aaataataaggactttttttctaagtaaaacaaaaatgttgaaaacttatttgaggacaaatagcaaatgtcaacaaaacacataatctatgcacaacaactatacaagggagctaatacaaagcatacaagaagagttgttgtttctatataagttgaacagctgctattgatggaattttctctcttaatttctgagtgactgctacacgaactgtcatgactccagctgcagggcctgtgattcttatcttcacgattggatcttcaatctccactagatcaagcgatccatctgctgttccgattaagtaaaggctgatttcttccaacaccttttcaatggtttcctcattc

SEQ ID NO: 164084 - DNA, 530 bp, Zea mays
  Clone ID: MRT4577_81222C.1
acgggggcaggtagatggagaaagtatgttgcagccagggtggcccctcctacggcggcggagctggagcagctaagcagcaccaagatgttcgacggcttcaatctccgcttccgccacgcagagcgtcaccttgggctgatacactttactctgtgtttgagcgatgtagaggcttgtacatatcaaagtgcgaggcatgccgctgtcactattgaaaatgttcctacctctcgcgcatccaggtacagcattggctttgacttgctttcatgactctgcgccatgaccgtcatcaagtgcacatgacccttggaccaaatgtggcgttctgcctatgatggctgtctttgtggttcgactttgctttttttttagccctatcgtgagccctggctgtacggcgactaggtcactgttactgtgttctgattacacctcctgaagacgtaggcgtcttctagagcattgccattctggcatgcaggtgcctctggttcggttcgctggcagcccgctgatcttcctgc

SEQ ID NO: 164085 - DNA, 576 bp, Zea mays
  Clone ID: MRT4577_81223C.1
atggccgagcagccgatgccctgtcacgatcacgatgcagagtcctcgacattcttcgtcgagtctggacaagcagacagttgcgtcaaggcgcgaaggctccaacaacgccaacgaagaccatgcgtcggtccaccatgtgtcagtgccttcgttggcccacctgttagcgtaggtgcaaccgcgtgtcagtgctcaacatttgacacccaccgtttgtgtgacgaatacaacaaccacatgactcccaagaacagcacttgtcctagcccaccatcaaacgacgatgacgccagggcctccctcgccgtcaagaaaggcaaggtgcataagcttatctacaactattctaagtcgactgtccggaataccgtagattattccagacaggagaagttttttttgaaaaacaccaaacgcggaccgtctggcctcaggcgcggaccgtccagtcgttgtaaaaccagaaaacccgaagccgttgatgtgcacgggcggaccatccggaccaggggcgcggaccgtctacggtcgacagaaaaggagcaacgtctaggaagtggttggaggctataa

SEQ ID NO: 164086 - DNA, 407 bp, Zea mays
  Clone ID: MRT4577_81224C.1
aaagcaacccttttttgcttttctatttctggaaaactaaaatttcttacaaaaatatataatagcggggaaacctaaagtaaaaaaaaatgaaaaagcttaactggactcaatggaaaaaacagatgaaaagatgggtggcaaaaaaaacccaaaaatttagttccaaccgggcgacccccgtttgttctttccgggctccatttttatatacaattccgggcaaacaaattccccgtaccttgagtaccagggcggaggttaattgaaattcccaggccggggcccctaggagcagaaacagaatcccgtcccaaactggggggagatcacccaaactttcacctatttatacacaaaaatcaccccttttggtgtaggggaaaccccaaaaccaggcagggggc

SEQ ID NO: 164087 - DNA, 2109 bp, Zea mays
  Clone ID: MRT4577_81225C.1
acgtgaacctggacctcaacatctcccggctgccgccatcgacaactgtgccgccaacggtgctgctgccgctgcttccgacgacgaggagacgagccaaggcaaacccgctggcactttgttctctgctaggcacatgtgggccgtgccgtgcgccacctacccatgctcctcagtcatatctcttgtcaagcagcctgccgccgaggctgcctccccactaggcacagaagcgggcatgcctgatgccacctcctgggaccgcattgggtacctcgaggccggcaacccccgctgcccaccggctcacctgtccttcatccgccccgatccgaccccaaatcaattccaaattcaatccggtctcagtggttggcccgccgctgccagtgccagatcgaatcggactctcggctcgtgtgcagcccaccggcgagacgccgaagctatatttttatgcccatctgatccgatgcgtggtgtggcgtcgtctccgcttttactagatcatcagtagccagctcaggagccgagcctggtcagggtagccaagcccatcccggtcctctcccggcgtcttctccctccgcaccgcggctccggcgatggcgggcgtcggctccgcgctgcgtcggctctacctctccgtctacaactgggtcgtcttcttcggatgggcgcaggtgctgtactacgcggtcctgacgctgcgtttgagcgggcacaaggccgtctatgccgccgtcgagaggccgctgcagttcgcgcagacagccgccatcatggagatcgttcatgggctcgtagggttggtgaggtctccggtctctgcaactcttccacagattggatccaggttgttccttacgtggggtgtcttgtggagttttcctgagacccagtcacaccttcttgttactaccctggtcataagctggtctatcactgagatcatcagatactctttctttggaacgaaggaggcatttggctttgcgccttcctggttattatggcttaggacagcaccctttatggtgttgtatcctactggcatctctagtgaagttggtctgatctacattgccttgccttacatgaaggcatcggagaaatactgtattaggatgcccaacaaatggaacttctcatacgattacttctattcatctgtccttgccctcctgatctatgttccaggaagcccacacatgtaccgttacatgctctcccagaggaagaaggcgctatcaaaggccaaagcggcgtgatgatgccgcgcaagcaagggaatcggtggactggtttgcgtgatggatgtcggaacgtgttcaagttttcgacatccccagtagaatctagtggtcgggggatatatattactagaatggggctcttcatatgaactgccccgtatgcgtaatgtgttgtaccggagtcatcatttcagatatcagctgttgcgtggttaaatcgtagtttgcttccggatcacccatcagttggggggtggattaccatgttgattatataaggcaatgcgttccgcatccttccctcaactggtgctgtgctctcttgtttctagcgtacgatgaatgatggattttatcccgggcctggaacattttgcatgctctagcttcatgttgattattatatagcaaaattagcaatgtatttcttacttatgacactgatttttttttaaaaaaaaaactgccaagggggatccccacctgaaaaaaaaaaaaaaaaaaaaaaaaaaaaaaaaaaaaaaaaaaaaaaaaaaaaaaaaaaaattgggaggatttattatctttctcctttttccccctcccctggaccctttaagcctaaccaggatcagctttgttgctgcggaggcaatccctgtcgcctgctccctttgatccccatgagagtaccacgccacacccttaaggtccagctggcctcccctcccattttttaagaacaatctgcaccatgctgctgctgctgctccatgagcagacggaattcttctatctggttcgcccgatgagaagaaagataaaaaaaagtcctccgaattctgctttctcacccttgctgttcatcgattcc

SEQ ID NO: 164088 - DNA, 228 bp, Zea mays
  Clone ID: MRT4577_81226C.1
aattaacacaagcatttctgggggagcgggcatgtatcacaaggtagtgaacatatttgagcgtacattccagaaccgtgcagaatgcttaatttaagggtggtcattgatgcggaaccactaatttgaatggcaccgtacctgctaaattttcaggacatgccttctctcaactaatggtaaacgggttaaataaccgtgaatgtgccagggcattcgttattataa

SEQ ID NO: 164089 - DNA, 1282 bp, Zea mays
  Clone ID: MRT4577_81227C.1
cgcctccgctcccgtcgcagtcgcagctcgcagcacattcaccctacctcactcgccctccccaccctcccctccagaccctcacacggtcacaccaccggcgccgcccgccctgtatggcctactactcgggcggcggcaagctgtcggcggtggacgccatcctggcggaggcggcggacctggtggcgctcgagcaggtcgccaagctcaacacggcccacctcgatgacgactccgcgcttccgtccagcctcgaggcccgcttccgcaagctcaagtccctcccctcgcccgccgcagtgccgcccgtcagcactctcgcccgcagcgccaccgcgccgcgcccggcccccgctctgcccggccccgatcctcccgctcctgctccgcctgtgcatcacccggtccacgaagacccgccgccgggagacgcggagacgaagggcggcgggtcctcgccgcggcaggctcgcgccccggcacccgcacccgcggtccacgccgacgacgccgaggacctagatcagctgttcgggtcggcgccgcgggggcggccgacgctgcgggagcggaacagggggagcgactcctcctccgtctccccctcgccgccgccgccgccgcgccaggcgtgctgcttcggcttctcccccaagaagcccctgcggagggcgccgtcggccaagggcaagaagaaggaggtctgccacgggtcccgcgacgtcctcggcgtcgacgccgacgagtggggcgacgagaacaggaggatcgccaccgagctcagggagcagcagcgccggctcaggaaggcgctggaggaccaggtgcaggtcagcagggagaccgccaagatggcgcgctgggtcaagcaggcgtccgcgcgcatgacgcacgccgaggccatcgacgacctgctcagtgactgcgaggacgacctcaaatgagctcacgccgacgctttgctcgtcggttcttccactgtctttgtcttgttggtgatcacaagtctgtcaaaaatgctcatatgttttcatgagtgcatttgcatccatgctttggtacaatgcttatacagaagaagcagagtcacgaaacaatgctatttcttttatgtcacgtattattaggaccaggcaaagtatatgaatcgatggggcatataaggttttcatgagtgctgaactgctgatataggaaccaagaacgtggtgttgtgaaaaagatttgatcatgtgttctgtttccatgagaagtaattacacctggctattctaatttt

SEQ ID NO: 164090 - DNA, 292 bp, Zea mays
  Clone ID: MRT4577_81228C.1
attccctgctcgacgcactcatcctaatccccctacctacctcaccttcaggtttcccatctactacttctattacaccgccagtctatcttccaaccccgagacattcaccaataacctctatctttaaattatccactcccacttaaccatactctactctctctcctgcatcttcccctatcttctctcccgcaacttcttctatttctactaaaccttctatttcaatgccttctcccatatcttcatccataccttatctaactacctctacaaccccatccttatc

SEQ ID NO: 164091 - DNA, 258 bp, Zea mays
  Clone ID: MRT4577_81229C.1
gggagcgcacacacatacacaaggccaggcgcactctagcaatggcttctgaggttgcccgccctagcgacgccgagctactaaaggcacaagccgacatatggcgagctaggcctctcctacctcacgcccctgagactgaggtgcgccgaggagcttggcatgcctacggcgatctaccgtcatgcgggagctgcctgaggcgctgagctgtagcacagggctgagtgtgcactgcactaagctgacgaagctacg

SEQ ID NO: 164092 - DNA, 211 bp, Zea mays
  Clone ID: MRT4577_8122C.1
tgtttttatgattaactcaatagtatcacttatataacttgccaaaacttcatcatcatcaccttattgacttgtgggctaaatctacatggcacaataagggatataaaggaactatacactgtacagcgacatataaggaatcagttctatgttccttcgatttctgttttctggatggcacaatactaccatccttgctggtcatact

SEQ ID NO: 164093 - DNA, 136 bp, Zea mays
  Clone ID: MRT4577_81230C.1
ctccacgagcggctcgaggtcgatggcctgccgcttgtcgatgcggtctcgctggacggcgcggtgtcgtgcgcgcgcttgcggcctccgggcatttatgcggcgcgtgccacgcagtcgtcgcgtgctctgctcg

SEQ ID NO: 164094 - DNA, 306 bp, Zea mays
  Clone ID: MRT4577_81231C.1
tatggaattcggcacgaggttcgacccaacccgcctccaactccaagccgtatggcggcgccgtccccgaccatctaccgtcggcgccgccgccgccgccacgacccaccaccgcgtgctcctcccatccgcgcgcccccgcgccgagcactcttgtgtccgccttccgctacgagcgcaggcccacgcccacgcccacgcccagcgcgcgcgactcgccgcccccgtggcgggcgcgttctcaggcgcggcggcgtagacggaataccccacttaccccctgtcacggtccgtcgagggaaagcc

SEQ ID NO: 164095 - DNA, 278 bp, Zea mays
  Clone ID: MRT4577_81232C.1
cccacgcgtccgcttctcactcttgccggtcccgagtaaagagcagcagcgcaagaagtcggtagagcgatgaagaaggcaatggcggccgagagcttccttttcacctctgagtccgtgaacgaagggcagcccgacaagctgtgcgaccaagtgtcggacgccgtgcttgacgcatgcctcgcgcagggatcccgacagcaaggtggactgcgagacctgcagcaagaccagcatggtgatggtgttcggcgagatcacgaccaaggcggccgtgg

SEQ ID NO: 164096 - DNA, 259 bp, Zea mays
  Clone ID: MRT4577_81233C.1
ctcaaatataatccagatgattcaagaggggggcgtaacaattcattttttgtgctcaccaaaaaaatatacgatttatctattgagaggagatcagatttattgaaaactgatatcacgtataccaattttaagatcaaacatgtgggcgaccaagatttctatactatatttaaagatgaatggctgagggcattaatataccatgctgctgatcacgggacacaagctcaccaaactataaacgtgtactaagact

SEQ ID NO: 164097 - DNA, 190 bp, Zea mays
  Clone ID: MRT4577_81234C.1
tgtccttcaccaaccaaaccctggagaccggagcggactactactcttgtttccgccatgcagcattacacctggtgttttctttggtaccatggcacctaacgatctttggcattccactaacttcaagtacttgcgcagcaatatttttttttttgtatataaaaatgaacgtgggggggggggagtt

SEQ ID NO: 164098 - DNA, 380 bp, Zea mays
  Clone ID: MRT4577_81235C.1
cgtttggcaagcggctggtgtcggctggaaggaggtttcagtcaatggggcagtacgactagggggaactcaagaaggctttgctaaaggcttcccaacaatgttgaagggtgaaattgctatgatatctgaagatcttcctgtgaacattgcactagcattgtgctggcatcaacgaggcacttgccttgcgtcgggggattgctcttgtactgatcatacagaagaaatttgcatcgctgattttggttaacagacaagtgttgtttcagctttggaaacccaaattagttgaggtggaaatggatgtgtgtaacgagacttgtctagcgtgctaaagatttagctcttacaccacccaacttaattaggtagagaac

SEQ ID NO: 164099 - DNA, 522 bp, Zea mays
  unsure (1)..(522): unsure at all n locations
  Clone ID: MRT4577_81236C.1
ccccgcgtccggagnactatgacgaatttggcaacctgaaaaagaaattcgctctaaagctctgcatactgaaggtgcacaggcacttcctgggtctggacgtgctggatgggaagttgagcatcgtggtcctagtgaaagggaaggcagggagaggagcagggatcgtgttagggatgactactatgaaaaggaaaccaggggcgtgggtagaggtgatcttggaagggaccagcgccggagcaggagccgaagcagagaccgtgaaagggaaaggaggagggagaggagaagagaacatgattatgagagaagggagcgtgaccgggatcgggaccgccgccataggtgaagatagaaataacaaggctttctgttcgtacactgcatttgccaatttttgtagccatgcgacccgtggtcttgtgttagtaactgggggcgtgcattgttgctctgaatctgatttttgctttgaatgattcgctgcactggcattttattcagatattctgtttcttc

SEQ ID NO: 164100 - DNA, 271 bp, Zea mays
  unsure (1)..(271): unsure at all n locations
  Clone ID: MRT4577_81237C.1
gcgtacgcccacgccttcngtttgtttccgcaactacttttaacttcttcagaactatatattcacatgtcattgttactcctaaagattttggaaaaatcaaagattgaacactaaaagcaactcttccagctttaaaagaagttttaggccgttgttgctgacaaaaagaagtactttattggaaaatgttgcaaggttgttttcaaaatcaaacgctcgaaagaaaaaaatggttcaagaatacatatgcagccttaataggactgtt

SEQ ID NO: 164101 - DNA, 188 bp, Zea mays
  Clone ID: MRT4577_81238C.1
attcggctcgagcgggcacagtagctttttaagagcaaacaacgtcagggggccggccaacaactactgagcacggggctcttactctcaaacacgggctcagcttgtatactcagcagttcagtgcctcagatagaacgatatatgtcatacgctacaatctaacagccacaaatgaaaacacgagg

SEQ ID NO: 164102 - DNA, 296 bp, Zea mays
  Clone ID: MRT4577_81239C.1
ctcttttgcggtctctttggttcgttctttttttttcggaccggttcctgctggcgttccatctttccctattttgagtcgtatgacagcttggcgttgtcatgggcaccccctgggtttctgttaaaaaaaaacatccggtcacaattcgcgtaatatacgaggcggaaggctatacagccctgccggggggggcaaaagagcgaacttacttgcattagttgcaaaaatctcaccccacaatttgcaggaaaaaaaagagtctttcttgctgcggtttttaatctgacagggcg

SEQ ID NO: 164103 - DNA, 985 bp, Zea mays
  Clone ID: MRT4577_8123C.1
ttccgaaagagggatcggagacgccagccctcgcattgggaggctcgagggccggccgggacactctcaagtcccaactcccaacattacgagacgcctcgccggccgcgccgcgcccaactcctctgatcctcttccttgtcccccagtccccaccctcttcgccgatggcgacgctgcagctcaaccacatcgcgcgggagacctccgacgtggcccgactcgccgccttctacgaggccgtgctggggttcgagcgcatcccttcgcctacctactcgggcttccaggtcgcatggctccgcctcccgagctcccccgacgtcgcgctccacctcatcgagcgggaccccgccgcggcacccgtcgggccggggcctggcgccgagggcgcgccgccgtcgcagctgccccggcgccaccacctcgccttctccgtcgctgactacgacgggttcgtgaccgggctgaaggcgcgcggcaccgatgtgttcgaaaagtcgcagccggatgggcgcacgcgccaggtcttcttcttcgaccctgacggcaatggcctagaggttactagcgctggtgcagggaatgagaagtgaacagagaccatgatttgcagtctacttctattttatcgtgcaatacctcagcaaaccctgcctacatgatgcgatcgaaaccggagacgttcctgggtcaagcttcgttccgtaaaataaataaatccgaagcacttcaaagctctacatactcgcccttgcttgtttgagacaagggcttgcgttcttgctgcatctcatccgagatgattgtaatccgaacaatgtgtagttaataaaaatgtcgctttgccctgaaaatgttttacgctgtaacatcgctctgtacgtgattggatttcctacatgacaactggctaatggagtctaaataatttccttgtcattcaaaaaaaaaaaggaatgattttcctcacccatttatttta

SEQ ID NO: 164104 - DNA, 410 bp, Zea mays
  unsure (1)..(410): unsure at all n locations
  Clone ID: MRT4577_81240C.1
aaagtaaaatgcttattgtatagattatggagaatatgttccatgaaacagcaacagaatcaaactgtaagtttctggttgcaaccctttctctcatccatttccattatgatttacatatgtaacatacatcattatatctaacacacagccctatctcaaacaaatgagcaagcatacaccactccagaaaaagttaatgaggcaaaccacagaaattctatgcaacataatatatatgtatttgtatgttagttttctgtgttcagcgttgtggagaaatctggctgaacacctgcttctgcatcctgattttgngtccttttttcacatttncatcggcaatgagaatatcatctatccatgagactatattatgagccaaactttncagcacccttnagtagctc

SEQ ID NO: 164105 - DNA, 156 bp, Zea mays
  Clone ID: MRT4577_81241C.1
tgctaataaaactacctaaccaacccggctagaagcccttacgctctaagggaggctcaaactgtctgcctcgcaacatcactacaaggttcacagtaaaaacatggctatcatttaaggaacaaggaagtgcacattttagacctcctccctcga

SEQ ID NO: 164106 - DNA, 409 bp, Zea mays
  Clone ID: MRT4577_81242C.1
agcgtccgtttttttttttttttttttttttttttttttttttttttttttttttttttttttttttttttttttttttttttttttttttttggggtaaactacatccacgcccctttcgatttgaatcttggggggacaggtttagcaaaaacaaaaacaaaaaaaaaaacagaagcttgggggggggggggggccccctgccctggcggttggaaaaaccccccctcccccccctggaggggagcggagtagtatggacagggacagccagcaaatgggatgcgactggaaatttgcgaagaagcatgcttggggaggccgggcgcccgggacgcggaccgacaaacaaacggacgggggagctaggcccaaagggggccgagctccctgagccggggcacgaggg

SEQ ID NO: 164107 - DNA, 235 bp, Zea mays
  Clone ID: MRT4577_81243C.1
gtaaagctgggcgcgctctgtagagttcggatcctgtatagcgggcgcgacccactgcgtccgcgtattcatctgaatccgctctgccgatcccagggctaggcacaaggcagaaccccacactacaccacctcaacgtattccttgtattggcgattgtcgagcggacctccgaggtcgttgactagcaggccatgcccatgggagggcttccctacttagctcaggcgtcctg

SEQ ID NO: 164108 - DNA, 368 bp, Zea mays
  Clone ID: MRT4577_81244C.1
tcaaatcacaatgatggcctcggcgacttgtgaatcttaccctcgccaaggtgtcaatggaatctacaagtttaagcaatgagaatgtactagtcaaagttctggactcgattaacatcaccctgtctgctgcagattaactgaaggattctattacactggttcgcccacataatgctaccttccatgtgatcacttgattcaggctgtacattagcacaatttacactaacgaccattatggaactacacctatagatgtcaaccacgctattctcactattctctactgtatcgaacatcgtgatcactactggctcatctagaactcatggagcgctttcttgtgtgatgatacgatacttaat

SEQ ID NO: 164109 - DNA, 690 bp, Zea mays
  Clone ID: MRT4577_81246C.1
gtaccggcgcccttcctcgagtttttttttttttttttttttttttttttttttttttttttttttttttttttttttttttttttttttttttttttaaccaaaaaatcccccggtttttcccagcaaatggaaaagtttttacccccgggccttggccgggggccccttaaaacccctgggggatctttcatattccccctttcgggacggggttttaaaggaaaattttttttttttttgggaaagcaattgtttccagatttaaacaaatgggggccccagttcccccaaacaaccccaaagggggccgcctaaaaaactttttcctttggcaaaccccccggttttttttccccaacccccccccccaaaaaagggctaggaaaaacccccttcacccaattaaaaatttggggcccccctcatagttctaaacggcaattgggggggggggattccccgccctcccggggcaatacccaacccaaatttcaaacccgatagagcttccaggggttttcaaaaaccatccctaatcccaaaaaaactgtaatttggggggaaaggaggaatttcctttgtcccaacagcccccaaaaagctcccctttttttggggggccaccaaaaaaaattccccttttcccctaaaaaaaagggggggtggcttccccctttatgggggggg

SEQ ID NO: 164110 - DNA, 229 bp, Zea mays
  Clone ID: MRT4577_81247C.1
cgacccacgcttgctcggacgcgtgggtaggcgacctttttctgtgacctgtccatccaatccaacgcgggctgggagcagcagtctctcgtaagctaggatcactattccgccaccgtgccaagtagtcgtcctgtcactggcgaccattctgcaccgagccgtgtacgacgacgcccagttgaccgccgtgccgaccgtggatgcgcccaggctgttttgcgtgagc

SEQ ID NO: 164111 - DNA, 126 bp, Zea mays
  Clone ID: MRT4577_81248C.1
catcctgagcatgcggaagggtaagttcgatggacgtgacccaaaaaacgctccggacctccgcctttctcaggttacacgttaaggagaaatggttcaagaacctctacatcgcttcgatctgct

SEQ ID NO: 164112 - DNA, 596 bp, Zea mays
  unsure (1)..(596): unsure at all n locations
  Clone ID: MRT4577_81249C.1
naaaactgattattcttgaagctcttcgcttgtatcctcagccaccattgttaatcaggcgttctctccggccagacaagttgccaggtaccatcttcttctctgtaatgtcgtaagttctttcctgagcaatacaaatggtgtgtagtggtcatttgagtggccatttagactagtttggttgaagtcgctgttcttgttactggtaatatgtttatcgagaccttggtgatgacagcctttctatacttgtggatggatgttggcaaattgtatccttcgatcagcacacacaactatttttcaatgaattagtttagtgacaagcagggtgcgttgccttcgctggtacatgccttctaactctgccgccgtgatcgtctatttacccaggcgggtgcaatggagcaaaagaggatatgaaataccagctgggacagatntatttgtttcggtgagtttaagcaactgcngttttggaaacggcttggatagcattgtgcaacagagatgactacgagtttggccttcatcataaaagttccagtccaagtccactccaagccattgctcgacttacggtaaaatctggcact

SEQ ID NO: 164113 - DNA, 143 bp, Zea mays
  Clone ID: MRT4577_8124C.1
aattcgacatacatacatatatatacttcctgtggcatgtggcagggaacctccaacaccatcttgtggtaccgcgggaaacccctgtgcccttacacttaccctcacatttcctgcggcaccctaagcggcccaaggtgggc

SEQ ID NO: 164114 - DNA, 602 bp, Zea mays
  Clone ID: MRT4577_81250C.1
ctcattccacctgttggcccacttacaggccacctgtacctgccaccttttcctccaacatatgctctaaatggggaacttttacaggaccttctactgcaaatgctgctgttgatgttgttattgggacagcttactctacagctgactctttggtaggtgatatcccaggagatgatcccaaatgctgttggtactgcaacaagaccatgaacagcaccatctgctgacacaggtactcgacttggtgaaacactagccgatcctccagccaagccccatccccaaaccacttcctttaatacttactttgtaacagagagaatctttgatcaaccctatactcatccacagacgcagatagagccgtacatagtgccgtacgctaccaatgatgctgctaatggtgatacttcagatgaaacaccatactgaccgcattactcaccgacatatgtgctggcctttatgctggccacaattaaatatacccttgaatcatacctttgaaaagctgtgattactgcaccaacttctgttacagattcttacaatgatgctacacaggatgctccacaggatgctggcctcattgctggact

SEQ ID NO: 164115 - DNA, 430 bp, Zea mays
  unsure (1)..(430): unsure at all n locations
  Clone ID: MRT4577_81251C.1
ccctcnaaaaaaaaaaaaaaaaaaaaaaaaaaaaacaaaaaaagagactccggaggcgcgaactgcctccggggtcctgtccatcccaagatgaagagagggaacaccgtcctctccacctccatctgcgtcttggtgctcctatcccttgcctcccagccctcccggagtgcagcaacataagaatctgagggaaacgccggaggagtctccacggataggggacgagtcaagtcttatctccaggtgcaagaacaattggcatggttacatgaaagaccacctggaaaccgggaggcctaaccgaaggcttgagcctgggcatgaagcggcgttgacaatggagctgtatcatcatcacaggaggattaccaccgggcacaagggtggcagcgcgggtggagtcgccgcagccccgtcaaaggggaac

SEQ ID NO: 164116 - DNA, 357 bp, Zea mays
  Clone ID: MRT4577_81252C.1
gtggggaaaaaattttattggattttttcggaaattccaaaaaaccaacccccccgggggaacagggtccccggaaaaaacttggttaaaggcggggaaaaaaaaaaaaattaaggggcggggaaaaaaaggtaattgccgggtcccatttgttcggggcacaaggtggtttatagccgggtaattaagggggggggttctaaaaattcccgcggggtgaagggtgtgttttggggcaacaaaggggccgcggcctggtaaaaaaacccgggggggggggggctttgggaaaattcttaggggggaaccactggggtttgggggccaagtaaaaaatggggggttccccgggggggg

SEQ ID NO: 164117 - DNA, 239 bp, Zea mays
  Clone ID: MRT4577_81253C.1
tgacgaggtggacgccccgcggacgccacggtggtcatacgcctaaagccctaaactctaaagcgtcactgtccaacgccttagcgcttaagcgacgattaggcaatgatttagcgatgccataacaaccatgttacgtaatgcagtgaaactcatgcttgtgactttcctcaagacattcttgtttagttggcttagctgtgatcgatttgtgattattttctttatttagaagttag

SEQ ID NO: 164118 - DNA, 1020 bp, Zea mays
  Clone ID: MRT4577_81254C.1
ctggccggaggtgctctagactagagctctctgttttctcctcgtagctcgtcctgcgtgtctcttgcttcagcttccgcgtccggacaccgcctgatctctgtactgcacggcggtcatacaaaaggaggacgggctaacgatgttattcatgccaccggcgggcctgggtagcctgatgttcgagttctttactttactgtctagttctcttgctgcttagttcgctgaattgactccgatacatatgagtccttgcgtgacgcctatttattatggtattggctacgcgcaatcatttcaacagaccgagtttctggcacttgatgctgagaacctctgcgcaccctcgctggtccaggtaccgccgccgcttgtcaaaacggtgtctccacctcttcccgcggagaagctctcccgacccccgcttgtccaggtgccgccgttgcagttcgcgaaggtgtcggcagggtcggacggatcgctgctagcgttcttctgggacgcggttgcacacgtgcaaaaaggtgatgtggaagggaatccttgttcaacgctctgatttattttattttaatgtttgtgactttgaattttgatctgtgagcaaaatattttcctggtttagcacactcgaggttggacaagcacatctcgagatggttcgggctggaccagtccaagtaccagtgggcgctcaacgactattttgagaggaccggacaggttatcccacactttagtttctcgttcttctgtttgtagtttgtcagtcttgtttgtttcggttggatcaatatctctgattcctctctggcaggcatgtgttctttttttattttgaaaagaggaaaacctctgcctttaagaaagcaacagtatctcggatcaccagtttaccggagaaagcataacagataaactaatcctgatacagaattaaatttcaatgatgtctaaaatcatcacaccactaggcttagtgagtgtgccaagcaatgcaagggcgtgttgcttttt

SEQ ID NO: 164119 - DNA, 842 bp, Zea mays
  Clone ID: MRT4577_81255C.1
cattgggacctcgagccggccgggaacgtcgggctccttattctacccagccaggctccctcacgcggacgcccagggccctctcaagtctcaacacactcgttgtctctagaatcctccccatgtctcctctctgctcgcctcattccccaacatcgatcccccacgcgctcgcgctctgcaccggctcccaggcacacgtcgacgacgcattctggcacgtgttttcttcctgattggattccccagcaccggtcagtctcgccttggcctcgggccattgcatcctaggccgagctcggccagttcaccagcgacctggccgtggcgctcgccctcctgctccggtctctccatcacgctcggctccagctggtcacgctcctcgcaccaaccccgactccaagtgctgccatgacctcgtcatggattcgaggcatcacatcgtcgctctgctgcataggcgcacgtgttgtcgcctccctgccgtcttcgcttgtgtgccagaacacctagaagaagtggtgtttgaaggagtctactccaatgcctgcttatcaagtggatggatctatctaactaaaggttgggtagaaggattttgggatcttctcctgcaacaaggcaagccccggtgcatttgccaccatccttgtgtttacaaaattttatcacttatatgctacattaggtgataggagttgattggttaaactcttgatgcattaccatccttgaaagcttgattaccataccttgccacctgttttataaaagctagagatgcttagtcatgcgaatagactaaagaaaatgtttttgatctatgactcatgttttta

SEQ ID NO: 164120 - DNA, 244 bp, Zea mays
  Clone ID: MRT4577_81256C.1
cgggagaggagtatttttacatgtaagcgaacgtaactttccgatcctggaaggtagacatactaaactcgactgcattgcatcgcgcaggggtgccaattaacagacatcactctcatgcacatgatggaacacctcgacaacaataagcatgaatccttgcacacggggcatgcacatggccgatcatgccccttaatttgacactaggtaaactaaggctctaagcaggcaaacaggctaa

SEQ ID NO: 164121 - DNA, 496 bp, Zea mays
  Clone ID: MRT4577_81257C.1
gtgttcgagcgagctatggcgctggcgcggtggctgttccgtcttactcctaccttggtacgtttttgttttcactcttaattttaaacaactaagaagcgttttttttgtgtgcacgcgccttttgcctttgtggaaaggttgataagatccgtgttctccaagaggggcttgtttttttactacaacaagggggcgttaacaaattctaaggattcaaagggggccgaagaaagtcccaaagaggagaaaaaaagctctgctttgaggggctgtgggcaaaggtttacccgactaaaatgttccctttttgattgggccctcaacgttttttacccctttgatcaggtaagggggccctttgttttccatgggggggggcaaaaaggccgggggggcatcattccctccaattttctccaggaagttttgggcgggcttttgcttttcctcatccaactcactgaatggggggccgactttttggtgtactggg

SEQ ID NO: 164122 - DNA, 633 bp, Zea mays
  Clone ID: MRT4577_81258C.1
tcggccggggtcgctcgccggccagaaaagaatgtttcgatcgatctacgagatggagtgcgtagctgcaacgacgatagagtttcgatgtcgcgtcggtccagtgcctgctccgggaccaggtcaagcggataccggatactttcacgtcatttgagagttacttggattcgtttacttggccgctgattgaagaagtacatgctgatgtattctcatcgctagatggttattctgaggcaaactttatagaagtaacacaggtgggaaatcttgatgctagtaaaccaatactcggttttcgagttgcagaaccagtgaaggatgagaagtcaagggagacatatgtaccagtggagaatgatataattgtcctgtcctcacataagccaaggcatgtgtctgatttgacacaaaacaagtcatcatttgtgttaggttcggtaattaaaactggagaagaagatgggttccctccggactggtgtgttgttcacttgtcatctgccattctcgttgaggcagactgtcatacaaaaattccaaaaaggccactgtttcttgtgttccttataaatatgaagacatacaatcgcatatagaaaaaaaaaaaaaagcggccctcgagctcca

SEQ ID NO: 164123 - DNA, 384 bp, Zea mays
  Clone ID: MRT4577_81259C.1
atggatgaactatgtgatgacataagaattaagcatgagctttcagccaagtatactcctcaatctaatgaatttgttaaaagaaagaatagaacacttattgacatgaaaaaaatccatacttacaaagcttatggagtctttaacaaaaccattggcataattgaagaagtacatgatgttgaatttgatgaatcaaatggctctcaagatgaagatgaaaatcgacatgatgtgagaggtactcaattgaacaatgctatgaaggctataacaatttgtgatatgaagccaagagaggtggttaacgagaaagaagatcaagaagtatggaaatcaacgatcaacctagcacaagtggtattcatgatcaagaataactaa

SEQ ID NO: 164124 - DNA, 251 bp, Zea mays
  Clone ID: MRT4577_8125C.1
ctcaggttcaccgctgatgttcgttccgtgctgagccgaaaccttcaccaacatcggctctggtgacagctgctccccctccacctgagttggggtgggggggaaagggagggcgagcccttgggatgccgtctgatgccctgtccaatgtgaggactgcctgggcagggtctgctcctcccacccctctctgccctgggagccctacactccacttggagtctggatggacacatgggcaaggggctctg

SEQ ID NO: 164125 - DNA, 213 bp, Zea mays
  Clone ID: MRT4577_81260C.1
tcaagttatggtacgctgacgctggcgcaagctgctacatacgtcgattagatgcgagcatgggaccattgtctggaccgtcgtgagtggaatctatccagtaggcttttatgcacgaactagtctaaggcgaaagacctagacgcattgtgctattatcgaatgttgagctgtcaatacctttggcgcttatgacgagaaataatatctgac

SEQ ID NO: 164126 - DNA, 358 bp, Zea mays
  Clone ID: MRT4577_81261C.1
ccggccgggagacagtcccctacctgtatctgctgtgccagctgattcgagcgacggcgacaaattcaaggatctactgaccaaatataagaacgtcaagcgactttactttgacggcaagacgcagatcgaagggctcaacggccaaatcgtgcatcttcagaatgctgtggccaatcagcgcatgtcgcaatcgcgcaccgccctcgatgacagtgaatactctacacgattcaatcgactcaatggtgccatcaacaacctctctttcaacattcgtaaagactggcggtgcgtgccacagtggcttgacaagtatgtcagcgcagatgcactcaagactgcaaaggccgagatg

SEQ ID NO: 164127 - DNA, 258 bp, Zea mays
  Clone ID: MRT4577_81262C.1
acaatgatactaaatggggttgttcatgggaattaaactaacaccacacattaaacttatattgaactcaacaaagatgctacaccttcagatttaaggtaccatctgaaaaaacaacattgcatatagtgacacgaattcacatcataaataaggcagagaccaatttttggtaaactagatctaaaatccactgcttgatatcagccttatatttctgccacagcctgtcaaaggagctgtttgttccgctgtgag

SEQ ID NO: 164128 - DNA, 402 bp, Zea mays
  Clone ID: MRT4577_81263C.1
cttcttcaacagaatcaaatactgtttttcagggtttttttttatttttcaactctttttacccgccactgctttgataggatcccttattttgtttcgctcttccggaaacagggtccccttgcttttaaaaccgggatgtccggtacaaaagcctgcaacgggcgcccccgcccaaattctcgagaaaatccttttatggatgtacatttccgccctatgcatgggcttttaaatattggtagggccaatcttttttggcatccgcaaacctggatatttcaacccacaaggggcgtgtgataaaatgttctgaacacgccccaccccccatgggtggcaccagctcggttccaatatcccctatttttttttttttcctgggaagacaagaaaaagccc

SEQ ID NO: 164129 - DNA, 465 bp, Zea mays
  Clone ID: MRT4577_81264C.1
gatctgatccctacaggtcctatgccatcgctctctcccctccgtttgttggtcctggactctctcttatagtcacggtatcctggggagatattcctgacacgaagcgggccacaacaagaaggcgtccagctcgagatagtcgcgtcgcgaaacagccgtctcctgtaccccgaggcatggagacatgatcgctgtcgcgaccggatctagacgtctcgtcacggacgacgaagtatataatctctgccacttgattgtcctagagaccttcgtccagcatgtatcgcctaagtattccactagaagagacgtagcttcttgagagacggcatcactactgatcgtcatcatagctgggttcatctttcgacgcttcatgcagctggtctccgacggagttgcctatcacgttgactgcggacggagtacaccatatcacgacgcctgaatagtatagatcct

SEQ ID NO: 164130 - DNA, 643 bp, Zea mays
  unsure (1)..(643): unsure at all n locations
  Clone ID: MRT4577_81265C.1
aattcggcacgagggaaaggccagctaccacccgatctctgcccctcctctctaatcgatcaatggtgcgagtactcttgccattgtattacattagcgaagaaactccacatatgcggcggctgattctcttacttgtcttatagttttgactgagttgacaagttgaagtctgcatagagaaattaatgatgaaccaatgtgcaatataaagacacatatcatatttcatggtttagtgacatccttattagcacctgttttgaggagatggacatccacatatgtgcgcggccaattctcttgaaccaagatggtacgatctctgctttcaaccgaataaaatctctgctttccgtgtccttttccatgaagaaaatcgtccaagagatgactaggatgaaggacgagaggaataggctgaggatgatcatgacacagtacatggtgtggcttcattctccatgcaagatctgagcagccttaagtagtagattgaggtcttgttatgtatgtagaggangattactattagtgctattttttgtanggattctaccaaatattccagtttggtgcttgtggcacctgtttttagattgtattatgtatgtactattatgcactaacattgtattaaata

SEQ ID NO: 164131 - DNA, 161 bp, Zea mays
  Clone ID: MRT4577_81266C.1
ataaacaccgaccgcagtgtgatgattgccgatggccagacgcggctgtcgtgaaggggaggtctatctaccgctttgttggcacttccaccttcagcgagaacaccgtcaagcatgtgaattgcgctgcaaagataaccatcatgctccccttcataaca

SEQ ID NO: 164132 - DNA, 710 bp, Zea mays
  Clone ID: MRT4577_81267C.1
gccgacgccaaatctctcctgaccgcaacggggaactcgacccccgcctccgccaccgccaccgcgccggtcgccgacccactcactgtaatgccgcatcggaaacgtgcaggcagcggcggcggagttggctggcgcggaggtcacttggtcgagttaagcgcgtgttgtaatggaggggctcaacgccactgatgctgtgatcaagaagccaaggagtgttgcattcaggaagccaaggtccatgaagcagctcacggttgagtgcaatggcatttgcctgccatctcggagtgctcgtcatgacgatgacactggcgtcgaagctggtgggcagcggaggaaagagctacacctaaatagccctgaaatgaagggctccatgactcataggagtgacgtgcccagtaagataagaagggatgataaatctggaggtgactatgatggtcatggtcggagcagaaaaacgaaggatgccgccaagcatggaagtgaaagtgttcttgccctggagtgcacagcaagaaacattgaatcccttgacaatccacagttggtccccagagatgactctttgcctggtgaaaataggccgagaaaagtaaagttcaaatttaatcggacccaacgtaccaaaaatggccaggatgatggtggcagtggcattcctgccacgtcggcctgctttattaatcagtacaagcaat

SEQ ID NO: 164133 - DNA, 569 bp, Zea mays
  Clone ID: MRT4577_81268C.1
gaagatggggcagggtcacggacagtcgctcttgagctcggggcgggcgtggttcagacgatctactgttcggaggggtgggcatccaaatacccaactatcagcgagataagatgggcaaaggaggatccttggctgagacaccaagcccttaagattgaccacggcaaacaccatgtgtctcagaaatttggtatcagtgactggtgcgtgctgatgaacattggcagtgggtgcgggggagggggggggggtgaggtggcgtatcttctttgggaaggcatgggcatcccaatcccttcgccagaaggaaataaaggagacgcgaagaggatgttgaggtcagtcggatccacggttagcatatacagtccggtgacatggcctctttcaactatagtgtgtgtgtgtgtgggcatacggtgagcatatacaagaacaacagtgtgtgtgtggcagaagtgaaacaaactgatacggttgtgttgcactgtcgtaccagttcaatgttcctgaagtgatattattctttgacgttataaatacttcgagggtgggtgggcgaattt

SEQ ID NO: 164134 - DNA, 101 bp, Zea mays
  Clone ID: MRT4577_81269C.1
acttcatgcatcttgctcataaatttagattgccgtactgagcgacaaccatgtcgtagagctgtctatcctgaacctatcgcattctatgataaatcagc

SEQ ID NO: 164135 - DNA, 272 bp, Zea mays
  Clone ID: MRT4577_8126C.1
gcgcggcccgaggggccctttggaacacatcatcacattgctaaaaacagcgagtctaacagctttgcccttggcggagaacctgctttccttttgggatcgacttaacttaattgatagacctattcttttattggcctgctttggatccaaagaaaagaggaagattaagagccataaaagttcctaactaaaaatgtgagttctaaagattgtgatgtaactcttcgaattatcgaacaaattcaagctactagaatacagaattgttg

SEQ ID NO: 164136 - DNA, 274 bp, Zea mays
  Clone ID: MRT4577_81270C.1
ggagaaggcgtccagtggcgggagcaaggaggcaaagtcgcccaagaaggccgctaagtcccccaagaaggcatagactgactgtccggtgtgatctgatgtgtagccagaccttgtcttccagtatgcagtgatgcgtaggctgtagatgggacgaatgtgctggtgtgtgtatgtgtcctatcgacagcctacgcatcaccgcatactggtaacaaggtactgctgcaagttgccctttgctatttaaaatggaagaagaaatgcctggttt

SEQ ID NO: 164137 - DNA, 338 bp, Zea mays
  unsure (1)..(338): unsure at all n locations
  Clone ID: MRT4577_81271C.1
ccaactaacttccccccccccccccccaccggcgagggtgcaaagggagnagggcccatacgcccacgaaccggacagagacccanngnnagacagacggccaaaagcaaccgcaccgcaaagggaaacggcggaaagaaacacggcccgncccacggaaaaccgcggcgcggaaggcccaaggaaaaacaaaaggcgannnnanaacccgagaatcacaaagagaaccnnggggacnnaacaccgccccgagaaccanccancgagncaannncaancaggggnnggcccccagacgcagccccggcagcaacaagggncgcaaccacagcaaaccg

SEQ ID NO: 164138 - DNA, 415 bp, Zea mays
  Clone ID: MRT4577_81272C.1
acgcctacctaagctcggaattcggctcgagcagtgagcagggtaggcacttttttttatcggcctgtcaccaccttctttcacgatggccgggggtttcagggcgagtatgccacaaaagttgtacacaacagcggaactgctgttgggctcaaatgcaaagcaggactggggatgggtctagagaggccggggacctcataaatgatgctggagggtggaaatccgaggacccatttattgcaccggcattcggcctcggtagttgcttgtcgggcaacgaacgtcacaccaaatggtggaagggccaaatgaactgctgacagatatgaaaaggcctactgagaaccaactcctgtgaaggagttttgagaaccggccgcaagcgatgtccatgcctgaacgcttgactggt

SEQ ID NO: 164139 - DNA, 318 bp, Zea mays
  Clone ID: MRT4577_81273C.1
gaggggggttaaggagggacgggtcttatcacccttcaaatatttaacacaacattcttcttttataaaaagcaatggaccacaagggcatcataagtatcatgagcaaacacatatgagagtgataactaaataaaacaaccctgctcccccccctaaatcaattgttttctttgcctccataaacaaccaattcgcccccatgtttctattgccctcatgcaatggtgagcaaccaactcgggtgatgacggtgcccttcctacaaaaccctgggattaaagaaaaaacctgtggcaacatgggttgcccccccct

SEQ ID NO: 164140 - DNA, 571 bp, Zea mays
  Clone ID: MRT4577_81274C.1
gtacaagcttttttttttttttttttttttttttttggttttttttttttttttttttttttttttttttttttttttttttttttttttttttttttttttttttttttttttggggggttttttttttttttttggttttttttttttttttccccccccggggggcccttttggggggggaataaaaactattttgtggggggaaaaatggggtcccgcaattgaacccaaaattgtaacccgggggagaaaaaggggtgcctgggggaaattttattggggctaacttcccaaaaaattttccgccccaaaacattttgttaaaccgggggggtgttttgggggggggaaaaataaaataattttcgggcggggaggggcggtttttttattgggaagattttccctcccttcttaataataactttccccccccattaaggggggggggggggttttatccctttttcagggggtttttcctttatcccccgaaaaaggggttaccccgggggaaagatgttttcataaaaaaaaagggggggcgcggatttccaaaaagaggggg

SEQ ID NO: 164141 - DNA, 334 bp, Zea mays
  Clone ID: MRT4577_81275C.1
ggcggacccacgcgtccgccacacccgtccgaatttaccagcgactaatttggcttgagcagaaaaaacccacttagttgggagcagcacaaacggcgggggggatggcggcctcaataatctcctcgtaagttttggcgggggcgcctaaaggcctgccgccctttggccgccgggcctcttcttttgccgtggtttgttccaaaaaaaaaatcaaaaccgccaagccctacgggattggggggggcctgaccgccaacttttaccccaacggtagaaagggcaagggcaagggcgtttaccaattctttaacaagtacggggcgaactgtta

SEQ ID NO: 164142 - DNA, 340 bp, Zea mays
  Clone ID: MRT4577_81276C.1
atggggggtgggggaccccaactcaaaaacacttggtccctcatgtttttttttacgcgacccacattgatacacactgcacaacattgttctcaaaaatgggaaagggcgcctttttcatggacaaattattgcccaaggcttgaaaagaggcctgcccaggtttaatttgaaacgaaaaacgcctgaacgccttcctgcggaaaaacctcctccttccacggctaaggcctgaccacaatccgccatacaaagactggcacaagaggttttataaatgctgtttcccacacggttgcaaacagcagacgattcctcccttttgaatttctagcccacc

SEQ ID NO: 164143 - DNA, 432 bp, Zea mays
  Clone ID: MRT4577_81277C.1
gtactggcacacaagtaataaacgactggctagccaatatgctgcacactgcacggcgtggattgaaagcgcctatataagtccaacaaacaggtcgatcgagagcacactgccagtctgcgactgcgactacgagagttagcgcatcgcaatggcggccagcagaaccagcgtggtcgttgtgctttgcttcgttgtagcctctcttctcctgtcgtcctcgtcatttgctgcccgcactactactacaaccgacgaatggagaagggagacgacggcgaagcagcggtccgtggttgaggaacaggacttccccgtgacagaggggtctcctaatattccgtcttactacgtacccccgccgccttcaccctatacggcatgatttcttcccaccgcggcatgaatgtggatgaatgtaatgtttccagg

SEQ ID NO: 164144 - DNA, 603 bp, Zea mays
  Clone ID: MRT4577_81278C.1
ggtttccatggtgacggggcgccaggctagggcggcctggccactgagccggggtgcagtggcagcgggagagtacctggcgatggcgatatgagcggtgcgggggtggcggctgggacgcggccccccagctcgccgaccccgggctctcggcgccggcgccagcgcccctctgtgggcgtccagtccttgaggccgcagagcccgcagctcaggcagagcgacccgcagaaacggaacctggacctggagaaaagcctgcagttcctgcagcagcagcactcggagatgctggccaagctccatgaggagatcgagcatctgaagcgggaaaacaaggatctccattacaagctcataatgaatcagacatcacagaagaaagacagcctctccacgtcaagcttccagtctgtcaagtccatctctaattcaggcaaggccaggccccagcccggctccttcaacaagcaagattcaaaagctgacgtcccccagaaggcggacctggaagaggagcccctacttcacaacagcaagctggacaaggttcctggggtacaagggcaggccagaaaggagaaagcagaggcctcttatgca

SEQ ID NO: 164145 - DNA, 327 bp, Zea mays
  Clone ID: MRT4577_81279C.1
cccacgcgtccgcttctctacgtggtttatcatgacgcgcatcaccatttgatgctcgctatgatgcttgcaaccgtcgatgcccctattgccttgtcagtgccgataccagcgcatagacgctcagatctcctatctagtcccgtagccagacgggacgcccaaattggcaggcttagctcgaagtgcaatgcctaccgactcggtggcgcggtggctcggcggggcaatcttcgcggctcgcccgtagcgacgcagatcgtcctcttcgcatcccgcttgcgtgcgatcctgcgcgccatacagcagcacccaacgcagagcgcg

SEQ ID NO: 164146 - DNA, 543 bp, Zea mays
  Clone ID: MRT4577_8127C.1
gggtacccggttccccccctcgggttttttttttttttttttttttttttttttttttttttttttcatcaaatttttttttttagggggtttgggtcacaggcggcgggatttttattttttaggagacaccaataccgccccccagctattatctccgaggctaccttcatccatttaattataaaaccgcccaaactaattattctggggctgcgagggaacggggggcgggggaacaatttggttcccaaacccggggccaccaccaatggccggggggtaagaaggagaggagggggggggaaaagccacctggggggaacaacaacggcttcgggggggataaaggttttggccaccgatgtctggtgctccaagaagcacctcacaacctgggggggatcaatgatacggggggccaccaaggggcaaggctcccctgaagccgctttgaccccacccccgaagtttttttgggctagaacgttctcagaaacctcgggggcattagggccggaatttttggcccccacccaaggg

SEQ ID NO: 164147 - DNA, 447 bp, Zea mays
  Clone ID: MRT4577_81280C.1
gcgggggggggtctatggaatccaacaaatgttgtaagaaaagcatcctgtaaaaaaaaaatggggggggaaaaggtttcaaagaaaaaaaccgaaaaaggggactgcagggggaaaaaacaacaggagacgaacatgggaagaaacaaaggaaaacgaagaaaaaaacacagaaggggaacccggaaaaaacattgaaaaaccaaaacggaaaccaaaagggacccaccaaaagaaaatgctaaaaccacttgggaaaagcaaaaagggagcggtaaaggaacggcgaaccggaaagggggaccccaaaaacaatcgggcaaaagggtgcaaaaacccagggaagcacgaaaaaaccaacagaccgcgacccccaacgagggcgcgaacagacggctgccaagaaaagaaagggttccggaatggaatccaagaggaaagacgggg

SEQ ID NO: 164148 - DNA, 479 bp, Zea mays
  Clone ID: MRT4577_81281C.1
ggggggggtttttttttttttttttttttttttttttttttttttttttttttttttttttttttaaaaaaattgcccttttttttatgcacacgttcctccttttatttatccccacaaaaattatttgaatgtttctactgaaaaactggggggggcccaaattgaaaatccccacatttttttttccaagtcaggcaaaataaaaactcacaggcccagcacccatgggccatggggctggcccatggatacatcgataagctcccttgctccatcagggatgatcccacccaatttgtttttttccaaatccctgacaactttgtttttttcgaccgggaggtcccacccgcggttccaaccaaagtcccacaccgagttagcgtccgagtgcgtgctttccatgtcgtagcgggggaccatcctaaggttctcagttgtgctggggccatccccccgttgctgaattttcctcg

SEQ ID NO: 164149 - DNA, 377 bp, Zea mays
  Clone ID: MRT4577_81282C.1
aatccattcaaaaaaactccaacaacctttttccctcaaccaccaacatgcacggagtaacattattttcccacaaaaaaaaaaaaaaaaaccaacatccccccacaaaaaaaaaaaaaccaaacggtaccccctgtttccgccttgttccaccaatttcccacaaaaccccaaaaaaagagcaaatggattcttcttatccaagcaaaaccaacccttacctatacttatccattcctatcccttcccctactaccaattacttggattttcacagcaaataacaagatattacttgttaatctatttccacccacaccccaaaacacatcttttttgttaggggccgggaacggaccaagactcgcttcgttctt

SEQ ID NO: 164150 - DNA, 341 bp, Zea mays
  Clone ID: MRT4577_81283C.1
ggaacaaaatggcaggggctctgccttttaattaaaaagaatagaattgacccagttttaaggaaaaccggccccaaaacctacacggggggccccgtaaaaaaaccggggaaggccttaacaaccacctagacaacgacgggcttacacacacaaacacatttttggtcatttttgccaagcttaaacacaaggggcgggcagttccgactccccaagacgggccgcacactgccaaaggaactcaacgacccctaaattcaaaccccgccccaagaaattaaatcacggggcgttattgttgccaagcctggcacaccccaaaagagggagttcctttt

SEQ ID NO: 164151 - DNA, 570 bp, Zea mays
  Clone ID: MRT4577_81284C.1
atggcggccagaaggtctcttgtcgtcttcctcccttggtgttgtggaccggcggcctcttgggccgacatctcccgctctgtgcgctctccgctctttcccttgttcgcacgtttcatgggcgagcggctctccgggcaaacatttccctggcgcggcccagaagacttcacttctctcgccccgtgttttcacggcagttggttcgagtccacgattcgtccgccacttgtggaagaagagtggccgcctttgcctcgctcggtgtccgcgttgaagatggatccaaaaggtcgaaaccctaactgggatcgatggggtcagaaggatgcgcctcaaggatcccaatcgtggaacaagaatcggaacctaagctggagattgaagccaaatcttggcaaatctgatgtcaaggaggacatcgtgacttcgtcttctggcgatgggggccaatcagatgcacgagaaacaatggacaatagtttacaggtttgggccgatttgaaatgcgtaacaccctacgtcctggcgagagtgctttatgtggtgggttacaagaaggttctctag

SEQ ID NO: 164152 - DNA, 633 bp, Zea mays
  Clone ID: MRT4577_81285C.1
ttttttttttttttttttttgaatttaacaatataacaaagcgaaaaaaaacgaataattgggtatgtctcttgtggtagcagaaaggtttcacctggaaacctgtacaaactccaatgatattacaattgtatcatcacaacctctacaacctgtttctgagaaatcacctggaccatcttcattgcttcatcctgttgtgatggcggatacatcagcattcatggcattggcagtgcctaacagcagtgatctttcaacggcgttctcgacaacttccttgctgctgatgcccaatgacaaaatggaggtcttccagaagctaccacagattccacacttccgcgaggcatggaattgccctccagaacttcgtgaaggaagagccctatgacttatggtctgttttgcaaacatggccaaaagcataaaagacatgcgaattcaagaggaaccacgactttatcaagagaagatgagcatcctgttagagatggaagagaatgggtttgaaactgcccccctgaacgtacgtctacataattttctttgtacaacgaatcaccatatgaatcttaagagcacgaaagttagattagagaaggagatacttgagatagaagcataaacttg

SEQ ID NO: 164153 - DNA, 241 bp, Zea mays
  Clone ID: MRT4577_81286C.1
ggaagctgcagctgcaggtgcagcaagatcaggtgcaggtgctcgggagctggaaccgcaaggtggcttgcttcctcaactcgtgggttgcccacgcgcctgtccgcctgcgaggtctgatcctggactggattcggagaggcaaggaaagtcagttaccagcgccaccgccagtgcaccagctggaaatctcaaccatgtgacttacatattagtttgaccgtaataggctccggatgga

SEQ ID NO: 164154 - DNA, 483 bp, Zea mays
  Clone ID: MRT4577_81287C.1
cccacgcgtccgcccacgcgtccgccctccctcactcagccaaacctgacatcagcctattacaagcgtcagtagagatcttccagatggccatggccaagcccccgcttcagacggccgcgatcatcttcctcgtgctcctcgcgaccgcgtcgtgcctccacaccgtcgacgccgccgctttagggttttgctggggcaagtgcagcgctcggtgcgcgcgggcaagcgcgcggcgggcgtgggccgcgtgcatgagctcatgcggcctctgctgcgaggagtgcaactgcgtgccgcgcgacatccatgactgcccctgctacagcaacatgttcaccaccggccccaagaagatgcccaagtgcccctgagactgagactgtgaggtcggctcacactgcggcatccatgggactgcgactgctgcctacaactacgatccgatccatgctgggccagacaaccagttatgcatgttat

SEQ ID NO: 164155 - DNA, 1152 bp, Zea mays
  unsure (1)..(1152): unsure at all n locations
  Clone ID: MRT4577_81288C.1
gtaccctcccgggacttttccagggagcagcccggaactccggatccaccgctaccgccgccgcgtctaaaccctccaccgccgcggtgcgtcagaggcagaggcagagaggcagaggcagaggcagccatggggagccgcctcgggcgccgcgtgatccactttgccaacctcccgctgaaggtcatgctgccccccgcgccgctctcctccgtgcaggagttcgccgtgcggaccgtcccctccgcttccaaggtggacatccggcgctgcctcgagtccatgtacggtttttccgtcgccgaggtccgcacgcttaacatggagggcaagaagctccgccggggcccctttctctccgccaagcccgactacaagaaggcctacgtcacgctccgcgccccgctcgcggtctcgcgcgacctgttccccatcggggccatcctcgcggagcgggagcggaaagccagcgcagccgctgcgaggaggaaggcggtggagggcgccgaggtggagggggagagcaaggggaagcactggatggaggacgagagggagggcttctccagggctggctgcgggaaggtcgtgtatgggaaccctgggaggctggggaggaagaggaggggaggggataaggtgaaggagcaagctggggacgaggcggccaagttcccgtggtccgggatgcgcctggctaccgagaaaccgaggagggtgagacgctctccatcgaagaagggaatagtcctgaagcaaaaatcacggaaggtatccctgcagcaccgctcaaagaagttgaaagcttgatagtacttgacttgagctgctgtaccgaaccactggaggatcctgccatcgagcgtggatgcaggccgtggacccataagttcgctggcggacctgccttgtttttaaattaccaaataaacaccgaacgttgaaggacttgtaaggattttgtgcctttgatatgggatttagaaggctgcatcgggcatgtgtgctggaggaccagacctggaagggttcatgggcgttccctatcctatactgtcccttcgtttgatatgagaattgagatttgtttagtaattaactgactactagcattgctgattagagatcatgtactgttatttttccnnnngg

SEQ ID NO: 164156 - DNA, 213 bp, Zea mays
  Clone ID: MRT4577_81289C.1
ggcgaagattaagaggggcggtgctatcaggcaagagctcgaaagctggggagggcgcccacgggtgaaggaggctctttccgagaatgtcatgcgagagtttttggtaatgagtaggatcagcaattcgattgagcgttgtcaaggccagattaacaaatagggccccggaaaacccagagaaaacttattaaagaacgggggggctaagga

SEQ ID NO: 164157 - DNA, 438 bp, Zea mays
  unsure (1)..(438): unsure at all n locations
  Clone ID: MRT4577_8128C.1
gcaatcgttaccggtgatttccctcttggttcttggtaacacctagccacctggtccgcattacaaatggaacaaaaaacaaagatgcgtgctttggtcgttttttattttccgattcgggataagctccccccttttttttcctggctgcattttgctgcacactggtggaacctcccgatctcatcctctgcctgtaaagagttcgcgggaaccggtggatctttccgtcatctggccagtggccgtctgatttgttcgtgatctccccgaccccgtgtttgggctgggacaaggagaaaccgccaaaggagagatttgttttcccgcgacactcggaaacacaagtgtaatcccccctaccgttctctctgctcaagtgtcgccattaatggccaggcctctnccataaagcaccatcaattcctcatgcaaaaa

SEQ ID NO: 164158 - DNA, 558 bp, Zea mays
  Clone ID: MRT4577_81290C.1
atacaagaaaatttgagctgcactttgaaatttcagtgtgaaggtgcacggatctattattgaaaaaactggaacatgctcgcatgaaagagcgaaccacacactactgtcttttgcctattatgcattgtgacatgttagcttgacatactcacttgtgatgttagctcatgggcattatacccaagcgccatatttctgatctggccccacttacaatcttatggaaacatattatacctgaactatttattctaaagataaagactggttgaccggtgcttaacatgcattgtatgcctttgagtggcttgattaaacctttagatcgagctaagactgcgatgacagcaccccatgcttctgactcttctagctcggggtggtgtagacctgccggtctttgcctacaaatttggaccacgcgttccggtaccagatcatgccaatcacagccagaaacatgccaagggaggacatggaaacttgagcgctctcttttccaaagaaaaggaaccctaaggttaacaccagcactgtatttatgtggcctaggac

SEQ ID NO: 164159 - DNA, 448 bp, Zea mays
  Clone ID: MRT4577_81291C.1
aattaataacttaaaacctcatcaaattcagatgcaacctggtaaagttcaaccatatctgcttccatgattctactacgggtctattccttttgctgatccctggggggcatgggtactactggatgggggcattttccacataggcgagttggtaactggatgccaggcaccattttaacctacctttaaggggcgtttcggaacttcaaggtttttgtaactaacagctgcacggttgaacctccacaggctttctacattagcgttccaaaaatttttttttccaacccccggtggtttgaacctgcctcgtctaatctaccaaaaacagttttggaacttgcttcacctgaaaaaggaaaaggcaaaattcctggggattccaagctccacaagctatacgctggattaaacaaaagtttcccccttttttaacggttacaaa

SEQ ID NO: 164160 - DNA, 835 bp, Zea mays
  unsure (1)..(835): unsure at all n locations
  Clone ID: MRT4577_81292C.1
cccagcgtccgcccacgcgtccggctaaataccagatgctactttcatcagcaactgtctgcagggtcaccaatatgtatgcatatttggaacatatcataaattgcgatagcatgtcagcatcattgagccatatcctaccaagtactaaggcacttatggtcgtttggttccttttcaattgctaacacaagttcatactcaggataaactcagaaatttgttccatgtaggcattccttctgtatgtggtatgccatagggagggatgtaggacaagaaaggtcatctaaatcatgctttaatgccttccaggaaccacagcagcagcaaccacaagtgcaggtggagctgcagcagcaaccacaagtgcaggtggagctgcagcagccgcaaccacaaaaacaagcagcacctgttatgcgcagaggagcatctattgctgctcggcaagcagcaatggcacagcaatctctggagactatacccgttccatcttcacccaagatcaagcgtcaaacatcagggagacctggttcggtggcatccacaaagcctgcagcagctgcatccacaccaaaacctggcggtagcccaaagaaagagggcgcggaagagcttgaccctgcgctcgaggagacgttgatggaggagacgatccgtgtgacgcgcgccaagctaaggaggcgcaccgccaccgaggattctgctgggaattagatgcatgccgttgttttccctgcacattgtattgatctttttccgagttttaggctcaggtgttgtttgctggaatgaaaataagctgtcctcacttggttcttgtgncncagag

SEQ ID NO: 164161 - DNA, 197 bp, Zea mays
  Clone ID: MRT4577_81293C.1
gagctcatttttcggcggccgcagccgccagacgtgccgtggacgccttgcggaactggagcagtctggcgacgtccggcatcaccgagtggacgggatacagcgcgccgaagcactccgaccactccgactgtagcggagttcgcttgcagtcgaagggcctgacgccgtggagcttctacgacgtgcgcacccac

SEQ ID NO: 164162 - DNA, 298 bp, Zea mays
  unsure (1)..(298): unsure at all n locations
  Clone ID: MRT4577_81294C.1
ggaannggagggtcgcgcccacgcgtacgcctacgcgcacgcccacgcgtactcccacactttcggagaagactgttgatggggcctgatgtaaggactgtaggggtgtaaggtctgctaggatcaacatcagtcccagcaggactgcaactactaaaactgctgtcaaggtccttctcttcctctttggaaaacagactggaatgtttttccgtgtcccaactgccgatgttactgctgtggatttcgctgttaggctagagaagtcttgctcctatgattagatcaaggctatggt

SEQ ID NO: 164163 - DNA, 1827 bp, Zea mays
  Clone ID: MRT4577_81295C.1
aattcggcacgagggtcgctcgctggtacacccatgcggccatgcgccatggttcggttgaacaggggaggagaggagcagagcgagagggcagtcgggttggttagaagaacccaatgcaagtgtgagtgagctgacggcacggcggacgcgctcgcctctcctctcttctcctctcctcccctcttcttccggccctccctctccgcgtgccattccaacgcattaccggtatttttagccaccggaggagacgggtagctgcgtagccacactagcgagagagagagagagagagagagagagagagggagggaggggaaaccatagctcctggccgttccgcgctcctcacggccggcctcagtcccttctgcctgcccatccaccgcggcgccggccggccgtctcccgtccacatccctcctcctctcctgcaaggttcctgtgcggtatggtatgctagctcggctccctgtggtttcccccctcatccggaatgtgatggcgcggtggatggtgttttgatctgtgttcgcttttggcggatctggtcgcgcgcagtagcgcagaggggtcggagtcggagtcggagtcggagaagatgatgggcgggttcctctccagggtcctcctgttggcttttggctatgcctatcctgcctacgaatgctacaagactgttgaactgaacaaaccagagattgcgcagctcatattttggtgtcagtattggattttagttgccctattgacagttttggagagattcggagatttcacaatatcatggctaccgttttactcggaagcaaagctgatgttctttgtatacttgtggtaccctaagacaaagggaactacgtatgtttatggaactttctttaaaccatatatttctcagcatgagaatgaaatcgaccggaatctccttgagctgagagctcgagccaccgatatggttgtcctttatttccataaggctgcttcggtagggcaaaatactttctttgacgttttaaaatatgttgttgcccagtccccttctcagaaatcaaggcaacgccttcatcaggaatcacagcagccgccacaacaacagcaaccacaagtgcaggtgcagcaggcgcaaccacaaaaacaagcggcacctgttatgcgcagagcatcatctattgctgctcggcaagcagcaatggcacaacaatctcaggagactaaacccgtttcatcttcgcccaagatcaagcgtcaaacatcagcgagatctggttcagtggcatccacaaagcctccggtagctgcatccgcgctaaaacctggtggtagcccaaagaaaggcgaggtcaaacctgctgccgacccagttcaaactccaaccacaggtgccgattcaccgaaacccgagcctagcgtcccatcactccctggagccgaaggggtggacaagatggccatcgacgaggccagtggtgacgccccagagggcgcagaagagcttgaccctgcgctcgaagaggagacgccgatggaggagacgatccgtgtgacgcgtgccaagctaaggaggcgcacgaccaccgaagatcctgctgggaattagctgcaggccatcgtttttcctttccctgcacattgtgttgatcttttattttttttggggggggggggtttaggctgtcatgttgtttggtggaatggagatgtgatgttgaattggttctttgtgacacagttgattatcctgtttctgtgctttcttagtgcccttaaaaaaatttaaaaaaaaaaactcgaaggggcccttgctccgaatcttgtaacgtc

SEQ ID NO: 164164 - DNA, 1726 bp, Zea mays
  unsure (1)..(1726): unsure at all n locations
  Clone ID: MRT4577_81296C.1
tatgggtcaccgggtccccccctcgggtcgaccccgcgtccggcttgaacggggaggagagcagagcgagnaggcagtcgggttggttangaagaacccaatgcaagtgtgagtgagctgacggcacggcggacgcgctcgcctctcctctcctctcctctcctctcctcttcttccggccctccctctccgcgtgccattccaacgcattaccggtatttttagccgccggaggagacgggtagcgtagccacactagcgagagagagagagagagagagagagggagggggagggggaggggggaaaccatagctcctggccgttccgcgctcctcacgggcggcctccgtccgttctgcctgcccatccaccgcggcgccggccggccgtccgtctcccgtccacatccctcctcctctcctgcaaggttcctgtgccgtatgagcgcagaggggtcggagtcggagtcggagaagatgatgggcgggttcctctccagggtcctcctgttggcttttggctatgcctatcctgcctacgaatgctacaagactgttgaactgaacaaaccagagattgcgcagctcatattttggtgtcagtattggattttagttgccctgttgacagttttggagagattcggagatttcacaatatcatggctaccgttttactcggaagcaaagctgatgttctttgtatacttgtggtaccctaagacaaagggaactacgtatgtttatggaactttctttaaaccatatatttctcagcatgagaatgaaatcgaccggaatctccttgagctgagagctcgagccaccgacacggttgtcctttattttcagaaggctgcttcggcaggacaaagtactttctttgacgttttaaaatatgttgctgcccagtcaccttctcagaaatcaaggcaacgccttcatcaggaatcacagcagccgccacaacaacagcaaccacaagtgcaggtgcagcaggcgcaaccacaaaaacaagcagcacctgttatgcgcagagcatcatctattgctgctcggcaagcagcaatggcacaacaatctcaggagactaaacccatttcatcttcgcccaagatcaagcgtcaaacatcagcgagatctggttcagtggcatccacaaagcctccggtagctgcatccgcgctaaaacctggtggtagcccaaagaaaggcgaggtcaaacctgctgccgacccagttcaaactccaaccacaggtgccgattcaccgaaacccgagcctagcgccccatcactccctggagccgaaggggtggataagatggccatcgacgaggccagtggtgacgccctagagggtgcagaagagcttgaccctgcgctcgaagaggagacgccgatggaggagacgatacgtgtgacgcgcgccaagctaaggaggcgcacggccaccgaagatcctgctgggaattagctgcaggccattgtttttcctttccctgcacattgtgttgatcttttttttgggttttaggttgtcatgttgtttggtggaatggagatatgatgttgaattggttctttgtgacacaattgattatcttgtttatgtgctaaaaaaaaaaaaaaaaaaaaaaaaaaaaattcaaaaaaaaattaaaaaaaggcccctatatataattaatttttcttattattaatctcaataaatatttggggggg

SEQ ID NO: 164165 - DNA, 263 bp, Zea mays
  Clone ID: MRT4577_81297C.1
catatctactttactatactctaggaagcaaggacaccaccgccatggcagccaagatgcttgcattgttcgctctcctagctctttgagcaagcgccactagagcgacccatattccagggcacttgacaccagtcatgccattgggcaccatgaacccatgaatgcaaaactgcatgatgcaacaggggcttgaaagattgaggtagaaaaccaaacctgatgctacaaaaacatgatgcccttaccggttcctacaatgc

SEQ ID NO: 164166 - DNA, 1672 bp, Zea mays
  unsure (1)..(1672): unsure at all n locations
  Clone ID: MRT4577_81298C.1
actcgggttggttagaagaacccaatgcaagtgtgagtgagctgacggcacggcggacgcgctcgcctctcctctcctctcctctcctctcctcttcttccggctctccctctccgcatgccattccaacgcattaccggtatttttagccgccggaggagacgggtagcgtagccacactagcgagagagagagagagagggaggggagaaaccatagctcctggccgttccgcgctcctcacgggcggcctccgtccgttctgcctgcccatccacggcgccggccggccgtccgtctcccgtccacatccctcctcctctcctgcaaggttcctgtgcggtatgtagcgcagaggggtcggagtcggagtcggagaagatgatgggcgggttcctctccagggtcctcctggtggcttttggctatgcctatcctgcctacgaatgctacaagactggtgaactgaacaaaccatagattgcgcagctcatattttggtgtcagtattggattttagttgccctttcttcagttcattgacgagaatctaacatttgtgtgtgctcatgttgaaggttaccgttttactccgaagcaaagctgatgttctttgtatacttgtggtaccctaagacaaagggaactacgtatgtttatggaactttctttaaaccatatatttctcagcatgagaatgaaatagaccggaatctccttgagctgagagctcgagccaccgacacggttgtcctttattttcagaaggctgcttcggcaggacaaagtactttctttgacgttttaaaatatgttgctgcccagtcaccttctcagaaatcaaggcaacgccttcatcaggaatcacagcagccgccacaacaacagcaaccacaagtgcaagtgcagcaggcgcaaccacaaaaacaagcagcacctgttatgcgcagagcatcatctattgctgctcggcaagcagcaatggcacatcaatctcaggagactaaacccgtttcatcttcgcccaagatcaagcgtcaaacatcagcgagatctggttcagtggcatccacaaagcctccggtagctgcatccgcaccaaaacctggtggtagcccaaagaaaggcgaggtcaaacctgctgccgacccagttcaaactccaaccacaggtgtcgattcaccaaaacccgagcctagcgctccatcactccctggagccgaaggggtggacaagatggccatcgatgaggccagcggtgacgccccagagggcgcagaagagcttgaccctgcgatcgaagaggagacgccgatggaggagacgatccgtgtgacgcgtgccaagctaaggaggcgcacgaccaccgaagatcctgctgggaattagctgcaggccatcgtttttcctttccctgcacattgtgttgatcttttattttttttggggggggggggtttaggctgtcatgttgtttggtggaatggagatgtgatgttgaattggttctttgtgacacagttgattatcctgtttctgtgctttcttggtgcccttttcttgttatttaagttgtaagtaacactttccctccgcatgtgaatacaagttagtggcacgggcaacgaacgcctgcgattgcaacattaaaaaaaaaaagaaagggcgnccg

SEQ ID NO: 164167 - DNA, 562 bp, Zea mays
  Clone ID: MRT4577_81299C.1
gacgcgcgggccgatacaagactctaaaatgagtaggtgttgttctttgtatatttgtggtaccctaagacaaagggaactacgtatgtttatggaactttctttaagccatatatttctcagcatgagaatgaaatcgaccgaaatcttcttgagctcagagctcgagccaccgatatggttgtcctttacttccataaggctgcttcggtagggcaaaatactttctttgacgttttaaaatatgttgctgcccagtccccttctcggaaatcaaggctgcaccctcatcaggaaccacagcagcagcaaccacaagtgcaggtggagctgcagcagcaaccacaagtgcaggtggagctgcagcagccgcaaccacaaaaacaagcagcacctgttatgcgcagaggagcatctattgctgctcggcaagcagcaatggcacagcaatctctggagactatacccgttccatcttcacccaagatcaagcgtcaaacatcagggagacctggttcggtggcatccacaaagcctgcagcagctgcatccacacaaaacc

SEQ ID NO: 164168 - DNA, 548 bp, Zea mays
  unsure (1)..(548): unsure at all n locations
  Clone ID: MRT4577_8129C.1
tcccggtcgaccccgcgtccgcccagcgtacgaggacccctgggcggacgcgtgggctgacccgtgtctaaacaaacagctcacgcagactattatttttcttcatatagcgattcgtattaagaacctatataagctgcattagcaagaacacagtggatttttttttttttcaccatttttatttactcagtcagggcgtgagttttccgttgttcttattctatgttnttacatctgcgtggtctagcctatgtccattgtaaaggttattatcaagaggcccgacgtctctgttaactgagtttcatgctacatgcttgcgcatgagagcgaccaaacttttcacaaaggtcttgagcgcttgcattggtgaggccagcgagcgtgcactactgctatgcgttgcagcctctacagctctagctaataaagctgcttaaatgactgactgctagcccttgccgcaaaatgagaaagcatttataggccggactgctcttacagttgcttcttgtgttggcaactcttctgatctggcagtcatt

SEQ ID NO: 164169 - DNA, 215 bp, Zea mays
  Clone ID: MRT4577_812C.1
aaacggggccgacccacgcttccggaatgacaaaatcaacctcccctactttctttctttacaatcccccaccttccccggcggggatttcttaatataagggggtctcccattacacccaaaactacctcaaccaccgccacatcgccctcacttcttatacaacttaccatacttaccctaccttcttctttcttatccacactcacaactat

SEQ ID NO: 164170 - DNA, 812 bp, Zea mays
  Clone ID: MRT4577_81300C.1
ccggccgggccaacgcattaccggtatttttagccgccggaggagacgggtagctgcgtagccactagcgagagagagagggaggggagaaaccatagctcctggccgttctgcctgcccatccaccgcggcgccggccgtccgtctcccgtccacatccctcctcctctcctgcaaggttcctgtgcggtatgtagcgcagaggggtcggagtcggagtcggagtcggagaagatgatgggcgggttcctctccagggtcctcctgttggcttttggctatgcctatcctgcctacgaatgctacaagactgttgaactgaacaaaccagagattgcgcagctcatattttggtgtcagtattggattttagttgccctgttgacagttttggagagattcggagatttcacaatatcatggctaccgttttactcggaagcaaaactgatgttctttgtatacttgtggtaccctaagacaaagggaactacgtatgtttatggaactttctttaagccatatatttctcagcatgagaatgaaatcgaccgaaatcttcttgagctcagagctcgagccaccgatatggttgtcctttacttccataaggctgcttcggtagggcaaaatactttctttgacgttttaaaatatgttgctgcccagtccccttctcggaaatcaaggctgcaccctcatcaggtttggtcgaatgtattctcttttttgtccaaaaaaaatccattgaataatttgttgttaagtgttcatcatgtttacacagatactcaaaaccttttttaaaggtc

SEQ ID NO: 164171 - DNA, 431 bp, Zea mays
  Clone ID: MRT4577_81301C.1
ctccaaccaatctaattagtgggagggatttaattcggtcttttctttggtcccaaccccacgcaaacaacccccaccaccccccccccgcaaggctagggaggggtgattgaaggaggggggggggacgtggcgggcggacccggaggggcgggcgggccaaccaaaaaaacaggcagaggcgttagggggcccacaggcccgccccggcgggggggggcgggccggggggggacaaacgggagggggagaggggggggggggggggggggtgcctcctttgaaaaaccctggggggggacagagggcggagggcaagcctaaaagaacgaaaagcaccttgaatgccatgcgggcaaatacagccacctcgggaagggccaaacaccttccaaaaagacagggcagggactgctggcgcgggggggggc

SEQ ID NO: 164172 - DNA, 432 bp, Zea mays
  unsure (1)..(432): unsure at all n locations
  Clone ID: MRT4577_81302C.1
gttgaaggctaccgttctactcggaagcaaagctgatgttctttgtatacttgtggtgccctaagacaaaggtctttagattgtcctttgcttcttctatctcacagtttagtttttggcaacaggctgatgtgtgctttcattacagggaactacgtatgtttatggaactttctttaaaccatatatttctcagcatgagaatgaaatcgaccggaatctccttgagctgagagctcgagccaccgacacggttgtactttattttcagaaggctgcttcggcaggacaaagtactttctttgacgttttaaaatatgttgctgcccagtcaccttctcagaaatcaaggcaacgccttcatcangtgtgtgtggatcaaatgcactattactctctnttttgtcaaaaaaaaatccattgaatcatttg

SEQ ID NO: 164173 - DNA, 2773 bp, Zea mays
  Clone ID: MRT4577_81303C.1
gcaattgcaggcgttcttttctcgtgccgctaacatgtattcacatgcggagggaaagtgttacttacaacttaaataacaagaaaagggcaccaagaaagcacagaaacaagataatcaactgtcacaaagaaccaattcaacatcacatctccattccaccaaacaacatgacagcctaacccccccacccccaaaaaaaaaataaaagatcaacacaatgtgcagggaaaggaaaaacgatggcctgcagctaattcccagcaggatcttcggtggccgtgcgcctccttagcttggcgcgcgtcacacggatcgtctcctccatcggcgtcacccaaggggtgaccagattgaagcgtgtaggtggcggccgcccttttttttttttttttttgttgcaattacaggcattcgttgcccatgccgctaaactatatacaaatgcggaggggaactgttatttacaacttaaatcacacaaaaaggtactaagaaagcacggaaataagataattaactctgtgtcacaagaaccaagtgaacaacaacatatctccattccagcaaacaacatgtgagcctaaaactcggaaaaagatcaatacaatgtgcagggaaaacaacggcatgcagctaattcccagcagaatcctcggtggcggtgcgcctccttagcttggcgcgcgtcacacggatcgtctcctccatcggcgtctcctcgagcgcagggtcaagctcttccgcgccctctgcagcatcaccactgacctcatcgattgccatgttgtctacttcttcggtctcagaaagtggtggggcactaggctcggattttggtgaatctgcacttgtggctggagtttgaactgggtcgacagcaggtttgacctcacctttctttgggctaccgccaggttttggtgtggatgcagctactgcaggctttgtggatgccactgaaccaggtctcgcctgatgtttgacgcttgatcttgggcgaagatgaaacgggtatagtctcctgagattgctgtgccattgctgcttgccgagcagcaatagatgatgctctgcgcataacaggtgctgcttgtttttgtggttgcgcctgctgccacctgcacttgtggttgctgctgctgtgattcctgatgaaggcgttgccttgatttctgagaaggtgactgggcagcaacatattttaaaacgtcaaagaaagtattttgccctaccgaagcagccttatggaagtaaaggacaaccatatcggtggctcgagctctgagctcaagaagatttcggtcgatttcattctcatgctgagaaatatatggcttaaagaaagttccataaacatacgtagttccctttgtcttagggtaccacaaatatacaaagaacaacacctttgcttctgagtaaaacggtagccatgatattgtatatttgtggtaccctaagacaaagggaactacgtatgtttgaggggagaaaccatagctcctggccgttctgcctgcccatccaccgcggcgccggccgtccgtctcccgtccacatccctcctcctctcctgcaaggttcctgtgcggtatgtagcgcagaggggtcggagtcggagtcggagtcggagaagatgatgggcgggttcctctccagggtcctcctgttggcttttggctatgcctatcctgcctacgaatgctacaagactgttgaactgaacaaaccagagattgcgcagctcatattttggtgtcagtattggtttgtttcctgtgtctaggattttagttgccctgttgacagttttggagagattcggagatttcacaatatcatggctaccgttctactcggaagcaaagctgatgttctttgtatacttgtggtaccctaagacaaagggaactacgtatgtttatggaactttctttaaaccatatatttctcagcatgagaatgaaatcgaccggaatctccttgagctgagagctcgagccaccgacacggttgtactttattttcagaaggctgcttcggcaggacaaagtactttctttgacgttttaaaatatgttgctgcccagtcaccttctcagaaatcaaggcaacgccttcatcaggattcacagcagccgccacaacaacaacaaccacaagtgcaggtgcagcaggcgcaaccacaaaaacaagcagcacctgttatgcgcagagcatcatctattgctgctcggcaagcagcaatggcacagcaatctcaggagactaaacccgtttcatcttcgcccaagatcaagcgtcaaacatcagcgagatctggttcagtggcatccacaaagcctccggtagctgcatccgcgctaaaacctggtggtagcccaaagaaaggcgaggtcaaacctgctgccgacccagttcaaactccaaccacaggtgccgattcaccgaaacccgagcctagcgccccatcactccctggagccgaaggggtggacaagatggccatcgacgaggccagtggtgacgccccagagggcgcagaagagcttgaccctgcgctcgaagaggagacgccgatggaggagacgatccgtgtgacgcgcgccaagctaaggaggcgcacggccaccgaagatcctgctgggaattagctgtaggccattgtttttcctttccctgcacattgtgttgatctttttttgggttttaggctgtcatgttgtttggtggaatggagatgtgttgttgaattggttctttgtgacac

SEQ ID NO: 164174 - DNA, 1367 bp, Zea mays
  Clone ID: MRT4577_81304C.1
attgggacctcgagccggcgggatgcacaacaatccatcatccaggccgcaagaaacgcctcctccggccctccctccctctcgccgtccgccgtcctcctcgccatggctctggactcggttcctccttaccccagcgacctgggctccagcagggccgccgccgccgccaggacccagcagaggatcaggaaagaggagcgcacctggacctcggacacgtacgctccgtacgacgacgggcaccagtggaggaagtacggcgagaagaagctctccaactcccacttcccaaggttctactacagatgcacatacaagaacgacatgaagtgccccgcgacgaagcaagtgcagcagaaggacagcagcgacccgccactgttctccgtcacttacttcaaccagcacacctgcagcagctcaagcgccctcggcagcgccagagacgtcgcgtcccagtcgtcttcaaagaaggcggtgtcgatctgcttcagcccgcacgccccctccgagcagacctcgttcctgacgacgactacggtcgcgccgccggttatgcactcctacggcgccaaccgacagcccgacaggagcgcctacaaccaacagccccagtggtggacaggcggtgtgccatctcccacaagcaacggccctgctaagatggaggtcgcggagtccacgcagaagccgagcggttcgtacggcagcaccaccggcaacgctccgtccaggacgctgctaccgatcggccagtccaggtgcatcgagtacttccatttcttgtgatgagcttccgggaaggcaagctggggctcgggcactgcagcttggtgtctgcttgtttggagtggcaagtggagtttgtatctggagctggaggcgaaggcgaaaatgttgctgccgtcgtcctggcctcctggcctgaactacacaggccgggcggggcccaatcagtatactgactgacctgcattgcattacatacagagactgcctgctgcttactgtactgtacatctttgcatttgggttcaagccacgttttggtgcttggatgatgtgaagaatggtattggactgttggggtttctttatctagcagtagcgtacatgatatgatacgacgtacagaatgactgcttgacagttgagatatatccatttgtttgttatgtgttgtttgctgtttgtttagagatgagactaggatgtctcatttctgacagcgggatattggccatggttcagtctgctgctacggaaatgctgaaggttatagattatgtacactaaacagtaacagtttcttattaacatgtcttctacagttttagaagcaaaaaaaaaaaaaaaaaaaaaaa

SEQ ID NO: 164175 - DNA, 1674 bp, Zea mays
  unsure (1)..(1674): unsure at all n locations
  Clone ID: MRT4577_81305C.1
taattatctatannagttggtttggaaaaaaaaaaaaaaaaaaacccgggagtctccacccgcccaggccagcgcccctctttctctttgtgatgtgggcggcatgcactgcacgatagcgacgtggcgcgcccatccaattccgtgagcccatccagttcgtgttcgcgtaagaataacggcagccagccacagcccacaggcccccaaggactctcgtcgctcgcctttcccccaactttctccccccgctcggccatacggccactcgcctcgcctcgctgaaaccaatcgcctcttctctccctctccctctccctccaatgcttcccaccgatcgctcctgaagcggctcaactgctccagattttctcgaggctgaaattttggtgtccttgctcagccatgggtagtaggagatatgacattgatacgaggagatgtgggatccactcaagaccaaccaaatcaatgtatctggatgctcaacaaatcgtcagctgccaaactagagtgggagaccacgatgttggttcctgtgctgtgaagcatcacttcccgtctccaatcgtatcttggatagaagatctttccagctttggcaatgcttcttttaatcctgtctctgaatatgtggatgagcaagccagagcttcagtgggacagtcttcagcatcaagtaatttgcatgacatgcaaatatcagtgagattgacagccgaattcatggagcttgcaaaggagaatacaagcaataatctagagacttgtggaattcttggtgcttcatttagggatggaacttattttgtcacgatgttgattataccaaagcaagaaggaactgctcactcatgtcaggctgttagtgaggaggagatacatgccgtgttatcagagcagtcactttatcctgcagggtggattcatactcatccttcacaaacatgctttctatcatcgatcgacttgcatactcaatactcttaccaggttatgttaccagaggctgttgcaattgtggtcgcacccacagatccaaccaggagttacggaatattcaggctgactgaacctggagggatggatgttcttagggagtgtgacgaaagtgggttccacactcaccgagagacaaccaacggcagcccaatctatgaaacctgctcgaaagtgcacttcaatcccaacttgcggtttgagattgtcgacctgcgctcggctcaatgatcaatgggactaaagctatggcagcacgtgctcccttgtgctccctcttggcagaagtatataccatagagcttgctgacgatgcgtgataggtatagtgacagcgccaagccggaaccaagatgctcatgttacttatctgacatctgcgctggtatttgtcaaagaaaaggagtaactgaaaactagcactggttatcttgtctgttcggccagcctttgagttggtattttaagtaatactgtatataacatacaactggggcaaaacacacacacacactattaacttggtctgggatgtgattgtaacgtagcgcaatagcgcttgactgtttctgtggcactgccaatttacttactaattgtcagtgactggagtatgaagaaatacattaatttggcagttccttactaaaaaaaaaaaaaaaaaagaaacctaaa

SEQ ID NO: 164176 - DNA, 209 bp, Zea mays
  Clone ID: MRT4577_81306C.1
agcacgagtccgcggacgcgtgggcggacgcgtgtggcaagcaacggtttacgttttggaaacggaatttcttcgggaaccaaattaagcttggccttacgaaccttggccctattgggcgtgctctgctgcaacatggcaaccaccggttccgccaacaagaaaggaatcaaggtcttcggaagcttcgagggttcagaatacggaag

SEQ ID NO: 164177 - DNA, 611 bp, Zea mays
  Clone ID: MRT4577_81307C.1
ggagaaaacggcagccgcccagcccacaggcccccaaggactctcgtcgctcgcctttcccccaactttctccccccgctcggccatacggccactcgcctcgcctcgctgaaaccaatcgcctcttctctccctctccctctccctccaatgcttcccaccgatcgctcctgaagcggctcaactgctccagattttctcgagggtttaacttctagcggggaggctcggcggggagctaaggattggtactactttccggggctgtttctgggggggttagtgatgaagaggctgaaattttggtgtccttgctcagccatgggtagtaggagatatgacattgatacgaggagatgtgggatccactcaagaccaacccaatcaatgtatctggatgctcaacaaatcgtcagctgtcaaactagagtgggagaccacgatgttggttcctgtgctgtgaagcatcacttcccggcttcaatcgtatcttggatagaagaactttccagctttggcaaagcttcttttaatcctggctctgaatatgtgggtgagcaagccagagcttcagtgggacagtctttagcatcaagtaatttgcatgacat

SEQ ID NO: 164178 - DNA, 641 bp, Zea mays
  unsure (1)..(641): unsure at all n locations
  Clone ID: MRT4577_81308C.1
ctccttttctttgacaaatccagcgcagatgtcangaaagtaacatgagcatcttggttccggcttggcgctgtcactatacctatcacgcatcgtcagcaagctctatggtatatacttctgccaagagggagcacaagggagcacgtgctgccatagctttagtcccattgatcattgagccgagcgcaggtcgacaatctcaaaccgcaagttgggattgaagtgcactttcgagcaggtttcatagattgggctgccgttggttgtctctcggtgagtgtggaacccactttcgtcacactccctaagaacatccatccctccaggttcagtcagcctgaatattccgtaactcctgaaaaatttgagaaacaaatagggcattttcagattacgttatataagtttacccagaaccagaatgtaggagcaaaagaaattaagaacaaaggaactgcagatgtatgccagccattttatgtacaagtaacacaagtgtagtatttattagcaaagaacacttgcctggttggatctgtgggtgcgaccacaattgcaacagcctctggtaacataacctacaagaatccagcatttttcatcaatcaaagttaaagggcatggcaaagtgtcataac

SEQ ID NO: 164179 - DNA, 333 bp, Zea mays
  Clone ID: MRT4577_81309C.1
ccgcctctcacccaacatcctctgctagcccccgccgcactcgcctcccgaattcggccgccacggctcctgccccagcccacctccctacagcagctgcagttccctccggcctccagtggtctgtcacgccgcctcctcgtccagatccgtccgtggtccgcccctccggcctcgcccagctccaaagctccctcatgctcgcgggcacgcggcctcgccctggggccaggccctgggtcgccgtctccggcatctgggttgaggggtgagcgagaaggttaagaggcacagattggttgagcaggctactaatggaaggttgaaggaaga

SEQ ID NO: 164180 - DNA, 448 bp, Zea mays
  Clone ID: MRT4577_8130C.1
ggcccgcgtgcgggagccgggcctgaattatattgctgggtcgacgatgctttttagtccggggccgcactcttgtacgtggggtttatttactcggagcgccgggtaccagatgccggcaataactaggacgccttgcaccctatcatcgccgactatgatgccgttcttatcattgtccgcaggttcagcgacgcctatgtccacagtgattgaagctgcggcccttgaaggtcattccagggaccgttgagaaaccaatgatagcacctcagtcacacggggggggagagacactcggtacacgcggagatctcctgtatgggcctcatcaggatgcgatggatcgatgaagctcaccgtgcatgttggagcaaaaatgctggtgtaacgtgtcctgcctatttaaattgctatcagacgcgggccactcaggatgctgggtgga

SEQ ID NO: 164181 - DNA, 336 bp, Zea mays
  Clone ID: MRT4577_81310C.1
gacatgccgacggttggcaacgagatggcgccaggcggcgagcagcatctccgccgaccgcgtccccgacatggagaagcggaagctgatgaacctcctcctcctcggcggcatctcgatgacaagaggcggaatgggtgtacaataaggggcattattagtccaggcaggtgaggcgagaactaaaatatgtgcataaacaaattgatctattacatgaaacggatccgaggacaacaatgaaccgaagtctctgtctgctacatccgaatctgtcgaacgtccagaactgtaacaacctctacgacatctgggagttaatcaacttcaggacga

SEQ ID NO: 164182 - DNA, 1920 bp, Zea mays
  Clone ID: MRT4577_81311C.1
ctatgttccacgacttccccacttctgtgccgtccatctgagtaagccggtatgatcgcggccgtgtgacctttgatacaatgaaggtccttcccatagtggtgacaacttgtgccgtccttcccccattagaattcgacgaaggaccaagtctcctactgcaaaggaccggtgtcgcacagctttatcatgatagcgccttaaggtctgctggtacctacccgactgaattactgtgttcaatcgttcttcctccagtacatcgatatcttctagcctggtagcttctgcttcagctatgctttcgaaagtcaacctcggcgccccgaatattaggtcggtgggcagcactgcctttgacccatagaccatgaagaacggggtatttccatgcagagctcgactgggttgagttctcaggctccaaaccacgtatggcagctctctgaatattatgtcttgtatgaattctactgccttggctgaggtcaaggaggcaataggcttgtactctatccattttgtgaatttgtcaatggatcccagcgaagagtgatgttgccgagtatagcctcccagagctttcttgaaaggtccgatcatgtccagcccctcttctgtacagtatgcctctatgagggtgtagtgggctgactgccttgcgatgcgttccgctgctaccttgtcatccggttcttcttcattttttatgtacctgatgataggctctctccagtcaattgggtccgactctagttggctcaaggtgttgcactcttccatctgatctaagaggatacttgattgtgatatttcttggacgaagatcccgggtggagcttgggcccgactggatcccagcttcgacaacgcgtctgccgccgcattgcggtctcttttcatgtgaaggaactccaatccttcgaatttgtgctccaattttcggacggctgcacaatacttgcccatggaatcagtcgagcaatcccagtctttgtttatctgtcttatgaccactagcgaatcttcatataccatcagcttcttgatgctgagtgatacggcgatgtttaatctgtgcatcagtgcttcatattctgctctaggagcaataaagagaatccctgcacctgctccctgcaacttcagtgagccatcaaagtacattctccatacttcggtagtctccgggttgtctgggacctggtgctcagtccactctgatacgaagtcaaccagtgcctgagtcttgattgccatgcagggccggaactctatgtcgtgagctcccagctcgcatgcccacttggctatccttccgatagcttctttattgtggagaatgtctcctattggaaatcctgtgactactatgactttgtggtcatcaaagtagtgacggagcttgcgagcggttagaagtaccgtgtatagcaacttctggacttggggatacacgtgagtcatgcaggagatgtataacaatagctcttctgctggctgattcggcatggctcggcgtggtggcttgagtactggtggtgtagtcaggaactttttcagtgcctctagagcttcctgtgcctctgtggtccactttttctgcgattgtggcgcttccattctcatgatggcctcgattttttttgggttagcttcaattcctcggtggctgacaatgaatccgagtaacttccctgccggtacttcgaagacacacttttctggattaagcttccaccggtatcgctgcaagctgttgaagaccagctgcaaatcttcgatgaagttttctgagttttctgttttgatcaccacatcatcgacataggcttccacccactttccccagtgatcggctaagcatgtttgaattggtctctggtaggtcgctcctgcgttcttgaggccgaacggcat

SEQ ID NO: 164183 - DNA, 243 bp, Zea mays
  Clone ID: MRT4577_81312C.1
caacaacatttttcacacagaagtaaagcaacaaatcatggcatcgcaccaaattgacaaaaactcagagcgatacatcatcgctaagacgatctacaatgaaggccactacgagggtgtggatgtgatggaggccgtagcatccaccatcctcaacaggtacaagctcaacaaggctgagctcggtggccaagactggagaaaaatctgtgaaatgggctaccctggcgaggaaggccagga

SEQ ID NO: 164184 - DNA, 332 bp, Zea mays
  Clone ID: MRT4577_81313C.1
aaaggaaaacattcaacttatgacccttgaaaatgcacactgggatgtcgcgatcccaaagtccgtacgggacatacaatttacattggtataaattttatttggggcccattcaacttaaagatttttgaagatgcacacttgtacataaaatgcagaatagcataaggccgtagtagcttttgacaattttattttggggaaaccagcgaattttgggagaccattcgggagggaaactgtaaactggcaggggggttttaatcgaacaaggtgaaacccatatttttattagacttttttttttttttaaccttttttttcttttttgg

SEQ ID NO: 164185 - DNA, 414 bp, Zea mays
  Clone ID: MRT4577_81314C.1
ggggaagccttttttccttggatttttgcccacattttttttgggtttacggggggggttgttggaataccattacatacccggaaaatacaccgggggggggtaaacatttggggggaacacccttgtaaattaaacgggcgggacgggaaaaaacagggcgggggcaaaaagctttgggttattttttcctcgatcggttaacgggggcgggggggggcacacaaaggggggggtgcctagtgggggagcagggggcttttataattatcattaccatcagggggttatttttggcgggggggtaggacacaaccctttcattggtccaaaccacctaaatgctccaaaaactgacagcagggggggttgggaggcatcgctttttaataaaatgggggcggcgggctgggg

SEQ ID NO: 164186 - DNA, 160 bp, Zea mays
  Clone ID: MRT4577_81315C.1
gactcgtcctgtagctgctcaataagcgcggtacaagtgggggattcgcgcatccatgacgctacgcttgtcaacgccataacgaccgcatatttagcgtacattccattctttattgccacgtttgaccgtttgccccataaagctatgaagctgtggc

SEQ ID NO: 164187 - DNA, 561 bp, Zea mays
  unsure (1)..(561): unsure at all n locations
  Clone ID: MRT4577_81316C.1
tggacctaccaaacataggaagatccttgcttaatattgctcgtgctaacaaataccacagaaattaaaaggcaaattttagacggttacttgctatgttgtatgatgtagaatgttggcctaaaaagccatcatgttcagcggataagggtgtgtttggtttaactttctgaactagattcgctgccaaaaataagaatctcaaccaaacgagcacaatatcagaatacatttctaaaaatctacagattcctctagttcaattcagaatcaccacttaccctaaattttctagattcttgccattcgtgttaccaagttatcatgctcttacaatatctacagtttgtnagttgtttcaaccaatcatatttcagctttcatacaactgttagctcacaacaactttctcacagctcacaactagaatcaaattttcaggaatctacggtcgaaccaaatagacccaaagtgttgcggaaatgcatatgttgcgttagatttatggccatacaatataagggattgagtcgaggacgatgatatacatgtataggctag

SEQ ID NO: 164188 - DNA, 208 bp, Zea mays
  Clone ID: MRT4577_81317C.1
gtcgcgccgccgctcctctcacacccagtcgctcaaaaccctagagctctcgcctgctcgcctccgccgccggagcgagctccccatcttcatccgtcaaccatggtctacccacatcatcaagaagaacaagttcgtcacctacggtgttttctacgcctagctcaatgagatgctgacgcgctagctggcttatgttgcttactct

SEQ ID NO: 164189 - DNA, 278 bp, Zea mays
  Clone ID: MRT4577_81318C.1
cttgaatctgatacaccccacatcctcctacgtcctttactcggcagtagccatggccacggattaacatcgacatgaacggtttcgaggggatcgccatgctcttccccagggtcgcgctgcagaccgaggttgtcttgctcgtcaccggaaacgaccccttcatcaccacgcactagcagagctacatgttcaagcacgacaccatgcacggccactggaatcacagtttcatcagactcaaggactctcaggcctttctcttgcgtgacaagccg

SEQ ID NO: 164190 - DNA, 342 bp, Zea mays
  Clone ID: MRT4577_81319C.1
atccttttgttattaaccgccctaaatagggggaaaaccgggggtagtttaaggcgcccacacgttggacaacaccccagaaggggggtgacattggccaacagggcgggagacaaatgcaaggaataaaaccggacccacaacgacaatccagacaaaaatccccaacgctatacaagaagaacgagagccacaaagtagaagaatcccaaagcgaaaaggggcgggaacagaccaacccaaggcacatagatccactgtacaggaacggagcgccgggccgaagggcgggcaccagaaggaccaaaccagcctaccctaccagatttgcacagggggcaa

SEQ ID NO: 164191 - DNA, 172 bp, Zea mays
  Clone ID: MRT4577_8131C.1
aacgtccggacgggcggctacgcttgtactctgtcgagcccctgcttttcttcctagctcgcttgttttactcttctgcggcgctgagttacgtattgtccccatcccttgggtggcggcgcgcgcttgtcctggtcggcgcttgcttggggggggggggggggtttttttt

SEQ ID NO: 164192 - DNA, 664 bp, Zea mays
  Clone ID: MRT4577_81320C.1
cgtacgcgtgggcgtcggcacgaccccttccaccaccgcctccttctccgccctctcctcctcgcccgcgtccgtccccagtctccggcaggctccttacccccaccgtcggccctgcttcttccttctcccctacgcgtgatgccctcaacaccgtcgccctctcttcttcaccatcgcctcgctcgcctcctccgtcgtcgagccagcccttctccgtatctgtcgccatcacacccggatctgcctccgccatgaccgacgaccaacgagagcggcgtgagacggctttaggcgacgaaggcggcccacaccatgtcagccaacgacgcacagcggtggaagcacgcgatgggagctgacgacgcccttcctcggacggtatgcctacccccaatcaggtcatcgtcggcctcctgcagctgtccctccatcacctccttcaaggtttaggcgctccaccacctcagtccgggtgcactgtcttgccctcgactccagtgcctgtcacctcctcctgggccttggcgttaccgtggcccctcgcacagagaaccctcggtccaacaagcatctaggcgtctttggtagtggtctgtcaacaacttacaaggtttgcactctttggtttccttccttactaaagttctatatggagggagtc

SEQ ID NO: 164193 - DNA, 380 bp, Zea mays
  Clone ID: MRT4577_81321C.1
acggcccgctcgcgatttataacctttctcgttggttaaaaggggcttaaccacatggacttaggattctacagccttttatggacaaacccaaaggtaaccatgggcatctgtgtccttgactggacatgagactttccacagcttttacaaccatgcgttgactgaacaaacaccatgagcagataccaacattggaaccggacctacctttgataccgtttgtaaagatcaccaaccagcgaggggcgcctgactcacaacacagtttgcaggtcctaaaccaattgttatgtccggcggtgctattccttgacgtcttcaaagagttcatcttgacacttcatgcttgtcggattatttgggcacataacaataca

SEQ ID NO: 164194 - DNA, 657 bp, Zea mays
  unsure (1)..(657): unsure at all n locations
  Clone ID: MRT4577_81322C.1
gtttgggaaaagcattgaagccgaggaggcgtacaagaacggttgtcagtaccttcttggtcagtttgggcctccgtttgctacgctaaggcttgatttctctcccgtcaagttgactgtgccttcaccgtctcttgcttcaaagcctccactccgagatattaggaagaaccttgaggatatgatttcagcccgtcgttcggctctggcaacctcatcagatgggcagctgaatcctgttccagataagcttctgggggagatgcagggccttttggcaaacgttgacaggatgcttactaggccgcctgagaatgctccttagctctgccaatctgaaggattatggctgtaacctattggtagttagacaactttggcggttctgttagttgtagcttttgcatctaactttatgatgaactacatcgtttacccagttcagcagctgcgatttggaattcctgtgaatggtaggggcttattgtgtcactgcttcgtgtactatatatgccaataaggtcgcagcttcttttagtgccaaaaaaataaaaaatgttaatagtatgtcaaaaaaaaaaaaaaatgttnngggnngttttaaaaaaaacaaaatttaaaaaaaataaaaaaaaaaaaaaggggcgccccttttaa

SEQ ID NO: 164195 - DNA, 300 bp, Zea mays
  Clone ID: MRT4577_81323C.1
ccttggtgaaatgtgcgcgggaccttcatatactgcatatgttaccacaacacattaataactgcatactgtcaagaggggttaaccctgctgaatgctccaatttattggctggacggcgagactgccgattaagcgtcaaaaagttggccctattgcctttattgaggtattacaggttgctgatttagggcacacataaacggtggggatggtaagagacacttatgatcagctcggcgtactggtgtgacccatggcactctaaatctacagcattttaatctttgacagaacagg

SEQ ID NO: 164196 - DNA, 450 bp, Zea mays
  Clone ID: MRT4577_81324C.1
tcccgcgtctactccacttcttcctctaggactaactgctaccccctctcctttccctcgccgcctactcctctccaattctactttaccaaccgcatcagcgagagctagactgataatgaccacttcaccttcctcactcataacctaccatctctactacctttacaactctcaaacacattttttctataatcaatctatataatatcatttccattttaatactattataatatccatatcattctttcttcttttaccatatttcttttttttattcttttattttttttttatttttttctatttattatatttttattctgtttttttttatttttttcttttattatattttattatatattcttttttctatttattttttcttcattattatatatttatatttattttaatatttttttataattttttatatttttt

SEQ ID NO: 164197 - DNA, 290 bp, Zea mays
  Clone ID: MRT4577_81325C.1
ggttcccgcagctccgccgcgccacgcgtgccgcggccacggtgctccgggaagtcgccacggtcaacgagtccaagccgcttgacgtgtcgctgggcttcgcggctcagctagtgaggctgacgggtccacacgagctggcacaccatctggtcaacgccggggtcagcgagcggacctggtcaaccggctggtcagcgtgctggctacgtacgcctgcccttcgatcaaggcgccgcggatccgaaggtttacggtcgacctcgtcatcgcgctgctgaggacgccgc

SEQ ID NO: 164198 - DNA, 210 bp, Zea mays
  Clone ID: MRT4577_81326C.1
cccacgcgtccgtagttctagatcgccacaccttttgtaggcatgtatttttgtaggacctgattttggtagggaatagaggggtaaggtaaaacaatgaaaaacgtaggagttcggaagtagttcggcaaaatgtccacacctatgtaattgtattgaaactgactaaagctagtgcaaggaactgacacttagttttgttttgtgttt

SEQ ID NO: 164199 - DNA, 266 bp, Zea mays
  unsure (1)..(266): unsure at all n locations
  Clone ID: MRT4577_81327C.1
ccggccaggccaagaacactttcacctgaactcctggagaatgggcatgagagatctcccgctgaccccttcacgagctcctcgtttggagctcccaaaccaggccagcggcggcgggcccagatcagtgagagcttatgcgaagggagacgagggagggcgacaaggcagtcccctggttcggaagcatcaccgaggcgctgactttctcgcagggtcgggtcggagaaggacgccgagctgctgtacgangccagggagtccac

SEQ ID NO: 164200 - DNA, 342 bp, Zea mays
  Clone ID: MRT4577_81328C.1
gtctgtgtattttatggcgactcgtggaatccacatgcaaactccaaaccggaacccaggacaggacaaaagcagatacagacagggataacagacgagggagtagacgggggaacaacttacatcgggcaaggcacaacaccagcccaaggccccgaccaaggaaccggccaacgcaaacagatcaacagccgcggaggacaaaggagggaaccagaacccggcagctcagaagcaagcaggggccgcatacccatgggaaaggcaactgtgcgaggcgcaagagcaacagctccaacagagggaaagagcggaccagcagccagaccgcctggaagggac

SEQ ID NO: 164201 - DNA, 306 bp, Zea mays
  Clone ID: MRT4577_81329C.1
gagctcatcagtcggcggccgccctttatctttagggggacttttaatagatgcttggtttcattactaagacattggaggattagagaagggttggatgaagcctcaagtcatgcaacgacgcaagggcaaacgctggagggccgggtggggctaaacaatcaccgacagtgtctgcagatgacaggatcaaggtttcttcactaaattttgtgcagatgggataaaccctgaccttaacaagcagtgcttgggctgcctgccagagaactagcattcgaacggtagaggctccttatgaactga

SEQ ID NO: 164202 - DNA, 521 bp, Zea mays
  Clone ID: MRT4577_8132C.1
ctcattccgccgccgcctcctcttcaccaccaatcttgcttgtcgcgcgcctccgcgccgccgccgccatggcgacctcactctcatcccactcccagctgcgcgcatgcccctcccacgcccaccgcgccaccgtgctctcccgctccctcctccccttcccgcgccgtcaccacggctcctcccgccgcggcctctccgcccgctccgcctcctccaacggcgccgcgcaggacaccgccgtcaccgtacgccacttcgccgcggagcctaccaagggcggcaagctcgccggcgtcgagaagatcatgattctcggcgcggggcctatcgtcatcggccaggcgtgcgagttcgactactccggcacacaggcttgcaaggcgctcgtcgaggagggataccaggtggcgctcgtcaactccaacccggccaccatcaagaccgaccccgacctcgcccaccgcacttacatcgaggcccatgacccccgtcgctcgtcgagggcacccatccccaat

SEQ ID NO: 164203 - DNA, 419 bp, Zea mays
  Clone ID: MRT4577_81330C.1
ttttctcttgacatgcccattatggttttcgatagagacaccaaagacatatcatatattggggattttctccaaattttttccgatgggtttttctagagttttacacagtatgctattgcaaacctcctctttacttacatgattttaaaggagaatatgcatgatgaacaactgcttaagggggtagtatgagacctaagcagtttcaactgctcccagtcatcgtgtgcaagggacgtgccccttgcacaatcccgcttaggcaactggcaaacggacgtgaccccatggtggagaatagatgtgactcaacagctgcctccttttgggtgacttttcacttggatttatatgttcaagcaataaagaaactttaagcttaaaagacatctatccatgctgatgaagtagtaatg

SEQ ID NO: 164204 - DNA, 175 bp, Zea mays
  unsure (1)..(175): unsure at all n locations
  Clone ID: MRT4577_81331C.1
ccgcatttccggggcggcaacccggggcgcccagcgnccgggacttcccnccccgcccccgcgcacaccaacgcaaagatggaacacggcccgacaaaacccaagcgcagggaagggaaacacgaccaagccagccaccaagcaccccgagcgaagcaacacagaagaggcaagc

SEQ ID NO: 164205 - DNA, 388 bp, Zea mays
  Clone ID: MRT4577_81332C.1
gtatccatgtgtcgttaccttttcattgcgagggaagaacatgacatgccttggtgcaggtcatagcagggatggtgcaaaaagatcctcatgagatgtccactgcagccttggtaataacgtcggctgacctgcactcatgatagacctgatcagacttgcaaagcacactagatgctgtgtgctctaggacgctgagcatggctataaagagtgcagggcgtcctatcttataaacatggctgcatgggacatctatgtgaggacaacggaagctgactgcattagtgaaccgggatgatgttaccctcttgcacggagacgcacctggatctggcggccgattactagcttacttacgcatgcgtgcaataatataggtcctgta

SEQ ID NO: 164206 - DNA, 386 bp, Zea mays
  Clone ID: MRT4577_81333C.1
ccggccgggacttccacaatatttcatcatgtcctgcttcagcgacgactcacaccccgctcatgtgcaccaccaagtaactcaccgacctcatgaggaagaatggtcccaccagttaataagtgaagacgcagactatgaggccgccaaggcctatcaggatcacgtcactcgaaatggacagcctgacagcgcaccccaatgctaaggaaattctggccggatttcacctggcctttgttgaccgtgcaactcagacatatccgactggactttatcgatgcagaataggtcaagcgttgtggacatcaccatgtacaagatcagctgactgccgacagctgaggacgagactatgcttaactcgtgatcaatgatctttatta

SEQ ID NO: 164207 - DNA, 299 bp, Zea mays
  unsure (1)..(299): unsure at all n locations
  Clone ID: MRT4577_81334C.1
cggccgcccttttttttttttttttatatatttgaatancttctcntttctttttaggacccaactaccaatggggggattacccagaacgttacttaaacaaacataagnnaagggngnngattacccattacggtactaatatgggaatgaaaaggcatcattggatctttcacctaggactggggcagggcgacttctggttagcctttgccttttcttatcaggggattcaaatgctggtttcccccaagaaacttgaggaaattgaacaggaagggaacgtatttatgcttcct

SEQ ID NO: 164208 - DNA, 154 bp, Zea mays
  Clone ID: MRT4577_81335C.1
attattttaagtgtggagggagggcgcgctcacgcgaacaggctaaatgaaacaaacgcagacgtgacgcgcgtctaaattcataaacgacgaccctcagagacagagaggtgggcatgaatgataagcccgggagctctcctcttggcgtttc

SEQ ID NO: 164209 - DNA, 320 bp, Zea mays
  unsure (1)..(320): unsure at all n locations
  Clone ID: MRT4577_81336C.1
attcgtttcgagcctcctttaccatctcaatctttttttttcaaacaaagattatattcctcagggcagggtataatcaaatgtgcgggggcctctccaatgctnatcaaataagtggccaaaatatcatctcccatccatttcagcatggtactaataacaaatgtttgttccttgtacgttcagaagaatagccttgaatgctactcaccctctctcttggcaccatcccaatttcttctaatattttagaagacattttaaatatgcaaaaaaatgaacttactttctgcccgtccaaaaaaaaaatctaattgcca

SEQ ID NO: 164210 - DNA, 194 bp, Zea mays
  unsure (1)..(194): unsure at all n locations
  Clone ID: MRT4577_81337C.1
cccacgcgtccgattttttatcantgacatnagccaaacactcagacgttcgcgctgactttctgtgaaaacaatataaatatctacatggactctttacacaagatgcgcaccttcaacgataatattcacaacaaagagggtatcatcaccaaacatggtgcgccttaaaaatgatgacaccttggtccatg

SEQ ID NO: 164211 - DNA, 269 bp, Zea mays
  Clone ID: MRT4577_81338C.1
ctcacgcgtaccataaatcagtcgattgttctgactatagtatctacagactaagggaggcttctataatatgattccgggctaagattacctcaagatatcttgagcccacacaaattctatcctgttaagccaatgatcagaaccatatgtctctcatcgcactccacatattatcacaccttaaatatgtattaccacacatctgcttcgatgagcactgccacgtaatctatatcttcaaaccggacatttttggcaagcacaac

SEQ ID NO: 164212 - DNA, 1082 bp, Zea mays
  Clone ID: MRT4577_81339C.1
aagaccttctacgaccccgtgctccgccgccgggtgctctggggctgggtcggcgagaccgacagcgagcgcgccgacgtcctcaagggctgggcatccgtgcagtcgatccccaggacggtgctcctggacacgaagacgggcagcaacctgctgcagtggccggtggtggaggtggagaacctccggatgagcggcaagagctacgacggcgtcgcgctggaccgcggatccgtcgtgcccctcgacgtcggcaaggcgacacagctggacatcgaggccgtgttcgaggtggacgcggagggcgtgcgcgtggcggaggaggccgacgtgacgttcaactgcagcaccagcgcaggcgcggcgagccggggcctgctcggcccgttcggcctgctcgtgctggcggacgaggacttgtccgagcgcaccgccgtgtacttctacctcgtcaaggccacggacggcagcctcaaaactttcttctgccaagacgagctcaggtcatccaaggcaaacgatctggttaagcgagtatacggaagcttggtccctgtgctagatggggagaatctctcggtcagaatactggttgaccactccatcgtggagagctttgcccagggcggacggacgtgcatcacgtcgcgcgtgtacccgacgcgggccatcaacgactccgcccgcgtgttcctcttcaacaatgccacgggtgtccacgtcaaggcgaaatccgtcaagatctggcagctcaactccgcctacatccgcccatacccagcaagttctctatgagctagcaaagtgaccgtaaccgacaaataggcagcagtattattgcatgcttgttaattacatgcatgggctcatttgtagaatagtgattgattaatttattcgttggctcttgtttgtatatcggtcatctatctagagtattacttgagcgatttaattgtgcgtgtgatgctcagatcaagtagcggttgaaaatgagcttgaaaaccggcagtgtgaaatggtttcaattttttttgacagttttcgaaaaggttccaatatggtttgaacgtgagtttgtg

SEQ ID NO: 164213 - DNA, 430 bp, Zea mays
  Clone ID: MRT4577_8133C.1
agtgtgtctgtctcttttttttttattttttttaaatttttttttttttgttttttttttgggggggtctttgtggttttttatctaaaaatactgacccaaaaaagggaaaggcacctctcaaggcggccaaaaggggaaaacctgtaagccttcaaaacgctccagaaagttggaaaaacacacctgtatacacgaaaaacacgaacggcggaacaacaagaacagacaaaaacccccctaaggggggggctgcccaacctggagtggcgagcggtttaaaatagggacccccctgtaccccaaccccccaacggaaatggcaccgaagaaaaagcctagcgggcaaaaccagcatcacgccgaaaacgggaaatccccggggaccgaaccccgccccgagagggaaagcccgggccccaacaagggg

SEQ ID NO: 164214 - DNA, 2396 bp, Zea mays
  Clone ID: MRT4577_81340C.1
ctccgtgtctccctcgttcacgtctcgtctaccattactggaaccaaagaaattaaagcctggtgtttgtttctttccgaaggcagccatgatcccggccgttgccgatccgacgacgacgttggacgggggcgcgcgcacgccgttgctcccggagaccgaccctcgggggcgcgctgcccccgccggcgctcggcagaatcggccggcggcggcggcggcggcgacggcgacgatgaccgttctcaccgccgtcgtctccgccgtgctcgccctcgtcctcgtggcggtcacagtcctcgcgtcgcagcacgtcgacgggcagggtgggggcgttcccgcgggcgaagatgccgtcgtcgtcgaggtggccgcctcccgtggcgtggctgagggcgtgtcggagaagtccacggccccgctcctcggcgccggcgcgctccaggacttctcctggaccaacgcgatgctggcgtggcagcgcacggcgttccactcccagccccccaagaactggatgaacgatccgaacggtccgctgtatcacaagggctggtaccacctcttctaccagtggaacccggactccgcggtatggggcaacatcacctggggccacgccgtctcgcgcgacctcctccactggctgcacctaccgctggccatggtgcccgatcacccgtacgacgccaacggcgtctggtccgggtcggcgacgcgcctgcccgacggccggatcgtcatgctctacacgggctccacggcggagtcgtcggcgcaggtgcagaacctcgcggagccggccgacgcgtccgacccgctgctgcgggagtgggtcaagtcggacgccaacccggtgctggtgccgccgccgggcatcgggccgacggacttccgcgacccgacgacggcgtggcggacgccggccggcaacgacacggcgtggcgggtcgccatcgggtccaaggaccgggaccacgcggggctggcgctggtgtaccggacggaggacttcgtgcggtacgacccggcgccggcgctgatgcacgccgtgccgggcaccggcatgtgggagtgcgtggacttctacccggtggccgcgggatcaggcgccgcggcggatagcggggacgacgggctgagacgtccacggcgccggggcccggggtgaagcacgtgctcaaggccagcctcgacgacgacaagcacgactactacgcgatcggcacctacgacccggcgacggacacctggacccccgacgacgtggagaaggacgtcggcgtcggcctgcggtacgactacggaaagttctacgcgtccaagaccttctacgaccccgtcctccgccgccgggtgctctggggctgggtcggcgagaccgacagcgagcgcgcggacatcctcaagggctgggcatccgtgcagtcaatccccaggacggtcctcctggacacgaagacgggcagcaacctgctccagtggccggtggtggaggtggagaacctccggatgagcggcaagagcttcgacggcgtcgcgctggaccgcggatccgtcgtgcccctcgacgtcggcaaggcgacgcagttggacatcgaggctgtgttcgaggtggacgcgtcggacgcggcggccgtgacggaggccgacgtgacgttcaactgcagcaccagcgctggcgcggcgggccagggcctgctcggcccgttcggccttctcgtgctggcggacgacgacttgtccgagcagacagccgtgtacttctacctcgtcaaggccacggacggcagcctccaaactttcttctgccaagacgagctcagggcatccaaggcgaacgatctggttaagagagtatacgggagcttggtccctgtgcttgatggggagaatctctcggtcagaatactggttgaccactccatcgtggagagctttgctcaaggcgggaggacgtgcatcacgtcgcgagtgtaccccacacgagccatctacgactccgcccgcgtcttcctcttcaacaacgccacacatgctcacgtcaaagcaaaatccgtcaagatctggcagctcaactccgcctacatccggccatatccggcaacgacgacttctctatgactaaattaagtgacggacagataggcgatattgcatacttgcatcatgaactcatttgtacaacagtgattgtttaatttatttgctgccttccttatccttcttgtgaaactatatggtacacacatgtatcattaggtctagtagtgttgttgcaaagacgcttagacaccagaggttccaggagtatcagagataaggtgataagaggagcagggagcaggtatcgtaaagtatgtctataaagtagtgccagttaagcccagaacaaa

SEQ ID NO: 164215 - DNA, 335 bp, Zea mays
  Clone ID: MRT4577_81341C.1
atggttttttttgtgaataaggcactgttggtggggttagggggactaagtgtgagggtgtaaagtggtcgattggtatcagatgcgatgcatatgagacacaaacattagcatatcgagcatggtgatctagaatgttagggtgacacccatcatctatcttaggtgagctggtagtatgggacacaagagcgagtagggaatggtagagattgaaacattgttgttaagtagggtctgatttatggatttaggcttaaatagggtagtaaaatgaggccatgaaccacactggatggtggtttaatatttaggaggtaggctttctaatgccg

SEQ ID NO: 164216 - DNA, 612 bp, Zea mays
  Clone ID: MRT4577_81342C.1
gggaccctcgaggccggccgtggcgtgctcgtgtacctccgcggccacgagggccgcggcattggcctgggccagaagctccgcgcctacaacctccaggacgagggccacgacaccgtcgaggccaacgtcgagctcggcctcgccgtggacgcccgcgagtacggcatcggcgcccagatactccgtgacatcggcgtgcgcacgatgcggctgatgaccaacaaccccgccaagttcatcgggctcaagggctacgggctcgccgtggtggggagggtgccggtgatctctcccatcaccaaggagaaccagaagtacctcgagaccaagcgcaccaagatgggccacgtctacggctccgatctcccgggaagcctgccggagttcgccaacccacaagaggcccccacagaacaagacgacgacgataaccaaaactgataaaaaaactatacggtgtcgtttttttaggaaaagataccaatataaccacaaattcttgtattccactgagaacgagtattgcagagtatttatttatcaactgcaaaattattaagtataatagagatacaaacttttacgaaaaaaaaaaaaaaaaaagcggcc

SEQ ID NO: 164217 - DNA, 236 bp, Zea mays
  Clone ID: MRT4577_81343C.1
atagagccaagtacatgttctgcctagtctttgctacagcacgtcttcacctgcttacacgcctggttcctaatacttgctgcttttcttaaatcaagaaaaggtattgtcattatatctattcactctggatgtcctttagtcctagttttctgctttgtgcagagctatgcatacaagttgtggatgtctgtttgtcaattgtatatcaagatcgctagagcagtttaatttac

SEQ ID NO: 164218 - DNA, 626 bp, Zea mays
  Clone ID: MRT4577_81344C.1
ggttatattggtatctttcctctaaataaaaaaagatgtgtattttatcagttttggttatcgtcttcttgttctgtgggggtgtcttgtggattggcgaactccggcaggcttcccgggaggtcggagccgtagacgtgccccatcttggtgcgcttggtctcgaggtacttctggttctcctcggtgatgggagagatcaccggcaccctccccaccacggcgagtccgtagcccttgagcccgatgaacttggccgggttgttggtcatcagccgcatcgtgcgcacgccgatgtcacggagtatctgaaacgcacgtacatttggatcgaaaaaacacacatcaatctccccctaacttaaaacaaggaatgaggcaagaattgctgtggattctgctggctacctgggcgccgatgccgtactcgcgggcgtccacggcgaggccgagctcgacgttcgcctcgacggtgtcgtggccctggtcctggagattgtaggcgcggagcttctggcccaggccaatgccgcggccttcgtggccgcggaggtacacgagcacgccacggccggccttctcgatcagcttcatcgccagctccagctggttgccgcagtcgcagc

SEQ ID NO: 164219 - DNA, 618 bp, Zea mays
  Clone ID: MRT4577_81345C.1
ggggggggtttttttttttttttgataaaagtttgtatctctattatacttaataattttgcagttgataaatatataccctgcaatactcgttctctcagtctgaattttactttgcatgagccaccgtgtcgaagtggaatacaagaatttggggttgtggttatattggtatcttttcctaaaaaaacgacaccgtaccgtatatatctttatcagttttggttatcgtcgtcgtcttgttctgtgggggcctcttgtgggttggcgaactccggcaggctgcccgggagatcggagccgtagacgtggcccatcttggtgcgcttggtctcgaggtacttctggttctccttggtgatgggagagatcaccggcaccctccccaccacggcgagcccgtagcccttgagcccgatgaacttggcggggttgttggtcatcagccgcatcgtgcgcacgccgatgtcacggagtatctgggcgccgatgccgtactcgcgggcgtccacggcgaggccgagctcgacgttggcctcgacggtgtcgtggccctcgtcctggaggttgtaggcgcggagcttctggcccaggccaatgccgcggccctcgtggccg

SEQ ID NO: 164220 - DNA, 140 bp, Zea mays
  Clone ID: MRT4577_81346C.1
actagaaatgagcgtttttataggcaccggatgatgagaataccctcacaacaatctttttccgcagatggaagacaagatgcatagcaagcgtggacatagatggtactaccccagatatatctgaagcactgaaggcc

SEQ ID NO: 164221 - DNA, 176 bp, Zea mays
  unsure (1)..(176): unsure at all n locations
  Clone ID: MRT4577_81347C.1
aaaaatacatatgtagatagcgtacatatcctctccctcaattcaaaacaaggtcagtgcaaggctgctggacctcgngaaccggcnngggggagctncatccaaggctgaggtccattacactactactcantccaagggaggtgcccatagtaaggcacagaggccacaataag

SEQ ID NO: 164222 - DNA, 586 bp, Zea mays
  Clone ID: MRT4577_81348C.1
aattcggcacgaggagagagagagagagagagagagagagagagatagagatagagagctgatccggggagcatgtagcctaccatacagcgcccttggagcgcgcgctcgcgcgctctctgactccccttgcctccgcgagagtctctgcggacaatcacccgacgattccccaggctgtggcggaggcgcctatacccctttcgccacctagcaaaaaaggcgcacagacgagacaacagctcgctgttcctcattttcgaatcgtcactatggatacagcgctgctcccatcgcgtctatatacgactcctacgcgctgtgtcgatctgcctaccacaagcaaagaccatccaatgccatagcgcgcgctaccaccgctctggcaagttccttacgccaatcttccacaggatatcccactttcccactaacactgtcctaacctggcttcctctgtggatgggattgatagtgctggcacactacataacgcaagtaagctcgtaggtccaggtttttgatattgtcataatcacggacagacatcttgtgcctctgtatctcatgtcaacaaataatatac

SEQ ID NO: 164223 - DNA, 826 bp, Zea mays
  Clone ID: MRT4577_81349C.1
ctcgaggcaggccggggtgcgcgtgcaggtgcagaggtggccgagatggaaatggccagtgccgctggaggcgtgccaaagaagctggtcgacgatccggcggcgcacgccgcggagccgtggccgccggcagcgagggaggagaagaataagctgtggcgccgggttttgctcgtcggcagcctggtgactctgccgctcgtcgccttcttcgtgctcggccgggagagcgcgtcaacggcctggctgcagatggctattgccaagctcaccgccatgaacaatggaacagcagggttcacagagggtcctcacgtgcacggccgtgacgagcttcttggagggctgctcgctccgggcatggaccggcgagcgtgccggagccggtaccagtcatggcagtactacaagcacttccccttcgcgccgtcgccgcaccttctggccaagctgcgcgcgtacgaggctcggcacaggcggtgcgcccctggcacgccgttgtacgccaagtccgtcgagcagctccggtccggccgcagcgccgacgacatggagtgcgcctacattgtgtggctccccttcgacggcctgggcaaccgcatgctgtccatggtgagcggcttcctctacgcgctgctcaccgaccgcgtcctcctcgccgccgtgcccccggactcggccgacctcttctgcgagccgttcccgggcgcgacgtggcggcttcccggcggagggcttccccgtcgccaaccctgttcggagtcggccaggacattgatcggtcgtacacgaggctcgtcggcgacggcaaggtcggctccggcct

SEQ ID NO: 164224 - DNA, 333 bp, Zea mays
  unsure (1)..(333): unsure at all n locations
  Clone ID: MRT4577_8134C.1
tatttccttctttctttattttttgttttttccggtgggtgtttttttttgtaacatgaatgccaagaagccacccacctaggacgcggtgaggaggaacagtgttaaaaccaaagcaccccccacgagggccccaggcagtcatgccaggcccggcatggattcgggacgggaacccgaaagagccgcagttagtgttacgtttcccacacacctccgagatgnccgaggcaacgtccacctctacctggccgggaagatctccgcgggtgctcattaacgtgatcccattgggcccgaagttggcgggtcagaatgggtgggcgggcatga

SEQ ID NO: 164225 - DNA, 278 bp, Zea mays
  Clone ID: MRT4577_81350C.1
aagaacacgcaagccgtgatttcaaacaaaattaaaaccagatctatccatgacaacatttaacacatcaatagcacatcttagtaaaattatctctgagagccccgggtctaaacacgaagtcttcatggtaatacgaaaacagagataagcttagagagtgtccaatacaagaaatcggcaactaaagcaggcactattggggacgccaagcatctagaagcggagcttggtaaagaaccacctgttcttgcctgtcttgaacctctcctcgaggc

SEQ ID NO: 164226 - DNA, 385 bp, Zea mays
  Clone ID: MRT4577_81351C.1
gtgaattttatttttttataaactttcgtcaacacaacaggagaaatacatgcctaaaatataacaacccggttacatgacaattcactggaaattaaggaacctctaaagaaactaaagatatatatatatatgtatatatataatcattacaaggaaaggagagcttgttgtgacatacattaaatgttcggaatgtgccgaaccaagcccaggcaacttccctgcagttgctccaccaaatctgaatgcatgtttcgcgcatacaagtggggaacagacctattgtttacaaagagttgagggacacttttaacattccacagctcatgaagatccaggtgtgtgaaattttgaatggcgccatcacttatttggattgacc

SEQ ID NO: 164227 - DNA, 532 bp, Zea mays
  Clone ID: MRT4577_81352C.1
acaagattattgacctttcatttttaactttctagatggtccttagtttggaacacattgccgtgcccattagccgttcgttagagctcatgccactcaggagctggcatcaataaataaatcctagtcattggcgcaaggcaatactcttgtcctggtttccatatttaggcctccgattattttggggggaaccaaaccactcgaacgacagccagtccattaacgccagccaccttagatcttttttggtgaccatgaacagcttgtaatcgagccggaacaccattttggagtccatctttgctccttgggcgataactatcaacgcctcttcaacttcacctttcattttttcaccaacattggctccgaatgcccccatgaaagtctgtgaagctgaacacatccccaggttcataggggctaattacgaggaaaggggggcccttgggtactttcaccccaagcccgtgctggctgcgctggccaaacccctgtattctgccttgacggctgaagcgcaaccagc

SEQ ID NO: 164228 - DNA, 765 bp, Zea mays
  Clone ID: MRT4577_81353C.1
gggcgcctcgaggccggccgggacacccacgcgtccgcccacgcgtccgctcacacagtgcagtcagtcacacagagcctactagccagcactacctaccagcagttcctcccgtgtgcaaactgcaaagcaagcaatggacatgggcttctacaagcgcgccagcaggggcggcggcatcaagcacaaggcggcggcgatgcccttctaccccaggaaaccggcgcaggtggcgcccgccgcgccggcggcgcagcaggccgtcagcaaggcgaaacagccctcagcgaccaccatgtggtcgattccggcaccgccatcgtcaaccgtggtcgccatggaggttgctggaaacggcatggtgctcgacggcgactccgacgtcgacagccgggcggcctcgtacatatccagggtgcaggagcggctccggcgcgagcgcatggccgaggactggcggatgtactactgaccaccatgcgctgcgctgcgcttctggctgcatgatccccgaggccagcaaaggtcgggtgtgccgtgtgcccagttagttaaatatatatataatatatataccaatagtacttactaatccatgagttaagtagttacttactcggtgtgtgtatgacgtacacttcttgtactaagtacggtgtgttatatgttttatatgacaacttctcgattttagagaaaaaatagttcatatttagtgtcgtgataattcaacgaatttgatgtcgtcaaaaacaattttatatt

SEQ ID NO: 164229 - DNA, 323 bp, Zea mays
  Clone ID: MRT4577_81354C.1
gaaaaatcctctgccttcaaaagaaacaattgaacaagagaagcaagctggcgaatcgtaatgaggcgagcgccgccaatatgcactgtacattccacgagcattgccttcttattttacttcttttagctgtttaacttcgtaagatgcaaagaggttggatcaagtttaaatgactgtgctgcccctttcacatcaaagaatcagaactactgaccaggaaggcctccccccgcctctcccgcccacctgctggcctggctggcagagagggaaaagaattgcatgttggtgaaggaaaaagctgggtgggagaggtggaa

SEQ ID NO: 164230 - DNA, 446 bp, Zea mays
  Clone ID: MRT4577_81355C.1
ggggcggaccacacccgtccgggtggatttcatggaccaggaccggccacgtttatttgttcttgggaggctgcactgcaggatggatagggttgttgtggttttggagactaaccgacctgttagggggaatgttttttaccaggccaccatcaagcagggggcctttttgttgaaccgattccagaagctttaacgggtcatggaccttaaaggcctgtctgggtgggagcttttcttgcattcggggcctgcaaatgtttccaaccctacggtttcaacaggacttgaccatttttctcgggcggggaacaggttttaagaccattttggttttaagtgcagaatatttgggttttatatagtaaaccctgtcctgtcttttaaggtttcctatttggggttttgccggggaattcttaacttaagtggctggctggccaatc

SEQ ID NO: 164231 - DNA, 1142 bp, Zea mays
  Clone ID: MRT4577_81356C.1
cccacgcgtccgatcgatccagcagcacacagacgagccgacacaagcagttagctatagctgctagcctgatcgccaatggccaccgccggcagcaagcaaggaggaggctcgtccaagccgcctgcggctggtcaggagttggacccgaggtacgagtgggaggagaacgccagcagcttcatcctccgcatccacctctcaggcttcaggaaacaagatttcagggtgcaagtcgacggcgccggccgcctcaccgtccgtggccagcgctccgacgccgccgccaacgccaggcactcccgcttcaacaaggtcttccagctgccctccacctccaacctcgacgacatcgccggccgcttcgaccttggagtcctcacgctcaccgtgcccaagcgcctgcccgcgcccgcaaaggaagaccagcagcaggccaagaagcccgaggatgccgctgccgctgccgccaccaagcaggtggcgggagccaagggcgccaaatcggagccggagcagcagcacaaggaggaggcggcggcaaaggaagataagcccaaggcgaccgccgcagcacctgcaccggcagccgacacgacggcaaaggaagataagcccaaggccgccgccgcagcacctgcaccggcagccgacacgaagaagcagcccgagacgcaggccaacgcagagagcaaggcgacggatccgaccgaaagcctggcggagcggcgcaccgaggaagagcgggccaatgcaaatgctgcagctgcggcggagcaccagagaaaggcatgccgtggcttcaaggagcgcgtggcggaggagctccaggggctggcgggctccgagtgggcggagggccttgtggagacgatcaagaggaacagggaggtggtcgccgtcgccgtcgccgccttctccctcggcgtcttcgtctccagcaggctcttctccaggtccagcaggaactagaagccaaccatgcatgcatctctcttttgtgacaatcgtaatagcgcttgtcaccaccacaaactacgtatactgacacatacagtccatgatgtggatatatacatgcactgcacagacacaagtgaattgtaaacatgtttataaatgtatcagaaacaagtttatac

SEQ ID NO: 164232 - DNA, 1091 bp, Zea mays
  Clone ID: MRT4577_81357C.1
gagtcaaatcaaaatgtttggttgccaggtcaaaatgaatcaggcccatacgacacattgtttggttctcattttttttagcttggtccaggggcgaacacgaagaaatagctatgattcttaccaatgatcatcggcaccggaataggggtttccccaagcccgccgctgcgcgatggtgatgctggtcgtcggcgagggagtccaagcgcttccgctgcacctccattcgattaaccccttcataactccttcacggcctggccaacacccgggaggccctgttggacgccggatcccaacgccaatgagaatccgcgacgacggtcaactcactccctcttcgctctctcagttctacctctctcgacgcttcaggcggccagggactaattccaatcaattggttcaaggtgcgccagagctctctgggtcaggtggtcaccggggctcacccgcttttccttccgcgtcgaggacgaccgctccttcacccgcttcgacctggacgacgacacgtccacctcgccgcccgagccggacacgccacgggcggccgccgccgccactggccgcgagaagccgagaagggtcgccgccgggctgacgtcgtgcgcgtcggcgccgtcgcagctgcagctggaagtgcgcggcgggagcagcagcagcaaccggagctggagggcgagcacgacgcgctggccgtcagccctggacgccaccggagtagataggtggagaggtcgaggccgccgcggcgagaggcgccgccgcacccgccgtcgacgccgggtagaggggcgcgtcctcggggagttgagcttggcacgactgtcgctgaagctggagggcgagcacggcgtggccgcggagatctacgagctcacgccagagctgctggtcgtggaggtccggcgcacgtccgacggcgccgccgactacgaggagttcttccgcacgcggctgaggcccggcctgcgcgacctcgtgtgcgacgaggacgagcccacgctccttcagtctgacgagtgctctcagagcctatcgggagtgatgggagagacgagagagaggcgtctgaggagtctgcg

SEQ ID NO: 164233 - DNA, 486 bp, Zea mays
  unsure (1)..(486): unsure at all n locations
  Clone ID: MRT4577_81358C.1
ggtaccctngcgggccttccggggtgcatcccgcaccggcggccggcggccgtgcgctgtgcgcatcccgtagccccggcggcgctcctctcccgcctcatcctctccggtggccgtagatctaaacgggacaaacaaaaaaagcgaaaaaagttttatcaactcgcagatcccagaagctccagatccgtatgctccttctgcctcgatggatttaaggatatctgagggttcgggtactggggccatcttggatgaccaatcggtacaatcgccgaccagaagggcaaaggtttgggagtattttcaacaagagttagttgaggttgatggagtgatgaaggctgtttgcaaatattgtgggacaaagctgacaagtaaaaggaattcaggaacagatagccttagaaaccatgttgcggatacatgttctaaaattccaggtggggggcgggaggggattcattgctacaatgagaaaaaggc

SEQ ID NO: 164234 - DNA, 611 bp, Zea mays
  Clone ID: MRT4577_81359C.1
gaactagcacgcagcgcagcactgaggcaccacttcctgcactcactggctagcgtgctcacacgcgtaggtagtcaacagtaccatgcaccccaggtgaccacaaatggactgcccaaggttgtcgctacttcctcgccctcgggctcctcggtcgctggccgccgctcgcatgtgctgcgtacaccacttactaggtcggtaggtccaagtctggtcccagacgaccagtccagtacatagctcgaacgccgatctgtcagcaacagatcgacgaggcagcatgcacacgactcgacagcagctactaagactctaaggtagttgtcgccatacgtggctgcgagcctcagtcgaaggcacggacatagcccctagcacgatacaaagcgtgccacgctgcctggaaggcagttagttgtgaacactcacagcgacgagactatgcactctgcaccgacatgcaaggccaacgtcctcacgatacacctcgacgtgccccttaccctgaaccttatcctcaagaactgaaccaaaattagcccaatagacttcacttggcccaaataaacacgggatctcttgtgggctccgtcacgtgaatatattta

SEQ ID NO: 164235 - DNA, 581 bp, Zea mays
  Clone ID: MRT4577_8135C.1
attttgaagcaagaaggggtcgaatttgggagctttgacatccttacagataatgatgttcgtgaagtggtgaattgaaggatgtttttgaggagcacaatattcccctcaaaccacagggtagcaaaaatgaagaagcaggtcagcccgagtctgcaactgagaagggtgctgcagttgctgaaccaatggggcttactgatgctcagaaatctcgtttggaaagccttattaattccagcccagtgatggtattcatcaaaggtacaccagaggaaccaaagtgtgggttcagtgggaagttggtccacatacttaagcaagagaatattcctttctcaagttttgacatcctttcagatgatgaggttagacaggggctgaaggtgctctcaaactggcccagttaccctcaactgtacataaaaggtgagctggttggcggctcacacatagtgatggagatgcacaagagtggtgagctgaaaaaggttctgtctgagaaaagtgttattccaaagggaagcctggaggacagaatgaagtccctggtttcctctgcaccggtgatgcttttcatg

SEQ ID NO: 164236 - DNA, 513 bp, Zea mays
  Clone ID: MRT4577_81360C.1
tcggaattcgctcgagtttttgacataaaaggccgttgatattttcacttcgatcacagattcacactaacgaagctggggccagtagtctctgcaactgcaggtaccgtacctgaaccggtggagccggttcctgtccctgatgactactgttccgcccgaagatcttccgagatcagggcgctgtacgcgtggcattccttgctcatccggaggttggtcacgacccttaccggcgccccctccggcgtgctgagcaggccgaacgccatggccagcttctggctgtgcgccgtgaccacgcgccccttcttctcttcgcccgcgttcagtgccatcttcgacgtgtcaggtttgtatccatctgaccgcagctgccactccatctggtggagcatctcgtagatgtcgcgcgttcgtgggtgcgccatgttctgcgacacgaaccggtgcagctacccgtgcacctccacggcgcttgacccgatggactgctcgaagcccgagtccacc

SEQ ID NO: 164237 - DNA, 281 bp, Zea mays
  Clone ID: MRT4577_81361C.1
acagctcccgaaggcccggctgagtgacccacccgaagatgataaccgccgcgtacaaccatcgtgaagaggatgcgcaccctgcagcagtaggatgcaacacttgccatgcgtcacaggtgctctcgaaggaggatcaatgacaggctggactggtctggccaacgtagccccgttttgggtagccgtggtggctgcagcgcaagcatgcaatggcatcatgtctctgctgagcatcggatggagaatgatcagatgaccaatactgttgccacgaatga

SEQ ID NO: 164238 - DNA, 403 bp, Zea mays
  unsure (1)..(403): unsure at all n locations
  Clone ID: MRT4577_81362C.1
tcgtggctgccctgctctgctggtgggggtnggcgttcgtcccccgcccgcgcggggggttccatgggcgtctnctccgggtcgttggcgggcggcttctngggcgtgccggggggcgtggacgaccttctccttctggagctcggccgcttcgccgtctttgtgcgcggcgggggggccaatgctcttctggggttcggggagcttgtgggggccatgacacaggtggttgctggcgcggtgtgctatctcacttttggggtgtgggatggcgaggtctagagctctacgttgctttggtctgggtgatgccttgggtgtatctttctggggctgcgggagttcgtgcctgttggagagtgtgcttgcgcctgggggtctctcctttcccgtgtgcgggcct

SEQ ID NO: 164239 - DNA, 449 bp, Zea mays
  Clone ID: MRT4577_81363C.1
ggcaaggaaaagcctccccattaaatacccccttttgggaaaaaaaaacccggggtggggggggaaaaaccaaaatcaacatttcacgggggataaaaaaacaaccctggggtagggaccccggccctgggggaagcccaaaaggcacccccggggcggggccttagggaacaagcccccccccttggacgtggcgatcccccccaaaatggacaccacctcccccaatttgggacccttggccgggttcccgccccaaaaattcttaaaaaaaatcgctaaggagcccgggcaaaaacggggaattttaagcctaaaattctggcaaacaacgggaaaggggaccccaaaaaaatgaaaaagggaccggcttgtcaaaacagtttatttcccaaggcagaacccaaaggtggccacctcacactttctgttggaagcatggccattga

SEQ ID NO: 164240 - DNA, 241 bp, Zea mays
  Clone ID: MRT4577_81364C.1
ctttcttttttttttttggtgcttttctgcaactttttggttgtccaaactccaaacattcttttacacttttctctttgacaaatccccgtatactgattcccaaaaataattcactagcactagacgtcgctgatgctacagtggctattaagacaaattgcaccactgacaagaagtagcgtccgggttgaatcgaccattcatcatacaggcgggggtggctggtccagcaagagcc

SEQ ID NO: 164241 - DNA, 370 bp, Zea mays
  Clone ID: MRT4577_81365C.1
agaaaatgtccaaaaaaaaaaaaagaaaaccgctccaatcgaagaagaaggtatttcttcccgaaatacctggtctgcatctatctacaaagatagaccattccccaagaagcaaatgctggccatggtatcaatttccatgctttcttgggggctggattctcggcaagtagttgacttgccaatcatgcctcagcgaatactggttcaggtcattcaacttccagtattctgataactcatatcaggcatctcgggtcatttcataagatatcttgatgaatcagtttatacagggtttcacttatcgaacaatggacgtagaaaaagcaatttttttctgacaacatcttcgatccattgccaggcg

SEQ ID NO: 164242 - DNA, 500 bp, Zea mays
  Clone ID: MRT4577_81366C.1
cctcgaggccggccgggaaaaaattacaaaaaaaaaaaagaaaaaaaaaaaaaaaaaaaaaaaaaaaaaaaaaaaaaaaaaaaaaaaaaaaaaaaaaaaaaaaaaaaaaaaaaaaaaaaaaaaaaaaaacaaaaaaaaaaaaaaaacaaaaaaaaaaaaaaaagatttttaaatgccagacggattgactagacggatattaatgcgggtgggaaaattgccccccggccggagcccgccctgcctatgtatctctcccccccaaaccatatggaggaaagaaaaaaaaagggagccaaaaaaagccgccgacaaaaagagcgggcaaggcagggatgcaatcaaccgttgccttcaaccgagtgctcaccctgggtgggttgacaagaaaggcaagaaccgaaggcagacataatgatggggtgaaaaaaaaaggcaggtgtaagatacggctgacagaaaaccctcctgcgggggaaggaatccttccctgcagggga

SEQ ID NO: 164243 - DNA, 153 bp, Zea mays
  Clone ID: MRT4577_81367C.1
ggctagggggggagcgagcggacatccgctgcgccatgctctatctgtgaggctcgggccatcctcttctatctcttggtggcggggcccaccgacctggaggccaggtgcccgggccactccagttctctgaggtccttgccagcaggaggg

SEQ ID NO: 164244 - DNA, 140 bp, Zea mays
  unsure (1)..(140): unsure at all n locations
  Clone ID: MRT4577_81368C.1
attacaatcatctcctcaatagccacacnatttattttattncanttaaaaattnctncccaaacctttcctgcacctcccncanncannnctatagccncagaaaaaacgnataacccttgngaatcaaaatgaacgag

SEQ ID NO: 164245 - DNA, 440 bp, Zea mays
  Clone ID: MRT4577_81369C.1
ggactattgggtccaccatttccttgccatatttatacatgagattttaagatttttatagaatttaataaaatttcacggggggggctagggggggggttaaacaaccaaaaccaaccaacaggggtttgagcatgggatatgcagcatatgggttttttttcaagaaagaaaaagaaaaaaggggggtcttattcacgggcgacgaaaaaaagcaaggaccgaacagagggggcggggacatttatttatttatttatttcttttctctgacgaaactggggagaaacaaactcgacttggggtcccatgccggacgtaaaaaaaaaacaccggccacccccctatggggccggggcctccgggcaggtgttttgggaaaaatttgtgagaacctcttcacaacggtaggggacgacgggggcatgggccatgccggg

SEQ ID NO: 164246 - DNA, 2273 bp, Zea mays
  Clone ID: MRT4577_8136C.1
cctcgaggccggccggagtcgccgtcgcggcgccgcgcgggagcccccagaaatggggaggagcgagaggcagcgtacgccttctgcctcgctgcgccggcctcccaatcgatcgaggcggcgcagagcagaggaaaaccccgagccgcaaccctcctcaccgcacagcaactcgagtcctcgttctcttccccatcctcctcctcgtcaactccagtcgtcttcagcccttcaccacaatcaggcccacctcccaccaccacatttcttctcatccaaccgccccgtaggatcacagagaagggggatggcgagcggcggggcggtgagggatgtgggctcgcctgcggagctggaggcggcggtggccggggcgcgggcggcggccgtgcacttctgggcgtcctggtgcgaggcgtccaagcagatggacgaggtcttcgcgcacctcgccgtcgacttcccccacgcggccttcctgcgggttgaagctgaagaacaacctgaaatatcagaggcatatggagttacagcggttccatattttgttttctgcaaggaaggaaaaattgttgatactttggagggagcaaacccagccagcctggccaataaggttgcaaaagtagctgggcctgctagtgttgctgagtctgctgtacctgctagccttggagtcgctgctgggcctgctgtacttgaaaacatccaaaagatggcacagcaaaatggatcctctgctgctgaaagcacaaactctggcagtactcaagatgcattgaataagcgattggagcagcttgtcaattcccatcctgtgtttttatttatgaagggaaccccagaacaaccaaggtgtggtttcagccgtaaagtggtgaacattttgaagcaagaaggggtcaaatttgggagctttgacatccttacagataatgatgttcgtgaaggtatgaagaagttctccaactggcccacttttcctcaactgtactgcaaaggcgagctgcttggtggatgtgatattgttattgctatgcatgacagtggtgaattgaaggatgtttttgaggagcacaatattccccttaaaccacagggtagcaaaaatgaagaagcaggtcagcccgagtctgcaactgagaagggtgctgcagttgctgaaccaatggggcttactgatgctcagaaatctcgtttggaaagccttattaattccagcccagtgatggtattcatcaaaggtacaccagaggaaccaaagtgtgggttcagtgggaagttggtccacatacttaagcaagagaatattcctttctcaagttttgacatcctttcagatgatgaggttagacaggggctgaaggtgctctcaaactggcccagttaccctcaactgtacataaaaggtgagctggttggcggctcagacatagtgatggagatgcacaagagtggtgagctgaagaaggttctgtctgagaaaggggttattccaaaaggaaagctggaggacagattgaagtccctggtttcctctgcaccggtgatgcttttcatgaagggcactccagatgctcctcgttgcggcttcagttcgaaggttgtgaacgccttgaagaaggaaggggtcagctttgggtccttcgacatcttatctgacgaggaagttaggcaaggtttgaagacgtactccaactggcctaccttcccccagctctactacaaatcggagctgattgggggatgtgatatcgttcttgagatggagaagagcggagagctgaagtcgaccctgtcagagtagacacctagctagcattcttgcttcgctggcgtttttatcatattgcctgcattggatcactctactctggtattcatgccattgtattcatagatccacgttggtacttgtctgcagtgccacattgctagaattgtgacacatctgcagaaggaataacttgagacgcttgttcggtactgattgcattgttcttatatcaccagttctatttagcgggtggaagcttttttgttcgggtattgtcacgatttatagacggataaagtaaaatatttatagagtataaaaaaaaaaaaaaaaaaaaaaaaaaaaaaaaaaaaaaaaaaaaaaaaaaaaaaaaaaagggggcccggtacgggtaattgtgtatttaagtcaacccattgtttttgggaagtcccatgtggaaaattgactttcccaatgaacaagcttataaatctaattaaaagtggttcggccc

SEQ ID NO: 164247 - DNA, 318 bp, Zea mays
  Clone ID: MRT4577_81370C.1
cggctctagttctctgtctccctctagcttttcttgtgcgcattcgcaggtgttgggtttccttcatatacatcctacacgagggcaaaacccacatacactctcactcctgtactccggcctacacatacatcctctacaacgctcaatagctaacaatccaaagctatcgttttcaatcctcgaaacttcaagcttatagaaaaactaaagcttcgatagcattcaaggtcttataggacaccaatctattgtattgactaagactacaaactcgacaggcaaggtaggtattactaccattatcaaacctcacaa

SEQ ID NO: 164248 - DNA, 313 bp, Zea mays
  Clone ID: MRT4577_81371C.1
gggcagcatggctgaggagagcctccaaggatgacacgttcctccagtacattcagaacaacggcaagaccctgggtgcagaggacagcagcaacgagttcgggtgggacaacaagcatgccggcctcaacgtcctcgtctccaaggatttcatagaaggcgccgcgctgcctttgcagtcgtacaaggagttcgcggacagcttcgtatgcacgctcatcccggagtcgtcttcttccccgcacatcacgtacacccccgggggcatgatctacaagcctggaggcagcaacatgcagcacgtcacctccat

SEQ ID NO: 164249 - DNA, 123 bp, Zea mays
  Clone ID: MRT4577_81372C.1
gaccttgcactctcaccaatccgttttcatgcctgatctcgacattaacataccaactgccttcgatccctgcgctgatgccaatgctaggtactcaggcgcaacatatagggtcaaaggact

SEQ ID NO: 164250 - DNA, 518 bp, Zea mays
  Clone ID: MRT4577_81373C.1
aggacccccggtgggcccacgggcctggcagggaaaccgggatattttaattacccagggagaaaaaaaaaagggggggtccccccccttccacctattaaaaatttccccccaaaacagcccggggggggcaaaaaaaaaaaaaaaaaagggcctaaattttttttgtttaggggcccaggggcctaaaattacccccccccctgaacggggggggggggggttttaatttaaaacccatttttaccgacccgtcttttaaaaacttaagggggggggggggaaacccccctttgaagaaggggggggacccttttttccaggccgggccggtttttattatggccaaaaactccttgaaattaattttgccccccttggggggggcaattttttgaaaaatggggttcgccattttctcaatggtgggggccgccccgttgtccaaaaaaacctttaaaaactcctggggctaaaaaaaaccggggccgtctttgggaaaaaaaaaaaaggccccc

SEQ ID NO: 164251 - DNA, 375 bp, Zea mays
  Clone ID: MRT4577_81374C.1
gaaggattcaaggagctgcttcgggtgagaatgacatttacatcgaccccaaactcgccaacaaagcatctaaatcgataagctggttttgctgtttattcacctaaagtccaataaatagggagttacatcattgcgtgtcgaacgcatctattagttgctgaataacaccatttatcgccagatgggcccaaaggcaccgctcatatttcttggctgaagtattgtagatgcctctctaagacgaggcattgcggaggctggcgtaggaatgcgccgaatattcgacacagcagttggataaatcctcagaagtatcgaatcggaccgtccaggctgccaaaggcaaactgctgtacaatgggatttggtgat

SEQ ID NO: 164252 - DNA, 620 bp, Zea mays
  Clone ID: MRT4577_81375C.1
ggccgggttccgggaaaaaaaaaaacgaggcaagtaccgccaatgcgtgtaccgggcacgggcagccgcttgacgcgctcacgctcttctgtggttctgcgccgtgcccgtgctcgcggtgttctcactcaccgctgcaacgccactggcacaatgaggtgagagagagagagaaggtaggcatggcaccggcgtgcgactggagaaccaaagaaagaatgtgtgtgtgtgtgtgggcagattcctaatcgatcgggcgtgtgtgtcctgctaactgaagcagcgcacacatgcatcatcgagggccgcgtgggcggggctgcccggccggctggggacatcctgacgaaggagacgagacctgagaaagaagaaacaaggaagtgtgcgccgcccgtatctatagcgccgcgcgcgtcaggtacgagggtttacatttcatgtgctgcccacttgagtagagtagcagctacaggtctgatttgtctttgtagttttgtcaatagatagatacgggaaacaacgagcccagactgcgcatgggcgagtgactgcgggacatctctttctctactattataatacaacagtttcaaaaaaaaaaaaaaaaaaggccccta

SEQ ID NO: 164253 - DNA, 252 bp, Zea mays
  unsure (1)..(252): unsure at all n locations
  Clone ID: MRT4577_81376C.1
ggccttccgggaagggaaggtggccagcctgatcggcgtggagggcggccactccattgacagcagtatgggcgtcctgcgggcactctatcagctgggcatgcggtacctgaccctcacccacagctgcaacacgccctgggctgacaactggctggtggacacgggagacagcgagccccagagccaaggcttgtcaccctttgggcagcgtgtggtgaaggagctgaaccgtctgngggtcctcatcga

SEQ ID NO: 164254 - DNA, 375 bp, Zea mays
  Clone ID: MRT4577_81377C.1
gaaacacccgcttaagtatcaaacgaatgactgcacgtaagaggccgctaactgtttttttgcctaaacgaaaccggaacctacggggggatatataatgatcaaaccgaagcatccgctaatttatcgaacgaatcataaaagtcaacaaccacagatagcattaactagagaagtagcgtaccggacggttaataattgtaattgagtagcgatagaagattgtgaaatacataaagcgatacaaattataacacctgataatcaatataaaacatcatttaaagaatattagaaacttcatgaaactgttaactctaacaagctttaaaaatgcgaaacctgattcttgatggttaaaatgattgtgtctat

SEQ ID NO: 164255 - DNA, 761 bp, Zea mays
  Clone ID: MRT4577_81378C.1
agcagtggtaacaacgcagagtacgcgggcgatacagagaatataaacatgctggtcaaatttggacaaatcaggtatgcaatatatgatcatttaaagcatcttgccatgccataatggatacttaaatagaccgagccgatgtcgaacaaatattaacaatatcgcacaaattatttataaagagtcaacgtagaattcttaatgatatgcaactatattgacaaccatatactaatctagtcctttttagcgatattgataagtctatgttgtatgtttgcagggatagtatatcgacaccttttctcatatattaacaaatcgataacaaagtccctccgaagaacctttgcatcctatgcataacacataaggaaataaaacatcatttttttattatatcactgcaatgtatgtttgaatatgaaatgaacgatatgtcgacaagaattttccttataacttcacggatcgatcataaagttcccccgaagaatatttgcattctatgcataagatataagaagacaaaacccctttttttattatgtaaaaacaatgtatgtttaaacataaaacgaatatacttcattcaccctaacaaatttcattcgactgtcaatacccacatggtcatagcttgtaaaacgagatagttgatgttattcctatagaaaaatgttttgctagctatgttatatccaaaaaaaaaaaaaaaaaaaaaaaaaaaaaaagtactctgcgttgttaccactgct

SEQ ID NO: 164256 - DNA, 546 bp, Zea mays
  Clone ID: MRT4577_81379C.1
accacttgctaagtagcatcgaggaaggccctgccttgtgcgtccaccgcactgactaagccaatgtcgctgctcctagtgagacgccaacgcctctaacttgcaccctacgcaaggcggtgagcagatgcgcctgttgctagcttgaattatgacttaaacggggctaatcataatacggatcacagaagcttctaacgactatgttggcaaccaatgtcgatgcaccaagtgggtgaatgaacccgtgatggtaatgctactggtcaattactatgattgaaactggcatcattaagctaaaactcacctatatcaaaaccgactaatctcatgttaactgccatattaatgagcgaacaattcatcactctcggaatgctgttacagaatgatctgaagaaccacatttgaatgatcataaaggacaatatgtattaacgcttatctaccacatgccacgtattactgaggcaaattctgatgcacctgtagttctaaactgcataagattaaatgatcgatacgacacactcctacggattg

SEQ ID NO: 164257 - DNA, 208 bp, Zea mays
  Clone ID: MRT4577_8137C.1
cttagcacttgcgagggggcagagtgggagggggtatgggtagggtatacaggagtgctctgcccatggagaaggcggggcatacaacgccatgttatcggtggaggtgggaagaaggcgcccgcgctggggctgcataagcagtaactcgtggtcgccggacatagagcccaactaggggggggggggggggggcattttcatgcgc

SEQ ID NO: 164258 - DNA, 293 bp, Zea mays
  Clone ID: MRT4577_81380C.1
ggggacaagcacgctcccaagttccaccggcgacacaaataaaacacacgttgtggtaaggacggggggggggcaaacccaccagggcttttttttttaactgccccacacacgtttggctttaaacaaaaaaagcagggagcgggcaaagccgaggggggtaacacaatggggggggggaaatccaaacagggaaatttatacatcccggctgggcctgggacggcaccggtatgaaagggaacccatgcgaaaaacagaaacctagcaagccagacccccgcagaaagatt

SEQ ID NO: 164259 - DNA, 243 bp, Zea mays
  Clone ID: MRT4577_81381C.1
ccgtggggagattccttttcagggccccgaagaagaagacccttaaaatgccggaaaaacttcccccaataatatttacaaggggggggaggaaaaaaggggactggctgcttagaggctgaaaaataaaatcccccctcccacctagaaaggggtcttaccccaccccctcaaattgaaaaaaaaaaggcgggggagtttaaatctcccccccaaaaaaatcatcatcgtgtttgataaaaa

SEQ ID NO: 164260 - DNA, 304 bp, Zea mays
  Clone ID: MRT4577_81382C.1
cgcatgcacccctacgtacagctcggtttaggtgtgatcgagctcgagccgcatcttatttcgcagggtctggggcctgcacaaggggaggagctgtaggcctaaatcctccagcaacgacagcagaacctacgactccaggcgagctgtacaagctgctcgattcactggctgacgtattggaatgtctttattagcagagatctcacagatccgcctagatctcattatatgagagcacaaatcgatgaacatacctcataccataggcctcaaatagcgtgggtgcatgttctaaccttgg

SEQ ID NO: 164261 - DNA, 686 bp, Zea mays
  Clone ID: MRT4577_81383C.1
ttcctcatctacttgcctcctccaatccttgcaaagcccacgactcgtagcaactttagccatggcttccaagctccagctcctgccctccttcattgccattgtggttctcgcagcggttatccacccttgcgcgtccgttgagtttcaccgcaagctcgccagttggtctaatgccggcgcgacatggtatggcgccgctaatggggctgggagtgatggtggtgcgtgcgggtacaagggtgccgtcgaccagtcaccgttttcatccatgatcgccgccggcggcccttccctctacgcctctggcttgggctgtggatcttgctaccaggtgaaatgcactggtaacgccgcgtgctccagcagcccggtgacggtcgtcatcacggaccagtgccccggcggcccttgcttggaagagccgcacttcgacctgagcgggacggcgttcggtgccatggcgaagcccggccaggccgaccagctgcgcgctgcgggcgtcctccaaatccagttcacccgcgtgcagtgcaactgggccggagtgaagctaaccttcgtcgtggacgccggctcgaacccgaactacttcgccgtgctcatccagtaccaaaacggcgacggcgacctctcggctgtcgacctcatgcagagcggtgctgcggcggcatgggcgccgatgc

SEQ ID NO: 164262 - DNA, 424 bp, Zea mays
  Clone ID: MRT4577_81384C.1
ggtgatgttcgtgtgaattggacaccaacaacaaaaaaggagttaccctcaaatctggagatgttgtttctgttagtgggatgggaaggttaaagattggggaaattgtgactacgaggaaaggaaaattgcggttgagttgattcgctatttgtaatcatggaactggtctactttcatgtctgaaactctgaatttaacggtacacattttctcctatatgtgatgagaatcatgtattaagtattacttctcagtgaagttgaaagtgatgcacaaatctgagtatatttgtagtattcattgactgctttagcttcgtaatgcaaatattcttataggtcaagaatttcataaagtcgtcagtgtacattcattatttcaaataataagcaccaaagggccaggttgctttggatcttcc

SEQ ID NO: 164263 - DNA, 1359 bp, Zea mays
  Clone ID: MRT4577_81385C.1
cctcgaggccggccgggacagacctgctcaccagcacacggccacagtaccacacagaacagtagcaccgggctccgggcaccagggcaggcgaattcctaggttcgctggagcctggtccgagggatggccgccgcctcgctcgcgttggcgagtcctctccggcttctcctccgcgtccgtcacccgcgcggagccatcgccgtcccgtgctacttcatctcgcgaggacggtatagcaccgccattgccgttgcagcagcgagggatttggcggtgaaaggaagcgtggacaggaattcagcggaggaagtcaggaacattctgaatatggcagaaagggcttcccaacgaagaaatgtttttcacaccaattttcttactccacctatagtgaaagaggctatgctggcacttgaaaagtttgcagataccaaagcagtagctcagggtggctaccctcaggctgagaggtgccgaatatctgttggacacccggacgtcatgacaagtaacccagatgtggttgctgctttgagcatctcagggaatttccggttggaatcttgttctcatggtgactttcttggtgctattcttgggacaggaataacaagggagaaagttggagatattcttttgcagggggaacgaggtgcccaggtccttgttgacccagaacttgttgactatctgatttctacccttgaaaaggtggggaaagttggtgtttcatgcactcagattcctttgcttgctctagaatatgaaccaccaaggaccaattcatttaaaactgtagaatcatcgctcagggttgatgcccttgccagtgcaggatttaaaatctcacgcacgaagcttgctagcttgataagttctggtgatgttcgtgtgaattggacaccaacaacaaaaaatggagttaccctcaaatctggagatgttgtttctgttagtgggatgggaaggttaaagattggggaaattgtgactacgaggaaaggaaaatatgcggttgagttgattcgctatttgtaatcatggaactggtctactttcatgtctgaaactctgaatttaacggtacacattttctcctatatgtgatgagaatcatgtattaagtattacttctcagtgaagttgaaagtgatgcacaaatctgagtatatttgtagtattcattgactgctttagcttcgtaatgcaaatattcttataggtcaagaatatcaaggaaaaaaagattgtggctttgtttgtttggtggggataagaggtcggataaagtcgtcagtgtacattcattatttcaaataataagccccaaagggccaggttgctttggattttccc

SEQ ID NO: 164264 - DNA, 576 bp, Zea mays
  unsure (1)..(576): unsure at all n locations
  Clone ID: MRT4577_81386C.1
ctcgnacgtcgtctccacgtaccctctgcttccgtctcttcgtccacgagaggccgagtagccgagtactcctcgtctctgccttggaagcctccctcgaccatgcaggaagctctcgtatctccggccaatgccggccgccttcgctcggccttggagctcaagccgttcgccttcggggaccaagcgcctcgcctcgccgcgctacctcaacctcgcctccgtcgccggcggcggcggcggcgacgacgcgctgttccgctgctcctcgccgttcagccccagcttcggcttctcctcgccgtcgccgctcgccacctcctccaccatctcgctctcaccgtcctcctcctcctccctcgtcggcgactgcgactgcgacgacgacgccgacgccgacgccgccacgggccacaggctccagctcgcccgcctcgcgctgcagtaccaggaggtggccgaccgctacgagctctgcctcgcccgcctcgccgacgccgcggacgaggcggcggcgctccgccgcgagaacgccgagctccgcgtcgccaacggcgacctcacgcgccgcctcgc

SEQ ID NO: 164265 - DNA, 755 bp, Zea mays
  Clone ID: MRT4577_81387C.1
cattgggtacctcgaggccggccggcatttaaaactgtagaatcatcgctcagggttgatgcccttgccagtgcaggatttaaaatctcacgcacgaagcttgctagcttgataagttctggtgatgttcgtgtgaattggacaccaacaacaaaaaatggagttaccctcaaatctggagatgttgtttctgttagtgggatgggaaggttaaagattggggaaattgtgactacgaggaaaggaaaatatgcggttgagttgattcgctatttgtaatcatgggactggtctactttcatgtctgaaactctgaatttaacgatacatccaacaatatctaacgagctgctacatgtgaagttgtcatgcgaaaagcaggatgtcacatgtttgtaaagcccagcaattaattggccaggcacaatagctacagctaccttacagttttctttggagatgggagcacgagcagcgaaacccaacggtgcttgaaatgttttcggtgagttgaatcaatggaaaaggttaagggcgaactgcactttccggaaaagattcatgctcgtttggacacttccacgagaagtttactttgagccggtgcgaagatatactaaactagagccttgtccctgcactgtcaagtcccagtttgcttgctccagctgcttgggtacctttttgtatctctcgcagtttaactagtggaaaataacacttgctttttttaaaaaaaaaaaaaaaaagcggcc

SEQ ID NO: 164266 - DNA, 551 bp, Zea mays
  Clone ID: MRT4577_81388C.1
gccggccgggtccgggacagaacagcagcaccgggctccgggcacaccagagcaggcgaattcctaggttcgctggagcctggtgcgagggatggccgccgcctcgctcgcgttggcgagtcctctccggcttctcctccgcgtccgtcacccgcgcggagccatcgccgtcccgtgctacttcatctcgcgaggtaagcccgaaggcccatcttatctttcgattttgcctctccgctgacgcctggcccacccgagccaggacggtatagcaccgccattgccgtcggagcagcgagggatttggcggtgaaaggaagcgtggacaggaattcagcggaggaagtcaggaacattctgaatatggtaatttgatttttcccctttgaccattgagcaatcatgctcaattggtcgtcatcaaactgtgtaactgcagtaacctactattgctactgactagtgtttgcttgtgagaactgtgtttttttaatgaaacgcgctggaatcaggcgcttccattccaaaaaaaaaaaaaaaaaaggccccta

SEQ ID NO: 164267 - DNA, 646 bp, Zea mays
  Clone ID: MRT4577_81389C.1
ctcgaggccggccgggatcagaatctcgagtctcctctgtcgcttccgcagcctttctagctctactccaccccctcgatatccaaatgcatcatttgcagtcacgcgatcatgcaagcgagcgcacccgtacccagagttcacgccatgaagggcgcggccgcgcgcaagggcggcggtgctaggaacaagttggtgacgacgtccgtccaggccggtctgcagtttcccgcatggccgcatcgggcggcacctgaacaaggcccgttacgcgcagagcgtcggcacggtagtccctgtctacctggcctccgtcctcgaatacctggccgccgaggtgctcggagctggctcgttattcgtgccaaggtacatcaagaagacccgcatcatcccgcgccacgtgctccttgtcatccgcaacgactaggagctcggcaatctgctgtccggcgttaccatcgctcacggcggcgtcctccccaacatcaacccggtgctcctgcccaagaagaccgcgtagaacgcggcgccccaggaggccaagtcgtccatgaatgccgccacgtcccctaagaaggcatatagggccgcctttaccgttgtgatgttgaatgctcgtgttcagtagatctttacgtctgta

SEQ ID NO: 164268 - DNA, 2177 bp, Zea mays
  Clone ID: MRT4577_8138C.1
aattcggcacgaggctcccagaaaagccgaggaggcagcctcgctgtgctcctgctgctgctccgaccgatcgaggtggcgcaaagcagaggaaaaccccaggccgcaaccctcgcaaacactcaagtcctcgtcccttccgcactctcctcttcaactccagccgctttcaccgccaatcagaggtccaccacccaccaccacatctcttcgcatccaaccgccccgtaggatcacaggaaacggggatggcgagcggcggggcggtgagggaggtgggctcggcggccgagctgcaggcggcggtggccggggcgcgggcggcggcggtgcacttctgggcgtcctggtgcgaggcgtccaagcagatggacgaggtcttcgcgcacctcgccgtcgacttcccccacgcggccttcctccgggttgaagctgaagaacaacctgaaatatcagaggcgtatggagttacagcggtgccatattttgttttctgcaaggaaggcaaaactgtcgatactttggagggagcaaacccagccagcttagccaataaggttgcaaaagtagctgggcctgctagtgttgctgagtctgctgtacctgctagccttggagttgctgctggacctgctgtacttgaaaacatccaaaagatggcacagcgaaatggatcttctgctgttgaaagcataagctctggtagcacagaagatgcattgaataagcgattggagcagcttgtcaattcccatcccgtgtttttatttatgaagggaaccccagagcaaccaaggtgtggtttcagccgtaaagtgattgacattttgaagcaggaaggggtgaaatttgggagctttgacattcttacagacaatgatgttcgcgaaggcatgaagaaattctccaactggcccactttccctcaactctactgcaaaggtgagctgcttggtggatgtgatattgttgttgctatgcacgaaagtggtgaattgaaggatgtttttgaggagcacaacattacccttaaaccacagggaagcaaaaatgaagaagcaggtgaacctgagtctgcaactgagaagggcagtgcagtttctgaatcaatcaagcttactgatgctcagaaaactcgtttggaaagccttattaactccagcccggtgatggtattcatcaaaggtacacctgaggaaccaaagtgtgggttcagtgggaagctggttcacatacttaagcaagagaacattcctttctccagttttgacatcctttcagatgatgaagttagacaggggctgaaggtcttctcaaactggcctagttaccctcaactgtacataaaaggtgaactggttggcggctcagacatagtgatggagatgcataagagtggtgagctgaagaagatactatctgagaaaggggttcgtcaaaaaggaaatctggaggacagattgaagtccctgatttcctctgccccggtgatgcttttcatgaagggcaccccagatgctccacgttgcggcttcagttcgaaagttgtgaacgccttgaagaaggaaggggtcagctttgggtcctttgacatcttatctgacgaggaagttcgacagggtttgaagacatactccaactggcctaccttcccccaactctactacaagtcggagctgattggtggctgtgacatcgttcttgagatggagaagagcggagagctgaagtcgaccctgtcagagtagacacctagcattcttgcttcgctggcgtttttaccatattgcctgcattggatcactctactctggtattcatgccattgtattcatagatccacgttggtacttgtctgcagtgccacattgctagaattgtgacacatctgcagaaggaataacttacgcttgttcggtactgattgcattgttcttatatcaccagttctatttagcggatggaagcttttttgttcgggtattgtcacgatttatagacggataaagtaaaatatttatagagtatatgtgtacgtgtaattgtgtatttaagtcatgccattgttcttgggaaggcacatgtgaaaaaaattgacttatcacaatgaacaagcttatacacctaatttaataaaagttcgcaccaaaaaaaaaggatttttgggggtaattatt

SEQ ID NO: 164269 - DNA, 230 bp, Zea mays
  Clone ID: MRT4577_81390C.1
gtgatgcttttcttattgttcatcgtcgtcaccatcttctaggatggctatctttatgcttggggattggagaaaaccttatctaaccttttagggaaccggtaatatatatataatgcagcatgagtttgcagaatgttcatcagaaccttctagagtctagatgcatgaatggcatcatagaatacaagagttgcttccattcaaaaaaaaaaaacccatataacata

SEQ ID NO: 164270 - DNA, 367 bp, Zea mays
  Clone ID: MRT4577_81391C.1
gttgtttttttttttttcttttttttttttttttttttttttttccagagttgaacgggaactttttaaaatatcccttcctggggcttacgagaaaaaaaacctcccctttttttcattgaacaagggattatacccgcggggggggcgggcgagtgacccacaagaaccaaattctacagctcgggagggctcctggtctacccttgttaaaacaaataagccggggggaagccgcaggggggacacaagtgcccattttactctcaaaaatcttaagggtccccaaaataggggggggccggagcctccagccccatcaaaaatggggttctttgtcccccttggggcccctgcgcgggggccg

SEQ ID NO: 164271 - DNA, 286 bp, Zea mays
  Clone ID: MRT4577_81392C.1
gctagggggagcagaatacatcacatacgaattaaattaagaagcacaaaacacacaagccaacacgtcttgatacacgactgcgcaaaagttaattaagctcctaacagtcacaagggcagcaacgccgtctaagcctacgtcgacttcaagatctaatagccttccccaacaacgaaagcagttctttggtgccttgaatcggcgcacacacagcgctgtgagcggagccctagcgcacgacgggaaattacttgttcttctggtggcccttctttgcagactc

SEQ ID NO: 164272 - DNA, 347 bp, Zea mays
  Clone ID: MRT4577_81393C.1
ctcgagggcggccgtgatcccattcctaagtcacagctcacagcaagcacttcgcagccgcccccgctcccaaacccgaccgagcaaagcgcaaagccccccaaccgcggatcaatccgcagcatcgatggcgcccaaggcggagaaaaagccggcggcgaagaagcccgcggaggaggagcccgcgaccgagaaggcggagaaggctccggcagggaagaacccgaaggcgcaccaacacctccccgcgcctatgcccggcgccggccgagcataatcatcgactataataaagccaagaacagagagcagacctacaacacctacaccctcaaggtgcccaaaac

SEQ ID NO: 164273 - DNA, 1189 bp, Zea mays
  Clone ID: MRT4577_81394C.1
gcacgagggacgggaaagccgcggcggcgggcggggaccccagcacggtggccgcgccgacggcgatgccgccgacgagcgtcatgacccggctcatcctcatcatggtgtggaggaagctgatccggaacccaaacacctactccagcctcatcggcgtcgtctggtccctggtctccttcaggtggggcttccagatgccggccatcatcctgcggtccatttccatcctgtcggacgcgggtctcgggatggccatgttcagtctcggcctgttcatggcgctgcagccgcggatcatcgcgtgcgggaacaaggtggcgacgttcgccatggcggtgcgcttcctgaccggtcccgcggttatggcggccgcgtccttcgccgtgggcctccgcggcacgcttctgcacgtcgccatcgtccaggcagctctgcctcagggcattgtccccttcgtcttcgcaaaggagtacaacgtgcaccctgacattctcagcaccgcagtcatttttggcatgctcatcgccctgccgatcacgctcgtctactacatcctgctcggcctgtgaccgacccgtgggtgatggcaatggcatgccccgcattgctgtaactgtaaagaccgctgctgccactttccgttcaagggaggcaagtgaggagactgtctgctacgacatttgcttggcgcttcaaaaatgagtggcttgtttctctctctcttctatctattttttattttttctctagaagtaggtgtgaggattgtatggatggaaagtgtgggaggtggacaagtcgcggtagctaggtaggacgacaatggtgaggcaaaacggaccaaaaggaggtgcaagtacaaaagcttgaagggaacaggagatccagtttaagcacgtcacgggatgggttggatatttcaacgggttcagggtattttggttggctgcgctgaccgatgtaaaatcagcgcgccattgtgacaggagatcgatcttgcttgagataaacagctcacctccggagtttgatggcttgagataagggctcaactcaaaatagacagaaatatataccgtatttgtcactgaaacaaatcagtcttttatacacttggtattttaaaaaaaattgaactttcttattcgacttggaaaaaaaaaaaaaaaaaaaaaaaagggcggcc

SEQ ID NO: 164274 - DNA, 581 bp, Zea mays
  Clone ID: MRT4577_81395C.1
ctggaacacaggaccagctgtctcatactacgagctactatggcagattcctcactcctgctaggtgtcttgatggttgtgggtgagggcgaagggccggcgctgatgttgctcacctggggatctgcaggcggctgttggatggggaaccaggcgctagggaaccgagaaaggctgtcgatgctaaccccagatcctcccgtctgatgttatgagcaccacctagcacggtgaacgaccccgggactcgtgatcaactaccttattcctaccgagaactaccatgctgcgacggctcataatacaacatgaacggggaggagctgacagagcttatgatgatcacccaccaccccctggccggggtgacgggccccatcccgggctgcctgggcggctgtccaacctgcagttgctgatctggtggcaaccacgtgaccggggcattgcgggagtggctgctacggctgtccgggctaaagtggctggagctgttaaggaagcagctgacggtacggatgccggcgcgagggtgcgacctgcccatactgcggtcgttgcagctgcggctcaaggaactg

SEQ ID NO: 164275 - DNA, 221 bp, Zea mays
  Clone ID: MRT4577_81396C.1
ggattcccgggtgcgcccacgcgtccggcggcggcggcgcccgcctcggcattgcctcggggcggcggcggcggcctgatcagattgcatctacgtcatccgggacgtcaacggggaactgttctcgggcggtgtcggcggcggctgcttgccgacggcgtcgaatgccgcgatcgccgctctgtaagaggtgaaggcctgtgagtggttcggtcgctctt

SEQ ID NO: 164276 - DNA, 819 bp, Zea mays
  Clone ID: MRT4577_81397C.1
ttggggaccctcgaggtcggccggtctgctcctgcgtactctaatcagtccagctgcttccgttcgatccgcgaagcattgtctcgtcttctctctgctcgcctctcctctctcatctcgtaaccggtttctactatgctcgcctcatcccgcacggcgctgcgccaggcggcgaccaagcagctgtcgctcaagtccagtgtccgagctgtctcggcatggtcgcaggtgccccagggccctccagatgccattttgggtatcactgaagccttcaaggccgacagcaaccccaagaagatcaacctcggcgtcggtgcgtaccgcgatgacaagggcaagccctatgtcctgccttcggtgagagaggcggagaagaaggtcgtcgattccgcgctggacaaggagtacgctggcatcaccggtgtacccaacttcacaaaggccgctctcaagctcgcatatggtgccgattcgaagcccctcaacgaggactgcatcgccgttacccagtccatttcaggtactggcgccctgcgcattggcggcgccttcctcgagcgtcactaccctggccccaagaccatctacatccccaccccgtcatgggccaaccacaatgctgtcttcaaggactcgggtctcaaggtcgagaagtaccgttactacaacaaggacacaattggcctcgactttgagggaatgattgccgacatcaaggccatgcccaagaacagcattgtcctgcttcacgcctgcgcacacaaccccactggtgtcgaccccaccgaggagcagtggaccaagattgccgatgct

SEQ ID NO: 164277 - DNA, 293 bp, Zea mays
  unsure (1)..(293): unsure at all n locations
  Clone ID: MRT4577_81398C.1
ctttaggggggncgggggcggggtacaagatgaaccatactcacatgttgaagatgctgtactacggctatgatctggggatgccagagggcgttctgatgaatggtctggggccatatatgggtaatgactcgctagcgccagatgggattgagcacgatactatgaaagaggagccaggagaaacatagcgttttcgtgcccagaatgttggcgtttccacaagctgggacttactgatgcagaatcacaagatgggcattgttgaaacagacggctgatacacgatgaag

SEQ ID NO: 164278 - DNA, 344 bp, Zea mays
  Clone ID: MRT4577_81399C.1
ggaaaaaacaagtccctgggatttaatagttttttttggccattatggggggttttaaaaattagttttagccacaagccccccattaatcgaaaatgacatgttagttgacttgaagctaaaaccagttttttttaagccaatcacatttttaactggaaccgttatttggcagaaacttaaaacaaaaaaaatgcccccaatccaaccaaaaagacaattttcccaaaatgaagtttttttttcccagaatagaaacaatttcttgtcaattaaagctgggctttttaagggaagagatgggttaaacttgtttgttttttcaaaataaaaaacgtaaaggg

SEQ ID NO: 164279 - DNA, 530 bp, Zea mays
  Clone ID: MRT4577_8139C.1
attcccccagacccccgtcgacgcgaccgctgctaccaccatgggctctccccttgttctagactgaaatatgacgatctagtgccttgagtgcaggctaagagagagatgaaccggcacatatccgcgctatgtgggacactctgatcagctagctgcgaacactcctaccgaactgcacaaggtcctaatcatgcttagcgatgaggagctgagctcagtcgtcttttttgtagagaggaaaacgacaatcgtggagaagcgatacggtcaactaacattttggccagatgtatacctctgtgctttctgagaggacgatagtgaagagcacagaggaaagcctttatatctaagccaagaaaaacacacatccctggcgcatttgggggcatattataggcttgacagaacatctgaaggttttcgacaaacatagaacagttcttatggatctgactgagcccattcttcaaggaacaaagcgttcaaaggatctcgcggatgtgcatattgttgggaactgtact

SEQ ID NO: 164280 - DNA, 214 bp, Zea mays
  Clone ID: MRT4577_813C.1
ttcctacaaacactacatcacaacattcactttcacctccacatacaatctctttagaactggatatattacttatttgactgctccagatatatcctgctcctactaaatactgcatacaaattctgtattctaactaatgatctcatctctcattatcatatcaaatcatttaacctgaatgacatatcaatcttactaaacttaaccacat

SEQ ID NO: 164281 - DNA, 484 bp, Zea mays
  Clone ID: MRT4577_81400C.1
ctggatgatccggagcaggcacgactcggtgttcaagttttagagcatcatgccagtttctttgttgcactgaaactgatgttccagactacatacatcgacgaaggcaatagatccaagtgttgcgtattcaaaggtgatcctgcaaaggttgctcatcactgtggcagcagcaaagaagttaaagagaaaataagcatgataatggatgaacttgcccttgatggatatcaggccatagctgtaggacatcaagtagactcttgttgggactttattgcccttctgccttacacagatgaccttagaagcgatagtgctgatgttgtcgatagccttatcgatctaggtttagatataagagtcctcacaggtcattctgttgtgcatatcgccatatcctgctgtcgagatttttgctattgtcattttctatgataaacatgtcttcatcatatatgtatattgttttgtcctatctaaa

SEQ ID NO: 164282 - DNA, 743 bp, Zea mays
  unsure (1)..(743): unsure at all n locations
  Clone ID: MRT4577_81401C.1
tcgggtcgacccagcgtccgggccaanaattcgaattcctcggctgcgacaagcacgacgataatgatgaagtggacggcgagggcgaagaggacgacggcggcgatgaggaggaggaggaggatgacgtggagtacggcgaggacaggatgagtcccccgcacggcggcgtgtcggcgcgcgcgctggagcggcggctccacgagctgctgcagaagcggcagcaggaccggatcgtggagctggagtcggcgctggacagcgcgcagcggcggctccacgagaaggagcgcgaggtggtgtggtggcgcgacgccgccaagctcgtctcccaccgccgcgacgagtcgcgccggattgccaccgccagtgccaggtagagaaacgagagagagagagagagaggtggcgcgaaaggccggctggccgcctgcctttgtactgcagcctgcagcagatgtccggatggaatggggatgggggtcgtcgttcgtcatcacgctgcgcgggtgacgcgctgtaatgtactcctgcgagctggggcgagtgagcgacacgacccgcggcggcggcctcttgtcgcgcctctgccgtgcgcgcgtgcggctcggacggaggccgcggggttcggctctgcatttgcctgcacttggttgtcttgtacgtcgtgtcgttgtccggtgcggacgaaaaaaaatccttttgtgaaaaaaaaaaaaaagggcggccgccaccgcggtgga

SEQ ID NO: 164283 - DNA, 470 bp, Zea mays
  Clone ID: MRT4577_81402C.1
aacgctggacaccaaatttatgcttttaatcgcgccccgcaacaccgactgcccagggcacagaagcgcgcaaggcagcgagagcaccgcccccccccccatcacacacaagagccgccagcacgcctggaagaacaactcgctccgggacaacagaaaacggccgggagcagcactcgaaaaggatggagcacgacttctcagggaagcacacccacagaagccaccactacaacacgcggaccctggaacgccaagaggagaacggcccgcaagcaccaagagagaaagctcgccgaagaaaagcaaccacgaccgaaacaacaaccacgagcggccaggaggagcacaacggaagcaacccaccagcaagggccaccggacccggcaaccaacgcgacggagcaggacaacccaaacgagcacaggcacatggacgacacggcccaaacagaacgaacgaaacaagc

SEQ ID NO: 164284 - DNA, 301 bp, Zea mays
  unsure (1)..(301): unsure at all n locations
  Clone ID: MRT4577_81403C.1
cggctgtgacggcnccgnacacccggacgacaagcgcgacaacaacggcgagaagacggcngggcccaacgccaacccaancaggggcnncgagggcaangacgccaacaagaccgagccggagcgggagngcccaganacagnnnccngggccgaccccccngccaacgccgcccgggaccccgacgnngggnccggcgggccgagccgggagaangagggcgggcggaaggacagccggaccgccagcccgcagggcgccaacaccaaccncccagcaccgacgaccggccgcgacacc

SEQ ID NO: 164285 - DNA, 315 bp, Zea mays
  Clone ID: MRT4577_81404C.1
gagcactccagtcggcggccgcccttcttttttttgttttttttaaattttttttgggttttttcccccctttttttttttttttttttttttcggggaaaaattccatgggcctaaaaaaaaattgaacaccgttgcccaccacgggccatgggtggcccaccccggccaaacaggggcccacaacccccaaagggggcccaccaaaactataagcccggcaacaccccatccaaggcacacaattacaggggaaaacaaaacccctttccgtgggccccctccccctgggggtgggcccccgccccggggaaa

SEQ ID NO: 164286 - DNA, 218 bp, Zea mays
  Clone ID: MRT4577_81405C.1
gtcatcccacgcgtcgtgcccgacaagccacgctcagcggaagcaacaatggtgatgacctcggctaacggacggaggaaccgcaggcctgtaggcactgacgccgcagagacgccctcgaccccgtcctgccggatgacgccttgctgcaccaacacgtccacctgaggccccatgaccatctgtgcgaagtggacggcctggaacgcacgcctcgc

SEQ ID NO: 164287 - DNA, 157 bp, Zea mays
  unsure (1)..(157): unsure at all n locations
  Clone ID: MRT4577_81406C.1
taatcggcacnnagccgcgcgagacatacggcggcaggacaaccacggcgttagggggcaactggtaaacctggacgtcnaacctctgcaagacctccgccacgaaacgatgcgccggggggggaangccggcnatgaanaacgcttccaacttttt

SEQ ID NO: 164288 - DNA, 1123 bp, Zea mays
  Clone ID: MRT4577_81407C.1
tcgtgttaacaagccaaaggggtacatttgctcatgtggtgaagagtcaaaatctgttgtctctttatttaatgattatttgaagggctggaacaagattcaaccagggttgccaaaaccacgcttgtttactgtgggtcgtcttgatgttgccacggctggtctgataatagtcacaaatgatggtgagtttgctcaaaagcttgcacatccttcttcaaatgtaacaaaagaatatgtggtgactattgatggtgccgtgcacaaaaaacatctcatagctatcagtgaaggcacaaaaattgatggggtcatgtgcattcctgatttagtagaaccattggctgcccaatcagatacaagaaagacccgcctaaggatagtggttcatgaaggacggaatcatgaagttcgtgaacttgtacagaatgcagggctacaggtttatgcattgaaacgtgttcggataggcaggttcaggcttccagcagatctgggaattgggaagtttgttgagctcaaacaggctgatatcaaggcactagatggcaacaactagagatgacatctgatgtggctaataagcgcatcttgtccaaagatggtagtaatcctcaaagtcacaatacatgagctgctactcaactcagaaagcttgtgaatgttctggatgtccattggtggtggtggctgatgatcaagtgtggcaaacatgttttgccttgaagaacttgtgaactactccatacttcgcctgcgctgcgaatctccacatcatatcaaacggcagaaccaagtccgcgatgcagcagtcgtttggtgaggatggaacattgtcaaatagcgatcttctgttggcatatacattttactctctattctaaattataatttttttagatgcattgtttttactaaattaaaatatcttatagtttagaatgcatcttgtccaacaggtagtcaataatggcagacgagttatatttggccaaattacattgtactccgtgtaccgagaactgtttttttaagaatcctttattgaccaggaatttttttcttgtaattgtggcactgttatttctatagtcatgagaatcccttcgggaaaaaaaaaaaa

SEQ ID NO: 164289 - DNA, 162 bp, Zea mays
  Clone ID: MRT4577_81408C.1
tgtcgaaaccgcaggcagcagcactcgagagcgcaccaggaggcggcgctccgacttagagtttcacataggccgctgcgtccatatactcctccccgcagtcgacgtcgcccactggagacgacccggcagctgcgactgatcccgacctaccgaggctca

SEQ ID NO: 164290 - DNA, 404 bp, Zea mays
  Clone ID: MRT4577_81409C.1
ccctcgacccaatagtaggttcccgaataggttggttttttgggggcccagcagcagttccttatccagaccaatttggcaacaaaaaaaatataaaattttggccaaaaaaggcatctccctgatcaaaaaaaaaaaaacgggcgacgcggtggttgggttaaggcgggatcatgggaacccgggcttaattatgacccctagcaacataggcctttggccacaggggaggattttccatacaaaaaaaaaaaggggtaagttggccataaccacccgaggggtggggcttcagccccacaaaggaccagtggacaaaccaaaacgccaggcaggggatgttgttatcctggcggagcaccttccacgctacagttgggccaaaaaaaacaggggggcccatt

SEQ ID NO: 164291 - DNA, 273 bp, Zea mays
  Clone ID: MRT4577_8140C.1
tactttacgtgcgcaagcgcgcaacagcggggaggaccaaagacgagacggcgccgaaaccaaacaggaggcacagcgaggaagcgaggcagggggaaaaacgagacacggagagggacaggcgcagagcgaccaggagccggagggggccagcaaagaagccaaacacaaagcggggcaccagaaacagacgaggggggaaggcgaaaaacccctagaggaacacccacagcacgcggcacaggcaatggacaaggaagggccggaacagca

SEQ ID NO: 164292 - DNA, 236 bp, Zea mays
  Clone ID: MRT4577_81410C.1
gaggagaataaaactagggctacatttcttagacttagaggtacttaggtacatccttcaaaatcaattcacacaccggggatctaggtccaccagccgatacggacagagcaggcgcaggtcaggacacacgggagacgctcgactccaagggattccgagcaggcccttttgacggggtcgaaccgggagacagcgactacggagcacgcaataccatcgagcaggacctgacg

SEQ ID NO: 164293 - DNA, 388 bp, Zea mays
  unsure (1)..(388): unsure at all n locations
  Clone ID: MRT4577_81411C.1
ttctctccccgcgnagcctgcgtataggaactgcctgtattgatcctagtggtatatgttgcgtcgatgtaaatttgtatctatgttcttcaatgtaaatgtttaccaatgttgcaatgtatgtatattgtgattctttgcggtaatgtctgtgtatcatgtttctctgtttgtacagtggtggcgggggggtggatttgccattcactctgtnacatgataatgataaactactgtccaaaaattgacctcaccttagttgaaattcatgaatgctgaacatttgagatcacccgcgctttttatgtactggggagaggtctacttcggttgttgttcttttgcctgtttcctgtttcttgttgccctggttggctcctgtggctgc

SEQ ID NO: 164294 - DNA, 1688 bp, Zea mays
  unsure (1)..(1688): unsure at all n locations
  Clone ID: MRT4577_81412C.1
ccaatggaagttctgcttgaaccaaagattaggggtgttttnnccttgacaaaggttcaaacaaacaattacgcaacaaacaactgctgaatgctgaaatcccatgtgttcatagcatacactagccacctaccacatgttactggactaggatctaggaagacaccaggctaccagcaaacgatcgttacatttacagttgtgtcaagtgtgaatcacgtatcaaatagaaacacaaggctttccacaactcatcaggcctgagaacctgcggaggatcctggagagaccggttcatggccatggacccggaggcggtagatgcacgtcagctgcgagcttccgtgattcgaagtgaaatccagccggaccatattgatcacgcctacatctggggctgtcacgtcaaatgtctgcacattgttcttctccaagtcgtaggcgaactctgccaaagccatctttgcagcatgaccagattgggtctcaccgggcgtctcctcgtaccatccatacacccgacagccttttggagctgtagacctgtcatacgccacatccttggacacatgctcaagcgttactgcctcaggaattatccctgacttgagcttgacctcaacaaacccattgctaccctgcaaagcaaagcactgtccaggttccccaaagctcggttgaagcatcttctctggcttaggccccacgtcaactccagacatccaaaccatgaaaccacgtttaggcacataggcctccgaatgccggacaacccttcccccgcctgaggcaacggcgtagtcaaccctgccgatcccatctgcggcatgtttctcaatctccctcatgacgatctccctggctaaggcacgaacctggtccagatcaacctcgctctccgaactcgagccaaggctccccttcacctcgtcccagaacttctcaaactcgtccttccggaggaactccatccgcttgagcccggccagcgcgtcgccgagctcaccggccctcgcgtcaagccgggtgagttggcgctcgagcgcgagccgcttatcctccagcagagcgagaaggtcgcccctggcggcgccgacctcgccgtcgatcttgcgatctacggcctcgagttgcacctggatcatccggaaggtgcgggtgagggaggcctccacctcgtcgacgcgggcggcgtagccctcgagcgcggcgcggtcgggcggcggcgagggcgggggcgggtgggaccagcgccaggcgaggtccccgagatagagcagcgcggcgaggagagccgcgttcttggcggcgatgctgagcacggtctgccaccgcggccggggcgggtgagaggtcttttttcggcgtgcgtgctgagcggacgcggcggcggttggttggagcgggggcgtaggggagaccgggtgcggacggtggttgaggaggaagaccgaccgcttgcgctgggcggcggcggctccgggtgcggggcgggaggcgagggggatggcgtctagggttagtggggaggaggcggggctggtggccgcagcggcgaaggagggggacgccatgggacggagggctgcggaggcggttggggttcggggtggagtcgagggggggaaatccgaatgcgaaatgctggggcccggccggggagcgggcagtgcaggggaagacgaacc

SEQ ID NO: 164295 - DNA, 380 bp, Zea mays
  Clone ID: MRT4577_81413C.1
gcctcgcgtgctctcttaattatatgtaccactgactctgagctgctgctagcgggccatgatacatagcacgctgttatcatctgtaacagaggctctctgggcaatatccgtgaccaggactggaggatgatctccgcctacatatagggttggtactgggtttcacctagtcctgattatgctttgataaaccatcgaagttgacaaggcaggactagaacgtgattggatgtctataaggaccgtcttttctcatgtgttgaaaaatggatgaggtaagaacactagcttacgtgtattactgagtacaactacatgtaaatggatgcctgcgaccagatcactaacaagctctggtggccgcaggtactgagacc

SEQ ID NO: 164296 - DNA, 609 bp, Zea mays
  Clone ID: MRT4577_81414C.1
cttaggttaactaatcgattatgaaaaggaaaaaagggtaaagtaacttgatgttgattgttctctaaatagaacgtttcttcttctacatgtagaaaaggaataaataaattaatcaaattccgggaggcttgatgaagtgcttctttaggagttaaacttccatttgtccatatttctagaaaaagaatctcttgtttttcattcccattcccataagaatgaatactatgattggcattttcaacaggcatgaatacagcatcgataggataacttctgtcttcaaagttatttgacatttttagactatatccgcgattcctctcaatttttaattcaatacacaaatctattggttctgttaaggtagctatatgctgtgtattatcaatgatttccacagcgggcggtaaaataatgtctcgagcagttatatatccaggaccttggacacaaataagcgcgttgcgcgttccatatagattacttcttaatacaatctcgttcaaattcattaaaatttcatgtactgattcttgaatacctgctatgttagaatagtcatgtgggattgtctcaaattttgcacgtgtaatacatgttcct

SEQ ID NO: 164297 - DNA, 338 bp, Zea mays
  Clone ID: MRT4577_81415C.1
gcgagacgcctggcaacccccgccgaaacacttccagtctgtttggtcctaaaaagcccaacccctttaagaaggccgtttcaaaaaaactgtcgtggaactatcacagaaacgctactactatctcactgaagaatcccaccacctaaaatcctgcccactctgtaaactcccacgatacctatctctatcatgacacattaacgacaataaggctatctatatcttgtcgacttactaaataaccaagttaatgtgctaaagcacgtaaacccactcatatctatgtttccaagagcacgtacatcatgaacaatcctataaaccaaacaatgcca

SEQ ID NO: 164298 - DNA, 947 bp, Zea mays
  Clone ID: MRT4577_81416C.1
ccatgactagggcgattgggcccgtcgaagccggccgggcacggcatacgcgccacccccaccacccccctcttcgcgccatcccccccttcatcggcgtgccatgacgacgacgcgcctttgcgccgccctgaccacgttcctgccactactactactctcctccgccgcggtgtccctggccaatgccgccggcagggagagcgaggatggccgcggccagcaagcggccacgaccgcgagcgtgtacgtggtgatggtgaaggctcctgcccagggcgtcgactccgaggcgtaccacatgcgcatcctcgccaccgcgctcggcagcgaggagaaagccaagcgggcgctgatctacagctacaaggccgccgctagcgggttcgccgccaagctcacgccggcgcaggtcgccgcgttgcagaagcatcctgacgttgtgcaggcgctgcctgacgtgaagtacacccttgaggacaggaaccacctcaactgaaccgagtgcggctttcaccaacacgatacatagctcggcactagtgccatctcatgttagcaagtgtgcatgtgcccacaccctagggtcagaatttatataagcatgctatgtgtgggctagtgatggtaatttagtctcttcataaagattgaatgctgtacccggagcgtacgtacatattactacccagcctgctgttcattgtttgatatcaccgtggatccacgagactgctgcacctgatgagaggctagagctagaagatggatttcagaacatgcgtgtgcccaaccaattgcacatttcaggctttcaaacgtgctgttcatctgtccttctgtttcccttttttttttcaagaaacgagagaacattgtaccttgagcaatatgtatttgagcacgaatttaccctgcgactgcaatagatgcgtacagttcttatt

SEQ ID NO: 164299 - DNA, 178 bp, Zea mays
  Clone ID: MRT4577_81417C.1
ggcaaaacaatttaatgtaaaacaatcgcgcaaaggagcacatttttttgacaaataaaatggcctctattccaagcaggagcattttaaattatgttggtcacccacccggttcatttcaaccgtaaaaagggggggaagaaaaaaaaaatcccaatgcctccaactttcacggccc

SEQ ID NO: 164300 - DNA, 261 bp, Zea mays
  Clone ID: MRT4577_81418C.1
ctcgctccagcgccatgggccctccaggaagttcttcgttgggggaaactggaagatgaacgggcggaacagagtctgggggagctcatcggcactctgaacgcggccaaggtgccggccgacaccgaggtggtttgtgctccccctactgcctatatcgacttcgcccggcagaagctagatcccaagattgctgtggctgcgcagaactgctacaaagtgactaatggggcttttactggggagatcagccctggcatg

SEQ ID NO: 164301 - DNA, 317 bp, Zea mays
  Clone ID: MRT4577_81419C.1
gctctatcaggcatcctcgatcggatggctggagccaggcagatgctagccatctgccattcatcaggatacatatatattatgttctctgtcaaattccgaatctttacagctgcgttgtatatatctccactgcccaggttccctccgatcacctgctccgcgtacctgtcccagcgctacaaggacactcacgcggatctgaaatcctacgacgacagcaaggcctgatcagaggactgccctctcctctctctgtctcagccatcggtacgtacgtacgacgtgtatcctgcgataacactgggtggaggacg

SEQ ID NO: 164302 - DNA, 578 bp, Zea mays
  Clone ID: MRT4577_8141C.1
cgagggcgtcagtaaactcagctttgcgttgttggtcagatacggtatttgattctctgatgtatccagctagggaggttttatatgaaccaaaagtgctggagctggaacctgagattctcccggacatcagttggggtctctctagttcagtagatggtaaagcaaagctggatgaagactgtcttgcagatgatcagcttgaccagtacccatctttggagaacaatccagttacatttgagctgagagacgagccagcgatcccgcagctgggagtgcattgaagaatcccgcagctctgcttgctgcattgctctagaatgctagtaggtcttgaacccctgatgtttttctccagctatgttctggtggatgtgtgggtggtgtaggatttcacagtttgatcactagtgcctgatccagcggaagcgacagcgcttcctatgcttgctgatgggcgatggttgtggaactgctgatggtataattctaatgttttcagcaaaacaaatctatatgatctctatatttattctcctgaatcatatgacttggcagtgcttgtcctaaatata

SEQ ID NO: 164303 - DNA, 808 bp, Zea mays
  Clone ID: MRT4577_81420C.1
atctgaaagcgccgtctccacagtcagagctcgatcataagctagctagtcaggccaggcgggcgatcggacgatcgggctataatttcgactacggcgacgatggccggcgcgggcgtgacgacgacggggtcgccgtgcggggcgtgcaagttcctgcggcgccggtgcgcggcggagtgcgtgttcgcgccctacttctgcgccgaggacggcgcgtcgcagttcgcggccatccacaaggtgttcggggccagcaacgcggccaagctgctgcagcaggtggcccccggcgaccggagcgaggcggccgccacagtgacctacgaggcgcaggcccggctgcgcgaccccgtctacggctgcgtcgcccacatcttcgcgctgcagcagcaggttgcggcgctgcaggcgcaggtggcgcacgccaggacgcaggcgcagctgggggggcggcgacggcgatgcacccgctgctccagcagcagctgcagcagcaggcgtggcaggtggccgccgccgcggatcagcacgaccaccagtccatgacgtccacgcagagcagctccggctgctacagcggcgcccaccagcgctccgacggctcgtcgctgcacggcgccgagatgtactgcggctacggcgagcaggaggaaggcagctactaacccccagatgattgattcactcgttcctcgttcgttcccctgagaaacctgagacatgtgccatgaaaagtttctcctttgcacgcgcgttcgcttgagttggttcaactcttgccggtctcggctgtaaggcatcaatc

SEQ ID NO: 164304 - DNA, 741 bp, Zea mays
  Clone ID: MRT4577_81421C.1
ctcggcgacaacctggaggcccgcgtcgccgacttcgggctcgccaagttcctccgctccggcgccacctccgagtgcatgtccgccgtcgctggatcctacggctacatcgcccctgagtacgcgtacacgctgcgggtggacgagaagagcgacgtgtacagctacggcgtggtcctgctggagctcatcacggggcggcgccccgtggggggggacttcggggaaggggtggacatcgtgcagtgggccaagcgggccacggccggccgccgggaggccgtgccggggatcgcggaccggcggctcggcgccgcgcccaaagacgaggtggcgcacctcttcttcgtctccatgctctgcgtccaggagccgccggccaccagctacaagctgttccccgacctgctggcctgatgaagcgcagacggacgaacggcacctgttttgccatgccactgttaattacaccccaaaaaaacacacacacgacgactcatcatcgtgcaggactgaagttacagcatgtagcgcagcagactggagctagaggttcttcaggttggtcggccgacattggagatggtaacaagatagaactggggatcaataataattaagtaacatgtaactttattacaatttttttaatctttctttctcttctctctttttctttccaaattctcttcttcttaatttctttgttcggctatcaaaggtgtacagggtctgatcata

SEQ ID NO: 164305 - DNA, 1063 bp, Zea mays
  Clone ID: MRT4577_81422C.1
cgtcctcgtgcccatctctgtcccaatcaaactgattgatccgtcgcccgcagggccacagcagccgcggcgaggtcgtccgtcggattcggaggctcaggcggaactgcaccccatggaaatggaatcgagcgaacttacacgctgcttcgcaaccgtattatgcagttattactgaaaagataatacagtacctatggcttctctggacgccgtgcgaggagacctcgccctgctgattctgtacctgaacaaggccgaggcgcgggacaagatctgccgagcgatccagtacgggtccaagttcatcagcaacggcgagccagggcctgcgcagaacgtcgacaagtccaccagcctggcccggaaagtgttccggctctgtaggatcagccctcctgccaaggggactccgctcccgctgatcctactcgggaagtccaagaacgcgatgctgtcgactttcctcttcctggaccagatcgtgtgggcggggaggacaggaatatacaagaacaaggagcgggcggagttcctcgggaggatagcgttctactgcttcctcggctccaacaccttcacggccatcatcgagctagccgagctgcaacggctgtccacgtcgatgaagaagctggagaaggagctgaagcaccaagagctgtacaaggacgagcagtaccgcatgaagctgcacaagtcgaacgagcggctgctggcgctcgtcaagtcgagcctggacatcgtggtggccgtggggctcctgcagctggccccgaagaaggtgaccccccgcgtcacgggcgcgtttggcttcgccagctccctcatcgcttgctaccagctgcttccaagcccaccagcaaagcagagcaagtgaggactccgactccaagcactgtttaccaggaaaataatcccccccgataggtttgatttggttgccacatccccttgtatggcagactagactaatatatgtaatcatcatcataataattgataaaccatcccactatggataggtttggtcactccgaaaaaaaaaaaaaaaaaagcggcc

SEQ ID NO: 164306 - DNA, 332 bp, Zea mays
  Clone ID: MRT4577_81423C.1
gattgttcaaggtcattcattattttctgtcaagggctagttgatctccattttaatgagggcaacacattcccgatatgcacgacatgaaacgaacgccggcaactcagatattacaacaacgaagagaaaaccgactgcaaaagacatattgcccctgatcccctggcccaagttgatgaccccgggcatgatggaaacccctcgggcaaaaaaggaacacaggctggcgtcctccaagagccccaccaggtacacctccacagcctcctggagtgccaccaccaccaaccactggaaccaaaaaaacgtcttgaagacctgcaccacct

SEQ ID NO: 164307 - DNA, 1083 bp, Zea mays
  unsure (1)..(1083): unsure at all n locations
  Clone ID: MRT4577_81424C.1
agngagagaatcaaaaagaacgtccttggcgtggtgtcctcgtcctcgtgcccatctctgtcccaatcaaactgattgatccgtcgcccgcagggccacagcagccgcggcgaggtcgtccgtcggattcggaggctcaggcggaactgcaccccatggaaatggaatcgagcgaacttacacgctgcttcgcaaccgtattatgcagttattactgaaaagataatacagtacctatggcttctctggacgccgtgcgaggagacctcgccctgctgattctgtacctgaacaaggccgaggcgcgggacaagatctgccgagcgatccagtacgggtccaagttcatcagcaacggcgagccagggcctgcgcagaacgtcgacaagtccaccagcctggcccggaaagtgttccggctctgtaagttcgtcaacgacctgcacgctttgatcagccctcctgccaaggggactccgctcccgctgatcctactcgggaagtccaagaacgcgatgctgtcgactttcctcttcctggaccagatcgtgtgggcggggaggacaggaatatacaagaacaaggagcgggcggagtttctcgggaggatagcgttctactgcttcctcggctccaacacctgcacggccatcatcgagctagccgagctgcaacggctgtccacgtcgatgaagaagctggagaaggagctgaagcaccaagagctgtacaagaacgagcagtaccgcatgaagctgcacaagtcgaacgagcggctgctggcgctcgtcaagtcgagcctggacatctccaagccccccagcaaacctgagcaaagccccattctggttccaagccctgtttcccaggaaaataatcctttttcggatggatgggactcacggctttgcccaccctagaataagaatgatttggttgccccatccccttgtatggcagactagactaatatatgtaatcatcctcataataattgataaaccatcccctatggataggtttggtccctccccaaaaaaaaaaaaaaaaaaaaaagggaaaaagacttaaacccaggcgaaa

SEQ ID NO: 164308 - DNA, 1248 bp, Zea mays
  Clone ID: MRT4577_81425C.1
gatacggcctccattatttataaagaggatatagaataaaaaaaagagacgtccttggcgtggtgtcctcgtcctcgtgcccatctctgtcccaatcaaactgattgatccgtcgcccgcagggccacagcagccgcggcgaggtcgtccgtcggattcggaggctcagttattactgaaaagataatacagtacctatggcttctctggacgccgtgcgaggagacctcgccctgctgattctgtacctgaacaaggccgaggcgcgggacaagatctgccgagcgatccagtacgggtccaagttcatcagcaacggggagccagggcctgcgcagaacgtcgacaagtccaccagcctggcccggaaagtgttccggctctgtaaggtgctgctgctgctgctgctgctttgctctcgcatcatggtgtggtttcgttaggactcagagcctgtcctcgttttacagttcgtcaacgacctgcacgctttgatcagccctcctgccaaggggactccgctcccgctgatcctactcgggaagtccaagaacgcgatgctgtcgactttcctcttcctggaccagatcgtgtgggcggggaggacaggaatatacaagaacaaggagcgggcggagtttctcgggaggatagcgttctactgcttcctcggctccaacacctgcacggccatcatcgagctagccgagctgcaacggctgtccacgtcgatgaagaagctggagaaggagctgaagcaccaagagctgtacaagaacgagcagtaccgcatgaagctgcacaagtcgaacgagcggctgctggcgctcgtcaagtcgagcctggacatcgtggtggccgtggggctcctgcagctggccccgaagaaggtgaccccccgcgtcacgggcgcgtttggcttcgccagctccctcatcgcttgctaccagctgcttccaagcccaccagcaaagcagagcaagtgaggactcccactccaagcactgtttaccaggaaaataatcccccccggataggtttgatttggttgccacatccccttgtatggcagactagactaatatatgtaatcatcatcataataattgataaaccatcccactatggataggtttggtcactccaaaaaaaaaaaaaaaaaaaaaaaaaaaaaaaaaaaaaaaaaaaaaaaaaaaaaaaaaaaaaaaaaaaaaaaaaaaaaaaaaaaaaggggcgggccgttttaaa

SEQ ID NO: 164309 - DNA, 1339 bp, Zea mays
  Clone ID: MRT4577_81426C.1
gatacggcctccattatttataaagaggatatagaataaaaaaaagagacgtccttggcgtggtgtcctcgtcctcgtgcccatctctgtcccaatcaaactgatcgatccgtcgcctgcagggccacagcagccgcggcgaggtcgtccgtcggattcggaagctcagttattactgaaaagataatacagtacctatggcttctctggacgccgtgcgaggagacctcgccctgctgattctgtacctgaacaaggccgaggcgcgggacaagatctgccgagcgatccagtacgggtccaagttcatcagcaacggcgagccagggcctgcgcagaacgtcgacaagtccaccagcctggcccggaaagtgttccggctctgtaagttcgtcaacgacctgcacgctttgatcagccctcctgccaaggggactccgctcccgctgatcctactcgggaagtccaagaacgcgatgctgtcgactttcctcttcctggaccagatcgtgtgggcggggaggacaggaatatacaagaacaaggagcgggcggagttcctcgggaggatagcgttctactgcttcctcggctccaacacctgcacggccatcatcgagctagccgagctgcaacggctgtccacgtcgatgaagaagctggagaaggagctgaagcaccaagagctgtacaagaacgagcagtaccgcatgaagctgcacaagtcgaacgagcggctgctggcgctcgtcaagtcgagcctggacatcgtggtggccgtggggctcctgcagctggccccgaagaaggtgaccccccgcgtcacgggcgcgtttggcttcgccagctccctcatcgcttgctaccagctgcttccaagcccaccagcaaagcagagcaaatgaggactccgactccaagcactgtttaccaggaaaataatcccccccggatggatgggactcacggctctgcgtctactagtataggttcgatttggttgccacatccccttgtatggcagactagactaatatatgtaatcatcatcataataattgataaaccatccttttaggatagaaaaaaaaaaaaaaaaaaaaaaaaaaaaaaaaaaaaaaaaaaaaaaaaaaaaaaaaaggccagagcaaaacgacattagtctctctattttagtctctaaattgtccaacgatgagactaaaataaagactaaactgtttaggctctagtcactcaaagggactaaaagtgactaacaattattctattttgcctctcctttattttagttgcactaatgacgggagaatgttaaaagaaattttggttctcttgt

SEQ ID NO: 164310 - DNA, 348 bp, Zea mays
  Clone ID: MRT4577_81427C.1
attcggctcgaggggacttgcaacagactgtatgtcctgggagtaggcatatccatgactgcccttaacaagtgaaccttgctggagcgtggcacgagattaacacagagctgtgtggtgcaatataggtggtcatcatgactaaagctgtcaccaacggcttcgagagtgatgctagcatggtggagagaaagataatgcctccaggcctaccttgtttgatgtcagtcaactgacctgcatagagtaccaccggggacagtggtggccttcactggatggaaaccattagtcgattaatgaattgaaacgaaatagggcgtacacacgctagtgagcgccctgacc

SEQ ID NO: 164311 - DNA, 406 bp, Zea mays
  Clone ID: MRT4577_81428C.1
accctccacgaagcctctggtgcctcggccaccgcagcagcctggccctgccccggcccccgggcgtggtgtcaggtctcaggtgtggtggcgctttctcctctccggaaaggtggacgcgtcatatcagatatacagaggggagagagagttagtattatgataagtggtatatatgatggagatattaaaaaaataaaaattgtaatagaatataagaaatacaaatcaaaaaaaaaacaaaacaacaaaataataaaatacaaaaaaaaaaaaaaaaagaaaaaaaaaaaaaaaaaaaaaaaaaaaaaaaaaaaaaaaaaaaacaaaaagaatttagctgaaattcccccccccccccccaaaaaaataattcaaacaaaataaaaaaaaaaaaccccaccat

SEQ ID NO: 164312 - DNA, 1091 bp, Zea mays
  Clone ID: MRT4577_81429C.1
cattgggtacctcgaggccggccgggaaactgattgatccgtcgcccgcagggccacagcagccgcggcgaggtcgtccgtcggattcggaggctcagttattactgaaaagataatacagtacctatggcttctctggacgccgtgcgaggagacctcgccctgctgattctgtacctgaacaaggccgaggcgcgggacaagatctgccgagcgatccagtacgggtccaagttcatcagcaacggcgagccagggcctgcgcagaacgccgacaagtccaccagcctggcccggaaagtgttccggctctgtaaggtgctgctttgctctcgcatcctggtgtggtttcgttaggactcagagcctgtccttgttttacagttcgtcaacgaccttcatgctttgatcagccctcctgccaaggggactccgctcccgctgatcctactcgggaagtccaagaacgcgatgctgtcgactttcctcttcctggaccagatcgtgtgggcggggaggacaggaatatacaagaacaaggagcgggcggagttcctcgggaggatagcgttctactgcttcctcggctccaacaccttcacggccatcatcgagctagccgagctgcaacggctgtccacgtcgatgaagaagctggagaaggagctgaagcaccaagagctgtacaagaacgagcagtaccgcatgaagctgcacaagtcgaacgagcggctgctggctctcgtcaagtcgagcctggacatcgtggtggccgtggggctcctgcagctggccccgaagaaggtgaccccccgcgtcacgggcgcgtttggcttcgccagctccctcatcgcttgctaccagctgcttccaagcccaccagcaaagcagagcaagtgaggactccgactccaagcactgtttaccaggaaaataatcccccccggatggatgggactcacggctctgcgtctactagtataggtttgatttggttgccacatccccttgtatggcagactagactaatatatgtaatcatcatcataataattgataaaccatccactatggataggtttggtcactcc

SEQ ID NO: 164313 - DNA, 398 bp, Zea mays
  Clone ID: MRT4577_8142C.1
gatcactctactccaaccactccgcgggatcgtaccttacccagccttcttcctcgtcgccggctcgccatgtcggcggcgttcaaggcgttcctgaatagcccagtgggccccaagacgacccacttctggggacccgtctcgaactggggcatcatcctcgcgagcgtggctgacacgaaaaagcctcctgagatgatatccggccctaaaccatagtctgaccgaacaagcatgctcctgcttcggccgtacaatactacaatgtactcggttgtaccacaaaggcaatatttgatgcatgtacgtaacgtgaaaaaagcctcggttatacatgttgtaggttcatctgcggatactgaactatgaatttccgagcataaagcatcaatttccac

SEQ ID NO: 164314 - DNA, 1597 bp, Zea mays
  Clone ID: MRT4577_81430C.1
ccaacacggcgttccccaaattctccccaccctactagaaatccccatatccgcggcggcgccggccttcggattcgatcctcctagacgagtcgactccatctgatcggcggagccggggcaccagccaccatgtgggcggcatcgcgcctggcgtagtgctgcgcggcgtgcgcgtgcgaggcgtgccggacggcgggcggcagcatcggccgccggttcggacgaatcgtctacgtgcagggctactcgggcattggcctcgaggccggccgggataaagagagagaaccacggcctcgaggccgggtggggtccttggcgtggtgtcctcgtcctcgtgcccatctctgtcccaatcaaactgattgatccgtcgcccgcagggccacagcagccgcggcgaggtcgtccgtcggattcggaggctcagttattactgaaaagataatacagtacctatggcttctctggacgccgtgcgaggagacctcgccctgctgattctgtacctgaacaaggccgaggcgcgggacaagatctgccgagcgatccagtacgggtccaagttcatcagcaacggcgagccagggcctgcgcagaacgtcgacaagtccaccagcctggcccggaaagtgttccggctctgtaagttcgtcaacgacctgcacgctttgatcagccctcctgccaaggggactccgctcccgctgatcctactcgggaagtccaagaacgcgatgctgtcgactttcctcttcctggaccagatcgtgtgggcggggaggacaggaatatacaagaacaaggagcgggcggagtttctcgggaggatagcgttctactgcttcctcggctccaacacctgcacggccatcatcgagctagccgagctgcaacggctgtccacgtcgatgaagaagctggagaaggagctgaagcaccaagagctgtacaagaacgagcagtaccgcatgaagctgcacaagtcgaacgagcggctgctggcgctcgtcaagtcgagcctggacatcgtggtggccgtggggctcctgcagctggccccgaagaaggtgaccccccgcgtcacgggcgcgtttggcttcgccagctccctcatcgcttgctaccagctgcttccaagcccaccagcaaagcagagcaagtgaggactcccactccaagcactgtttaccaggaaaataatcccccccggataggtttgatttggttgccacatccccttgtatggcagactagactaatatatgtaatcatcatcataataattgataaaccatcccactatggataggtttggtcactccaaacactaattttttttattcatcgctctccaaaagcatgctaaggcccgtttagtttgatggactaaacattagtctctctattttagtctctaaattgtcaaacgatgagactaaaataaagactaaactgtttaggctctagtcactcaaagggactaaaagtgactaaaccatattaattctattttgcctctcctttattttagttgcactaatgacgggagaatgttaagaggtattttggttctcttatgaattaagcggcc

SEQ ID NO: 164315 - DNA, 928 bp, Zea mays
  Clone ID: MRT4577_81431C.1
tcaacgaccttcatgctttgatcagccctcctgccaaggggactccgctcccgctgatcctactcgggaaggtatgaacgcacgggaaacttgaggatggttttttgttctgggcttctctgactggttttgttgcccgcgcgcgcgtttgcgttgcagtccaagaacgcgatgctgtcgactttcctcttcctggaccagatcgtgtgggcggggaggacaggaatatacaaggttctcagagaaatcacctttgtggaagccgatgccgctttactccatgacgatgaactaactaactaaccggaccatgcttttacacggatgatgcagaacaaggagcgggcggagttcctcgggaggatagcgttctactgcttcctcggctccaacaccttcacggccatcatcgaggtgcgtgcgtgcgtgcgtctctgtctcgagtgccgtattatctcgtgtttccgcacctgattcatgctccaagccgtgtagctagccgagctgcaacggctgtccacgtcgatgaagaagctggagaaggagctgaagcaccaagagctgtacaagaacgagcagtaccgcatgaagctgcacaagtcgaacgagcggctgctggcgctcgtcaagtcgagcctggacatcgtggtggccgtggggctcctgcagctggccccgaagaaggtgaccccccgcgtcacgggcgcgtttggcttcgccagctccctcatcgcttgctaccagctgcttccaagcccaccagcaaagcagagcaagtgaggactcccactccaagcactgtttaccaggaaaataatcccccccggataggtttgatttggttgccacatccccttgtatggcagactagactaatatatgtaatcatcatcataataattgataaaccatcccactatggataggt

SEQ ID NO: 164316 - DNA, 565 bp, Zea mays
  Clone ID: MRT4577_81432C.1
actcctatgggcgattgggttcctcgaggccggccgggtgccaaggcccccgacctcaatgtcggtgacagattggccataggagcactccaagatgaagatcagctcaacaaatgaaatgatcagtaatgcaataagtgaaaaggaaaattagttctaaagcactgaaagatcccaacaatcataaaataccaccaaaatgtcacgccaagttagcataacagaacaggatgacaagtgtaccctgaactcactcctgaactcagtcccccatcaccactgacctggtctgtgacaccacctgatgccattggctttcccgccagcatgagcggtcacgtacgactgtcccaggcactcaagctgcggcttgctcctttggcaccatggtgttgaggggtattttttgtcttagccgtcaccgttgatagaaaaatgtaacagagtgctaggttcaattaaagtttggatgtttcagtggtgttttacagttgtgtgatctttcaatggtattttaccattctcgtggtcttttcgcaaaaaaaaaaaaaaaaaaggggcggcc

SEQ ID NO: 164317 - DNA, 244 bp, Zea mays
  Clone ID: MRT4577_81433C.1
ctgcgagagaaactttaggagagattaatagctacttttagccattgataatttaaaccagagagctaatgggggcaattgaaactgggctttagcgcttcaattcatttaccttaagtttaacaggaagctaaagtttatcccgggagattgaaaccgggccttaatggacatggagcttggaaacaagaactcccggtatctggaccctccccagagtgctgcttaatccaatttcttttta

SEQ ID NO: 164318 - DNA, 227 bp, Zea mays
  unsure (1)..(227): unsure at all n locations
  Clone ID: MRT4577_81434C.1
tcccggngtcgnacccacgcccgtccgcccacgcgtccgnanctgnattctgatgtgtctcaatncaagtgcaggaataggttntgagggttgacatataaggaagctgtcctgtagcagtattgaacaccgtcgtacattacatgtccattcttgtatgatccgcagggtgaatccagtgttgtagttctcgagctggtaaaggtagagtcttgtgttgaaaatat

SEQ ID NO: 164319 - DNA, 348 bp, Zea mays
  Clone ID: MRT4577_81435C.1
gcctagttaacttaattgccgcgctataaaaggattgaggtggattacagaggcttgcctggccacatcatttgaaacggctccaaagggatgcaaccgttttcaacacctagaggtcaaccgctaaccaaccaagccttaagcctaaaacggacactgttgaaaaggccctaatcgcacatataaggtcactagctattggaacttaagacaccaacattgggacaaaccagttggataaaatcggtttcgtgacatagcaatctcaggaaccacacacggcatgaacgtaacatcagacagctcgtataacaactgcactggatgcagagactgcaaaaacaaact

SEQ ID NO: 164320 - DNA, 978 bp, Zea mays
  unsure (1)..(978): unsure at all n locations
  Clone ID: MRT4577_81436C.1
cgggctctatgtcgncgagtgggcgnacgccgccaccgccttncgccagtcgccaggcgctcaggttttcatcttcgggcccttcaccggcgaccagcacccaacaggtaccccaccccttctcttccgttcctgctgtgcggaaccgagcgcccaaacctagcttaagctatttgcattcgtatctgatctgatacaattacttagtgtatgtttcgatccattagtattaaacattagctagctaataactgctattttttagctagctaattttagtagtgggtgtttggattcactagctaataaggtggttcgacagttaattgctattagcacctattagcaacttcaaacctgctagtggaactaataggtaccagcaccatctaataattagcagttatatttggatccactagctagtactagttttagctgctaatttttagtgaagagtgaaaacggacccaaataggccctgtgtagtatacatgttttgtgcctacaaacttcatttttttcatattgtataaaatattatttggtgtacatgtgtatacacgtctttcactgggttcgtcaccttgttgcagttatgttccaggcttcctgcaacaagccttgatctctggcccatttctgcacatagaagtaggaaagagggcataggatgttggcatgctgcagcttatctgagaaccatcgtgattagatactaaccgatgaacatcgagctgggaagcaagggacagttgctaaagtcctcaaattggtgttagtagtagcagcagagtcaagaaaaaactttgatagtgaccatgcttaacatgagtagncttttttctcccaagtgatgccttgctgtactttagcccatttctgatcctgtcctactaaaattgccatcataggttcgtggtgtattatttttcctaggaaaacaaaatcttctacatacacaaattcttttgtatt

SEQ ID NO: 164321 - DNA, 323 bp, Zea mays
  Clone ID: MRT4577_81437C.1
aaaaaaaaaacctgaggggctccagcataataaatttgtcaaaacaaacagcacatgaagcttttcccccttgctttacacatttggaaaacaaatattttttgtaaccaaacccaggcaaaactgttccctaaatcaaaaggttcctgcctccacctggggtttttttttcacactttatttatgggctgaatcgacaaaaaaacccctaaatccatcacaaatgtcactactttgaaaaccaggtccttacccctggaaacatggaccctgcccctgccattgggggtaaaacggggtgtgatcttgcctcatttttgccc

SEQ ID NO: 164322 - DNA, 284 bp, Zea mays
  Clone ID: MRT4577_81438C.1
aatggatcaaggcaccatcatctcaaagcaattcaggtacatcatcacccacaagtcacaaggtcagcccatcgatgcccgtaataccgatgccagcgctgatagcatgagtatctatgacgatattgatgctgacgcgctgcaaacttacctaggatacaatctggccaccatcatctactacgctctgcaggagtccaccactagtgagcagagtgccaggatgacagccatggacaatgccagcaagaatgcttctgagatgattgacaaattgacatcga

SEQ ID NO: 164323 - DNA, 501 bp, Zea mays
  Clone ID: MRT4577_81439C.1
ccggccgggtaataaccggccatctagctgatgcagcggttggccacttgatgcaactagatttttttatatgggtccgtgagtcgccaagccactgccgaatgcagataagcatcagggatatggaggatagcaacaaacagcatcaggtccagactccagactggtaaagcaaaaaaaggctacagctgttaaggcattttggataaccgtgtgcattttcactacactggacgacctaagattcagaaacagaatggcgtatttcgccacgcgttttggaatggcgcgggcaaaaaggaaaaagagtcgcacaaacaaacaaaaaatctccagacttttcactttaacaaagcggaaggaagtgcctgcgcaacgtggcattctggttgcctcaagaagaatcaggactgcgaaaattgtattttgccgttcctggatggaatcgcggtgcgtagtaatcgccgtttctccaaaaaaaaaaaaaaaaaaggggcggcc

SEQ ID NO: 164324 - DNA, 247 bp, Zea mays
  Clone ID: MRT4577_8143C.1
atttttttttttttttttttttaaagtcatacaatgttcagagatgataattctagcgcttatagtagttgttgagtcaaccgacatggtcatacaaatttatagagtacatcagtaattgaagagctacggaacgcttaaataaaaacagagctgcaaatggtttagcggtttggttatatgtacacaaaagcattcatgctccaaaggggatgatgctcatcataggtatgcaaaatagttacct

SEQ ID NO: 164325 - DNA, 789 bp, Zea mays
  unsure (1)..(789): unsure at all n locations
  Clone ID: MRT4577_81440C.1
cgcaccgcggatccccaccctcctcccctctgctccccgccatcaacgggcaagcggatgccgcggatccccccaccctcctccccctatgctccccgccatcaactagcaccgaccctcgcccgtgatccatcctcgcccgatgtccgtgatccatcctctcccccgcggcaatctcgggccctcggcaggcaccctctcccccgcgacaatcttccccacgccctcggcaagcgatccacgaaaagcgccctctcaccggcgaggagcacgtggcggcgccggcggtcgaggagacgtcggagaagaagcaggccagcacaaccgagctggtcgcaccctcaggctggacgaagaagagctatgcagacaagtggtggaggcctggtggtaaattgtttatcaagatcgctagagcagttaaatttactcctattatcttctgggataaatttggcacaccattccccttcccaaaacccatgcatgtggtcgtgggtaaacaattgaagtcaataagattccccatcctacaattgacgagattaatgaagtccatgaacagttcatcattgccatgcgggacctctttgagaagtacaaggcgaaagctggatatctcggccttcatctacgagttctatgacattccacaaccagactcaaagttagaattcagcaataacatggctctattactcttccctcaactggggtgtcaaactgcacctcgcaggcactcgggcggtagntgttgcattatggtgatgataataaggctccagcacc

SEQ ID NO: 164326 - DNA, 1698 bp, Zea mays
  unsure (1)..(1698): unsure at all n locations
  Clone ID: MRT4577_81441C.1
tgggaacaattgatgaaggatgagatgacgatgaggactatcatgttccnntgaagctgatatagnaggcgacggcctccgaggcggggccgcaacgccgaagtagccaagacaacacgagcagcgaaacgccatctattcccgactctgctgcacctgcacctccgggccgccgccgagatgggcgcggatggcgggctgaaccgggcggcggagaagcccagggatggagagggcggggaggcgagggtgttccggtgcacggactactcgctgccgcggacgacgctggcgctggcgctctggctgggcggtatccacttcaacgtccttctcgaccttgcgtcgctcttcctcctctccggccgctccgctgccatagtcgtggcgttccagctcttgttcatgtacgcgcccggtcacgacaggcttaaatggggccagagcgctaccaggttcatatggagaccaggaatgggctacttccctataacttgatgattagaagcgtacgagtagtttgatttttgcatagtatcttcgggcggtgatttggcacactaatccccttcgctagaaacccatgccatgtgttcgtgggtaaacctattgaagtcaataagattccccatcctacaattgacgagattaatgaagtccatgaacagttcatcattgccatgcttgacctcttagctaagtacaaggcgaaagctggatatcctggccttcatctaagagtcctatgacattccacaaccagactcaaagttagaattctagcaataacatggctctattactcttccctcaactggggtgtcaaactgcacctcgcaggcactcgggcggaagttgttgcattatggtgatgataataaggctccagcaccgatgccaaaacatgcacgagttggtcacgagtcagagccttttgttgctggcttaacttttttctttaatgttgcaaagataagataatgtaattactggttatgtgatgttgcatatgatatgagaatattgggtaagcctattgaagtcaataagattccccatcctacaattgacgagattattgaagtccatgaacagttcatcattgccatgcgggacctctttgagaagtacaaggcgaaagctggatatcctggccttcatctaagagtcctatgacattccacaaccagactcaaagttagaattcagcaataacatggctctattactcttccctcaactggggtgtcaaactgcacctcgcaggcactcgggcggtagttgttgcattatggtgatgataataaggctccagcaccgatgccaaaacatgcacgagttggtcacgagtcagagccttttgttgctggcttaacttttttctttaatgttgcaaagataagataatgtaattactggttatgtgatgttgcatatgatatgagaatatgaggattggtgatatataagctcctgtacatgcagctgtttggtttggatcttggcttcggcttttgccccctaaaagccattgccaaaccaaagggctgaatctggaaagcagctttctctaaaagccgacttttttggagtgcaaaactaaaagcacctctggacctgcttttagcagcttttaggtgaaactgtgaaaatatatatggaataatttttatcaaaaaaaaaaaaaaaagggcggcc

SEQ ID NO: 164327 - DNA, 211 bp, Zea mays
  Clone ID: MRT4577_81442C.1
cggacgcgtgggatgtggtgataaaaaaaaacacaaaaataaaaaaaaaaaaaaggggggtacctctactatgatgctcgctctcatcagcgtcgctcccacgcgactacctgtttgtgatctgacatatatccattggagagggcgtcattctataacgtcgtgtctggtgaaacacctaacgttacacaactggctgccgttttataac

SEQ ID NO: 164328 - DNA, 1168 bp, Zea mays
  Clone ID: MRT4577_81443C.1
agcgcctacagtcgcgtcgcaccgcggagcccccaccctcctcccctctgctccccgccatcaacgggcaagcggatgccgcggatccccccaccctcctccccctatgctccccgccatcaactagcaccgaccctcgcccgtgatccatcctcgcccgatgtgcgtgatccatcctctcccccgcgggaatctcgggccctcgggaggcaccctctcccccgcgacaatcttccccacgccctcggcaagcgatccacgaaaagcgccctctcaccggcgaggagcacgtggcggcgccggcggtcgaggagacgtcggagaagaagcaggccagcacaaccgagctggtcgcaccctcaggctggacgaagacccaatccttggcacgagggtgtacgggaaatgcttcatatgaacaatgattcagaggttgcttttcttaaatcaagaaaaggttttgtcaagatagctatacagtctggatgtcctttagtcccagttttctgctttgggcagagctatgcatacaagtggtggaggcctggtggtaaattgtttatcaagatcgctagagcagttaaatttactcctattatcttctggggtagatttggcacaccattccccttcccaaaacccatgcatgtggtcgtgggtaaaccaattgaagtcaataagattccccatcctacaattgacgagattaatgaagtccatgaacagttcatcattgccatgcgggacctctttgagaagtacaaggcgaaagctggatatcctggccttcatctaagagtcctatgacattccacaaccagactcaaagttagaattcagcaataacatggctctattactcttccctcaactggggtgtcaaactgcacctcgcaggcactcgggcggtagttgttgcattatggtgatgataataaggctccagcaccgatgccaaaacatgcacgagttggtcacgagtcagagccttttgttgctggcttaacttttttaatagatatatgcccgtgcgttgctacagaatcatggttatgtgatgttgcatatgatatgagaatatgggcgggggggcggcggggcgtgcacgggggggtgcgggatggggcgcgtcatcggggggcggcgggggagcgtgggggggggggag

SEQ ID NO: 164329 - DNA, 400 bp, Zea mays
  Clone ID: MRT4577_81444C.1
acttgttttttattatatttttgtcattgaactttattacgcattgtttatgttcattttgtgtattataatcaattgtgctctgttttcaatataaaatttttaaaattaaaaaaaaaaaaaaaaaaagaaaaaaaaaaaaaaaaaaatatccaaaaaaaaaaaggaataaaaaatgtcccttggccgaaaccacgaaaaaggcaaaataaaaaaaactgggggccgaaccaaaggagggcgaaatccgaacacaaggggggcggaaaataggaaaaacgagttcctggccaaaaatggtaatcccttgaaaattccgccctccttggggaaaggaaggtaaaggggaaaagcccgggaggcctaagaggggaagaaaaaacaaaaaaatggcgggggg

SEQ ID NO: 164330 - DNA, 507 bp, Zea mays
  unsure (1)..(507): unsure at all n locations
  Clone ID: MRT4577_81445C.1
tggcttggaacctttgggctgatttatgtgcttgtgccccctacttgttcctgttcttaattgtgcgtgtcttatgttcttcttaggaaagtgagagtcctcgtacaagaataataaactaaaagtgcgactagtctggcgttaataaaattctaataattaagccctacgctcgactctgatgcttagtccttactcgttcccgacttgcccgtcgaggtaaacgtcgaggatctcggcgtcggcttcggaatgaaggaccacgcgtacgcgtgtacttagtagtgtaatggtagaaagagctcgatcatagcttagggctcgaagaaagagcctagtcacaataagacttctaaggactcgaagaaggaacctcgtcgtaacggcatcgcagcctaggatttagagtcaggttaggctacctagtcttaaggcgactagtgtangaacgccgtcatcccttcagcctaagtcgggaacgtgaagaaggagaatactaagacctat

SEQ ID NO: 164331 - DNA, 431 bp, Zea mays
  Clone ID: MRT4577_81446C.1
gggtgtgggttggtttttttttatttttttttttttttgctattttttttttttttttttatacgcaccgcatgggggcattaaccaacccaactaatacaaaaccaatacagtgctccttgcaaggcgctacacacaccccaaacaaccgaaccatgcggtgggggaggttgaacactagctttaccctacaacactaccacggttgattattgatggaaatggcactctggtctgactgcggccttccctacttgaccctgtcccaactctcggtcttcctcactcgtacgctccaatggcctcctcccctgctcggcggtgcccgtgctgcggcttccctggttctccaccgctgctacttgaacgttctgctggacgccacgccccacaccggctttatgtattgccgctggctccccctgctgctc

SEQ ID NO: 164332 - DNA, 323 bp, Zea mays
  unsure (1)..(323): unsure at all n locations
  Clone ID: MRT4577_81447C.1
ttttgctctttacactgctccacacaacataagatcagggcaagcaataacagagcagtgggtagcagcatnatggctctcttctgcacagtcttcgacaggaaggcattgaaccacccgaagtatttatccgttgaggaccacgtgaccttgctgacgacggtggtccaagcacagcactctgagagctactggagccccacgtatcggacccgaccgggtgttctccctaggcacagtgaccatctcgccctcgtgctacctcacgggcgtgatccccggctactccaggtgatgcacactatgcttgatcttgtacccga

SEQ ID NO: 164333 - DNA, 306 bp, Zea mays
  unsure (1)..(306): unsure at all n locations
  Clone ID: MRT4577_81448C.1
aactctagtgtattgttcctaccaagacacatcctagaggatgcatctccaggagagagactggatcatncanttcctcaccatcttctttaagggccctgccaagaactaagagaacgggctgctcatcctctgtgtcgccggctgcgatccaagggtccaaagcgaagtgaccgcgcctctcgcctatgataacgtatcctctcccttaataattcagactgcatagcccctgatctctcactttttgcaaagatgttcggacatattcatatatattccttgtcttttatcttatattggaca

SEQ ID NO: 164334 - DNA, 870 bp, Zea mays
  unsure (1)..(870): unsure at all n locations
  Clone ID: MRT4577_81449C.1
tttttttttttttttactcaagtcagcacttatgctccttttcatttccagaactttagtgaagtacaaataaatgaatagttgcagtaagagcaaaggagaagaccagatcactcaaaatggcaggaacaccttctagcatcactagcctttgtaaactgagatgaaatctctgccacaacaagctccaaatagaatcaggcctagagcagctgaacaagtaggtgtaccattagttcatacacttggggccaagggggaaaaaaactgaggcatgcaatcagacaatgctagtttacatttcgcttttcagcactgggactgggagctaatagacatgacgatattgcaaaaaaattggatgctgccttgcactgaaactcgcagggatgcttcacttgcattctagtcctgcctctgctgctcgccggggcttgtttttccgccggctcccgatctgcctgaacccgttggtccttgttgattcatcactgctcgatgggacaatagagttgttatcttctacgacaatattggagccctctttcaacggcctgcctctcttgttaccgccagctgcggcgctgttcttcagcttgccatcgtcagcttcttcttggtcgccgtccaccttttctacaaaattttcaacatcgactgcctgatcgatcttactggcgaagcgcttttggggccttcccctcctcttttttgcaggcacaacttcttcgccgctgctacctttatcttcggggctcctgacagtggttannnnnnnnnnnnnnnnnnnnnnnnnnnnnnnnnattcaatttcagcagtttgcaaatatcggtcggtccaatcactggagccgcaggttctggtgaagt

SEQ ID NO: 164335 - DNA, 828 bp, Zea mays
  Clone ID: MRT4577_8144C.1
ctgtcggccggaatttaagcccggccgggatccccccgatcactctttcactctactccaaccactccgcggaatcgtaccttacccagccttcttcctcgtcgccgggctcgccgccagccatgtcggcggcgttcaaggcgttcctgaatagcccagtgggccccaagacgacccacttctggggacccgtctccaactggggcatcatcctcgcgagcgtggcagacacgaaaaagcctcctgagatgatatccggcaacatgacaggagtgttgtgcgtgtactctgcgctcttcgtcaggttcgcgtggatggtgcgacctcggaactatttcctcatggtaacccacagctgcaacgagtgcgttcagctctaccagctgtcgcgctgggctagggcgcaggggtgagtgagcgagtgagtgaggcttttctgctagcttcatccattcatagccttttcaagctctttacaacctcgcaacagctagctcaacgtaacgagcatattggcattaatttgcactgcaatcctccatgtttggatatgcatggttctgtgcaggttctttgagaagaaagaagaggagaggcccaagagcgaagattgaccgacggcccggccctaaaccatagtctgaccgaacaagcatgctcctgcttcgaccgtacaatactacaatgtcgtactcggttgtacttgtaccacaaaggcaatatttgatgcatgtatgtaacgtgaaaaaagtctcggtcgttatacatgttgtaggttcatctgtggatactgaactatgaatttccgagcataaagcatcaatttcc

SEQ ID NO: 164336 - DNA, 574 bp, Zea mays
  Clone ID: MRT4577_81450C.1
agcagtggtaacaacgcagagtacgcggggtgagctgtgcagtgtgaacctcgtgatctcgctgactcgttgacctggctggccacagaagcccacaggcccagcaaggcccagcagcagcagcatttgccgcgcttcagctcccattcattgtcatcgctcgtcaatcaagtgttcaaaaggagcacagggaagtggcgtccatgcagcctctgcctgcctatccagtccagtggctacttgtgcttccttggagtcagtagggtgataatagatagagaaaatcccttcaatgccatcaaaacttataccaatccctttaatgccatcagaatttatagcttcccttcaatgccatcaaatttaaattttaatctcttgaatgccattaccgttagtttggagttaacgccgttagttcgatttaaagtcaatctctccaatgccattaaaatctatattgatcccttcaatgccactagaagttgattcgatctatttgggattaaaaaaattccaaaaaaaaaaaaaaaaaaaaaaaaaaaaaaagtactctgcgttgttaccactgctt

SEQ ID NO: 164337 - DNA, 281 bp, Zea mays
  Clone ID: MRT4577_81451C.1
ttcggctcgagctcttacagaatctatagttgacaagtgtttcaaccaaacagctttcagctttcccacaacagctttcccttatttcatagctagaataagattttcaagaatctgcagctgcaccaaataaaccctctgttttgcaatgtgggtaacttggatatactagaatacaggaatataatccattcccaatctaatttgacgacctgtcatgtttggagaagtattcaggagcttcttgttgtatcaaaaacatgtttctgactttggcattg

SEQ ID NO: 164338 - DNA, 596 bp, Zea mays
  unsure (1)..(596): unsure at all n locations
  Clone ID: MRT4577_81452C.1
aattcggcacgagggtcagctctaactaatcatccattcacgtttcctggaaaaaaacaataattcatgttcatctgggtctcgatcaatctcaacgtcgcagcctttttggctttccggtcttttggtggtgtactggtggctggctggctgctgaatcgtcgctgtctctctctctctcgctttcggcagctcagctgcactccacagtctgcctccactccactctccaccttttgccgtcgccttcctccccttgccttccctgtgccctcccctccctcgcgccgcaaaaaacgccgcagggaggaagaagagagagagagagagagagagagagagagagagagagagagagagagagagagagagaaagagagggccaggctgagcttactggcggcngagctggnagaaagaaggnaaggnagcnnatggccatgccnnggcggcgctgctacctcnnttcctcctaagtcctctncnncgccttcgnaggcccggggaagcttccacgccctgcnnncggctgctnngctgcagggtaaaccccggcagtcctttcgtccatgnatgaacttgnagnntccggttca

SEQ ID NO: 164339 - DNA, 191 bp, Zea mays
  Clone ID: MRT4577_81453C.1
gtcgccgacccgcagtggggccgtgctcgaagaggaggcggaggtcgaccagcagggccagtacgacgacgacgacgggtatgagggcgggcgcggcccctcgttcacggtccccacgcgcccgcgcaccggcaaggccgcgcttctgcttaagcgcgaccgcacgaggtctaataggtttctcgagatac

SEQ ID NO: 164340 - DNA, 474 bp, Zea mays
  Clone ID: MRT4577_81454C.1
catatcgacaaggccaaagatggcttgacccccttcaagccagacaaatcaccacgcctactcccaacgaactgcccaactgtcttgctcatcgatggtctcatacatcccaccagacctgaccttgaacactcatgcccgaggccgatacctgaacgcccgccaacatctagttccacacacgttcctctccctcataggccggataacgaagaacatcgactgccaagacgagtctcctgaatgcgccagctcgttctactccgacgacacctcgttcatctctgcgccggcagctccgatcacacgatgacctctctccgagatatacctcctcatccaagaggaccaccttactgatccgagagtgctatcgctatacacatgcacaaatccactaccaagaatgcgcccaagacatgatgcacagatgagaagaacctgcagcaagcgaataccaccgcgcgtcaattg

SEQ ID NO: 164341 - DNA, 2493 bp, Zea mays
  Clone ID: MRT4577_81455C.1
aaccatactctgctgtttataataccgattcttctgcagaagcatctagaagagaagcccttttagtaaaacatgtgaaagaaaagctgagggagcagggttttgtagaggagagcatcaggacagattcatacttgaatttgaggtatgagggaactgatacagccataatggttagacagccagagcaaggatctggaaatgactatgctgatgagtttgaaaaattatttcagcaagagtatggcttcaaattgctaaacaggaaaatactcatatgtgatgtgagagttcagggtgttggtactacaaacatcctgcagcctcgtgaactgacgcaaatatcaaccaaacctgtgcaagaaagttcatgccggatttatttttcaagtggatggcaagatactccgctgtacaagcttgagaatttgggttatggccatctattggagggtcctgcagttattatgaatgggaatagtactgtgatcatagaaaaagactgtaaagccataattacaaagtatggtaacataaaaatagatatcaatgcagctccaagcactgtatcgatatcagagaaagttgcagatgtggtccagctttctattttcaatcaccgattcatgggcattgctgaacagatgggtcggacacttcaaagaacttcaatttccactaacataaaggaaaggctagacttctcttgtgctctctttggtccagatggcggccttgttgcaaatgcacctcatgtccctgtgcatctaggagccatgtctagtactgtgtgttggcagcttaacttttggggtgagaacctcaatgagggtgatgttcttgtaacaaatcatccatgttctggggggagccatcttccagacataacagttgtcacaccagtttttgatcacggtaagcttgtcttttttgttgctagtcgaggccaccatgctgagattggtggcatcacgccaggaagcatgcctcctttctcaaagtgtatttgggaggaaggtgctgccatcagagcatttaaacttgtcgaaaggggtgttttccaagagaaaggaataatccagctgctgcagtcaccttgctctgatgaacttgctggctataagatcccaggaacacgtaggatccaagataatctttccgatctccgtgctcaggttgcggcaaaccagagaggtatagcacttatcaaagaactcataaatcagtacgggttgatcactgttcaatcatatatgaaccatgttcaaaagaatgctgaggtagctgtcagggagatgctcaaaacagttgcgtctagagttgcaaaggagaatggatcatgtgttgtcgaggatgaagattatatggatgacggctctgtcattcacttgaaactcacccttgatgctattaaaggtgaagctacaattgacttcgagggtaccagtcctgaggtctatggcaactggaatgctcctgaagcagtcacaacagctgctgtcatatactgcctacgctgcttggtggatgttgatataccactaaatcaaggctgcctagcgcctgtgaagatcctcattcctaagggctctttcctctcaccaagtgacaaggctgctgttgttggtggcaatgtgctgacgtctcagagagtgaccgatgttatcctaatggcgttccaagcctgtgcctgctctcagggctgcatgaacaatttgaccttcggggacgacaccttcggttactacgagaccatcggaggtggatgtggagctgggccgacatgggacggcactagcggtgttcagtgtcacatgacaaacacaaggatgactgaccctgagatctttgagcagcggtaccctgcccttctgcacacatttagcatcagggagaacagtggaggttctggtttacacagaggtggtgatggccttgtaagggagattgagttccggcggcctattgttgtgagcgttctatctgagagacgggtgcatgctcccaggggactcaaaggaggacgagatggagatcgtggtgcaaactatttagtcagagaagatggtagaaagatttaccttggaggaaagaacactgtaacggtcagtgctggtgatatccttcagattttcacgcccggtggcggtggctttggctgtccttgatggcacttcctgcagacgcggaccttcctccatttgtttcctacctttgtacaccagtagctctatttagatcgcgattaaaataaaacgtaataaaaccgccaacaactggagattccttatgctattgttgctccccgaggcattggatccgaatgcagcatgaatggtgctattgtttatcagatatcatttatgtgaaaccagcaatcccaaaattggtgatgaatgatgcttgctctttcttcttgttttgatattagtcggaaattgccacgctaatcttttatcgtttgtgtaaacatgccctcgtatgccttctcat

SEQ ID NO: 164342 - DNA, 1530 bp, Zea mays
  Clone ID: MRT4577_81456C.1
gaacaagaggtgacaagttgtgttgctgaaatattatcagaaaaagtgcatgcttctgaaatggtaggcactgaaggttctgaattagatatatcaactattattgctgacttatttgaccaaaaaggtgggcatcttagtcctgaagcattgaagcattacttatctgctggggagaagctctacaaaatgtccagcaagatttacaaagaaatctgttatttcgaggcatccataaaaaggcctttttttaatgtcaagacacttgatgatgatcagcttgaaaactggcaccagtatcttgactttgttgagaagaatggggattttgactgggtattttttttggctgtaaaactttatgagaggtgtttgatcccttgcgctaattattcggaattttggatccgctattcagagtatgttgacgctaaaggtggccgagaaattgcaaaccatgctctgggtcgagcatcatcatgttttgcgaaggcaggttaaagtattgaggaggcaggtaattgctcaagacagctgaagcctcatgcatgcatgggggcctagcaccgaagtgctcgatgctctcagaacaagttgatttggtggaagagttagggaagagtttacaaacacaggctgagtactgcgcaagaaacatactgtctccactagaacagtggtccaggctcttgaaggatggcattggatcagtgacatcttgacacctctttcctgggctgggatccaacagtttttgctgttatgggatgctgtaagaagagtagtgttaacacaggaggctgatacacatatctgactgcatacttcttctggtcaattctcctccaagtcttgttacaaggccttttttatgggatccattacttttgaaccttggaagaggctgtggaaatcttgggctcctccaaagtgtaagtttttcttgtggctggctattcggaataaatgttggacatctgatagattggaaaggagaggtctggaccacccagagtcttgccttttatgtgatcaatcacaggaaaccatccagcatcttttgtgtacctgtgtctttgcaagacatttttggcattccgttcttttggccttgggtgttggtaatctctctccgtctggagatgagacctcctttgccgattggtggcgaaaatcaagtaagaagattcataaaagcaagagaaagggtatgaacaacatcatcattctgggggcctggtgtttatggatccaccgcaacaaggcagtcttcaatggggagaccccttcgctgagctctatcagatgcgtctttcttgatgagatgggatgttggattacgactggagctaaacatcttcagagtttcgacattgagatcacgcgtaacttacacagggcctaatttgttgggggaggatgtagtgtgtgagtgggtgttttgttgggcctgttcagggctttgtaccttggtccattttggaccttttcttctctaattaaatgatgcgcagttctcctgcgctttcg

SEQ ID NO: 164343 - DNA, 3605 bp, Zea mays
  Clone ID: MRT4577_81457C.1
tattcggcacgagggtcttacaccacaggagagcaaccgtttagagacttcgggtaagacacgagcccaataccacggccctgccagcgatggccacattggcgccaccggcggtggaggtggagccggaggccgatgccatggccctggcgtcggaagccgcggcgcctgagctcccatcgtcgcattcgcagctcgattttttcaagaccagagttcaattattgtgtgaaagtaacacgagagattttgatgcttgggtatcattaataaatgctgcagagggaacatcagcagatgacatagaagttatgagcttggtataccataacttcttgttggaatttcctttgtgctacggttactggatcaaatatgcagctcataaggcacgactatgcacaaccagatatgtaatggatgtttatgaacaagctgtccatgctgtacctcattctgttgatatttgggtcaactactgtgagtttggtatatgtgcatttgaagaacctgctcatgtcagaagtttatttgagagggctttatctcttgttggaaaggactatttgtgttatcacctgtgggacaagtatatagaatttgaaagctctcagaagcagctgattcatcttgccaccatttttatcaacacactaaaatttcccacaaagaagttgcacatgtattatgaaagttttagaaagtttgtaacattattggaacaagaggtgacaagttgtgttgctgaaatattatcagaaaaagtgcatgcttctgaaatggtaggcactgaaggttctgaattagatatatcaactattattgctgacttatttgaccaaaaaggtgggcatcttagtcctgaagcattgaagcattacttatctgctggggagaagctctacaaaatgtccagcaagatttacaaagaaatctgttatttcgaggcatccataaaaaggcctttttttaatgtcaagacacttgatgatgatcagcttgaaaactggcaccagtatcttgactttgttgagaagaatggggattttgactgggctgtaaaactttatgagaggtgtttgatcccttgcgctaattattcggaattttggatccgctattcagagtatgttgacgctaaaggtggccgagaaattgcaaaccatgctctgggtcgagcatcatcatgttttgcgaaggtatcacttggtaacatatttgacattttacaccttcccatagttttgaaattgtgtaaggaccctatgtccttgtgtgttatgtgcatggttggatgtggatctaaggacgaagggtacaatacctgctctcatcttactgctggcatgggcaacagagctcctccgtgtggcagtcgcttggaggcatggttaaggagggagagaccagataacttctttatatatacaaaaatctcttagcaatatttgaatatatatgataacttatacaattcacaacccttttgttgccaaaattaatcatttgtgttgtgaaaatatgcatgttgcgttaggtttgttgtcatacaagaagggttctgagtccagaactatgcataggtgataggctaggggtagcaccaattaaaaaaaggcttgttcacactggttgagatggtttggacatgtccaacagagacctctagaggcaccggtgcgtaatgggatcctaaggcgctataacaatgagaagagatgcagggagagtctaatgttgacatgggaagtgacaataaaagaaggcttgaaaggatagaatatacccaaagatttagctttgaagattagtacatggaaaacaactatccatatgcctaaatcttgacttgtggttccgtgtttctgtttttttccttctgtcttctgttatggttcctttttatataataaaattgtgctgtaggggtttcccctatagccttttcccttaaaaaaaactctagcgtatcccaacttacttgggataaaaggcctttttgttgttgtatagaaacagtcataagaactgttggaaccagggatttattgctcagaattgaaagattacagaggaagggttgggggagaattatcactcagccgcctatggctcggtaatttcttctctgccttacatcctgcatagaggcctctatttataggctggacagatctacttcacccctaagtaatccccctaaaacaaatcctaacatcccaaatatgatcctaactgaataggaaactatctcaacataacaggaaacaatctgaacaaactaggaaactatccctgttttttttctttcttcctgctactgtagctcgcactgctcacgtggtgaccagatctggtgccacctgaacctccccttgtgccggctgggccctcctaggcttggccctgtgctaacgcatgcacaacaagaactgtgacttttgatcactaatttctaatgtaatatatctctatagtaccgtgatactacttttcaagtccaatgtactccctcagttccgttatacagggcatgttcgcatttttgcttttggccatattactaggcaggttaaagtattgaggaggcaggtaattgctcaagacagctgaagcctcatgcatgcatgggggcctagcaccgaagtgctcgatgctctcagaacaagttgatttggtggaagagttagggaagagtttacaaacacaggctgagtactgcgcaagaaacatactgtctccactagaacagtggtccaggctcttgaaggatggcattggatcagtgacatcttgacacctctttcctgggctgggatccaacagtttttgctgttatgggatgctgtaagaagagtagtgttaacacaggaggctgatacacatatctgactgcatacttcttctggtcaattctcctccaagtcttgttacaaggccttttttatgggatccattacttttgaaccttggaagaggctgtggaaatcttgggctcctccaaagtgtaagtttttcttgtggctggctattcggaataaatgttggacatctgatagattggaaaggagaggtctggaccacccagagtcttgccttttatgtgatcaatcacaggaaaccatccagcatcttttgtgtacctgtgtctttgcaagacatttttggcattccgttcttttggccttgggtgttggtaatctctctccgtctggagatgagacctcctttgccgattggtggcgaaaatcaagtaagaagattcataaaagcaagagaaagggtatgaacaacatcatcattctgggggcctggtgtttatggatccaccgcaacaaggcagtcttcaatggggagaccccttcgctgagctctatcagatgcgtctttcttgatgagatgggatgttggattacgactggagctaaacatcttcagagtttcgacattgagatcacgcgtaacttacacagggcctaatttgttgggggaggatgtagtgtgtgagtgggtgttttgttgggcctgttcagggctttgtaccttggtccattttggaccttttcttctctaattaaatgatgcgcagttctcctgcgctttcg

SEQ ID NO: 164344 - DNA, 1374 bp, Zea mays
  Clone ID: MRT4577_81458C.1
gtctgcttcatcataatgttacacattgttcaagaccatacatgagaacaagggtgggttgtgcaaaaactgcaggaagtaaagacaatggcgtgcttggcgaagacggtttggcacccaagtttttcactaaagaacaaaatttcggagaccccggtgcagcttaacagtactaggcgtgtgaatcttgttgtgtacaagttctttagatgagcgtttggaaacgatagtagggcgttcttgttgtgtccactaagcgagtggatggaagtcacaaaaaatccttatgaggcactcacaaatatggataataagtcatccagtaccattacgtaaacaaaggatattcaaatatgaaggaaacctgacggcccagattcgtgtacaccaaattcagacgaagatacgtactcctgctatctaacctttaagttgaatctgcagcctgcgaaattgatttgaactcgattggtataatttcgtgacacctgcttattccgtcattacacatactctgcgcccaaagagactggactgtacgcttctcttgacataagcgctgcacgtagacccagaacggctgtgaccgtcagggatctagttaggacatgagcaacaacattattattatatcctgggtgtccaaggcgacggcggcacggagagacaggcagggacgccgtagtgcatgaggtctgacctggcagtataaccattgattcgagctcgctcgggggtgagcatctgactctgtggccaaacggaccgagtatataagaacaatgaaaatacagggttctggcgccttaggttcgaggaacgcctacctgcgaggtctcgcgagtctccctcaacgtcccatacttcgtgacagtcggccactaattcgacccgatggggagaggtcttggaaggttgcggagaatgcagggggtcacggccgcaaccccaatggcattctcggccttctatgtagggaacacttccctagactggttaagtacagtggagtgacggacccagcttacaccttcaaccactacgtcgtcgcccccgatgcagtagaccaggacagcagggaattcaacaacaaggcggagcgtgtgaagcaaaagctgtgggatttcttcagatatgaggttgtatacgaggccagggcggatgtgttggccaccacgagctataagaagctcgtcgtggacatgcattacgaggtgcgaatccaagccatcatcagctaccatggcgctccgtccttggtgagaaggtgaccaagtaggatgcccgaaccatgtcgttgactagggaccagtagttgcatgtaaatacatcactttaatattcgtgacaaaatttgcttaattttatcttttg

SEQ ID NO: 164345 - DNA, 561 bp, Zea mays
  Clone ID: MRT4577_81459C.1
ccattaacaaccccgttttaccccccattcagttttcccccaatttccaaaattacattttagggaaccacacaggggctaaaccacactttcccctgggggaggaaaggccccccccaaaccccccctattttttttcctactatccttaacaccttttaaaaaagggcccctttactttttactacatattacccgaattccaatatccacaaaaacggttccgaacataaacagttgttccacggtaaaattttaaaaccaaaatttttttttacaaaattggaccagctcctgcctataaagggccccaagtagctaatcctgtccaataaaacaataaaaaagggttttttttgggaaaataagttaattttccaaggcatccacacgggggacggttgatttgaccattttttctttttaaaacggattttaaaacggttttttttaaagcacctgcactttgtcctcaaattaacccagccgtttaagaatgaaaaaaacacatatttttttgttaagaatgggccaaaaaatggaggcaaaaattcctccttg

SEQ ID NO: 164346 - DNA, 286 bp, Zea mays
  Clone ID: MRT4577_8145C.1
gatcgaaaaggtcaggatcacaccccatcacatctacattcatggtacagtctagattgcgatcacttaacgccgcagtaccgcctacatcaacacacatcacgtcggctcactgcagacacacccatcgcgctgccagcaaagccactgtcgatcactccaccaatgctgcaggcggtggcggcgaccgccacactactgcctcagcagctgctatcaccgtcgagcacgcagccgcattcgtccccggctgtcgcgccgggccacacatccgggaccgggatcg

SEQ ID NO: 164347 - DNA, 354 bp, Zea mays
  Clone ID: MRT4577_81460C.1
attcccggcgtcagacctacgggttcatgcaactacatgctgtctactccccttcaatctcttcaattcaaccatctgtgtggattgaactattctgctaacttactgcgacaccacctgctaccattgatccagttagatcgtgagaaccctgctaccttctacatacatccacagtagtacacgatctaccatcacggcatgtatagcgctaggcacattattacacatgaaccactagatgtcatgctagcaaatcgctctgactaatctaaccatcatctaccaataacatataatcaactagctgcattgaaagatgcctcataagtgatacatcaacaattaccattc

SEQ ID NO: 164348 - DNA, 378 bp, Zea mays
  unsure (1)..(378): unsure at all n locations
  Clone ID: MRT4577_81461C.1
gaggtcttggaaggttgcagagaatgcanggggtcgcgggggcaaccccaatggcattctgggccttctatgtagggaacacttccctagactggttgagtacagtggagtgacagacccagcttacaccttcaaccactacatcgtcgccctcgatgcagtagaccaggacaacagggaattcaacaacaaggcggagcatgtgaagcaaaagttgtgggtaagtcttactatattgtaaaatatgtctcattcgttgcacattcttcaaataagtctttgtatgcaggatttcttcagatatgaggttgtatacgaggccagggcggatgtggtggccaccacgagctgtaagaagctcgtcgtggacatgcatta

SEQ ID NO: 164349 - DNA, 750 bp, Zea mays
  Clone ID: MRT4577_81462C.1
gcttcaaattttgttttagtggaaaaaatactctagtgagagtctgacagttgaaatatgtaatttcgttcctctggctctaagtatatcactgctattttccacagctatggctcagaaagctctccgattggagatttgtcagaagtgtgtcacacagtggtactgtaccctcttgcttgaaattcatccggttctggttatagacttccaatgtcttttcgcagaaatatgatacatcgacacccccttttcagccggcatacacttatgtggatggagattgcacggttcccatagaatcggcacgggtaagatgataaccatccttttgtaatcgtgcattatatgctatgcattgcattcatagtgacacctagttcagcgcaatcctgttcaaatgccagaccaaaatatggtgaagtgaatcttttggtctaggaatggttttgcactgaaggttggacatatctagatacttttcaacgccttttagttcatttggagtaggatttataatggcatatctcttgcttgacttcatcagcgatcactggtcagtcacagaagcaggtttacgtgtactcaccacatatgagtgttgacaggctgatgggttctctgcgaaagaaagagttggcgtcaaggccgaccaccgtggcctgctgtccgatgagaacgtattcaagcttctcaagaaatggctcggtgtgagcgagaagaagtcagagtggcgttgcgtgtctaaat

SEQ ID NO: 164350 - DNA, 397 bp, Zea mays
  unsure (1)..(397): unsure at all n locations
  Clone ID: MRT4577_81463C.1
aaaaaaaaccccggaaaaaacaatgttattccccaaggggcccaaaaaacagggggggggtgggggggggctggccccgggggcccaaaagggggggggggtttatcccggggttacaaacgggaatttggggtcccgggggcctttttatcccccccccccctccctttggaaaaaaaaaaaagggggggggggccaggccggggagcatagtggggaaacagccctcctaagttttgggggggggggacaggcccaaaaaccctctaaaggacctccggggagacgctcgggccctggggggggagttgttaaatcttcgcggcggttttttcctaaaaaccttggaggttggccccgganccccccttgtttttggcaaccttccttggaaacc

SEQ ID NO: 164351 - DNA, 787 bp, Zea mays
  unsure (1)..(787): unsure at all n locations
  Clone ID: MRT4577_81464C.1
cattgggtacctcgaggccggccgggagtgagttcttctccctatctgtgagctttagctggttgctctggtatctctgcagtttgttttgcaagtctaagttccctccccagccacctagttgatcggctctagtgccctgtggtgctctcccttgtttggtgaccacgtccaccaaaaccccacctcactggccaggattcctcgatggcttccttgaccgtgtggtgtttgttccatgctcaaataagacctagacgaagtggtgattgaagaaggagtctactccagtatctgttgatcaagtgaagaagccatctaactgggtagcctgtagagggatctagtgcctcttcactgcaacaaaggatataactttgtgctgctgtgatggtgttaagtgccggtgggctcgaccttcttatataaacggatcctgttaagttatctggtgcacatgcatgccgtctgaggtctttgagacgaggacaggtgcatgtgggcccgataccttgggaggttctgccacaatggcagccgagggatggcccatgaaataatgaagaagcgcgaaaaagacattcatgatgcccaagaagcaacaaaagcagctganaaagctgtggaactcgaaagacggatagctgaactatctcctcccccagagccattcaatccactagccgaccctagaacagagaagtcaatagagattattaatatggctgaagctattatgggatgaagttgttaccaagctactaacggaaaactgctgaaatgttct

SEQ ID NO: 164352 - DNA, 343 bp, Zea mays
  Clone ID: MRT4577_81465C.1
gccacgcgtctcggtttaaaagcgattgcaactcacgcagggcccggcaggagacagagacgaacaagtattcagagggtgctcatggctctgcaaaaagtccttgccacttaccagccgtgtaggctctggtgtggaacacatgcaccactggcaggaagcaattatgggtccataccattaaacgatattctggcatagtcttgctgactacaatcgatttttctgctcgttatattttcatacctccatacgtgtgattcggtcttcacgtgtcccatatataacatcaacagggactgtagcctttgactggacttcttgcttgtccagctgaccatca

SEQ ID NO: 164353 - DNA, 479 bp, Zea mays
  Clone ID: MRT4577_81466C.1
gggcatcacagactcaaacaagtcaactttgggaagccagctgctcaacaagtaaaaactaaaaactaaaagtccatgctgatctagaggggaccagcaagacataatattcgactatgcccttacacgaaatcttctttgttgttttttgccatgccgttacaagggatgattttcgaccatttccattccacccagcaaggggtagaacttggctatctccacaattcttccttcaattttggggcggtgacgccactgatcctcagtaatgatttccacgagggatccttggtcatacctctaactcttctggaaggccaccttgactaactccattcccaccaaaacaaacattttcagccttttccatactctccagcaattcagcactggtgttgctccccatcctttcacttccaactagctctgatacaactttctccgctacacgcttcaaagttgtgcacacggctaca

SEQ ID NO: 164354 - DNA, 835 bp, Zea mays
  unsure (1)..(835): unsure at all n locations
  Clone ID: MRT4577_81467C.1
aacctctctcgactttagccgctcccacacggcctccatctttcggcatcgagagatccaataacaaaatcaggagcaagaagagacgcaatcattaggagctactacttatctgcattccgcagatcaaggttcaagaacaaattcagctggaggccggaggagattattttattcatcccccccgagaggctgcatcgaaaaagggagatcaaggatccccggggggcttctagacgcaaagggagggcgagaggcttcttctctgagcagcgaccggctcgccgtccagagaagaagaagacgacgacgaagaagaagcgcttctgggctccgtcgtcgcatgaagaaggaaaccatggaggggcatgtgccattgccattgccattgctcccggacggagaaactgcggtgggctacagcaaggacgccgcctcctcctcctcggcggctctctcgcctctgcaagaggagatttcgagcctgcgatcgaggcagcggcgtgttgacaggagacggcgggaggcgctcgacaggctcgttgacctgaaaggaagcgttagggtcttctgccgggtccggccgctggctcacacgaacagcttgcatgcccaatcatcacctgttaccgtcgagcaggagaggatcacggtcaaggcagccgggatcaagagggagttcggcgctgatagggttttcggccaggagccacgcaagaggatgtgttcgaagaagtgaaaccgatcctcaggtctgcactcgacggncacaacgtctgcatcctcgcgtacgcccagaccggggacggggaagactacacatggaaggaacgac

SEQ ID NO: 164355 - DNA, 758 bp, Zea mays
  Clone ID: MRT4577_81468C.1
ttaggtgtacgacttcaggagcagtgtgttctggtgatgcaattagtaagcatgatgttcctcatgttgagaactgcaacactccaactgtagccgtgtgcacaactttgaagcgtgtagcggagaaagttgtatcagagctagttggaagtgaaaggatggggagcaacaacagtgctgaattgctggagagtatggaaaaggctgaaaatgtttgttttggtgggaatggagttagtcaaggtggccttccagaagagttagaggtatgaacaaggatacatcgtggaaatcattactgaggatcagtggcgtcaacgacacaaaattgaaggaagaattgtggagatagataagttctaccgcttgctgggtggaatggtaagtagctcaactcacaagtttccttctggacacagatttgcaattgcggaggtttctctgacaggagatggtcgaaaatcatgccttgtaacgacatggcaaaaaacaacaaagaagatttcgtgtaagggcatggtcgaatattatgtcttgctggtacactctagatcagcatggacttttagtttttggtttttacttgttgagcagctggcttcccagagttgacttgtttgagtctgtgatgcccctaaggcccttttgtacctctcctttgtaatataagatttttttgactttcttgttagtggtaccattcatgtgatgattctgatgagttataaggtcagattttctgttttggtgctcattct

SEQ ID NO: 164356 - DNA, 686 bp, Zea mays
  Clone ID: MRT4577_81469C.1
agacccaaacaagtcaactcagggaagcccgctgcagctcagttcatacacaagagtcagctgctcaacaagttaaaaaaaaacgaaaacttaaggttcatgctcatctagagtgtaccagcaagacatgacattcgaccatggccttccacaaaatcttcttcgtcgttttttttttgccatgccgttgtgcaagacatgatatccgataatctcccatcatccatcatcatagaaacccccgtaattgcgaatcgaatgcacaagggatgagttcaagaccatgcctcagtgacgacttccacaatgtacacttgttcatacctctaactcttctggaaggccaccttgcgcaactccattcccgccaaaacgaacattttcagcaaggacatcctccttttccatactctccaacaattccgcactgttgttgctccccagcctttcacttccaactagctctgaaacaactttctcagctacgcgcttcaaagttgtgcacactgctacagtcggagtggtgcagttctcaacaagaggaacactactatgcttactaattgcatcaccagaacacactgctcctgtttgtcgtgcacctaggggcagacagaatagtatctgggcttctctctgatgcctgaggtggaagccggactgccaccacttgcatcgctagggag

SEQ ID NO: 164357 - DNA, 193 bp, Zea mays
  Clone ID: MRT4577_8146C.1
acgaattcctcgtcaccaacacgcacgcggcctctgcatccgcgtcagcatcctgaggcacccgatcccggcggcggcggcgaggaagccggcgctcgcgcggcactcctcttttgtgaggacaactgcgtagagtacaaagactgcgacttcgagatcgtctgaaggaattgacgctggatttatcgctatt

SEQ ID NO: 164358 - DNA, 2567 bp, Zea mays
  Clone ID: MRT4577_81470C.1
caaggtgattcaagtatcaagattacccaaaacccaaacttgagctgtgatttgtttggtaattcatggggaaaagttcaaaatcctagtttttagaactcgaattactcaatccaaaattttctagtctacgtgatgtcatgagtgcttgttcatctttacggttcttaactaaccaactctttcacctattctagtcctagatctcgatcctaatctccccatacttctgtcctcgtagttcgcttacacgtaacctctgttgccaaggagctaaccatggcatctatatacaagtttttcactatcagtcttgattttgccaaatagtttttttgtcgtgtccttaaatttatgcataaagatttgcatgtgagtcctgcatcatgccgtattatgccattttgttccaagagatacatatctagttaacatgctactgcaggagttggatatctctcaaggatcagtcctttatgctgtcgatgaagctactgtccgtagtcttaatggttgcagagtagcggaccgaatcattagacttgttccaaatattgagaattttcgcacggcattaagatgtctgaagtgctgggcaaaaagaagaggtgtttactctaatgttactggctttcttggtggtgtcaactgggctttactggttgcacgtgtctgccagctttatcccaatgctgtgccaagtatgcttgtctcacggttttttagagtttttacacaatggcagtggccaaacccggttatgctttgttccatagaagaggatgaacttggcttacccgtttgggatccacgtaaaaatcctcgagataaatgtcatcacatgcctattataacccctgcatacccgtgcatgaactcgagctataatgtttccacaagcacgctgagggtcatggtggaacagttccaatttggtaataaaatttgccaggaaattgaaatgaataaggccagctggtctgctctgtttgagccttttcaatttttcgaagcatacaggaattatctacaggttgacatcattgccgaggatgatgaggaccttagactttggaaaggatgggttgaatctcgcttgcgacaactaactttgaagattgaacgtgatacatatggaatgctgcagtgccatccttacccacatgagtatgcagacccttctaggcagtgtgttcattgtgctttcttcatgggcttatcaaggaaagaaggtgtgaaaatacaggaaggacaacagtttgatattcgtggaacagtggatgagtttaggcatgaaatcaacttgtatatgttttggaagcctgggatggagttagctgtttctcatgttcggaggaagcagatcccagcttatgtgtttccagagggttataaaagacctcgcccttcaagacatgtgaaccatcagtctgataaaaatgacacagaagatggcacaatgatcaggtctccggacagtcagctgaagaggaggcacaattctgttggaactgatgatattgaacccagctggcctgctaagaggtcatcagtcagcccagttcatccgaaaaattcacctcaatcagggagctctggtgatgagactagatgtaacaaccaaataaaaagggctcctagtgatgcgactggtgccagtccggcttcacctcaggcatcagagagaagcccagatactattatgtctgcccctaggtgtacgactgcaggagcagtgtgttctggtgatgcaattagtaagcatgatgttcctcatgttgagaactgcaacactccaactgtagccgtgtgcacaactttgaagcgtgtagcggagaaagttgtatcagagctagttggaagtgaaaggatggggagcaacaacagtgctgaattgctggagagtatggaaaaggctgaaaatgtttgttttggtgggaatggagttagtcaaggtggccttccagaagagttagaggtatgaacaaggatacatcgtggaaatcattactgaggatcagtggcgtcaacgacacaaaattgaaggaagaattgtggagatagacaagttctaccgcttgctgggtggaatggtaagtagctcaactcacaagtttccttctggacacagatttgcaattgcggaggtttctctgacaggagatggtcgaaaatcatgccttgtaacggcatggcaaaaaacaacaaagaagatttcgtgtaagggcatagtcgaatattatgtcttgctggtacactctagatcagcatggacttttagtttttagtttttacttgttgagcagctggcttcccagagttgacttgtttgagtctgtgatgcccctgccatgctgttttctagaatagaactagatgagatgctgtgtcccctaaggcccttttgtacctctcctttgtaatataagattttttttgactttcttgttagtggtacctagggatgaaaacggtcggaaacggtatttattcggtaatcagttttttctttgattgcgaataaataggatatggaatatacaatacaaatttgtattcttgttttt

SEQ ID NO: 164359 - DNA, 667 bp, Zea mays
  Clone ID: MRT4577_81471C.1
tcccccaccgatttgatttctccctcatcctccgcccgcctcgccgcggccaccgcttcctccatgtccgcgcccgtgggccggcttctactgctggtctccgctgtcgcggtaggcctggcgctccccgtggcggccgagatcaagaaggagtccttcagggaggacccgcgctcgtccatcatgttcgagaaattcggcttctccaggtccggcgaggtccggatcatcatctcgggcgcctccgtctcctcccccgtcgcgcgggccgacctcaagcagctcgggttcttcctcgtctccgacgagtccctcctcgacgccatcgacgaggcgcgggaggaggggccgacgccggagaagctcgtcgcggcgagcgacgacgaccccgacgacggtgccgctgccgggtgcgtgctctacagccccagcccctacgtgaggaagctcttcaccttcaagaacatgaagggcgggcactacaacaggtccttcccggtgacccgccccgacgagtacgcgctcttcttcgccaactgcgccccggggtcgctcgtctccatgaccgtccgtaccgagatgtacaacgtcggcgccgacggctccaaggactacctccccgtcgggcaggcgcctgttgccgtcatccacggcgtcttcgcgctct

SEQ ID NO: 164360 - DNA, 570 bp, Zea mays
  Clone ID: MRT4577_81472C.1
ggcaagtcttcgcttcgctcctctctgcggctccctccggcgagcggcgatggccttctcacccccgctgatcgactgggaggcggagagctaccctgcctacccagatttcgcggccattccccttttcgtcgtcttcttcctcgtcgtccgtttcttcctcgaccgcttcgtattcgaggttgtagtttttcccgctcatttttacaacatttctcgtttgctgtacgtatcattatcaacgatgctcgagccagttattttatagagtacgaagagagggagtcgaggactcgaggtttcgacgaactatatggattgtgagcaggtgcttgcgtgctcatgattagcaagggtggaaatccaaaggatctgtcaatcaattcactatcatttcaggatttgctaagtactatttatgtcactcacaatctcacatgtaactcgtgagcttacatgctattgagacatggagtagcaaaacctgaattcctatttaacttaaccatcattcaagtatatgtttgatctgagtgagtgttcttacggaggcgccctattaggcagaaa

SEQ ID NO: 164361 - DNA, 1186 bp, Zea mays
  unsure (1)..(1186): unsure at all n locations
  Clone ID: MRT4577_81473C.1
ctcaggcatcaganagagcccagtactattctgtctgccgctaggtgcacgacgacagcctcagtgtgttctggtgatgcaattagtaagcatagtagtgttcctcttgttgagaactgcaccactccgactgtagcagtgtgcacaactttgaagcgcgtagctgagaaagttgtttcagagctagttggaagtgaaaggctggggagcaacaacagtgcggaattgttggagagtatggaaaaggaggatgtccttgctgaaaatgttcgttttggcgggaatggagttgcgcaaggtggccttccagaagagttagagccaaacaataggattgaagcggtttcttgagctgatgcaggtatgaacaagtgtacattgtggaagtcgtcactgagggttagtggcatcaaccacacaagattggggaaaaaatggtgtagagatggataagttctacccccttgctggagggaatggtaagtagctcaactcacaagtttccttctggacacagattcgcaattacgggggtttctatgatgatggatgatgggagattatcggatatcatgtcttgcacaacggcatggcaaaaaaaaaacgacgaagaagattttgtggaaggccatggtcgaatgtcatgtcttgctggtacactctagatgagcatgaaccttaagttttcgtttttttttaacttgttgagcagctgactcttgtgtatgaactgagctgcagcgggcttccctgagttgacttgtttgggtctgagatgcttctgccatgttctaggtctagaatagaactagatgcggtggtgtgttctctaccctaagtccccttttgtgccctttccttctgtaatataagatctttgactgtttaaaaaaaaaaaaaaaaaaaaaaaaaaaaaaaaaaaaaagaaaaaaaaaaaaaaaaaaggcccctaagacgttaaggagcagggagagaggtgtatttttgaataaatggagggtctagatgcaaaggtttgtcgtatggctgtaatatgtacatgaaatgtggtggattctgttaggaattttctagggcatagcatatctggtattcatatccaatctcctttgctttgtatgtcaaatggaaaactccttcgagactcacgtttaatttctttagtggcaaattctttggattggtt

SEQ ID NO: 164362 - DNA, 1637 bp, Zea mays
  unsure (1)..(1637): unsure at all n locations
  Clone ID: MRT4577_81474C.1
ggccgcttttttttttttttttttgaattacaataactaaaaaaaaatctgaatacgtggctgcaaagttcaaagacacaaggnctttacanngttccaccttnnggttcttgttggacnacgtnngcatgtaaaagaggannacagcagnnntgggagctcacacnnncttcatgccagcngnnttcgacaaccannccgtctatttacgcgcggtagaaaanncaagcganntccaatgggcaaaggcnncgattaagnnntaaaatctaaaccnntcctaaacnntacgcgcanncctgaagnntttcacaaatnnggagggttnntcggcgtgccttgctgacttannagaaagcannggtatnnncagtggnnacgcaagnngcgaagnnaggtggtcntnntagggcaggccangnncagtgttggtggtnngttgccaccgtatgcnaggagacnnagcctgtgggcctggtcaggcanngggtagcttcattggggagagattaacaatgggtacacnatcannccagagagggtcagaggtgatcanctgatcagccagcggnggacggcatntggaanttggaagtttggaacacatgagagatggagagacgagagattcaaaagccggtctctgtcatcgcggacactctgatcttaacttctttcacttttgctatgtgaatcttttgactttgactgatttcaaaaatgtgatggactggtggtggtgttattttaccatgtctactagtaacaaataaacccccacccttagttttatctggcactgttttttccattttggggacatggctatgatgtctcattggctatgaataggcaaatatctgaaattttaccatagtacttaccttaaagtcacccaaatgattctgaactctggtatgtgcattggcgaacaaaattcttactacttgtattttctgaataatattatacactacgatgtgtactcgttactcaagcatcactgttttacttgtatcattacatatatttgaacctactgcactttgatgaaccgagcggggtgcacaatctcccctcgcgtagctgagtatattgtttcatacatagttggaagtgaaaggctggggagcaacaacagtgcggaattgttggagagtatggaaaaggaggatgtccttgctgaaaatgttcgttttgggggggggggggttgcgcaaggtggccttccagaagagttagaggtgtgagcaagtgtacattgtggaagtcgtcactgagggttagtggcatcaaccacacaagattggggaaaaaatggtgtagagatggataagttctacccccttgctggagggaatgaagattttgtggaaggccatggtcgaatgtcatgttttgctggtacactctagatgagcatgaaccttaagttttcgttttttttaacttgttgagcagctgactcttgtgtatgaactgagctgcagngggcttccctgagttgacttgtttgggtctgagatgcttctgccatgttctaggtctagaatagaactagatgcggtggtgtgttctctaccctaagtcccttntgtgccctttccttctgtatataagaactttgactgtttctt

SEQ ID NO: 164363 - DNA, 511 bp, Zea mays
  Clone ID: MRT4577_81475C.1
gaatcaatggaggcagacagatagagtaatcaaatcaatggttgtccactctactactactactagttactgttgatctgtattaggacccaagtccaacatatagcagtaaggtcattaaaaatgcaacaaaaataagtattcagggtagcctgttaaattagaaacaacctggctggatatgacattacctctcgtttgatcaagctaatccaaagtccaacatatacctagtgaatgtagcacaacaattcccccatggagtgcctttgttggttccctccctctgttaaattagaaacaacctggctggatatgacagtacctctcgtttgatcaagctaatccaaagtgtggttagtttcgttggaaaaaataaatgcagacaagttgaattgctaattaattgccatataatcgttaatgattatccacgggatcttttcggctgatcaccaagtttagaatgacacgctgttattctccgtcttcatccatgatccatatcata

SEQ ID NO: 164364 - DNA, 928 bp, Zea mays
  Clone ID: MRT4577_81476C.1
cagtctccagacagtcaactgaagagaaagctgattctgttggaactgatgatatcaggtatgcaaagaggtcatcgaccagcccagttcatccgaaaaatcacctcaatctggaagcactggcgatgagactagatgtaacaaccaaataaaagggctcctagcgatgcaagtggtggcagtccggcttcacctcaggcatcagagagaagcccagatactattctgtctgcccctaggtgcacgacaacaggagcagtgtgttctggtgatgcaattagtaagcatagtagtgttcctcttgttgagaactgcaccactccgactgtagcagtgtgcacaactttgaagcgcgtagctgagaaagttgtttcagagctagttggaagtgaaaggctggggagcaacaacagtgcggaattgttggagagtatggaaaaggaggatgtccttgctgaaaatgttcgttttggcgggaatggagttgcgcaaggtggccttccagaagagttagaggtatgaacaagtgtacattgtggaagtcgtcactgagattcgcaattacgggggtttctatgatgatggatgatgggagattatcggatatcatgtcttgcacaacggcatggcaaaaaaaaaacgacgaagaagattttgtggaaggccatggtcgaatgtcatgtcttgctggtacactctagatgagcatgaaccttaagttttcgttttttttttaacttgttgagcagctgactcttgtgtatgaactgagctgcagcgggcttccctgagttgacttgtttgggtctgagatgcttctgccatgttctaggtctagaatagaactagatgcggtggtgtgttctctaccctaagtccccttttgtgccctttccttctgtaatataagatctttgactgtttcttg

SEQ ID NO: 164365 - DNA, 722 bp, Zea mays
  Clone ID: MRT4577_81477C.1
gctagttggaagtgaaaggctggggagcaacaacagtgcggaattgttggagagtatggaaaaggaggatgtccttgctgaaaatgttcgttttggcgggaatggagttgcgcaaggtggccttccagaagagttagagcccaacaataggattgaagcggtttcttgagctgatgcagggttagtggcatcaaccacacaagattggggaaaaaatggtgtagagatggataagttctacccccctgctggagggaatggtaagtagctcaactcccaagtttccttttggacacagatttgcaattacgggggtttttatgatgatggatgatgggagattatcggatatcatgtcttgcacaacggcatggcaaaaaaaaaacgacgaagaagattttgtggaaggccatggtcgaatgtcatgtcttgctggtacactctagatgagcatgaaccttaagttttcgtttttttttaacttgttgagcagctgactcttgtgtatgaactgagctgcagcgggcttccctgagttgacttgtttgggtttgaaatgcttctgccatgttttaggtctagaatagaactagatgcggtggtgtgttctctaccctaagtccccttttgtgccctttccttctgtaatataagatctttgactgttaaaaaaaaaaaaaaaaaaaaaaaaaaaaaaaaaaaaaaaaaactcgaggaggggc

SEQ ID NO: 164366 - DNA, 829 bp, Zea mays
  Clone ID: MRT4577_81478C.1
agtcagcccagttcatccgaaaaattcacctcaatcagggagctctggtgatgagactagatgtaacaaccaaataaaaagggctcctagtgatgcgactggtgccagtccggcttcacctcaggcatcagagagaagcccagatactattatgtctgcccctaggtgtacgactgcaggagcagtgtgttctggtgatgcaattagtaagcatgatgttcctcatgttgagaactgcaacactccaactgtagccgtgtgcacaactttgaagcgtgtagcggagaaagttgtatcagagctagttggaagtgaaaggatggggagcaacaacagtgctgaattgctggagagtatggaaaagctgaaaatgtttgttttggtgggaatggagttagtcaaggtggccttccagaagagttagagccaaaccataggattgaagtggtttcttaagctgatgcaggtatgaacaaggatacatcgtggaaatcattactgaggatcagtggcgtcaacgacacaaaattgaaggaagaattgtggagatagacaagttctaccgcttgctgggtggaatggtaagtagctcaactcacaagtttccttctggacacagatttgcaattgcggaggtttctctgacaggagatggtcgaaaatcatgccttgtaacggcatggcaaaaaacaacaaagaagatttcgtgtaagggcatagtcgaatattatgtcttgctggtacactctagatcagcatggacttttagtttttagtttttacttgttgagcagctggcttcccagagttgacttttgagtctgtgatg

SEQ ID NO: 164367 - DNA, 216 bp, Zea mays
  Clone ID: MRT4577_81479C.1
tcgatttccgtccaaagcgtttccccgaggagtatctcgtgcctaccatgttgcgtatgcgctggggcttcaagacgggagcatcgcatgccgagatggaccctgacgctcgagtttattatctgcggtgaccaactgaccacaaaattgtctatttttacgtgctgaattcaacaaccaagtcgcattactaaaaagtattgaacataaaaactt

SEQ ID NO: 164368 - DNA, 238 bp, Zea mays
  unsure (1)..(238): unsure at all n locations
  Clone ID: MRT4577_8147C.1
tgatacaaaacgcggcttgcttcttccgacggttaccttcaatccctgagcatgcaccacttgccattcctttcttatttgtacatttgtgcccattatgtcattaacttcgtaccaaaagtttcctattcctaagttacctattttaccgtatacctgaagattgtaggatggatgttgtgtccgttggttaaaaagtgtnctattggtctaatctgggaaggtacttttgagaggt

SEQ ID NO: 164369 - DNA, 254 bp, Zea mays
  Clone ID: MRT4577_81480C.1
atctactgctgcgaaaccatctggtctgatgaacccgggacaatatcggcaatctaataccttatgctgccagctttacacgggcgcaatgagtcaaccgtattcttctggaccatgtgctccgtatcgaagcggagctcgaacaacatttcatcagcttgtagcacctgcctaatgtcatagtgctgttccaccagtatcttgtttaggtctaaacagtcgtgtacaaggatcagtccctaagcaggtgtttc

SEQ ID NO: 164370 - DNA, 439 bp, Zea mays
  Clone ID: MRT4577_81481C.1
ctggccgggccttcgtagtctatccgtgagattgcacctgcactatacatatatatttacatacatatatgtacgtgtgacggtgccttactgggatgggcgtgatgatgtcatacctcaagagggtggctgcgctagccgtattcatggatggccatggatctgaccacatgacgttacatgctaccttaacgctctcgtggatcttatatattacgaagacacgtgcaaatcacatatctgcatctagggtgggcgattgaccagcatggactttgcacctgatatgatattttgtgtaatatcaagtgacctaatgtatacttgctgactactcacaagaaaaaacacaaaagcggccctgaaagctccagcgtccagctatctttagtgactactgaactgcgctcttgctgactcatcgtcatctcatgacccg

SEQ ID NO: 164371 - DNA, 264 bp, Zea mays
  Clone ID: MRT4577_81482C.1
ctgacccgcaactaggcagcctcatacattattttcactaagagaccagtggggctggaaagggacttgtgaggtgctaagtagccagcgagagcttctgggtcctgtcgcagttttgccctttcttccctcaaaaaaaggtctctccacttctctgtggcaaaggcttgggcaagttctctggtttccaatgaggccagagaacctgtgctgatccctaacatcttcacccatcggtgggaaaataagtaaaataaaagtaat

SEQ ID NO: 164372 - DNA, 580 bp, Zea mays
  Clone ID: MRT4577_81483C.1
actgaagaaggatgctatgacgatggtctccttgcacctcactgcagcgggcccgaacaacaaggatgctactgctactgcctctgacgaggatcactcatcctctacaactcggagccctgatgctgacattgcatctgcatatgatgctgacgatgatgttcagaggcagactgacacttcaattgaagctgctaatcacctgcagtgcaatagcagctgagtgcccagctgatcggatggtgatgctgtccactgaggagactgggatgatgatgaaacaggcatacccacagagatggaagcactagtgcatgagctcaagaaatccctaatgacaaggctggcgtcactaaacctactccctatgactaactgtttggacacatcaaggctagcctaggaagagctccgacccctacccagctcaaggctgtgctggcctcataaacccttcctgcccaagacgagatgaatgctctgctggaggctctctttggtggcgcgggtaagggatacaccagagatgctgtgagaaacaacaagtaccttgcaggtcctgtgccagatgagggagccc

SEQ ID NO: 164373 - DNA, 602 bp, Zea mays
  Clone ID: MRT4577_81484C.1
ttttttttttttttttttttttttttttttttttttttttttttttttttttttttttttttttttttttttttttttttttggggccaaaattggtcccaataaatacgggcccggggggttagtttttgggaaaaaacatgtttacgggcgggtccacccaaagtcctagggttcccgagaaaaaaaacctgttcccaaaacataaaaaggggggggggaccccctttttttgggttaaaaaaaagggtgccctgccctgttaaatttttgttttttgttccaaaaaaaaaaggccctcggggctgaccggggttttttaaattgttttttaacgaaaggggaggcctttaaatattttttgggaccaaggaccctaaggggggtttgggggccccctccaaatttgtttttgcccccttgggaaacttttgggagggaataaatgaacccccgggttttttgtttgatcaaattttttacggggcgtccccccgaaaccaatttttaaacagttccccgggggagtccttttccaccaaaaacaaaaaattctttaggggtttaaaaattttcctccaaaaaagctgctttttttgggg

SEQ ID NO: 164374 - DNA, 192 bp, Zea mays
  Clone ID: MRT4577_81485C.1
tcttacgcgtgggcgcgccgctcttttgaagacatccctcctgcttgcggcgagcgctgtcacatgtcgtgtggtgtgttggctctctgatccggatggttcatcgcctttgtcttctcccacggtcattattattcttttttctttcattattaatttgcaatattattttatcgtggtctcttttctgtt

SEQ ID NO: 164375 - DNA, 341 bp, Zea mays
  Clone ID: MRT4577_81486C.1
aaaaaacccacccggacgcaacaggaaaaaaagggggcgaacacaaccacgacccaaaacccgaacagcggaaaccatgacaacccacagaacagagagggcaccagacaacgcaagcacaaaggccgcaaaaacgagccatgacccagtgaccaccacggggacggagcacaaggcaagagggtgcccccccaaaggacggagggggacaactaaggtagcgggcaaccaccaacaagcagccggcgaagaacaaacccaagacgagcggcgggaggccccaccggtcccgggacatccgcaacagaacagacgggggggcccaacaccgcaagcgaaca

SEQ ID NO: 164376 - DNA, 297 bp, Zea mays
  Clone ID: MRT4577_81487C.1
cacaacagcagctcaaaaaacccaacacgccttagcaagcagaggaaagacccgggattcgatggcgcggaagcagagagcgagagatggacggtaggatgtacggacttgagaccataatgatggtggctctgcaacacctatgtggacgtgcctcatggtaacgcatgcagcgacggctaattggaagaccagtgcggagataaccgcacttactattgagacacgcgcgccatagtcggtgatatggacgacggctatgagcaaatgggcgcgttctcctgcgaagggtaaatg

SEQ ID NO: 164377 - DNA, 379 bp, Zea mays
  unsure (1)..(379): unsure at all n locations
  Clone ID: MRT4577_81488C.1
gcgcggacgcgtgggcagcgcgctcccaccggccccggcgtccgacgacagggcggggagccccgcggcggcgcgggcgagcaagctggcgcgcgccgcgccgcggcggagcaggtcggagaagatggcggcgggcccgcggctgctgcaggttcggcgcgcggcgtccccgccggcggcccccgagctgcggcggacggagtcggagaacgggcggcggcggcggtcgtccgtgtcggcgcgcgcgtgccgctggggcgcggacgacgccgacgagttccggcgcacggtggaggcgttcatcgacaagcacaagcggttccaccgncaggagtccatgacgctggccgtcgtcgcggggtccgggaccgggtccggc

SEQ ID NO: 164378 - DNA, 132 bp, Zea mays
  Clone ID: MRT4577_81489C.1
caaacactactattggtattattgtctgtgtgactgcgatattcatagttcgatctcttaggtctatgattattgtgtgctgcaacttgatctgtctagatagataaagtacgtacgctctagacaaggggt

SEQ ID NO: 164379 - DNA, 480 bp, Zea mays
  Clone ID: MRT4577_8148C.1
attcggctcgagccacctggaggatatctatttttggcgagaagaaggacgcggtgattgtaggcgtaccagagagcatcttgatggcttgcataaacatgtacgtaggcgggtggggaaatttcaatcggggccactagcctgagacttacatatgtagacgggtggaattgtgtataccgggcatatgcaactgttgttgagcaggcttctgtagataataaggtgatgctaactctaataaatgctattgaaggatggtctcgtgctgatggccaaagccctgtcttggctttagatgttttcctagttcaggcattaacaaaacaccatccgggcgcatttcctttagggggctagctccccggagattttattctggacgtgactgtctagaggaaaaacctttctttataggccgggcccttgcacggtcctgagacatgggccgtagggcatgtcaagaaaaacctgtaatcc

SEQ ID NO: 164380 - DNA, 411 bp, Zea mays
  Clone ID: MRT4577_81490C.1
gccggccggttcgggatcttctcccccttcccctttttcctagcggtacggcaccgaggtccgccctgcgtggcctcttcgtaattgtcgcgcctctatcttcgccactccttatgctccttgctacgatgtagtgtgaaacgccagcgggccgcgtattaggacgcctggtctcgatgtcgctatacggtgcccttctgccacgactagcttacgtgactgatcggtgcgcgacttcccgtcgcacggtcttcggacgatacaagctcctgcgagcgcgcgtgctcaaggggcgtacctatggtgcgcgctgtggtgcgtcggatctccacccggcatatccgtggagtcgctctcggcgcggatgatcatgccacagacccctgtacctctactgctacctgctgctga

SEQ ID NO: 164381 - DNA, 311 bp, Zea mays
  Clone ID: MRT4577_81491C.1
cttcgtccaggccgacgcgcccgatgcctctctcggggagcgccgaccacatctctggcttgcctctactcgggctccaggtgacttatttcaaatgtggacgcctctcccttgctgttggcatgcaacaccatgcagcgcatggcatgtctgacttgcacttcattaactaatgggctcgacctctgccgcgtacctcaaattactcgcatgcccttcattcaccggacccttgttaatgctcgtgatccaccacctccatttttccagcatatgctgtcccagcctctccactgttatggttgctgcac

SEQ ID NO: 164382 - DNA, 661 bp, Zea mays
  unsure (1)..(661): unsure at all n locations
  Clone ID: MRT4577_81492C.1
gggtagnagnaaaaccccgtcgaccgcctttttgaagacacaatttgccncacctctcttcctcttcaccagccgtcgccaaacccattggagttctctataaagactccttcgaccggccccgcattccgcgacagcgactcagactttcccctccaccacctcttctctccaaaacaccatccacaaaatggcgaacgctctagaccacctcaactccggcaggaccaggatcgagtggctcagccagctcaacactgagtacacacctgcacgggagtaccgaagaacctccatcatctgcaccatcggtccaaagacaaactccgccgagaagatcaacgccctccgcaaagttggtctcaatgtcgttcgcatgaacttctcccacggctcctacgagtaccaccagtccgtcatcgacaacgcgcgcgaggccgagaggacacaacccggcaggcctgtggctattgccctcgacaccaagggccccgagatccgaactggtaacacagtcggagatgccgatattcccatcaaggctggctccatcatcaacatgaccactgatgagcaatatgccaccggttgcgacgacaagaacatgtacgttgactacaagaacattaccaagggtattgtacctgggcgtacaatctac

SEQ ID NO: 164383 - DNA, 389 bp, Zea mays
  Clone ID: MRT4577_81493C.1
ctcggttgtgcaggatgcccctgcggcggcgcggcactccggcaagggcccagcgcaacatgcagcccggtggcttcaagaatctccagcgagcgactacctgctactgcatgcaccaacccacttggacatgctcaacgaacgagcgataggttccagcaattgcctcgacggccctcgacagccccttaatccgcgctgcagagaccagctgataaggatcccaggacgcaagatttctccgcatcctaactaatcggcttcagttacgctttatctggtgcaatggagagggaagttctggtgccgcgtatggttatgcatgtgcaaaaaacacggaggtggctcagccccatgcatgcaccagcgcaatatctgcagaagagggg

SEQ ID NO: 164384 - DNA, 515 bp, Zea mays
  Clone ID: MRT4577_81494C.1
gccggccaggctgccgaacgttatcggtctatctatcgttgtatcaccatttccattgcgagacagcacacaggaacgatgctgcttctgagctcccccttagcgtgccggcggccgacgctgacgtcgatcatcttccatgggggtcgctgagcgctgcccttcgaggggcacaggcacctgactcgtcgtctgcccgcagacgaaggggaataatacagtcgcggcggaggtggagaccctggatccatacctgaagtacgagggccgcgagcgcatcatgaacaacgacgaggggcacgagcgcgagatcctccaccttctcctcgacgtagagcagctcctgcccataccgtgccatctccaagagaaagtgcttcgtcggcatcgcggtaccagctggagacactcgtggccgcgctcgtctcctagctccgctccaatgcgacgaccaccatgatccgccatcgccagagcgattgattgggcatgagtgatgacctgtctatgacttc

SEQ ID NO: 164385 - DNA, 847 bp, Zea mays
  Clone ID: MRT4577_81495C.1
gatcctaggcatgcatcggcagatcaagatcaaagttcgatgctcaaggtcatttgcaaccagagggatcgtttccgtgcacgtctgcgtgaaactgaggaggaactgaggagactaaaagagaagcatgagatgctgactgttgaactggaaaaaactaaagctgataatgtgcaactgtatggaaagattcgatatgtccaagactatagccacgacaagattgtttccaggggaccaaaaaagtacgcagaagatattgaaagtggttcttctgatgttgaagcaaagtacaagaaaatgtatgaggatgacataaacccgtttgctgctttttcaaagaaggaaaaggatcagcgttataaggaacttggtttaagagacaaaatcacacttagtagtggccgttttgtccttggtaacaaatacgcacggacgtttatattcttctacagcatcggattgcatctccttgtatttacattactgtacagaatgtcagctttgagctatctcaacacaacaactcagcaggatgaaatcattctggatgctggtaatcagaggctaacgcacatgctttaggccaagttccatataacagtagaaaaagaggctctctgggttttgatctatagaatctttggacaggatcgttgctgagattgctattgacttgtttgctttgtacccttgatatgtttctgtagataaaaagaaaaaaaccctgttttgggggcaggcgtgggtgcggcatgggctttaaactatgtaatactgttgtactgccaatttaccattttgttggtaaatgaaagcacacttgtcacaaaaaaaaaaaaaaaaa

SEQ ID NO: 164386 - DNA, 546 bp, Zea mays
  unsure (1)..(546): unsure at all n locations
  Clone ID: MRT4577_81496C.1
aaaaaagcgaactgcgccaaagtctgacgaagtctacctcaagctcctcgtcaagctctaccgtttcttggtcaggaggaccaagagcaattacaacgctgacattctcaaaagacttttcatgagaaaaaccaaccgaccaccaatctacatgcgccgccttgacaagtttatggaaaggaaaggaaaaaaacatagctaacatatgaaggcacaaacacagatgcccannggntcccggnggttcccgcnntgnnggttcctgccctgnggttcncggngcccgcnngggcccggnttgtcnntgctggtggcgngtgcctcccctttgccccgcttgctcttcgtgcctcccttggcgngccccggtcctcttgnggggccccnngntgcccgtgnggcngtgnggccctttggcnnggctcctggngtgccgcccgccccccnngccgtntgtgcgctccngggnnggnngttcgngnnggctcgtggcnggngggcccgccgnggnttcnnggtttnnnnnnnttgnggccctncgtgttg

SEQ ID NO: 164387 - DNA, 258 bp, Zea mays
  Clone ID: MRT4577_81497C.1
gacagctctagttgtacttggtgtgactaaatacctcaaaggcaacctgcttctgcaggttttgaagtgtcagcttcataagacactgaggtttagaattgtttgattctagaccataactgaagggcataaatggaaacaggatatgaagggaaacaagtagcatcatggagctgaaaagtggtgcatcacccaatggctagcacaaacaaggatcacactgtccattctcttgtctgctaaattaagcattttctt

SEQ ID NO: 164388 - DNA, 1601 bp, Zea mays
  Clone ID: MRT4577_81498C.1
tgaaagggctcaagcacgattagtcagtcttgagagggaaaagggggatctgcgttcacaattgcagaccagaactgcgcatccttgaaagtactttatcaagtgagagagaaatgcatgtgaaggagcttaagaagttgactactttactcactgaacgggaaagtgctcttatggagttgaagaaagaactccaggaaagacctacacaaaaactggtagatgatctcaagaaaaaggttcagattttgcaggctgttggttacaactccttttaaactgaagactgggagcttgctactaatggagaagaaatgagcaaggttggaagcagtgcttctagacaagttccgtaaaatggagcatgagctaacacaactgaagggtaaaatatcagagaaaacaagggttattgaggaagctgaaaaaaggattgttgaactaacttcaaaggttgaagagcagcaaaagctgattttgaaacttgaggatgacatactaaagggctacagttcaactgataggaggggctcactcttgaatgactgggatattcaagaaatcggctcaagtgaagcatccgagggctctgatccaaggcatgcatcggcagatcaagatcaaagttcgatgctcaaggtcatttgcaaccagagggatcgtttccgtgcacgtctgcgtgaaactgaggaggaactgaggagactaaaagagaagcatgagatgctgactgttgaactggaaaaaactaaagctgataatgtgcaactgtatggaaagattcgatatgtccaagactataaccacgacaagattgtttccaggggaccaaaaaagtacgcagaagatattgaaagtggttcttcttatgttgaagcaaagtacaagaaaatgtctgaggataacataaaacccgtttgctggtttttcaaagatacgcaggagacatcgtaagtagttcttctgatgaagaagcaaagtacaagaaaatgtatgaggatgacataaacccgtttgctgctttttcaaagaaggaaaaggatcagcgttataaggaacttggtttaagagacaaaatcacacttagtagtggccgttttgtccttggtaacaaatacgcacggacgtttatattcttctacagcatcggattgcatctccttgtatttacattactgtacagaatgtccgctttgagctatctcaacacaactcagcaagatgaaatcattctggatgctggtaatcagaggctaacgcacatgctttaggccaagttccatattacagtagaaaaagaggctctctgggttttgatctatagaatctttgcacaggatcgttgctgagattgctattgacttgtttgctttgtacccttaagcgccttaagcgcttgatatgtttctgtagataaaaagaaaaaaaatcctgttttgggggcaggcgtgggtgcggcatgggctttgaactatgtaatactgttgtactgccaatttaccattttgttggtaaatgaaagcacacttgtcaaaaaggtatgcggtatgccataccatcactgcatcgtttagagtgaaatgcctctaaacttttcctgc

SEQ ID NO: 164389 - DNA, 559 bp, Zea mays
  Clone ID: MRT4577_81499C.1
gcgctgagagactccctgtaacaatgcgtctgctggaggaggaaggatgaagctgcgcctccctagctcttgcggcgcagcactgggctccaccgccacggccagcctgctcagagaacgtcttcatggtgtgcccggtggcttgggtcacgcacaccatcaccctgctgatgaaggtcaaggcgcaccccgtgctgccgtgtgcgtgtaccatatgggcggccatctcctcgtcgcggacgacgcctaccacactaactcccttgccgttgagaacgagtaaagggggcaacgacgcacctcggaggagaccctggacggcttgaacgtcatgatcacccacgcacgaacgcctaggaagaccgcgggagcagggaccacctgtctaacatgaacgcccgaattgttaagaggactgcgcactgagatcggccatcactgaccaaacgctgttgtcaatatgatcaggcacgcctggaactgtactggccctagtgctgcggggggcgcaaagaaggctacctcttattataagaacaagctgtgtgctgcgactacg

SEQ ID NO: 164390 - DNA, 365 bp, Zea mays
  Clone ID: MRT4577_8149C.1
gtcgcgcgggggatctgggtgccgctcactgtggacatttattctttaaggcgagtcttacgtattcggggccgcgacgggcgcatgcaagacctgggacgcgagtgttgatgtagattttatggaacctacacatgtacgctcatctggttgagcccagcactgtcagtgctgacgggataaactgcggttaacaccagcctcgaggcggcatacgcttacacaaccaggcaagagagggctgatgcatgatcataatgtatggatatgcttagcttatgatgatagggagacgtatcactcgttgggtgacggataaattaatcaccgccaaactgaactagtgctgtgaagtccaattacac

SEQ ID NO: 164391 - DNA, 395 bp, Zea mays
  Clone ID: MRT4577_814C.1
attatcatcatgcaggggttagttgtaataccacacatcataatgtctctcctcttactgcattattacagatatagatagagagggatgggattgaggatcattcccaaatatcatgaatcactagtagggcggaatggcagcggataccccacacgaggtggtgctgtagctggccacctggtactggtagagtccacccatggccggcatgttctgggccatcatcatggccatggccttgagaccctgacctgccaacagctgctgctgctgatgcatcaaagctgtctcgtacaggctgttgctggcggcagcttcacgctcaagctgcatcatcatatgcagttgttgtgcgacggactgcacgtccatcatactcatctgttgctggc

SEQ ID NO: 164392 - DNA, 389 bp, Zea mays
  Clone ID: MRT4577_81500C.1
tccgggtcggcatggctgccgagatgctcgacgacgctggtatggacaccagccagagcgcattgagtgaaatcgaatagttgtgctggagcagcaggacaatgttgcggagcatgatgaaatacaatcgatgccatgtaaaacatgaaatggtgaagctgggacataccccatggatagttctgctgttgagcctgaactaggaggttcaccatcagcagaggggcttcacgagagtaccttggctttccgactgaccacacacatactgatacatccatagaaaccgtggtactacactgcatgcgaacagaactacgtggagcctgagaaaatgcaccgactggacggtgctgaagtgaaaggagcttctcacctggaacaccatc

SEQ ID NO: 164393 - DNA, 551 bp, Zea mays
  unsure (1)..(551): unsure at all n locations
  Clone ID: MRT4577_81501C.1
ccacgcgtgcgtgcanaaatttgcttacagaagggtaaagccctcaaaacatactgctgcgagcaaccctgtcatgtggaaagggaaacaaacacgaactgcgtgagaagatacaggacgcgggagctgcatacttcaatgcgcatcgctatggagggggagcacgtgccatccaaggggtctatcggggctctcctctctaaacaaggggccaaggtcctaccaggggggaggggtgtcctctccgatgcgctgaggcttgaacccacgaaccgcgtgggctgggtctaccttggggaggggcacaagcaggacgggaggctanctgatgccgccgactgcgtccaggggggctcaatgcgcgaggactcggatcctgtgnaaaggttcagatcactctgatggggcatctgcgacagcgtgaggggccctttttttgtggggcgggtttctcttcgtgttcccccattttcgaggcgcaggtgggcagagaccaggtgcgcagctatctgggacttgtgtggtctacagggtgggaggtgggaccaaca

SEQ ID NO: 164394 - DNA, 288 bp, Zea mays
  Clone ID: MRT4577_81502C.1
acttacggacctgttctatcgtcgctaggtatgctctacgctgacaccagcactggaccagtggtgccatactgaatggactgatgtaatgctgatcgtgtcacagtatgtcaacgttctttggagatcaattctagctagctactcctagtaacgcgttattgctgggctgccttggtgagtgctatgcacgcggtgttaactctatgtacagaaagcaagctatgacatactggcaatatctaaactgctcgttacatccctgcacgggagcgaggctaagatggt

SEQ ID NO: 164395 - DNA, 478 bp, Zea mays
  Clone ID: MRT4577_81503C.1
gcgtttaaatcctttttcattatgaggttaccaggcttaagttatttgttgcaaaatttatgagccttgatcaaaatgtataatgcttccccctttatgtccttaaaaatgaatgcatcgaaatcatttctttaaattacttgatgcatatctttagggggagtccattattatattttgattatgttgagactattgctttatcttagtaatttcatatagtctcttgcatgagaataatgtttctcatatagtatgctgcttcacatcaatcaaacttgttaaagtaatatcgcttttgtcaaggattgttgcttttatttctaaaagtagcatgcttattggattctcctatttttaagcttgattaaaaacctattacctatgttgttctcttgatcgcatattggttgatcattgaacatcttcaattatcacttatgcttcttagtgcctcatgtaatttcaattggtaatt

SEQ ID NO: 164396 - DNA, 409 bp, Zea mays
  Clone ID: MRT4577_81504C.1
gggacgagcatgttttttaggcggctggcctacttttgcttttttgtatacatcacaagcctggagcgttgtgcacgcatgaagaacatcactgaccagagcacctctagctacaaccagtcaccgacggctaaataatatcaaacacctggtgtccacaaactgtattctgcctaatcgtaaaggaaacaccaccaaatgaaacaaacatcactatccaatgcacggagataattgacctcacaggcgtgcaaacacaaactttatctatatacgtaggtatacgtacgggacctgcaagggccaactactgcttgtctggaggtaggggtaatcacaaaccaatcatgcatgaaaacatcgacggactacagtgacagttacaccactttactaccacgcttggtgg

SEQ ID NO: 164397 - DNA, 1216 bp, Zea mays
  Clone ID: MRT4577_81505C.1
ctcttatccacccgcgcgcccaccgccgcgcgcagcaccgcgccgcccacccgcggccaccccagcgccccaaatgccgctccaaccctagcctctcgccatgcctttcgatctcgggcggccatgggaaactgatgccgctcgccggtcgccgtcgcgcgggaggacgtcagctcctcgcacttccccgcatccacctcgtcatggagctctgcgagggcggcgagttcttcgaccgcatcgtcgcgcgggggcactacaccgagcgcgccgccaccaatgtcactcgcaccatcgtcgaggtcgtccatttctgccatcggcacgacgtcatccaccgtgacctcaagccggagaacttccttttcgccaataagaaggagaactcgccgccgcgcagcgcccctctcgatatgccgccctgcttcctcctctcctcttgatccatctgccatcccatccccgctctgccagttgcccctcgcttcctcttcggctcttcatccccctcgatccgtcgcccgtgcttcctcctcactatgtcccgtcccctctccatcttgtcgccctgcctccccgcgtctgcgtctgcgcctgccttcggcgtccagagccatatccgcgttggcctccacctacgcacccgcctctagccataagagctcctcccgtgtctgcctttagagatctgctacctccacatcggtgtctagggctcctccattgcctagatctactagagaggcagatgaaagtatttccgtctcatcaactgtgctgaagaggaggaaaacacctcacttgttgaagggagcagtggagacccggaggaagatcatttggagtctgcagctactaatcttcagcctggcagtgacacttgcattgcaagggaagagttgccagatcagaaggatctggtgaaactgcaagctgttatccgtggacatctagaggcggcccatgcctcacggccaaagcagatcagttaggaggataaaagaagacactaccttggcacatgcctgttgtcacaatggacaaaagaagattagtgttgtgtgagatttttttcattcctttgatctattgcatgctatttgtaccctaatcgacaaaatagatgagactcaattcaggagcaaatcaccagtcctgttcacagtccaattcactatggctaaaatagcaaaaaaaaaaaaaaaaatttgcggcc

SEQ ID NO: 164398 - DNA, 1786 bp, Zea mays
  Clone ID: MRT4577_81506C.1
cagtgatgctgagactggcatgtctgaggaggacatcctcttacaagatgaaatatgtaaatctcggttaatgagtataaaacgggaggaagaacagtatatgagagagagagatcggtatgagttggaaaaggggaggcttatacgagagatgaagcgtctcagagatgaagatggctcacgctttaacaacttccaaattcttcaccatcgttatgctctcttaaatcttcttggaaagggagggtttagtgaggtttacagggcttttgatttggtggagtacaaatatgtggcatgcaagcttcatggattgaatgctcaatggagtgaggagaaaaaacagagctacatacggcatgcgattcgtgaatataacgttctcggcacgtgggttcatccaaacattgtcaggctatgggatatatttgagattgatcacaatacattctgcactgtcctagaatattgcagtggcaaggatcttgatgcagtccttaaagctacaccaattcttccagaaaaagaaggaaggatcataattgttcaaatatttcagggcctggtttatctaaacaagaggggccaaaagatcattcactatgatctaaagccgggcaatgttctctttgatgaggttggtgttgcaaaagttaccgactttggcctcagcaagatagtggagaatgatgttgggtctcaggggatggagctcacttctcagggagctggaacctattggtatcttcctccagaatgctttgacctgagcaaaacaccatttatttcatctaaggtggatgtttggtcagctggtgtaatgttttaccagatgctcttcggaaagcgtccttttggtcatgaccagacccaggagagaatacttcgggaagatacgattatcaatgcacggagagtggagttcccttcaaagccagctgtatcaaatgaggcaaaggatctgatacgccggtgcttgacatacaaccaatcagagagaccagatgtactaaccatagctcaagatccttatctctcatacgcaaagaggtagccgctatgccggagaacactaaggcaagggtagctgcttatttaatgagattatttatgtatggggatggatattcttgtgaaggagcaaagtgttccacaagctcaagaagaccacaaagggtgtaactgtatatgttgtaaattttagtctttcccatcgcagcaatgacctgaaatccagaagccatcagttcaacggacagcttctttgtagcgtagagaaagcaggcattggtttgaacggggcatgcgtaacgtgatggtttcttggctggtgggctgtgggcagtggtcctgttgatggttggtttttgtttgctcatactgtcggtaaggtctgccaaatcagaaaccaccggtgacaggcgagagctcacatgctcacctccgaaaaaaatctcggccttgcactggcaggatggactggattttgcgtattgccaaaacagatttaaggtagcatgcatcaatacaggttactttggataacctatagactcaccacagccacaagcacagaagctcttcgtacaatttcagagagtaccgatgtgccagatttctgctggtgccaatttgtttgtgatcgctgtcacccttgtacaacactgggatcgctcattgagcatacacaagttatgcaatttgcttttttattatagtcatctttagggcgtcgttttgttcggaacggattctttggaactttaatgttagttttatttgtgtt

SEQ ID NO: 164399 - DNA, 2263 bp, Zea mays
  unsure (1)..(2263): unsure at all n locations
  Clone ID: MRT4577_81507C.1
caacaaggaaccccaatcgagtgttcaactgggccatgacgacagggctgctttacaggaagaattgtcaatgttacatggcaaagttgcatttttggaggaggaactttctaaatcgcgtcaagacgcaacaaattaccatcaactgagtgatagggtagcaaaggaattgaaggatctcaaagatcatgaccaacaaatgagatctaagcaaatgaaggtgctgtctgatctgctgatagctgtgtcgaaagcagagaggcaagaagcgcggatgaggataaggcaggaatctttcagacttgggaatgttggtgttatgagagctggaactatcatatctgaaatttgggaagacggacaggcaataaaagatcttaattctcacctgaaatctttactggaaactaaggagactattgaaaggcatcgtaaatcacttaagaaaagacaatctgacaagggtgatggcagtgacgctgagactagcatgtccgaggaggacattgtcttacaggacgaaatatgtaaatctcgtctaaccagtataaaacgggaggaagaacagtatatgagagagagagatcggtatgagttggaaaaggggaggcttatacgagagatgaagcgtctcagagatgaagatggctcacgctttaacaacttccaaattcttcaccatcgttatgctctgttaaatcttcttggaaagggagggtttagtgaggtttacagggcttttgatttggtggagtacaagtatgtggcatgcaagcttcatggattgaacgctcaatggagtgaggagaaaaaacagagctacatacgtcatgcgattcgtgaatataacattcacaaaactttggttcatccaaacattgtcaggctatgggatatatttgagattgatcacaatacattctgcaccgtcctagaatattgcagtggcaaggatcttgatgcagtccttaaagccacaccaattcttccagaaaaagaagcaagaatcataattgttcaaatatttcagggcctggtttatctaaacaagaggggccaaaagatcattcactacgatctaaaacctggcaatgttctctttgatgaggttggtgttgcaaaagttacagactttggcctcagcaagattgtggaggatgatgttgggtctcagggaatggaactcacttctcagggagctggaacctattggtatcttcctccagaatgctttgacctcagcaaaacaccatttatttcatctaaggtggatgtttggtcagctggtgtaatgttttaccaaatgctttatggaaggcgtccttttggtcatgtgatcagaactcagggagaaaaaataccttcgggaagatacaattatcaatgcacgaagagtggagttcccttcaaagccagctgtatcgaatgaggcgaaggatctgatacgccggtgcttgacatacaaccaatcagagaggccagatgtactaaccataactcaagatccttatctctcgtatgcaaagaagtagccactactctggagaacattttggcgatggtatttgctcaggcattgagattatggatggggatggataatctcgtggaagagctaagtattaaacaagctcaagaagaccacaaagggtgtataattgtaaattttagtctgccctattacagcaatgacctgaaatccagaaggcatcagttcaaaggccagcttcttttgtaacatagagaaaacaggcattggttggaacgggcccatttaccctttgactgaacggattcttggctggtgggctgtgggcagtggtcctgttgatggttggtttgggtttgctcatactgtcggtaaggtctgccaaatcagaaaccaccggtgacaggcgagagctcacatgctcacctccgaaaaaaaactcggccttgcactggcaggatggactggattttgcgtattgccaaaacagatttaaggtagcatgcatcaatacaggttactttggataacctatagactcaccacagccacaagcacagaagctcttcgtacaatttcagagagtaccgatgtgccagatttctgctggtgccaatttgtttgtgatcgctgtcacccttgtacaacactgggatcgctcattgagcatacacaagttatgcaatttgcttttttnnnnnnnnnnnnnnnngggcgtcgttttgttcggaacggattctttgannnnnnnnnnnnnnnnnnnnnnnnnnctga

SEQ ID NO: 164400 - DNA, 635 bp, Zea mays
  Clone ID: MRT4577_81508C.1
cattgggtacctcgaggccggccgggatctcgcttccgttccccaattcgagatccctcattgctcgatgcctcttgctcttcgccgtgcgtgcgtgtatgtccgagcgactcgactgcacccccgctcctcccacgccccacacactgcgcgccgacgacgggacctcgtacgtcttcaccgcgaggtcgctcacgccccaccgagcggaagcacatgcggaagaggcaactacaagcaccacgtacagacagcgacagggagcagcctgccagccagcgcgcagaaggaccgcacgatcgtctgcgactagtccgcatagcggcccacgcgcgcaggtacaagccatccagtaagcaagagcacgcagcatggcgtttcccgacctccgccgccgtggttgccgccgaggggacactccaccgcgctccagctgaagctcgatggcttggcggcgatggagcaggtcgcctgctccaacgacccctccgtgcagcttgacgactacacacggttcctgaagctgctttctatagagcgaagtcccccaatcgaagaggagatcatcactggagtggtgccgagactcattgacgtgcttacaccagaggaccatgcgcaactccagtgtgagg

SEQ ID NO: 164401 - DNA, 271 bp, Zea mays
  Clone ID: MRT4577_81509C.1
ggaaaaaaaaggggcggcccaaaggaaaaaccccaccagcccgccctaccaaattctggatcatgacataaccgggcccacaggcacaaataaggggggggggagccccaaacaggccccttttaaggggtgggtttaacaacagcgggcttgtagcaaaaccatggggcctcctttttcttttccggggccccctaaaaggtttttccggggacaagctaaggaacgtaatcataatcgccctgaacagccccagcgctggcaccagcct

SEQ ID NO: 164402 - DNA, 579 bp, Zea mays
  Clone ID: MRT4577_8150C.1
ggggggggggttttttttttttttttttttttttttttttttttttttttttttttttttttttttttttttttttttttttttttttttttttttttttttttttaaaaacgggttcccttctttgggggggggaaagaaaaaaggggggggggggggtttttttttgggaaaaaaaggggggcccgggggggggaacgggggccaccccccggggcccgggcccgggaaacgacacaggggtcgaaaaccccccggtgccaaaggggggggggggcccaaaggggccgttccctaccaaagaaggaacaaccccgggaaaggggctttctaggggggccccccccaaccccgaggggattggggtttttggggacatttgggcgaaaagggtggcctttttttggggcccctttgttcccgggggggggaggttttgtatcaccgggttcaacccgggtatccttgccacgccctgggccaagggggacccccctttacggggtatttgggaaaacgcggacccggggttctccctgcacttggggggcccccgccttattaacccgcggggggagg

SEQ ID NO: 164403 - DNA, 167 bp, Zea mays
  Clone ID: MRT4577_81510C.1
attcggctcgagccgagttgctaatcccaatttttttggcttgcccggcttgtgttgctgcgggggacataaaaaaacatgatgggcgggggaacactaatgtgctcggcctcccggtaattgatgctgctcggatacatgaaggcgttcctgttattactatggct

SEQ ID NO: 164404 - DNA, 308 bp, Zea mays
  Clone ID: MRT4577_81511C.1
aagcggggccccgtgcgcgtgccccgccgcagaattcggggggacccacacgcttttggtgcgctcatgagacgaagggcgaagagcgactgtttaaacggggtgatgacacagggggccgtgccacaggtgacacgtgacgggtgggcaaatacggtacaaaacacgcctagggcagtgggcagaggcacaggtagaccctaaggttgaggcagacttgccctgttttgctatgggggggcatcttgggcggctcaacacttttaggcgggtagaaaggcatatttgcatggaagaatatagaagaa

SEQ ID NO: 164405 - DNA, 365 bp, Zea mays
  Clone ID: MRT4577_81512C.1
cccacgcgtccgcccacgcgtacgacaacacgtccgatgaccaacaatcaatcataaacacgcttatctgctacatgtgctacatggcttggctgatggagcatcattgtcagctgtgtccgtggatgacaaatgacaaaacgattcattgtcatgtggatggatcatgcatgatatgtcatgcatactagcctttattcctgatcatgtaacaacaacattgtctgtgttaaaacctacacgcgcgcacgtgctatgcgtcaggatggtgcggcgcctgcttctggccgtctaatacgtgttggtgcaacctgcatatgaccgcacatgtgagtgagtaaactgcaggctatatgtctgcggtc

SEQ ID NO: 164406 - DNA, 163 bp, Zea mays
  Clone ID: MRT4577_81513C.1
gttcttcgtagcgccgacgctccatcttctgctccctcccattgttgcgctcggcacgcgggtgacggcggcagcagcggcgctcaggatctgtctctcagcgacggcatcagaggtttcccgtcccgcttctatcaagtggcatcgagcactcgcctcgggt

SEQ ID NO: 164407 - DNA, 228 bp, Zea mays
  Clone ID: MRT4577_81514C.1
tcgatcgtgaggcttgcacctcgatacgctactctatggaactttcgtcctaccaggcttccgagcactcgtccacccactcttccgtgcactcgtccgaatacccgtcttatcaacctttcctgttaactacatatcatctcatgtactcccattcaatactcaactcctaatccaggccacatcaaacaacctatttatagagaaccacttccttccagatacgac

SEQ ID NO: 164408 - DNA, 374 bp, Zea mays
  Clone ID: MRT4577_81515C.1
ctttataacggttgttaaaactgtttgtttttagagatggacagagagcacggcaacaacgacctctgcaccacccataacttcacatggaaccatagatgtgaaggaccatagcaggagctcatcaaccggttggtcacagattgaaagagcagagcttcagggttataggcacaagattgaatcacccgcggtttcacaacataatataaagggtcttataagtaacatgaaataagttggcttagccctgggatacaaagcataaggggggcggttcccttggcaagcacagatccttatacctaattatttatactggtagaggaccaacacaccatggttgccgccgttttgatacttagaaaccctgg

SEQ ID NO: 164409 - DNA, 436 bp, Zea mays
  Clone ID: MRT4577_81516C.1
ggcctcaaacgggcaaaaagaatttcatagaacggggggggcagggccggcttcgcttaaggggggccccaaaccttttacggggtaggggacacattacaagggggcggcttatttctttttaaaaggggatttgggggcccttccacaagaaaaaaaacatagccggccccgatttacacaaggccctcccccaaaaacccaatacggaaaacggcccccccccatttcaacccaaaaaaaaaccctgggtttggcccgctcaagggccctctcccccccaaagagtttctccactttgggaagcgaaaattccataaaagccccaggaccctggggggggattagggtaccatcaacaaaaaccctgggggggcattccctttgggccgcaaggttgtccccaaagcaggataggaaggagctttctttccct

SEQ ID NO: 164410 - DNA, 433 bp, Zea mays
  Clone ID: MRT4577_81517C.1
gtcgacgacgcgtccgacgatttataagaataacattctagatctagaagaaagtataggttcataattgataatataatatcgatgaaagtaaaaaaaacaacatctatgaaatatatataaataaaacgaaataaaatatgcataattaataatataacataaattaaaattattaataaaatatataaaaaagcataaaaagcccgataataggtaaaaaataaaaaagaaaatcacatggatattattttgataatctaaaatatatcatggaatatctcatgggtactttataaacactcaaagctaatcgtgaaacatcatatacatactatgtgagtcgtgagtcgtcttaaagtatatcgtaaaacatcaaacacacatgttaaacatcaaacacacatatataagccgacgttatttgtcacct

SEQ ID NO: 164411 - DNA, 442 bp, Zea mays
  Clone ID: MRT4577_81518C.1
cccacacatttttttttgttggggaatttttattaccaaatttaacgggtaacaaaaattttaacattattgtaaggggggggaaaacaaaagaataagggggaaaaatatcccacccccaggaagaaggaaaaaaaaactactaaaactaaaaaaaggggggagcccaccggaactaaaaaacataatcacccccccaaaacaaaacccggggaaacactatgtaagggttggtaagacgacgcccactggacgatcatccttgcccaaacactggaaaaggaaggtccgttaaaaaacatctcctggcgaagaagcccgcgctgggggccaactggagccatcttccgcatcacgggataaattatcgcccctgaaggaacggggttaggcaaacgaaggcttttggccgggaataccataaacccaaggggggctaaac

SEQ ID NO: 164412 - DNA, 330 bp, Zea mays
  unsure (1)..(330): unsure at all n locations
  Clone ID: MRT4577_81519C.1
cccccacggggggtaaaactttataaactgggtttgcacccacaggccgggggaaagaaaaaaaaaacaggaacaaataactgggggggggcaaatttccaggggaacttttttggggccaacacaaggtaaaatccttgccccagggtaggacttcccgcggggggagaacattttgttggaacgggggcttgggctttaaccccccaaaagcaggttggcccccttgggcggcccccgggcgaaacaggacgagtttttggggcggggggctttctcccccgggggcgtgatcctcccccggcccaaatttcccttgggggngggatt

SEQ ID NO: 164413 - DNA, 699 bp, Zea mays
  Clone ID: MRT4577_8151C.1
gccggccgggcctcgccttgtaagtaacctgtttgttaattgtcattataatatttggcaacctgtaaaaaaaaaaaaaaaaaaaaaaaaaaaaaaaaaaaaaaaaaaaaaaaaaaaaaaaaaaaaaaaaaaaaaaaagtttttccatcacacgcagaggtagagagcatccggattccagcttcaagtcccgaaccccacccatgtccgccgccgccgcgacctctgccagcgactggaccatagtccgccgccgcggccgccgccgaggcaacgccccacgctccacctcccagcccgatgccccgacgcctctccccgtgaccccagtcctctggtccccctccgattcctctctcgaccccgcccgcgtctcccgcctcgtcgcgcgcgcccacgccgccatctcccgcgtcgctgcctcccctctctaccacagcctcctccaggactcgtcgctccgccgccgcctcagtctcctcgccccggaccacctctccctcctcggagtcggcagcttcgagtcctcccccgccgcgcgcctccagttcgcgctcgccgccctcctacgccgcgacctcctcccgaaagccgcctccgcggacgtcttcgaccccgtcctctccgccgtcgagtgcgcggccgccgcggcgctcggcttctccgtcccgagcctcgacaacgggtgccgccgttgcg

SEQ ID NO: 164414 - DNA, 359 bp, Zea mays
  Clone ID: MRT4577_81520C.1
ctggtccatgttcgatacctgagcgaggaacggacgtacacctatacccagctgctagccatggagctgaccaattagaagggcattgctgatggtaacctgaatgctgctgttgttgatcgctgcatcggtattcaagactactttacggatatgcagtgctaggctgatcttgatactgctactatagcaggtctacaaccattgctatagcaccatgagacaacagccactgcactggcatatgggattgataagactgatctaccacagaatgaccagctgaactagcattatgtcgatgtacatcatgcaagcatgcaagtcagtgatgtctgtaacaacaagggacagctcaa

SEQ ID NO: 164415 - DNA, 194 bp, Zea mays
  Clone ID: MRT4577_81521C.1
ccccgcctctccctaccgaatcaataccacccaatgcgcatccgagccacgagccccgcaatgccgccctctgtcaatgaaatgccggcccccggagacgtcgcagacggcggcgacatgcgcatgatatcctccaaggaactaccatctcaagcgtccgccgacgacctctggatctccatctccggcgacgc

SEQ ID NO: 164416 - DNA, 517 bp, Zea mays
  Clone ID: MRT4577_81522C.1
cggacgcgtgggtttaatcccaccaaaaagctaggaaaaagcttttcaacaatggccgccgccgccgccaagaagacggtcctcgtcgtggcggcgctgctgctcgtcgcgctcatcgcgctggaggccgccactccggcgtccgccgtgacggactgcaaggccgggtgcgacgagctcagacgactcggcgtcttcaactgcgagaagaggtgcgaggcgatcgccgcccaggcacagaagggacccaaggacgctagcaagtcgtatttttgacgtccccgtacgttaatgttcctatatatgtatgtatatatacctcatgcatgatgatacaacggcgaggctacatcagtatatatgtatatatatatagcgatcaaccatgcattagagagatcatgcatccttatacatatgtaaatgctggcctgttgtccatgtaatttggtttcccgtgtttcgtttggcgtccgtaatgtaatccatacactcaagatggacgtttgttgttttt

SEQ ID NO: 164417 - DNA, 533 bp, Zea mays
  unsure (1)..(533): unsure at all n locations
  Clone ID: MRT4577_81523C.1
cccgggctgcataaatattggttcagcactagtgtgtgctgatttttggcgcaccgggaggtgtctagtgtgcaccggtcactgtccggtgcaccaggcccaagctgattgaaaccaacctctctctggaatttcaggggcaccctacgctataattcatcggactgtccggtgtgccacccaactgtccggtgagccagtggagcaacgacttcttacacgccaacggccgactgcaaaagcgcacagtggaaaacagtgccgcgcaaaagtcagaggtcactggactatacggagtggcactggactgttctgtgcagcaaaaagacaaacgactccaacggtcaacagcttcaaaccctaacgaacacgctgacgtggcgcgcaccacacagtgaacagtgactatcctgtgcgccacctgactgtgcggtgcgctcatcgccagcaacggctaggaagttggnnctgaaactgaggttaagggcagagatcgacagatcagtatcatctggatatacccatgcatgggg

SEQ ID NO: 164418 - DNA, 280 bp, Zea mays
  Clone ID: MRT4577_81524C.1
ctcgcagtaacatctcactactcatacgcatacataatgcggactactgaataaagaaaaatgccaagagaaatggagttcggcaaaccaggcactttctgttcccaactaactacattactcacgtaattctaattgtgcacctgaaaaccaaaacccgcatactaggtcttaaaaaaacctctaaacattgctaaaacaggaaccgatacgactgtcagcaacataaaagtctccagccccacagtgcacctaggatacaagctcccgtccaacggtt

SEQ ID NO: 164419 - DNA, 663 bp, Zea mays
  unsure (1)..(663): unsure at all n locations
  Clone ID: MRT4577_81525C.1
cccacgcgtccgcgcgggaattcaaagtgggtttctttgttgcatgttacacctaaaaacttgagatgcatttgttccatttgtgtgtgtgtaaggtctaacggcttgatagcaagggagatatcagtaccagtgacaatcactgatcttttgttttacacctaaattttgatttctgaaatcagttttcatgtgtctgctagttgtatggagtacttatgctgagcccatgtcttgtccgagacagataattctgtgtgctgttaactttcccttctgtttttttgctgctccagtgattagattgacttactaaaaaggtgtgcatttttgtgaggttgctaatgcttctctagagcattacttgcataaatatgtcaaggctttgttgacgtggttattacgtagaatttgttggattagaatgcaaaatgaatgataatatgctcctatcctgcaaactgtaacatgttttcgtacctgagtgttgttttagattgataattttccctagtattgtgttctcctcatggcctcgtcgtagtgtgattagcgactcggctggactatttaacaaaagatgtaatagaaaacttgaatatctcaaaacttctntaatagtgttaagaatttgaacctataataaatactaataaatagctg

SEQ ID NO: 164420 - DNA, 208 bp, Zea mays
  Clone ID: MRT4577_81526C.1
attcggctcgagcggagcttgcttgcgaactgtttaaaacggggggcacagcatgatggacccggaagccgaatgcattccattgaagacaaccttagccgcaaacaaaatgaccctatggacccctgcggtgctccagttgtaagagctctcgggtctaacgggggccagtttctacacctacgaacataggcgccttctgtgattc

SEQ ID NO: 164421 - DNA, 193 bp, Zea mays
  Clone ID: MRT4577_81528C.1
gccggggagcatccttccctgtattctcgaatttcgatttcctatccagcaaaccctaccagtctttcacgtactcatagaggtacccgatggcacccaatgcggagatcatgccggcggggaagaagccctcagaggaggagcccgcggtcctcggggaggaaggcggcgctgggaagaagccgaagaccga

SEQ ID NO: 164422 - DNA, 754 bp, Zea mays
  Clone ID: MRT4577_81529C.1
tttttttttttttttttaccatgacaaagaataaggtgataaattaaaaggcgtgacgtgtgcagttcaaaaatcgcaacaaaacgtgctcctcggcaacagagtaatagcaaagaaaccgatcccaagtggcacaataaatcccaggattgaattccaccagaaacacggaacatccacaggcagaatacacacacaccgtctgatcccgtcaacattgacagagagaaataaaaaactagggcgacatattatgctctgacaaagctagaatagcacgatagcattccaggctcaatccagttccagctctctctctctctccctcgcatagaaagctagtagtttcacttgtcgccgtgtcgaatccgtcggtcggcccctctcactctcagaagcaggcgtccaggaggcagcagcagcagagggcagccaagcatccctccatgaaggaaggcccgctgctctgctgctgctgtggaggcggcggctgcgcgtactgcggcgggtagccctgcggagggtagccctgcgccggccggcgggtgcccccctggcgggtacccgcccttgcccgggtagcctggtgaaatcaagatcttgctgcggcgggacgccgacggggggctgctgcccgtagtagctcatctccctcttcttccttgcgatcggatgcgcggagagggttaggggagctttcgctgcttcgggttggggcgtgtgggggcgtgacgggaatacggatggccggccg

SEQ ID NO: 164423 - DNA, 533 bp, Zea mays
  Clone ID: MRT4577_8152C.1
ccccaaaaaccccctggggggggaatttggttgaaacggttggtttttggtccaaaaaacccaaaggttttttttgggccaaaaaaaaaacctggttttttttgggccaaagggggggaacttttgggaggccccccgaacctaggggaaggcaatggttttcccaatggtatccccggggggccccccccaattttttggcccccgggttttaaaaaccccccccttggccccccccctgggaaaaaaaaacccctttttttggaaccctttttttggccctggaaagattgttgttaaaaaaaaaaaagggcccaaaaaaaatcttgaaggccttgggccctttgaaattaacccccggaaaaattccccccaaaagagggggccccttgaaagcccccgggcccaaaagggcccccctaaaattggggggctaaaaaagggggccccaacccggttcccccttaaacagaaagggttttcttgggtgggaaaatgtttgggggaacccccccgggggggccccccaaaaa

SEQ ID NO: 164424 - DNA, 792 bp, Zea mays
  Clone ID: MRT4577_81530C.1
atccgtattcccgtcacgcccccaacacgcccacaacccgaagcagcgaaagctcccctaaccctctccgcgcatccgatcgcaaggaagaagagggagatgagctactacgggcagcagccccccgtcggcgtcccgccgcagcaaggctacccgggcaaggacggctacccgccagcggggtacccgccggccggctaccccccgccggcgcagggctaccctccgcagggctacccgccgcagtacgcgcagccgccgcctccacagcagcagcagagcagcgggccttccttcatggagggatggtacgttcttcgcccccccacttttgtgccgcgtattcgctcataatatgttcctagatgggagtgtcttcgaaatttcctcgctagtttagatggtaggcaccttccttcggctcaccggcggcggcggcggcgaccgccgtgctggtgcggcacgttggcccatgtgggtgggtggggccttgacttgacgcgtgaaccacccttggaaaagggcgccgccgccacgccacgccaccctcgtggcgacgtgtcggttgctacacgcaaaggtagtaggtgtcttagaccgtctgatctgagactggcggtccggatcgctagcctcggcggtcacattttcctgctgccgttccacatccacatgcgaggagctatccgacggtcgggtcgctgtcagtgtgaggctttcagattccttcgggtgtttttttttggtttggttgaatggataatatacttgcgttgacgcgtgagtaccatg

SEQ ID NO: 164425 - DNA, 505 bp, Zea mays
  Clone ID: MRT4577_81531C.1
ggttgataccatgaaagagagagagagagaggtaatttgggtaatcacgtctatgtatgattactggaataggtacagtatatgtaggctaagccactacccgattatagaaacagatcaggagggcagccactgattagccaagatgacagcacggctgattagccaagatgactgttcggctgattagccaagattacagcagcaattataggagaggatatcctggcaatatactgtctaacacttcctttaattttgttttatgttccactgttacagattttgcattaagtggtcaaatttcattctcacacgcgttagttcaaacctaaaaaccaatataactgctctttactcttttgcatgagtgtaaaatataattccttgttggctaagttatatacttggctgacaagtccaaattctttgttgcatcttattaacacacccccctctcttcagtccaaccatgggaagagaattgaccttatgtttatcaaat

SEQ ID NO: 164426 - DNA, 1043 bp, Zea mays
  unsure (1)..(1043): unsure at all n locations
  Clone ID: MRT4577_81532C.1
caaacaaacaggggtggtctcttcacccctggaaacatacaactcagaacatcgccctcaagtttgccaactttagggtagggtaagcaagtccatttcttgccttgctagcgcggctctgcatagctcatcncaagcttaataaggtgataaattaaaaggcgtgacgtgttttttttttttttcaacaaaacgtgctcctcggcaacagagtaatagcaatttttttttttttttttgggcacaataaatcccaggattgaattccaccagaaacacggaacatccacaggcagaatacacacacaccgtctgatcccgtcaacattgacagagagaaataaaaaactagggcgacatattatgctctgacaaagctagaatagcacgatagcattccaggctcaatccagttccagctctctctctctctccctcgcatagaaagctagtagtttcacttgtcgccgtgtcgaatccgtcggtcggcccctctcactctcagaagcaggcgtccaggaggcagcagcagcagagggcagccaagcatccctccatgaaggaaggcccgctgctctgctgctgctgtggaggcggcggctgcgcgtactgcggcgggtagccctgcggagggtagccctgcgccggcggggggtagccggccggcgggtaccccgctggcgggtagccgtccttgcccgggtagccttgctgcggcgggacgccgacggggggctgctgcccgtagtagctcatctccctcttcttccttgcgatcggatgcgcggagagggttaggggagctttcgctgcttcgggttgtgggggtgttgggggcgtgacgggaatacggatggacgccggacggggccgggaggtcaggtggttttatggaagggaacgggtgtgtttgatgtttcctggtgttttccggctggtcctccggcgaaccgcgtcgtcaacgtggtgctggccccagggcatgcctggtcccttaagacaaaagaactcgagcaacccggccggcctcgaggtacccaatg

SEQ ID NO: 164427 - DNA, 183 bp, Zea mays
  Clone ID: MRT4577_81533C.1
catgaatttgtgtggttactacatctagctaatagggtgcatgacacgacaaatgaagtgtctcattgagtaggcttgtgaggcatcagcaatacttgcggatgaaccaattaccgacacaactgtttagaccttgtgtgttgctaccggcacacatttgatgctgagaataaaacttgatta

SEQ ID NO: 164428 - DNA, 347 bp, Zea mays
  Clone ID: MRT4577_81534C.1
cctccttccctcctcggatctactcgccgagcgctcctcctcatctggctcatcccaatcccctctttcattctttctccgctcccgcttcaccgtcttaacaaatattgaggccttcctagcctacctctttatgtctccttcacaggccttccccgcccctccttgcactcctctccccaacctttctttcttttacatcattctccacaagtggccttccttcttcgtcgtcttcatggcttaaccctatcttattgccaagctggactctttctagaaagcctggaaagaaatgtccttaatgttttcatatcctgacattgtctctgatccaaacgaatacc

SEQ ID NO: 164429 - DNA, 1219 bp, Zea mays
  Clone ID: MRT4577_81535C.1
ccttttttttttttttttttgagaataaggtgataaattaaaaggcgtgacgtgtgcagttcaaaaatcgctacaaaacgtgctcctcggcaacagagtaatagcaaagaaaccgatcccaagtgggcacaataaatcccaggattgaattccaccagaaacacggaacatccacaggcagaatacacacacaccgtctgatcccgtcaacattgacagagagaaataaaaaactagggcgacatattatgctctgacaaagctagaatagcacgatagcattccaggctcaatccagtattccagttccagctctctctctctctccctcgcatagaaagctagtagtttcacttgtcgccgtgtcgaatccgtcggtcggcccctctcactctcagaagcaggcgtccaggaggcagcagcagcagagggcagccaagctgttcaaaatcacaaatggcgcgtgaaccattgttaagataaaaaaaggtccaaccaaagaaagagagagagagcattgcaaatatcccaatttcaagttgtaacaactacggtggatgctcgaacaccatcttatctcattggtactcacgcgtcaacgcaagtatattatccattcaaccaaaccgaaggaatctgaaagcctcacactgacagcaacccgaccgtcggattagctcctcgcatgtggaacggcagcaggaaaatgtgatcgccgaggctagcaatccggaccgccagtctcagatcagacggtctaagacacttcctacctttgcgtgtagcaaccgacacgtcgccacggaaaggccacgagggtggcgtggcgtggcgtggcggcggcgcccttttccaagggtggttcacgcgtcaagtccagaccccacccacccacaggggccaacgtgccgcaccagcacggcagtcgccgccgccgccggtgagccgaaggaaggtgcctaccatctaacctagcgaggaaattttcgaagacactccgatctaggaacaacttatgagcggctgcgcggcacaaaagtgggggagccaagaacgtaccatccctccatgaaggaaggcccgctgctctgctgctgctgtggaggcggcggctgcgcgtactgcggcgggtagccctgcggagggtagccctgcgccggccggcgggtaccccgctggcgggtagccgtccttgcccgggtagcctggtgaaatcaag

SEQ ID NO: 164430 - DNA, 360 bp, Zea mays
  Clone ID: MRT4577_81536C.1
cgctttcggtcccgttcgctgggggtgcaaaataacctggcgctcatatggttccataaccatattatatggtgtaagactatacacatcaatatcgccacgactcgcttccaacggatgctatacacaacaatatgacaactaggctctcaatatgtaatcaccactaagttcattactaatattatatttgtcaaggtatacgtcaagaactgagctagagggacaaatatttgtgatcggccatagctaaacggatacccaagaaaactgcaagaacgatggcaataataaaaacaactgagagagacttattgctcaattcctgaatctaccttgagtgacatatacatcatccac

SEQ ID NO: 164431 - DNA, 154 bp, Zea mays
  Clone ID: MRT4577_81537C.1
tatagctagagtacggtccggattccgggtcgccacgcgcgggacctgggccgcgcgcggcccgatcgacgagcgagcctcattcacactccgatctagctagcacgctagtttaggaaagtgaaatctgaccacagggatgctgtggcggctg

SEQ ID NO: 164432 - DNA, 860 bp, Zea mays
  Clone ID: MRT4577_81538C.1
cattggagaccttggagacggccgggactttttgggaagccctgtctcgaacccgagctcgagcctcgaaccctaacccccaccacgtaactccttggaattaccgaaatgccactcttcttctccaaattcgcaccattggtcccccgcgtccgccgcctttccatcgccgcggcgacagccgccggcgaggaccctaagctgtctcgaatcgcggatgagctcctcgccctatcccccgccgagctggacgactacgcggcgctcctgcgcctcaagctccgcctgtcgctcacctccagcgcagctgctggagcctctccggccggggccggggacgccgcggctgcagccgtggaggccgccgcggcggtgaagacggcgttcgacttgaagatcgagaagtacgaggccgcggcgaagattaagatcatcaaggaggtgcgcgcgatgacggacctgggtctgaaggaggcaaaggagctcgtggagaaggcgcccgtagtggtgcgcgcggggttgcctaaagaggaggccgaggcgctcgccgctaagctcaaggccgccggtgccgctgttgcactcgagtgatcccacgaaggtgtcgcctctttttttttttgttcctagtgtttttagacgatgcaacgtatctttgcgccttaatttgtttggaatggaattcaatggattggataggggtataaagaggatgcaacgtatgctctacttgcgttgttgtagcttcggataagcctcaagcctaatcactgatacgagtgacagcattttcctgaatcgcacaataagaagttcctgcacaatgttctatattactgggcctggattggtttgaacag

SEQ ID NO: 164433 - DNA, 513 bp, Zea mays
  Clone ID: MRT4577_81539C.1
ctatgacgtaacctgcacgcgctccgtaagctcggatcctgtatagcgggcgccatccactcgttcggagggcctaatcatccgacggcaactgagtctcataacactgagtacatggatcacaccgggctggagagatcaaacatggacaatgacccggctgacgcatatggacctagttggaagacgacggaacggaaaaccttacctaagccgcatgggaggaacgcacccaaatcgccactctatcggaaaagatgatcagctccatgaaagaccgaaagcttggtctgcagaaagcctaaatgatatccgtgagatcgcacaataacgccaccgatgcccaacacctttgctgcgacataagattggacccttgatgacaaaggaccatgcgcggaaaaaggggactgtccataaagcctcagtagcgtgcaaataaaatgccaccatctgaaatggtgaagaaaaacaacctccaagatgccactccaacggatcacatgctggagg

SEQ ID NO: 164434 - DNA, 785 bp, Zea mays
  unsure (1)..(785): unsure at all n locations
  Clone ID: MRT4577_8153C.1
gcagttcgtttatcctctcctctctctttctctgtcttgctgcggcgacacctccgcttccgccggccgagtcccgagcggagccgaagcaacaaccgccggggaggcgagggattgattcggagatggcgtcaactagctctataggcgacgtgggagcctcagatgcaaaatcacgtgtggaggatgtttggaagaagatgaatggtggctttcctaataagatgcccaaacctgcaatgacgaagctcagttcaacagcaacagaaaagaaaaataagccaacaaataattggatgactgttctaggcctctcaccaagtaaggcatgtaattccagtcaaggatcaaaaaatggtctaaaatggacacaacatgaaacgagagaggatgccaaaaaacttgcagcaaaggcccttgcagctgccaaaaatgccgctgctgtggcatctggacgagggaaagtggagatcactgaggtaagggactttgctggcaaggacatcgaaatcaagaaaattggttgatcctaattcgaaggaggcaatagagaaggccaaggcnagctggtgccgccccatcagctgtcgatagcattctagagcaaatacggaagaagcagaagctgagcgttctggacaagacgaagaaagactgggggagagtacaaggaagaaaaccgaggcttggaggaagagctggacgcctacaagaagagctcgaaccagtacctcgacaagcaatcattcctgcagcgaactgattaccgcgagtttgagcgcgag

SEQ ID NO: 164435 - DNA, 901 bp, Zea mays
  Clone ID: MRT4577_81540C.1
aattcggcacgagggcctcaggcacgagaataggtggtcactctactacccgaagccgcgggctgaaccctaactgacccagagcgatcggagctgacgacgatggccgggaaggcggcggccgcgacggcggcgaggtgggcggaggggtacccgtggaaggagaagctggcaaagtacaagggtgagctcgggaagggggtgtggggatactgggagctcggcgcgtggaagccgctcggcatcagcgctcgcaagcgcgcccgcctccgcaaggaggtgctcctcgccggcgaggactggagctacgatcctccccgcggggagatgcgtaccaagcgcaagggccacaagtgcgaccgcatctccgccgagaagcgagcaaatactgttgagctgatgaagaagatgccccagatgctgctcgactacaagaaacgtaggtgggagaagaagatgaaagcggaggagagcggcaagaattgataccacgcggctcgtccagggtgcttctcttcctaaataaggtccaaactttatccaggaggtttgcaggacggctagattctgacgcgtcatttccttgtggattccttctctcctgtgatgcgactttggacgcactatcctgattgtgatgctttccaacacttgtgccactggatcgtgatttcagtgagccccaacttctgcagcactagtattttgttgagacaaatcagctataagcatgccatctgcccaataaacttgttcatcatgtaagatcaatgctgttagtttttgtccgagtttgtgcttgcgtttgcttatacttacctgcagaagaatggttgtctgaaaacctaaaaaaaaaaaaaaaaaaaaaaaaaaaaactcgagactagttctctcctcgtgc

SEQ ID NO: 164436 - DNA, 205 bp, Zea mays
  Clone ID: MRT4577_81541C.1
cggacgcgtgcggtcttcgcttacacttaccactttccccgcctgcttcctgcagtcgcgtacgggtatccatgcgcccacggagaagatggcctactctactccaatctgccttagctcaagctctggtcgaggaggcagaggccggtgccagctggcggactgagaggtaggtagcagcttgcggttgcggaagggaagctgc

SEQ ID NO: 164437 - DNA, 226 bp, Zea mays
  Clone ID: MRT4577_81542C.1
cccacgcgtccggcctcttccccgtggccgggatcggggaggccgacgcgctggtctggcggaaccttccggagagaggtcccccctaattccccttaacttttaacgcccccccctctaaaaacccctttgttttctataggactccatttaagtgataggctcctctgatcatatccaggagaaggctgatctgctataccctttgattaacggaaggcaactt

SEQ ID NO: 164438 - DNA, 1134 bp, Zea mays
  Clone ID: MRT4577_81543C.1
cttgttcatcatgtaagaacaatgctgttagtttttgtccgagtttgtgcttgcgtttgattacacttacctgcagaagaagattgtctgaaaaaaaaaaaaaaaaaaaaaaaaaaaaaaaaaaaaaaaaaaaaaaaaaaaaaaaaaaaaaaaaaaaaaaaaaaaaaaaaaaaaaaaaaaaaaaaaaaaaaaaaaaaaaaaaaaaaaaaaaaaaaaaaaaaaaaaaaaaaaaaaaaaaaaaaagggggcggcccttttaaaaaaatcaaactttttttacccgggtttggaaaggaaaaaatctttttttttgcccacctaaattaaatttcagggccccctttttaaaacagttggattggaaaaaaccaggagtggtccaaagcatagtcttaaaaaaaaaactactttttatcaatggagagaaaacaggcccggtgcccaaggtttccttttcgaagcgagcaaatactgttgagctgatgaagaagatgccccaagtgcgaccgcatctccgccgagaagcgagcaaatactgttgagctgatgaagaagatgccccagatgctgctcgactacaagaaacgtaggtgggagaagaagatgaaagtggaggagagcggcaagaattgataccacgcggctcgtccagggtgcttctcttcctaaataaggtccaaactttatccaggagttttgcaggacggctagattctgacgcgtcatttccttggtggattccttctctcctgtgatgcgactttggacgcactatcctgattgtgatgctttccaacacttgtgccactggatcgtgatttcagtgagccccaacttctgcagcactagtattttgttgagacaaatcagctataagcatgccatctgcccaataaacttgttcatcatgtaagatcaatgctgttagtttttgtccgagtttgtgcttgcgtttgcttatacttacctgcagaagaatggttgtctgaaaagtttgtccttctgtaataagtgttgaatgttggaaatcctaaccctctcggggttgggagattaatatatagacttagttggatgggcccgcccctttcccaaaaaaaaaaaaaaaaaaaaaaaaaaaaaaaaaaaagagaa

SEQ ID NO: 164439 - DNA, 427 bp, Zea mays
  Clone ID: MRT4577_81544C.1
acgcagaaaaaaacctatatattgccttttggcttgtgaactgaaaaaaaatacaaacaacatgaacacatatacaatgcacggctttgcagcaagatggctggcttcattgttgatgctgcactaattttcgtcctacaaaacatttcccaaaagttggactaataaaaacagaaattctgcatgaggttgcgcagaacctgaaagcctcctccccttctgaagagctgcttctccaatgtagtcaacctgggattcctctgcactatataagccaaagcttcatggcttaatttctacagtatatgcctgtcgaaggagtcagttgctttgatgaacatagctgttgaattctatttaagaggaatgaccacatccagattcgtcccaacttgccatcctctgggataggcgagattctcagatc

SEQ ID NO: 164440 - DNA, 415 bp, Zea mays
  Clone ID: MRT4577_81545C.1
gggaccttccccaaatcactgggccctgggccccgggttttgtttctttggttccaaaaggggggggggggggaaaccgctcatggctcccgaagggattttcccctcaaagaacattgggggccccccttggcgggggaatgaacaaaaccccccgggggggcccggggccaaaaacctcgcccctcgggtttggaacaccggggggtttttcctcccctgggtctgccaaattggggaaaggggggacacccgtttttcccccctttggggggggggctcccggggtgggggcccccccgccccaaggttttgggcgtcctagttcccccggggtcccccttcttaagcaatttctccttgggggccccggggtccccggggggttcaggggccccctccaggggggggcccc

SEQ ID NO: 164441 - DNA, 360 bp, Zea mays
  Clone ID: MRT4577_81546C.1
ccgactgccgtagcgactgcgcctcgtcggcctccgtcgtggacgacggcgacgacgcctccacggtccggtcgcgcccggcgctcgacctcaatctccccgctaccctcgaggccggccggggtcatgacctcgagctttgcacggacctgcggctctgaataggcgaccggatccacggacggatcgggacgaagggagagaaggcggttttttttgctttggtcttcttttcttgatcagattctgccttgctttgacttgtcgtgctcgagggagcttgtaccagtgctgcactgtactactcgatacgaatggcaatagaattggatgacgattcctgcaaaaaaactcgtgccg

SEQ ID NO: 164442 - DNA, 151 bp, Zea mays
  Clone ID: MRT4577_81547C.1
tgccggcattgggggtggccacgtgctctccctcccattacctgggagggggatagtggtgatggcctctaagctgctcaccaagacctggggggagtgaaccgctgctgcttactggggagatctcgccccacaactgcgcaacgcccat

SEQ ID NO: 164443 - DNA, 507 bp, Zea mays
  unsure (1)..(507): unsure at all n locations
  Clone ID: MRT4577_81548C.1
agcagtggtaacaacgcagagtacgcgggacgagtgaatataggggatggaatcttgctgacgtggctgcatagtaacatttagggggaaaaatttagggggcacggttgcggacagtcttagccacattcctcactccaaattacaaatgtattcatttgtacggtacataaagatgtgttactatgttttctgtcgttcgtttacgctcgcaagagcagcagcagtcgctgctcgccagcacgtacttggcggttggatcgaccgacgaccgtacgtggcgtggcggttgctcttcgtcttctctgtgcgcatgtctctagtggtctggaccgtacctctgcattccatgattcttcgttcgttaccgcccttcctttttttttctgacagaaaaaaaaaattcttgtagctaatgttacatgaacgccgcgaaaccaactggatatatacccnaaaaaaaaaaaaaaaaaaaaaanaaagtnctctgcgttgttaccactgctt

SEQ ID NO: 164444 - DNA, 1400 bp, Zea mays
  Clone ID: MRT4577_8154C.1
acctcgaggcggcgggccgggtacgtgatccagaacccacccatggcttcaatcaacacagtcctcggtgcaatcttcgttgcttccttctacttctgtggctcccttgccttcttccctcctggtcctggtcctcaccacgagggagcccaccaccctccaatcggaagtactccaatcccaggtctttctacagactactacaggttgacatgcccgcaagctgacgagactgtggcgcccatactgaagaaggctatcgcgaaggaaccacgggtagctgcctcccttctcaggctcctcttccatgactgctttgtccagggctgcgatgcgtcggttcttttggatgacgctgaggaagtcgtgagcgagaaaaacgctatccccaacaaggattccattagggggtttgaggtcatagacgagatcaaagctgcactcgaggaagcatgtccgcagacggtgtcctgtgctgacactgtcgccctggcagccagaggttcgacagtgctgagtggtggaccgtactgggagcttccattaggaaggagggactcaaggacagcaaacatgaagctagcaaacaagaaccttcctccaccaaacgcaacactgcaccgtctcatcaagttcttccgaaggcaagggctggacaaggtggatcttgtggcactatcaggaagccacaccattggaagtgccagatgcgtgagtttcaagcaacggctctacaaccagcacagagataacagaccggacagcacgctagagacgagtttctaccacacgttggcgtcggcgtgcccacgcgccggtggcgacggcgagatacggccactggatctcgtcagcccttcgcgatttgacaacagctattataagctggtactggaggggaaagggcttctcaattcggacgaggttctgtggacaggaagagaccccgaaattgcaggcctagtcaagagttatgccgaagacgaggcgctgttctttgagcactacgtgagttcagtaaccaaaatggggaacataaatcccctcacgggtcacgatggagaaatccgcaagaactgccgtagggtcaatcaggagatctagtcgttgaaaggcttcagtttcagtcaggttccttttgcttatgacgggaaatttcattcacatgatgtcaactgtaaggccactattttcaatgaaatgtatctcatcatcttcttttgctctaaaatagtgcgtttattaagacaacgtttggttccagagtaacgtgggacggagtcactctgcttctaatctgttcttgtttgaattggttccatataggatctaaaaatgaaatactatgctcaaatattgacccaaaaaaaaaaaaaaaaaaaaaaaaaaaaaaatggacg

SEQ ID NO: 164445 - DNA, 380 bp, Zea mays
  Clone ID: MRT4577_81551C.1
aaaaatttatcgcctttgcaatggcagcaagcaactatcttgaattttctcccttgagaatcattacctacgtgttttcttttgttcacgtcttttattttgccaatatcaacgtgctttcgctttagctcgttcagtcctcaacaattgccttgacattcctcttcataacaacgaagacctttcattcccttcaaatttcctcaagaagctttcaggtagcgtctcttcaaaatccgagacctcccaacttcccatctctcaagatgaatgcgaggaaacccccatcttcactgagaattcaaagtctgaagcttatgaagttaagaaagttggtgaaagtgaagtgactgaagaatccgaaaatcacgttgctttta

SEQ ID NO: 164446 - DNA, 760 bp, Zea mays
  Clone ID: MRT4577_81552C.1
attctcctcgcgtcacgcgtgaacccagccggatccccaaacctccttccggcccgacgccggcgccgacgggggaccccctccgcctctcacgcgcgccgccgccgccgccgtcgccgtcccgtctccctcgccggggcatcgcgttccaccccgccggcgaccaggaacacggcactctgaagctcctgagctaacgtaggaggggcaaaaccatccagctgaagaatgaaaacacatgagcgtgctgccaacttggctcttgctggtttgagcttggcaccgctcgtgatcaatgtgaacccaaatttgaatgtgatactgacagcatgtcttactgtctatgtgggctgttaccgttccgtcaagtcaactccacccgctgagacgatgtccaaagagcatgctatgcggttcccgttggtggggagtgctatgcttctgtcgctattccttctgttcaagtttctctccaaggacctggtcaacactgttctcactgcctactttttcattcttggcattgccgctctctgtgcgacgttgcttcctaccgtcaaacgttttcttccagaaggatggaacgataatgccattgtctggcgtgctccatatttccactcactggtcggtggagtttaccaagtctcaagttgtcgcttcagtccctggatttttcttttgcgtatggtatgccatgaagaagcattggctagcaaacaatgttttgggacttgctttctgcattcagggaattgag

SEQ ID NO: 164447 - DNA, 304 bp, Zea mays
  Clone ID: MRT4577_81553C.1
atcttgataactttatttttacggtcgggtttatttaaaatttaaaaaatggcacccccaatggtgggcggttgaaataagggggaagcacccggcaaaaaaaaaagcttaaatggcattatttgtagatgattaaaaaaagcaaaaatgtttgacacattctgtgggaaaaatggtagtaatcgtcgcctgagcaagaagggataaatgtttcccacatcttgttggtaaaatggcctctaatgtttttgtctcaagaaagcaacaatgtttgccacagcccgcaaaaggaatggaagaacct

SEQ ID NO: 164448 - DNA, 788 bp, Zea mays
  Clone ID: MRT4577_81554C.1
cccgaaagaaaaacttaatctagacagcacgattcaaaaactgatcttcatataaatttcaaaagcatacatcatcattttcctcaaaacagacacatcacttaacaattacacacacaaatgaaatctcaaatacagtaccatagtgacatcatctactcaaatatagaagtcttccctaaccaaacaactccaagccaaaaatttctgcaacacaggatgggcacggatcactgtccatctgagtagaacatgctcgggtacacctagaatggctgaagctggatgtaccagtctctcttgaacccaaggccagggtcagtggaatcatcccaaatgacatctgcatcgtcacccagcccatgcaagacccagcgttgacagattcaaacaatagttgtactgaaaacttggccagaatgacatgcttaatactgatacaatgatggcccctgtccacgctcttgtacctaggaatggaacgacaataaacagcaccaaaccaagccattggaattcctcaacaggagcagtgtggcgtcgtgcccgctcaaagaggtccataattcgagtcgcatatgcgcttttctgagacagaaatgtcgcaagttttttcaggtacgaggatgataaatggtacatgcaccatgttcctgggcaagacaggagagagatcaaattctacttagtgaacctttttagaaactaaacggtgcattttgtgctaactgagacttgtgagttgtgacagcaggcacttttctctttaacatgttattagatgagaa

SEQ ID NO: 164449 - DNA, 706 bp, Zea mays
  Clone ID: MRT4577_81555C.1
caaaaaatattattttgattaattttgttatttttttattttttttttttttttattttttttttttttttttttttttttttttttttttttttttttttttttttgggtagacatcgtgggttttcttcatataaatttcaaaagcatacatcaatattttcctcaaaacagacacataacttaacaattacacacacacacacaaatgaaatctcaaatacaataccatagtgacatcatctactcaaatataagaagtcttccctaaccaaacaactccaaggcaaaaatttctgcaacacaggacgggcacggatcactgtccatctgagtagaacatgctcgggtacacccagaatggctgaagctggatgtaccagtctctcttgaacccaaggccagggtcagtggaatcatcccaaatgacatctgcatcgtcacccagcccatgcaagacccagcgttgactgtaatgcgtcaacgtggatttgtaggttaatgatatagatgggcagtagaggtggatatgtgaaataattatgttctcaatgtcgagttcaagcaattgggcttagctagggcctatatgcaaaagaagtaaaaactactcaaatctattttacgtaccagattcaaacaatagttgtactgaaaacttggccagaatgacatgcttaatactgatacaatgatggcccctgtc

SEQ ID NO: 164450 - DNA, 198 bp, Zea mays
  Clone ID: MRT4577_81556C.1
ggcgattgggatcctcgaggccggccgggtttgtcctcttttttctttgttcctctttctccttaacttaacgaattgatgcatgccgctgatgttcttcccctgagagagggattaacacttgtatcatttcatcgcttgccatttgtttgaatccattcaacaattcatccgaaaaaaaaaaaaaaaaaagcggcc

SEQ ID NO: 164451 - DNA, 418 bp, Zea mays
  Clone ID: MRT4577_81557C.1
aagggcttacgagtgcatcaaggatatcatcaaggtgaaacttcttagtggccagaggggggatcacaactcaaccgccgactaccgagcgagattatctgtcaatagggacacatctgaagttgcctacagtcaaatcggacacaccgatgggtgctacatctataccaccacagtcacctgagagaacaaaggcattatggactagattaatgagaagctgtatggacagtactgaactgaggctatacatggctgagctggtctgtgatgtcgcttgacttgcgaaatgttcagtggaggatagatgataacatccacccatgagttggtgcccataccctggatcatgtgacaaggacacggacagttacctgctgtacaatttttttgggaagataattgtcttgcttggtct

SEQ ID NO: 164452 - DNA, 307 bp, Zea mays
  unsure (1)..(307): unsure at all n locations
  Clone ID: MRT4577_81558C.1
ccgccccgcgccgcggtcgcgtgggcggtcgcgtgggcggacgcgtgggtctcagccacagcagtgtcgtccatccaaccaactacctgaattgaactactgcccttattcgcaccagcaacaactaccacncatcccccagtccagcccccaacccccancacnagctccccaaggacacgccgacaccntncaccacncccaccccnacactgcnccacccacgcccaacangcaaggcacacacccngnccacccccncaccaaccccagcaccganccacacgccnccccgacgacgaacccc

SEQ ID NO: 164453 - DNA, 618 bp, Zea mays
  unsure (1)..(618): unsure at all n locations
  Clone ID: MRT4577_81559C.1
ccgggntattatttactaatgttgaaagtttatgttttaacagccgccggggggggggggggttaaattttcgtactttccagctttagtggctcgccaactaaatctagcatgggtccctgcttcatataactaaatctagcattattgtcttcttctatttgttgtacaagtaaaagatagaatggaactcaaatggggggggggtaacttttgtggttacttgaattcatatatatttagcacaaataggtctgaccaagtttcccccccactattagtttggatttagagtacacttatgtatgagttattcgacaatgcttatttattagatattgaatggggcttatctatactatattaattataatgtgattaaatatatgtttatgtatatttctctttcaaattattataatatggtatctgattataaattaaagaatttactgccatgtaaatcatttcgtttaaaagtacacaaactcggtcctatagcttactgagaactttcatgacctttaattgttgatcagagaggggagcttgatagtaccataatctttaaaacctggtttagggggtatatatatatatatatatatatatatatgg

SEQ ID NO: 164454 - DNA, 335 bp, Zea mays
  Clone ID: MRT4577_8155C.1
tttgcagtcggcgcgacggcactgactcctcagaacacggatagccgtagtcacacacactctgctgacttgcggcaagcagggtaacattttccttcaggcatgcgcatggagaagactcacatcaacattgaggtcattggacatgtcgactgtggcaagcagaccaccactggccacctgatctacaagctgggcggtattgacatgcgtgtgattgagaggtttgagaatgagcccacgttgatgaacacgtggacatataagcatgcgagcctgcttgacaagctcaaggccgaccgcgagagaggcctgacaaccgagtactgatagga

SEQ ID NO: 164455 - DNA, 2276 bp, Zea mays
  Clone ID: MRT4577_81560C.1
cagaattatatgcataaacatgtagtaggctattattctcttttatgcaggatggtgctcaaattttgaaaaatagatgtaggtgatccaattatattttactaccatggttcattgagcggcttgcttgtggacattccttttgtggtattttttctatatattactattgactcatgtcataaatcagttagttatattttactttgttgatgaggtgacaatataatgtttcatttgcaaatttaggtgaaagtgaaggttgtttgcccctcataatgttccatgaaaccgaacaacagtcaaactgttagttgtgagttatataggatctgtttattttcctattttcatttctctaattttactacacatcttttttccccacccattccaggatcattccttaatgcatttggatcaattgttctcaatgcgcctgttggaatcaagtaagtttaattcagaaaaaaatttgaccttccattgttagttggcatatgatgtagcaacggtaaaactagatctcgatgaaagtcattgacatgtgcaactaattgttagaaaagtgtactgattcgaagtatgtttagctatagtttttatctttgtacctcctcttttagatagagttagattgcatcagatatcttctctcttgtattcccaattgcaaagtaatattggttccatctatgttggtagagtagaaagaatagatgtgatcggtttgtgccataaaaaaaaaaaaataacattgtgtttattaactgcgggagttattacctcagcttattcttagagttgtcacatattgccatgtccttcataaaaggttgagtgtcctaattctgggtgtccatgattggaaggtctcttgggtgcgttttctgagggactacaaaatcactcgacctgaaacgagcttatactttcgagctcacgacttatcttgtggaagcgtctgtctcctggactggctcggggggaagggtccagccgggagccccccccaccgccgcctttttatttcatccacgctgctcgtgctcgctgcctgcttcttgcgcgatcgtctcggcctctcgggactctagagtggcggccggctctccgcctgttcttgtcgtcgctgctcctttccctgtgagcttaaaatatacacaggatgtcggaacgttctgagagtgcaactgaaaagattatgagcagcatcatggataccattgctgacaaccttcctaagcagaagtctgggaaatttgatccaggttcagtctctgacaaagtgaagaacaagctgtttggtcgtcagaagaccttgcatggagttctgggtggtggaaaacctgctgatgtgctgttatggaggaacaaaaaaatatcatcgagtgttctggctcttgcaacagctatttgggttttctttgagtggctcgactaccactttctgacaattgtttcatttgcccttgttcttggaatggttgtccagtttgtttggtccaacttctcaaacatgctaagcagcggatcccgttctcaggtgccccgagttgaattgcctgatgagttatttgtgaacattgccgttgcaatcggtgcccaagtaaacaagttcctgtgcttccttcaggatgtttcttgtgaaagaaacttgaagcattttgtagtggcgatcgcaggactgtgggctgctgcggtgattggaagttggtgcaatttcctgactgtcatatatgtcgggtttgtttgtgttcacacgcttccggtgctctatgagaagtacgaagaccaagtggacgatttcctctacagccttcttggtctgctgcgagatcaatatcagaagctcgaccaaggcgtcttgagcaagattcccaaggggaacatgaaggctaagaagaacgagtagtttagcaggtggtttctcgtgaatgagatcaatatcgttttgacttgtgtcgattattaatttattacctaaggcgtgtgtgccattctgaacctggctgctagttcatcgcccaccggggttttaaactactaagctgcaatgcacaagtaatgaagtgtgctagttcattgcccacacgggtactaaaaaaaaaaaaaaaaaaaagcgtttagcaaaaaatgtgtagatgcgggggtttgacccacaacctagtgtatgagagacttaaacacacccatctatccagtgcgactgcaattttaatgtgttatatgttgaattcttatgctaaatatatgtaatctattatttttaaaat

SEQ ID NO: 164456 - DNA, 181 bp, Zea mays
  Clone ID: MRT4577_81561C.1
cattaataaaaacgaaaaaataagggcggttttaatttataatcagatggcccaagtcacaagaaagcgggttcgggtttttaaaaacaaaaaccgcctccaaaaccaaagatcaacagcttgggaaataactaagttataaagacccggggacgggcttatatttggataccaactgggg

SEQ ID NO: 164457 - DNA, 218 bp, Zea mays
  unsure (1)..(218): unsure at all n locations
  Clone ID: MRT4577_81562C.1
nannnnanaatttaaaccaaaacaaaaaaagaccaanaaaaggggnanaataggcggacaaccccgaggccacacaaganagaaaaaagccaaagacaaacaaccacaganggaaaccngaccagacagaaaaggccacgccnnncncaccccngaacagagacgcagcgccgnagggccaaggcaaacagagacgcnnnccgnccgcagacggacac

SEQ ID NO: 164458 - DNA, 328 bp, Zea mays
  Clone ID: MRT4577_81563C.1
gcttgcatcctttacatcgaccgcccttccttttttttttttttttttataaggatttttttaacaccgggcaaatttaaaaataactgcgggtttctatactttctatccaaacccttaaccatcttacctgggtacaacacccatacacataatcctgacaattttatccacacatcacaccgttttaacttattaccgaccccaattatccacccatgctgagaaaaagtagcgagtacagcaacacccctttttcgacttatacggtctcacgcccttcaactaataaacctcactcttactcaccacttgcaacaacaactac

SEQ ID NO: 164459 - DNA, 432 bp, Zea mays
  Clone ID: MRT4577_81564C.1
agcaggggggcgggggagtttttccttaattccgagagaaaaaagcaaaattctgtttttttccttccctaaacccttgcccaagtttgggcttaaaacataaaacaaaagcgagcccacccccgagccaatacacgacagcccaaaagtaaatattaaacccagtctggcccaaccacccggggatttgggcaaaaagtccgggccccacaaccggggaggggcacttgaccttttttcggccccccacaatgcttgtttgaaaacacccccccccttttaaaaaattgtttgaccccaaacaggggcaaacggaaagcccttatggaaaaaataacggccctcccagggggccaattttcgggggcggccaaaccaggcaaccaaaatttgttgaaccaggcgaagtcccttgggaaccccccatgttta

SEQ ID NO: 164460 - DNA, 269 bp, Zea mays
  unsure (1)..(269): unsure at all n locations
  Clone ID: MRT4577_81565C.1
cgccgnntcgcctacgccgttctggatgtggatggtcattgcgttatttaccggggccaccgtctaccagctctactgttattttttcatggaccggngcttcctttaggggggggggggggggtttttttttnnnnatcannttattcttatnaacggggcgtgtactatgcttntatgatggtcaanctngtgctgtgcctagcctggggcgagagtttgatgaaagttcggtttggtgtggtggggtgtggtctgctggattttta

SEQ ID NO: 164461 - DNA, 485 bp, Zea mays
  Clone ID: MRT4577_81566C.1
ctcgagccggccggggccaaggatcagtcacgtctcccagatctaactccccccgactcacgaatcccagagggcctccatggcgacgcaccgccactgcctcccactcctcctcgtggccgccgccctcgccctcgccgccgtccctgctcgcgcggcgctgggcggcggatgcgtcccgctactgaacggatgaacatctacggccgagggaacgatatcagaaatctacccaagaggagataggacggctccagcacggaccaggcccccggtgaggacagcgaggtcatcctgtacccgcaggccatcttcaaggacccattcaggaggggcaacaacatccttgtgatgtgcgattgctacaccccaaacgacgagtcaatccccaccaacaataggtacaacgccgccaagatcttcagcagccctgaggtcgccgacgaggagccgaggtatggaattgagcaggaatacaccctcct

SEQ ID NO: 164462 - DNA, 498 bp, Zea mays
  Clone ID: MRT4577_81567C.1
ggccggcgcccgtccgtcgtcgaggaccactggttatgatggggggtttcgtaagctggcccgaaccaaataaaaatttcttctttggccggcctacctttaaaatttaaaggcaaatttttggttgtaaataaaaccaaacaaccccgggcccaaaaatggtgtttttggcaggctcccaaaagcgaaaaggctaaaaaagaagggctttatccaaaagttaattaccaaactttgggttccaaggttcctaaaaaaactatgcttgtgggctagcctttgattggttttcctccctttcaaactccttaacggcagttatgaggttgcaacttatgccctttaggcttaaaccactttcctccatttcctccaggagtttttaactttttttcaatcccttagcctggaaacaaaaggacggaatcagttggccatactcatccactttggggtgcaacccattttttttaatctccttgaggcactcattggcct

SEQ ID NO: 164463 - DNA, 555 bp, Zea mays
  Clone ID: MRT4577_81568C.1
ccggccggcgcctgctgtgcccgatacaattggcgcttgaggctatccaccccgcgccgcgccgatgtctccaagggggatctgaatgagaggcttgccaagatgtacgacctgaaggaccccaacaccatcttcgtcttctagctcctgacccacttcaagtggaggcaagtccactgggttcaggctcatctactataacctcgattctgcctaggaacatccagcccaaatacgcagcctcatcatgaatgggcttgctaataaggctgagaagtccagctagcaaatgatacacgagaagaacagggcaataacatccgtggtgccaaaaatagccaaggttgttgacgtcaataagaagcaagaagacatttatatttctggattactgtcctgagctctgactgacctcctagttgcaatgaaataactatgctctgggtacgatgtgtacagcactctacaataatcgaaatgttcgaattcctggatgagaacctacccctatcgtatgtaacatgtggtgacatgataaggctattttgacagaaa

SEQ ID NO: 164464 - DNA, 366 bp, Zea mays
  Clone ID: MRT4577_81569C.1
gttgcttacttattcatgatattatgtaacttgtttggaggaattattttttgtccaagctacaagtaaacaaatctttcccctcagttactccccacagacaaaaaagaattctatctatgagtgtgcgacccctgtgacatgaacaaccaacagccaaagcaaaagcaatggagcagggccgtgatcattttcgtacattctgtacaggcggagcccctactgggactaccgatgttgagaacaattgcgctcagagagcgagcccgacccttaatgcttgttctgggcggaaggacgtccttctcgaaagccgcttcggggggacgaacacctggtcaatcacccacccatcggaattcatga

SEQ ID NO: 164465 - DNA, 491 bp, Zea mays
  Clone ID: MRT4577_8156C.1
ggttcaaccaataaaataacacgggccctcgggattcaagggcatggcatacagggggcataaaaattaaaagggaagggtcctgatccttttggccaggggacaatctccagtaaggttttctgaacaaatttaacgggtaaaaggctgtacgtgctccaaaaaatttttgggccgtttcctttatgaatgtacaaacggttttcaccccatgagggggggaaaaaaggggtgggatcataacagggcgaaagttttaaaaagctttacttttaaggatttcagattggtttttccacatgacgcgagggttaagcttcacagcctggctttaaaaaaaagccccatttatatgcatgtacggttggtttagtatacggggggccatggaaggaagctgctttgtgttttgtatggccactgcgcgataacttatgtaaagtgatttgactgggtactgttgggggccgaattttgaacctttgccgggc

SEQ ID NO: 164466 - DNA, 175 bp, Zea mays
  Clone ID: MRT4577_81570C.1
gaactctcctgcttatttacagcagcttcaactactaccattcagccagctagctggagtaaggttggctatctaacaattataaccactattacaacagttactatcaggagcatttattgtaacataacatcactgttacaactactacaacaacttgcactacaaaaacttg

SEQ ID NO: 164467 - DNA, 122 bp, Zea mays
  Clone ID: MRT4577_81571C.1
ggatataggaccccttacaataaacaggggtggaaaaggtaaaatgcaggggacaacagtttaaagggttttcaaaccaaaccagaccgggtttaaaggccccccgccaaaaacaagggggg

SEQ ID NO: 164468 - DNA, 1847 bp, Zea mays
  Clone ID: MRT4577_81572C.1
gatgaatggggtacaagtttccctttcgaaagcttgttaactaggaggtggagagataccagatagaactaataaccagactaactggccagcagtactatgaaaagctatcaaaacagcaggaattggcagtagagtgatgaaaagactaactggccagcagtactatgaaaagctaccaaaacagcaggaattggcagtagagtgatgaaaaaattatagcaatcaacacacccccttaaacatagtatttttcgcactctagaatatttaccatactcatatcctcgtgactctttccttccgagttcatcagcgacccaactggggggatgttggtaagtggtgggggaagcgaaggtttaggtacaggttgtggcacaaacgattcaacccacagctttggcaggtcttcattccattcagcaagtcgccccccatatggtctttctggaagacccaccaacaagtacttttggtcccctcaaagccaaatgggccacctccatcttttccgggcacttgaattcaaaatcgtcgactaacccaaaattttccaactactgatattgacagttcttcattccacttcagcaagtagccccatatggactctcagtcagacaccccaacaagtaactattggatccccgcaaaagctaaaatgagccccctcctcatcttctccttcgtcttcgtcttcatcatcctcagaaaacccaaaatccaccaatgcttcttgtcaagatcagtcatcgtaggtcaccatgtatttctggcgcaggattctatagcttcaaaaaatgtattgaccccagaaccagaaatcgcagatactccaacagagcgcaaattattgtagaattcgtcaagaaccagagagaggcttcgggtatatgtagcggagtatgatttgtcagattccacagctgtctgaaatgcctcaaagtcttgcatccattcaatggcaaactcatgcttggcaacatcaaccttgttgaatgtcaggactagaggaaggcgagttttgtagagaatactacaggcataaagcatgttgctcataaaagtaacagggtttgttgatctcggagtgtcaacaacatatgctacaactgttggaaacgtcgatgcaaaagcttccgtaatgatagctcctgaagctgaccaagtgaagatctcaatctgaccaggagtgtccaccagtacataatccaattgttctgcacgtctttcaatgacagatacaacctcatcgaacttggtggcaaacaagttaagcgaggtgaggatgccgccattgggaccaaggctgtactccttcatcacatccttataccgcacagtgtcacgaatatcaatgttggcaccgaatggcagggtcatcactgcagggtccaggttgacgacgtagcccctcttatttgatgcttgcgtatcgcataccagccggtgcatcaaggtcgtcttccccgtcccggccatgccgatgacgatgataatcacaggcttcttcttgaaattggtgcgccccgggccgatagagaggctaccgatggagtccgcgagctcctcgcccttcccgttcccctcctccgcctttcccttcccctttgtgttcgtctggtcctcgaggtccatctgcgtgggcttgctcgaggcggccgggtccgagtcgacgtccatcggccgcgcgggtggtttagcgtaaatggtggtcgccaactagctagaagagaggtgtagccgccaaaccctaggcttcaacggggggtctgcgtagaagacgaggaactggaggaaaggaaatgaacaaggggtcccgcccgcccgagagggcgccaatt

SEQ ID NO: 164469 - DNA, 636 bp, Zea mays
  Clone ID: MRT4577_81573C.1
gcgaggagctcgcggtctccatcggtagcctctctatcggcccggggcgcaccaatttcaagaagaagcctgtgattatcatcgtcatcggcatggccgggacggggaagacgaccttgatgcaccggctggtatgcgatacgcaagcatcaaataagaggggctacgtcgtcaacctggaccctgcagtgatgaccctgccattcggtgccaacattgatattcgtgacactgtgcggtataaggatgtgatgaaggagtacagccttggtcccaatggcggcatcctcacctcgcttaacttgtttgccaccaagttcgatgaggttgattgctataatttgttcatcactctactgccaattcctgctgttttgataacttttcatagtactgctggccagttagtctgtttattagttctatctgttatctctccacctctaagttaacaagcattcgaagtggaaacttgtaccccattcatcttcaggtatgcctgttgtttagcccttgtgcttacctgtctttgtttgattgaagtattgaactgtatttccagtcaaatctaatggaaaaggggtcatctggtttaaaattttgaacaacagttaggtgaaaagtagtgtgtaattc

SEQ ID NO: 164470 - DNA, 1671 bp, Zea mays
  Clone ID: MRT4577_81574C.1
ggatgtgttaactcatgcatttcattgaagtgacagtgatgccgccaccacataaaaagtcgagtgatagccagttcgattgtagattacattataccaaacatattcgcttccccttaaacatagtattattcgtactctagaatttctaccatactcgtatcctcgtgactctttccttccgagttcatcagcaaaaagactggtgggatgttggtaagtggtaagcgaagcgaaggattaggtacaggttgtggcacaaccgattacacacacaacttgacccatcaacttcttactcgcacgtacaattaatatgattagtacagctcagcgacgagataaactttgacatgaggtcccaaatatatagcataaatagccagcagtggggcaccagaatttaaaagagtagactaatagcaaagtcaacaacctactgatattgacagttcttcattccacttcagcaagtagccccccatatggactctctgtaagacacaccaacaagtaactattggatcccctcaaaagccaaaatgagccacctcctcatcttctccttcgtcttcatcttcatcatcctcagaaaacccaaaatcttccaatgcttcctcttcttcctcctcatcagcaccatccatcatgtctgaaacagattttttttccttcaaaccagtggtgagcaccacagtttgtcctttggatttcatcatatctttctgcaatttttccatattctccttcctgcgctcttcctccaatctttccttttcagcaatcctcttgtcaagatcagccctgtaggtttccatgtattccttggcgctggcttctatagcttcaaaaaatgtattgactccagaaccagaaatcgcagatactccaacagagcgcaaattattgtagaattcgtcaagaaccagagagaggcttcgggtatatgtagcggagtatgatttgtcagattccacagctgtctgaaatgcctcaaagtcttgcatccattcaatggcaaactcatgcttggcaacatcaaccttgttgaatgtcaggactagaggaaggcgggttttgtagagaatactacaggcataaagcatgttgctcataaaagtaacagggtttgttgatctcggagtgtcaacaacatatgctacaactgttggaaacgtcgatgcaaaagcttccgtaatgatagctcctgaagctgaccaagtgaagatctcaatctgaccaggagtgtccaccagtacataatccaattgttctgcacgtctttcaatgacagatacaacctaagaatgaatattaaatgtcatatacctgaacaaaataaaggtaacagaaatgtgcatttcccatataccaccataagtacaatataatttgcagcaaagttaaattattcagtgtggcaacagataaatcccctggtgttcctttgtggactgaattgagcacaatctccatgaaagcttgaatggaatggtaagagttgacatgacatccagagtgctttattagcacatttaaccaaagtcatcattcacaaagcacatcagttcagtctttgatcccaaatcatgttatgttagtaaaatcgtaacagtgcacaacattcttgttaccaatgttaatgcattggatcagcaaattgaaatatcg

SEQ ID NO: 164471 - DNA, 1447 bp, Zea mays
  Clone ID: MRT4577_81575C.1
cggacgcgtgggcggacgcgtggggtacgcagatggccatggagggtcgtcgtcgtcgtcgtctcgttctgtggctcgtgatatccgcgcaaacaatgctagttgccgccgcggccggcgccaagcggcaggcgccggtgatgttcgtgttcggcgactcgacgctggacgtcgggaacaacaacttcctgtcgggggcggccgtccccagggccaacaagccccactacggcgtcgacttccccggcggccatcccaccggaaggttcagcaatggcgacaacacggctgacttcgtcgcgaagagcatggggttgaagagtagccctccgccgtatctgtcgcttgcacccaacggctccagccctctgctcgcgcagactgctctcaccactggtgtcagctacgcttccgcagacgctggcgtcctcgactcaaccaacgagggcaagtgcatcccgttgtcgacgcaggtgcgctacttcaacggcaccaaggcgaagatggtcgccaagaagggcgccgccgcggtgagcaagctgctggccgactccgtcatcctcatgggcatcgccaacaacgacctgttcgtgttcgctgccgccgagctgttgcggggcaggtcggccgcggagcagaagagcgacgccgccgcgttcctcaccgacctgctgtccaactactcggccgccatcacggatctgcactccatcggcgcgaggaagttcgccatcatcaacgtggggctggtggggtgcgtgccggtggtgcgggtgctggacgcggacggcgggtgcgccgaggggctcaacaagctggctgaagccttcgacgtcgcgctggggccgctcctcgccggcctcgccgacaagctgccggggctgacctactcgctggccaactccttccgcctgacgcaggacgccttcgcggacccgaaggcgtcagggtacagcgacgtggccagcgcctgctgcgggagcgggcggctgctggcggaggcggactgcctgcccaactccaccgtgtgcagcgaccacgacagccacgtgttctgggaccgctaccacccggcccagcgcgcgtgcaacctcacggcccgtgcgttctacgacgggccggccaagtacacgacgcccatcaacttcatgaagctggcccaggccagttaatggtttctgtatggctgtccacgaatacttactagccacgaatacctgtgaaaacagcaaaacaaaaaatgggcaccgttggccattatacatggaaacttgttaatttcttaggaatgtcacgtggctcgatcgaggccaagccatgtacgtacaagttgttcaattatttatgcatgctgctgcatgtatagatgtccaatttggcggcggcatgggcacaattcggctcgacccgtcactacaccaaaaaaaaaaaaaaaaaactctcgtgc

SEQ ID NO: 164472 - DNA, 1050 bp, Zea mays
  Clone ID: MRT4577_81576C.1
gctgcttctgctgcgcctgcctcgtggcttgccggtgtcgaccttgtttctgggaaaggggcggttccggagcccgccaggaagatggttgcagggagatttgtgattgtgtcctcgaggggtgactggattctcggtgtaaccttccgagcaagtacaggattcccgcttacccaaggactggatggcatccaggacatagggtgctatgagaactgtcttaagtggccttcttgcagcatttgcttggcctgctacgttgcttgccgctacagattttattgatagtaaatggtctgttgctattgacagaccagataaggcaggaaaaatgcttgcagaagtgcttcttaagggactgcaaggaaacaggcctgtgactcttgttgggttctcgcttggagcgcgagtcatattcaagtgcttacaggagctagctttatcaagcgacaatgagggacttgtcgagagggttgtactccttggtgcacccgtttcagtgaaaggtgagaggtgggagcctgccaggaagatggttgcagggagatttgtgaatgtgtactcgagagatgactggattctcggtgtaaccttccgagcaagcctgcttacccaaggactggctggcatccaggccattgatgtgcctggtgttgagaacgtggatgttaccgggcttgttgatggccattcttcgtacctgtcagctgcccagcagatcctggagcaccttgaactgaatacctactatcctgtttttgttccccttccggaggtcaacaaataacagatgtagataggttgacaatagcagagaaaagatgtaaatatcagggaggaatataccttcgaatttacacaaaaaatgttacagctgtctagatgatgaatgctttgtagtttcttggtgactaatcctaatcgtacagtagctctagttacgtgtagatatctattgtgtacatagtaaaaacaaaacaataccgtctattgtgatcgcaagaaaagcttgaatctagaatagggaagtaagtacttccgtccacaagg

SEQ ID NO: 164473 - DNA, 290 bp, Zea mays
  Clone ID: MRT4577_81577C.1
aaggagggaaagtcttaccatgtatccttttttaaacaaccgggagttcgggacagacaaattacttctaatacccggacccccactatgacaagcacgcacacctccgccgaagggcggtttggtgattgcttgatttattttttagggggggggggaatcacacgggaggggttgctttggaacaaccataaatcacgtttcatagggccatcatcctccgaaggggttttggctcccccacgccctggtgcccccggaccctacttggagcataccggagcaccttt

SEQ ID NO: 164474 - DNA, 515 bp, Zea mays
  Clone ID: MRT4577_81578C.1
aacataaaacatgaactgcaaagactttcaagtcacttgtattttcacatattagggagactaagatcattccaatgactcgaccaataggttccttcctgaaaaaaagatagcgtcccatcccatctactcgtcagcttgaaaccgccatgtttgaatcacttcttcgcatggcttccaagcttcggcctctgctccttctctccagccctcctccgccccttcagcaccgcatcggtggcagcgtcgccggcaccggcaccggcacccttacgggcagtagccacaggagcgccggtggccgcagctctgctgctccttcctttcatcgttgctgtaacctgcgcgtcgtcgcctgtcgtcgcagcgcgtgggcacgacgacagtctcctggcggcggcgccagcgtccaccttccgatccttggcggcgccagctgaagaaccattcggccgaggcttcgccgtggtcgttgtccctgtcgtaacgttcttcggcgccttgtccggtctggc

SEQ ID NO: 164475 - DNA, 363 bp, Zea mays
  Clone ID: MRT4577_81579C.1
atggaaagaggacgcggggggaaccggcccggaaaacccgggacgagccacgcgctgatatacgcggacgcaacaagagggagaaggggagagtaaacagaacgcgaagcaggcgcacaagacgggaaggagcgaacgaccaacgacgaaaaggggaacgaaccggcggaagaaggccaaaacaaaaaaaagagggacaaggatagtgggaaggggggccaaccaaagaacaaagacacaaggggaaacatgccaggacggaacgggatccaccaggccaacaggcaactgacaacgagggccgatactgacaacaagacatggggaaaggaaggaaaaaggcagaggaagaaacggaggaga

SEQ ID NO: 164476 - DNA, 243 bp, Zea mays
  Clone ID: MRT4577_8157C.1
aaccaaacgggcaaatgggaggggaataaactggtttaccaaactataaaaaacgtactacgtatgcaaaaaaattgggcaaaaaaaaaaaaaaccgggggtgactttaacggggaaaaaaaaaattgggggcatgatagccccccatgggcagggcaggaaggaacacccctcgaacgaacgattttttacaccatttggggttccgaagggcgaacccaaagggccccggggacccgtggg

SEQ ID NO: 164477 - DNA, 229 bp, Zea mays
  Clone ID: MRT4577_81580C.1
gagccacagccaccactccaccagcagggcaaagctggaggatggccgcagacgcagcgatgaaggctctcgcggtcgccgcctcgccggtgtcggtacggcagccccgtgggtacgtttcaggtggggctagccagcggctgcagacgccgttccacggcgtgtcggtgcattgtcctgggcgaccgctgcgggcgacgccacggggggggccgcatgtgggggaggc

SEQ ID NO: 164478 - DNA, 293 bp, Zea mays
  Clone ID: MRT4577_81581C.1
cgcgcacacggacggccacgcgttcgtcacaggccacccgcccccttttttcgtgaacgcgccggcgcccaagatcccgcccgcaaacccggaggcgtggcccaacgatctccgctgccccaacacgctggaggtcatgacggacccggacagcctcccctccggccacacctacgagcgccgaagcaaccagagctggctcgacggggggcacacaagctgccccgtcaccaaccaaccgacgacgacctacgcgccggtcatgcacaaccacgcgctgcgccggcacaaag

SEQ ID NO: 164479 - DNA, 558 bp, Zea mays
  Clone ID: MRT4577_81582C.1
agcaattcaatgagaaggttcagcgctttcaattatatttaaaataattgttatctcgaccgaaattaattgcataaataaccatggcaactcaaggtaaagatttggaaaaaccaaaatcagaatcagcaactgttcatcgcattcgaatcacattgacatcgaccaatgttcgttcgttggagaaagtctgtgccgatttgatttccggtgctaaaaagcaaaagcttcgtgtcaagggaccagtccgttggccaacaaaggttcttcgtattacaactcgtaaaacaccatgtggtgaaggtagtaaaacttgggatcgtttccaaatgcgtgttcacaagcgtatcattgatttgcattcaccaagcgaagttgttaaacaaatcacatcaattaacatcgaaccaggtgtcgaagttgaagtcaccattgccaatgcttaaattttaatagcatcaaaatttcattcaaatgtgaacacaaaaaaaaatgacttgattgttgccgaaaaatacgaataaatattgaaatatttttcgaattgtcaattcagaa

SEQ ID NO: 164480 - DNA, 1088 bp, Zea mays
  unsure (1)..(1088): unsure at all n locations
  Clone ID: MRT4577_81583C.1
ggatttncccagaccgcccctacatctaacaaaaaaaaaaaaaaaaaaaaaaaaaaaaaaaaaaaaaaaagggtacccccgccatcgcgtcgcgcccgccgctctcctctcctgccggcctgtccaacttcaaaagagcacgcgcttctgccccccgccctcctgcaccgctctccttccccgacgatggatcccgcagccatgttgagatccccgtgctctatcgtctcgccgggctccttattaaccgccccacttctcccagtacgcctcgccgtccagccacgccgccgagtgcctggttttattgcgccctccggcaggccgtccgtcgcgcggcgcgccgcggccggagacaagttcgaggccgagacgcccatagagaaaagtttccctcccttcccaactgtcatggacatcaaccagatccgtgacatcctgccacataggttcccgtttcttctggttgacagagttattgattacaaaccaggagaatatgctgttgcaatcaagaatgtgacaataaatgataacttcttcccagggcatttccctgaacgacccataatgcctggtgttctcatggtcgaggcaatggcccaggtcggaggaatagtgatgttgcagcctgaagtgggtggatctcgagagaacttcttttttgcggggatcgataaagtgaggttccggaagcccgtgatcgctggagacaccttgatcatgagaatgactctgatcaagctgcagaagagattcggaattgcaaagatggaagggaaagcttacgttggcgccgacctagtatgcgaaggggagttcttgatggctactggatcagaatgaaggcaggagacacatggattgatggatacataatatttcaagtttttactgtgaaatcagctttccagtctaataagttttgaactgtgtctgtaatagcggtgtaatgtcgttgccttgtagtcttagtgagtgttgctgtgttggtgtgtatgagtaacagggctctaaggttaacaaccactgccatggaatggaacaaatggaaactgacagcgcgtttggttgtttttagagcgttt

SEQ ID NO: 164481 - DNA, 883 bp, Zea mays
  Clone ID: MRT4577_81584C.1
cattgggtacctcgccgcgggccggggaacctaagacaagtccgtttgtgttgcgtggcgtgattcgtgtgaaacaccttcgagtcttcgatcttcttgggcgccgccaacgcgccggcgccctccgcccctgcgcctcagcctggtaccgtgcctgtgccgttctggtcctccgccctccgcatctgcctggtaccgtgctagtgccgccttcgcatccgtcctccgcctgggtctccgccctccgcggctccgccttgcgactttaccctgcacggcccgccgccggccggtcgcccgtccggagccactgacccgagtttccgtccagcactccagcgaccagcgcctgttcgtccagagtaccaacagatctcgtcaagaggtctgaaggatgaggaaaggactgcatcctcagatgcaatggatttcatatgtgacgcagagtggtaggctgatcaatatcatgatgaccaaggtgaatcatactggcaaagtgtaccacatgagggccaagcggcaaatggctcaaagcctcggccagattgcgaagttcaaacgtcgatatgagcaggaagcagagaaaagcaaagacaagtaggatggtgttgggaaggaggtgtagcctctgtggtcttagtcagttctgttgactgcgaagttttcagctaaggatcttcgattgaatgattttattttagatcacatcatcttttgctccacttcataattgtgttgtaccccatcttgagcaaacactttggcacttgttgcatcttaaagccccaagaagatagtctatggatcgcctttgctctgaccttcgagttttatggttcatattttttctaaaaaaaaaaaaggccgccgttttgagatcaag

SEQ ID NO: 164482 - DNA, 253 bp, Zea mays
  Clone ID: MRT4577_81585C.1
cccacgcatccgttatgacttaagacaattttctatgtatactacaaaacgcacaacaacggcgacgtcaccatgaagacgatgatggtggcgctcgctgttctggctctcattgctagcgccacctgcgcgcattcaacacagacatgcggctgccagccacctccacaacttaatctaccgccgccggttcatctaccacatcctgttcaactgacacatcaagatcatccaccaccacaagatcacctgc

SEQ ID NO: 164483 - DNA, 581 bp, Zea mays
  Clone ID: MRT4577_81586C.1
ttctcatgtccggtgctcttgtgtctactggttataaacaataaatgctatgatggagctaagggtgatctgtggtcatgtggagtgattttctttgtcctcatggcggggtacctcccatttaaagattcaaacctgatgtcgctttacaagaagatcttcaaagcggatttcagttgcccatcctggttctccacaagtgcaaagaagctcatcaagaagatacttgatcctaatgctaacactatgagttctgttgtttgtagccatcatttaactcattttgttcaacatctgcagagttaataactgtgtaccatcgttctgtggcctgtgtagataatagctattgcggagcacattaacaatgagtggttcaagaaggtttatcaacctcccagatttgaaacaacagatgttattatggacgcaactttgatcctgaatgcgcacaactttagttggtgcttctaatatcaatgtcactgacagccagatcccactgactgtgccaaactctcacattggaagagatgttgttgttcacgctgctcctggtgatcttagaaaggagctattga

SEQ ID NO: 164484 - DNA, 433 bp, Zea mays
  Clone ID: MRT4577_81587C.1
tggcagagctaataactgcgtaccatcgttctgtggcctgtgtagataatagctattgcggagcacattaacaatgagtggttcaagaaggtttatcaacatcccagatttgaaacaacagatgttattatggacgcaactttgatcctgaatgcgcacaactttagttgttctgtctgtttttagaggattcatttttagataggttgaatattgtcaaaatttggttgttcgaaatggttatgattgttgagttgattcttgatagcatatttaacaataacctatgcgtgcacaagtgtccctcattgcaatgcacgggcatatacctatcttgtcactgagtttgattctttggtgccaggtgcttctaatatcaatgtcactgacagccagatcccactgactgtgccaaactctcacattggaagag

SEQ ID NO: 164485 - DNA, 539 bp, Zea mays
  unsure (1)..(539): unsure at all n locations
  Clone ID: MRT4577_81588C.1
tgtcaccatcactcgctgcatcactcacngcgagcatagcacgcagtgtcgcgcacaacctcgcatgttacgacgtacgacgacatcatgcggggcgaagccgactccggcctgtacatccgcttcgtccacctgcccaccggtgagctccacgtcgtccactatcgtcctccaggacttcatgaagcgctccatacagctgcacactgctcacgtaaaggaggccgtctgcggattgtggcgcccgaagcacgagaaccagacggactacctctgctatagactatgacccatacagctcaatcatagagccgactacaggctcctacgtgcaagcgctgaacctgaacctggtgctcgagctgcacctggcggcgatagacccggagtagccttcaacacggccatctgggtctggatgagcccgcagtcgcccaagccctcgtgccacgccgtgatgaccggcgactggaggcccatggacaacgaccgcgccgcggggagtgctcccggatacagactgaccacgaacatcatca

SEQ ID NO: 164486 - DNA, 347 bp, Zea mays
  Clone ID: MRT4577_81589C.1
acatttcttacgaggcacatcatgttactgcgcgagggaaggggacacactggcgactggacgctggatccacgtgcacagattttgcaaaccaggcgcttacacaactgatgggatcagtgaagggggtggatgaacccgccaaattcgaggaatatggctatgccctcacactaaactagggcactgaatgggggcagccagtgcggtctgtggcggaagagaaggattatgttatggccatgactctgcaatttgtgaaccggcttatcttctacaagaccatacacattcggccaaaagattactggtacaccaagggcgccggcaacgaatgtcttggaatg

SEQ ID NO: 164487 - DNA, 209 bp, Zea mays
  unsure (1)..(209): unsure at all n locations
  Clone ID: MRT4577_8158C.1
ggatatatttgacttgtgtacctattagatcttgaattaactattgtgatcatatattgatatgaactcccaagttttctatgattctcggtattggtcgaaatgacaaagtattagacaatacttgagtacncactgaatatgctgtagaacttaccacttctttttagttgcgtgcaaagtatggcagattatcattgtcctcaaat

SEQ ID NO: 164488 - DNA, 340 bp, Zea mays
  unsure (1)..(340): unsure at all n locations
  Clone ID: MRT4577_81590C.1
cccactcgnccgaaagactgcccatgaagcagctgtgagggtcgtgctgaaggtatcccaccaggatagggccataccaggaaggtgatgagcagccaatcgaacacgaagagtatcagggcatccgatggcttataacttcattcctatcgggcacagacagtcatcagcatcgaggggattgacggagccagcagaatgtgggaggcttgagcctgagaaaatctcccatcttgtcctatggccttccaccaatcgggcgctgattctctagacttctagtgaggacttcaatgagtcgggtttagttggccagaacttgggctaaatctaatggcag

SEQ ID NO: 164489 - DNA, 151 bp, Zea mays
  Clone ID: MRT4577_81591C.1
ggctcgagctcgcgagcacaggaactagttatgaacataatctggctagggtctaggcgggacgaggacgctgaacgctggttcacctacaaatgccagacccgctttgatgcccaggtcagccaggtgaatggaccgtgtgggcaaaagc

SEQ ID NO: 164490 - DNA, 522 bp, Zea mays
  Clone ID: MRT4577_81592C.1
atggactccgcctcgtccgacctcagggctcggcctcaacctcgacctcgagaggaatcgcgtcctcgcccgaccccggcctcggcctcaggagaagtctccgcctcgcccgacccccgggctcggcctcgacctcggaaggtggtctccgcctcgcccgaccctagggcccggcctcaacctcgacctcgggaggaatcgcgtcctcgctcgacccaggcctcgacctcaggaggagtctccacctcgcccgaccttgggctcggaccgaccacgccgcagggggtacatcattaccctacccctagccagctcaggctacgggggaacaagaccggcgtcccatccaggctcgccccgccactgcgcgagtcggtgtcggggctggtgtcgaacgaatacggggagaaggcgcctgctcctacaccatctgccgagaatgtggtagcgcggaggtggaggcatcaggggagcaagaaaagaagtagaatgacgaatgaggtggtgacaactgaggcgtga

SEQ ID NO: 164491 - DNA, 676 bp, Zea mays
  Clone ID: MRT4577_81593C.1
ccatcctggatccaacaacaatcctggccgcgctggcggccaggaccgagcagatcgggctggttgcggcggtgaacgtttatacggctctgccttatgattttgcacgccgtctggcgtctcttgatcacctctcgagtggacgggcaggctggaagccatattcgactgccgatgagcctgaagaagcccggatcgcggagttcgtgcatgccgtcagccacctcctggacagctgggatgacgatgccgccctttacgacaaggagagtggaatttatgtcgacatcagcaaggttcatcggctcgatcacatcggggaatattatagggtagctggcccgctcgatataccacgcgcccctcaaggtcgaccggtcctggttcgagaggtcctcgctgccgatcttgccgaaggcgcatggcccacggcggacatcattgaaatcgttccggtccccggtcagagcacgaacaagcccctcgcacctcgtgccgagggaaataccacccttctaagtatcgttgcagacactaacgatctcgcgtcgatgcatgcactgcttaacgatggggacgttgatggagcaactgaacgtgtagcgccacgggatcggatgccgtcgcgcgggccagcgagagatattgggttatggtcaaagccccgcggaagcaa

SEQ ID NO: 164492 - DNA, 395 bp, Zea mays
  Clone ID: MRT4577_81594C.1
acctttttctcgcttcggatcgcacctgccactggtgtcaagcataagatgctctgttgcgagagactccacccatccacccgtcacccagccttctcgcgactcaacggtgtacgctgacgccctcccctggacagccatgaggagcccacctgacggtgacgcacttgcgaccgtcggtcgacaccgtcccgtacaatatcatctacctctccggccctgggaatgtctacgacttctccttcgggagcggcttgatacggcgcggcggcgcctaccctgaggttgagatcgatagcgcacttatggcgtcttggagacgcctgatgccttggtcgacctcacctttgcattctttatgctcagagttaaagagcgcggctccctcaccgtct

SEQ ID NO: 164493 - DNA, 2032 bp, Zea mays
  Clone ID: MRT4577_81595C.1
gaccactctctctcctcgaacacatacagcatacatcgacgctcttccgcgtctcctcgtcttggtgagtctgatccctctctccttccgtcatccaccatctctagggttttagcgccccattttcgcatcgccattcccgatcggatcgccccttccccacccaaccctccggcgccgccacccttcgtgtcagagggtcggtctccaccgaaagcctcgcaacaaatctcctccgtttcttgctccggccatttgttgcaaagatcgtgttttccccccctcatccatgcctcgcgttccatcccttccgtccccggaaatccctccgctttcttgagatctcccgttcctcgatctgacctcgcctcgtcccgccaccacaagcaacagctgttttgcgccacgatcctcagggttgcgattctcgcgtccatttgctcgccccaatacctttcgggagcatctgatctcgaacagtgagacaaagtagccacctttgtgccgttccttgcgtatcggtgggtggcggcgctgcccattcctatgaatggacgggagggagtccacggtggcgtcggggcccaacttctcgtccttcttcgcgcagcaccggggcatcggggcgccgggtgtccccggccactcgcaggggcttcacgccccgccgcccggtgggtaccggcagcatcttgatgctgtctctgcggggtatgcattccagaccccgcatgttgggggtcccagcattgggcaggggtacgaggcctcacctcatgcggcacagcacagcgccggtggcggctctggctccggtggttgtggtggtatggacattggcatgggttcggccgtgtgcgccgatgttaagggggagctggggagcgggcctgcccaagatgagcaggtgaagaagaagcggggtaggccaaggaagtataagcctgatggggcggtgactctcgggttatcaccctcttcatcattaacacctcactcggccagcttggggatgggaaccatgattagtgctccaggttctggatttgggtcggagggatcaggggcttcaggcttgggtgcgccatcagagaagcgtggcagggggcggccacctggctctggaaagatgcaacagttggcttcgcttggaaagtggtttcttggctctgttggaactggttttactcctcatgtgattattattcagccaggagaggacgttgctgccagaataataccaggagaggacgttgctgcgagaataatggccttctcacagcaaggcccaagggcagtgtgcatcatttcagcaactggagctgtttctgcagcaacccttcaccaggattcagaatctggcagtgtggttacatatgagggtcggtttgagatcctgtgcctttctgggtcatacttggtggtagatgaaggtggcggcgcacggacccgaagtggagggctttgcatagctttgtgtggtcctgacaacagggttattggtgggagtgtaggtggagtcctgatggcagctggagcggttcaggtgatagtggggagcttcatgtacggaggaggttcaaagaagaacaaggtgaaagccgagttggacgcggagcctgaggaggcgaacgccggcgaccaagaggtggcacttgcggagcacagcagcatggcccctcatcctgccatgagtggtggtggcgggtgggcatctggcatgatgaggcagatggagtcgagaactcccaacatcgatatcaactccatccgcgagtagtttgcctgtttggttgggtggatgaggaaggctcctcctccttggatgcacacagcacagcggcatgcatatgtttggttgtaggcgttgctatgttttaggactccagagtatattgtgatgtgatgttgtacttggatgttgttgtataagatcatgggaacgcttggtcgtgttattatgttaataaaaatatataatggatggtaagctactgtttggaaaaaaagcgaccttgggcctagttttgat

SEQ ID NO: 164494 - DNA, 2030 bp, Zea mays
  Clone ID: MRT4577_81596C.1
acttcccctctctctctcctcgaacacagacacggatacaccattgtacatgctcgctcttcctcttggagtcttgggaccgccccctcccctcttccgagtctgatccctccttccttccgtcagcgcacatctctagggttttagcgccccatttccgcatcgccattcccgatcggatcgcccccttcccacccgccgccgaccagatcccggcgcgagtgctacccaaccctccggcgccgccacccttagtctcagagggtcggtctccaccgaaagcttcgcacaaatcccctccgtttgtcggtgccatttgttgcaaagattgtgttttcctcctcatccgtgcctcgcgttctatttctgccgtccccgaaaatgccaccgctttgttgagatctctcgtttctcgatctgatctcgcctcggtatggcgtgagagttgctaggggagggcaaaatcctcggagttgagattcttgcgtccatttgctagtctcaataccgagcatccgatctcgaacagtgagacaaagtagcgacctttgtgctgttccttgtaactgagcttgcccccgcctgcgtatcggtgggtgacggcgagctctacggcgctgcccattcctatgaatggacgggagggagtccacggtggcgtcggggcccaacttctcgtcgttctacacgcagcaccggggcatcggggcgccgggtgtccccggccactcggcggtgctccatgacccgccgcccgccgggtaccggcagcatcttgatgctgtctctgctgggtacgcattccagaccccgcaggttgggggttcccacattggacaggggtaccaccatgtcgaggcctcaccccatgtggcgcaatacagctccggtggcggcaccagctccggcggtgatatggacattggcatgggttcggctgtgtgcaccaatgttaagggggagctggggagcgggcctgcccaagatgagcaggtgaagaagaagcggggtaggccaaggaagtataagcctgatggggcggtgactctcgggttatcaccctcttcatcattaacacctcactcggccagcttggggatgggaaccatgattagtgctccaggttctggatttgggtcggagggatcaggggcttcaggcttgggtgcgccatcagagaagcgtggcagggggcggccacctggctctggaaagatgcaacagttggcttcgcttggaaagtggtttcttggctctgttggaactggttttactcctcatgtgattattattcagccaggagaggacgttgctgccagaataatggccttctcacaacaaggcccaagggcagtgtgcatcatttcagcaactggagctgtttctgcagcaacccttcaccaggattcagaatctggcagtgtggttacatatgagggtcggtttgagatcctgtgcctttctgggtcatacttggtggtagatgaaggtggcggcgcacggacccgaagtggagggctttgcatagctttgtgtggtcctgacaacagggttattggtgggagtgtaggtggagtcctgatggcagctggagcggttcaggtgatagtggggagcttcatgtacggaggaggttcaaagaagaacaaggtgaaagccgagttggatgcggagcctgaggaggcgaatgccggcgaccaagagttggcacttgcggagcacagcagcatggcccctcatcctgccatgagtggtggtggcgggtgggcatctggcatgatgaggcagatggagtcgagaactcccaacatcgatatcaactccatccgcgagtagtagggctggttgaggattgtcctggggtgcacagagcacagcagcatgttacatctgtttagggtgctatggtttaggagaactcccagtatatcgtatgtgatattgttgttgtatgaaataattaacggttggttggtcgtgtttttatgttaaaaatatatatgaaatgctgttgttgggtttcccctccc

SEQ ID NO: 164495 - DNA, 353 bp, Zea mays
  Clone ID: MRT4577_81597C.1
agccgcggatagagaaggaaaaatttccccaaaccctagcttcggatctcgatggcgaacccccgcgtcttcttcgacatgaccgtcggcggtgccccagccggccgccatcgtgatggacctgtacgcccacgaggtggccaagaccgacgggcaacttccgtctgctgtgcaagaccgacctcaccactctcacgctctctaaggcgctactcgcgatggctcgctaccatcgtgcgcgcccctctcccaagtcttatccggaacactatgctatgctggccgccgccactgcccaccacttccgtgcgaacgatgacgaccctggcgactgcctgtggtcactacttacg

SEQ ID NO: 164496 - DNA, 782 bp, Zea mays
  unsure (1)..(782): unsure at all n locations
  Clone ID: MRT4577_81598C.1
catggagactgacgattttattgaggaaagcagaaacaaaaatgaaaatatattccaggaagggcttctgttttcttcacagaatgatgcagagtttcatggcattacatctgacgtgctgactgtttcaaagaattccctcttactggatcatgaaacttgcaagatggtagagactaacactaccattttctcggatcatctggaactgctgaatgaaaagcacagcgaaggcgtggaatctacaagaaacatgatgagtgattgtcttgaaaaggattacatggctaatagtccggttcgaaaccatccacgggaactactgaccagtgcaaacagcttggaatcaattgacaaactaagagcttctctgccagatctggtggcaaagttcaggctcgagaacaagttgaatgaaatggataaggggaaccaatactgggatcaaaggacacgtcctccaaaaagtccttttacgcctgtcaaccagtaacctgagtggagaatgcgccaaattttgggatgctcaaatgttgtaaaaatggcaaaatatcttgccgatatgttacccccttaatttagggtgctcgtcagacgttaggatgttgaaaaaaaaaatcccccccccgggttagataagaaatccagcaatattggatttcaatttgtatcatgtaaaatcaacataatttttcccttatcccttcccaaaaaanaaaaaaaaaaaaaaaaaaaaaaaaaaaaaaaaaaaaaaaaaattttaaaaccccccccccccccac

SEQ ID NO: 164497 - DNA, 263 bp, Zea mays
  Clone ID: MRT4577_81599C.1
gaaggactgggatgcccttgacgcgactgactttaatcgtcttgttaataatcatgctctggccagctggaggaggagttattaggctctgacctttcgactcccatagcagatgacgaacactgaatgtcttttggggcgatccctgtaattgcgccttacgtacggccgcagtggaggatacaacgcagacctaccgctgcacttggctgagggctaactctcgatattttcgttatattgcctgcctttctcgcctgcat

SEQ ID NO: 164498 - DNA, 294 bp, Zea mays
  Clone ID: MRT4577_8159C.1
aatcattcggagagcacacaagaatgggggtcgtgcagatctatggtgctggagtcgttgcagcggccttcacaaacaagagcctagtatgttggaacgcaacgctacaggtttgctttgctgaggctgcttgatccgtagtctggacgataaggctgcaacagccgccatcccaaagtacactttactgaagcctttgggagatagggtgtttgtgaagcttggtgccccaaaggataatactgatggcggcttttagcttttcatctactgcccagactaaaccacaaggag

SEQ ID NO: 164499 - DNA, 209 bp, Zea mays
  Clone ID: MRT4577_815C.1
gggggacgccatcgttttctacatttacaccaataccatatgaatgggtagaaatatccaaagtaaaagatggccccatttgaataaaaaacactttaagtaaaatataacgggaccggtttttctatgacggttaacatgagagggccaagcacccgggggtttggtgctgccaggaatttctacatcattaaatcttaggccatgat

SEQ ID NO: 164500 - DNA, 216 bp, Zea mays
  Clone ID: MRT4577_81600C.1
tttacacgtaccgggtgacaactgtcttgtgtgtgatctactgagtcgttgtacggacggcatgaactaagcatggacactatttacctgaatccatgtcccaatcactcagtccgaaatgatggttgttctgatttttggcgcacgactggacgacgtgtaactcaattagatttagcgccccaggtcaatcgggcacctagagaaccgcgggga

SEQ ID NO: 164501 - DNA, 317 bp, Zea mays
  Clone ID: MRT4577_81601C.1
agaggacgtggtggtgggagaagtcggctggcaaggaagagggaaaaaaaaaggggaaaggcggcgaggaaggagaagaggaaaggctacttcagcgacgagagtgatgaggacgaggactaagcttcagtgtatcctgctaatgttgttgtgttttgacaatagatctaacgttagttacgtgatcaacagctttgtgtatcagtgtatgaatgctagctttttaaatttcagaagttatggctgattacttgtttcagacttcgtcttgtcactgtactgttttcttgattattaagcttattatccgtccgaac

SEQ ID NO: 164502 - DNA, 325 bp, Zea mays
  Clone ID: MRT4577_81602C.1
tataaacaccacccaaacgggaccgacagatcgagagaggtttataatctgggaaacacacctgaccgcccaagactatcacgcctcgaagaggagaatctctgacaccagttgacaaccatgaggccaaagcatccaaagacaagtgagggcacaccgcatagaccagcatgcggctcatacttcgctggcacacagtcctgagcgacgtggtgcacgctacgttgactacaacatgcagaaggagagcaccctccaccttgtgctccgtctcaggcgaggcatgcagaactttgtgaaaaccctgaccggcaagactatcacc

SEQ ID NO: 164503 - DNA, 566 bp, Zea mays
  Clone ID: MRT4577_81603C.1
cctaccgatctagggtttcctgctagggttttggtcctttgttttcggcggcgcaagatgggggagagggtcaagggaaccgtgaagtggttcaacgtcaccaaggggttcggcttcatctccccggacgacggcggcgaggaccttttcgtccaccagtcctccatcaagtccgacggctaccgcagcctcaacgagaacgacgccgttgagttcgagatcatcaccggcgacgacggacgcaccaaggccaacgacgtcaccgcaccgggaggaggggcgctctccggcggctcccgccctgtcgaaggcggtggtgaccgcgggggccgtggcggctacggaggcggcggcggtggctacggcggcggcggtggcggctacggaggcggtggtggcggctacggcggtggcggtggcggctacggtggcggtggctatggaggcggcggtggcggcggccgtgggtgctacaagtgtggcgaggagggccacatctccagggactgcccccagggcggcggtggcggctacggcggtggtgaatacggaggacgcgatcgtgc

SEQ ID NO: 164504 - DNA, 896 bp, Zea mays
  Clone ID: MRT4577_81605C.1
tccggagagagcgaagcacattgccatgatggcaattgggcgaagcccgcctttgataatggtgaacgggacccgcgccctactccgaccctagggtttccgtccaactcttccgtaagcttccaaaaaaaaatggccaacgaggagccggctcccgtcaccgctcctgccgccgccgcccccagccgggggcgaccattctccggccttctcgttcagcatctggccgccgacgcagcgcacgcgggacgcggtggtgcggcgcctcgtggagacgctcgcgggggacaccatcctctgcaagcgctacggcgccgtgccggccgccgacgccgagcccgcggcgcgcgccatcgaggccgaggccttcgacgccgtggccgccgcgggaggcgccgccgcctccgtggaggaggggatcgaggcgctgcagtcctactccaaggaggtgagccgccgcctcctcgactttgtcaagtcccgctccgcggacgccaaggccgacccgccgtcggcggaggccctggcccctgacgcgcccgaggcccagcccgcggcgtgagcgccggacagccagtcattccgtacctgatcttcctgagatgagattgagtcgcgtctggagtttgtgtggagactgcagcctgtgtgtgtggcatggtctgggtctgtatgacttgaacgttagctgtttgcacatctatgcagttcttcttccacggatgtctgatttagtgcgtgctcttattttacttcttgcaatgactgcccctgaccaacgattatgttccgtttgctgtgacgctcatgcatcaggcctcgagtgatagataaatccgaaataacaagcagaatcctcccatctttcaagccaaaaaaaaaaaaaaaaaacggcc

SEQ ID NO: 164505 - DNA, 330 bp, Zea mays
  unsure (1)..(330): unsure at all n locations
  Clone ID: MRT4577_81606C.1
gggaccacccacgcgtccgcccacgcgtccaggccgggaccgtcgggtacgtggcccccgagtacgggcagacgtggcgcgccacgaccaagggcgacgtgtacagctacggcgtgctgctgatggagctcgccacgggccggcgcgccgtggacggcgccgaggacgagtgcctggtggagtgggcccggcggatggccagagaagggtggagttcggcgggcgccgtcgtcggcaccgtgtcctgngagctcctgatgctcggcatgcggtgcacggcggacgcgccgcaggagcgccccgacatgccggacgtgctcgccgcgctgc

SEQ ID NO: 164506 - DNA, 1319 bp, Zea mays
  Clone ID: MRT4577_81607C.1
ttgggtacctcgaggccggccgggccggacataacctaggtaattgagggtgtaattgtctttagaaagacaggacagatcctcggttacatataaataccccgtacagtgtcattgcgggggacggagaaaattactattgccccaatatactgtgtttactggcatcaaacctttcactactctcccaccgtttgagcttgcctgaccacgagtttgaaagtttcaagagtggtacacgctccatcgctaatctagagtgcacctacagccaggacactcgatcgatcgctgcttagagcgagagcacatgatatactcgtcatttcgtcgccattgtactcgtgtagctacaaattatggactgtaaagctagcgcaacaagagaggacctggaattcatactacttaatgaagatgcagagccgaaaccactgcctttgtcgcttcttgtagacatcacaagtgatttctccgacaagaatattattggaaggggtggatttgccatagtttataagtaccatcctccatgcatgattgcaactgctgcccttaattaaagagcaaggcattgggaatacgtacagggatccatcgggaatcgcacggttgctgtgaagaggttgctgcctgtactacattttgacgagaatggattctaccgagcggttaaatgcctgatgaaggtgaagcaccaaaatgtagttcgatttttaggttattgtaacgagacacgagggaagatggcagggttcaaaggtacacttgtcatggcacaagaagaagaacgattgctttgtttccaatacctatccaaaggagggcttaacaactatatcaatgcagatgcatcttctgcgcttgaatgggaacaacgctatcgaataatcaatggagtttgccagggcttacatcaacttcatcagcacaatattttacacatggatctgaaaccggaaaacatacttttgggtaacgacatggtcccaaaaattgctgatttcggcctatcaaggcgattgcatgaagaccaaagctacattataactaaaaatttatgcggaacacggggatatatggccccagaattcatcgacagtaatcctgaaaatcgcgcaattacaaaaaagtgtgatttgtatagccttggtgttataattatggagctactgacgggaacgcgcacaacgggtgctgttaacgatgtacttgacagtaggatcagccagtagggagaatcaaagactaaggcacagttagagcagataaaagaatgtactcagatagctatcgagtgcagtacccctaaagcagag

SEQ ID NO: 164507 - DNA, 1693 bp, Zea mays
  Clone ID: MRT4577_81608C.1
cccgatggttcaccgaagttccctgaggacatgtggtctcgcagcccttcgccggatgtcgagtacaaagaggacgaggagaaggtaacacgagaagctgaagcacagtacgacggggacatcgaacagagaagcacggcggaggatgaggggggcgtcgacatgagcgacgacgagcactcgtcgggcggcgagaagggagaatctgcgccagtctatgatctagctcctgttgctgacaactgtatggatcattcggagaaggagatcatcgctctaaatgatcactcgggaggtgaagctgcttctgatgcgcaaagaagtccagaggcagtctctgcgagacaattagcagctgtaccatcggatcaagctgctggcccagccaagagaagtccggagccatcggagcaggaatttgttggtattgttgatcattcacttgagcacagttctgacgaccggaaagaaactgccagcgaaagcgatcagtcatatgaaatagtatttgatgacaaaagaaaacccgaacctccggagacaggattcctggatacagcagaggaagaatatggtggcacaaatgatcgttcaaaccatctcatttcttatgagaagaagaaggtgagtttcagtactacagatgatcggccatacgctgcagttgctgacgagaagagcgtcccagagactccagagcaaggattcagtctaactgaccatcgagatggagtagctcctgacgccactaacatttcagagaccagagaagacgaggaacaagacagtgcagctcgacaggcctacgtttcagtcgccgggaaggcaaaggtgtacgacgaagatggggaggatccagaagtgaggtggaaggatctttcagccgaggaggaggacgagctggagtcgctgtgggagcaccaagacctgatagagcagctgaagctcgagctgaaaaaggttcggtccatcgggctgcccacgatcctcgaggagtcggagacgccaaaggctccgatggaggacctcaagccatggcggatcgatgccaagttcctgcgcgaagaccccatggacgagctgaacaagttctacaagagttacagggagaggatgcggaagtttgacattttgtgctaccagaagatgtatgcgatagacttcctacagctcagaggcccccagcaatccagcaactctctaaagtccctgtcgcccacggtggcatccatcctgtcgcacaatttccggtcatcgcgtcgcagatctccggaggacccgtcggagcggttcttgagggagctccgctacgatctggagacggtgtacgttgggcagacgtgcctgtcgtgggagttcctccggtggcagtacgagcaggcccgcgacctcccggagtccgacccttaccacagccaccagtacaaccaggtggccggcgagttccagcagttccaggtcgtggtgcagaggttcgtggaggacgagtcgttcaagggccctaggctgtcgaactacatcaacaaccggtgcgtcctccgcaacctgctgcaggtgcccgtgatcaaagaggacagcctgaaggacaggatggaggaccagcgcaaggggaactacgtgataaccagcgaggagctggaggacgtcatggaagaggcgatgcacgtcctgtgggagttcatcaaggccgaca

SEQ ID NO: 164508 - DNA, 362 bp, Zea mays
  Clone ID: MRT4577_81609C.1
attacccctctttcacatcatacattagcattgatcctatatagcggtcgccttttcaatttttatttcaccaagcattctttcagctgatactataaaaagaactcatacttatcgtgaaacagttaaaagaattacaaccttgcatttaaatactggaacacccagccagttttatttatatgggtcattaaaaaaggaatgtaagaaaaaaaggctcgtcaaccacttgtatccatagaaatacagagttcattgctcaaaaatacactataggtagcagttaacctgcaagaactgaactagacaagaacaggtaccggaggaggagcatcaaccgtccgggctgccacggatgatgc

SEQ ID NO: 164509 - DNA, 260 bp, Zea mays
  Clone ID: MRT4577_8160C.1
gttctagatcgcagcagccgctcgcgatctaactagactagccgcagcttgtgaaataacgaaggacgatcaaatttgatggtttcaaagagcatcgataccatataaaaaaaaaaaaaaaaaaaaaaaaaaaaaaaaaaaaaaaaaaaaaaacaaaaaaaaaaaaaaaaacaaaaaaaaagaatatggtcacgaaaaaccagaagtgactgcagtatcaatctgaaccaaattattcttcgtatccttttaacgagtac

SEQ ID NO: 164510 - DNA, 723 bp, Zea mays
  Clone ID: MRT4577_81611C.1
gggaccctcgaggccggccggggacaacactctccccgtctcctcgatcggcgtccgaccgccatgggtggcctcaagctccggcggctggcatccaccttcctctccccaggccccgcatccccgggctccgcagccgacgcgcaccactcggtgtcgcgcgcgacggctcaccaccctagcacggcgccgccgtccgcgcagcacatggacgcgctcctggccttcggacggggctcgcgcctctccgccgcgtcgctcgccgcggcgctcgtggaccgcctgcgcgccgcggcttcggggcagggcgacgccgccgtggctctcaagtgcctcgtggcgctcagggtcctcctggcgcggggcgcgttcatcctccgcgaccagctcctcgccgcgctcgcccggcacccggcctccgggcgcaacccgctcgcgctgtcgtcgttcccgctcggtcgatcctccttcgccgccgcgtcgtgggtccggttctctgcgcggctcctggagctcctcctcctgctcccggacgcctccgccgacgccgagtacctcgccgcgctccccaacccgcacctggtcgccgagctcgccgccttcgtgtccgtcgcggacgccgtccgccagggcccgccgcccccgccctcgggcccacagcccaacgcgctcatctgggaggccgtccgcctcgccgacgaagaccgcgtcccggcggaaacg

SEQ ID NO: 164511 - DNA, 160 bp, Zea mays
  unsure (1)..(160): unsure at all n locations
  Clone ID: MRT4577_81612C.1
tcnataacgggccacccggaagcaggaaaggagaattttacgacccgatggcgaaatgctaacagactgaaaggtaaggttaaccgttccttaaatacgaccaggacgacggggaggacggcgagaaaaaccagaaggatctttaaggtagggaaaccaa

SEQ ID NO: 164512 - DNA, 252 bp, Zea mays
  unsure (1)..(252): unsure at all n locations
  Clone ID: MRT4577_81613C.1
ttagaaagtaaggagggacctgnaatggggggatggggagactttgggtgtatcggaaacaccaaaatagacnatcgagtgggttacagattacgtaggaaacgaccaggaggagtagcttgtccaggcttctccatgaaactcagtaatctccctaagatattaccgctgcattaaaatttatggctataatttatgaaactcccataatataaccactattaaatctacttaaaactgtttgttcaaata

SEQ ID NO: 164513 - DNA, 260 bp, Zea mays
  Clone ID: MRT4577_81614C.1
gctaagtagatagaccagattaaatgacattttcctatctacaatattacggacccataggacaacttacatgcccatgtggaacaatcaacttatcacctcatataacccattatcattacacatgcacataaattcctttacatttcatttatataactcaacctgcattatattatcattggttgcacgttttctatataaattctgtgacattaccaacttacaatattgatttcatctaaaatgtaacatatttt

SEQ ID NO: 164514 - DNA, 245 bp, Zea mays
  Clone ID: MRT4577_81615C.1
ggcgcgatacgcgtgtcattgcagacgagactgaagttcacgagtcaattggtcgataggttgttagagcattatgaaggtgaggtaactaggacactggggaatatattagttcacggttgctttgctacaaaagttcatagacaccaagagtctttatcttacgaagaatggcgaggacaattacgtgcactattaattttgatggagaaactgagacaccgtgtgaggctaccaaacaccca

SEQ ID NO: 164515 - DNA, 446 bp, Zea mays
  Clone ID: MRT4577_81616C.1
gggggtaatttccttcctttaagcttcatcgttaaacaagtggccagggaaagggtaaggggggggggggggggggaaaacaagcgaagaacggcccacaagattcaaatccacggagtggagggcaggcaaaatggggggccaaaagggcgggccgcgggggggggcgcgggggggggcccgggaaggggggcccgggaccggcgggcggacaaccgtgcccaaaagggggggggataaaaggggggggaaaaaagggggagagaggggggcggggggaaatggcctggcggaaacaggtcccacaacaaactacccggaaccaaaaagggcaaagccgggggggccaaaggagggggcgaacaaaaatgaatggcgttgcactaacggcccactttccaggggggaaacccgtttggccaactgcataaaggaaagggcaaaag

SEQ ID NO: 164516 - DNA, 446 bp, Zea mays
  unsure (1)..(446): unsure at all n locations
  Clone ID: MRT4577_81617C.1
ggggggagggaaaaaaaaaaaaagggggggggacccaacccaacagggcacaagggtaacctgttatggggggggacccacacaaaaaaaaaaactggtcgccaaaaaccccccaagaggccaggggaggacacaaaccccccatcagcccttattattattttaaacccaaaacatgccatgggacccaactgactgactgacttaaaacacacacagggacccccctatactttattaaactttaaaaaaaagtaagnttcctccggccggcctggaggggggagcacctaacttacttgccccaattgcagggggcccacttgcaattgccccccgaattggaccccccggcctaaattccggggggcggcttaaacccccccctggggggccccttgggtggggggaaacccaaaaaaaaaacctgggtggggggtgggggg

SEQ ID NO: 164517 - DNA, 262 bp, Zea mays
  Clone ID: MRT4577_81618C.1
tataggttctagatcgcgagcggccaccctttttggcctgtagacattttagaatttcctaacagagtttactgttgtttagaaatttgcaagggcttcttttccgcaaatgccaccagcagattataattttgtcagcaatgctattatctctaattagtgccaccagactagacctgtatcattcatgtgataaattttactcttgcaacataactaccatctctctcttaaaacgagatcaggttagcaaatgatgtaa

SEQ ID NO: 164518 - DNA, 726 bp, Zea mays
  Clone ID: MRT4577_81619C.1
cattgggaccctcgaggccggccgggatctcatgtcctgatggcgcgtcatgatcctccgttccccatcacgcaccgacacccgccgcacgcaccctccgaggagaccccaggcacgacgatgccacccgtcaagctgtctcggaagtctcgacgctgtctgtcgatcaatccgaacaggctcccggcctcctttccttcgagtctgaaacatttgcactccctgtcgaccctgtccctcctgtctggtgggaggagggctctcctgcttttcaccgccgccctgatgagtacctgtgcaggtctctctacggtgaccttcggctcagccttgacgacttcgctctcgtcgaacactacccgtaagacaacaaagatacaacgctgtttctggtcgacgcgtaccggaaggaagagagctacttatagatcttattcgagcgtacagattatttgcagggcataatgattgagatagatagtgtggatgagagcgccatcgaaactgcggatttttgaaaacatgcaggatctctatgaaactgtgaagaaggcacctatgggtagacaagttcgatgctgttcgacatgcagaaggtaccttgcagcgactgagattgatggttattgccaaggtgaactaatcaaaggaactctttctgggaccatgatcctattagaggagcaatcacacaagctgcgatggacctgggagttgtgcaacttt

SEQ ID NO: 164519 - DNA, 316 bp, Zea mays
  Clone ID: MRT4577_8161C.1
ggtgtttttttatttttttctcgcggttttcgcatgaaaacacgaaaccaacccaaatagaagcccttaacgccaggcataaggatagacacacgggcccctacataaaaaataactggtctcggaccgggggaacatagccgcatgaataaaaaggaagggacaccctacgcgggaagaacctggaacacgtacaaaagaaggacatgggtttgccctccatttcattccgggcaggcaggaaatatacacctaaaaacccggacagccatgatgaggctgcgagcgagttacctaccccgctccgcacggaggc

SEQ ID NO: 164520 - DNA, 475 bp, Zea mays
  Clone ID: MRT4577_81620C.1
aagcattccattccttcactccattatcaaacgtcatcaaaagttgcgactatcatacacagcaaagtgacaactctgaaccaaaacaatatccacgtgagttgtcaccaaattcaaatacattccagttgaatgccattccttattcaggaaaagaaaaaagaggatagactcaacacgacatgatcaacacaagatgttgaccgtataaaatagaaatattgttcaccgaatgccaccctgtcgtgtcatctttacttgccagggtaagcctgtggggggtaggaaccttgtgctgggtacgagccctgtgctgggggatatgaaccttgtgctgggggtgggggatatgaaccttgtgctgggtaggagccctgtgctggggaataggaaccttgtgctgggtaggagccctgtgctgggtggtaggaaccttgtgctgggtaggagccctctgctggggggtaggaacctt

SEQ ID NO: 164521 - DNA, 997 bp, Zea mays
  Clone ID: MRT4577_81621C.1
taaatttcctgtctgatgcgattaaggtcctgtggagggttcctgttctttcttccgatgtcacttggactgaatataaccttttatgcagggcttcatgttatgccttcaacaagttgcttgcatcttctctatagttgcagctattgttggtagcgaggagctttcagaggcttcccagatccttaattgtctgtctgatttggtctactggacggtttgtgcatgtatgcaggtatatagctcattcttttcttctcgcaaccttactgatcatggctcttgtgaaccaaaccctcacatatccttcttgtggcattgaaataaatgcaaatgcagacgcagcacaaagtcgaaatggacaagagggatggaaagttcagcccacagcctatggcagtgcccccggtgcaacaaatgacacgcatcgatcagcctatgccgcctcctgctggatatgcaccgcaaccagcatatgggcagccttatggtggctatccatctcctcctggccaaggttatccgccagctggatactcccagggcggtgcataccctccacccgctcaaggttacccccagggtcagggtggtgcatatcctccgcctggttcttaccctccacaaggttcctaccccccagcagagggctcctacccagcacaaggttcctaccacccagcacagggctcctacccagcacaaggttcctattccccagcacagggcccctacccagcacaaggttcatatcccccacccccagcacaaggttcatatcccccagcacagggctcgtacccagcacaaggttcctaccccccacaggcttaccctggcaagtaaagatcacacgacaggtgaaccaaatatcgtgaacatgtaaacagtaggaccgctttagcgctataggttattttgataaaattctttactgttcagggtggcattcggtgaacaatatttctattttaaaaaaaaaaaaaaaaaagcggcc

SEQ ID NO: 164522 - DNA, 565 bp, Zea mays
  Clone ID: MRT4577_81622C.1
cacccgctcaaggttacccacatggtgattcggctcgagcacctggtcaaggttacccccagggtcagggtggtgcatatcctccgcctggttcttaccctccacaaggttcctaccccccagcagagggctcctatccagcacaaggttcctaccccccagcacagggctcatacccagcacaaggttcctattccccagcacagggctcctacccagcacaaggttcctatcccccagcacaaggctcgtacccagcacaaggttcctaccccccacaggcttaccctggcaagtaaagatgacacgacaggtgaaccaaatatcgtgaacatgtaaacagtaggaccgctttagcgctataggttattttgataaaattcttgttactgttcagggtggcattcggtgaacaatatttctattttatatggtcaacctgtcaacatcttgtgttgatcatgtcgtgttgagtctatccccttttttttcctgaataaggaatgacattgaactggaatgtatttaaatttggtgacaactcacgtggatattgttttggttc

SEQ ID NO: 164523 - DNA, 546 bp, Zea mays
  Clone ID: MRT4577_81623C.1
ctgcttctttatattgctcaacaaggtggttctctcggcgacatcttcgatgctggaagtgtggttgatgctataccagaaccttataagtgtggtcattcttcttatacttgagctcttgcgtgtcatttcaacggaggaactcacatggaagctgataaaagtctggattccggtgaatcttgttttcatcggtatgctactaactggaatgtacagtttgaagtacataaacgtcgcaatggtgacaatactaaagaacatgacaaatattataacggctataggagagatatatatattcaggaagggtcagaataagaaggtttgggctgcactttttctgatgattgtatcagctgtatgtggggggattacagatctctcttttcatctagttggctacacgtggcaaattctgaattgctttctaacaacaggctactcgcttacactaaagcgcttgatggatacagctaagcaatcaacaaaatctggcttcctcaatgaagtttctatggtggtactcaacaatgcactcttaat

SEQ ID NO: 164524 - DNA, 2677 bp, Zea mays
  Clone ID: MRT4577_81624C.1
gaccaaagcagaccagaatccgccctaccaatcgcctccccagatcggcggtccacccggaggcggcgatggcgtcgtcgcaggcgaacctcgacaagatgcagctccgccagagctaccgcaacgtctggcacaccgacatgacgaacgccatccaggccgacttcccctactgctgcctcgcgctgtggtggtgagccatccatcgaccctgcctagcagatctcaccgtcaccgtcttctgcgggctttgagtctcgaacccctagccttccgtagatccgaggacacttaatttgtcgctgtggctagggtttttggggattttggtctccaagggttccgcgttgtgcattgccgctttttcgaggagcatatcctgaactaaattgttgcagtataaaagctcattctacattatattatatacattttagattaggggaggctgtaggggctccatggtatccgaagcggtagggggggctcgagccccctgccccaccgctggatccgtccctgatcctgaatttgttattccatctgcgtctaaaggttattctgcagcagcaagatggttaatgaatgtagaaatgaatggaagatgatatcgaaatgcgctgggcgagccataatgtctctaggattttgacgtgtgcacggagcccatgttgtagctcatcgaacaccccatgacgcctcatgcgagatgtgcgccgcaaccagcatattggcagccttatggtggctatccatctcctcctggccaaggttatccacctcctcctggccccctctgttagatgcaccaggttaattgggctaatgagcattgaaagagtgcaccatttttgcttccgatgggtgtggaccacctccatctgctcaaggttatccacagcgtccgggtggtgcatatcccccacctggtaatgattttcctccagctgctcaaggttacgcccagggctagtatggagcataacttccgctcgattctttccctccaaggggtaccttgctcccagcatagccctccgatcctgcactatgttccgtcccaacgccacagggctcctaccctgcacagagttcgtattcccccacccaggggatctgtcaccaatcatacccgttcgttaatctgctgcattctcctgtttctgttcagtggaccttgcgtgtcgtacatgcttcgcaaaagggctctctacaatgacatgtcaagatatgtctgttgcgctggctacatgccatgcagtggaaagtgtggcgagagccggtgcccagagttctgtcttgcaactgaggtgttcctttgctttggcaattcagttgcatcaacccgcttcttgctgcaagatgaatttaacatacagaccactcagtgtgacaactgcatcattgtaacaccacttgcctcttaaatttcctgtctgatgcgattcaacgtcctgtggagggttcctgttctttcttccgatgtcacttggactgaatataaccttttatgcagggcttcatgttatgccttcaacaagttgcttgcatcttctctatagttgcagctattgttggtagcgaggagctttcagaggcttcccagatccttaattgtctgtctgatttggtctactggacggtttgtgcatgtatgcaggtatataactcattcttttcttctcgcaaccttactgatcagggctcttgtgaaccaaaccctcacatatccttcttgtggcattgaaataaatgcaaatgcagacgcagcacaaagtcgaaatggacaagagggatggaaagttcagcccacagcctatggcagtgcccccggtgcaacaaatgtcacgcatcgatcagcctatgccgcctcctgctggatatgcaccgcaaccagcatatgggcagccttatggtggctatccatctcctcctggccaaggttatccgcctcctcctggccaaggttatccgccagctggatactcgcagggcggtgcataccctccacccgctcaaggttacccacatggtggtggatatcctccacctggtcaaggttacccccagggtcagggtggtgcatatcctccgcctggttcttaccctccacaaggttcctaccccccagcagagggctcctacccagcacaaggttcctaccacccagcacagggctcctacccagcacaaggttcctattccccagcacagggctcctacccagcacaaggttcatatcccccacccccagcacaaggttcatatcccccagcacagggctcgtacccagcacaaggttcctaccccccacaggcttaccctggcaagtaaagatgacacgacaggtgaaccaaatatcgtgaacatgtaaacagtaggaccgctttagcgctataggttattttgataaaattcttgttactgttcagggtggcattcggtgaacaatatttctattttatacggtcaacatcttgtgttgatcatgtcgtgttgagtctatcctcttttttcttttcctgaataaggaatggcattcaactggaatgtatttgaatttggtgacaactcacgtggatattgttttggttcagagttgtcactttgctgtgtatgatagtcgcaacttttgatgacgtttgataatggagtgaaggaatggaatgcttaaaaa

SEQ ID NO: 164525 - DNA, 435 bp, Zea mays
  Clone ID: MRT4577_81625C.1
gacataaagaagatatgctacgaggcacgctcttgcctcggtgtgtgctaagaaaaatatgttttaccgtttgacatagacaaagggcattgttctgcccaccaatgtaatatgggttgagaccatgagagggtgtaatatgctcccgatccttacctaaagaattaaaaaatgttcacatttaacaggaaactggactccatattactttggaaacttagatagttcaaaatagaaagagcgagagcataggccccgatgatattttctttcctgaccaacaaaaccgctggtacagcgggactttctacttaatcaacgactctattatgatgcctattaactaggagggtagatagaggggatcctagttcgacgatgacgatccctggacttgtttatgaagcacgggatggctcatgccactgtggtggg

SEQ ID NO: 164526 - DNA, 1233 bp, Zea mays
  Clone ID: MRT4577_81626C.1
aaaataaattcacgtaaattacttaattctgaaatagaaaagttaatgtgactatatgccgaagctatatcccgctgcgagttgtgcagttgtgcactaaaacagtaaggacaagagtggagtcaatagctgacatgccagggacgaaagacaaagggtgcactggcaccagcctaaccggggcctttatacaccggatggtaccatattgcgcaaaggtttctcacttttgtcactgccacctacacaacccgcacaacttcactcttcaatgaggaaaactattgacatacatattgttttctcctcaaaaccatatatgaccagacctattcaaaatctggttcaatgctctccctgaataccaccagataccacacctcagcatgtcaaccgctccagtttgagccatcaattaatacattccttgaatatagttgtatctggatttctctgatgaccattccaagtgttcaaaatgcttccgagcagtaatccctagttgatcagttaaatcgtcagctcttctatttggctggatgggtcagtctgattagaggctcttgcttcttccatttcttcttcgctctggaactggctttccagaacgtcatttatgttatcagggggacaccggtctgcatggttcttggcatccgtctggcagaagcactcaggccatgagttcgtgtagaaagactctggatggacgcgcttgtggggggcaccaaaatgggtgttggacatcaccctcctgattctctcaaagccaatgtggcggccttccatcctgtcgatgagtatcggggcaagagcctttctgttcggcgtgattgtggtccggaaaccgtagtacatacggtggcccatgaggttgtttgcaaagttgcttgggccatcatatgtgggcatgaaaatgtcagacaggaggcaaaccatgtagtcaactgctgatcctgctagcccttgggtattctcttccagctttccaggtccaactgtgctgtggttctctaagcgtggaaacatggtcttgaatggcttcatgaaacgtttccctccaaagagctcgccagaggcaaggtaaatgcgtgttctattgtcaaatcccatggcacgtagaataaaacctacctcttctggagttaaagggcactttcctttgagcctgattttcatggggataagttccttttctgcaaaatgttcttccctgtacttccggacgcgtgg

SEQ ID NO: 164527 - DNA, 407 bp, Zea mays
  Clone ID: MRT4577_81627C.1
ttggcctggaacctttgggctgatttagtgcttggagaatcgggataaggccaagatcaccccttccttcatcgagaagttaacgatgctcgacctacgcgtcttcccgaccgtaatttccttaccggaggtatgtggaaaaaccggcgatcctaccaaaggagcgcccgttgctccttcagatccggaccctctaccctccgagacgaacttgcctattacggctaacggggagttacacttctcggatacgagaggagaatcagacgatatagtagtccctaagaatcctaagaagcggggaggcacagaacccttctcattccccggaagagcatctagtttcatagaaagccctacttacgaatcagacgagaagataagcgttctctccaagcctatggccc

SEQ ID NO: 164528 - DNA, 229 bp, Zea mays
  Clone ID: MRT4577_81628C.1
gacgctcctggcgcacacacgcgcaccatctccatgtccacaccacatgcatcttgtatgggaagggggcaacctagctgtggatcgacgatataacgcccaccctccgccatgttgcatgagcagcatgcgccgtcacccgcactgacatccctaccgatacacaccaaccccttcatccacctcaccttctatgacctggccaccaacttgatcgaccccatctctt

SEQ ID NO: 164529 - DNA, 507 bp, Zea mays
  unsure (1)..(507): unsure at all n locations
  Clone ID: MRT4577_81629C.1
cttaacatgatgtaaaattttcaggtccaacagggttagtagtacagtttatgtgaggcaagaacatctccagtatttctggcgaaaaactttggaaccaggaaactatcagtttaaatactgtaatctaatacaaaaactacaattcacacaagcttccgtgaaaaaaaaacgccgcatccaaacacctatagcagctcatcgactgataattttttgtatcagtttaaatactgtaatctaatacaaaaactacaattcncgggaagcttgtgtgaatagtagtttttgtatcagattaaagactgtaatctaatacaaaaacacaatgcacacaagctgccgtgaaaaaaaacaccggatccaaacacctataggagcccatcgactgataatatcttgcaaaaccacatctccattaactngggcgccactcggtgagaaccgccagcgcttgaaagaagagaggaaccatttctctatctggagttaaccctgcagattcca

SEQ ID NO: 164530 - DNA, 153 bp, Zea mays
  unsure (1)..(153): unsure at all n locations
  Clone ID: MRT4577_8162C.1
gaccgttgactnttctctananacnacaatgacattggtacactatncctnttattcggcgcatnagctggagtcctaggnacagctctaagcctccttattcgngncgngntgngccanccaggcaannntctaggtnacgaccacatctac

SEQ ID NO: 164531 - DNA, 148 bp, Zea mays
  unsure (1)..(148): unsure at all n locations
  Clone ID: MRT4577_81630C.1
tangnagggaaaagaggccagcagttgatgacctgcttttaacataatggtcggttacaacttacaccaggctactaacgaaaagaaggggaaaaactttggagcaacgaccaatgtaaggcaaaaacttcaaacagacaaagatttt

SEQ ID NO: 164532 - DNA, 337 bp, Zea mays
  unsure (1)..(337): unsure at all n locations
  Clone ID: MRT4577_81631C.1
caagctggcgtacatctctaagtctgccccctcgctctgatgaccgccaatcctncatggctcaggacccctcaaccagcagagctgacacaggactacaccacgttctcttcactcaccttccgattcgccggacaactggccgactacatggcccacaacagatacaccaggtagactgacacctacatcacgcgatatatacaatgagatacaagatcaatcacccatcttcgtagccaagcactcatgccgcncgttatgactaccattgccgatatgatatccaacatggagtacccgatctatcctattacggcgaccaccataaccacct

SEQ ID NO: 164533 - DNA, 462 bp, Zea mays
  Clone ID: MRT4577_81632C.1
tattgtggatggttatttctagattcacctgacccgtatacgcgctctgctcttccttctgcctgctttatagcagacagcactacatcagaagagagaggctctgcacgtatgattgcatcactgggttcatatggcagcaccacgagtatcgtaattatctacacgacgtccagtcatgcaaatatgaatgcttgccatagactgatcgtctgacataatggcctacctgattacacattacataactgtccgtaccactataacctcatacatactgaaaacgtgatttacgaatcacctttataatgtaccagtatctacgtgaatatcctttgtgaacacccacgacctaaatgcctttccgtgagttttcgtgcccgtcaccttctgatcccgacaaaatatcaacagatcgctttgaaaccgtttttttcatataataatgtgctacttgtagat

SEQ ID NO: 164534 - DNA, 294 bp, Zea mays
  unsure (1)..(294): unsure at all n locations
  Clone ID: MRT4577_81633C.1
gtcggattcaacgacgaacatttttgtcgtgttcgcgaatggccaacatttcgctttcatgtggatntggtgtatgaccaacgcgcattttctatttctacacctactatctcacctaacttctttacaaatactactcaccaatcctcaaaaataatttggggcgcccgctctaaaaaacccaaacttacctacccttgcttgcgaccgcatacccttcctatagcgaccccaaaattcaattgattggccccatgtttaaaaactctatacaggaataacccggcccttacc

SEQ ID NO: 164535 - DNA, 281 bp, Zea mays
  Clone ID: MRT4577_81634C.1
gccattatctcatttacttcatattggacaaattgacaccatgaacgcgctgaacgtgggcctggttttcctggcgctcgttgcgagcgccgcctacactacaagcagtagatgtggctgctatacaccaccgatacatctaccgcatccactctatatgccgtatacgctctatctgccgtatcagcagcagcagcagccatggcaatactcgacttaaccacactaactaaacccgttccaacagttccaatccttccgattcctgcagcgtcggcagc

SEQ ID NO: 164536 - DNA, 345 bp, Zea mays
  unsure (1)..(345): unsure at all n locations
  Clone ID: MRT4577_81635C.1
ggggggtgggaaaagaacaaaaaagcccccccaccaacgcagagagggggcaaagnaaaagccgcacaacaaccgaacccacggggagggacaatgacaaacacacaaggcccggggctccgcccagtggctagggcgaaacacagagcaaaaaaaaggcgaccgacaagaacaacaaagcgggaaccacacagggaacacaaagaaacaggtcaagccagcccagaaaacgggaaaaaacggggaggggatacgacaacacaccggggcaacaaccaacagagggacaaccatccgagagggcagcggcccaacaaacggaggacgaaccaaaaaaccccagac

SEQ ID NO: 164537 - DNA, 325 bp, Zea mays
  Clone ID: MRT4577_81636C.1
ggaaaggaaaatttgctggggttcctattttgaaaaagcaaaatcgacccctgcagctggagggatggaagggaacaaacactgccaactgcacttggttaaacctacactgggactgggaggagaaacacgatcgaacaaaaaccatggaccaaagtagcatgttgagggaggccatggcctccggaaaaaaaaaaaaaaggggggcacacaccccacccttacaaattggagtattaaaacttgcaccatgttggggctatccacaaaaaaatgatgcaattcatggaaatgctaaaaataaacattgtttaaagaaactgtt

SEQ ID NO: 164538 - DNA, 210 bp, Zea mays
  unsure (1)..(210): unsure at all n locations
  Clone ID: MRT4577_81637C.1
gtcccctcagttgcagggcataaatgaattgcatagaccaaggncgtgatttttgtaagaatcaagccacaggctatgtgtccttcgagttgagcggtggaacaccccctaagccacggtttaattccgcgcaggtttgcataagttttcctatgggaccaaagcaacgattattttggcaagggccaaagaaaatttaaggagccggtt

SEQ ID NO: 164539 - DNA, 351 bp, Zea mays
  Clone ID: MRT4577_81638C.1
tcttgtttttaataaccactcacagcacgcgccgattacaatagaccagtacgacggagtagcaagcaatataatgacacactttatcaaacaccatacacacagaaccgtgggtccactacacacatgtgcgaccctggtatgacataacatgcaagacctgcatattgcgaccgatgaagagcatgctgcacggtgctacgagcaatacctacccgcggcgcaccgcttcagtctccccacggaccgagttggcggcgaatcccttattgactatacagaagctatacgaacgctcagggatgattgacagtaccattagctcctggggcatgcgcatggggagcccag

SEQ ID NO: 164540 - DNA, 379 bp, Zea mays
  Clone ID: MRT4577_81639C.1
acacttgggccaacgcgtgcgcgcatggggcgttgaatcaaatttccgacttacttaagaatgccttgcactatagcaagaaaacaagaacccaggcaacaaacttgcctcattccaaaccctccttgcatacaggcactaaaggccatcgaggaggacaggtttgagcaagagctgcaaatagctgatcaacgaacttagcagggatgagcagacgtgattgataagggttatgtgttgatggaggattacgaagcggctgacgcgcttgacacaggtgtggattacaatgacatagaagcatacatggagcattattctaagaaggtacaggaagtgattaaaaatggagctaacaccattgcatgcacacattgac

SEQ ID NO: 164541 - DNA, 915 bp, Zea mays
  Clone ID: MRT4577_8163C.1
attaccttcggatttaatatttttttcggtaaaaactgcaccgattgtcgccctggtgatcagttaaaatacgaagaatcgaactactagcattttttgtaattaaaacattttttgtttattgttttgagaaatggggtcttcttggtagtcatttggcacagagcagcagtgatctttgtcgttttccgagaggtttgataggattgctgatactgcatgtgctctgttcttatctgaagtaaagtgagatctgagataaatatacaaaagtatgcaaccaagatctgtgtcagaacccaataaaatgtcggcactcagcagccgcaaattctgtattgcaggcagtatgactcgaacaggagtcttaagtgaaccaataaaagaaacttgtaataccagtaccacaagctgtcgagtgtcgacagcaggagtattgttttttttttcagtgactagtagatccttttgccaaatgaacatgccggatgggttgacaaatgaataagtgacaggcttttcctgggttgttgcaaattgcaatgacgtggctgcccagttttgcctgcaaacttgtagacaatctaggctgtactgattaatttccacatttttactaatggtcagatgcctgatttctatcttctcttcaaaagatactgtatccatctttttgcttattttttttttcctgtattaagatgctcagctttacatgctcatgaactaacagtgaagattattatctgaaaacatactatatttcaggtgggcacctgaaatataacaactctctaatttccgcaactatttttttgtgccctcttagatctcaaatatatgtagctgcgccactttttctttgtttgtcagaatatacatggttactgacaacacaacatttaatttttttta

SEQ ID NO: 164542 - DNA, 518 bp, Zea mays
  unsure (1)..(518): unsure at all n locations
  Clone ID: MRT4577_81640C.1
cgacaagggcggcgcncgcgccanccaagaaaccgggcacccagcgcaacggcgcgggcnccccccgctacgccaccgcagcgcccaccgcgggggcacagaagaaggccccccgcgccagcaagaagcccgcccagaagcccaagcccgcagcggcagcggccncgccaccagacaccagcgacgagcacgccaagcgggacggaccngacaggaggancaaccggccggacgggcggcnggaccgancggaggcgccggagcaccacaccggagaggccccnggagacnacggcgacgacccgaagggcccgcgcaagaagccagaggacggcgccaagnaccaggcccacgagccganccaagccagacgggccacgcccggcgccgcaggcgccgccaacccagaggccggcaacaagccccgcgccaacaggggcccagaggcggccacggccaagaccgaggcgcggcacccggacggcaacacccgcaaccacgcccgggaacagcagccc

SEQ ID NO: 164543 - DNA, 301 bp, Zea mays
  unsure (1)..(301): unsure at all n locations
  Clone ID: MRT4577_81641C.1
gccgcagtgtgatgatatctgcagattcgctgngagcagtgtaacaacgcagagtactcggtttatttttttttttttttttgcttttttagncgtcgtgtaagtcgtcctgcgccgataattcttggtggtcccatgataagagtcattcctgaagcccgtgattagcgctgacctgggggataaatttattccacccaatttgtgggggggaacttatgattttttttttcctctaaaataaattgactttttaaaccaaacgctccttagtttttttggcttcccgggagaactcttt

SEQ ID NO: 164544 - DNA, 305 bp, Zea mays
  Clone ID: MRT4577_81642C.1
caatagcgaaatcgtccctgattgtattattgcatatacacagatatgctaggcatagctcttactgtgattatacatgaactattcattcaatgaatggtcagattattgtccataatgtacggaattggcaaaagggaaaaccgtttatcctgttaattaattttttttaataatatatgaacccattttaattattgtactaacattaacagtaaggttcttattaaatacttaatacaaggggccctgtctgcttcttttctcttgacattggattgggtcccgtttctagtcataacaac

SEQ ID NO: 164545 - DNA, 136 bp, Zea mays
  Clone ID: MRT4577_81643C.1
gttcatgatcgcgggcgggcgtgcaaaccatagagggggggaggtttatatgaggctgcccctcaaccagcccccaaggcaaggcgtgcagaactggagcatctgggcaggcggggacgaagcagagctaagcccg

SEQ ID NO: 164546 - DNA, 276 bp, Zea mays
  Clone ID: MRT4577_81644C.1
gtccggtccggtcttccgggtcgcaccacgcctccggcgccgcccacctctccggcggccacgtccacccggccgtcaccttcggcgcgctgctcgccggccggctctgcctcgtccgctccctcatcttctgggccgcgcagttgctcggcgccgtcgcgccgcgctcgtgctcaggctcgccaccggaggcatgcatctcccggagttcgcgctggccggtgcggtcactgtatggtccgctgcggtgctggacgctgccatcgcgttcgggct

SEQ ID NO: 164547 - DNA, 424 bp, Zea mays
  Clone ID: MRT4577_81645C.1
acggcttatagagctaggctggaagacattggagctttttgccttgactcatatatttagccgaatagaagtggcacatcaagaggctgtggctttgaagcgccaagaggaactcattcgtgaggggggggggggtgggctagctgaaattgaacttaaggcaaagcgtagtgctggtgaaaaggaaaaacgtgccaagaaaaaacaggttaacatttttttggtgcaagcatgccatccccatcctataataatactctttctgcttccttttctggcgtatttcatttataagtgaaattagtgattgtgctgttcctagtcctcactgttgtgtttaatttgtttttgaatgtactaatgataagttatgtagtatcctttttgtacttgttgaggagttttgtaatgctctgtatatctc

SEQ ID NO: 164548 - DNA, 562 bp, Zea mays
  unsure (1)..(562): unsure at all n locations
  Clone ID: MRT4577_81646C.1
acgaggagannggngggcanggcggngnngaaccannngnnncanccaaggagnnncaaagaangaacgnggcannagnccnngagaagggcnngccncnccaggggaggagaccgngngncnangcagagcgnagcccncggnggcnaacnanaaaagcaacgggcgcaccagggcacggngcaaagnngnanganggnagngcaanggagaannngangaagagcgnggaggcnannaggagaaacaggacancacagnnngancnagngaaancnggagagaaggcngaaggagangnngnancggngaannnngcgnaccngaaggcnggcacaccnacaccaacgggnnnnngncangaancnncaaccancngaagcagaggnaggncnnngacanccggancccnccnagngcccanggggaagcacnggagaggcgccnnngnngaagaangggcaccaccnncacgcaacccgaccnncgagnnnaaacagaaagagncngncccggacaacnnngggaagccagccangacagcggcagacagcacaaaccc

SEQ ID NO: 164549 - DNA, 477 bp, Zea mays
  Clone ID: MRT4577_81647C.1
cggacgcgtgggcggacgcgtgggcgtactctcaagtctccaccgaaaatacaaaccagcggagggtatattcggtggagacttgagagtacgtgagaaagagagaggttacgaagagtgattatatatataatccgctggtttgtattttctttcttctttggatcatcacaaaaccaaccgatgtaattattattagaccgacgcctcacaatcttggaacttattcattatgctagtgtatatctgtaatcccattccataatgttaatgttgatttgtggtcaaaaaaaaaaaaaaaaaaaaaaaaaaaaaaaaaaagaaggaaaaaaataaagaaaaaaaacttccaggccggatcaaattcaaggtaataagacttactatagagataccatcaaaaaaatgggtcgccccttgtataaaataaaatttattgacaggccgctgtggaaccccaactttattgtttaggcc

SEQ ID NO: 164550 - DNA, 175 bp, Zea mays
  Clone ID: MRT4577_81648C.1
gggaaactgatatagcttgctgttatagtgttatctactatagcttcaagcatgccttgtatctaggactacttttaggccttgttcagctacgttgaatatgaagggattaaatccccagaggaaagagtgccatgttatagaaacaacttgatgaggtataccactaaatttt

SEQ ID NO: 164551 - DNA, 302 bp, Zea mays
  Clone ID: MRT4577_81649C.1
acccgaaggactttgatcaagcaccattatcttctgcaaaccaaaaggcaatgggtggcgaatcatagttttggcatctaaattggtcacctgcccttgattccatatcagcgacagaatcttagtcaccagatatactaatagcttggatgatgctacttcaataattaaatgtatggagactaagaatgcctgacactatcaaagatcgagtgccagttaccacaaatgctgaccaaaatctgtgcatcacaccttgccttgtgttgcaggagatgatggtgcttgctcagctcccttgg

SEQ ID NO: 164552 - DNA, 449 bp, Zea mays
  Clone ID: MRT4577_8164C.1
catacaagaaccaatagttgttggactcaattatctaaccctcaccggggaagttccatctcgcttaaaaacactctgaataccaattttaacttcaaaactcctcccttaaaagggctccgtctgagggtccccacacatccagggttcacatgacagaaataagggggggcgtttctaagggttaagccgcctattcctcctcgtgtttagcaaaggtggagaaccgtaattcatatacactgggggccttgtttgccggtacaactcggagccagacacgcacattgggcttattcaggcgcttcttgggcaagtttttcaagctccttttaaagaaaggcccctcggaggtgacggggaccttggacttatcgcgggtgacggtgacacccttaccaagctggccggccttgccttcaacgaccttgatgcccttctggaggaac

SEQ ID NO: 164553 - DNA, 491 bp, Zea mays
  Clone ID: MRT4577_81650C.1
gccttcagaactgaaagacatttccgtttaaggccccgtagacgcttgcgatggctaggagtcctgactcattgggtggatctggctagattccgaatggttataaatgacttagaatactgtaggtagcgcaaaataagatactcaataggacccaagataagccaaaaagtcacacctgcacaacaacccaaagaaatctgccgagcaaaaaaaacaaacaattgaaaaaggagagagggcatgacccgggcacaaaaaaaaaatcctgacccacaaaaaaaaacccatgggataagtggctgactaacccccaaaaaatttgtgtgggacaaagaaaaaaaaattcttttttgttttcagaaccacaacaaaaaccgcgattaaattcccccccaaccatgaaaagtttattagccccaacaagacaatattggcactacaaaagcacacaaaagtgtcttttgaatcttacacagtgagacctcacc

SEQ ID NO: 164554 - DNA, 491 bp, Zea mays
  Clone ID: MRT4577_81651C.1
atagctttctagataggagaaagtactgtctaaatcgacactgaccacgttcgttcgagcgtgagactagttagcgatgagctaactcagttagtcccatactaatattgattgctcggtcataatggtgcgtgaagagccgcgctgctgccgcatggcactcctcgtagctctgagcgagtcactcgtcgcacacgggcgacgtgtacacactccatctgttcgaccaagtgcaggcagcttaacttactcattgcaatctcagaacctcaaagaggcgcagacgaagtacaagcacctgatggagctctcattgaacctgagcaaacatgcatcatcatctctctatgagttgctagcgacgtgtatcgtgacctatcagcgacgatgacatgatttagcccgtgtagttacagtacagctactaccgcaccaccgagttaaccttctggttcagcttgggcttggagaactctgtgtacatcatgtac

SEQ ID NO: 164555 - DNA, 400 bp, Zea mays
  Clone ID: MRT4577_81652C.1
gacccacgcgttcgctatggttgaagcaaaacacggttaggaagtccttattgcccttgagatggctgcctatttctgggggggctaccactctcctaagaagctcatcggttgctttttagcctaaaaaaccttccaagtcagaccgaacaaaaagtgaaaaacttcatccagtgattgcttggtcctttcgctctatcaagtgtgtaatgtgtcttcgaaagttttgaaagcctactgctgcttgtgcatatacttatatcactttcaatgcaagcctatcgttgtgttcatttttaatgcttgacgagaaacattcttgttttttatttaatatgtcaccctttttgttgttgttgttgacatttaatacagacattttctttttcttttttgtgtt

SEQ ID NO: 164556 - DNA, 1232 bp, Zea mays
  Clone ID: MRT4577_81653C.1
gaggacatggaagatgcaaatacagtccctcactagacactaggatgatgagctccaccttgccgtggcccacgcgtccgcccacgcgtccggccgggaagtggcagcctcgctgcaccgatcgcttgccaagtttatcgtgcctgacaacccagagaaaatcctgtcgcttgtcgctgccaaggctagccatcatagagctcttggctctgcggacctcacatgtgccctgcaggcatgcagggggcgaggcaaccgatggccgcttgtgctggagatccacgcgacatcagtcgtgcgtgggcttggggctgaccgccttataggcaacttgctgatcgatctgtatgcaaagaatgggctcgtgtggcaggcacggcaggtattcaaggagctttcttccagggaccatgtctcatgggttgccatgctgtcagggtatgcacagagtggtcttggaaaggaagctttcaggctttacagccagatgcattggactgctgttattcctacaccatatgttctgtttagtgtgctgagtgcttgcactaaaggaaaactttttgctcaaggtcggatgatccatgcccaagtttacaagcaagcaatgtgttccgcaggctttgtgcccaatgctcttagtgctatacacagtgttattaaaactacgtttaaacgatgtttaaactacgtttaaacgtcaaaactctaattagaggttgaaatcacgttttagcgttttggcgttctaaactgtaaaacgcagtgttttatgcattttaaaccattagctatttttgggcccggtcaattagttacttttggggttcaatccagctcatggttgaagttttggtaagccactaacctctctgttttggtatttaacttcatattattgtctgaaattatgatatattggtatttttcctatgttgtttaaaactacgtttaaacaaagtttaaacgtttaaaagtcaaaatttcacccatgagcggttcaacgttttatcgttttaataagcttgggatatacaacgagcactaggcgacgcgaccagtgatcagcaattacctcagaagtacatcctattctactgtactaagagttttattcatcctgtctagtgatggtgtatgattggtgttgctatactttttgtttggaccaaacgtctttgacatgattttctattttttcaacagtgtccacagcaaaattagagcaatgg

SEQ ID NO: 164557 - DNA, 689 bp, Zea mays
  Clone ID: MRT4577_81654C.1
acggacttatccaaactagaagcatttatcaagaggtgctggaacatattacctcaataaaccaacagaaaataatgcaagtgcaatacaagataccagatcatgtccacatatctacggaatgccagcaacttattgcccgtatctttgttgccaatccaatgaggagaatcacaatgaaggaaataaagagccatccatggtttttgaagaacctaccacgggaactcacggagactgcacaaggcatgtactacaggagggataacaaggtgccttcttattcagaccaaacgtcggaagaaatcatgaagatagttcgtgatgcaaggaccatgccgaaatcatccagatcaggctatgggtggagcgctgagtattcggatgaagaagagaaggaagaggaacacagactagaggaagatgaatacgataggagggtgaaggaggtccatgcaagcggagaactccgtatggacactcttcacatatgaaagctagtggaagaaagttacatgtagataacttgttgttgttgatctgaaggatccagtgggatgtatgcagttttggcttctgaattgcttgtgctcggtcaattttcatgtaacataattcaatacactgaggcagactaccatgtccttgtgttggtaaatatgaagcatctacctgtctgtgtccattgc

SEQ ID NO: 164558 - DNA, 2231 bp, Zea mays
  Clone ID: MRT4577_81655C.1
ccggccgggatctcctcctccccgtccctcgaggccggccgggcttccctccccctccctgctcggtgctcgcacacgctggcgcggcttgcccccacgctgcgctcctaccacccaccagtccaccactatataatccccgatcgcctcacgcacacgcaccgacccaccggccgacgaggggcgaccgccgcaacacaaatccacacgcccgccgccaccgccaccgccgccatacggacccactcctcctttgccctggtgcgagcaggcttcggcagcaaaccccgcaggctgctcccggacgagggagaacgcgcggggctgggctagccgctacccgctagccaggggaccggggcggaggcagcgaggaggtacgtatggacaagtacgaggcggtgcgggacatcgggtcggggaacttcggggtggcgcggctgatgcgcaaccgcgagactcgagagctcgtcgccgtcaagtgcatcgagcgtggccaccggattgacgagaatgtgtacagggagatcatcaaccaccgctcgctgcgccatcccaacattattcgcttcaaggaggtgatacttacaccaacacatcttatgattgtgatggagtttgcagcaggtggagagctttttgatcggatctgtgatcgtgggcggtttagtgaggatgaggcccggtatttctttcagcagttgatctgtggagtgagctattgccattacatgcaaatatgccatagagatctgaagctggagaatgttctcttggatggcagcccagctccacggcttaagatctgcgattttggctattccaagtcatcagtgttgcattcaagacccaaatcagcagtaggaacgccagcatatattgcacctgaggtgctatcccgtcgcgagtatgatggaaagcttgcagacgtatggtcctgtggggtgactctttacgtcatgcttgtgggagcatacccatttgaagacccagatgaccccaagaatatacgcaagaccattcagtcactcttcgcctgcagcaaataatgcaagtgcaatacaagataccagatcatgtccacatatctacggaatgccagcaacttattgcccgtatctttgttgccaatccaatgaggagaatcacaatgaaggaaataaagagccatccatggtttttgaagaacctaccacgggaactcacggagactgcacaaggcatgtactacaggagggataacagggtcccttcttattcagaccaaacgtcggaagaaatcatgaagatagttcaagatgcaaggaccatgccgaaatcatccagatcaggctatgggtggagcagtgagtattcggatgaagaagaagagaaggaagaggaacacagaccagaggagcatgaggaagaggaagatgaatacgataggagggtgaaggaggtccatgcaagcggagaactccgtatggacgctcttcacatatgaaagctagtggaagagaaagttgcatgtagataactgggttgttgcggatctgaaggatccagtgggatgtatgcagttttggcttgagaatttgcttctgtttgtcaattttcatgtaacataatttaatacaccgagacaacagactaccatgttcttatattggtaaatatgaagcatgtaccttctatctgcaaaaaaaaaaaaaaaaaaaaaaaaaaaaaaaaaaaaaaaaaaaaaaaaaaaaaaaaaaaaaaaaaaaaaaaaaaaaaaaaaaaaaaaaaaaaaaaaacttttgttcctccccctccgcctaatcaatcaaaaaaaggaatccccatgccgaactcgaagaaaaaccatttcaaatcaaaggccaaccttggggcgccaaaaaccaaccccaaaaaggttggaaccgcccaaaaaaacggtttaatcgaaaaaaaaaaccgcccctgaaaggttgggaaggtttcaaccccaaaaactggaaaaaatgcccacccaaaaggcaattttgccccaaaaaaaaaattaaagggaaaaaagtttaaaaaaattgtcccttaataaaaaaattgaaaaattcccaatggaaaccgaactaaaaataacctaattaaaatttctaaaaaggaatttggaacccttttaacttcaaatggaaacacaaaggatgatctaaaactccaaactaataaaactcttgggccccaaataaagaaaggtttcaaaagcggaa

SEQ ID NO: 164559 - DNA, 1560 bp, Zea mays
  unsure (1)..(1560): unsure at all n locations
  Clone ID: MRT4577_81656C.1
ccccccgtcctctatgcgttatccaaagagctgcatagcagcgcttctcccagccacgtcttcatcacacacggtcgcggcgcgaagcaatggcgaccacggcgccgctgctctcgccccagcgcgcttgccctacccatctccggcgccgcctctcgcccctacatctcgtattccccctcgacgcgtcagcgaggcggctgcgccttcgccgggcgccgccaccttgttcggccaagttcggcaagttcgacgcctccgacgccccggcggaggccgaggaggcggggggcgcgacggatggtgggctggcgcagcccgtggaggaggacgacagttgcttgccatcggatttggagggcgcgattcggcagtcagggaaggcgagcgcagatttcgtaaactccggaggcatgcgagctatcgcagaactgctgatccctcagttggaattcctcaacgaggaaggagcacaggctgaactctgggcgttgtcaaagattttcctggacacacttgtacaagagacaggacagaaagttactgccattttccctgacgctggagcagctgcccttctcaagcatcaatggaaagatgcacaattcaagtgtgccagtttaggtgaccggaagccagttggtcctgaagatgaggtcgcagttatgattatccctgatcatcagatgctggaagctgttgaacgcatcacatctcaactctctgatgatcctataagacctcttgtcatgtggaacccacggcttgttagtggagatgttggagtaggctttaatgtacggaatctgcggagaaatttcttaagcacttttaccactgtttactcgatgaggccattgccaactggtgcagtctttagatgctttccagggcagtggaaagtgttttatgatgatccaaataggccaaatcggtatttgcttgcccgagaactcacaagtaggcccgatgcaactgatattgagagaatatttggtggtgccgatgagcaatctgaagaggcaccatcgttgatgaacaatgtcatgggcgtgttcagttccgtgagtcggtttatgagggtcatctccaagtgagagtcgaagcaaacattgttcacacttgaagccatcaacaaccatcatgatgcttgagttatacaagaagattattttagtgcatccatgttgttttcagtctgtaattactccatggtactgctattcggaacagtatagtttggcgttccggcacatgccaccaaatgtgtgcacataccataccgtggattcctggagtcatctgctgatcctacaccgtgaggtcaattatgtaagtgtgacttagaaaaaaaatgtagatagatcctcattctggaaaaagccgggtatttgattgtaattcaatactgtgcttgatatatcacaatcagctcgcattttgtaattcaatactggacgaatataaattcaatcctttgttttgctgctcccnttgaaatatgataaaaaaaaaaaatattaaaatgtaataatggtaatttgatttaaggggggggtt

SEQ ID NO: 164560 - DNA, 209 bp, Zea mays
  Clone ID: MRT4577_81657C.1
cttgatgtactattttttcgggcaaaaaaccattattcttgccattttggaatttccgcgggcatttccccccttgggtttgaccttttgctctcctgagaaggttaataccaaaagcgaaaaccttttctaggtaaaaaaacctaaaatttttttcaattttcccccttagcaaaatttgggcccaaaccaaaagtttttggtagctt

SEQ ID NO: 164561 - DNA, 378 bp, Zea mays
  Clone ID: MRT4577_81658C.1
tcttgtcagccttcagccaccgacacccacctctctgcccgtgggcacacgtgttgttgacactaacatttaccggactcttaccttacctcacactcctgcagaatcaacaacctgaagatcttcatgctaccgctctgatcgggcgcgttggcactacgagtcctcagaaccagactggaaccccaggcccgtttcgagacccagctcgctatgtatcaaacatccgctggtgcgagcattgacaggctcggccagagagatgacgaaccgcacgactcaggacaagatcatactgtggacgctggacctggctgcagaggggattctggtgggcggtacgatagcgctggtgctcacggaggtgacgagggaggc

SEQ ID NO: 164562 - DNA, 810 bp, Zea mays
  unsure (1)..(810): unsure at all n locations
  Clone ID: MRT4577_81659C.1
ccggccggggccagatcccatccctctcgcccacgcgcgggtatcggagtcggagcatggcgtctgcagtggtggtggacgccggcgacgcgccggagcccacggttcgtaacctcctggaccaggagtccctcaagtgggtcttcgtcggcgggaagggcggcgtcggcaagactacctgcagctccatcctctccgtcctcctcgccggggtccgctcgtccgtgctcgtcatctccaccgaccccgcgcacaacctcagcgacgccttccagcagcgcttcaccaagttccccactctcgtccgcggattcaccaacctctacgccatggtaaacatacaaaaaagcaaaatttcctccattattttctccgtcttacggcttcaagccttcaatccacccttcttgcggggccgtcttcacttgacggccctacccaattcggtggtgcttgtgaggatcggatgggcaggcttcgtgtcctggctaaggccgtggtcagcagaggtgtatatggccgtgcagaacgctgttttgcacatagagtggagtttgaaataaggagtgagatatgacgtgggatagggaggctgctagagagggcctaatggtgattgcctggttggagtggactgtagccttacctaattgttgggagtggagatcagcagggttgtctgagcagagaggcagtatggatatagaaaagtcgcatggtgccgttaaattttcatgtatgggaatnncatatcacaggcatctaaatatgccaggctatatgagatgccattatgccaagnntgacatc

SEQ ID NO: 164563 - DNA, 290 bp, Zea mays
  Clone ID: MRT4577_8165C.1
gtgattttcagcagaaagctcccattacttcctgtttgatatttaaacgtgtcaaatgtcaggtgttttgagaacaagtttctgttcagttatatttctatgatccatatagattctttgcttgtaactactagaatacagtctagatcctttgttctgtcagatgaatactagcgttcactactcaactcaacgcataccctctaatctctgttgattggaggatatttatattaatgtacacctagccatattctggacgatcttctgaaagttggttgtgggtagtt

SEQ ID NO: 164564 - DNA, 353 bp, Zea mays
  Clone ID: MRT4577_81660C.1
aaaaaaaaaaaaaaacaagaaatctgcaccgagctccaaaaccaaaaccagagccaacaaaccaggggaagccaggaaagtggacaaaactgaaggccgggcgtccctcttaaagaatccaagtttatggcccacccaaccaacttcaataggtttttttcggagaaccaaattgaagttaattgccggccgtatcccaaatgaatgacgggaaaacccaccagtatccccaattatagctccttgaacaaaagcccccttagctgggccctcaataaataaaaaaccccggacataatatctttacaaacaatggccctactaatatggcacacggggccccccttttaccg

SEQ ID NO: 164565 - DNA, 206 bp, Zea mays
  unsure (1)..(206): unsure at all n locations
  Clone ID: MRT4577_81661C.1
cccggcgacgacgggcgacagccgccgccggccaacaccaggaccccaggccgacgacggaccctgcgccgcggcgagcaccaccagagggcgagcacggcgcggacgacgcagcggacacggccgcgcngcccagagacacngacgcggccggagaggaacagggccaagccggccgggaaggagccgacgaccaaggccggcgg

SEQ ID NO: 164566 - DNA, 588 bp, Zea mays
  Clone ID: MRT4577_81662C.1
ataggggattgggatcctcgaggccggccggggagagagcaagtaccgtgtgccttttggagacaatggcgtccggaaacgagatcagggtgggcttgatgagcgtggccatagagggcctgctcctctgacatctcggcaccaccgcctccgtccaccacaaagacatccaggtcctcagaagcgccgagggatccaaagatggcagacagccacgagtcccaacgtcgctgtcgtctacacggacatgaagttgactgatactataatccgatgctgcggcgccgaagatcgggggcgtcggcagattgaactgaaaaacgcgcgaccagacgaggaaggtgcccaaaaccgatagctaattaaaggctcgattgagtgaccgattactagtggacttgccataattatatatagatacgcaaagagtggccaatggctaccgcacatgcgatgtgattgtatgcctccgaatatatatatagtatccgactcaatcctgtgaaattgatacgacgacgtcattatatatattgcatccctttaaattaatgtacaagcgtgagtgctgttatggatgtgaatgca

SEQ ID NO: 164567 - DNA, 441 bp, Zea mays
  Clone ID: MRT4577_81663C.1
atggcttcgcttggtcgccctgagcgtttccaatctgagggtgcactcaacctggtgcgcgacctgctcggatggagcgcgccggggctcgccagaagaattcgcgctggtgccgctcccctcggcgatctcgtcgccggggagctcgtgttgttcacctcctacatctcctgtgggttggcgctgccgatctcgcccttcttcttgctgctgttggaggagttcgaacttcagcttcagcacctcacgccccactccatcctccatgcagctatcttcgtccacctctgcgagatgttcgtaggtgtggccccctgtacttccctcttccgccacttctttgtgcttgtcaagtccgggaagactagggaccacattggtgcctactacttccagatgaggccagatccggccgtcgtctacatctccacccaattttga

SEQ ID NO: 164568 - DNA, 305 bp, Zea mays
  unsure (1)..(305): unsure at all n locations
  Clone ID: MRT4577_81664C.1
ctcgtcagtagctgagtagccactgtgctcttgagaaggatgacgagccccatgcacgcgcggaaggctaagctcaagacccacttcatctccgccaaggcgaactcaagcataacgtcaccccgcgccgcgtcgtcctgctggctgccgccgctacctccgccttcctcctcctattcagcctccgcaccctccactctgccgcgtcacgcagcgccagagcaagcgccgctgccaccgttgccgctgtcattngctccacgtctccagcgtccgtcgccgccgaccacgccgaccagctggag

SEQ ID NO: 164569 - DNA, 179 bp, Zea mays
  unsure (1)..(179): unsure at all n locations
  Clone ID: MRT4577_81665C.1
tgcaggtcgaccttanaggatccccctgaaacggtgcgtagactggccggcgtttaacataggcgcctcggggaaatccctatcagcacacactgtaatggagtggagtacatccctactatcccaagaccaccgcgaatggtagacggcctccccgtaggtgctgctgaacgatatgc

SEQ ID NO: 164570 - DNA, 249 bp, Zea mays
  Clone ID: MRT4577_81666C.1
ggtaaacgtgccggcccagcgatcgttatcatctgactaaccagtcaagtaccccgtctgaattgacttttgaggaccattgtgccctgttgaacttatgtcttaccttctgaagtccgatgtgtctggtatctacctgaccgtgcatctatctgatgctggtcttttaatagaaaagcaagcttccgttgaaatttattgtcaatgatggcttacgtataaaggttaaaaaaacggcggcctttttac

SEQ ID NO: 164571 - DNA, 623 bp, Zea mays
  unsure (1)..(623): unsure at all n locations
  Clone ID: MRT4577_81667C.1
cccgggggtgccttacagnntcttctccagggcaatcttcacgacaaagcaaagcaggctaggctccactgaattatgctcatctcctttccaccacacgttttctcaaatggggcgtaaatttgaagaaagatattctccctttaccaaaggtccattttaaacaatcaggcagagaggttcacttttgtaattagaaatattggttttttcgcggcaatgccataacacgtttttcattaagaaggaaaaacacatttcagaacacgaactagaaatatatttttattagcgaaaaacagcagcacaagtacacaactatgccctccatgagaccgtacctccatttttatttatttgacgccaagtagttcaactttgtaccaacaggggacaaataaaaaagataccttgtttggctgttacgactctgttctgcctgtgattgatttctgctattttcccttgggaaaattaaaatgtattaggaaaacggtgttcccaaactagcccttaaaaagacacgtttttctttgctgagcagcattttttctggcaggtgacgatccagaagaagtgaaggcgaggttgaagtattgggctcaagctgttgcatgcactga

SEQ ID NO: 164572 - DNA, 231 bp, Zea mays
  Clone ID: MRT4577_81668C.1
tctatagaatccaaccttacctatctcattcttgagagttaagagtattgtatagagggacctcatttctttttactagtccatcttttacaacaatctgactaataaaaccctggctttacctaactgaatgtcctttcataacattcttttttcgatagctcgaataatatctaagatgcccgcaccgatcacccttcccaacaattaatcatccttaatagcgaatgt

SEQ ID NO: 164573 - DNA, 424 bp, Zea mays
  Clone ID: MRT4577_81669C.1
ggcctccggggcaccgaccgctataaggccagtcggactgcgacaccgcccatcccctcgaccgcccgcgtcgcatttggccgcctccctaccgctccaagcccagccctcagccatggcatgccccctggatcaggccattggcctcctcgtggccatcttccacaagtactccggccagggaagggtgccaagcacaccctgagcaagaaggagctgaaggagctgatccagaaggagctcaccattggctcgaagctgcaggatgctgaaattgcaaggctgatggaagacttggaccggaacaaggaccaggaggtgaacttccaggagtatgtgcacttcctgggggccttggctttgatctacaatgaagccctcaagggctgacaaaaaatagggaagatggagcacacctctgggg

SEQ ID NO: 164574 - DNA, 404 bp, Zea mays
  Clone ID: MRT4577_8166C.1
gcgcaccggcgccgccgcatgcctcgtcgcctacttggcgttcccggcgctctgcgacaagggcctcctcccaccgacatccaaagacaagtcccagctggacataccgctagacgggctcacaccactacgcctaagagacatggtgttctcgcccactactacacatgcgaacatgacagagtgcctaaaatgcctggtcgacgcaacgaggagttgttccggcgtcatattcaacaccttccgagacctggaggactccgacctccagaggatcgccaatggcgtcgtcggagtgccgatctatcctgtcggccccctccacaagatctctccatgcaccgaggacagcttactggcgccggaccgggcgtgtctagagtggctggacaagcaagaggcgg

SEQ ID NO: 164575 - DNA, 535 bp, Zea mays
  Clone ID: MRT4577_81670C.1
tttttttttttttttttttttttttttttttttttttttttttttttttttttttttttttttttttttttttttttttttttttttttttttttttttttggggccaaggacaagggggattttattccttggccccaaggggggggggggggggtaagctaaaaaaaaacaaatggccctgaaaacccaggggaaagggggaatacccccctcctttcccccctttttggttggaaaaaggtaaaaaaaaagaatttttttgaaaaacaaaccaaggggggggagaaaaccaacccgcggggaaaggtccccggggccgccattggggatggcttaaatcaacttattcacaataggacattctccaaattttctttgggggaaaaacccccaattgggattgggttaaggaaaaacaatccctcgggaacttttaaaaaaaatcactcaggggatttttaaaaaggaaaaaccttggggaaccccaatttttttaacaagggtttgcaaaaaaacaaaaagggcagctccat

SEQ ID NO: 164576 - DNA, 219 bp, Zea mays
  Clone ID: MRT4577_81671C.1
ctgcctgcaactggctgtctcttgtagaggcccacctcgatcactctactgaccgttgctcacactgtctggactgtggaacaccctctgttgcccaacttaatgcgcttgcggtgcattcgcttctcgccagctggcctcttcactagcaggcgccctccgatcggcttttctaacttttttgcattcttatttcgcaatggtacgcgccttgtcccg

SEQ ID NO: 164577 - DNA, 254 bp, Zea mays
  Clone ID: MRT4577_81672C.1
caattggcggaagtttactaggtgcgtgttggatgagcggagctgaggttttcttgctcctgtggaagtataggaagtcaaaggtcctgcccagccatgcgggtccctcagtcaactctgtttcggagacataacgatttggactgctaacaagtcatgaaatgttcaagtccttggatgtagggaaaagaaagagagatcagactgtcactgtgtctatgtcgaaagtgaagacataagagactctattttga

SEQ ID NO: 164578 - DNA, 769 bp, Zea mays
  Clone ID: MRT4577_81673C.1
cccccgaggttggccgggaattctcatcacctatccaggaccaggatcgacgacgaggaatcaagcagccagcagcgaccgatcgaggcgcagccctgtggctgtgggttggatccaggacccgtctcctgagagagagaactcgatcgattgctccatggggagcggcaaggcgtcgtctccgccaggccccactgccggcgggcgcggctcgccgccgggcgccgccgtctgctgcatgtgcggcgaccgcggcctcctgcccgagctcttccgctgctccgcctgctccgtccgctcccagcacacatactgcacggatcggtacccgaaggtggagtcatacggcgtctgcaactggtgcctcagggcggacgggggcgtggcttctacttctaactcgccgagatccgccggcaaggcggctgtccagcgcccggctcctcacggcggtgacaaaatcggcatcggaacatcgcccaaggctgccgcgcgtggcgacttcgcgtcttccaacctgagcaagcctatcaagaagcagccgcagcagcatgcgcagaggctgttgctgcggcggtcggcgtcggaccccggcagtcgcgtcgttcgtaccgaccacgacgcgccgccttcgcccggcgttactacgcgtggcaggccgagggtccggaggtacaagctcctggaagaggtgatcactagctagctaactagccggacccggccccagcgtgtgtgtattactaaaatacgcgcgtttaattggtgt

SEQ ID NO: 164579 - DNA, 458 bp, Zea mays
  unsure (1)..(458): unsure at all n locations
  Clone ID: MRT4577_81674C.1
attgggtacctcgaggccggccgggaccccaccaccttttagttgctgcctccagcgtccaccgtccagccaccctccccaggacatccagcctgcaagtttggtaccaccaccttctcatcacctatccaggaccaggagcgacgaggaatcaagcagccagcagcgaccgatcgaggcgcagccctgtggctgtgggttggatccggccgattcgaccgcatgcggcacctacggatgccccacgcacccgtctcctgagagaactcgatcgattgctccatggggagcggcaaggcgtcgtctccgccaggccccactgccggcgggcgcggctcgccgccgggcgccgccgtctgctgcatgtgcggcgaccgcggcctcctgcccgagctcttccgctgctccgcctgctccgtccgctcccagcacacatactgcacggnatcggtacccga

SEQ ID NO: 164580 - DNA, 1190 bp, Zea mays
  Clone ID: MRT4577_81675C.1
cattgggtacctcgaggccggccgggacgccttgcgatgtgtgaggactggagaagaccccgcatcagtcaggcacccccaccaccaggtctttagttgctgcctccagcgtccagccaccctcccgaggacatccaccccgcaagtttggcaccaccaccttctcatcacctatccaggaccaggatcgacgacgaggaatcaagcagccagcagcgaccgatcgagacgcagccctgtggctgtgccgctgtgggttggatccggccgattcgacagcacgcggcacctacggatgccccacgcacccgtctcctgagagaactcgatcgattgcttcatggggagcggcaaggcgtcgtctccgccaggccccactgccggcgggcgcggctcgccgccaggtgccgccgtctgctgcatgtgcggcgaccgcggcctcctgcccgagctcttccgctgctccgcctgctccgtccgctcccagcacacatactgcacggatcggtacccgaaggtggagtcatacggcgtctgcaactggtgcctcagggcggacgggggcgtggcttctacttctaactcgccgagatccgccggcaaagcggttgtccagcgcccggctcctcacggcggtgacaaaatcggcagcggaacatcacccaaggctgccgctcgtggcgacttcgcgtcttccaacctgagcaagcctatcaagaagcagccgcagcagcatgcgcagaggctgttgctgcggcggtcggcgtcggacctcggcagtcgcgtcgttcgtaccgaccacgacgcgccgccttcttcgcccggcgttactacgcgtggcaggccgagggtccggaggtacaagctcctggaagaggtgatcactagctagctaactagccgtacccggggcgtgtgtgttgtgtattaggtgtaaaattaaatatacgtgcgtttaatttgtgtatatatatctacttagctacatctaggggtagacacggcatctcttgcggtgctgccatgcatgcatggagatcgagcagtgtgtacgtatgtactacgtgctgatcatctcaggcgttaattcatcaccatgcatcagggtgctcgcgtcgtgttgtacttgtacatgaggaataagtgtagtgcttgctaccgcgcagttcgatcaaaaaaaaaaaaaaaaa

SEQ ID NO: 164581 - DNA, 571 bp, Zea mays
  Clone ID: MRT4577_81676C.1
ccgtccaacgaggacccagtcccgcactgttctgcgaagcggcggatgcatatacggtggcggtgcgccttgatggatggcggctaccgggtgtggcggcgtgaagctacggcggaggacgaggaaggctacagccggggggggggatacggtggtgcaaaccgagtaggggggttcggcaacaaccactgcaaccggatgaactgaactgagcaggacggtctatgcctagatgtcttggtggattttgctaccgggtgcaccctagtctaaaaggggcatattttcaaacggggaactcctgcttcccgctgacgcggatactgttattgggtgccgctgtccatctcctattttgaccgcaagctgacacatctgatgttttcattaatgattaccatcactcaatacatagcctgcattgtgctccatacttggtggaagtgtgatctatggggcggccgatatacaagatactgtgtctcgtacacacccgtgcagaggcctacctatcatgataggccaccgaaatccaatacattaagcatgttgtaacaaccattggactgaa

SEQ ID NO: 164582 - DNA, 196 bp, Zea mays
  Clone ID: MRT4577_81677C.1
ctaatactgacattttgctggtgcgtatggtactttgcttcgtggaacatgaatttcacgtgttctgacggtattacaatgccttatgtgacactcttctatcttttactaaacatccgaatctatccttcgagtatatttaatcgcattaattctatttgaaatgtatttcgcaacaatgtccaatttactcgaa

SEQ ID NO: 164583 - DNA, 575 bp, Zea mays
  Clone ID: MRT4577_81678C.1
acctgttctccaagcgtcctacttgaaccagtcgccccgagttgtttctctgccatcttacgcttgcgcttatcaatccagactccctctgctctttcgccaacatatccagccatgttcttccaagaggtacaagctcagacgatcaagggcccacctcaaagtctcctaaagatatctcctaaggctgacctcttcttgaccggaccaaatgtcacaagcctcctcgacgaccgccaatatagcccacagagtctgatccggaacaccctgtctgaccgtccctgccacgctcgaccatcttgctgctgaggtccttgagctgcccggctatgctccatgtaaccccgatacagacccgcatcataccattgcatatccaattctccctcaccaacaacaaaaagctctcactactgctgggcacagtgaccttatttaaccaactatgtcatgcccaacattcttacttgcttctatcgatgatggccaggggtacacagcttacactgctgatgctggcctccatgactatgtacatgactaccacagttgacactttccatgatgatctc

SEQ ID NO: 164584 - DNA, 365 bp, Zea mays
  unsure (1)..(365): unsure at all n locations
  Clone ID: MRT4577_81679C.1
gtatgttgggattggtttttttttttttgtttgagattnnaatggggacaaatgaattagtgcatccataaggaagttaataccacaaaataaaccacggccaccaaagggatttgaaaccaataaaccctaaagcctcgaaaacaaagcacagggtgaaatcatggtgcaaggagacagataaagaactataaaaaacgctattggaacaaaaaggtttaataatgtggatcacataggaaaagccaaatatattggaaagaaggctgactgataataatgtttttcacatttttatgtgtactttggcaatgaccaactgcggtgtatcaacccatgtgcaatagatcacgatacatatttta

SEQ ID NO: 164585 - DNA, 555 bp, Zea mays
  Clone ID: MRT4577_8167C.1
aattcttgggtcgacccacgcgtacgcccactcatccgcggcatcacagactgatggccaagtgcctggagataagaccgcgggacatcacgatgaggccttgagcaccttcttcagccagactggtgctgggaagcacgttccccgtgcaatcttcgatgaactagaacccactgtgatcgatgaggtgcgcactggcacgtaccgtcagctcttccaccctgagcagctcatcagtggcaaggaggatgccgctaacaatgtaccccgtggccactacacaattggtaaggagattgtagaactgggccttgaccgtatccgcacgcttgctgacaacgtggaccggcctccagggcttcctggtcttcaatgccgttggtgggggcactggctctggccttggttgtctcctgcctgagcgccggtgcgtggagtacgggaagaaatacaagctgggctttactgagtgcccatttccccaggggtcaagcttctggtgggagccttacgacagtgtgctcttcactcacttactcctggagcgcactgatg

SEQ ID NO: 164586 - DNA, 379 bp, Zea mays
  Clone ID: MRT4577_81680C.1
ccggccgggagaccaccgtatactggagagaaagatcctccctcgcctccccaccccgccccacccatggccttcgccgccagcactgccgccgccgccggggccccgctgcgcctcctctcatcctcttccaaccgtatctccaagcccttccttccccgcccccaccgcctcaccctctcctcccccatctccttccagcgcctcacagcccggtccgcggcctccccttccccatccaccgccacctcgtccccgtccggatctgtcgacccgaagcaactgccccccgcgctacgcgacatcgccgaactctttttttccgccccgcacccgcgcacccgggacaagcagctccctgcctatgtcgcgcgcctgc

SEQ ID NO: 164587 - DNA, 146 bp, Zea mays
  unsure (1)..(146): unsure at all n locations
  Clone ID: MRT4577_81681C.1
aaatgtaaagcgtcatcataagtatgtttatttttttgccctaaagttggcatgaccttattcatcatcgnatgttcagnagnatgcatatgnaagnaaacaagatggnatnancgnactatatacanananacatatatacggga

SEQ ID NO: 164588 - DNA, 639 bp, Zea mays
  Clone ID: MRT4577_81683C.1
tcggtaccacgcatgctgcagacgcgttacgtatcggatccagaattcgtgatgtttatatttttttgcttccgcaggagaaatggtggttataaatttttaaagagatagccaatttagctatctctttttactaaacttaaaatttcatgaggcgtttgaaaaatataatcagccacctcgaatcctttccttgttttcgctccccacagggctaaaccaaattttgctcccgcttgttttgcgcattgtaagtcatatactgaatcacctatgtatatcgcttcttgtgcatctatattcaatctttttagacatgtcacaagtggctctggatgtggtttatgttttattgtatcttctacacaaatagagtgttcaaaatatgaatgtaatccaaatggcttgaaatcattgataaactcttggcgtgtttttgaagtaacaatacctgttcgaatcttatatgaagatactattttaatcacttccgcaattcctttaaatactgggatttcattcttaaaatctgccatattacgtatccatttttcatgaactggtttcatattttccacaccaatttcttgaacgcagcctacccagaatacctaatgcaaaatgtagcttttctaatga

SEQ ID NO: 164589 - DNA, 2630 bp, Zea mays
  Clone ID: MRT4577_81684C.1
ctctttgataacgtgcttataattttagctccagcgtgatagcgaatacatcctaaaatctcttcgtcgacgctgccaaagagcatggatccgggctgatagccgcaagatacgacaaattccttcagttccaatatatcctcttcggaaagttgttggccactaaggtgccgaagatcgaaatttttatctttcgaagaggtctcatcagttctctttgccttatcagtagatgtttcagctacatttttctcaggaaccacatcagatataagtctatcaatttttgacattgtggtagcgagattatcaatttcaggtgtaccttcattagctttggcttcaacagtatcttccgcatcagcaggcacaatagtcttttatgccgaagttgggggcgaggtctgttcgatggcttgcattacgttcatcattcgtcgtttcttttgacccccagcattttccccggtatccaaagcggtcttctttgattgcaataggttagtcagatctaaccctagaggacttagcattgcgaatgggaagggttcaatcatgaccttcggaatttctaaaacatcaacagaggaagacgaagaagggcctgctgtcttttttggcacatcttgtaccttcgtctctacaggagatattatgacaagctttcgtttcttgggagtcgaatccttcggctccgctagaactttttgcttcttgacaaccctctgatcttccttgacggaccagatggcctacctgttcagaatactaacaatcctctctgttttcgctcatccggccccttcgtcaagtctatcgtaatctggatattcaaagttaagagcatccatcacccgatccaaccttcatttttcacgggtgccgaaggtagggctggaaaaaaagctcgaggctcgcgagccggctcgggctcgatcaggctcagctcggtgaggctcgcgggcctaaacgagcccgagccgagcctaattccacggctcgctacactaacgagccgagccgagccaggtcggtgaggctcgcgagccggctcgaggctcgatccaaactactacagctatcacttgtcagttgtcagtttgtttactagtgtccagtcatctagatccagtgaccagtgtgttgttttggtcacaactcacaaggaattagagtgtagggacataattttttattatatggaacatattgtgcttcaaatttgagctaatgactgtaattactgttgatgagtacttgagtgtataggttcgcgagccgagccagctcgcgagcctatatcgagccgagcctcattatcgagctcgcgaagtgaccgagccaagccgagcctcgcttggctcggctcgtttctagccctagccgaaggcagctgtcatcagctgatcttctttcttcgtatagttcccgagaatttcattgcacattgtttctatcagctccaaccattcagtgcagggtttgctggatcttttttggaacttaaaccgataaggaagtcgaacaagttcatactttttcccttcttcctttttcttctgcattccccaccaaccagaagttggaaacgccctatttgccaaatattcttgcaccaagtccttagtgccgatatgctctgccacaactctaaattccacctcggtcaggtggtagggggaccccaactacatgttgcacaggggtcgagtcatgccgaagctcagtcttaagggactcattaccatgctcatgagcttctccctcttcttttcgtcacccttcacataaaaccactcatttgtccacccggtcggccacttagtacgataaccaatcacgggggccttggtatcctttcggtatgcaaaattatagcatccaaaattcttgtgcagaccatcacttctagccttcgtctgataatgaagtccgtgcactcgatagaacccttcggtattggcactttttcattggcttcgaagagtccaaatgtacacgctaagtctaacaatggcattgggggtcagttgatgtaggtaaattttgaacttcttcaaaacatcaccgatcatctcataaaggggaatcaaagtcctaccttgaagaagcttttcaagactacgacttcatcctcttttggttctagaatcacctcctctccagcaaaacgaaccagttcgtcatcatcctcaaaaacataatttgacaatgttttccaagtatgcgagcaggtatcttcggaatcaggttgcgggtatacaaaagcatggtcaagacgaagcttgactgaaatggaagacgatcgtgacgaaggatgaaacgatcacgaagctatgtgcagaaaagcttcggcatgacagcagaaaagggaaaccgacttaaagatgaaaagtcaaattagacctcgaagaattactatagagttattaataaaagcaaagggcattaatgtaattttacatgggctgcgtcccgtgcctataaatagatgaacagtactcccgtactgttcacgctgacttggcattggcaccacgcttgtacccttactttccttcaagccgaaggtacatttgtaatttgttgccgtttatataagtaaaataaatagaaatgaatgaatgttc

SEQ ID NO: 164590 - DNA, 422 bp, Zea mays
  Clone ID: MRT4577_81685C.1
cagggatccctaaggaggaggagttcaagctgatgtacgggatgctcttctctatccgctcttttgtcagcaagaggtccccgctagacatgaaggacggcttcctggccttccaaactagccgctacaaactccattactacgagacgcccactgggatcaaggttgtcatgaatacagacttgggcgtggggcccatcctagatgtgctgcaccacatctacagtgcgctggatgtggagctggtggtgaagaatcccctgtgcccgcttggccagactgtgcaaagtgagctcttacggtcccgactggactcctacgtccggtctctgcccttcttctctggccaagctggcttaaggaagccctctacctgacccctcataagaatccctgtctgcctggggcccaacttaacctgc

SEQ ID NO: 164591 - DNA, 504 bp, Zea mays
  unsure (1)..(504): unsure at all n locations
  Clone ID: MRT4577_81686C.1
cccacgcgtccgccgcaatcaaggttgtcacgcccgacgaggatggctgccagtcaccgcacggccggtccgggccccagcgacggctccagcgcaggcgcgaggaagaagctccaactcaccaatgagcagtcgacgctgctcgaggactccntccgcgcccacaacatactctccaacgcgcagaagcaggagctcgcacggcaggtggatctcagcgccaggcaggtggaagtgtggttccagaacacacatgttcagataacatgttttgcatgaactaccctctgtatctaacaaaaagaagttcaagtttgcaggaaacaaccacaatcgaattgttgcaagtgcgtcccacgatctgaagacaaaaagatctgttgtccattagcaacaaagtgctacagaggctgtgttctgtgtaccagtacttgatagtgagtttcagaatgaacctataactatttccaacatcgacaagaaggatggtgaaaattttcatga

SEQ ID NO: 164592 - DNA, 286 bp, Zea mays
  Clone ID: MRT4577_81687C.1
tctgtcaactcaggggacacgagcggcatgggcggcacatatacagacgacgccgacgcagagcccgccgacacgggccgggctccagctggaaccggatgaacgacgggaacgcgtgacgatccgcgcagcgtcaggaccagcacgaggaaacgtgggggggcgcgcggagctgagctcggcgctggtgatcagcctgagcacgggcgtgtcgctcttcctgggccgattcgtattcttcaacttccaacgggagaacgtggcgaagcaagtgcccgcgcaaaac

SEQ ID NO: 164593 - DNA, 3405 bp, Zea mays
  unsure (1)..(3405): unsure at all n locations
  Clone ID: MRT4577_81688C.1
gccggccgggtcggggcttttccctgttcctcccatccctccctgatctctcccatccccttctcctgggctggctggccagtgacggaccagccctctcccacctcgcacgcccctgtggctcctgaccttcccaccaccggagttaatgccgcctggcctggccgtctcgctgtgcgcggcgtgggacgtggtagcagtaccgcgcgtcgcggttggacgggccacgggcgtaagtgcgtaagcgaggacgcgaggtgaggtgtggcgcgtgtctccctgtcgcccgcagcttctttttattcctccggtccggttccgttccggggaatggattctggggagccggcgcggccgcggctgctttgatcccttgccgcctgcctggcctgggctctcgtaccgcaacgcaatttggcggcgtgcgtgttccttgcttagattggcgtgatccagctctgctccaaccgtagaggtgcgcgcacttgctgctagctaagaagcatctgcagtgatcgttccaggctcgtgaggaaactcatttgctcgaatcatgtccgactttgtcgggagcagatataccaagcaagaagatttccatgttttgttgagcaagaaagatcctggagaaccacctgaacataagcacgtcctgtggatggcacactggaccaaagcaagcagcaacaatggcagcagcaatcctttggagggtaccaccaagggcactactacgaaagatagcgagaccttgccttatgaattcacggaatctacggttgctaaaaggctcatggtaggagtaagccatggaagcgcctccatgcagcatgaccgacaattcaattctagtgtgtggggtatggcacgccatatttccaacgaattgggaccgaagaatagtgaacatgttgatgggtcttttgaaaaatttgtgaagaaggatgctgtgaacttgagagcaagggcagttgtgtcagaaacatactctgttcacaagctttcagagttaccgttggattttcagcaccttggggactccgacgatccaagtccagattggagccactttccnccgcaatcaaggttgtcacgcccgacgaggatggctgccagtcaccgcacggccggtgggggccccagcgacggctccagcgcaggcgcgaggaagaagctccaactcaccaatgagcagtcgacgctgctcgaggacaccttccgcgcccacaacatactctccaacgcgcagaagcaggagctcgcacggcaggtggatctcagcgccaggcaggtggaagtgtggttccagaacacacatgttcagataacatgttctaacctgccggagagtttgaccctattctcaacggccaagcgggctttcatcctgataatccagggccgtctgcatcccatgtgatggccctatcgtcacaagaatacatgatgcactcacatcaaacagctgacgagaacatggatacgtgcaaacctgcagaaggctttgcatctcgtgtagaagatcatgctggcttcaattcagatcctccagggccaaagttaaaagggcaattattggataccatgtcatgttcttgcagcaaggatgacaacaactcagcagattgtccaatagatgagcagcacacaagccactattttgcaaactcaaagcatgaactaccctctgtatctaacaaaaagaagttcaagtttgcaggaaacaaccacaatcgaattgttgcaagtgcgtcccacgatctgaagacaaaaagatctgctgtccataaacaacaaagtgctgcagaggcagtgttctgtgcaccagtacttgatagtgagtttcagaatgaacctataactatttccaacatcgacaagaaggatggtgaaaattttcatgatatgtataaatgtcttggcaaggctgtttcgtgtcctttgttaccttatgagcatcgtcatctgaatacacagagaacggaatctgcagaaaatttgaaagtctgcacgcttcctgatcatcaaactgcaaataaattgacagaaaagagtcatggtgagctgctgacatatggaccaaagccaaagaaaaatacaggctcttgcaaccgaagaagcctctatttattcgaaaagctaacgattccttccaaatcacaaagtgcatatcctaaaaattctgcgtcttcaggaaaatctagcggctttggagtttgtatgtacggcaccaatattggaagccagttattcggagcacagaatcaatcttcatctaagactgaaacattgcacagcgatgctcttattgggtccaaatcctcagcaggcattgcttcattatcggcacaaaaggacaacggttgcccagccccagccccagccccagccccagacgaagcgaaaagcgagcagctagcagctccgtcgtccaacaccaagcagggaggagaatcagcatacagtaaagaagatggatctcataatctcaacgaaggccacgatgtttcgtccaaagcagctatcggtagcaagcaaccatgcatgcctggagcaggaatcacgaacctggatctcatactctcccagatgagcaggatgagaaaccagattcccagtggcggtgtaactcagccaccaataggcgccgagccaagtgatagatggctcaagcgcctgcagctcggcgtaccagaccctgacgtccctggttccaagaccaagaggccaaaagtcggagacagtcctccgccacccaggcaaataaaccggtcctttgacgtggcactcccttgcaaccgggctggcagtgacactggagcgatcgatcgtggtaaggaggagcagagcttgaatggaggggggaaagtgcagggaagagcccccccgattccagagaagagcgtcagtcgctggatagggagatggtgccagggcggcactcctgttttccgtgaaggcccaggccagcagggaaggcaggcaacgaaacctgctggccggttgtccgaggagcttgaaggacagttctttccaagcactgcggcgatggcgatgatggggcgcgcgatgcacaagctccggccgtgcgagcagcagcagaaggggccattcgtggtgtggaagatagattgacctttttgggtgtcatatacttgtttctttaaaaataaaataaaataaaatgtaaggcaactgtgcattttgcctggctgtggttcatggtttattgctttaatttctggtagtggaagtagctaggtatagtgcctactgatggtgtaatgctttgctgtaccaaaagtgtaatactatactgtttactgtgtcgttcgttatggtgatgtacaccatggagtaatcgaatgggacagacgaatgaactggaactggaaggtgagcatc

SEQ ID NO: 164594 - DNA, 279 bp, Zea mays
  Clone ID: MRT4577_81689C.1
gccggccggtttccggataataaggcgatgactatccctctgccccctattactatcatcgatcctgctaatcaagtgcttttgcatccaccagtaccttgaccaacttgactgtccagtcatgctacattgcaatcagtacaggtattatattgtctttggcacattattgaccgatctacaacaccatgtatcttcttgtaagagcaaaaccctaattcgaatatttggagactcctccagctctggccacaaaaaaaaaaaaaaaaaaggccccta

SEQ ID NO: 164595 - DNA, 1504 bp, Zea mays
  unsure (1)..(1504): unsure at all n locations
  Clone ID: MRT4577_8168C.1
aacggatagagctgactgcttgcatatgcgctagtacaaatagagcgccgcagtgaatccggccgaaatgactttcccatcgcgtgaagaggttgccgttaccgaccatgtcgcagcagccggcgccggcgccgccatatcggccgtataggcaggtgagggaggcgacgccccatagccgggcgatctcctgcgtgcggttctccccctgcgggcgcctcctcgcgacagcctccctcgacggaacggtagcgctgctctccccgtcctcactggccgtaatcgccgtcctgcgcggccactctgacggcgtttccgacctgtcctggtccacggagtcgttctacctctgctccgcctccgacgaccgcaccatccgcatctgggacatccggcccgtcctcgccggtggcgcccaggcagccgccgtctccggcgcagaccgctgcgtccgcgtgctcaaggggcacaccaacttcgtgttcagcgctaacttcaacccgcagaccagctcgcagatcgcttccggaggatttgattgtaccgtgcgcatatgggacgccacgagcggccggtgcacccgcgccatcgaagcgcactctgagcccgtcacctccgtgcatttcattagggacggatccatcgttgtatccggaagccatgacgggagctgcaagatctgggacgccaagagcggggcttgcctcaagacggtcatcgatgaaaagaagcccgcggtgtccttctccatgttctcgcccaatggcaagtttatcctcgttgccatgctcgataactcactgaagctatgcaattttgccaccggcaagttcttgaaggtatacagtggacatgtgaacagacaatactgcatacagtccgcgttttctgttacgaatggaaagtacattgtcagggtgtcctgccatcaatcagagaacaagattgcttctggtggccttcataatgataggactgtaagattatgggttcaagatagctaatcaacttgcaggtgtgcactacgctcaaagattagcacttgccgatcaattagtaaatgtgtcttcttcctatggatatagattgctattccagatacgtttacaacttacacaaagacattaaccatgcgagctttgttttaatctgatgtgttctgcacttgctatggatatggatcgctattctagatacgtttacaacttacacgcaaaaaaagacattaaccatgcgagctttgttttattctgatgtgttatcctaagttgtgaatgccgaataaatcaacatctcgtcatctctaataatgttgtgatatgttatgcctaacggctgtattccaatcaatattgatttattttgcnnataaaaaaaatatataaatttaaaagttttaataacatgtacaaataaaaaaaagttggtggggggaatattaattaatatttatttgttaaaaaaaattataatttaaggggggggcgccctggtaattttggac

SEQ ID NO: 164596 - DNA, 380 bp, Zea mays
  Clone ID: MRT4577_81690C.1
gggggggggttttttggaaataaataaatccgggtggaactaaaataaggcccacccccaaaaggaaaaggcggactgtacgggtacactctgtttaaacacacacacactcacaagggccaaaacacgcagggagggcaaaatagtccacaggggggcggcataaagttgatgacatagctatgcaacactatcaagcggggggagcactaaacagtcacgacgggaatatacagagtccccggcccacggggggatagaaagggaacacctttaaacagtcgaattccatcctcgtcggcactaagaggccaggtaaccctggaccactgcttttactttcgaattaaaacaggtatagggtccccatacaacccagg

SEQ ID NO: 164597 - DNA, 124 bp, Zea mays
  Clone ID: MRT4577_81691C.1
aaactgctcctatgtctcaaccagagttgagaaaattacccttgtactatgctccaaccctcaaaggttctccatctggatattgctccttgagtggcacctactccccaaggctatctcccca

SEQ ID NO: 164598 - DNA, 166 bp, Zea mays
  Clone ID: MRT4577_81692C.1
gcgcccattcgaccacgggcccccaacaacaaccaagctgaaccacgcctgcatacgacggcgtagggcgaccaaacgaccacacaaacacaatccacaagcagcagaacgacaacggaaggactgccaaaacaaaagggttacccaacagaatcgcgaggcaaca

SEQ ID NO: 164599 - DNA, 206 bp, Zea mays
  Clone ID: MRT4577_81693C.1
tcgtatcaacagaccattatctttataggggggagatcgtatattatgtggacacacaccatgaggatgtcgctcgtttccctcactatgctggctcgcgcttcgagcttcacaatgacgtgtacaatccgccgtttaagctgccagccatcgacatcagtttatctaccgtctccttggcatgtaccacctctggtttaactgcc

SEQ ID NO: 164600 - DNA, 106 bp, Zea mays
  Clone ID: MRT4577_81694C.1
cccaaacaagctatgcatctctcaaggcacccataatgggcgctttgatcatcagttatgatgaaacagactctactgggctgacagatgccttagatgacactga

SEQ ID NO: 164601 - DNA, 231 bp, Zea mays
  Clone ID: MRT4577_81695C.1
ggccgcttttttttttttttttttagtaagaatttgaagatgcattggatttcatatctgtggaatgcagcaggtaggcttaaaattcttggtgcacgttatgcaaccatcttaataatatgccactgaatgaaactattatacagataataatgctataggatactagcttccaaggaagatcctgcggtcagttcttttactctttcaagcatgaaaggagtgatcgca

SEQ ID NO: 164602 - DNA, 1816 bp, Zea mays
  Clone ID: MRT4577_81696C.1
cctcgaggccggccggggcccagtcgcccgcatctgcggcccgcaagagaagcgcaagcgctcctgcgccgccgtccaccgaatccccgaccgcgcccggcgcccctcgacctccgttctccatgtcggcgtgaaggctagctcctgctaggcgctgggtagcgggttaggcagtgctgtgcagatccacctgcgtcccgccttgttctgtgctgccgcttgtcgctgcgtcatttaccaagtgctcctgtgccagccggcctacggccagcaccacagttcgcagggccgctggtgttctctcttggctggccccagtcccctgctcgtcctacacagtctgccactgtccctcgctgttgcagtggccaagtaacgaatcactgtctcgttctcaatgggacacagtttcttttcgatgcacaggataacatctcgctcgatgttacagctctgccgtgaagggaggcacctcgatcgctggcgtatgtgacatcattgctgtcgcatctgggaaaggcggcgtaggcaagtccaccactgcagttaacattgctgtagcacttgcaaaggagtttaagcttcaggttggtttgctagatgctgacatctatggaccatccattcccacaatgatgaatctccatgccaagcctgaattaagtgaagacatgaagatgattccaattgagaaccatggtgtgagatgcatgtccattggttttcttgtagacaaagacgcaccaattgtttggagaggtaatgagtgctcttgagaagatgacaaggggagttgcttggggggaccttgatattcttgttgttgatatgcccccaggcactggtgatgctcaactatcaatgtcccaaaggcttcggttatctggtgctttaattgtttcaactcctcaagatattgctcttatcgatgctagaagaggagccaacatgttccgcaaagttcaagttccaattctgggattggtagagaatatgagttgctttaaatgctcaaaatgtggtgagaaatcttacatctttggggaagctggagcacagaggactgcagaggaaatggacatgaaattacttggtgatgtacctcttgaaatcagtatcagaacaggttcagatgaaggcaaccctattgttgtatcatcacccaactcagcatctgcgcaagcgtacgtaaatgttgcggagaaggtgactcaaaggctcaaggagttagcagaggagcgacggatgggcccagaaatcttactttgagaaattcaggctgcttttctcacacctttccctgtttgacgctacggcgccaaaacaatgtactgataagtagattgctgttggaagtaaactttaaatttcgtcactctgtctgaaaatttactcaaacaaacttctgctgcttccatcagaacaggttcagatgaaggcaaccctatcgttatatcatcacccaactctgcatcagcacaagcgtacgtaaatgttgctgagcgggtgactcaaaggctcaatgagctagcagaggagcgacggatgggcccagaaatcttactttgagaaattcaggccacttttctacacaccttcccctgtttgacgctacggcgccaaaaaaaaaaatgcactgataaatagtgttgttggaagtaaacttcaagttttatcagttgggctggaaatttactcgaataaaacctctgctgccaaccttgtctttgtcacgcatgtcccttatctagtattctagtctctgcatttttttcatgactcattgagtgataattatatactagtaatatatagt

SEQ ID NO: 164603 - DNA, 1550 bp, Zea mays
  Clone ID: MRT4577_81697C.1
gtaccctccgggctcgccggggcggcgtgccgcccatccgccctgtgccctcgccccacccgtcgacgacggcgcatccgccctccgccctcgccccacccgtcgacgacctcgtctcctccgtgcgcgggcctcggctagctcctgcttggcgctgggtagcgggctcgtcggtgctgtgcagatccacccgcgccccgccttgttctgtgctgccgcttggcgctgcgtcactgaccaagtgcgtgcctgccagccgaccgacggccagcaccacatttcgcagagcccttggtgctatctcttggctgtcagcagcagaagcacagcgcagagtcgccccagccccctgcgcctgctgcatagtctgccagtgcccctcagttgttgtggtggccaagggacgaatcactctctcattctcaatgtggcacagtttcttttcgatgcaccggatagcctctcgctcgggtttgcttggtaggagatgttacaggtctcgcatgaaaggaaaaaaaacgatcggcaacaaaaaaaaaaaaaaaaaaaatcaactattcccagccatactactctttcaaattgaaactgcaaaccatcaaacatgataccttttgaccaagtttgataaacgccaggcagtccgaaattaaaatgggaaaacattttacatgaagatgattccagttgagaaccatggtgtgcgatgcatgtccattggttttcttgtagacaatgatgcaccaattgtttggagaggtcctatggtaatgagtgctcttgagaagatgacaaggggagttgcttggggggaccttgatattcttgttgttgatatgcccccaggcactggcgatgctcaactatcgatgtcccaaaggcttcggttatctggtgctttaattgtttcaactcctcaagatattgctcttattgatgctagaagaggagccaacatgttccgcaaagttcaagttcctattctgggattggtagagaatatgagttgttttaagtgcccaaaatgtggtgagaaatcttacatcttcggggaaggtggagcgcagaggactgcagaggaaatggacatgaaattacttggtgatgtacctcttgaaatcagcatcagaacaggttcagatgaaggcaaccctatcgttatatcatcacccaactctgcatcagcacaagcgtacgtaaatgttgctgagaaggtgactcaaaggctcaatgagctagcagaggagcgacggatgggcccagaaatcttactttgagaaattcaggccacttttctacacaccttcccctgtttgacgctacggcgccaaaaaaaaatgcactgataaatagtgttgttggaagtaaacttcaagttttatcagttgggctggaaatttactcgaataaaacctctgctgccaaccttgtctttgtcacgcatgtcccttatctagtattctagtctctgcatttttttcatgactcattgagtgataattatatactagtaatatatagtatgtgacctctgcttttggcatgcctgt

SEQ ID NO: 164604 - DNA, 1580 bp, Zea mays
  Clone ID: MRT4577_81698C.1
gcggaggcgaagcggctgatgcggctggcggggccgatcgtcgccagctgcgtgctgcagaacgtggtgagcatggcgtccatcatattcgttggccacctcggcgagctccacctcgccggcgcttccctggccacctccctcgccaacgtcacgggctacagccttctcaccggaatggcgagcgcgctggacacgctgtgcgggcaggcgttcggcgcgcggcagcaccacctcctgggcgtgtacaagcagcgcgcgatggtagtgctcgggctcgcctgcgtcccgatcgcggtcgtgtgggcgtgcgccggccggatcctgctcctcctcggccaggacccgcagatcgcggcggaggccggcgcgtacgcgcggtggctcgtcccgtcgctggccgcctacgtgccgctgcagtgccacgtccgcttcctgcagacgcagagcgtggtcctgcccgtggcggccagctgcggcgccacggcgctctgccacgtgctcgtctgctgggcgctggtgtacaaggctggcatgggcagcaagggcgccgcgctcagcaacggcgtctcctacgccgtcaacctcgtggtactggcgctgtacgtgaggctgtcgggcgcgtgcagggagacatggaaaggcttctcgcgggaggcgtttaaggacctgtggcgattcgccgagcttgcctggccgtccgccatgatgatctgcttggagtggtggtcgtttgaagtccttgtgcttctatccggtcttctgccaaatcctcagctggaaacgtcagtcctgtcgatttgcctaaatactggtgctctgctctacatgataccattggggcttacttactccataagcacacgcgtttccaacgagcttggcgctgggcagcctcaggccgcgaagatggcagcaaaggtagtcatgtacatggctttgtctgaaggactcgttatatccttgacgatgaccctgctacgcaacatttgggggtacgtgtacagcgacgaggaggagatcgtgacgtacatctctaagatgttgccgatcctcgggatatctttcttcatagatgggctccatagctctctttcaggggtgctcacaggctgcggaaagcagaagatcggcgcggccgttaatctcggagcgttctacttgctaggcatcccagtggctgtactgcttgcattcgtcttccatctcaacggaatgggcctctggcttggcatcgtctgcggcagcgccaccaagctggggtttcttctgtttgtaacgtgttccgtagactgggacaaggaggcagtgaaggcaaggtacagagtgttagggtcatctctcccgttagcatgaaaaaaatgccagtgttacatggaaatcccatttgaaggcagttgaacagaacccggcaaagaaagtgtgggaacaaaaaactttctatagttggggacatctcaaagtcatagctatggggaaggcaagaagaaccagagccagtatttttggattcatctgtactgttaaattttgtagcactgcaatggtttttcaggaaatataattagctggattgagtc

SEQ ID NO: 164605 - DNA, 469 bp, Zea mays
  Clone ID: MRT4577_81699C.1
cggacgcgtgggtaaatcattcatctcatttcttcaactggctttgcttctttctttcttgttcctcaattataattttttcacaggtttgagatcttatcatagagttttgttttaagtttgtgagatggaattagtgtctggaaaagtagttccaggttgctccaacgcaggcaatcctttccatgagtgtactgctatctgttttgagagagtaaactctccagatgtccacaagaaggagaagaaactctttgggtttggtaagagaactcccagcagggatcagactcctccagctagtccggctcgtggaagcagatcacctctggccagctatttcgccaagaagaaggttgagtcgtcagcagagagttcaccatcctcttatgatcacaccaatggcaacttcttaagtcgcctttccccgctacagggacgcaagatcgagccttcaagcaatgtcgat

SEQ ID NO: 164606 - DNA, 802 bp, Zea mays
  unsure (1)..(802): unsure at all n locations
  Clone ID: MRT4577_8169C.1
ctcgaggccggccgggagctcatctccttggtcatctgctcatcctcatcccctgcccatccgatccgatcggtcatctcatcccctacccgatcggatcccctgctcatccgccgagcaccaccagtcagcaggctccagtcgtcgagcaccagcaggagcacggcgcgccgcccagtaggagcacgaccaggaggacgacgcccgcatccagcaggagcaccagcaggaggaggacgcccatgctgctaccgttgtgcgatgatctgatgcgcccccatcatggctcttctcctccctcgcggcctcgcctcgatctgctgctgccggtgatctgctgctgccggatccgagcgtcgtccccacgggtcatagccagcgatatgcagggatcaagaatccaactttgagaaaaattgctcgagatgtaaatggcgccgccggagtaccagcagtacctcgtgcaggtgaccaagtaccaggccgcacagaactgcaaggtacgtatgcacgcatggttacatttactatagaactggagttattttttgatgcaaaggctgtcaggtcatggtgatttcacgtccgttaggcttgagaggtggactcaaacatccaagttttacaagttttgatgttggatgttaaatttctatgctcacccctcgtttggttattgatgtactatttccatctcatgtcacaaatttggcataaggaatggggtattggtggctactgactgtgtttgtttccacgtattatacatgtacaatgggacagntgataatagttttgcatg

SEQ ID NO: 164607 - DNA, 1593 bp, Zea mays
  Clone ID: MRT4577_816C.1
ttttttttttttttttttttttaaacaaaggttctgtattcgtatcacatgttaactcagtaccaccattccacacggtggataaaatgtacagtcgaaactcaaaaggtagatgaatgaggaaaattagaatgaaagaatatgtcaggtacataagctatcacgtgacacaacacaattagtactaggtaacagaattgcgggcgaggctgcttcattctattgtaagcttcatacggcattcccatgccttagaaagaagcagtgcttttctgctagctgcagaattgagcggccaaaatttcaagcaggaccatgctcagaccttattcttctctcttggaggtatcttcagcaaatgcttcatggtgtcatatgcggtgaaaccaatggccactgaaggcaccaccttgatgtaattgaggctcaagccagcaaataattgtttccaaccctgtgtttgtttaatggacacaagaccctggaatgtgcccgttattcgtggggcaccaaattgctcatgttgttgctgattttgaacctgcatctgcctcctgacaacatctaatggatatgtcagagtctgtccaaataaaccagcagcagcaccacatgacagcttcaatgttacagaacttctgtaatcttctggtacatgtaccttcagcccttcatatatgtagaacttaagaccagcataaggaagtatccccatgagtgttggacctacacctcggtaaagagcccgcactccaccttctgagtaaacacatctaaagacatcaatgattcctccatatgctggctggggacttccccttttcaaagctctgctgagttcatctgaactattgacctgaaaggcaagcttagtccgggccaaatccaagggataagtacacaatacagcagttccccctgatgctgaaccggctaaaagatctactaaaggccctgttcccagtgagggacagttattcaaaatccaacaccggtaccgctcatatgccatgaaatgtaatgcagcataaggaacaattctcatcacactggcaccatttcctttgtaaaaccccatgactccatcaagttgtctcagtttcttcaatgatttgagaactccaagagacccaaactcatttgttctggtctgcagcaatatcttgacgcgctcgagcggcgcgatggcggttttggagaaggcgccggcgacgccgccggcgatcatctccttggcaaagacgggcatgaggtcgagcgcgcagaggtcgacccgggccgccgtcacggtcgccgagccctgcgaaggggtccccatcccgccgccgcgctcctctcatccaaatcaaacacccccgcgcgggaatctgcggaagtccgaagggatcccaccaggccggacgcgcgccgcgaccagcggccagtcacgccgccgccccaaacgccgacaaatttgaccgtggcaacggggcgatggtctgcgcgggcggcttgcgggtttctcttttcttgcgcgggttttccggcagggcggccacagcccagagggacgactaatatgcgggagcccggccggcctcgaggtacccaatg

SEQ ID NO: 164608 - DNA, 1023 bp, Zea mays
  unsure (1)..(1023): unsure at all n locations
  Clone ID: MRT4577_81700C.1
ggcgcaacccctgcccctatcctcgacggcaaggaaacttcccccgggcataaatctcaccgctcacacgccattagcgtcatacccgctacctcctctagcatgccacacgccgccatccccctagcccactctgtgtcgggcgggccgatctcctatttttatgccccacgcaacctaggccatcccaccacggagcaagaaaccctagcgtagccaccaaccagtgctgcccacatggcatcccgattgtggccgcatccatctcggcgcctcgcccgccacgttgcaccaccgtcgccgctcctcctccccaccgcgccgtcgccctgagtaccgccgccgccgcgcatgcctccagggccgcatctcttaacgttagggcccagccgaacatcgtcgtcgcctccacctctgcgtctgggccaccgcaagaatttagggctcctccggggttcgagatcaagtccgaccagcagagcagcgtcctcagcaccacgctcgacatccccctccacctcggcaccggcatcttcgccctcgggtacgcaccacaccttttctcaccatccgagcattgccaaggagctcctctccatccccaacacgcgccccgccccaccaccgacgatgaatgggtgctttagattcactaagacgatggcgcgtctgcggcaaggagcttcagattcactgccatcagaaacttgcaggcgaggaaggagagggtccaagttcctgacctctgcatcgactgagagggtccaagttcctgacccatgcattgactgattatctttgagtttcatcattatattggaattggtgtgcgttcaaaatactcaattgattctcacggctatcttggctcctagcgaaacttgtttttcgttggtgtatctggcgtattatggaaaaaataccttctctctttgagggttccagtccatttcgttctctataatgtcacctacccttcctgagnnctactttgttgctattgtaagaataagaagaaaaagc

SEQ ID NO: 164609 - DNA, 285 bp, Zea mays
  Clone ID: MRT4577_81701C.1
tttattttttttttttttttttttttttttgtgggttttttaactttttcttgggggaccaaaatatatatatatttatctataaatctaaacctacaccaaaaaaaaaaccaaaaacaaaaacctactataaccaaacaataaaaatccccaacaccaaggcgcccgactacctgcaccgctcgctagtccgccaccacgcgctccaccacgtaagacccaattaaacccgtaaagaacctgcaaatagagcttcactccctggaccagaacctgaacaaaaat

SEQ ID NO: 164610 - DNA, 194 bp, Zea mays
  Clone ID: MRT4577_81702C.1
attcggctcgaggctttaaattacgactctgaatgcctgttctgacaggggccgagatgtcgtagctctacctacagggggttgtacgaggcaggtcacagctgcagctttaatctgcggcgagcaccctttcaattgcacgattatagagcccgcatgtcttcatctcatgtacgaagcgctcttgatgaaca

SEQ ID NO: 164611 - DNA, 241 bp, Zea mays
  Clone ID: MRT4577_81703C.1
accacgcgtccgacaacacaaacgtggacgatcacaaacataaactgcttgcacaaaaatattatctaatatgaaaactcaattaggctgtctgtacgaaccctaatctttccttggatatgcaatagatgttccactttaaactttccaatttgccaataaatatcttcataacacgtcttataaaccgctgcatttttacagtactgtatttcgctgtttacaacaaatttatcattat

SEQ ID NO: 164612 - DNA, 221 bp, Zea mays
  unsure (1)..(221): unsure at all n locations
  Clone ID: MRT4577_81704C.1
aaaaaagggngggagggacgcgtccgcggacactacgcatcaaacaaataattatattttaaccttagacaaaaaacgtggcgggtggaaattttggggcgccacaccctaccacaaaccttcctttatatccacaccggcggcacacacaccttgtttttgactgagcttggggcgtccacatcatatgcgtgggacgggcgttttcggtttcataagcc

SEQ ID NO: 164613 - DNA, 632 bp, Zea mays
  unsure (1)..(632): unsure at all n locations
  Clone ID: MRT4577_81705C.1
ccaaattactagcatcaatcgaatcatggacacaagatggacaagtacacgcccagattttntgggattaataacaccggacaccagactctaaacatgggtcaagctggagcgactcaagatgcagcttgactcctggtacactatatgagtgattcaagacgccctcgatgccacggacactgaatgttgtgacgtcaatttggaagccacgggatggatccctttcagagcgatctagacgccctcgatgcctcgacaacttcacgggcgtctgatgtgtaaactgacatcatacttataactgataggagacaggtaagatcagtcaccagtgatggagtcatgaggttgttgacgtcgtgctaaatgttggtgtagggccaaaggagaagatatggtgcaaaattcttgagcttgacattatggtacaatataaatttgagtattcttgcctatcatagcagtctatagcctatatcacattgcaaaattccatgaacaattggtccacattatttgtttgttctattgttcatgcccaagcatggatgcaggtggatgtgggcgccagggccgccaccaaggatgtaggggtcgcgccacaacgggcgaggatgcattgggcatgc

SEQ ID NO: 164614 - DNA, 2351 bp, Zea mays
  Clone ID: MRT4577_81706C.1
gaccctcgaggccggccgggacacccgttccttgttcggtcggaacgcagcgcagcggcggcggcgatagggagagaggagagagtctgcaggatccagcaggccgagggaggagtcagcggcgggccggagaatatgagcggcaacggcgcgaagaaggtggtcgatgcggcggtgaaggccggcaggacgatcatcgactgggacggcatggccaagttgctcgtcaccgacgaggcgcgcaaggagttcgccgccctccgccgcgctttcgatgacgtcaaccaccagctccagaccaagttctcccaggtgtccgatctcgcttttcttctccttcccccttgggctgatctgacctagggtttccagatctgtcgctgctctttctgcgctgacccagatcgatccgtttgactagtctatgtacaaatggtgtgatgcggggtactcgagggaatcagctgtgttcgctttttttatgtatggttacattttttcttgagcgctagtggtctcatgttgacgtaacgttgtttgattctagttatatttgtacaaattaggataggtatcctgcattttcactttgtggtcattattagcgctttacttttaattattgatccgtaatgaacacagcaaccggacactgttagaaccattacagtttatcctgtatttgtcaactttgaaactgtgctcaagccctccattacctgggatctgggaaactcttctgttatgagaaggtttggttcaatctctgatgaaagacgatggaggcattacatttgaataaccgagtgatttcagagaaaatacatgttctatcaatagagaaggacagcttttgttttttgagaccagagagggccaatcttggcttcatatgtgaacaaggtgttttgttttctgctcgaaaaggtttgttttaccctcgtaagttgtaaggtttatattattcaaactgcagtcacatattgggttcttttatactcttggtaggctgcaagcttcctttgatttagcttagtacggagttgatcgagtgatctctcctgtcatgttgggtgcttttattcttgttcatttgctacgttatcttgaaagttcctgggaggcagctgaggcatgcactattcctcaaatttgcagtactgtgtcttccacatgtgttagttatgtatcctagatcaatgggtctttgttctctaaaccttttacttattttgtttgcaggaaccccagccgattgattgggagtactacagaaaaggaattggatcaaaagtggtggatatgtacaaagaggcttttgaaagcatcgagatcccgaagtacgtcgacacagttactccccagtacaagccaaagtttgatgctgtggtcagcagctgttgctctcacacttttgtattttaaagtttattgcctgaaaatctattctgttttttgtgttttctatcttgagttgctctaccaacatttcctagatgagtgcatccaattttttagttcccgtattaactccttaccttattgctgatgtgcttctttttggttcttatatttatgttacctgtagattgctgaattaaaggaggctgagaaagagcatcagaaggagtcagaaaggatagagaaggaacttgctgaaatggaggaaatgaggaaaaagatcagtacaatgacagcagatgattactttgagaagtaccctgaactcaggaagaagtttgacgatgaaatccgtaacgataactggggatattgaagagattggagagaactcttatgatgccatttccatgtccgtgaagaaccaataattttcctgtgccctgaattgggtggtttccatagcatgtgcacggggtttgggtggaatgcctacagaatcgactgtgtcaagctttcttgattccgtagaaacatgttttgtttgacctcatcatagaggatctccgcttttatcgtacaaagattgtgatatgttcttagcttctttctacctgaataagaggatttctgcagacccttttccttaaaaaaaaaaaaaaaaaagcggaaaaaaaaaaaaaaaaaaaaaaaaaaaaaaaaaaaaaaaaaaaaaaaaaaaaaaaaaaaaaaaaaaaaaaaaaaaaaaaaaaaaaaaaaaaaaaaaaaaaaaaaggaaaaaaccaaattttactaccgggggttggaaagaaaaaattttttttttggggccccaaaattaatttttttaaaaaaggtgttttgggaaaaacccttgggttccccaatttaattgctttggaaaaaatcccctttttcccagtgtgggtaataacaaaaaaggccccccc

SEQ ID NO: 164615 - DNA, 299 bp, Zea mays
  Clone ID: MRT4577_81707C.1
agcaggctggtcctgagctagaggagagtcatccaagaggggggggtggtgttaaaaattgcgctattctgcaacaactagtcaccgttacattggcctatcatgagtgaagatatttaaatgcttattcgacgttagagagtactgattctaattattttattaatcagcttattatgcacctatagaatatgattgtaccctaaaaaattagtggcaagagtcggataagtattttagcagcttgcattaatgcatccaggtagcatccatttatcaacgtgtgatagttggtgaat

SEQ ID NO: 164616 - DNA, 662 bp, Zea mays
  unsure (1)..(662): unsure at all n locations
  Clone ID: MRT4577_81708C.1
agnatggagaaccccaactggtccatctccgagatctcctcgccggaggacgacgacgaggacatcttggccgccgccgccgccggccgccgcaacaaggggggccgcaccaagaacgccaagcagatcaggtgggtgctgctcctcaaggcgcggccaggcgcagggtggccgcggggaggaccgacgccgaggccggcgtcgtggccgccgccggcgagagccccgtggtgcgctccaggttctacgccttcatcaaggccttcctcgtcgtctccctgctgctcctggccgtcgaggtcgccgcgtacttcaacggctgggacctcgccgcctccgcgctcgcactccccgccatcggcctcgagtcgatgtacgcctcctggctgcgcttccgcgccacctacgttgcgccggggatacagttcctcaccgacgcctgcgtcgtgctcttcctcatccagagcgccgaccgactcatccagtgcctcggctgcttctacattcacatcaagcgcatcaagcccaagcccaagtcgcttgcattgcctgatgcggaggacccggatgccgggtactaccccatggtacttgtgcagataccaatgtgcaacgagaaggaggtgtatcaacaatcaattgcggccgagtgcaccttgact

SEQ ID NO: 164617 - DNA, 574 bp, Zea mays
  Clone ID: MRT4577_81709C.1
ggccaaccagaaataagaagttacatttccagattctaatgtgaaaaaaaaaaaaaaaaaaaaaaaaaaaaaaaaaaaaaaaaaaaaaagcaaaaaaaaaaaaaaaaaaaaaaaaaaaaggcttaaacctaaaggagtgacaacacataagggggatattttagggcatataacctcacactggggggacctcctcaaacatccatattagagggcccaattactccctatagggattacaaaaaacaaattactgaccaaccgtgatacaacttaaataaatgggaaaaccttgcagccacccaacttaatgggaaaagccgtaaattcccctttttacaactgggggaaaacacaaaaggcccaaaccaatcgcctttaaaaacaaatcaaaaccgaaatggcaaaagaacacgccctgaaggtgaccatcaatgggaccggccctagtggtaaccctaaacgggaccgttccatttgtcaacgccctagggcccggttcttttggttaggtccttaacttcggggccaatttagggggcttttcccttgaagcccaaatacgggggctccc

SEQ ID NO: 164618 - DNA, 388 bp, Zea mays
  Clone ID: MRT4577_8170C.1
caacagcatggactggatgtacgccaactgctcgaccacagcccagcgtggtgctctcgactggtggaagaagttccatgatgcctccaagcccatctttgaggagctgtacgagtctgtcgccaacggcaccgagaccaggaggtcgctcaccaagaactcagcccccaactaccgtgctgagctcgaggctgagttggccgagatcgccaaccacgagatgtggcgcactggcaagtctgtccgcaagttgagacccgagaaccagtaaaacgcatgcccaggccgactatccatttctcctttctagactgttttcctcattatgcgctttgcaattgtaccataccacactgaagtcagagaataaatgcaccttctgaacccc

SEQ ID NO: 164619 - DNA, 137 bp, Zea mays
  Clone ID: MRT4577_81710C.1
cccacgcgtccggagaagacgatggtgaacatccaggacatgtcgctggaggcagtcctcgattacgaaggctagaaggccctgtcctcgcagtcctgcgcgatcatgcagcagggcctgacgtacctctctggagg

SEQ ID NO: 164620 - DNA, 537 bp, Zea mays
  Clone ID: MRT4577_81711C.1
atgcgacgcctcttcctgggggattggcgcgctgcggccagcgccgtgaacgcccacggcgccgccgcggggcgccgcttcaaccgcaccctcgtccagtgccagacccgtgtccgcaccctcaagcacaagcagcggtacaaggaggagctcctgaagcagccggcgtcggggtggtgtcacctcccgcggctccacgcgttcctggccagccccgacgagtcgactccgggctttccggccaaggcgccggcgttcaccaagcaggaggaggaggagaaggtggccggaggaggcattgggctggtggggagctggactgttccgaggaggccgaggaatgcggccgcagcagggacgggattctgcccgggggcggtggtgacgaagctggcggaggtgtacgagcacgtggagctggccagaatcggcgccgagaaggtgaagacggagatgcagcaggagatgggaggtggagaaggccatgttcagcgccctgaaggtggagcagtagaagctgaaaagtactgccactga

SEQ ID NO: 164621 - DNA, 280 bp, Zea mays
  Clone ID: MRT4577_81712C.1
ccgaccattgaggtcgctatatacggctggcctagggccggcgcactctggtcacagtcccatcttcagagagtagtggcgttggctaaactcccttgctgaaccaatatgtgcacaagcagcttaacaatcatggacaaggctacgatcggtgcggatccactgaacaaggaggtgcagttcgcggaccggctcttcaatctgcaaatatgggacactgctggccagcaaaggtttcacagtctcgccggtgcattctaccggggagcacactgccgcg

SEQ ID NO: 164622 - DNA, 769 bp, Zea mays
  Clone ID: MRT4577_81713C.1
ttccttaagcagtggtaacaacgcagagtacgcgggggccagaggaccttacagcggatggcgcatctccggtgaaggtgtccacctcccaggatatacttgcgggcacctcagcaaacggggtggcctcttttgataactcggcgctgtaccagactgcccggatcttcaccgggccatcatcctacactttccctatccagaagcagggccggcatttcgtccggttttacttcttccccttcacctaccagagctatgatctttcacttgccaaatttactgtgtccacccaagatgttctcctgcttagtgacttccagcaaccagacaagaccgcacccttgttcaaggaatactcactgaatatcacccgcgacacgctcgtgatttccttcaagccgtcaaatggaattgcatttgtcaacgcaattgaggtggtctctgtcccagatgatctcatcaccgatgatgcacaaatggtcaaccctgtccagcagtacagtggtttgtctacacagccactggagacagtatatcgggttaacatgggtggtccgaaggtcactcctgacaatgataccctctcgaggacctgggtgactgatctaaagtacttgttgaacccatctgtgaccaaacaggttaattatggcaagcgtgtcaactataagaagggtgggaggtggagctactcagctgtcagcccctgatattgtctatggcacagctacagagttggcagcgacaaatacatccaatgctcttt

SEQ ID NO: 164623 - DNA, 171 bp, Zea mays
  Clone ID: MRT4577_81714C.1
attcggctcgagcgatcatgggctgatacggattgttgttgggcaggaaccgtaagagggccctggcggtggcacttggtcataggctccaagcacctgactagcgttaatagatagcggctgaagtggaggacacggacccgatggacactacagatagcaggagtatat

SEQ ID NO: 164624 - DNA, 468 bp, Zea mays
  Clone ID: MRT4577_81715C.1
gttggacttctctctgttggccaaaccacccggctctctgcctcagggaaggaggcttcagctcagcctctgtccgtgtctggtcctcatgggaccgaggacgaggcaccaaggaagaaggcacgccttggatgggggcaaggtttggccaagtatgagaagcagaaggtccaagggcctgtggatcctgctgaagctgttgctgatggaagtccagctgatggcgaactgaagaccacctctcctgtgcctgtgcctgtgcaccctgtgcctgtgcctgtgccttatgttgcacctgcacctcctgctgtaccagtgcttgcgcctgcgccagcaccttatggtactcctggacttttgtctgcccctatgcaatgctcatctccagttaccgggccaccatattgttcctcaacacctggagataaaacatgtgaaaagatgccaaatgcgggcactaactctact

SEQ ID NO: 164625 - DNA, 422 bp, Zea mays
  Clone ID: MRT4577_81716C.1
gtttttgctgtcttcttatgcatatctgaagatgtagtgagttttttttagcagagattgcatagtttcagtttggtcccttgattacgttgcctccttgaccatttttaggtggagtgttcatatcagtgtcagccctttgttggaatttaactattaaattcattcgtaattctcttgtagtgttataatcaaatgtgtaggttgcatgtaaccataggtatcctaccaaattttgtgtttgtggacggatgttctgcggggtttttttttgtgtgtcgatgctatttggcattgcttatatcggtttcttgtgttgatgaacgccgatgattgtttccacttagttgtctgatttacaatagttaacacgacacgacatccattctacacattattaccttaaacgtaagaatctgatg

SEQ ID NO: 164626 - DNA, 977 bp, Zea mays
  Clone ID: MRT4577_81717C.1
gcgcctacaagaacattgtcgccgcggacgacttccccgccgagttgcgcaagaagatcacccgcgtcattgacgtgaccaagctcaaggcaaagtatggccagtacgaggcccagcgcaagctcttcgccgagcacgacgtcttcctcggcgacgaccgcatcatcaaccgcctgcccaagatcctcggcaagaccttttacaagaccaccctcaagcgccccgtccccgtcgtgctcaagccaaaggcccgcaaggtcgacggcaagcgcaccaagccccagaagaaggagggcgaggtcaacgccgccacccccgccgagatcgcaaaggagattgaaaaggccctcggctctgcgctcgtcagcctgtcgcccagcacaaacaccgccgtgcgcgtgggcttctccgactggacgcccgagcagattgccgccaacgtcgaggccgtggccggcgctgtcgtcgagaagtgggttccccagcagtggcgcaacgtcaagagcatctacatcaagggcgctgagacggctgctctgcccatctggatgaccgacgagctgtggctcgacgagaaggacgtcattgccgactctgagggcaaggcctctgagaaggccaacattggcaagaagcgcaagaatgtcgaggagcaggccgaggctgcacccgcggccaagaaggctaagaaggctgccaaggaggagaagcccaagcctgacagcaacgacgacaagctggatcagcagatttcggatcgcaagacaagactgagaagcgcaaaggccaaggcggcaaaggcatcagagtaagaaaggacagaaaaaaaaaagacgagagggaagagaaaaaatgatttcatttttacataattatctgtgtgtatgcgcataataaggatgattagatatctggcactggcgttgcggcgtattagatggacagtcaaaaacatatgaatagaagaaatgagaaat

SEQ ID NO: 164627 - DNA, 481 bp, Zea mays
  unsure (1)..(481): unsure at all n locations
  Clone ID: MRT4577_81718C.1
nctcgggccggccgggactacgaggtcatcgtgcctccgcacaccgtcatcacggtgcgcatcctggccacgcagggcacttgccaggtccccttctcctacacgcaggaggatattttgactaccggggagaagaaggtcaccaagtatgacgatggcatcttccgtggagtcaacagctttggtttcaagtccgaggtcaccgagaggaagatcaacggcgaatgagacgatgcaccactgtgccaaagtctgcttatctatcttaataattggtgtcatctaagccatgcaagcatgtgtgctttatagctaatcatcttacactacgctcgtctgtttatttgtatacgtaagtactgtacattgcatgcacatgcactctcatcacctgtaatgttttacttgaaatttattcaaaaataaataaaggcttgtctttgccacttgttaaaataaaaaaaaaaaaaaaaaagcggcc

SEQ ID NO: 164628 - DNA, 396 bp, Zea mays
  Clone ID: MRT4577_81719C.1
atctggtgcgacaccgacgacaccagcaccgacaaccgtgacaccctgttcgaggtcgtgagggtgggcgatgacgccggggccgtgtacgggctccggaacctcggcaacaaccacatctgccaccggctgacctacgagggcaaggagagctgcctgaacgccagcatacccagcgtcaggaaggaggcgcagctgaagatcgaggaggccgtcctgctgcggaagatctacggcgtggactaccacctcaaggacgccaagatcctgaacaacaagcaacggcaagatctgggacgccagcaggtccttgaggctgggcatcaaaagcagcttccaagccggagtccccgaagtcgtgaccggatcgattacgctggaaagcgagttcgacac

SEQ ID NO: 164629 - DNA, 165 bp, Zea mays
  Clone ID: MRT4577_8171C.1
ctcacctcttctctctcttttttctttcttcagacactgcctgtctggtggcggtggtaccgctggctctgcccagtcgcctggccactctccggcttggttgcctccccgttcggcgacctcccgcatccgctggcggcctcaccgcccggcccgccggtggcg

SEQ ID NO: 164630 - DNA, 2299 bp, Zea mays
  Clone ID: MRT4577_81720C.1
tagaaaagagcaatctgagttttgaatttttactaacttcatttccaaaatttttggatttggtaaatgaagttatacgaaaatccaattgttggggctggcttggttgacattggtatatagactatgttatactgttaaataacaagccttctattatctattttctttctagttaatacgtgtgcttgggagtccttgcaatttgaataaaccaagatcttaccatgactgcaattttagagagacgcgaaagtacaagcctgtggggtcgcttctgcaactggataactagcaccgaaaaccgtctttacattggatggttcggtgttttgatgatccctaccttattgaccgcaacttccgtatttattatcgccttcatcgctgctcctccagtagatattgatggtattcgtgagcctgtttctggttctttactttatggaaacaatattatctctggtgctattattcctacttctgcggcgatcggattgcatttttacccaatttgggaagctgcatctgttgatgaatggttatacaatggcggtccttatgagctaattgttctacacttcttacttggtgtagcttgttatatgggtcgtgagtgggaacttagtttccgtctgggtatgcgcccttggattgctgttgcatattcagctcctgttgcagctgctactgctgttttcttgatttaccctattggaggagagcacagagagctagcatacatcgctagctcactttagcatatatattacataaatattggcatatataaactaaactgaattgaggacgatatggcccgcttggtctcttccggaatcattggtaaggggcacaacatctttgacgatggcggattcggtgaagtccatgctgacccaattaaagtcgagcgtccgcacaagcgtccgccgcagaagcagaatgcggagaatggaacgacgacgaaggttgatgagccaaaggaattgcctaagcacgtgtgcttcaagggagacaacgggctatacctgagcgctcggatggtggaaggctacccctacctgcagtttgcgtcggacgacataggcgatccaagtgtgaggttcaccacgtacaactacatgatcgacggcaagcgggtgatccgcgtcaagtcggaccacttcggcaagttctggcggcgcagcccaaactggatctggtgcgacaccgacgacaccagcaccgacaaccgtgacaccctgttcgaggtcgtcaggggtcggcgacgacgccgacgccgtgtacgggctccggaacctcggcaacaaccacatctgccaccggctgacctacgagggcaaggagagctgcctgaacgccagcatacccagcgtcaggaaggaggcgcagctgaagatcgaggaggccgtcctgctgcggaagatctacggcgtggactaccacctcaaggacgccaagatcctgaacaacaaggtgaggaccctggtgactcgagaggcggtgaacgccggcagcatgcccagcaagaacacgctgaccctcaagtacgtggtcagcaacggcaagatctgggacgccagcaggtccttgaggctgggcatcaaaagcagcttccaagccggagtccccgaggtcgtgaccggatcgattacgctggagagcgagttcgacaccagctacatctggggcgagaacaccgtcaacacggaggagttctccaccgactacgaggtcatcgtgcctccgcacaccgtcatcacggtgcgcatcctggccacgcagggcacctgccaggtccccttctcctacacgcaggaggatattttgactaccggggagaagaaggtcaccaagtatgacgatggcatcttccgtggagtcaacagctttggtttcaagtccgaggtcaccgagaggaagatcaatggcgaatgagacgatgcaccacatgtcatatctatggatcggagacactgtgccaaagtctgcttatctatctatatatatctgcatcaataattcagccacgtacgctaccatctgcatatatgtcagtataggtggcgcatgtattttgcttttaataattggtgtcatctaagccatgcaagcatgtgtgctttatagctaatcatcttgcactacgctcgtctgtttatttgtatacgtaagtactgtacattgcatgtgcacatgcactctcatcacctgtaatgttttacttgaaatttattcaaaaataaataaaggcttgtctttgccacttgtgaaaaaaaaaaaaaaaaaagcggcc

SEQ ID NO: 164631 - DNA, 1656 bp, Zea mays
  Clone ID: MRT4577_81721C.1
actcccctccgagttctccgatttttcaactcccccaactgacggccacctcgaacggaaggggatcccccttaattatgagacaattattgctgaaattatttttttcggaatccaatgaggtagtagtatttgtgtgattgtgtccaggccctatacataagccgccatttgcagtccggacgggagccccgttcagtcccagcccaggccgacgacggcagagagcgagccgccgccgccgccgcaccctcgtgccaggttacacggtgtgaaaatgtcaggaagggctttgaaagatctcaatgtttctcagtcagcagacctggagaacggaaaagacaattctgtgaaatcctgcatcaccaagcctgtgttgaatggcaacaaatgtgccaacaaggaagaaaaggctccgtctgcttgccacgacgctgtgactaatggaaatgcggctgccattgcagatgtggagtacattgattctgaaaatctagtagatctcccagatgtcgatgcagctctaagtaccttagctaaaagattggattcaaaggactgggttatgacatgtgaagctctcaacaatgttcgtcagttggcaatgtatcacaaggaacgattgcaggagcttctggagcctctagtccctcttatcgtgaaatctgtgaagaacccaagaagtgctgtatgcaaaactgcactaatgacttgtgctgacatctttaaggcctatggtgacttaatggttcactcaatcgatccactgctagtacaactgtttctgaaggcttcacaagataagcgttttgtctgtgaagctgcagaggcagctcttatatcgatgacaagttggatctcccctttactactcttgccaagaatgctgccttacctcaagaacaagaatccacggatccgagcaaaagcatcagtgtgtttcagcaagagtgtaccacgccttgatgtggtgggaatcaaagaatatggtatggataagctcatccaaattgcggcaacccaacttagcgaccagcttcctgaatcaagggaggctgctcgcaacctggcactggaactgcaagcattctatgagaagtctcaggcctcaacttctgacgaacacgaggtcgaggcctctgcctcgccagatgctgaatcatgggaggctttctgccagtccaagctctccgcattaagtgcccaagccattcttcgtgtgacctctactactacaaaagagtgcgtcacctctgccccaaaagaagggttggctgtgggttgctagcacaagccacaggggagatattgcgatttttcaccctgttcgctgttttgctgtacatgcttttggtttgtcctgcggtgcacccagtcgtgaaaaggttaatcattggttcaggagttcaggtgtgaccacggtgttaatattggtgtgggatatatatccattatagttggttgtacaatcatttggttccactacttggtattggagtgtagattttttttccatggttcagtgttatacacaacagtccttattttttgtttttgatgctggtcctgttattttgaaggaaatgacatattttgtgtttcggaaaaaaaaaaaaaaaaaaaaaaaaaaaaaaaaaaaaaaaaaaaaaagagcag

SEQ ID NO: 164632 - DNA, 1679 bp, Zea mays
  Clone ID: MRT4577_81722C.1
gcacgagcctggccacacacgtcaatggagaaggcgctagcgagctagataggcttgtgaccggacagcccaatcccccttgtgtaaattgagcacaaatggggtgtaaatggccggagagcacagagagctagcatacatcgctagctcactttagcatatatattacataaatattggcatatataaactaaactgaattgaggacgatatggcccgcttggtctcttccggaatcattggtaaggggcacaacatctttgacgatggcggattcggtgaagtccatgctgacccaattaaagtcgagcgtccgcacaagcgtccgccgcagaagcagaatgcggagaatggaacgacgacgaaggttgatgagccaaaggaattgcctaagcacgtgtgcttcaagggagacaacgggctgtacctgagcgctcggatggtggaaggctacccctacctgcagtttgcgtcggacgacataggcgatccaagtgtgaggttcaccacgtacaactacatgatcgacggcaagcgggtgatccgcgtcaagtcggaccacttcggcaagttctggcggcgcagcccgaactggatctggtgcgacaccgacgacaccagcacggacaaccgtgacaccctgttcgaggtcgtcagggtcggcgacgacgcggacgccgtgtacgggctccggaacctcggcaacaaccacatctgccaccggctgacctacgagggcaaggagagctgcctgaacgccagcatacccagcgtcaggaaggaggcgcagctgaagatcgaggaggccgtcctgctgcggaagatctacggcgtggactaccacctcaaggacgccaagatcctgaacaacaaggtgaggaccctggtgactcgagaggcggtgaacgccggcagcatgcccagcaagaacacgctgaccctcaagtacgtggtcagcaacggcaagatctgggacgccagcaggtccttgaggctgggcatcaaaagcagcttccaagccggagtccccgaggtcgtgaccggatcgattacgctggagagcgagttcgacaccagctacatctggggcgagaacaccgtcaacacggaggagttctccaccgactacgaggtcatcgtgcctccgcacaccgtcatcacggtgcgcatcctggccacgcagggcacttgccaggtccccttctcctacacgcaggaggatattttgactaccggggagaagaaggtcaccaagtatgaagatggcatcttccgtggagtcaacagctttggtttcaagtccgaggtcaccgagaggaagatcaacggcgaatgagacgatgcaccactgtgccaaagtctgcttatctatctatatatatctgcatcaataattcagccacgtacgctaccatctgcatatatgtcagtataggtggcgcatgtattgcttttaataattggtgtcatctaagccatgcaagcatgtgtgctttatagctaatcatcttgcactacgctcgtctgtttatttgtatacgtaagtactgtacattgcatgcacatgcactctcatcacctgtaatgttttacttgaaatttattcaaaaataaataaaggcttggtctttgccacttgttaccaaaaaaaaaaaaaaaaaaaaaaaaaaaaagcggcc

SEQ ID NO: 164633 - DNA, 275 bp, Zea mays
  Clone ID: MRT4577_81723C.1
caacaacctccagacctatcttcgttgcaagcattgttacaaaccattaaggcacaacagcgtgtgcagcttgatgcatgctgcgagcaaccaattcacgtcgctgcataccgttatcattactctgcacagcaacaatgcttttaattcaaccaactgtctacactgaaccttactacttatgtgtagaaacaactataaccatatagtcatatagtatctgactaatctcaacaacaacaactgcatctattcaacctaacggtcgtacttaa

SEQ ID NO: 164634 - DNA, 342 bp, Zea mays
  Clone ID: MRT4577_81724C.1
tgtccgccccgcccgaagacgaggaggagaggggagtagtgagatcgtgcgcgcctccgagatctccactactaagtggaaacatgagggctcacctctcacgaaactgcttcagccggcatcttctccacgacaaagatgaggatccttatgtctggtctcgatgcaactggtaagaccactatcttctacacgctcaagctcggacatatcgtgaccaccatccctacaatcgggtgaaatgcggagactgccgcatacaagaacgttagatcctctgtctgccacgtagcacgtcaagacaagatcaagctattgtgactgcactatttccagaacacc

SEQ ID NO: 164635 - DNA, 383 bp, Zea mays
  Clone ID: MRT4577_81725C.1
cccacgcatccgattaatgcacgcacacgagtctttgacggggctttgttagcaatgggtgctgagggtgacataagcacaaggggtatacattctcatgggcccaacactgttgaacgtctgttaacaacgcgctggatcatgccagggagcagacatgtgatgaacggcaacaatgatttcgaatacacacataacaaccttagattgccatgaggacgcttgtgtgatatatgaagagaaccgtctatccagggacgggagagagcgtccgcatacaggaccagagcgcggagaatctcattgatgaaggacggggaacagcactgatcacttatagagtgatttctatctagaacatgattggagagacacccaccact

SEQ ID NO: 164636 - DNA, 308 bp, Zea mays
  Clone ID: MRT4577_81726C.1
gctttctcggcgacggcggacgggcgggcgcgcgtgcgcaatatccgtcccattgtctactccgtgccctttccttccttcaccgggatcggcataggcgtctctccctgacctacctgggatctctctcctggtgctgcagcgccgcctgccgctccggccaccgttgcggcagcgcaccggcttgccggctgaaccccagatctgacccgggccagacacgccgggaggcccagtccagatctacggcgcacccgccatggacgccggcgccagggccacggtcatccgagggcccgacccccacc

SEQ ID NO: 164637 - DNA, 500 bp, Zea mays
  Clone ID: MRT4577_81727C.1
gccggccggtccgggatacaatatttcagatgaagtttaagcagtgacgacaggggacaaacaacctccagttgcctggagaagaaagatcaggatgcacccaaaagatgggaaggcagatgcacggcggaccctgacttgggtatcggccccatcttcttgaagaggtcggcgaatgtgtactcttcaggcagcatgtcgaacaggtcgtccccgttgcatatgatcttctgaattctgtctgggttcaggaagcttttctgcttcactcggtctgcatggctgtacgccttcatcttgaaaacaaactccttgatctccctgaagcagaagctgcagtgccagccggcgtcggccaggatgaagttgctctggcgggaatggcggtacgatgtgtgctcgttgtacacgtgtgccgtcgccctccagctgttgtcgtccacaggaaattcgaaggagtacatatagttcttcaaaaaaaaaaaaaaaaaaggccccta

SEQ ID NO: 164638 - DNA, 311 bp, Zea mays
  Clone ID: MRT4577_81728C.1
atatatataaattaatactaatataaaagaaaagttctttttaagggagaccataaaaaacccaacgaaaacctcattttcaccctacatttttaatccctttttaacccagtaccatgccgccctggctaaacttaaaccttaatcctgggaaaacatgataaaaacattcattaaacccttcacaagacccatccctatagaaggaaaccccacacccctccaaattcacaaaaacattatccacttaaaaaactttatggcctccaaaaacttcgaggctcaacctaaacaaggccaccaacaaaaat

SEQ ID NO: 164639 - DNA, 2123 bp, Zea mays
  Clone ID: MRT4577_81729C.1
cattgggtacctcgaggccggccgggctagtagaatattgtcatcttcgttgccctgctagtcccgtagcttctctccctcctcgctcctcggctcctcgcttgtcgctcctcctcagccctcaccgcgttccctcggtcccaccttccccgcgaagtaaccaccactaggacatcggtccacacgctaagcatctagtgcatctaggtctacgcggcgcgggcacgcggccggtacagcttccccctgccccccatcctcctcgtcgccggatgatcgccgccggcgccgcctcgatggggcgcgcagcgactccagcccccggggcccagtcctcccggttgccgcgcgccgtctcgaggctgcggcttgtgcttcgctcctcggaagcagcagcgaggagcggcagcaagagatggatagggtgcttccggccgtcgccatcgccggccaccgccgcggcgggggcggccgtggtgaaggaggcgaagggaaagcggccggaggtggaggtggagccggcgcgcggcggaggggaggacgtgtggagcgccgatgctgagaccgaagtggctcagggtggggcgttccccgagcacctcgtcatcatggtcaatggcctcgtcgggagcgcggacgattggaagttcgcggcagagcagtttgtgaggcggatgccggacaaggtgatcgtgcaccgaagtcagtgcaactctgccactcagacatttgatggtgttgatttaatgggtgaaaggttagcaaatgaggttctatcagttgtagagcaaagacgaggtgtgaagaaaatctcgtttgtggcacattctcttggtggccttgttgccagatatgctataggaaggctctatgaacctaatagtagaaggaaatcttctgggggggagagcagagatgatgttgtgcacttgaatggtcacattgctggtttagaacctatgaatttcataacatttgcatcaccacatttgggttcaagtggaaacaaacagctaccttttttatgtggccttcctttccttgagcgaagagcttcagaagctgcgcatttgattgttgggagaactggaaagcatttattccttacagacaatgatgatggtagacgcccacttctccttcgaatggttgatgactctgatgatttacagttcagatcggcgttgcgttctttcaaacggcgcgtagcatatgctaatgctaattttgaccatatggttggatggagaacatcatcaatccgacgtcagcatgagttgccaaaacatcgtcttcttgttcgtgatgaaaagtatccacatattgtttatgttgaaaaggaagttacagacaacaatgaaacgaaggcccatgctgatcattatgatccagaagaggagatgataagaggccttacgcaagttccgtgggaacgtgttgatgtgagcttccagaaaagcacccaaagattagttgcgcataacacaattcaggtgaaaagctattggctaaactcggatggagcagacgtgatcaaccacatgatggacaatttcatcgtctagtccatggaggcatgaagcctacgttgtgtcgatggaggttcagtctacgctgtgggtttgacgaatgtccgtcgaaatttgttgatcagtgaccattcaattttgcctcggccaatttttccttctaggttgcagtttcccatcccaggaaatgtggttgattctttaggcccgtttgctgcaggcgcagagcagagccccgccctcgatgcttatcatcctgcaccatcagcaaggctagttcgttcaactgtatcataatctgtcccctcctttgtatacttgtattccgcaactaagctagtaaatagatgttgctggaaatagaattcttctatctggttcaattggagttgaagttcgaactgaaacttgccatattattgtgatccatcgacgtgcttattgggcacggtacggtacttcaatcaagctgtttttttggaaaaaaaaaaaaattttttttttgggaattgtatggataacaggatcgctcttcagagagctcctgtcgttcttaaagagaagctatattctatgttgaaagtaattcttgcg

SEQ ID NO: 164640 - DNA, 332 bp, Zea mays
  Clone ID: MRT4577_8172C.1
aaaacgggaggcaaggcccagaaaaaccgggggggctgaatcttaaaaaccacttcgcgggcaaggcgggcgggaacagctgggggggcaaacccttacacagaaacacaaccaagtccccaaggaaaacccgggcccccgggggctagtttcctaaataatcgggcggggctttttggcaacccctgggttcgggcaaaaaatttgaatagcccccttgcttgggcccgggccccgctaaggttttaaaaagaaggggggcaaaattttgggttcctttggcttccgggtttctgggggggtctccagtggggtgtttccgggggggggcc

SEQ ID NO: 164641 - DNA, 1892 bp, Zea mays
  Clone ID: MRT4577_81730C.1
gcggcgcgggcacgcggccggtacagcttccccctgccccccatcctcctcgtcgccggatgatcgccgccggcgccgcctcgatggggcgcgcagcgactccagcccccggggcccagtcctcccggttgccgcgcgccgtctcgaggctgcggcttgtgcttcgctcctcggaagcagcagcgaggagcggcagcaagagatggatagggtgcttccggccgtcgccatcgccggccaccgccgcggcgggggcggccgtggtgaaggaggcgaagggaaagcggccggaggtggaggtggagccggcgcgcggcggaggggaggacgtgtggagcgccgatgctgagaccgaagtggctcagggtggggcgttccccgagcacctcgtcatcatggtcaatggcctcgtcgggagcgcggacgattggaagttcgcggcagagcagtttgtgaggcggatgccggacaaggtgatcgtgcaccgaagtcagtgcaactctgccactcagacatttgatggtgttgatttaatgggtgaaaggttagcaaatgaggttctatcagttgtagagcaaagacgaggtgtgaagaaaatctcgtttgtggcacattctcttggtggccttgttgccagatatgctataggaaggctctatgaacctaatagtagaaggaaatcttctgggggggagagcagagatgatgttgtgcacttgaatggtcacattgctggtttagaacctatgaatttcataacatttgcatcaccacatttgggttcaagtggaaacaaacagctaccttttttatgtggccttcctttccttgagcgaagagcttcagaagctgcgcatttgattgttgggagaactggaaagcatttattccttacagacaatgatgatggtagacgcccacttctccttcgaatggttgatgactctgatgatttacagttcagatcggcgttgcgttctttcaaacggcgcgtagcatatgctaatgctaattttgaccgtatcctttaacagcttcatccttgtctgtgtactaattattaatgctgagttacacttcttacctctgacgtgtttccagttaactaagcaaacagatatggttggatggagaacatcatcaatccgacgtcagcatgagttgccaaaacatcgtcttcttgttcgtgatgaaaagtatccacatattgtttatgttgaaaaggaagttacagacaacaatgaaacgaaggcccatgctgatcattatgatccagaagaggagatgataagaggccttacgcaagttccgtgggaacgtgttgatgtgagcttccagaaaagcacccaaagattagttgcgcataacacaattcaggtgaaaagctattggctaaactcggatggagcagacgtgatcaaccacatgatggacaatttcatcgtctagtccatggaggcatgaagcctacgttgtgtcgatggaggttcagtctacgctgtgggtttgacgaatgtccgtcgaaatttgttgatcagtgaccattcaattttgcctcggccaatttttccttctaggttgcagtttcccatcccaggaaatgtggttgattctttaggcccgtttgctgcaggcgcagagcagagccccgccctcgatgcttatcatcctgcaccatcagcaaggctagttcgttcaactgtatcataatctgtcccctcctttgtatacttgtattccgcaactaagctagtaaatagatgttgctggaaatagaattcttctatctggttcaattggagttgaagttcgaactgaaacttgccatattcttgtgatccatcgacgtgcttattgggcacggtacggtacttcaatcaagctgttttttt

SEQ ID NO: 164642 - DNA, 246 bp, Zea mays
  unsure (1)..(246): unsure at all n locations
  Clone ID: MRT4577_81731C.1
acaggccaacgccttcatagctttgctgagattccataattgataaaggcactggngccaacaactatgctcattggtaccccgaaagttaaaaatcaacaaaaagagcaagggaacactagttacaaccaccaaatttctccatcaatcgacatccatctacctagaagaaatgcaaaaaccccaactttcacaccatccacccttctacatggatcatccctagcccgattcataggtcccaaa

SEQ ID NO: 164643 - DNA, 277 bp, Zea mays
  Clone ID: MRT4577_81732C.1
cttgtattggagcatccaaccatttctcgattccatgctgttttgcagttcagaaatgatgggaaggttttcctttttgatcttggaagcacacatggatcctttatcaataaaaatctgatcaagaagaagctgtacacagagattcatgttggagatgtaattcgatttgggcagtaaatcatcacggctgtacatttttcaaggaccatctgagctaatgcctccagaaaaagacttgcagaagcttcgggatgctagaattcagcaagacatg

SEQ ID NO: 164644 - DNA, 309 bp, Zea mays
  Clone ID: MRT4577_81733C.1
cccacgcgtccgggcagcggccggagcaggcgcggccggcgggcagcgcgtgcgtgtgggtggtggtagtggtcctgctcctcgccgtgctggcaggcggcgggtgcctggcgctctacgtgacgctgccgccgtccgaggtgccgcagtggctgccggccgtcgggctggcgctcgtcgcgctgccgtgggcgttctggatcgccacgtgcgcgtaccgctgctgccgctcggcggacgcggcggcggcggctccagcggtggccaacgtggtggagcggcggccgtcgtcgtcgaggcggcgggcgc

SEQ ID NO: 164645 - DNA, 811 bp, Zea mays
  unsure (1)..(811): unsure at all n locations
  Clone ID: MRT4577_81734C.1
acgcctgcaggtttcggtccggaattcccgggtcgacccacgcgtccgtgctgcggctggttaccgttctccgtcccgcgcgtggcaagtggagggtctcgattctggacagcttggagcgtccaccatgaggagaagtgaggtgctagcagacgagtctatcacatgcttgcagaaagctctaactcacctccgggaaatatgggaactaattgggattccagaggagcagaggctacaaagaaccgaggttgtaaagaagcatataaaggatcttctggatagaatgattgctgaagaggagagcctgagggaaaggctgctcaaaagcatatccatctgtcagaaggagctgagtaccctgtgcagtgagctacaagtgaagccatttcaggaagaaaaagatacaaccatcttgcaactagaaaaagatttgcgcactcaagtagaattgatgagaaaacagaaaaaggagagaaagcaggaactgaagctacttcaggaacaggagcaagaactccgtgacatcctctgtatgccgccctgtgatgtggacagcacctctgtccccaccttagaagagctgaagctattccgacagcgtgtggcaacgctgagggagacanaggaatcgaggcgtgaagaatttgtcaacattaagaaacanatcatattgtgtatggaagaattagaacactctncagatacaagctttgaaagagatgtagtgtgtgaagatgaaagtgctttttgttatcactggagaacatttgcacattacagaagttgctgaagcagctggaaatgaaaa

SEQ ID NO: 164646 - DNA, 129 bp, Zea mays
  Clone ID: MRT4577_81735C.1
acgatagcctcaggcagatggcccgaccactttcacttggattgtatctgggcgctaacatgaacactatggattgcagttgcagtcacttggagcaaccatgagttgatgggtatcatctgcatcaca

SEQ ID NO: 164647 - DNA, 406 bp, Zea mays
  unsure (1)..(406): unsure at all n locations
  Clone ID: MRT4577_81736C.1
cncttnnnnnnnaanaaaaancnggaagacgggccaaacggggncacgaccgcccgcacagaagaaagcacnnacacacaccancancancggnncaaaggaaaggccacgngagangaccagccaaacccccnaccnacccagacaanangccacacnacaaacaccggcgcacacaaacaaccangacaagcnggnnaaccgggcccncgccacaagagaanaccacaacaaaggaggancacacnaacaccanaggcagcnanancaaccccaacaaccganaanagcaacaanancaaacaanccnncancaccccagactagcgcgccaccaaannnngacagcaganganganangaccaggccagccccacaccaccangagacgagaacancaaagca

SEQ ID NO: 164648 - DNA, 106 bp, Zea mays
  Clone ID: MRT4577_81737C.1
cgtaagaccatgtatgggggctgacgcctgcccaggccggaaggtcaaggaagttggtgaactgatgacagggaagccggcgaccgaagccccggtgaacggcggc

SEQ ID NO: 164649 - DNA, 289 bp, Zea mays
  Clone ID: MRT4577_81738C.1
cgggcccgccgctggccgtccgcggcctgtccgggccgggtcccctccgcgccgccaccgccccgccgccggctgccagacccctcccccaccccccccccccgcccgcccgccgccggcgcgtcgcggccgcatcccccctcccccccccctcccccccctccgcctccgcggccccctccccgccgccttcgcgcggctccgcccccttccgttggccccacccccggcgccgcccctgccgccagcggcggctcctcgaccctcgccacccgcggccgcggccgct

SEQ ID NO: 164650 - DNA, 312 bp, Zea mays
  Clone ID: MRT4577_81739C.1
gggctgcatactgaagtggtgtgaatagagatggtggcacgcagggggtggtgtctgccctgggggggggccttaacctggccgtggagatccaggccgacgccgggtacggttacggtggcgggtacaccccgacgccgacgccggtcaccccgaccccgaagcccgagaagccccccaccaaggggccgaagccggacaagctcgccaaggagcacaagccgtccaaggagcacgggcccaagccggagaagcctgccaaggagcacaagtcgacgccggccacgttcacgccgagctccaaacccacgc

SEQ ID NO: 164651 - DNA, 655 bp, Zea mays
  Clone ID: MRT4577_8173C.1
gaaaagaagcccgcagtgtccttctccatgttctcgcccaatggcaagtttatcctcgttgccatgctcgataactcactgaagctatgcaattttgccaccggcaagttcttgaaggtatacagtggacatgtgaacagacaatactgcatacagtccgcgttttctgttacgaatggaaaatacattgtcagtggatcagaagacaactgcgtgtacatatgggacctccaagggagaaatatccttcagaaattagaaggccatacggacactgtcatctcggtgtcctgccatccaacagagaacaagattgcttctggtggccttcataatgataggactgtaagattatgggttcaagatagctaatcaacttgcaggtgtggactacgctcataaacagcacttgcctatcaatgagaaaatatgtctgcttcccatggatatggatcgctattccagatacgtttacaacttacacaaagacattaaccatgcgagctttgttttaatctgatgtgttatcctaagttgtgaatgctgaataaatcaacatctagtcatctctaataatgttgtgatatgttatgcccaacggctgtattccaatcaatattgatttattttgcaaagttcgcccctttaagatgcc

SEQ ID NO: 164652 - DNA, 129 bp, Zea mays
  unsure (1)..(129): unsure at all n locations
  Clone ID: MRT4577_81740C.1
acccatncagcagggcctaatccacttttgtgacaactcaacctcacacacctttctttgacaaattaaacaaagccactattagtgatcagggacttgcttacaaggcttacaagccacaggctgctg

SEQ ID NO: 164653 - DNA, 365 bp, Zea mays
  Clone ID: MRT4577_81741C.1
catgcgcacgcacgcgaactctggaaatgggtctcgagagcgatgaaattgactagttttagcctgacgatctgtatcaatggtaccgaagcatagattcaaataaggcccggggcaatgcatgcagaaatgcacttgtcagggaaaacagaccgtgtacaaccaaaccaatctgtgcattacttgaatggtaattctgattgatgcaataatcatagatgtccaatggaagacaactcgttacttttcagcagtcatcgacccccaaggttactgggatcatatattggaccgaaacaactccactatatcaaaaaaccgcgaaaattgtgacggtatcaaaatgattatcaagatcagtgccc

SEQ ID NO: 164654 - DNA, 313 bp, Zea mays
  Clone ID: MRT4577_81742C.1
gattaacaacatcgtcccacccacactccttatattttcacaatacatcattaatgcttcattccctttcacctttaatttttaaagaaaaaataatctacgtgttccaccctccattatcaccagatgttcaaaccattaaactcccaaaaaaaaatgaactctgtttgagtcattgaacaaccccttgcattgtactgtatagagttcaacttacttccaattccaaatcaccaaagcctccattttatatttccagcaataccagtcaatgttaaaaatatcttattagaagcgccactattcccaaacc

SEQ ID NO: 164655 - DNA, 730 bp, Zea mays
  Clone ID: MRT4577_81743C.1
gtctacgaaagagctcaaacccttcatatattattattatattacctaattcatcatcataagactaaaagtatggaccacacaacaatacatgaagtcatgaattcttgcagtttgaaacccaactgtaatcaggcagtgcatcgatacaattcacaggaacgggcttcatctacacagatttatgaatgcctcgttggattcggtagggagaaaaatggcttgaacgtcagcaccaggccaatcaccgacaccatgtttatcgctaggaacaagatctgatcccctggtaagaacagtccgctgatgtgcttctgagcccacgagaacagaattcctgctgctgctggagctacagatttgaacacggacatcagggtaacagagatgccattagcaacgcctctctgctcttgcgtcactgcagtgttctgtaggatgttgcaggcaatagtgatggtagccgcaaacatgttcttcaaaacagatgcaatgttgatgagtattttaagctccaggccatgtaaattggccatgaaggggtacgtagtgaggagaatgatcgacaggatcgcggcaggccgaaatgtcttgattggtccaaaatacttcgcaagaaaaggataaatagcgagttggtatacaagtacaccaaaacctgagatggctagcacagtaccaacatcctgggatgtcaaactaagccaccgattctcggccggcctcgagg

SEQ ID NO: 164656 - DNA, 178 bp, Zea mays
  unsure (1)..(178): unsure at all n locations
  Clone ID: MRT4577_81744C.1
actctcncaaccttcaatttccatagagttgcatactgttgattgctccattgccattttcttttgcatcgcgacaaccccgactttgaccaccatgcttttcaagcagctcgcccttgcggcggcggccacggcctttgcgatcgttcccgagatatccgagccagacgagaacatc

SEQ ID NO: 164657 - DNA, 652 bp, Zea mays
  Clone ID: MRT4577_81746C.1
ggccgcttttttttttttttttttcattttttttttttttttttttttttttttttttttttttttttttttttttttttttttttttttggaaaaaagacctttataaaacatgggggcttacaataaaggaaaaaaaagggaacaggggctgggaaaaaaaaaaaccccccccaggaaacttatcagcagcccgcgctgccccaaaagttttaataaacaggagttagtcccaactgggggtcagggggccccccccctttcgcctttttccgttcaccccggatggggaagaacccttttttccttgctctgaaacggggggggttttaaggccccttttcataggggaaaacactaaccttttttttggccggcccatacttttaaaacttggcgaggccatttataaaaaaaaaaagggggggatccttgcccattccaacgttttttccaggaaaaaccctggggcccccctggcggatgaaaatggccccggccttgggaagctgggccccgtatattttgaccccgaggggctgtcccttggagtcccggccgttcttggggctcccggccccctttttgggccccatttggatggggagcccccgccccggaaccggaaccggcggaaccccccctgggcccc

SEQ ID NO: 164658 - DNA, 317 bp, Zea mays
  unsure (1)..(317): unsure at all n locations
  Clone ID: MRT4577_81747C.1
aatcttttangtgtttgaccacggaaaacatacgacggggcggggttacatacaataattacgtccgtaccgttcggagcatatgatatcaattccatgctcattatttcatataacaacggtttctttatatatatccctcatgactactattagattatattcttatcgaaagccctgcaatcctactctgttgcatgctttatttccttacgagctttccgttctgaaccttatgcccccggatctctgcctctctttgtcatttgtaatatcgtggctaccacttaattccaagtggttcttaccgtctaatc

SEQ ID NO: 164659 - DNA, 791 bp, Zea mays
  Clone ID: MRT4577_81748C.1
ccgcgacgactgccgggccctgcgtacggtcccccggcccaatatgtctgtagattatgagaaaggccgaaggccaacattttgaccctgtcatgttcattcatgtgtctcagacatttagggtggataagatatttcgtgacatgctgagggagatcaggaaggacaggcaatctgacagcaacagtgttaaatgcctacacgatgagctgaaggaaaagttgagaggaaaatgtttcttgttggtactggatgatctctgggtcagtcgtgagaatcaggaggagcgtgctattctacttactgtgctcgatgctgggcagagtggaagtcgggttctggtgacagctcagaagaaagatgtagctgcagcgttaggcgctgaggagcagatcccgattccggatatggaagaggagcagtacttttcgatgttcatgcactacgccctagaagggattaacagacttgtcctgaagggcatcgagcaaactagctcatcagttatgtaatgaagtgatgcaagtcacggaggctgacattgaagaatttgaagctaaatatagagggtcagattctgagaaaacggacttgaaggaactctacacaaaatataagggcaacatgaacaggaataattatctcttatatcatattgtaaaatctgaaacagttctcatgtagatggttagcttacattttacgctacaattacctcagatcacttcttgttgtatcttacaccaatttaacgaaattcttaaatgtgttttataacaacctcatgcgat

SEQ ID NO: 164660 - DNA, 162 bp, Zea mays
  Clone ID: MRT4577_81749C.1
tctgtaggagcaagctagtctcgccctgatctgatattaacaggacataaggagaatgcaaaatttgcgcttgccatgtttcccacaacactctatctcctatcatgaggaaaggacccttttgttccttatgagtgaacttatttacatttatttcgtttt

SEQ ID NO: 164661 - DNA, 628 bp, Zea mays
  unsure (1)..(628): unsure at all n locations
  Clone ID: MRT4577_8174C.1
ccgggatcgcttcacctcggcgtcttacaaacgccggcgtaaactctcgcccgagccggggtgggtctgttcccataccgtgcaccgggcgaccttacgccagtctcgggctcttccgaaggcgtcgcgcgcgggtgtttgagaggagaggaggaagatgagggagtgcatctccgtccacatcgggcaggccggcatccaagtcgggggcggggggggggaactttactgcctcnagcacggcatccagcctgatggccaagtgcctggagataagaccgcgggatatcacgatgatgccttcagcaccttcttcanccagacgggggctgggaagcacgtgtccccgtgcaatcttcgttgatcggggacccactgtgatcgatgaggtgcgcactgggacggaccggcagctcttccaccctgagcagctcatcaggggcaaggaggatgccgctaacaatttcgcccgggggcactacacaattggcaaggagattgtggatctgggccttgaccgtgtccgcaagcttgctgacaactgcgccgggcctccaggcttcctgggcttcaatgcccttggggggggcaccggctctgggcttgggtctctcctcctttagcgcct

SEQ ID NO: 164662 - DNA, 858 bp, Zea mays
  Clone ID: MRT4577_81750C.1
ctcgagccggcgggcgggatcaagacaagggagctgagcttcgcaataccctcaagaatttttgttgcttctgcactgctttttatttttccccctcactcacacactgctgctccccgccggctcccaagattgagcgccggtctatgattcaatcggcctgaattgttacccgccacctttcctcctatctaccgcagcacacacacagtcatggcttcgtccaaggacatacagcatcctgcgcggccccacggtcagcagcggctatcgatgtcgtcgaccctaggctccagcctgccgctccgcaacagccaccctcgccaccactcacattccatatccgcaggctcgatgggcggccctacgcaccgcgttacacggaggaagagcggctcagccaatgctgccgcggttgccgcagcggtcagagaggtcggcgaggccgttctgtcgtcgccgcccatgccgacggcctcgtcacggcggcacacaacctcgaggacgagtggcactgaattcgccggcctcgcaacgcccccgagtagtctgccaggaggacacaggttatcgctcatggctggtcgcaagggtgaccgcgacgaaagcgcgatcgacgatgaccagaacgacgacatggacgaggatgtcgacagcttcaacaaggcacggatgaggcgcgccagcgagggccagtcctcggtcaagagcgaaggaaagaagaacgacttgagatgcgataagtgcgggaagggatacaagcacagcagctgtctgaccagcatttatgggagcatactccagaatggtcgtacacgtcggaactgttgatttcgaagcaccagcaggtccagctgc

SEQ ID NO: 164663 - DNA, 246 bp, Zea mays
  Clone ID: MRT4577_81751C.1
tctatctcttttgttttttttttttttgctgtctttgtctgttttgtttgtttttgtgttttgtttttctttgttgagctgtgtccttcggaaccatgtaactaaatgcttgctttccttgggctgagactaatcaagagccttgcgtcctgtaatcagccccatcaagatgacaccaaagctgacgacatgcatcattcagccgagtcactcgcccagctgactgcatacaactggtgcaaaaga

SEQ ID NO: 164664 - DNA, 750 bp, Zea mays
  unsure (1)..(750): unsure at all n locations
  Clone ID: MRT4577_81752C.1
cctcgaagccggccgggatagagtatcagaggcacgtgacacgatcgcgagcgccgcacgtaagcacgttagtcggaagctcaagttaggagaagcaccagaggctgatcgatggcgggccatgctctcctctccgggcggaagctgctgggccgccccgcgtagtcggacgtctctaggacgtcggcgaggaaggcgcccttcgtcatcaagggcagctccagccctccagccaagcaaggtgccgacagggagctgtggctggcgtccaagcaggccctctcctacatctatgggacgctgcccggcgactatggctacgacccgctgagcctctcggagccggagggcaccggggagcttcatcgagaacaagtggctggactacagcgaggcgatctacggccggtacgccatgctgcggcggggtggtcgccatngtcccggagatcttcggcaagatgggcatcatcccggcggagaccgnggtggcgtggcacaagatgagcgacatcccgcccgagtacacctacaactacagggtcgactcctacacgatcttcgtcgtcaacatggcgcctcatgggcttcgtcgagcaccgccgcctccaggactggtacaacccgggctccattgggcaaggagtacttcctcggcctcgagaagtgtctcgccggctccggcgacccgccttaccacggcgaggccctcttcaacccgctcggcttcgggnagaacgagaaggagat

SEQ ID NO: 164665 - DNA, 583 bp, Zea mays
  Clone ID: MRT4577_81753C.1
aatgccgaaattcttgattgccaaaaaagcaaaatcatgtaatgagttatgttcgcttttagccaagaactataaatctaagtagtagcctgaaaacaaaaatcaaagcatagagaagctgccaaaaaaaggggtaaacacagcactttctcagtaaaaaacagaaaaaagaaaggcttcagagaagatcagcaacattgcttggcaactcctcaacgaccacattgtaaaacctctgaatatcagccatcattctctcatcctccgatgtcatgaaattgattgctactccctttctcccaaaccttccacttcttccaatacgatgaaggtaattctccggttgggttgggaggtcaaagtttatgaccagagagacttgctgaacatcgataccacgagcaaggaggtcagtggttatgaggacacgggaagacccagagcggaattcgcgcatgatgatgtctctttgtgttctgggccatgtctccgtgtgtagctgaaacagtgtgggcacggcttctcattttgtcggttagccaatcaaccttacgccttgtgttcacaaagatgacgctttgag

SEQ ID NO: 164666 - DNA, 1362 bp, Zea mays
  Clone ID: MRT4577_81754C.1
cacaccgacacgcggagaaaattccgaagcggaagaagttccgacagcgagagagagagaggggacgggaggggaggggaggggaggggagagaacgcgagaaactatgatgcgctgcgccgccgccgcgcttgcggtcgccctcatcgctgccgttgccgccgcaaccgctgcggggtcgccggccgcgggcacgtgcgcgcggaggggcgcgccgccgttcctcgacgccgtcggatcccgctgccccttcgtccggatcgacccgtccccgcctctcgaggtgagaggagagactgttgatactgagttgaaccttcgaaggaggggtgcttcatactccattctcttttatgctgcatggtgtccattttctagcaaactgcgaccaatatttggaactctcagcactatgtaccctcagatacatcactttactgttgaagaatcttctgctacaccaagcctgttttcaagatatggagtccgtggtttcccagccattcttcttgtaaatgagactacgatggttcgatatcggggttcaaaagatcttaactctctggtcgatttctataaagaaactacaggtctcgatccaattgcatatattgatgttgttgaacaagagagcacaggaagcttgagctcagttatgccatgggatcgttctattcgtgaaatggccaaagatgagatgtatttgttagttgcagttctttttattatcgtgaaggttgtagcacacttcatacctgttgtcatgtctcatctgagagctttcttagttgttcgtgtccaaaacttgaacctagggatccgtaggggatcaaaccagctcctggaacgagccttgaatgttcttgatgtaaggaggctttggagcaagctgaggctgagcaataaggcaacagacttgaggaagggagcaagtaatgctcgagcttgggcttcctcatttccttctgtttcactgggtgaaccgtcatcttcaagacaagcttagccatcttagagatgtttgttagggtagctgctcacatgtttctgtgcaaaaccatttaatctttgctccccactgtttctgtgcagtcaggaaggggggaaaaccttgcatgcatgtaaattttgaggaaatcatgtgctgttgtatattaggaatacctttgcatttgctggtgcgacgcctaatcttcctgtctattaaccagagtgtttatttggcaatgtatcatgaacttgtaggggtttttttttagaatttctctcttgtttgtggtgctgttgtactttacactgtactcttcattaaagaacttggtttcacttcgttattatactccaatttgaagagcgggaagc

SEQ ID NO: 164667 - DNA, 817 bp, Zea mays
  Clone ID: MRT4577_81755C.1
tggtacctcgaggccggccgggccgggaacctgctcgagacactgtgagtctgtgaccagtcaccacctctgcccagcgctccactcaccagtcaccacaatggcgtctgaatccgaggcctgcagctgggagccgcacccgctccaccccaacggcactgagccgctgcaccggatcgccgtggactactgcccggaggcgtgcctccacgagcgccacgcgggggagatccacgtcacctacgacgaccgcggcggcgcgcgctggcgctcctgctgccggttcctgcccggcagcgccgtggccaccacgatccgcgcgccggcgggggacacgtcgggactcaactacaacatctacttgtcctccctggagggttccgccgaccaggacgagatcgacttcgagttcctcggccacgacaagcgcgctgtccagaccaactactacgtcggcggcaacggcgggcgggagcagatccacgcgctccccttcgactcctctgacggcttccaccactacgccatcgcctgggacgcggccgccatcgagtggcgcgtcgacggcgagctcgtccggcgcgacgagaggcgcgagggggagccgtggccggagaagcccatgtacctgtacgcctccgtctgggacgccagccacatcgccgacggggcgtggaccggcacgtaccacggccgcgacgcgccttacgtctgcagctacaaggacgtcagggtgcccactgctgagcattcagtggaagacgccgctcatgcgccccgctggcgatcctgtcgccgctgacgctgccgcggcggc

SEQ ID NO: 164668 - DNA, 305 bp, Zea mays
  Clone ID: MRT4577_81756C.1
ggcggatccgcctccgtaccatggagtcccgacggcgccacctcatggtgttcacgggggcgttcactgataggtggtggtcctcatgtactagatctcacgcctgcagggcaggctccctaacatgggtcgtcgcatcctcatggtactcacggtcgcgctcgtcgctcgcggcgcggaggccttgatctgcatctacgatcgggaacccttccgagaggtatacagagcctcctactctctggcccatagtattctgccagtcatctgctcccgaacgaagggacactcggatacgagccccc

SEQ ID NO: 164669 - DNA, 1143 bp, Zea mays
  unsure (1)..(1143): unsure at all n locations
  Clone ID: MRT4577_81757C.1
cgcacgcggagaaaattccgaagcggaagaagttgaaccgacaggtgagagagaaagagataggagagacgaggccacgactccacgggggaggcagggagagaaggtgagagaagatgcgttgcgccgccgccgcgcttgcggtcgccctcatcgctgtcgttgccggcgcaaccgcgccggggtcgccggccgcgggcacgtgcgcgcggaggggtgcgctaccgttcctcgacgccgtcggatcccgctgccccttcgtccggatcgagccgtccccgttgcctcgaggccggccgggttatattgcgaatttggaaagtggtttcttatataccttgtcttctgctgaaggtgagaggagagactgttgatactgagttgaaccttcgaaggaggggtgcttcatactccattctcttttatgctgcatggtgtccattttctagcaaactgcgaccaatatttggaactctcagcactatgtaccctcagatacatcactttactgttgaagaatcttctgctacaccaagcctgttttcaagatatggagtccgtggtttcccagccattcttcttgtaaatgagactacgatggttcgatatcggggttcaaaagatcttaactctctggtcgatttctataaagaaactacaggtctcgatccaattgcatatattgatgttgttgaacaagagagcacgggaagcttgagctcagttatgccatgggatcgttctattcgtgaaatggccaaagatgagatgtatttgttagttgcagttctttttattatcgtgaaggttgtagcacacttcatacctgttgtcatgtctcatctgagagctttcttagttgttcgtgtccaaaacttgaacctagggatccgtaggggatcaaaccagctcctggaacgagccttgaatgttcttgatgtaaggaggctttggagcaagctgaggctgagcaataaggcaacagacttgaggaagggagcaagtaatgcccgagcttgggcttcctcatttccttctgtttcactgggtgaaccttcatcttcaagacaagcttaccatctttagagatggtttgntagggtagctgcntcacatgtttccgtgcaaaaccatttatctttg

SEQ ID NO: 164670 - DNA, 281 bp, Zea mays
  Clone ID: MRT4577_81758C.1
ccgacccctaccacgagctttatccttttgtcatatcgacccctacaaatagcctccaggtcatctaccagatgtcttgttaatctttctttatggccaatcgatgtctctatcgcaaacctcaacacccaagcacgccttacacagcttcatgagtaccttcttactcacaactacatcactggctaccaagcaatcaaggatgacttggatgactacacatacgtttcatctgctacctcatccaagcatatcaacgtatcaaggtggcagaatcacat

SEQ ID NO: 164671 - DNA, 372 bp, Zea mays
  unsure (1)..(372): unsure at all n locations
  Clone ID: MRT4577_81759C.1
gaccgacgagggcaaggngnacgaagcaggaggccagggnncnnnccacgacgaaacggacagcacgggcgcgagggnncnnnccanagagaanaananacagannanncgacgaaagagacgnangnnanananananangagnngnangcagncaccgaacnggcggnacaggggggggggnnccannnccngnagggaggcgagaagagaaancccggggngngnananagnncaacaaccaagccngccgannagaancccgnnncaaaaaaaaaacaaaaaaaaaaaaaaaaaaaaaagaaaaagagaaaaaaaaaaagagaaaaaagaaaaaaaaaaagaaaaaaagaagaaaaaaaaaaaacaaa

SEQ ID NO: 164672 - DNA, 2630 bp, Zea mays
  unsure (1)..(2630): unsure at all n locations
  Clone ID: MRT4577_8175C.1
cccgggccccacttgttctgtaccggggctaattctttgccagcacacaaggaccattaatcgcgattagtcggactacttgctaacactgggtgttaccgcgtaacaatattatcactggttcagtttgtttgattcctgatggctttgggacctcttgatgagaaacataggtggaatatgataatatggctaggttcggtgcattggcctcggccgggagtgttgtacacgcggagagagagagaaagaccccctctcgcttcgcccctcctcatcctctctcctctctcccccgccccgttcgtctccggcgagctagggtttgcccccccgcctcgccaccccacggctcccgccatccttggatctccagccatgtacggcggagacgaggtttcggcaatcgtcatagatgtgggctcttacagctgcaaggcgggctacgcaggcgacgacacccccaaggccgtcttcccatcggttgttggttcaattgaacaaactgaagacacagatgaccccaagccagagaaggaagctgactctgcatcagattctaagaacggtgccaagcccatggatgtggacaaagccaagacaaaacgcagactttatgtaggccaagagttagagttcaggagggatcacatggaggtgatttcatctatgaaagatggaacggtaactgactgggatattgttgataatatatggaatcatgctttcagacggaggttgttgatcaatcctgaagagcatcctatgctcattgctgaaccatctacaaacactgcacagcaaagagagaaagcagcggaacttatgtttgagaactacaaagtgccagcgctgtttctagccaaaaatgcagtgctcacatcttttgcgtctggacgagctacatctttggtggttgacagtggtggtgggtctactgtggtttctgctgtacacgatggttttgttttacagaagtctgtgtcgacttctccagttggtggtgaatttttaactgactgtatgatgaaaagcttggagagcaagggcatcgtcattaggcccagatattcatttaagaagaaggaaatcagtcctggagaatataagattgtagatcttgatcttccaaacacaactgagagttacaggttgtactgcatgagagctattgctagtgacgtcaaggagtctgtttgcagagttccagacactgcttttgatgaagtggcatatgcaaatgttcctacaacttcatatgagcttcctgatggacaaactattgaagttggtgctgatagattcaaggttcctgatattctatttaatccatctctatcccagactattcctgggattgatggatttgcagattcaataccagtccgtggccttcaacgaatggtcattgatagcgtaaataagtgcgacgttgacatacgaaaagagctattcagtaacatcttgctctctggtgggtcatcatcaattctgcagttaaaggagcgcctggagaaagaagtattggaggagtctcctcaagctgctcgtgtcaaggttatggcaagcggaaactcagtagagagacgtttcagtgtttggattggagggagcattctagcatctcttgggtcgttccagcagatgtggttctccaaagcagagtatgaagagcatggggtttcctatattcagagaaagtgcccttgaagcaggggaaggaatatgtacaaccaatattatgctttacgagccttattgttgccaaagggttccttgtgtacaacagcctggtgccttgccatgttggccaatgaatactcgagactcttttcaagtgacgtttgttgtcttcatggctagttaattttaggtgatgtaaggtgaacgtaagaactaggtcaactaaaatatttatcattgacagtatgctgaatctgtctccccttctgtagaatgagacgggaccccatcgtgttctgtaccggggctaattctttgccagcacacaaagagccaagacgattgttgtaactcgggttatttaaatcccagctgcagagcaaatacacaactttaaacgtgtaaaaaaaaaaaaaaaaaaagcccaaaaagaaaaaaaaaagcatcaacgttagtgttcaagaactcaaagagtaactgaagatggaagactaggataacatttatggagatctattttatgaactggggggggcctctgttaatatttttccgtgtttgaantaagaccgcgggacatcacgatgatgccttcagcaccttcttcagccagactggtgctgggaagcacgttccccgtgcaatcttcgttgatctagaacccactgtgatcgatgaggtgcgcactggcacgtaccgccagctcttccaccctgagcagctcatcagtggcaaggaggatgccgctaacaatctcgcccgtggccactacacaattggcaaggagattgttgatctgtgccttgaccgtatccgcaagcttgctggcaactgcaccggcctccagggcttcctggtcttcaatgccgttggtggtggcaccggctctggccttggttctctcctcccttgagcgctgtctgtggagtacggcaagaaatccaagc

SEQ ID NO: 164673 - DNA, 342 bp, Zea mays
  Clone ID: MRT4577_81760C.1
cgtcgatcacaatgccgtctccttcccaaacgcggttgccgtctcctttggttcaacggcttgccacgcagcagcagcaaaattccgagccaagccttcaactcgcatattaatcctactagcccgccgcttcttttcttcgatgtccgcagtctagaggtttgcttcgcccggctcgagcgggtagggtttcaggagtgctcggtgagacggcatgataacgcggggagcgaagcgcgcggccatgtcagagcccgccgcacgcgatttaccaagtacgagagtaatggacggacactcttttgatgtgcacagggcggagtcttccaatcagcatgtgat

SEQ ID NO: 164674 - DNA, 2310 bp, Zea mays
  Clone ID: MRT4577_81761C.1
cctgccgggacaagtcccaacaccttctgctcctgcctcgccggccgccgccgcgtcccggctagcccgaaggaactccgccgcaaatacagctatgagctcagccgcttccgcggcgccacctagccgccgcactaggagccgcccgccatcagcttcttctcgcaagtctgacgactcctcggccgccgccgccaacgggaatgggaacaggaaggtcgcaaccaagcccgcctccccccaccagctcacgggggagaggacagtgaagaagttacggctctccaaggcactgacgataccggaggggacgacggtgttggatgcgtgccggcggatggcggcgaggcgggtcgacgccgtgctgctcaccgacaaccaagggctcctctccggcatagtcaccgacaaggatatagctacaagggtggttgctgaggggcttagggtggagcaaaccatcatgtccaagatcatgacacgaaatcctgtttatgtgatgtctgacacgctcgccattgaggctttgcagaagatggttcaagggaaatttagacaccttcccgttgtagaaaatggtgaggttattgctatgctggacattgcaaaatgcctttatgaagcaatagcaagactggaaaaggctgcagaacaaggaagtgcaatagcagctgctgttgaaggggtcgaacgtcaattaggagggaacttttcagctccttctgctctcattgaaactctaagggagaggatgttcaaaccttctctgtcaaccatcgtcacagagaatacaaaagtagcaattgtttcgcctacagatcctgtgtgtgtagcagcacaaaaaatgcgagagttttgtgttaattcagtggttgtctctacaggaaacacattgcaggggatctttacctcaaaagatatacttatgcgtgttgtgtcacaaaatatttcccctgagttgactctagtagaaaaggtgatgactgttaacccagattgtgccacattagaaacaacaattcttgatacattacatataatgcatgatggcaaattcttgcatattcctgttattgacaaagatggacagattgctgcttgcctggatgtcctgcaacttacccatgcaactattcaattggttgaaggagggaatggaactgtgaataatgtcgcaaactcggtaatgcagaggttctgggactctgctcttgcattggagcctccagatgaggaatttgatagccatagcgaggtatccttactcctgcagtcagaggctggagatggaaagagtagtgtttatccccctgtggttggcaattcgttttcctttaagctccaagaccgaaaaggccgtgtgcacagatttacttgtggctcagagagcttggacgagcttgtgtcttctgtaagacaaagattaagtattgctgatgaaaaagaagctgtgcaactcttgtatgaagatgatgaaggtgaccgagtgctgctgacaacagatgccgatcttgctggtgcactgctgcatgccaaatcatctgggttgaaggtgctgaagttgcacatcgaagaccctagtttgaacactgaagtgacaaaaccatcccaagagctggcaccaccttgcctcaggagtgggatatcgatgttgctggtgcactgctgcatgccaaatcttctgggttgaaggtgctgaagttgcacatcgaagaccctagtttgaacactgaagtgacaaaaccatcccaagagctggcaccacctcccctcaagagtgggatatcgatggttcatgttgggttaacggccggtgtagtcgctctcagtggcgcagcagtgatggtttacttgaaacgatctcaactgtgatttcgaaaatcggaggatgttttttaggagcttgattatctgaaacaagcattgccatcagctaatgcattctgaagctttgccttcactcggtgccatttacaagctaagaactgaaggaatgtacagaaatgaagaccacatctgtgatcttttgatgagctgaaagtccgtacaggccacgggacaagatcactgtttttggaggtgaatttctgggcagaacggcgtgcctatctttgttcattcagcacaagccgtggcaatttcacgactatgatgtaatgtgtaaacattacatatttgttcctattcatactgatgtatttgtttgtagataaaaactcatttcacatgacactattgtttgagaattgagaggggtctggtaggatgtcacctgattttgaggatagaatcgaatacataacatatatg

SEQ ID NO: 164675 - DNA, 1209 bp, Zea mays
  Clone ID: MRT4577_81762C.1
gaaggggtcgaacgtcaattaggagggaacttttcagctccttctgctctcattgaaactctaagggagaggatgttcaaaccttctctgtcaaccatcgtcacagagaatacaaagtatagcattgattttgttggactattttctttcaattgttagcaatagaaacaacatttagctaactatgctatcttgcagagtagcaattgtttcgcctacagatcctgtgtgtgtagcagcacaaaaaatgcgagagttttgtgttaattcagtggttgtctctacaggaaacacattgcaggggatctttacctcaaaagatatacttatgcgtgttgtgtcacaaaatatttcccctgagttgactctagtagaaaaggtgatgactgttaacccagattgtgccacattagaaacaacaattcttgatacattacatataatgcatgatggcaaattcttgcatattcctgttattgacaaagatggacagattgctgcttgccctgatgtcctgcaacttacccatgcaactattcaattggttgaaagagggaatggaactgtgaataatgtcgcaaactcggtaatgcagaagttctgggactctgctcttgcattggagcctccagatgaggaatttgatagccatagcgaggtatccttactcctgcagtcagaggctggagatggaaagagtagtgtttatccccctgtggttggcaattcgttttcctttaagctccaagaccgaaaaggccgtgtgcacagatttacttgtggctcagagagcttggacgagcttgtgtcttctgtaagacaaagattaagtattgctgatgaaaaagaagctgtgcaactcttgtatgaagatgatgaaggtgaccgagtgctgctgacaacagatgccgatcttgctggtgcactgctgcatgccaaatcatctgggttgaaggtgctgaagttgcacatcgaagaccctagtttgaacactgaagtgacaaaaccatcccaagagctggcaccacctcccctcaagagtgggatatcgatggttcatgttgggttaacggccggtgtagtcgctctcagtggcgcagcagtgatggtttacttgaaacgatctcaactgtgatttcgaaaatcggaggatgttttttaggagcttgattatctgaaacaagcattgccatcagctaatgcattctg

SEQ ID NO: 164676 - DNA, 361 bp, Zea mays
  Clone ID: MRT4577_81763C.1
gttgtctgaggcgagttccctccctcctctgcgaaaagttctcaccttgtagttagcatgtggctatttatccacgtgtccgcctgcgctcacccaccccacccccactcgttgtgagtacacagtacactcgcaaaccgctacaccaacaccaggccaccgggagcgcggcaggccccggaggggattggcagacgcgcgcagagaggcacgtaccactaccgcagcagcgcgggcgcaggcagggacccgggccggcggcatgggcgtccttcggagcacgcagagccttcgtggaccccgccggcatgtccggctacacgaaacacatggcaacgttagaagcccaggcagcggagcg

SEQ ID NO: 164677 - DNA, 1392 bp, Zea mays
  Clone ID: MRT4577_81764C.1
aattcggcacgaggcacagtggctcaccacgcgggcgcccccgcaacgcacaagcctgcttacctacccaacccctcgcgcgacgaaacacagagcgatctgttgcctgaggcgagttccctccctcctctccgaaaagttctcaccttgtagttagcatgtggctatttatccacgtctccgcctgcgctcacccaccccacccccactcgttgtgagtacacagtacactcgcgaaccgctccaccaacaccaggccaccgggagcgcggcaggccccggacgggattggcagacgcgcgcagaggcacgtaccactaccgcagcagcgcgggcgcaggcagggacccgggccggcggcatgggcgtccttcggagcacgcagagccttcaggcggaggtggacgagctgcgcgccgcgctcctggcaggcggtggacacgaggccgctggcgggtgccaccggtcggcgggcctcgcggaccccgcgcgcatgtccggctacacgaaacacatggcaacgttagaagcccaggcagcggagcgggtgatcgaagttcgcgtcaggacagggtccgtcaggaaatgtgtcttctccgcttgcttgctggcatgtgtgtggaggcagaacaaccctcatggccggcggtgccctaccatcatcgacgagagctgctggagcgacgagagcttttgccgcgacaacaagctgtggtttgcgctcggcaagacggcagcggaaaaggctgcctggagggcggcgcggggacgagacctgaagctggtcaccatctgccccgcgctcgtcaccggcccggggttccgccgccgcaactccaccgcgtccatcgcgtatctcaaaggggctcgtgcaatgctcgccgacggcctgctcgccacggcgaacgtggagacggtggccgaggcgcacgtcctcgcgtacgaggcgatgggcgacaacaccgctggcggcaggtacatctgctacgaccacgtggtcaagcggccggaggagttcgccgagctggagcggcagctggggctgccgggaggggccgcgcccgcgcccgcgcacggctctgacgaccggccggccaggttcgagctttgcaagcggaagctgtccaggctcatgtcctccaggaggaggtgcgcgtacgacacctactactccgtcgcgtttgaggtttgactagctactagctagctcaggcggcgaaggtgcatttgccatgaaggggggaaccgctggcactgacgaccagaaatcggcgcagcaagggttgatcaccagtatgcaatctgtggtccattggcaagagtggacagtggacaccggaagcgaagcggagcaatagcaaagctctgcttgatgtccttggggacggggga

SEQ ID NO: 164678 - DNA, 191 bp, Zea mays
  unsure (1)..(191): unsure at all n locations
  Clone ID: MRT4577_81765C.1
cactctcatgcacacatacataatctcttaattcagctcgatatttttttttaacctatctattgcacctagaatcacatttaagacatccaaaatctttctatatcaggatatactttatactntatnctantctctaacacatcaacttacctanttcatatatntacttcctaaaacnctttatttcc

SEQ ID NO: 164679 - DNA, 835 bp, Zea mays
  unsure (1)..(835): unsure at all n locations
  Clone ID: MRT4577_81766C.1
gggtacctcgaggccggccggtcgtcagagccgtgcgcgggcgcgggcgcggcccctcccggcagccccagctgccgctccagctcggcgaactcctcgggccgcttgaccacgtggtcgtagcagatgtacctgccgccggcggtgttgtcgcccatcgcctcgtacgcgtggacgtgcgcctcggccaccgtctccacgtttgccgtggcgagcaggccgtcggcgagcatggctcgagcccctgctgccgaatatgcaggaggaggaggaggaggaggtcagaggctcagagcgatgagcaacgcgtgttagtgcgtctcatggacggtatgtacacgcacgcatccgggcggcagggcacggcacggacctttgagatacgcgatggacgcggtggagttgcggcggcggaaccccggaccagtgacaagcgcggggcagatggtgaccagcttcaggtctcgtccccgcgccgccctccacgcagccttctctgccgccgttttgccaagtgcgaaccacagctggaaaaacgacgcatcacagtatgtggcttcttcctgagtgactatagtttgtgtgatcaaaggagaaacagaaatacaaatgcgtctaatgtcttctcccgatcactcaccttgttgtcgcggcagaagctctcgtcgctccagcagctctcgtcngatggtggtagggcaccgccggtcatgagggtagtcctgcctccacacgcacgccagcaaaggaaagaggtgaagacgcatttccctgacggactctggtcctgacgcaggnctcaatcacccgctccgctgcttgggcttctacgctg

SEQ ID NO: 164680 - DNA, 390 bp, Zea mays
  Clone ID: MRT4577_81767C.1
cctcagcccactcctctcgtgtacgctagctcccagtcactggaaatccccgagcacggtcaccggcaccgacgagttgagccccgacgtggccatcccttctcagaacacaaagaagagtataatagaagaagaagaagaagttgttcctccaactgagaatcctcccgtggagaataacttttactttgacatctgtggtgaaaaagttgctattcctacgacacatggattgagagtcatggcgggcaccacaccagggtacacctacatcagcgcttggccattggaaaccgcccaggagacatcaccggggtacacggaaatcgttcgaggcatctcgaggcgtgtatgaggaccattggatacaaaattgctcaccggagttct

SEQ ID NO: 164681 - DNA, 376 bp, Zea mays
  Clone ID: MRT4577_81768C.1
gataaaaaaaaataaaagaaattttttaatcaaaaaacataaaaaaaaaagggtaaataaaaaaaaaccatataaaaaaggacaaaaaaaacaaaaaaataaataataaaataaatactaagggggggcgcccttttggggtttcaccttttcctccccgctgcttgcaaaagattactttttttttgggtaccctaaatacaaacaccacggcccgggtttttcaaagcttaccagtgggaaacacctggggtttcccaaattttttcccttgcgccaaaatccccttttgccgcggtcgggaatacggaaaaggtcccaccccatccgccttttaaaacaattgcccactttatttgcacatggatccacccct

SEQ ID NO: 164682 - DNA, 389 bp, Zea mays
  Clone ID: MRT4577_81769C.1
ctcttttttaaaaaagctcgggttggacggtcatgtcggtttgacccaggatgatgcggagagtcgcactgttggtagatgtttgtcggagcatgcactctttgttgggagtgcagctactccattggtgttgtggaaaccttgtttgtgttttctatagtatgtactaatatatagtttgttagtgaggtgtttaccttgtctttactattctgttacgtatgtatttaaagcgtgaaccagactgcatcatacagggctggatccagtgcgacatggtgtcgtgcgtcataatcgtcgagccatgagatggactgcactgggtgtggctttgtcacttgtgtagtgagtgttctggtgagagataataaataaatagaatgtgctgg

SEQ ID NO: 164683 - DNA, 602 bp, Zea mays
  unsure (1)..(602): unsure at all n locations
  Clone ID: MRT4577_8176C.1
ctcggcgtgttacaaacgccggcgcaaactctcgcccgagcccgacagatctctaattccccataccgggcaccgggcgaccttcacgccagtgtcgggctcttccgaaggggtggcgcgcgggtgtttgagaggagaggaggaagatgagggagtgcatctccctgcacatggggcagggcgggatccaaggcggcaacgcgtgcggggaactttactgcgtcgagcgcgggatccaggctgatgggcaagtgcctggagataagaccgcgggacatcacgatgatgccttcagcaccttcttcaggcagactggggcggggaagcgcgttccccgggcaatcttcgttgatctaggacccactgtgatcgatgaggtgcgcacctggacgtgccggcagctcttccaccctgagcggctcatcagtgggcaaggaggatgccggtaacaatttcgcgccggggcactacacaattggcaaggagattgttgatctgtgccttgaccggatccggaagcttgctgacaactgcgccggcctccagggcttcctgggcttcantgcgcggggggggggcacccgggtctgggcttgggtctc

SEQ ID NO: 164684 - DNA, 198 bp, Zea mays
  Clone ID: MRT4577_81770C.1
acgcgtagcttattcagtatgcacatatcctcgtacactcttttctctcatagtgtcgtaatgggcaaggctgttcctgaaagagtgttgggtaactgcgatcccgtataccctactgcctacgtccatacattgaatggatctgaacgaaataccttatatacgcagcttcttaaattaaagcaaaaaatgctgacc

SEQ ID NO: 164685 - DNA, 413 bp, Zea mays
  Clone ID: MRT4577_81771C.1
acgcggccgtcttttgcgccccgatacgcggagccacagcgggcgggcagacctggagaagagccggatccgaccggtagataggagggccctcatcggtaccaaggctacgagctcccggcagtctactgtcaccgccgccggcaggggcgcgacgcagaccgaaagggcggctgcgagagcacgtccgacacgccctgcgcggcccctcgcaccgcacatgaggagaagaggcgaaacctataccgaagcaaggacccccgaaccgacaagaaggaggcgaacgcagatgctgagctcagggggcatgcaggcatcgcacatacaaggtggtccacccacggggaagacgctaaaaggcacaggcaaagccaatagcaagccaccaaggaggacctcttggaggtccaaaa

SEQ ID NO: 164686 - DNA, 151 bp, Zea mays
  Clone ID: MRT4577_81772C.1
ggaggacaaccgggggttataaaaaatacggagtccaacagttgacctgaaacggggatggggacgggaggagcaaaccaggaggcaatattttgctccagcgacaggggccaaatccaaaggaaatcgatcgagggaaaagggttgttcc

SEQ ID NO: 164687 - DNA, 444 bp, Zea mays
  Clone ID: MRT4577_81773C.1
ggggcccccacattggaaggggtggtacacacaaaaaggggggtaatcccggcaaggaacccttttgcaggggccaaatggggggggagcaagggtttaatcccggaatctaacgggtcgggaaaagccaaaaaactttggaacaacccacttcaaacgttttaggggaaactttaaaaaaaagcgggggcggggcaactggggaaaaaattggccaaaggaggccggtaccccattccactggtttgggaaaaaaatgggtttaaagggcccgcccctaacttcgggaagggtgggaaaggggggccccaacctcactttcaaaagttgggcagggacatgttttttcccggggtttttttaaaaaccttgggcactggcattttaaaaatcctccgggggaaagggcaccctttttttaaaaaaagaaaacatttcaacctt

SEQ ID NO: 164688 - DNA, 299 bp, Zea mays
  unsure (1)..(299): unsure at all n locations
  Clone ID: MRT4577_81774C.1
cagnnccagagcgaagaagaaatggaagaagcaagagccncnaancagacggaccgagccagccaaanagaagagcngacgannaaacngancaacnagggannacggcncggaagcannnngaacacnnggaagggncancagagaaanccaganacaacnatanncaaggaaggnanaannganggcncaaacnggagcggnngacangcngaggngnggnancnggnggnanncagggagagcanngaaccagannnngaanaggncnggncaaananggnngngaggagaaaaca

SEQ ID NO: 164689 - DNA, 234 bp, Zea mays
  unsure (1)..(234): unsure at all n locations
  Clone ID: MRT4577_81775C.1
atggcagaatggaggacgcggcgcgtggnaggggtcggcgggaacggggnagcaggnaagccgcggcgccgccaggcgttcgacgttcgcgggagctgggtattctgcgcggagctgtgtgtatgtcgtgcgacgccatggnggtgtgaaggggggggggcggttatttcttttttttaggccanntcccccacgccgcttccaaggggaggggacgctgattcgctctgtgcg

SEQ ID NO: 164690 - DNA, 222 bp, Zea mays
  Clone ID: MRT4577_81776C.1
aaatgctgcagcgtacaatgaatggtaaagaagagcaggatgttggcttgtaattgattcaatcagcaagctactagctctctttctgtctgattgtagccgcaggatcaagtatcatggatgttcaccaagttaccgaagatacacgcttctttcggctgagcatattgctcttgccgtattcatcggacaagggaaaatgactatttatataactcgcgt

SEQ ID NO: 164691 - DNA, 596 bp, Zea mays
  unsure (1)..(596): unsure at all n locations
  Clone ID: MRT4577_81777C.1
ctccggtcccgccgctcccgcagcagccatgtcgttcttcccggagctttactttaacgtggacaatggctacttggagggactggtgcgcggcctgaaggccggggtgctcagccaggccgactacctcaacctggtgcagtgcgagacgctagaggacttgaaactgcatctgcagagcactgattatggtaacttcctggccaacgaggcatcacctctgacggtgtcagtcatcgatgaccggctcaaggagaagatggtggtggagttccgccacatgaggaaccatgcctatgagccactcgccagcttcctagacttcattacttacagttacatgatcgacaacgtgatcctgctcatcacaggcacgctgcaccagcgctccatcgctgagctcgtgcccaagtgccacccactaggcagcttcgagcagatggaggccgtgaacattgctcagacacctgctgagctctacaatgccattctggtggacacgcctcttgcggctnttttccaggactgcatttcagagcaggaccttgacgagatgaacatcgagatcatccgcaacaccctctacaaggcctacc

SEQ ID NO: 164692 - DNA, 404 bp, Zea mays
  Clone ID: MRT4577_81778C.1
cccacgcgtccgctgagccgttgatgagagcagcagtaccgttggtcgcagcggcgacggcgggcggccggcggacgcgatgtccgttgtggcggccgtggggcccgcggcggcggcgtcttacgggcagccgctgtgcggcggcggggcgaggaagaggaaggacgcgggcgtggtccaggaccaggaccaggaccaggatgcagggtcgtcgttgcggggtggtaagaacgccgcgctgttcgtgctggaaacggtggaggaagaggcggacgcggacactgagaggtcgtccatcggcgcggcgtccgaggacggcgacgacgaggacgaggaggaggtggctagccgcgggacgaatggcgccggggccccgctcgcctgcatggacatggggcccctcc

SEQ ID NO: 164693 - DNA, 615 bp, Zea mays
  Clone ID: MRT4577_81779C.1
acatatacatagtgcacctcttctcattcccgaagaaagtaaaacaagaaaaacagagacagaaaagagagtaatattgtgctctcatctcatggtagttacaaaatgcaagacaacgaggaatgtacacctgacaagtacatttttcctaatacttgtgatcatttgttcagcctcaccgtcatgcaaagatcgcagactagtagcccggtgtgtaacgcttcttccctatacatgtggatacctcaaaggtgctgcatctaaagcactagggcgaaccgcacgaggacatgaaggacgtcagcaacacacgacactgctcgacatgttcgtctaaatcaagacggtttctgctgcatctgcgcgaagacatgaaggacatcagcaacatacgacactgctcgacgcgttcgtctacatcaagatggtttttgctgcatctaagtgtctactgatatttcttgaaggactcgtcacttgaaggatggcataatacatcatggagaaggatatcaacatgacgggtagattattggaaatggagatcaccatgtaacaatgggccataccctgtcacaactattgtgtgatgatagaagtagaatgatccatcat

SEQ ID NO: 164694 - DNA, 2165 bp, Zea mays
  Clone ID: MRT4577_8177C.1
gcggtgaggcccccacgtccctccacaccgccgggggcgcgcggccagtacgcgttccagtacagctccgacgcgcctgtacgagtacggccgctatggctcctgccgcttattcacgccgtgccctccgtactgacggctcttgcatggcggtagccgctcgcactcgggttactgtgactctcggttggtatcgccggttatcctattgtcattagtattagtactacatattattatgtgtaagcgcgctctcaagttgtgctggtggcggccggttggagtcatggtttatgtggatgcgttttatataagcacattttctatgtagttgagaagaaatttggcgaagcgtcttccataatcacaaaaaaaaatcgcttcagctcggcgtcttcacaaacgccggcgcaaactctcgcccgagcccgacaagatcttcaattccccattccgcccaccgatcgaccttcacgccagtctcggtctcttccgaaggcgtcgcgcgcggttgtttgagaggagaggaggaagatgagggagtgcatctccgtccacatcgggcaggccggcatccaagtcggcaacgcgtgctgggaactttactgcctcgagcacggcatccagcctgatggccaagtgcctggagataagaccgcgggacatcacgatgatgccttcagcaccttcttcagccagactggtgctgggaagcacgttccccgtgcaatcttcgttgatctagaacccactgtgatcgatgaggtgcgcactggcacgtaccgccagctcttccaccctgagcagctcatcagtggcaaggaggatgcagctaacaatttcgcccgtggccactacacaattggcaaggagattgttgatctgtgccttgaccgtatccgcaagcttgctgacaactgcaccggcctccagggcttcctggtcttcaatgccgttggtggtggcaccggctctggccttggttctctcctccttgagcgcctgtctgtggagtacggcaagaaatccaagctgggcttcactgtgtacccatctccccaggtgtcaacctctgttgtggagccttacaacagcgtgctctccactcactcactgctggagcacactgatgtctccatcctgctcgacaacgaggccatctatgacatctgcaggcgctccctcgacattgagaggcccaactactccaacttgaatcgccttgtgtctcaggtgatctcatcgctgactgcttctctgaggttcgatggtgccctcaatgtggatgtgaacgagttccagaccaacctggttccttacccgaggatccacttcatgctctcctcctacgcaccggtgatctcttctgcgaaggccttccacgagcagctgtctgtggcggagatcaccagcagcgcgttcgagccggcttccatgatggtcaagtgcgacccacggcacggcaagtacatggcttgctgcctgatgtaccgcggcgacgtggtgcccaaggacgtgaacgccgcggtggccaccatcaagacgaagcgcaccatccagttcgtggactggtgcccgacggggttcaagtgcggcatcaactaccaggcgccaacagtggtgccgggtgccgacctcgccaaggtgcagcgtgccgtgtgcatgatctccaactccaccagcgtcgtcgaggtgttctcccgcatcaacagcaagttcgacctcatgtacgccaagcgcgcgttcgtgcactggtacgtcggcgagggcatggaggagggggagttctccgaggcacgcgaggacctggccgccctggagaaggactacgaggaggtcgccgcagagggcggcagtgatgacggcgacgaggaggaggaatactgatctgcttgcatgaatctgtttggctgtcgagccaggttgtggtgttgaaaaacctttgtttgtgtcctggcccccctgggtaatgtttgggtgtttccttccatcatcacttgctgaactgctctagtatttgcatttgtaattgaagtctgtcgctttaagcactcttggttctaaagatctctgtgcttttggggggtgtttttgcattgccccaaatcccaataaactcaccaaattcgggtcgtgcgtgccttcggcgccttgcccgactagcg

SEQ ID NO: 164695 - DNA, 284 bp, Zea mays
  Clone ID: MRT4577_81780C.1
gaatgactaatcaacacgcagtttaaccatgagcaagctttgtttaattattacagtctacgagaacttattcaggcagatcactttgaggttgcgcctactgttgggcgctgccagcttgaccttgttggtagctgccactgccagcacgagtaagcacaggcaggctcatgcttcctaccgattttgagctatgaagctttctccatggaaatggcatacgagtctggactatgtaggacggccggccaacgttgctcaccacggaccatcttactattgac

SEQ ID NO: 164696 - DNA, 205 bp, Zea mays
  unsure (1)..(205): unsure at all n locations
  Clone ID: MRT4577_81781C.1
cgagaccaacaangcaacatangaaaggtggaatacagtnagccaactaatagagcaacccaatggcgnngccaagatnattggcggcgatccttatgctnnccttgctctgttnnctgcatgnnngttgctaacngcngnnaccatttnnttcctcaatacctcnnacaagctcnnctatagnnctgcccnnttcttnnccccc

SEQ ID NO: 164697 - DNA, 1330 bp, Zea mays
  unsure (1)..(1330): unsure at all n locations
  Clone ID: MRT4577_81782C.1
gtaccctccgggtctcggccggggcctctgtgtttataaattccatcgcatccctctgcaggtgcagagcagctccattccattgcccctagctcaccacacactcgagtgacgagcacacccaccgacgatcgccatggccggcggcagcagccttaagaacatggtcgtcgccttcctcgtcccgctcccttccatcctcttctacctctccttcgtccgcgccggcggggacaccggcgccagcccgctcgcctcgtggtgcgcagcgcaccctctggtcctggccaacgtcctcttcttcctcaacgtggacgtcctcttctggctcgtcggcctcctcctctccaaccactggctcatcgacctgtactggaccgtcatccctgtgatgctgctgcactactaccgcggccacccggcatccgtggcggacgcggcgaggtctgcggtggccgtagcgctcacgtgggcgtggagcgccaggctcacgcacaactacctcaggcgggagggatgggagttgggcaagcgggaggactggaggttcaacgagatgcgtgcccagtacggcaacacctggtggtggatgtcgttcttcgccgtctacctctcccagcaggtgttcctcatcggcatctgcctgccgatgtacgccatccactccagcaaccagccatggggcgtctgggacctggtggccgcagccacctgcgttgccggaatcctcatcgctcacttcgctgacacccagctgcacaggttcgtgaccaggaacgagaagctcaagcggctgggcgagccaaccgtcccgaccctcgaggacgggctgtggcggtactcgcgccaccccaactacttcggcgagcagctctggtggtggggcttgtacctcttcgcgtggaacctgggccagcggtggatgttcttggggcctctcgtcaacagcctctgcctcggctacgtcacggtgctggtcgagcgccgcatgctgaagcaggagcaccgtgctgaggcgtacaagctataccagaagaggacttcggtgtggatcccttggttcaggaaggccgtccctgaatcgaagctgaaggagacctaaggccacactgtcgtttagttgtttgggccataccccttgtccaggttgttcaccatgttgttgtttgttccacaacgtccatgtttagaacctgttgtttcatccgctatatgtgtaattcactgtatgtgcatgaagtgcagcttgtatcatatgcatgatgacctgtttaaggtgcaagttaaaagtaatgtatctacattcgtttaaaaaaagcnannannnaag

SEQ ID NO: 164698 - DNA, 640 bp, Zea mays
  Clone ID: MRT4577_81783C.1
ccggccggggccagccgccgctcgccgtcttggtctctcggggtctcgccgtctcgctgtatccgcctcctctctcccttggactcgtggcggcgccgaccccgtaggccgcaggctaccgcaggcccgcctccggtcgtggccaggtgcccaggtcctgtcctctgtctgctcagccgtcgagcagcgtgcggtgtataggaagccgcaggcggctgcctgcctcaccctcaccggtatccagctgacgagcccagcaggcagcagcctccattgtccaagccaccggagacatggagaatcgcagagacgagcaggaagcggagcagcgctgcgtcgctgcctgaccaagcacaaggttcaagtctactttggcttgcgcagaccaactgtccctagctccgctgtgggttgacagattgaatgctgaaaagggagttgggccgacagggcatccatggtccaaatcttgtctgtgcatccatcagaaacatctgcaccgtccgcggtcaaacaatggagtctagtccggtgcaatcccaagcaagaagaaagggtgggtctagcccacaattcatgccaaaaaaacccaaaagcttagtagcccccctcttggatcaatcttggtggaggtggtaat

SEQ ID NO: 164699 - DNA, 413 bp, Zea mays
  Clone ID: MRT4577_81784C.1
gggaagcaataaatttgatttcacattgaataacagcatgccacctatcacaacatctgggccaaaagccacatataaacagtgcgagtgtatccatccctaacatctgatccttgtactgcaagtcatagctgacaattttctgggtcttgtaaaaatattttccatgtaaagagatcaccacggtatgatcacagggagccttgtgaagtctgttgtactgtttgatttctgggaactgattgcatttcccatgtaacatatttattagggtgtagctgtagggaaaactaatggtcctgattgtgccgacaaataggacattagggttgtagctgtagcatgttgttgttgatgttgtgtaatgatcatacttgatgtaatcattattgatttttttggggccaagtaat

SEQ ID NO: 164700 - DNA, 725 bp, Zea mays
  Clone ID: MRT4577_81785C.1
ttggggtaccggcgcccttcctcgagtttttttttttttttttttttttttttttttttttttttttttttttttttttttttttttttttaaaacaaacacggggggctttggccctctttttttttccagcatatttttagagagacgggggaggcccccaacgtacttttttccaacggaattacgtataaacccctcagggagggacatgtcgaagttgcatgccaatcgacaaaaaaggggattataataggggggaaaaaaccccgggggccatagcagtttttaaatccccatcatctttggggggggcaggggccaactgggcaaagttgaggggatccgggtactccggggggccgaaaaaaagggcaacccccccacgttcttttgttgcctgggaaggaggaaacatgccccaaaacatgtagtcgtcgcaacccaaacagaaagtcgggtttgggtgggcccacaaaaccggggggttaatttttcccaatccgaagaatgccctgggaaccacccggagcccagccattaaaggggtgcccatcaaggcggggacaaaattggaggggcttgcaagggagaatctcatgccggccatggaggatgcaacggttttccccacctcaagccttaagagtttgttgaagttctgccccataaagtgggcagggtctttgcatccgccgttggccatggggactctggaccctggg

SEQ ID NO: 164701 - DNA, 417 bp, Zea mays
  Clone ID: MRT4577_81786C.1
atgcaagccacgacgaagggggaaagtcgtcgagcaatcgccaccgatttacggccacaggagctcaacgagaacagcagatacgatccaccagagagtgcgaagctatctcccctacaagttccaccggagcgacggtggtccctagttcacccgcggcggtgctccgccttctctcttccctcggttcacggagctgacagtggaatggagggacgtgctgcgcccgagctgccgggagagtatttatccgtggcggacgatccagaaggtggagtcgcggaaaaccccaggagcccgagatctccgcggaggttgcaacggcgggtcagtggccatggcgaaagaagcggtccgttcggccacgacacagctgggcgacaagatgacaggtgggacccacaggatgacaaatag

SEQ ID NO: 164702 - DNA, 584 bp, Zea mays
  Clone ID: MRT4577_81787C.1
atcacacaatatgagagagaccagctacatacatagaaagccaagagcgaaccaaggctggcagacaaaatagtctgcctacgtatgctgcttgttctgtatgcgcgggctgggtacagcagaccatccacaccagattgcataacaagcatatatagctttctttcttcgcacgtaccaccaacgaggggtgtgttatgtgagagaacacccatttatccatacctgaagcaaccagcaggcaaaggtagcaggcaacctacattaatcacgctcgttcatcaaacaataatcatacctatgacagtacctacgttgcatgcattgatagacaccatacatgaggacacactacctacaacagcgcgagctaacaaagctggctacctacagtaacaaccgacagtttctttcattcaaccaactagatggatcgatgtttgttatttatatgaaccaccaccacctaccattcagccatctgttggctacctaccgccagcaattccattcattcaaccgacagacaggaacgatctcgcctgcttacagacagcaccactacctacattcattcagccagc

SEQ ID NO: 164703 - DNA, 347 bp, Zea mays
  Clone ID: MRT4577_81788C.1
ggagcggtgcccttttttttatgaaattccacaaaaaatggggttatatttttacaggggtcaagaaaaaaatccttggatttttttttaaaaaaaccgccgggcagagcacttttttttcacagcaggattttggggttcatgcctgggatagggggaggcttcagcttttctctttccaaatggttgaccggaatccatttttggctcctccatccacaaggaaaggttgtttttgccgaggcggaactttctttgggggggcactcaaaggaatcccttttggtgctttttcagggagggcagagccgggcttgaagaagcccccatacccctttgggcactcc

SEQ ID NO: 164704 - DNA, 564 bp, Zea mays
  Clone ID: MRT4577_81789C.1
attttgcgatgaatacatgatacgcacgtggtgggctccggcgcgatcttctaaacgtgggtgcatgacactcgctactctgaggttgagatctcctccctacgctctcccagatgcgtcgcccgaggtgatactcccatcgtcgaacaatgaggaacgagaagcttgccagaatgaggaaaacctccgccgcgctacacacacatcaatgaagaggagaaggctggtttcctcccgctcgaagcatgactaccgtcggaagtacgatgaggcagcaaaacgaagagtggtcgcagattcacacgcccagccactatgaggggtggtctcaatgcaccctggagtgcccggctgatcgttgtgagcgcgactacgaagcagctctgcaatgctcgcctagcatcaggtcaacgttgcagctgctgaccactgtgggatagcctcgaaagccaaagcttctcatcagaagagcgcaactggatttactttgctacacctgattgacatccatatcgagtcatctcaacccgaagtacggagagcgtgtgccagctgcttctcatg

SEQ ID NO: 164705 - DNA, 270 bp, Zea mays
  Clone ID: MRT4577_81790C.1
ggggggaggagctagaaacactacgctgcgaggaaatgatcgccaccacaaacaccatcgccacaagagctggatgttccatgatgcacctagtactcgaccccaacatgcaagaacgcctttaccactaggtgaggagcaaggtcggcaagaccgaccgagtcactgaagacctcgtggaggtcatgccctaccttctagcggtggtgaaggagacgttaccacgagaccggccgggccactttgtgctgtcaaacgcggtgacgcgag

SEQ ID NO: 164706 - DNA, 272 bp, Zea mays
  Clone ID: MRT4577_81791C.1
gtccatcgcctgtactgggccccagcgccgccgaggtcatgcgcgccaacccgggccactacgtggcgctcgtgacgcaccgcgcgggcgccggcgacgaggggaagcggtcccagcagcggcagcgggagcaggagcagcagaggcacggcggcgcgcgcgtgacgcgcgtgaagctgctcaagccccgggacacgctggtgctcggccaggcgtaccgcctcatcaccgtcgccgaggtcgccaaggcgctgcaggccaagaaagaggag

SEQ ID NO: 164707 - DNA, 383 bp, Zea mays
  Clone ID: MRT4577_81792C.1
aaagatcgcgatcgttggtgctactggagaagcgtggagggtcgattgtttatggcctcctcgaatccaaaacccaatttgatattacggctttggtgcgaccaagctcagctgaaaagccagcgactatcagcttgaaagaaagaggcatcaagattgtgctaattgatcttggtggaagccatgacgagctggtagctgtgcttactgggattgacacagtaatctcggccattcactttcaatcacttgatgatgagattccattgtcaaatgcagctaaaaaagctggtgtgaagcgatatgtgccctgcttcttcgctaccattgcacctcgcggtataatggatgctcgcgatagaaaagaggcagtcctagatcac

SEQ ID NO: 164708 - DNA, 481 bp, Zea mays
  Clone ID: MRT4577_81793C.1
gaattccgggtcgacccacgcgtacggaaggcgccccttcctgccctcacatgcgctcctcccttcccgacaccgaccgacccctcgtccgctaggctgcctcccaccgccatagccgcagccgccaccgccacgtcgtcctgttcttccttcgagggtccgagcgacgaccgcacctgcgtatccgctgaagaggtggcggcgggcgcaggggctacaggcatcgacgaccgggagaccgctgattgcggggtgggcgccatctgtcctgacaggatagcagtacaggagaccaccataggcacgggttgcgaccacgcctacagagcgaccgggagatcgaggtgggcaggctacaaggataaccgtttaaggcccaatggccagaatgcatccgaaaccctaaggggcaactggtttcccacagctggaaaccaggtggtcaatagaataggcgaaatggtggctggaaagtttcaag

SEQ ID NO: 164709 - DNA, 767 bp, Zea mays
  Clone ID: MRT4577_81794C.1
ttttcagacattggggtatttttgattgggccgggatctgcaacaagccaaccgcaaccagactccagagagagagagagagagagccacacattgcaagcttccaccatttccaagaacaactgccactgcagagagctcgtacaggaagagatggagatgcacatggacgacaagagcaagacgccgctttccaagaaggggagccggaggtcggcgtcggcgtcggcggcggcggggctgaagagccggccgtccagggccgccgcgggcaggtcggtgccgggccgcctggcgggcctggtgaaggagcagagggccaggttctacatcatgcgccgctgcgtcaccatgctcgtgtgctggagggactagctcgtgcaagcggtgcgcatctatccatggccgtagcgcgtaggcccccccaccccgttcggtggatgtgggctgtggctcggcccatgtgggcctggagctgtagcgccctggtaggtgaggacgtgatgtccatcacatgtgccatatatactgactagtttcccaacaacagcaaccccaaaacaaaacaaaaaaaaagtgtcatggtgagagatcggagatgtgcctgttgtgtggccatcctgtggttcatatgtgtccatagctgtcggaaaaattagtataacttcatcctgtggttcataattgtacgcaaaagaattactatcatgattgcctgaaatataacttcaccctgttacagcaaaaaaaaaaaaaaaaaagcggcc

SEQ ID NO: 164710 - DNA, 321 bp, Zea mays
  unsure (1)..(321): unsure at all n locations
  Clone ID: MRT4577_81795C.1
ggggnngggggtttttcggggggggttttttnnnnggntttttggagaaaatgggacattgtcccccacccaatttccaataaaattaatgcaattaaacatcctggggggatccattccgtttttcagcacaagataggcaatttcacataaggccctgtaatcccctaaaaacacttgaattttttgtcccccaaagcaaagtaagatcccctaaaccaaaacgtggggattcgcttccccccttaaccaacgggtttgaggaaagccttcccaggaccccccttttaaagtttgccgtggttgccaaccatttttgct

SEQ ID NO: 164711 - DNA, 1844 bp, Zea mays
  Clone ID: MRT4577_81796C.1
cctcgaggcggcggtgagccaagcaccccgctccttgctctgccgtgctcggagttggggagttggagcaccaccaccaccactcttcccctctcctctccctcctcgctcgtcctgttggaagcagcacacacacgagagagaaagagagacacaaggagatggcgctgctgttgctcctgctggccgtgctcggcgtggtgctggcgagcagcctgctgctgcggtggaacgagctgcggtacagccgccgccggggcctgccgccgggcacaatggggtggccgctcttcggcgagaccaccgagttcctcaagcaggggcctagcttcatgaagcagaggaggctcaggtacgggagcctgttccggacgcacatcctgggctgccccacggtggtgtgcatggagccggagctgaaccggcgggcgctggccagcgagggcgccggcttcgtcccgggctacccgcagtccatgctcgacatcctggggcccaacaacatcgccgccgtgcacggcccgctccaccgcgccatgcggggcgccatgctcgcgctcacgcggccacacatgatccgcgccgcgctcctccccaagatcgacgccttcatgcgcgcccacctccacggctgggccggacgccgcgtcgacatccaggagatgaccaaggagatggctttgctctcggctctcaggcagatcgctggcatctctgcgggcccactctccgacgccctaaaggcagagctgtacacccttgtacttggcaccttctccctgccaatcaacgtcccaggaaccaactacagcaaagggctccaggcaaggaagaagctcgtggcaatgctgcggcagatgatcgctgaccggaggtcctctggctgcgcccgagacgacatgctggacgcgctgctcagcggcaacgagggtaccagggcgaagctcagcgacgaccagatcatcgaccttctcatcaccctcatatactctgggtacgagactgtgtcgaccacctcgatgatggcggtgaagtacctgtcggacaaccccaaagctctcggacagatcaggaaagagcaccttgacatcaggaaggctaagtcaccggaggatccccttgactggaacgactacaagtccatgaccttcaccaaagctgtcatttatgagactctaaggctagctacagtagtcaacgggctgctgaggaaaactacccatgacgtagaaatgaatgggtatgttattccaaaaggctggagaatttatgtatacacaagggagataaactacgacccgttcctgtacccggaacccatggttttcaacccatggagatggatggagacgaacctggaatcacatccgcacttcatgctgttcggaggaggtgcccgcatgtgcccagggaaggaagtaggaacagttgaaatcgcaacgttccttcactatttcgtgacgcgttacagatgggaggaggagggaaacaacacaatatcgaagttccccagagtggcggctcccaatgggctacatatccgagttcaagattactgaacttcgtgaggcgttttgtgaagtttaggtagggattcagacagatagaaataacccatgcgatgctgatgctgctggcctcttcgaaaggactagaacagccattagtgcctgtaaaatgtgtccatgccgatagtaatgttattatagggaggatataggtatcataggtttattagaaatttgatgtagaaagccaacagatgctcctgtattcttttgctccatcaaaacagaggtatcatttggcttctaagcctttgaaacgaacccggcacagaaccc

SEQ ID NO: 164712 - DNA, 326 bp, Zea mays
  Clone ID: MRT4577_81797C.1
gaacgtatcccacacttgtgcgctgaccatatagtcaacatgtttctctccctatacacatcacaggatgagacagataaatggtcacgggtatcaactatcgacactagaatcaaatacaggatggaaagaatcccttaggtatgcttcctcattgtgctttaaccaaagaataacactaactgtagcatttgatcttccctattaagaaggtaagtctgacggaagctcagaccaaattacagcatccctacaaaccagttggatctacagtctgggtcatccaggttacatcctcacagtgactgacctaaggtactaccttg

SEQ ID NO: 164713 - DNA, 240 bp, Zea mays
  Clone ID: MRT4577_81798C.1
actagacgccgacatttacttctgttaggtggttacctggtacagcagcgaaccccttgggtgtaagactaataagcacgggagggaacgacataacgaacaagggtcaaaaagaggcgcgtttgacaattgaggcaggggacaacattgagccccctttgttagagcagacagatgggccactgaaccatcggggggaacgggattaaacccggtgggaacgttttgagtatgtcctaa

SEQ ID NO: 164714 - DNA, 329 bp, Zea mays
  Clone ID: MRT4577_81799C.1
gctcgggctcactgcgccaccagccatgttacaagacttaaaacctgctggtggctctagtctcattgggggtgagacagaaactcttgagagggtgaaaaaatttgcttcaaaatgctctattcagcccaaccaagttgaccaaagccattcccaagattgcctatattgggcttaattctcttgccaaaattcttcattgcttggttcaaggtggcttttttcaacggtcaaggattaagaagttgaaaaaccttcctactaaagcaattccttttgggtcaacacccaagattaatgatggcacatctgatgttggaacaaattgg

SEQ ID NO: 164715 - DNA, 2344 bp, Zea mays
  Clone ID: MRT4577_8179C.1
ggccggcaaccgccgagcaaaccagctcatccggtcggtcatccactcatcctcatcccctgcccatccgatccgatcggtcatctcatcttcatcccctacccgatcggatcccctgctcatccgccgagcaccaccaggcagcaggctccagtcgtcgagcaccagcaggagcacggcgcgccgcccagtaggagcacggccaggaggacgacgcccgcatcctgcctcttctcctctgctactggagcctctactgctaggagcacggctaggaggacgacgcccgcatccagcaggagcaccagcaggaggagaacacccatgctgctgccgttgagcgatgatctgatgcgcccccatcatggctcttctcctccctcgcggcctcgcctcgatctgctgctgccggatccgagcgccgtgcccacgggtcacggccagcgatatgcagggatcaagaatccaactttgagaaaatttgctcgagatgtaaatggcgccaccggagtaccagcagtacctcgtgtaggtgaccaagtaccaggccgcacagaactgcaagttgataatagttttgatcgcttcagctcggcgtcttcacaaacgccggcgcaaactctcgcccgagcccgacagatctctaattccccataccgtccaccggtcgaccttcacgccagtctcggtctcttccgaaggcgtcgcgcgcggttgtttgagaggagaggaggaagatgagggagtgcatctccgtccacatcgggcaggccggcatccaagtcggcaacgcgtgctgggaactttactgcctcgagcacggcatccagcctgatggccaagtgcctggagataagaccgcgggacatcacgatgatgccttcagcaccttcttcagccagactggtgctgggaagcacgttccccgtgcaatcttcgttgatctagaacccactgtgatcgatgaggtgcgcactggcacgtaccgccagctcttccaccctgagcagctcatcagtggcaaggaggatgccgctaacaatttcgcccgtggccactacacaattggcaaggagattgttgatctgtgccttgaccgtatccgcaagcttgctgacaactgcaccggcctccagggcttcctggtcttcaatgccgttggtggtggcactggctctggccttggttctctcctccttgagcgcctgtctgtggagtacggcaagaaatccaagctggggcttcactgtgtacccatctccccaggtgtcaaccctctgttgtggagccttacaacagcgtcctctccactcactcactcctggagcacactgatgtctctatcctgctcgacaacgaggccatctatgacatctgcaggcgctccctcgacattgagaggcccaactactccaacttgaatcgccttgtgtctcaggtgatctcatcgctgactgcttctctgaggttcgatggtgccctcaatgtggatgtgaacgagttccagaccaacctggttccttacccgaggatccacttcatgctgtcctcctacgcaccggtgatctcttctgcgaaggccttccacgagcagctgtctgtggcggagatcaccagcagcgcgtttgagccggcttccatgatggtcaagtgcgacccacggcacggcaagtacatggcttgctgcctgatgtaccgcggcgacgtggtgcccaaggacgtgaacgccgcggtggccaccatcaagacgaagcgcaccatccagttcgtggactggtgcccgacggggttcaagtgcggcatcaactaccaggcgccgacagtggtgccgggtgccgacctcgccaaggtgcagcgtgccgtgtgcatgatctccaactccaccagcgtcgtcgaggtgttctcccgcatcaacagcaagttcgacctcatgtacgccaagcgcgcgttcgtgcactggtacgtcggcgagggcatggaggagggggagttctccgaggcacgcgaggacctggccgccctggagaaggactacgaggaggtcgccgcagagggcggcagtgatgacggtgacgaggaggaggaatactgatctgcttgcatgaatctgtttggctgtcgagccaggttgtggtgttgaaaaacctttgtttgtgtcctggcccccctgggtaatgtttgggtgtttccttccatcatcacttgctgaactgctctagtatttgcatttgtaattgaagtctgtcgctttaagcactcttggttttaaaaaaaaaaaaaaaaaaaaaaaaaaaaaaaaaaaaaaaaaaaaaaaaaaaaaaaatccgagggagagcgcggtacc

SEQ ID NO: 164716 - DNA, 324 bp, Zea mays
  unsure (1)..(324): unsure at all n locations
  Clone ID: MRT4577_817C.1
ncaccctactctcactngtaacgtacctcagcactcggctcgagactcctccttcggatctcgcattcagcgcagctaggtgtgaaggacaggggacgcggatgaagatggggctcgcgttcgggaagctcttcagccggctcttcgctcagaaggacatgtcgatacttatggacggcgtcgactacgccggtaaaaccagcatcctctacaagctcaagctcggcgagatcgtcaccaccatccccaccatcggtttcaatgttgaaactgttgagtacaagaacattagcttcactgtctgggatgtcgggggtcaggaca

SEQ ID NO: 164717 - DNA, 455 bp, Zea mays
  Clone ID: MRT4577_81800C.1
ccggccgggttatacttgttacttttaccttctccttgaattctgcgcctttctcattccgttttaatacgtacaggatgatgaagctgaagaatgacgagttgaagcttaacagatgctccaaaagacttttctgcatatgattctagagaaatttttgtaatataattgtaaagaaacttatgtaaatttgtgcataccttgtaatatatcttttccctttatccgtgtacaatctgctttactgtggacgaaattttatttttgagccgaaggcgaaaaacaccttcccttcttttcgtacacaatgaagcatgaaaatttcttctttctccgaaggtttatcctcatagtcgaagcatctgccttttctgtatgatatgatgataatgatcctatgtatgtctaaatgaatgtttatgaatgcaaaaaaaaaaaaaaaaaaaggggcggcc

SEQ ID NO: 164718 - DNA, 465 bp, Zea mays
  Clone ID: MRT4577_81801C.1
ggccgccctcccgctttcgcggacatcttttgtgttattcagaaacccggccaactactaatacaaagcgccgacgcggctgtacaccagaccacagagtgtctcctaaactaagagagcccgacacaagcagcaagcaatgcgccacatagagaagggggcgcaacagcccaaatggatacgaacacatcttcacgaaaaggatgaacaggaagagctgtcacagaaatgctctcaaaacggactaaaagggtgcaggcacgggcaagcggaacagcactcaaacacaggcgctggaacgcagactcatgacgaagcttcggaggcgatagcctacccaacaatgcctagctcgagaagtgccaccaacaacaaagaagaaaaggccctcacgcttaacggtgacagaggccctgaatggctcgggaggaacgacatagggaaacctgacagccctaatgaggg

SEQ ID NO: 164719 - DNA, 246 bp, Zea mays
  Clone ID: MRT4577_81802C.1
gttgggaaaaaaaatttttttttgttttttccctttgccgcagtcgtccaatgcaaacggaagcaagcggcctattaccctagtgggtagctagctagtcacggaggatgacagagtcggcgatctccatgagcggcccggggcacccaggcccgaccttgcccccgaccatttgtaagtccgtgccgttggctttcggcctcctgaggtccctgatgaggtcggcggacccctcctccggccggt

SEQ ID NO: 164720 - DNA, 398 bp, Zea mays
  Clone ID: MRT4577_81803C.1
ggacctttgggctggtttatgtgcttgcttaatcggtgacgtaaagaatatccgcgaagcactcgaccaagaggaatactacgggaacacacgacgcggacatatgcgtcacaatatgaagaccaagagaagacggcagctccaccggcgctccgagcatcgactagctctcgatagataacgagccgccagaaacggtttaaaagcggaaaaccgccggagccgacccgaccagcggcgctatacgcgacgtcttacacgaacggctggataagatcgacctagaacgggagcccaagagggacttgctaagcgaaatcccctacgcggccgttcatgatcccggcactaagtacaacaccccgagatgaccgatactacacggacgtaaaacaata

SEQ ID NO: 164721 - DNA, 677 bp, Zea mays
  Clone ID: MRT4577_81804C.1
gaaatcatctgatacgtcatcaaagagatgtattcctcagcattcaaatcattttaatgagttcaaacaaaaaaatcaaggatgtacctagtcctgctagattgctgcggaagcgtgatggtaaagttccattcaggaagcgtcgtccgcgtcggcatttttatgaagttagccctagcgacgtggatccattttgcattgtaaaagagaggatcagagttttttggcctcttgatgagacttggtactttggcttggtcaaggaatataatccggacacaaggttacatcatgtcaggtatgatgataaagatgaagaatggatcaatcttcaaaatgagaggattaaactcctgttcttaccagcggaagctcgcaatagatctaaatgcaccaactcaaggtcagcgtttgacccgaagcatgaacacggtgacagagaagacatgcatggaagcggaggcaatacagagagttctgagtcaggtcccatcggctcatggttggctcgatcaaaccaagcaaaatctgctgcactttgtgacatcagcaagcaagatcacagtcattccaatactgttccagtttcatttgaccgacagcagcgtcgtgcttctgatgccaaggaatctattgattctgcaccatgtagttcacttgcaaatgggggtgtagag

SEQ ID NO: 164722 - DNA, 535 bp, Zea mays
  Clone ID: MRT4577_81805C.1
cccaaaaaacaagtgtctaaattgaaattgttgacaaagcagcaaaatacaccttactatcacaattaatctagctaagcagtatgtagacccacttccctctaactaacatgacaatgtagtttatttacaggccataacactgtcgcccgtccaagggaactcaatccgacgcgatggggcggtgagggatagggtggccccatcgaggtgcggatccgagcacgaccaccaatcgagaggccgcccgatgtcaaccacgttgttcttcgtcatcgtcgctttttctcacgtgttgtggattcaggtggaggtggggggaggaggcctgcacccgcgcgagaggaaggaggccgtcggaatcgcgtgggagaatccctgaggtccccaacctgaaactctcctctgcaccacaagtgatcaatgcatacggatcagatgtcccatttaagtttgtcgccttcaaattctcagcaaccagcaattctctggacacgaagagcagctacgtgacctagaactggatgcccctgac

SEQ ID NO: 164723 - DNA, 248 bp, Zea mays
  Clone ID: MRT4577_81806C.1
aacccacaaaccctgtccctccccaactccggacgacggtggcggggcaaaaacactgggtagctccggcgccggatcgagcgtcgtcgttccccgaaacttcaggctattagaggagctcgagcgtggagagaagggcattggtgatggaacagtgaactattgaatggatgatgccgatgacatggggggggggggatgtactggaaccatgattggccctcacaatactgaacatgaaggccaca

SEQ ID NO: 164724 - DNA, 314 bp, Zea mays
  Clone ID: MRT4577_81807C.1
cttttccttagtcgggtaagacttgctgagtaagtccatactcaggggttatccctttgttgtttttaggtgaggaagcgacatatttttgttgcttttgctccaaggtggtaccaaatgaggaaaaacaagactgaagtgcgggaggactcggtcctccacataggattttttgtttataacttatcgggaggagtttgtgtctcccttggtttgtataatattactactctgcactcgctctttagttctggtctgtaacaaaataactcaagcttgcttttgaaataaatgtaagtttatgtaattgcttc

SEQ ID NO: 164725 - DNA, 438 bp, Zea mays
  Clone ID: MRT4577_81808C.1
aaaaaaaaaaaaaaaaaaaaaaaaaaaaaaaaaaaaaaaaaaaaaaaaaaaaaaaaaaaaaaaaaaaaaagaaaaaaaaaattaaaaaaaacaaaggggcggcccttttgcgggccccatctttcctttcctttgcttgccccgtctttcattttctttggggtcccttaaattcaatttgttgtgggggggtctttacacctccctaactggataacccttggggttaccccatttattcccgttgcggctattccccttttgcccggccgggttttccttcaaaggccctccccggtcggccttcccaacggttgccctcccttattgggcctttgggccccccctttgtggggccttttaccctggcgggcgtgttgtttcccccccccttggcccctccccttgccggtttcttacctccctttcttttccctt

SEQ ID NO: 164726 - DNA, 228 bp, Zea mays
  Clone ID: MRT4577_81809C.1
gggccgaatcccgggccgaccacccttcccacagttttaacctagtggaaccggatttaattattaaaaccaggttaaggttcaattaaggggtttttttcccaacccaagggtgtgaaaaaccaaaataaaaaaggttttttggaacccgaaaagcatttaacggttttccgccatcccaaccttttttataatggtttcgccaataatttgttcaaaccctttgcc

SEQ ID NO: 164727 - DNA, 1850 bp, Zea mays
  Clone ID: MRT4577_8180C.1
cattgggaccctcgaggccggccgggatcgcttcagctcggcgtcttcacaaacgccggcgcaaactctcgcccgagcccgacagatcttcaattccccattccgcccaccgatcgaccttcacgccagtctcggtctcttccgaaggcgtcgcgcgcggttgtttgagaggagaggaggaagatgagggagtgcatctccgtccacatcgggcaggccggcatccaagtcggcaacgcgtgctgggaactttactgcctcgagcacggcatccagcctgatggccaagtgcctggagataagaccgcgggacatcacgatgatgccttcagcaccttcttcagccagactggtgctgggaagcacgttccccgtgcaatcttcgttgatctagaacccactgtgatcgatgaggtgcgcactggcacataccgccagcttttccaccctgagcagctcatcagtggcaaggaggatgccgctaacaatttcgcccgtggccactacacaattggcaaggagattgttgatctgtgccttgaccgtatccgcaagcttgctgacaactgcaccggcctccagggcttcctggtcttcaatgccgttggtggtggcaccggctctggccttggttctctcctccttgagcgcctgtctgtggagtacggcaagaaatccaagctggggcttcactgtgtacccatctccccaggtgtcaaccctctgttgtggagccttacaacagcgtcctctccactcactcactcctggagcacactgatgtctctatcctgctcgacaacgaggccatctatgacatctgcaggcgctccctcgacattgagaggcccaactactccaacttgaatcgccttgtgtctcaggtgatctcatcgctgactgcttctctgaggttcgatggtgccctcaatgtggatgtgaacgagttccagaccaacctggttccttacccgaggatccacttcatgctctcctcctacgcaccggtgatctcttctgcgaaggccttccacgagcagctgtctgtggcggagatcaccagcagcgcgttcgagccggcttccatgatggtcaagtgcgacccacggcacggcaagtacatggcttgctgcctgatgtaccgcggcgacgtggtgcccaaggacgtgaacgccgcggtggccaccatcaagacgaagcgcaccatccagttcgtggactggtgcccgacggggttcaagtgcggcatcaactaccaggcgccgacagtggtgccgggtgccgacctcgccaaggtgcagcgtgccgtgtgcatgatctccaactccaccagcgtcgtcgaggtgttctcccgcatcaacagcaagttcgacctcatgtacgccaagcgcgcgttcgtgcactggtacgtcggcgagggcatggaggagggggagttctccgaggcacgcgaggacctggccgccctggagaaggactacgaggaggtcgccgcagagggcggcagtgatgacggtgacgaggaggaggaatactgatctgcttgcatgaatctgtttggctgtcgagccaggttgtggtgttgaaaaacctctgcttgcatgaatctgcttggctgtcgagccaggttgtggtgttgaaaaaccttcgttttgtgtcctggccctctgtttgggtgtttccttccatcatcacttgctgaactgaaccgctctagtgtttgcatttgtaattgaagtctgtcgctttaagcactctaagatctctgcttttgggggtgtttttgcattgccccaaatcccaataaactcaccaaattcgggttgaaaaaaaaaaaaaaaaaagcggcc

SEQ ID NO: 164728 - DNA, 367 bp, Zea mays
  Clone ID: MRT4577_81810C.1
ggggttaacccacaaccacccatcgggggggcccaaaaaagccattcccctttaacgggttttttcaaagaaccggccgagcccaggggcagtgggggaactaaactggcgggaaaaaatacgggggggggagggatgccccctccttaggctgggtgggctgggcccccccaaagtttcggggggaaaggattccttccttgacaaaaggggcaaagggggtgacaacaaaccccgccgggaccttttgggggggggccacccccgtttggtgtgcccccagcagagtcacgggggcccccagccccccagtaaaaaacccggttgggtttcggtcaatgcccccgccgcggtttggtgcctcccg

SEQ ID NO: 164729 - DNA, 556 bp, Zea mays
  Clone ID: MRT4577_81811C.1
accttccccactccctccgctgtcacccgcgattccctcctcctctccgccctctacaccgcgattccggacgctctgcgatgcggcctgcagcgccgctcgcccatctccggtttccccggccgccactgttgcggacggcgctcccactccgctacagtcctataaggacgcactgctctccccggctcctcctcatctccaccgtcgccgcctccttgccttcctctcctctccagtcaaaaaactgtgccacaagtgctactccgctgagcacctcgtccgcgattgccgcgaccccgtgcgctgccgtgactgcgggcgttccgggcacttaagctcagcatgtaagttcgagcccctccttcccccgtcccttgtgtcccctgcctctcaccctcctctcccccctcgcaggctctccaacgagcttctccggtctctgtcccgctcccgctcgacctcgccgcccaactcccccatgtcgcgtgctcctccgcgtgagcactggttggaccgctactaccgggaggtcgaggcggagcgcaccatcccc

SEQ ID NO: 164730 - DNA, 1992 bp, Zea mays
  Clone ID: MRT4577_81812C.1
ataggacattttttgttgtcgtaagtcaaaaattctctaactttgacagagtttatagaaaaacaaaccaacatcaacagccttcatttcttaatcttatatagaagttgcagtattttagtctaatagatggacatgttttaaattttgaggcattgaaacaatttgcatcatgaaggcgttcgacttaatgtttccaaggttctgtggcagtgcgaggcgttttgggaggtggtgagcgcctcgcttggcaccttcattttcgtgatgatgctgtccttcaggctgcagtgccacacaagttcgtttggtgtaggtgctgcttgatttttggcggtgcatgccgggtgttcgacaatgtttctgaggttttgtggcagtgcgaggcattttgggagggacatcatcatgcccaacttgaagtcgtccgtgaccacaacagcgagcgcggtggagtacatggatgttttattgaaggcgttgccggcagccgccgccgccgacgacggaggagcagcacctctcgtctgtccaccgctgaccgctcgtttgtcagcctagcaccggggtgcatgaacgcccagtatatgctacagcaccgccgcccctggccctgccgcctgcgccggtcgttgccctgtgcactccgcgggcctcgggaatggccaaccaggacatttatcggtttgcccaccctctcctgtcttctcttctctcccgcccgctctccctctctcccttctctccggcttccgattgggtattgtttattggcttctggctttaattaattacgcacgaggcatgttcaggtatgttgttcatccatctcgtatgatgaagtgttttatgctcttttccaattattgttgcaagtagcaaaattagaacatgtccttatgtttagactatgaaagaaaacacttatttcaatttgtaggtgtatttttctgtttcagttggcatatcatcatgaggatgtgaattccacaggaaggcccatgtgatcttattgctcccttagatcttccacatggtttacagtcttattccttgccgaggggagtcctgctccagtagtggtctcagaaggggcaaataccatggatgttggcaggcctgtgcttgtgcagaatgcaccaaggacaagactggatgcagggacatgggggacgatggggattggattggggtactgtattgcagctgcagtagctgaacctgaatgactcgtggttgctgtggagggcgattctggatttggcttcggtgcaatggaggttgaggtgaacaggggcttcaacagtgatgctgttttagcaatggagacgatccattccctgtcagcttcaaaatcaagttacccaatggctgatctcacccaactcttcatgacagctactcaagaagggaaaagatcagaatcgcaaggccagattcttagggtggaatgctatagcttaatgccctaatctttatatgcctcttcttatatctgcacttccatgggcaccgggcgacactaaattcacaagataccccctccacctcaaggtggtacggagttctgtgtatcacaagagacatctaggttgacctcactcttcttagtgttcatgcccactacgcaagacaacaccgcaacgccgatggagttggaagatttcatcagtttcgattggatctggatgagatggactctgcttgtaaggagagagagagagtgcatggcttgggaggagcatatttttgttcatccttttcatgagtcatgttacctgccatgtcagattatgtaacttcagatatttctgtttttgttagaaaagtaccaaaatagtttcacttcatggctactctcagatgtgttattgctgctgccactaatcatataagggtaacattgtatttgttagccaacaatttttgagatattaaagttggtgataatataattgttgtttgtataaaaaaaaaaaaacggacgcgtgg

SEQ ID NO: 164731 - DNA, 469 bp, Zea mays
  Clone ID: MRT4577_81813C.1
cgggggatgaggcacagagcagctaacatacatagctaggtgacttctgtcagtatatattacactacataaggtgatatataactaaactaaattgaggaccatatggaccggttggtctattgcggaaacattggtaaggggcacaacatatttgacgacggataataaagccgaagtccatgactgacaccaatatataagtccgatgcgtccaagacaatgcgtcctgcacgatagcaagcacaatgcggacaatggaacgaagactaagggatgatagccaaaggaactgcccaagcacaggagcgctacaggagacagcgggctgcacctgagcgctctgatgggggagagctacccctacctgcaggacgcaacatacgacataggctagcccagggtgaggatgaccacggacaacgacatgatacgatagtcagcggtagcaccgagtgaagaacgacca

SEQ ID NO: 164732 - DNA, 178 bp, Zea mays
  unsure (1)..(178): unsure at all n locations
  Clone ID: MRT4577_81814C.1
ccgggncgacccagcgnncgcggacgcgtgggcggacgcgngggcggccgacggcgccgccgccgnacccgcagaaggcgccgcggnggacacaaaggccgaccacnccgcgcccnnccgcgnggngccgccgcccaaggngcnggngccacccaaggcggagcngnacacggngcgg

SEQ ID NO: 164733 - DNA, 109 bp, Zea mays
  Clone ID: MRT4577_81815C.1
gcagcaagtagaattattcaactggaatcttgtattctattcagagcttagttttccgttaaggaaaaaaatgagcttcagtttgtgttgtgatgtgtataatttgcat

SEQ ID NO: 164734 - DNA, 464 bp, Zea mays
  Clone ID: MRT4577_81816C.1
tcatacaaggccggccgggcttactcttttccgggataacttttccatcccctccggatcgaatttatacggtactccggcagttcggttgcatggagaactcgtgtcgacatgaaggacgactgctgtagactaccgatgtctctgcggatgtctctcctgggccacggacaagcactccctcaacaacgtcttcaactccaacgtcgtacacattgaaatgcaagatcatcctcgattggtagacgcagaggtccctctgcttcgagctccgtcaacattctccacacaggaggagatgctgaaacgccatctacgcgatgaacatcataagtcaacaccggcatgaaacatcaccgactactgcgtctcacatccgacccgggacgctccaggaagaacatcagcgtacacgtgctgcacgcgcaggcatggcatacacatcaggagggaaccgcgatgca

SEQ ID NO: 164735 - DNA, 219 bp, Zea mays
  unsure (1)..(219): unsure at all n locations
  Clone ID: MRT4577_81817C.1
ccggccggggcgcactatccttcatcatcccttgcagtatagtctcggcggctctagaatacgatgggcaaggacgacgtgatcgagagcggcgctggcggcggcgagttcgctgccaaggactacacggacccttccccggcgccgctgatcgacgcggctgagctgnggtcctggtcgcttgaccgcgcccggatcggcgagttcattccccacgct

SEQ ID NO: 164736 - DNA, 326 bp, Zea mays
  Clone ID: MRT4577_81818C.1
gaaaaacgtgcacgtagtatcttgcagtcgctggtacacagatagatactgaagtgttgcaattaattccggtctgtcagttacctggctacgatccgtgcagcgaccattacgtcagatcttacctcaatagcgtcgaggtgcaagaggccctgcacgctcggatcagaaactggtcagcctgcatgtaagttcatctgctgcctttggttcctctactctgcaatctgcattctcactcaccctactgagactattcttgttttttttctctctcccccgaatgtctaatgacttaaagttgatttatgctatttatgcttttc

SEQ ID NO: 164737 - DNA, 414 bp, Zea mays
  unsure (1)..(414): unsure at all n locations
  Clone ID: MRT4577_81819C.1
ggctactacagctcgtcggggtcccagcacggagatggctacgacgcggntaggagggccggacggctgctgcgcggagcatgaggcgctctggaccgctcgacttcggtgcgagcagaaggcgaagaattcgtcgagggctccagctccgggagcagcgatggagctggctcgttgcagaggttcgcagtgtcgagatctggccctctatcgtacaaatagggccgcatgtaatgtaaactctagagcagtagatcttcctatgcgtgctggtttacgtagctagcagcagcagctagttgtgctgtaagtaaaacccattaattgttttgttttgtttgctgctctatcgtacaaatagggcatcatgtaatgtaaactctagagctagtttttattttggttagttggttt

SEQ ID NO: 164738 - DNA, 694 bp, Zea mays
  Clone ID: MRT4577_8181C.1
gtaccggcgccccctctcgagttttttttttttttttttttttttttttttttttttttttttttttggttttttttttttttttttttttttttttttttttttttttttttttggcaacccatttttacatccccattacaacttacaaggacccaggagcaaacaaacaggggctttactttaaaggggggacattccccccccccaacttaacagccctttttacccagcaaaacggtggttcatacttaaccaaaaaaaaaagctttaaccttttgcccagcccagttaggggcccatatcaggcccaaggcttttgaaaacgggccccggtttaaggttgggggacctgaccagggcccaaaagtcaaaacccccccccctcccgaggggccggggagctgactatacatgcaaaacagggcccaaacaggaaagggcaaattaaaacctgacctttggaaaaaccttgccgccgttggaaaacctgaaattacaaaggagggcatcaccccctggaagcccaatagggaaaaaggcatccccccgcttggacagggaggccaaccccaacgggggcctttcaacacttttcaacatccgggaaaagcagttaaacagttcctctttcctttccaagcaactgaaatcagggacaaccccaggggcccgctttggggaaaaactgggg

SEQ ID NO: 164739 - DNA, 244 bp, Zea mays
  Clone ID: MRT4577_81820C.1
tcgacgtttgtgttggggaaggaaagaagaacagagaaactataaaggtgagggcctgaacgaagatgttgcgggtacgggcagggggagggcgcgactggtggcgggcagcggacccgtgccaaacaagctcactggggggttctggcggtcgaccggcggtcggcagtgggacacgcactgctctccaaccacagcctctcgccagtgtcgggcaagacaggttgctgcagggggtgcacct

SEQ ID NO: 164740 - DNA, 280 bp, Zea mays
  unsure (1)..(280): unsure at all n locations
  Clone ID: MRT4577_81821C.1
gggggggggggaaaaaaaaaagaaattttttggcangnngaaccagcgaactttttccccgccctcaaaaaaaattnggaaaaggaacagnaagcagaacgagaggtttttttctcgnttnaanncnnnncnncnncaccaactgggggccgccnggggcaaaaggggggggggtnctnctccacaggtcccagaaaaaaaccaacccccggtnacgctgctcccagtcntccgccttcccctttgcggtgtctgcntgggtcgccctccgggttccttt

SEQ ID NO: 164741 - DNA, 324 bp, Zea mays
  Clone ID: MRT4577_81822C.1
cggacgcgtgggtctttatgggcaatcacgaatcattgactgaactgtataaaggggattggtcactgtgacgctaggttctcagatgcgcacaacatgaccgttatgaagagctacacggcattcttcaagccacatgggatatcttattctgtagagagctccaaaaaaggttactgggcaccacctaccagggaagaaaatccgccacaacatcttgaattcatactttttttgcgttgtcggattacacatgtccaacgaaggtgccgttttcacgtttctcgctcacaccatcaaaccattgacctgtgcacatggacc

SEQ ID NO: 164742 - DNA, 452 bp, Zea mays
  Clone ID: MRT4577_81823C.1
ggggggaacttggtttattggtaaaaagggggcacccccgagggggtggcaacccattattcgggccaacacaaatttttttttctagaaggcggccccaacaaaggggggctggaaaaacatggggggaaaccccagggcccttggggggaacaaaaatgggaactggtggtgcaacaaaatctgcgaaacggggtcgcagggaccttggggcattattatttgggaaatcatgctcgggaagaccattggggacatcatgctcgggatcatcaagggggacatcgggttaggggtcatcatctggggcatcatcactgggatcgtctgaagcgggaaggccaacaggtggtggagcattaggggcggaccccccatcaagctgggaagcccctggtgcatcatgcaaaactgcatgcatgggttcatgggacccaagggcatgactgggg

SEQ ID NO: 164743 - DNA, 166 bp, Zea mays
  Clone ID: MRT4577_81824C.1
acaaaaaagggtttaaaaaagtggtcgttccgcccaccgattaaatgcaaccacttcttcttagacatactaaaccccccggaagagggaacacaacacccctcgggggacaaccaaacaagtatccccccaggggccccaaaagctttgggggggaataataatt

SEQ ID NO: 164744 - DNA, 1099 bp, Zea mays
  Clone ID: MRT4577_81825C.1
ttgggcacctcgaggccggccgggagtgggtcccgttcgggcagaatctctacgtcgcccggcgggaaaccctaaacatccggtccccactccccaatcaacctgccgccgcccgccagcaccaaacttccatccgccccgagctctgcctccgccgccgccgcgccatgaggcctctcgacgagaaggagacgactcaggtattcgagaagctgttcaagttcacggggcccaacctgaagcacctcctggagcgccccgcagtggagggccccgacgcggagcccggccgctactgcctccggcttcaccgcaatcgcgtctactacgcctccgaggcgctcgtgcgccgcgccaccgccgtgtcccgaccgcgcctcgccggcgtggggacgcccatcggcaagttcacccaccacggcgcgttccaccttacggtccacgcgctcgacctcctcgctgcgcacgcgcgccgccgcgtctggctgaagcccgacaccgagcgttcctttctctttggcaactccgtgcccaagtcttctctcgctcgcatcaccgagaacaccaaggccggggacggggtggtcgtcatgtccatggctgacgtcccgctcgggttcggcattgcggcgaggtcggcgcaggattgcaggaaggccgacaccaacgccgtggtcgtgctgcaccagtcggacgccggggagtacctccgcaaggaggaggagctcatgtgaggtgaggctactcctaagtcgaacatgggaattgcttctgctgctgctcgtaagttgcacatggcaattgcttctgctgctgccaatcatgaaaatggagttgatgatctttcttcagtaaaaacagtactggattttaacttccgtagtgtgaatgatctactaatgcttgtgcggatttcaaaggaacacatcagctgctgaagtgttcttgatgtttgatccaactaactctgcccttgttggatgtttaatccaattaactccgttgcttttttctgtttaatcaattaactccgttcttgatgatgtagcatgaagctgaatagtttcaaaagtacaaaaaaaaaaaaaaaaaagcggcc

SEQ ID NO: 164745 - DNA, 496 bp, Zea mays
  Clone ID: MRT4577_81826C.1
acagggttaccccaacaaaataacccttggggggtcgaaacattggcaggtgccaatttggcaaaatcaaagggggggggggggtcaagacaaaagggctcagaaagcccatttggaaaagggggagggccaaaacactattttttgggggaaaaaaacccgcttaaaaaaagggggggttttggaggggcccaaggcccccggggggggttaaaaaaactttttggacgggggggggcccccaaaggacttttttagcccgccacccgaaaggggttcattaattgcaaacaccccagcaaaaaaaaaaaagaccctttcccctttgaattgggggggcccttacaaactggggtcacttttagcttgccggggcttttggggccccggaaacccatttttttgacaagggcttcgattttttcaaaaaaaaaagcgggggggaaatttggggccaaactgattttccttttaaaagcattcttttttttaaaaa

SEQ ID NO: 164746 - DNA, 685 bp, Zea mays
  Clone ID: MRT4577_81827C.1
ctcgactctcctctccggatctgatatctctcgtctcgcttcgaagcgtaacgtaatgcgatgcctgacgtgaagtgaatagtccagtcccgcgtcccgtctatgttctgaacgcgcgccgcaccccttctgttctgggggacggctgcctgggctgcgcgtcacgccaaaagaaaaaagagaggtgaagtcaagtctactctgcagggtacgatgccatggctgagataatacctgtcctgactttactctactcgccgataagctgggacgcaaccacgccactcctcgtctctgatgtgcaggacactgccttgccgtaccaacacataacatacaactgagctgaggagagtgtcatgtgcttcgcttccacgacaagttgacgtggcgtggggtggggtcctctcctcgagtacaaccctaatcacatgatttgcttctcaaaatacatatcctatacgcctcgaatcgttctgggtgctgcactagaccctgccatgtctggtacgctagcatgggatgctattgtgttgtgacataacaaaaaaaaaaaaagcgaacctcgccttccgctccatgttctcttcactgaagggaagttgcactgctggcttgatcatgtcctgagctgatccgtgtgctgagtggatatgcgatccgcattccattccacataacatac

SEQ ID NO: 164747 - DNA, 346 bp, Zea mays
  Clone ID: MRT4577_81828C.1
caaccgactataatgaatccgagagacacccttacaaattattaaagcataccgccgttgcccgtaaacgactctgacataccgaatgcccgaacgagaaagaccttacatagcactacgcaacaagactatgagccagaccccatgtggatgaatccaggagtaattaacacgggcaatactactctacctatatcttgaacacctgctgttaccactaagacgattaccttttggtcgctgtatgctaatacaactactccaacgcattgtgctattcatcgaacttgacatactatgaaacgatcgtgaggacaggcacactctatgcatataggagcatcca

SEQ ID NO: 164748 - DNA, 797 bp, Zea mays
  Clone ID: MRT4577_81829C.1
ggcgattgggttcatcgaggccggccgggaaaatatcagtgtcaaaacaaaatgccttccgttgactcaccaagcatggcgacgcacttcatcacctcattcctgcccccagagctcgcagagaccgtccagaaacacatccttagcccacgctcgccagtccaggttgtcgtgcgcaacgtccttgtccaggcgcagaacgttatcgacacagttacgcctatcgtcgagcctatactcgaccgagtcatggtcctacttaccgaaaaccagggccttgttggcgttattgcatcgctgctcgtgcttgccactgttgtcatcatcctcaactggatccgccgtctgcttatgtggtggacacgcatggcgatgcgcattatgacatgggcctttatgtttgccctggcagcgtggatctgggagcgcggcgtctttgagagcgcgagggacatgaccgtcataggcgccaggattttgggatacctggccgtcatcaaggacgtctggctgcaagagtacgaccgatacgaggcacagcagggcatggcaggaacaagaggtcctgcctcaggacgatccagataaacactccatttgatgaaatgtgtaaggcctacagtcattctgcgaccgttatttggctggccacgatacgaaattggttggataccccaacgagatggaaaacgacaaagaaacacgaaaaccgaacattgaatagcatcaaccattacagcaagcacaacaactacagggcagggcattgctttcattctatgacgaaaaaagtgaaa

SEQ ID NO: 164749 - DNA, 951 bp, Zea mays
  Clone ID: MRT4577_8182C.1
ttaacaaaaaaaaaaaaaaaaaaaaaaaaaaaaaaatggctcgccgactctgccgtctccctcgcctctttcccctcgtctcgtctgcatccgcctccgccgccccaagacctcatcacctccccttcgccgtgaaccctaaccccgcgcccctcgccccctccttctcgtcgtcatcgccgcccgcttttccgggcccccatcgcctcttctcttccacgagtggttcaagcatggtggtcgtgggctccgcggactccttcaacagcatcttttccaaggtgcaagatgaaaagctaccagctgtcttttactacacggcggtgtggtgtggaccatgtagggcgatcgcacctttagtatcaaagctgagcagccagtatcccaagataccggtgtacaaagttgacattgaattggaaggactgggaaacaaactccgtgatctaaacatatgttcagtgccgacgttccacttctatcacaaggggcagagaattagtgaaatcgtgggtgctgatgcaaagaaaattgaagctaccatggaaagtctccacaagcagcagtagaagtttcagagcagagcctcaacctcacaccaatggaatggtttaatctacctcgcatgagaagtgttgcgcacttttggattcgtgtttttctttacgtgtcacaccgtgtgaacgccagcgtttcgtcatcagatgcttgtgattcgtgccggcttgtttcatgtgaagacatcagatgcttgtgtttcgtgccggcttgttttgagttttgggtcttgagcttcggcgactctgtccagagctgcggatgtttctcatgcttggaatgagtgagatgggttgaaaatggccacccatatgcaaaaaaaaataaaaaaaaaccaaaaaaaaaaaaaaaaaaaaaaaaaaaaaagtactctgcgttgttaccactgctaag

SEQ ID NO: 164750 - DNA, 286 bp, Zea mays
  unsure (1)..(286): unsure at all n locations
  Clone ID: MRT4577_81830C.1
ggccgacgggctctttgagacgcgtgattgggacggtaacaactggaatacagatatcttagatgaatcgcggagaccgctctgtggtaaggtgttgagtgggaactgtgtgtgccacgattcatgggcacatgtgctctggatgcctgccgccttatcatggggggggtgatatntggcttggtgtgacaaggagttgggttccttgttgtgggatatgttgtggtttgttttgatgtttgtgttgagggttctttgtggttatgtgggtgggggtattttgttt

SEQ ID NO: 164751 - DNA, 498 bp, Zea mays
  Clone ID: MRT4577_81831C.1
ttgggtacctcgaggccggccggaaattcgtgtcctgttatctggagagagtttgttccgttcggggaaccagaaagctcgttgttccgccgcgcagatgaatatgagagtcagaggtaggcatgtctcgtacgaagcataccgcccggaagtccacgggaggtaaggccccccggatgtagttcgccatctagggcggataggaagtcggagccgatgaccggcgaagtgaataagccctactggtacaggtctcgggacagtggcgctgcgcgagatccgtaagtaccagaatagcacgccatctcctgatccgcaagttgcccttccagagactggtgcgcgagatcgcgcacgacttcaagacagagctccgggtcctgagccacgccgtggtggggcttctagatgacgtttaggactagcttgtaggcctctttgagtacaccaacctctgagccatactcgcttatcgtggcaccatcatgttcatgggca

SEQ ID NO: 164752 - DNA, 357 bp, Zea mays
  Clone ID: MRT4577_81832C.1
cgtgagcttacaaccatccccaccatcggtttcaatgttgaaactgttgagtacaagaacattagcttcacggtctgggatgtcgggggtcaggacaagatcagacctctctggaggcattacttccagagcacacagggggaccatttatgttgaggatagaactgaccgctaacgcgatcaacacgacagagttgagatgctgaacaggccgctcttggatgagctcccccactgctgtgctgctagtcatcccgaatccgagaaccattttaccgccttgaatgcgtgtcagatcactgacaggctccggcttacactccctgaaggagacggcactggtacatacagagcact

SEQ ID NO: 164753 - DNA, 369 bp, Zea mays
  Clone ID: MRT4577_81833C.1
taggggccttttttttttttttttttgagcgacaaacgatttgtcatagaatgacacacagcaacgagacagtaatcacaaagtgcaaggcaatttttttaaggaatgacacacagcagcatcttaacatggtttgctcagttctaacaagtctcaaaactgttggaacatagataaatataagctgggactacgagcaccaacatgccccctgacagaacacaaacttagcgcttaggactgcctgttcttcttcttgacaccggacttggcaacctggaggctgcggtacaccgagcttagcctagcaagagctggcttggtcagatcaggcctgtagcccgcgtactctgcgttgttaccactgct

SEQ ID NO: 164754 - DNA, 260 bp, Zea mays
  Clone ID: MRT4577_81834C.1
catactccgtcgcttcaccactgcactcgccgcaaggctacgtgcgccgccgtggtcgatcacaggttgatgctcttccacatcgttctgtcagcgcgcacatgcagctgaaccctcgagcacttcgagatgtacctcctcgacaagttgggttccaagctcgttccgggcgtctacggcatcctggtcctgccggcacgagttcgttgtggcgatcacgggtcttgaccacatcgtcaaggtgctcgtccgcgatggca

SEQ ID NO: 164755 - DNA, 406 bp, Zea mays
  Clone ID: MRT4577_81835C.1
cccaaaatcgcctctgcactcaatacgcttctgtacgtcttcgtgactacgtcaacaccacaaattactttcccccaagttcacctcccagaaatcaatcaaaatgcccaaggctgctgctggtaagcgcggtaaggccgagaagaccaagcgcggcaagaaggaccccaacgcccccaagcgtggcctctccgcctacatgttcttcgccaacgagcagcgtgagaacgtccgtgaggagaaccctggtatctctttcggtcaagtcggcaagctcctcggcgagcgatggaaggctcttaacgagaagcaacgagctccttatgaggccaaggctgccgctgacaagaagcgatacgaggatgagaagcaggcctacaacgccgaccaggaggaggaagagtct

SEQ ID NO: 164756 - DNA, 385 bp, Zea mays
  Clone ID: MRT4577_81836C.1
cgcatcagatctagcgccgcctccttcatcccgctggccggcgagctcctcagcacgatggataagaagaccaaaggtataggttggggtggtgctggacataagttactggcaatgatggctatgaatattcattcttaaaaaaggaaaccaaatgcaagggggattgggattacctattcaccaatgcctgaaagagattgaattattattggatattttaacacaaaattggagggattacaccacctgtattaacctggatattatggaaagggcttggttcttttaacttacttaacattttaaagagtgggggttactttaagacacttttcatatgtgtgttgaccaacaagtgggcatgtttctaaataccattggg

SEQ ID NO: 164757 - DNA, 1225 bp, Zea mays
  Clone ID: MRT4577_81837C.1
agcgtgacttatgttatggattataagaaatatcaaaaggttggaggatgcttgcacagccacacatgtactgttggttggggaatcatctcccatcatcatcgcaagaattcagttgcagagataggaaaaggacagcttttagtctgatactagggtatgagacgatagttcgtagacagttatgtcatttagggggttatttcaaacataaacttgttttactaaactgactggacgcttgtgcccctggccataatcgtcgtcgctcatggatcggtccggttccagctgccaggttccaggatatcacgggacactgggatcgccaccgagcgccagctcctcgccgccatggtggccgtcgggttcttcaagacgtcgttcattgcgctggccatcgtgctgatcgaccgcgtcggccggaagccgctgctgtacgtcagcatggtcggcaggaccggctgcctggcggcgctgtccgccgctctcttcctgcaggcgcgcgggtcggtgtcccgtggcgccggcgttggcgtcgccatcctgacggtgtgcaacgacgtggccttcttctcggtggggatcggtccggttccagctgccaggttccatgttgatgggcagggcatcgtccaaggactggagcagggcatcatgccgaggccttgcgcctgaccttccacggactcctcctcccgtcgctgccctccttgtcggacgcggagttctcgccgatggaggagctgtcggacgacgccgcgccgatcgacgaggcctccgacagcgcctcctcctccctccccgccgccgccgcctcaccgccacgctcttcctcttccttctcacgttcttggaccaagtacccgttggcgtccctcatcctgtccgcgtcctccggatccggcttcccgctccccgactgccggaagccgccgtgcgccggccgcgccaccgccgtggacatgcccgcgaccaaccaacctacctacctacctaacaaccgaacctaccaaccgaccgatcagcgaatccggcccggcagagcctccgccgcggcgcacctcgggccccggcgcccggatcgaccggccggcgcgcaggaggagagccgcggagcgattgagcgaaggcgagaaatcccggcgcgcgcgagcgagatgggtgggtgggtcagtgggtgggtgggcggagaggcagggagggggaggcctcgtgccgaatt

SEQ ID NO: 164758 - DNA, 336 bp, Zea mays
  Clone ID: MRT4577_81838C.1
ggggccaaaaaatgggcccaaaaccttgccgggacggtttatttaaaggggggggtatgggcccgggaggcccccaggggtggatgcaaagggtccaaaaccttaaccccagctaaattatttggggctttttggttcacttgccccaaaaaggggggggccaagggccaagccccctggacaagtttgtttaacccaaacaaaaagggtttaaaaaaagcttttaaaatgaaacaaccattgggatccttttgcccgggcaaaaaggggtccaattgggcccaaagaattttttttcccaagggggcaaggacatgggaaaacttaaaacccaaa

SEQ ID NO: 164759 - DNA, 502 bp, Zea mays
  Clone ID: MRT4577_81839C.1
ggggtgggggggggggttttttttttttttttttttttttttttttttttttttttttttttttttttacctgagaaacctggggttgatttcacaaccctaggaggaaaacaatctccctaatttccacctttttttggaacctttaaacgggggtgtggggcgggcaaggcttattggctaaacatgactaggagggggggggggcggggaaacacttttccctgatctctccctcggcgccggggagcacctgggccttgcccattttaaccatgggcttggggaacttgacctgccatgcctttttgactggggggttgaagggggccattcccgcccccccggggttgtttaacagggtgttttcaaaaataaacaagaccttttgccccagcaccttcttttattcctggttttccaagggcgcccgggtgactgggtcaaacggccccacccggggggccattttggccttcctgggcgggcaaaggcacccccc

SEQ ID NO: 164760 - DNA, 119 bp, Zea mays
  Clone ID: MRT4577_8183C.1
gacaagtacgagctccgcagcgagaacaacatttcctagaacaaccgtggggcagtcaacaacgagcgcgatggctgctcgtgagagactagacaccgaacatcgattcgatcgtcgtc

SEQ ID NO: 164761 - DNA, 2638 bp, Zea mays
  Clone ID: MRT4577_81840C.1
gccgcccggggcggcagcggcggcggcggcggcggaggtgggcccaggcacgtgcgccggtcgcattccgggaaggccatcaaggtgaagaaagatggagctggcggcaaagggacttggggcaaactaattgagactgacgcagaggcatgccttgatcgaaatgatccaaattatgacagtggtgaggagccatatgagttagttgaggcccctgtttcaaccccactagaagactacaagaaatctgttgtccctttaattgaggaatatttcagcaatggggatgtaaaattagctgcttctgatcttaaagagttgggtcatgatggtttccactgttactttgtcaagaagcttgtttccacagcaatggataggcatgacaaggagaaagagatggcatcagtgcttctgtcgtatctttatggcaacgtggtcagttcaactcaaattaggctgggatttgtgctgctattagaggctgttgatgacttggctgttgacatacctgatgtggttgatgtgctcgcccttttcattgcacgtgcagttgttgatgacattctgccacctgctttcctcagcaatgcaaaagtgagtctgtcaggatcttcaaagggtatgcaggttgtacaaattgcagagaaaagctatctttcagcaccccaccatgcagagttaattgagcgacgatggggtggttcaacccacatcacagtagaagaggtgaagaggaggattgctgatcttctgaaggaatacatcagaaatggtgatacagctgaggcttgtaggtgcattagagaattggcagtgccgtttttccatcatgaggtggtgaagcgagctcttactcttggaatggagagtccagctgctgaagctcttattgtcaagcttctgaaggaagcatctgaagaatgtttagtaagctctagtcagatgatgaaaggattccaccgtgttgctgagagtcttgatgatctcattcttgacataccatctgcaaagtctgaatttcagttgttggtatcaaaagccatttctgagggatggttagattcttcctatgtgaactcaggtgtcaacggaagcgttgaagacgatgaacatgagaagctggctaggtacaagagggaggctgtatccataatacacgaatactttttctctgatgatacaacagaggtcatccgtagtgtcaaagagcttggttatccggaatacaatccgatcttcgtcaagaagctcataacaattgctatggaccgcaagaacagggagaaagaaatggcatcggttcttctcccttcattaagcatggagctgttctcgtctgaagacatcgccaagggatttgtaatgctccttgaatctgcagaagacaccgcgctggacatattggatgcctcagatgagctgggactgttcctagccagggctgtgattgatgacgttctcgcacctctaaacttggatgagattagcagcaagcttccaccaaactgcagtggggctgaaacattgaacatggcacgctcccttgcgtcggcccgtcatgccggtgagaggcttctgaggtgctggggcggtggaaccggatgggctgtggaggatgccaaggacaagataacaaagctcctggaggagtatgagagtggaggcgatgtaggggaggcatgcaactgcatccgtgagctgggtatgtctttcttcaaccatgaagttgtcaagaaggcgctcgtgatggcaatggagaagaagaacgagaggaccctgaacctgctgcaggagtgctttggtgaagggatcataaccatcaaccagatgaccaaggggttctcaagggtcagggatgggctcgacgatctggctctcgacattcctgatgccagggagaagttcctttcctatgtgcagcgcgcgaagaagagtggatggctcctgcctgggttcggtgtggcatcttcggcttgaacagctgggcagaagagaagtacgaagctgaagcggctcagcaaacccagtttggatgtgtgttttcgtcgttcgtggttgcccttgcgcctaggttagcggagcgagcccttcctggttgcggtggtggtggcttgtgtaggtctcgcatctgacatgttcatgctgttcttgtttcatttcatttaactctccatagaccctttttttttacatcaagctaaaacagagaagagaaaaaaaagaccatgttgtaaaagttctcccatgctccgcctgcattgcggccggttttttcatcctcatttagctgcaatcgtgcgttcctgccctctcatggccgccgtagctgtttttctatgccattggatgcttggattgtgattgctagtttgttactcttttattctttgtggaaatggtgtggcctggtgaatgcctggattgctagcatgcaccgccggccgcccggcactgtatctttcgatgctttctttgttttatgatgcgacgaatgctcatggacttggatttcagagactatggcatgggtttttcaaaaaaaaaaaaaaagaagggcggccgccgtataatgagctcgtccacccggtaattaattccgcggcggtaccatgcaggagcaccatccaacaaaata

SEQ ID NO: 164762 - DNA, 235 bp, Zea mays
  Clone ID: MRT4577_81841C.1
cctacactttcgccttctctaaccaatttttccgccaggcatttactaaagtgcgcgggttttttacatcaaagaaatccaccacaagaatctgttatcccctatccaatccctatcacctactataacaccaggtggtacatacattatgctgaatgtttctttacttcaatctatgcccaacttgtaatcaacatatatctactttaattctcgacttccatatcattcatat

SEQ ID NO: 164763 - DNA, 285 bp, Zea mays
  unsure (1)..(285): unsure at all n locations
  Clone ID: MRT4577_81842C.1
cccccccaaaataaaccttatttttcccgnngaagccgtccttaaatttcttccccaaatcatcaattcccaaaagcttcctcaaccctcccttaaaaaacccaaactttacccctgtcccctttaatacaaaaaggtctcttcacttctttaaacaaccaattaccttccaccttccaattaaatacacatggtgtttcccttcattttaaacccccccaaaacccctttttttttctcctattaacctaattaaaccctacccaactccccaattttttaaaa

SEQ ID NO: 164764 - DNA, 746 bp, Zea mays
  unsure (1)..(746): unsure at all n locations
  Clone ID: MRT4577_81843C.1
agcagtggtaacaacgcagagtacgcgggaaaacatatcaccacaaccataaattatcacctaaaataaaagtgaaatcaatttatctgctatattataataattacataagtgtcatattgtaagatgtcataaaaccctacatacaatgtctcctaattcaataacacaaacatcggctggacaggtctgcccatccacaagaactaaagacattgactgtattcactattttatttcatcagtgacatgaggaacaacctagatatttgaaaccataggtattttagattactagaaaaagatagtgccctatcgggcgctgtcccaatctcctcagcgctttctttagtcccttcaatccgaaaatgcaaatctgaaagtgcaacagtaatgcaaagcaaaacttaaagataggataaggagatcaagttccatcacagaataaagagttcaagtagcatgtggaattgtggatatgttacttttaatgtaatagattcgtcttagaaccagacattttctgttggaacaaatccagccaagaaaatattgataccctctcggactgagaatggcaatgtaaccacaccataagcacctggtttgccgtataaacaataagaaggttcgaggacaaaaaagtaagaaaccaagactatttattatattttaggaatcaacagtgnaaaatagaaccaaatgatttctattggaaagtgcagatacattcatgctangcgatc

SEQ ID NO: 164765 - DNA, 544 bp, Zea mays
  Clone ID: MRT4577_81844C.1
ggccgcccgggcaggtgctttttttttttttttttttctttgttcttcttttttttttttttttttttttttttttttctttttttcttcagtggcaaccatggtatttcccctccttatgcaagttgctctttctacacccttggggtacacaacgacacttttgactcgggaaagcaacctcttatttctgggtggcccccccatacctccaaaaaactttatttttggattgcaacaaacccacatcttaaaagggggcccctccaacaaggtgtcgctggtgggaggctcctgggtttgccaaagcgagttggccaaagggcaacaattgttgtagtgcaaaaaggggtgcggggttaaccgcacactgcttgtaaaaaggcagcacctgttgctgtgtcaaaaaggaagcacgacttgctgcagctagctcgctaaatggcagaagtatttgctgttgaaaataagcaggggggttcaatgcggccaattggttaaatggaaaaattgctgttgctgaaagtaggcactagctacctgg

SEQ ID NO: 164766 - DNA, 705 bp, Zea mays
  Clone ID: MRT4577_81845C.1
ggccctaggggccttttttttttttttttttagtacgtactacatacacacattgcattgcaagtgacacatgattcgatacatcaaggtttcaagatctttgccagatcctgggctcagcttgcagtgtcctctctaatgctaccactgatcgctcgaattcctactggaaactggagaatagctaatacaacacgagaacttttatgtcctaacattagcttaaactacctgagctagtagtacatcgcacgttacaaaactggcagctacctacctacccctaccccttcctcccgctcgtcccacggctacgacggcgccgtctccttgaagctcttggtgagccagatggctgtctcccggggggaagccatctcggggccgaacggcttcagcaggatgccaagctcctcgtaccgctcctgctgcagcagctgcgcgctgaactccagcaggccctccagcgcctcggcgcgctgctggtacgacgacgtgtcgaaccgctgctgcaagtgctgctgctgctgcctcgacgacgagtcgctggacccacggctggacgcagccgtggcgttgcgccccgacgagtcgctcgcggcggcgtccctcgtgccgaattgcggcgccaccgcctgcaccgtgtacttgtccttcgtgatggaccgggtgctgaagggaggcgtggagcaggacagcttcttg

SEQ ID NO: 164767 - DNA, 270 bp, Zea mays
  Clone ID: MRT4577_81846C.1
ccttaggggggtgaaaccgattatttaccaacccaaccaccccccaattaaggttggccacccagttgggccaaattgtcccaaaaaacattgggggcatcccaagttaatttggccccccttaaaaatacctgatccaaattttaaagtggaccaggccttaaatcagacaaccagttaacttaaatttttaggggggaagaagcctggattgctaaaaatacctaaaaatgtttttggcgagcacacagggggcccaaagaaaaagat

SEQ ID NO: 164768 - DNA, 565 bp, Zea mays
  Clone ID: MRT4577_81847C.1
cacaaaagcgtcacaattataatatcattcacaactagagcatttacagagagagagcgtagatctagatcattcacaaaagcgccagagaggagtcaggcacaaaagcgccaccagcgacatcactccagggggaggggaaattggtctcgtgttaccacacaaggtacaataatttcacaatattgccttccaaggggctggcctccaactggggggcgtgggttaggtgagaacaattggcctttacacagataattggtcaccgggggttggggaaaaatgggggagcggggaaacagggcttgggatttttttctctcacttctcagactctgggaggcgcctttcgggcatcctcaacagaatagctgcgatgggagaggtgtgtcggactcaggaactagccatttccaacggggcagacaccagaaagcgaaatccccatgcggaggaaactgggtttggggtctaacgacaccactggggagaaggccgaggaccacggggtggataagcgcaaggggctgttcgggggaacggggcgggttgctggacttcctgg

SEQ ID NO: 164769 - DNA, 357 bp, Zea mays
  unsure (1)..(357): unsure at all n locations
  Clone ID: MRT4577_81848C.1
ttgnccggagacgaaatttcgtggcccacgcgcagtgaccaagtgaccaccctatcgttaattatgacatcagcataacaaaaaacttagtaccagtattagtgggaagaacacaacaaatgcattactgaaggcggataagtctgttctccagtgaattaacttatgtaaaaactgtagtgacacttagattagaccatgacctatggtttgatagtgtcattttagttaaatacatagcgctatttccccaagtttctaaaaaagagactagtagattactggtttactgatctttccatttctcttaacctcttaataccttagcattagcggcacattagttagtgaggatgt

SEQ ID NO: 164770 - DNA, 295 bp, Zea mays
  Clone ID: MRT4577_81849C.1
gccgtcttttttttgcacctccatttcggcctctgtcccttgcaagggcaatgtcacctccaaccatgggtaaagagaactcccacatcaacattgagggtattggccatgtcaactctagcaagtctaccaccacaagacaccttatctaacaagcttggaggcattgacaagcgagtgatcgacatgtttgagaaggaggctgctgaaatgaataaacggcacttcaagtacgcatgggcgcttgacaagctcacggctgaacgtgaaagacgtatcaccattgatattactc

SEQ ID NO: 164771 - DNA, 541 bp, Zea mays
  Clone ID: MRT4577_81850C.1
aactctacgaagatgtgaatataagaaagtgtgtaaaagttttcaacaacgtacctaatcaaatgacaatggcacgtacatataatcgtaccccacattgatatatactataaacaaacaaatactatttggatcgatatatatatggcgctccttggattattcaacaaattaataatcaattaataaatcttggcgcgggctgaagacgcctgcaccttctcattacctgctccacccgtttccctctttactatcgcctggtcaactctcattatcgccttttatttcttttctttgagaacagccttttttttacaggcttatattgtgcctgcttccatcataatccttataaccacctatttcttcttcccccttttcaataacaacttcacttctttgttctttccttcgttgaagccacccttcgtttctttcaattttccatacccttcttaatctttccggtgcactctttcaagcactgcacatttttttttccttatcacttcttttttccccccattttttccccttt

SEQ ID NO: 164772 - DNA, 330 bp, Zea mays
  Clone ID: MRT4577_81851C.1
gaatagtgagccattagtggaacgaagctattagtggtgtgggagtgttggtgagataaccctgttacaaagcagactctagaatccccgtatcacgtagatactacacagaagaatgagaacaacgacgcactacgccctagtacacctaaagctcctcgacaatgccctcaagaggaagaacggcgcaaagagggaagccaccgccgccatcatgatgcccgcaagaatgccataacatgtagaccaccatccggagccaacgtcccggcatccatgtccgaaacatctcacccatcgttcacatcatgatttaccaaccacggtagg

SEQ ID NO: 164773 - DNA, 2691 bp, Zea mays
  Clone ID: MRT4577_81852C.1
atggagttacagccgggccacacggtggagttcggcacctcgaggatttcctcagttctcatgcaggagatgcagcagctggggtactttggtgacggtgttggccgcgtcctgggcgctgaggagattccagagcctgagggcgaattagttgtgtttgaggcattcttcatcgccggccttcgccttctggcgcatcgtttcgtggcggaggtcttgcagaggttcgatgtccaggtccaccagttgacacctaaagccgtggttgccctggcgaatggggcaactggtgagactattggttttatgtttcgggaggagaagtcgaagacctcccagggcttcctgcggccatcatgtgctcccactattacgtggcattcccaccatttgaggtggtggaggacgatgaggacgatagggccctccgaggatggagcagtgaggattgtggggcgatatgtgctgaggacggaggctttgcggagttgggatattcgtggttccaatggttgttttaaccgtgtcttcgagttaaaccgtctgccatatggcggttaccctggagacgatgctgctactactgtcgatcgccggggaaaaaagccagcggctgcggctgaggaaggcccttcacggggagctatgtcggccactaaaaagagaaaactaggtactacagctgaggggttgggggtctccgatcgttttgttgtggatttaatgggaacttgtgcaactctcgagggaaggatgtcttcgctcgagctccgggaatcttcggcgcgaatgctggaggttaccgtgggttgctggccaaggaacgttccgatcccctgggtggccggcgaggacatgtttacgtctcgtttggcccatgagatgaagatttttccttatggacgaaatattgctgctgttgtaacgacagtgatggacaaggatcgccaagatgcgaagcggaagcgtcagacgttcactagggtcagggaccctagtcgcgaggtcaagagggcgcggggaatcgtgaagtctgccgcccccggcagcagcaaaccaccgccggctgcgaagccagccgtccctgggcccagcaaatcttcgtcgggtgcgagggatgtcgcttccggctcgagcaagccggcttcggctgagcccatgaaggagcgagggccaccatctccactacgcaccgccgaggcggcggcgggtggggccgatctcgccatggacatctgtgtggatgactaccgcgtgggtggtgtcatgatgttcgatgcccacatgggccggggacttgttgggactgggtcttggacaagattgtggtgcagggttggatgctgggcaactgactattgtcccggctccagtggtggccgcgctggctgcggcggcggccaaagcgaagggtgcttcgcaggacccatggcggctgccttcgttgatcattttgcgtcgggcgccctaacctcggagttcgctgctgagaggcaacgactcgagggtaggattgagtgcctccgggcgcagcatacggaagctgtgcgggacaagtcagctgcggaaaacaagagccgcaggctgatggagaagttggcggctgcgaaggccgagaaggaggacctcagccatcagttggcggcagagaggaaatacgcaaacagagcctgcactgaggcgcaagctgcacaaaccgaggccaaacttgcgcgtgcggaggccagtctcgctcgccaacgcactgaggaggtggaaacgagccacaacagcctgcgcgaccgcttggacaaagcggaggcctctactcgcgcagaggtcgaccagacgcatgcacaactcgtggacgcgtaccgggagcttggtgcgcggaccgctccctttgatgcgtccggtaaggaggtgggccttcgcttccttagatggctgcaggaggagttggaggttgaggacccgatgctgaagcggttggccggggcactttatgataggatgtggggccctcacagccgtgagactgtccgagagaggtccgaccaggcgatggagcagatggcgcatgatgaggaggtcaaaaacctcggggacctggatagcacactgcccgaggcgtcaggtgcgaaggaggggactggggaggatctggcgccgccatccgatgttggcgagggccccttggtgacccccgcgccgacctgtgttggcgaggaccccatgccggctgctgcgccgaccggtggggacacttcggtggtggcgggcgaatcagctaccgaagaccctgcggcgtcggccggcccttcgcaggttccgacgtatgggcctgcagcaaccgctgctgacgatactaattttgtggcagccgcaaccgtagtgcctgccaatgacaatttatctcgttctggatctgggtctttttcgtctgatgatgtggccgcgacggagtcctcgccgcgggtggaggttggcgaggtggctgatcttcctagtgcgaggaccaagtgccggcgacgaagggtggtgttgaagcatagcgtgggcgaggtttcgcaaagtggtaggcaccgtcgaatggggatggagcaggaccgtcttcgagtagaccggtttggtaaacaagagctattgtcttcgccgattgggacgagcattggtgagggggatctgcagaatctttttgagggtgagtaa

SEQ ID NO: 164774 - DNA, 363 bp, Zea mays
  Clone ID: MRT4577_81853C.1
atcttttttaccaacttttggggcagttctggggttttatggtttttttacctaaaaataaaaccaagaggcacatgctaaccaacaaacgatcgatatattcatcatcagtcagtaatggtgacaccaacagcagcccgcaagattagcaacaaactccagcgcggtggtgagcgtaacagcaccaaaaaaagtaggggcagcggcaacagtgataaccatcatccgcatcaagtgccgaaaacggaaatgaggaagggcccgtggacagaggacgaagaccctcagctgctccgatgcccaccagcagcacaaaagcatcaacacgacagccggaacagaaagacggcgatggcgtcggcg

SEQ ID NO: 164775 - DNA, 441 bp, Zea mays
  Clone ID: MRT4577_81854C.1
aatagatgtaatcatttattccgttttttgaccgcgcgcataacattagagcaggacagcagtggaggccgtacagaaatatattgacgacaagaatcacctcccgctcgacgaggatgacatcgggctcctcaaaacctatggactggggccttgaatgtctcacaatctggcagacctggaggacatcagggagccggcgctagcatagactacctctgtgcgataagggattgctagacctgaaaggctacagctactcagtggacttcggtaatcgataaaccaaaggtggcacgaggaacagccgcttcaacatccacgatgtgcaaaaattattagccctaacaccgatgatgccaaatgtgtgatacatggaagaccagagagcattgtcagaactactgcaccttcatggtaaagagtatggatggggctact

SEQ ID NO: 164776 - DNA, 1210 bp, Zea mays
  Clone ID: MRT4577_81855C.1
accggaaagaggcgctcagcatcttgcgtgacatgcgcggcgcaggttgcggccccaatgtcgtgacttacaacacgctcgtcgcggcgttcttcagagccggggaggtggatggcgcggagaggctggtcggcatgatgcttgagggcggcttgaagcccaacctggtgactttcaattcaatggtgaatgggatgtgcaaggctgggaagatggaggacgcacgcaaggtgttcgatgaaatgatgagggagggtttggcgccggatggggtcagttacaacaccttagtgggtgggtattgcaaggcagggtgctcgcatgaggcattgtctgtgtttgcagagatgacacagaaagggatcatgccagacgtcgtgacatttacgtcattgatccatgtaatgtgcaaggctgggaacttggagcgggcagtgacattggtgaggcagatgagggagaggggcctccagatgaatgaggtcacttttacagccttgatagatgggttctgcaagaagggattcttggatgatgcattgcttgcagtaagggggatgaggcaatgcagaataaagccttcagtggtgtgttataatgcacttattaatggttattgtatggtaggaagaatggatgaagcaagagagttactccatgaaatggaagctaaaggactgaagcctgacgttgtgacatacagtacgattatcagtgcgtactgtaagaattgtgatacacattctgcattcgaattgaaccaacagatgcttgagaagggtgttcttccagatgcaatcacctactcatcactcataagggttctttgtgaggagaaacgactcagtgacgctcatgtgctcttcaaaaatatgattaagcttggcctacaacctgatgaatttacatacacatctcttattgatggccactgcaaggagggtaatgtggagagggctctttctctgcacgataaaatggtaaaggcaggagttcttcctgatgttgtgacttacagtgtgcttattaatgggcttagtaaatcagcacgtgctatggaagcacaacagttgctcttcaaattgtaccatgaagagccaattccagcaaatactaaatatgatgccctgatgcattgttgtagaaaagctgagcttaagagtgtgttagctctcttgaagggattttgcatgaaaggtttaatgaatga

SEQ ID NO: 164777 - DNA, 1126 bp, Zea mays
  Clone ID: MRT4577_81856C.1
tctcccttcacataacgcccttgtcactactacctagttcatactacgcccttgacactagaaatctagcaaatatttaacctttccgttcaaccgttaaaatccaacaattgattaggcacaaagaccatataagccaatcaatctatattatcgtgacctaactcatattctttctacgaacacactttagtcataataattcaataatcttatattactattaatcaccaaaactcaactaggagctagacgcctagacactttcacttttcattcttttataggcgtggtaggcatgccatgcacaagccactctatcgtcaaaccctcgatatcgataaatacagtaattgaggacatgataccctgccaaatgggaataaaaaaaacaatgacaccaccagaaatacaaccattcggtggacttgatttcttttctttaattccacagcttcatctgttgttttcaagtataatatgtacagattgccttgcaatcctgaataatgccggatcttggacatgtaccatacttcaggtcaatactgatccagcacacctagatagcaatgcatgatggagaaatatctagttttttctacaagggaagtgcaggttcttcagctttctttatcatcactagagcctcctttcaatgacttgtacaagtacttcttccttagcttgatggccaagcgtacacatctttttacatttattttgagcacattatcattgaacatcttgatcgcatcatctattgagtgagtccctcttattatcttctggcggttaattatcaagattgccgccacacagaatataggcagttcataatctccaccctttgctagcacacttgcacttggatgtggcatctgctgaggtcttgcccatattgtagcacctgacaagccacagagatgatttcttgtactagatttcattccagagtggcaagctccacagatttcaccatttctactatggcatttcctggttctggattttcttcttgtggaactgttgatccgatgcacttctttgacttcacatgataagccattgctcagatctactagcaatggttctaggcagttctcttctaaatgcctgactgctt

SEQ ID NO: 164778 - DNA, 1049 bp, Zea mays
  Clone ID: MRT4577_81857C.1
aaatgaactattacacattttttcaattattgggacgtaaaaaagctcggatatcattccccagattcagattttctgatctagaatactcctattacataatactatattttgctaacttgctcctctgaatgtacgtactcaaatttcatcagcatatggatggcaggatgggtgctttgagtgggaaatcaatcaaccctcctatctcccttctctcaatccagccctctttacaatataccaacacaggggtcgtatgaatcaatttgggatacaaaaagattacagcatcgtctaataatcaaaatgcaacatgagaacatattgttgttagcatcgataataatcaaaatgcaacatgagaacatattgtcatatgtaatctaagagccagacgtaggtggcagtatggcatatatggctgctttctgttggttgacaaacctgtagcttcaaataatcatgcaattatgccgcccatatatatcagcatacccttgtcccacacaatccctacttgcagtgcagacatctcttcatagaaagaatcttttgacctgttccagagttaagaacattatcacattccatgacccaatccgacaaaagtttgcaatgaatcccttgtagaaagcacaaggtccatcattctttaatgtcttggtaaaacaatcaagagtacttctgtacattgaatcacccatcattcttgatttcaccacatccaccggagagccaatgcaaacagcaaaaaacccagcaccaagtccagctaaaagatgcgtaaaaacgttatcagtaaacccaggaagttttagaaacatctgtttgaactgatcatagctggccaactcggcagcgttaattatggcattgcgtgcgacatttggaccaaggccagtccacaaagctccaataccttcctgtctgattattgtagcatatgcttaagggctccagaataactcctcttgatagtgttagcttttccatcagcttgcaacctaactttgacaagatcagttggatttgccacaacaatcgct

SEQ ID NO: 164779 - DNA, 370 bp, Zea mays
  Clone ID: MRT4577_81858C.1
tcgtccacgcgtgcggacggcagccaccaggggagctttttaaccaagggtgccgttgccacgcctgcagcagtcacgggggcggcgctgtcgcggaccctggcggcggctcaccctttcctgcgcggtgtggatgcggaggtggaccctgcgctgcctggcctcgccaccgggctgggcggcgcggtctcacgcaactgctggcaccagctcggaccgttccttggcgcacctgctgtacgtgcacgggctcctgcgcctggggggttcgcccggcaccgaggcgcgctggggactctaccacatcgtcaactgcaactgcgacttaaacggggccagtctttcagtctgacaccgcgcgcgctcactt

SEQ ID NO: 164780 - DNA, 880 bp, Zea mays
  Clone ID: MRT4577_81859C.1
gaagtagtgaacagtgtcgctctctacaatataccaacacagtggtctgtatgatcaatttgtgatacaaaaatattacagcatcgccacataataatcaaaatgcaacatgagaacatattggcatgtgtaatctaagagccagacgtaggtggcagtatggcatatatggctgctttctgttggttgacaaacctgtagcttcaaataatcatgcaattatgccgcccatatatatcagcatacccttgtcccacacaatccctacttgcagtgcagacatctcttcatagaaagaatcttttgacctgttccagagttaagaacattatcacattccatgacccaatccgacaaaagtttgcaatgaatcccttgtagaaagcaccaggtccctgtaaccaacttttcaactgaattaatggtcaaagcacaatacgcttcggattaaagccgactgtttggactgctgcagatcattctttaatgtcttggtaaaacagtcaagagtacttctgtacgttgaatcacccatcattcttgatttcaccacatccaccggagagccaatgcaaacagcaaaaaacccagcaccaagtccagctaaaagatgcgtaaaaacgttatcagtaaacccaggaagttttagaaacatctgtttgaactgatcatagctggccaactcggcagcgttaattatggcattgcgtgcgacatttggaccaaggccagtccacaaagctccaataccttcctgtctgattattgtagcgtatgcattaagggctccagaataactcctcttgatagtgttagcttttccatcagcccttgcaacctaactttgacaagatcagttggatttgccacaacaatcgct

SEQ ID NO: 164781 - DNA, 610 bp, Zea mays
  Clone ID: MRT4577_8185C.1
gcccctccctcgagttttttttttttttttttttttttttttttttttttttttttttttttcatatatggattataaaatagcaacacggagcccatttatagcccttacaaatatctttttttttttcatgtaggaaccacaaaattcccctttggaaaaaacaaaaggtggccccgggggggaaaaaacacaatttgggcgaaataccaccccccccttgtcagtagcagaaaaaaacagccctttgggggacctacctttagctggaacaaatgggccctatcctattaccggttgggcccgctccaaaaaaacataaaaatttcgggacctgtttttgtggattcacagttgaagctccagccacttattttgcttggccgtaataaaaaccgtttttttaaacatcctaaacttttgggggggccacatttttttaaacaacgggggggccatcatctccaaaattttaagggccgggccctgaaaaccccttgaccttgggggggcgaagtattctttccccaagttggaagccttttttgaattccgggagaaggacccccttttcatactccgaggatttttttctccctggggccgaatt

SEQ ID NO: 164782 - DNA, 266 bp, Zea mays
  Clone ID: MRT4577_81860C.1
cttgcctggacgctgcgccacatcgcaccggcccctacactgtggtgtccagcagcatccggcttcatggggggacttgcaccctgcagcaggctcctgctcctgcctctcctgctggctgtaagtggtctccgtcctgtctaggcccacgcccagatcgattgcagttgctccacggtgaccccgggcgtgctggcacccatcgttatgtgagtcctggtgcttacagtgctcattgccctggccgtgtacttcctgggccggct

SEQ ID NO: 164783 - DNA, 246 bp, Zea mays
  Clone ID: MRT4577_81861C.1
tcttcttacacatacggtgggccaacacacagggggagttcaccaagggatcgttggtcccaccatcattagagttaagaaacgactatgggcccaaacccttgcaagacagagcgcgtggccaatttttactagccttaccaagcacgtaacagtactgaaaaagcaccagatcggtatgggttgtggtgtcaaagtgcacgtacattgtgcaggaggcgctctggagtaccagggggcacccgg

SEQ ID NO: 164784 - DNA, 304 bp, Zea mays
  unsure (1)..(304): unsure at all n locations
  Clone ID: MRT4577_81862C.1
cggggaaaaaccgggggaattttattggcggccggccaaaaccaaaaaaggggggtcccgaaaaaaaaaaacggggggcatgggataaaaaaaaaaagggcccccgaaggggaaaatcaaataaaaggcccccgggatgtttgaacctccaaaaggcccaattttgcaagaacggggccaagaagccggaaacaggttttccccccctaggacgccaaacagacccgggtggctgctttaaaggccctcattctggngnggggacctgtgggagccccgcttcgctggcccctgggggggcccc

SEQ ID NO: 164785 - DNA, 156 bp, Zea mays
  Clone ID: MRT4577_81863C.1
ctgagaggctattattgaagtgagaagatcttgtttaaggaaatcgcctaccagaatttagttttagtcttaaccatgaaatgtcttggcttatggatagtagtgactgcaggataatgccaacaggaatgtactaccttcactgtgctcaattct

SEQ ID NO: 164786 - DNA, 2277 bp, Zea mays
  Clone ID: MRT4577_81864C.1
cgccacacgttctgcatgatgccttcttccctccctcattctcgctcgcccccattccaccttcgacgacccctttctccttctccctcctcaatcacctgcagcgaaaaggaaaagggtgtcagaccgtaactaagagctatttagcaataatacatacatagctataccctctttaggtcaagagggtggagttctccttattcggaggaagagctccatcctcattctacaagaccaaaccaataaatggcctctagcccacagtcctcgccatcatcctccaagaagtcgccgccaccacaagaagcatcagctttggcgccaaaatcatcttcaaagtcaccctcgccaccaaagggtgaatcaaattcatctcccagtcccccatcgaaatcgtccctgtcaccaccgtcacgaccaaagaaatgtgccaatacatattgctcttagtttgttaaggaatagaattcgtgttcatggtcttcgtaaaagcagattacggtggctgtgatcatcggcgtggtgtgtagagtggtgagctttgctgtgctctggttgatggtgttgtacgttttctggcctgtcaagctgcaaaaacgttggcaggacatgattatttccatgcagagcccctttccagctatggagtatttcgttgatgctggtgtacctagtaggtgggtgcatttgtgcggtgtggagaggtgagagtgtcaggcacagagctatgccggatacacttactgaaaccgaagaacacacccacagatcatgtctgtgacattaatccaaatatgctaaatgttgggaaaaagcgtgctgctgaaagaggttatagcgaagagcattgtcttagctggatacaaggagaggcagaagctctgagttttgcaggatggatctatggatggttacactattgcatttgggatcagaaatttgacgcacattgagaaagctctatcagaagcttacaggattctatagcgagggggcaggttcatatgctgggagttgagtcatgtggatggccctgtttttaaagagatttatgatgtttactcgttttctctgattccgactattggagagctggttgctggtgatcggcagtcgtaccaatacttggtgtgagagcatccgtcggtttccaaatcaggaaaagtttgctcagatggcccagtcatggactggagcacccgcatgaagatcgcgctcggctccgccaagggcctcgcctacctccacgaggactgccatcctcggatcatccaccgcgacatcaaggccgccaacatcctgctggacaacaacttcgaggccatggtggcggacttcgggctggccaagctcacgacggacaccaacacgcacgtctccacgcgcgtcatgggcaccttcggctacctggcgccggagtacgcgtccagcggcaagctcacggacaggtcggacgtcttctccttcggcgtcatgctgctggagctgctcacggggcgccgccccatcgataccaccaactacatggaggacagcctcgtggactgggcgcgcccgctgctgagcgccgcgctggcgggggagacgggcttcgccgagctcgtcgacccccgtctgggaggcgagtactccgtcgtcgaggtggagcgcttggcggcctgcgccgccgccagcacccgccactcggccaagcgccgccccaagatgagccagatcgtgcgcgcgctggagggcgacgcatcgctggaggatctgcaccaggacggcggcaagcccgggcagagcgtgctcttctccggcggtggctccgacaacatctcccgcctaaggcagctcgccttcgacagcggcgactactcggactacagcaccgactcctccaccggtggtggtggccgaccgccgcgcaggccatgatgatttatcaacttgacaacttattactagcacaaattgaagctacagtctatacacacatgcaaattagattgagcgagggagatcgagagagagctcttaactaatttgagggcgatctatagttaagctatggcagcaagtggcgatcgatgtggagatccatggttcatgtaattatattattgctgtgcttgtgatatacacatgcatggatttttactggactggatcctcgatggttatacgtacgtacgtacgcaggatcaaaggcggaactcaaagaaaagtggtagtacgtctatctctaaagatgggaacacgaagaagtcgtcctcatcggcgtcctcggcagat

SEQ ID NO: 164787 - DNA, 288 bp, Zea mays
  Clone ID: MRT4577_81865C.1
aatgctcggccttgcccaccagcgggctcgcgggagttttcacatgaagggccgaggcccctggtcatcagaacgcgctggcaggggctcacttcttctatggggacacgttagatacccccacatttgacatccagagggatctgaggagctgggcaacgatgcacaatggtgcagatactgttcactcacaccggaggagggccgatgtcttcaacacgagcccgctggagcccgacgctaggaaccgagagaaggggggggatttgctgtattactctcatgacc

SEQ ID NO: 164788 - DNA, 376 bp, Zea mays
  Clone ID: MRT4577_81866C.1
ctcaatccgagcatacagttggttctgtgaagtcagaaagcggcgagcgaatcacacgatgcctggacacctgcgggacgagcggagggccggacctcgcccgcagacggaactagagaagctacgcaaggccaccaccgaccgcccgctcgtcatcaacaaagacgcggacggcggcagctacaagcgggcgcagtcgacgccgtcgaccccgacgacgccggtgacgccgtcgtcgtcgacgacaccgcgcggcgccggcaacgtgtggcgcaacgtcttccacccggtgagcaaccttgccaccaagggcatgggcgccaacctttttgacccgggcgaagccaactcccccaccgtttactactggctctac

SEQ ID NO: 164789 - DNA, 304 bp, Zea mays
  Clone ID: MRT4577_81867C.1
cccccacgaggaaacaccggcccggggggggcaaaagcaaggggcagccgcacacccccgagaacaccgagaaagggaacgacgcccggcacctgagcgaagccctgggcgacagcaagcacgaagccgagaagcagcagagccggcgagaccagcgaggcgagaccgagcgcgaggagccggagcacggccaacaccagctgaatccgacgccgacgacaacggcgaacgcgctcccatcgacacaaggccagaaccaaacgtgccagcgcgacgtcgacaggcacaaccctagccccacgga

SEQ ID NO: 164790 - DNA, 468 bp, Zea mays
  Clone ID: MRT4577_81868C.1
acggcactgaaccgaaggactcgccaaggcggccgacacccccaaaagcgaccctgacctaagaagaggcgaagacgcgcgactctcaggcaggccgcaaacggagctagggagctgtggatctgttgttttcatgagaacgccaaatccatgctctctgacggctggacagaacaaaggattaacgaccaccgagggcatgatgtattgcctcagcactcacaaatatcactgctatgggcacggatgtatgagtgaaggagctgaccgagctgttcacgcctgaagagatgccgaatgtaagggccgaatacagcacgtgacagggccaactaaaaagcaccagcagcgactgatgaatccctttcttttgatgaggaatgtccatgaacctattcaggagaatgaggctggcacgagtaaccagtcaccaacactgctagcaatatctcaaagattactctacca

SEQ ID NO: 164791 - DNA, 1700 bp, Zea mays
  Clone ID: MRT4577_81869C.1
cattgggacctcgaggcggcgggctcctctctctcccctctcctccggctagggtgttcacgcctgccgcggcgaagcttctgccctccccggcgtcgcgctctggtcgtcgtctggccgcgaagatggctggcggcttcagggtacttcatctggtcaggccctttctggctttcttgccagaggtgcagagcgcggataggaagataccattcagagaaaaagttatctacactgttatttctctcttcatttttctggtgtgcagccagctcccactctatggcattcattcgacgactggagctgatcctttctactggatgcgtgttatccttgcatcaaaccgtggcactgtgatggagttgggtattactccaattgtgacctctggtatggtaatgcaacttcttgtcggatcgaagatcattgaagttgacaacagtgtgagagaggatcgtgctctgctgtaagtgttgtctttctaaaaatattgtgaccttcaattatcacaattctaatcgtagcatttctctatcaagtctgccatagtagattataaaccttctgatctgtatttaatatatttgtattgtgatgcacattgcatttctttactcaggaatggtgcacaaaagttgcttggtatcttgatcgctattggggaagctgtggcatatgtcctgtctggaatgtatggcagtaaaggttatggtttgggatctggtatttctctgttcattgctaccaatatctgtgagaatatcatctggaaggcatttagccccacaaccatcaacagtggtcgtggtgctgaattcgaaggggctgtcattgcactgttccatctgttgattacgagaaccgataaagtccgtgctcttcgtgaggctttctaccgccagaaccttccaaatgtgaccaatttgcttgccactgtcttggtattcctcatagttatctatttccaaggcttccgtgttgtgcttccagtgagatcaaagaatgctcgtggccagcaaggctcatatccaattaagctgttctacacttcaaacatgcccatcattcttcactctgcgctgattaccaacctctattttatatcccagcttctctacaggaagtacagtggaaacttccttgttaaccttcttgggaagtggaaggagtctgaatactctggccattctattcctgttggtggtcttgcttactatgtaactgccccatcaagcctgtgctctgttctcaaagacatggattgaagtttctggttcatcagcaaaggatgttgctaagcagctcaaggaacaacaaatggtgatgccaggccatcgtgagtcgaacttgcagaaggaacttaaccgatacatccccactgctgctgcatttggtggtgtatgcattggcgcattgaccgtcctggctgatttcatgggtgcgattggttcaggaactggtatattgctcgctgtgacaatcatataccaatacttcgaaacctttgagaaggaaagggcgactgagcttggtttctttggtttttgattagtagctgtggaaccttaacttggctatagctgaattttcttgtaagtccctgtagtgcttagccagttgtaacttaaagagttctgtttaggttgccttcttgcggccacaatcatgtagcagaatgtgcgtgtgtttcaggttag

SEQ ID NO: 164792 - DNA, 687 bp, Zea mays
  Clone ID: MRT4577_8186C.1
ctggcaggtattggcgtaaccccaagcatcggctgtgcggacatgctgcgctcctgcacctcctcggccgccgctcccagattcaccgcgccaggacgctcgacggaccgggtgcccgccccctggccgcccttcgcagcggtccccgcctgctgaaacccctcccgcccttagctgtaggcctcgcggctcggcgcggtcgaaagcagctggtgcgcgatcgagaagagtccgccggcttctctggtgcggggtgcggtgtttctgaggcccgacgcgccgcgatggggcgaatgcagcagtgagatgagatggtagtgatcctctactcccagaggtgcaggtgtaaatgcagtcagaaaattcggcatgagccccctctctgagctggtgtggtctccggatgaaggcttgagcattaaaattgcggcgtctagtcttagcacaagaaaggcttctcttcgttggaatgcagatacattgagcatattgatatcttcacctcaacgaagtggttctggtccaggtgaaaagaacggtgataccataaatgataacctagaggtatcagaaaagatgccatcacaactgcggattcgcagtgacagctcagtgagagtaaccgtggatagccccaatagtacaaatgttgacgccctacaatttacgtctatgagatcgcaggag

SEQ ID NO: 164793 - DNA, 150 bp, Zea mays
  unsure (1)..(150): unsure at all n locations
  Clone ID: MRT4577_81871C.1
attgcgattttgcgcacgnaatctcggatatctgctcgatctctccaactccttcgatctcttccctcctctcgccgccggccgattcacttcttccatcattcgnataatgaatcaaatgcaaggcgctattccctcgggngactcgat

SEQ ID NO: 164794 - DNA, 321 bp, Zea mays
  Clone ID: MRT4577_81873C.1
tcgaggccggccgggccgggctcccgaagctgagtacatgatgttctattgactgctaagtctaggtttcagccggtgccttccacatggcttggccattagcgcactgcagttgctcttgttgtgcgcactctacagtgtcgtagataaagcagtgatacttacagcagtcatttcgagtacatgtagcatcttgacagcttcaagagcattaaaatgttgtttgagatggaatactcagtgttcttgcaagtccttgaaagtaattcgatacactctgtcatttgcacaaaaaaaaaaaaaaaaaaggcccctagggcc

SEQ ID NO: 164795 - DNA, 2661 bp, Zea mays
  Clone ID: MRT4577_81874C.1
atggatccacaactgaagatggcgcttgacacgcagaccagatcgttcgtcaccgagttaggcaaaaaatttgcggctcaggacgccaagtgggagacgcgcatcgacaacctcgagcgcgctgcggcctcggcgtcaacccagctctgcgaattcaaggacgcgattctcaccaacgtcaccgcgcagttggcatcgtacaacaccaactccgcgaatcgactcgctcacgtggaggcggcgacaaccactcgtgttgcgacattggaatcgacgacggcggccttcgaatcatggcaatgcagtcttcggcttccgctcagccagggattctcggagatcattggtcagcatcccatcacccacctgccggacgctggactgacggcccagaagggcaaggcgctgcaactcaccgtcgggagcatggttttgggcttttcgatgcccgaaaccaactcccgcccaatgtttggaggccacacagtcgaatcaccaaccacacctaatctcgggtcgcttcccaagttgcactttcccacatttgacggggataacccacgactgtggatcagtaggtccaaagattactttgatctttatggagttggccccagcatgtggatttgggtgtctgtgcagcatttctccggcccagctgcccgttggtggcaatctatggagagaaagcttaagggagctagttggagggaattcagtacttggatgttggaacatttcgggcgtgaccaacatgaacagcttatccgccagttatttcacattcatcaaacttcgaaagtagcactctatattgaacaattttctgaacttatagataagctatcagcttatgagaacaaaactgatcccatgttttatactctgcattttattgacgggctgaaggacactattaaatccaatgtgcttttacatcgcccttccacacttgatactgttagtgctcttgcccaattgcaggaagaggtgatggagcctactcggtccgaagttcgcaagccagtgtatgcacgaggaccttcgcctgctcagcatccactgcccctgcctcgtcctccagctccagtgaagttcacttctgaagctggcaaggggacacgttctactgatgacaagttatcctcgttgaaggtatacaggcgtgcatgcggcctgtgtgacaagtgcactgagaaatggttccatggacaccgttgtgctccaactgttcaattgcaagttttggaagagatgtgggagctgatgcatgaaccggtcgaacagagctgctttctcaggagctgctttctgtttctcaggagatgtgatagcacagagccagacaacaaatctatttctcaggagctgctttctgtttcagtatcagcagtttcagaactgagctccccacacacggttcagctacagggcaggtttcaccattccgatccatccgacgtgcttcatgttgtctacctcttgcaagctgatggcacaacaaccatgccaactgatttggatcctcgcatcacttcagtcctgcagcaacacctgtctacctttgaggaaccaaaggggttaccaccatccagatcatgtgaccactctataccgctagtccctggagcccaacctatcctcattcaaccatatcgttatgctccagcgatcaaagatgagatcgaagcacaagtcaaggacatgcttcagtctggaattataaagcacagcaccagccctttctctagtccagtgttgatggaaggggaagaattcaaaaccgcatttcaaacacatagcggccactatgagttccgcgtgatggcatttggcctcacaggagcttctgccaccttccaaagcgccatgaataatactctgttgcttgttctcaagaaatttaccttggtgtttttcgatgacattcttgtgtacagttcatccttggaggctcacattgaacacctgaaggtagtgctagatctgctgcaacaagataactggaaggttaagctctctaaatgcacttttcctacttggtccatttcctaccttgggcatgtcatcagcgctgctggagtgcacactgatccccacaaggtgtccacaattgtcacatggcctactccgaccaattccaaggaactgcgcagttttctcggtttagccggctactatcggaagttcatcagacatttcagtattatctcaaaaccattgaccaatttactaaaaaagaacaccatgttctgctggacaactgaacacgacactacatttgaatgccttaagacagcattgagtcaagctccagttctagctcttccagacttctccaagcagtttatattggaaacagatgcatgtgcagtgggcataggagcagtcctgatgcaagccggtcacccccttgcatttgttactgactcacacgccaaggagctattggccaagttgtctttggatggttcctctatgccacattttcagctccagaatggacttttgaggtataagcagcgcaaatggattggtgacgacaatactatcaaatgtcagttggtcgaggtttttcaccaaagtccattgggaggccattcgggcattccagtaacctactggaaactgaagcaggtcttcgcctggcgtgggatgtaa

SEQ ID NO: 164796 - DNA, 646 bp, Zea mays
  Clone ID: MRT4577_81876C.1
ctgccctccgccggcggcccgctctggccgacgtcggccagaaagaggctggcggtttaaaggtacttcatctaggtcacggccctttctggctttcttgcctgaggtgcagagcgcggataggaagataccatgcacagaaaaagacatctacactgctagtttctctcttcatttttctggagtgcagccagctcccactctatggcattcattcgacgactggagctgatcctttctactggatgcgtgttatccttgcatcaaaccgaggcactgtgatggaggtgactattactccaattgtgacctctgggatgggaatgcaacttcttgtcgcatcgaagatcattgaagttgacaacagcgagagagaggatcgtgctctgctgaatggtgcacaaaagttgcttggtatcttgatcgctattgaggaagctgtggcatatgtcctgtctggaatgtatggaagggtaagccaactcggaacagggaatgctattctcattatacttcagctcttctttgctggcatcattgacatctgtttggatgaacttctacagaaaggttatggttcgggatctgggatttctctgttcattgctaccaatatctgcgagtatatcatctggaaggcatttag

SEQ ID NO: 164797 - DNA, 1823 bp, Zea mays
  Clone ID: MRT4577_81877C.1
gtcttcatttctctctctcctctcatctccacctctcctccggctagggtgtacacgcctgccgcggcgaagcttctgtcccccctccccccggcgtcgcgctctggtcgtcgtcggccgggaagatggctggcggcttcagggtactgcatctggtcaggccctttctggctttcttgccagaggtgcagagcgcggataggaagataccattcagagaaaaagttatctacactgttatttctctcttcatttttctggtgtgcagccagcttccactctatggcattcattcgacgactggagctgatcctttctactggatgcgtgttatccttgcatcaaaccgtggcactgtgatggagttgggtattactccaattgtgacctctggtatggtaatgcaacttcttgtcggatcgaagatcattgaagttgacaacagtgtgagagaggatcgtgctctgcctgaatggtgcacaaaagttgcttggtatcttgatcgctattggggaagctgtggcatatgtcctgtctggaatgtatggtagtgtaagccaacttggaacagggaatgctattctcattatacttcagcttttctttgctggcatcattgtcatctgtttggatgaacttctccagaaaggttatggtttgggatctggtatttctctgttcattgctaccaatatctgtgagaatatcatctggaaggcatttagccccacaaccatcaacagtggtcgtggcgctgaattcgaaggggctgtcattgcactgttccatctgttgattacgagaaccgataaagtccgtgctcttcgtgaggctttctaccgccagaaccttccaaatgtgaccaatttgcttgccactgtcttggtattcctcatagttatctatttccaaggcttccgtgttgtgcttccagtgagatcaaagaatgctcgtggccagcaaggctcatatccaattaagctgttctacacttcaaacatgcccatcatccttcactctgcgctgattaccaacctctattttatatcccagcttctctacaggaagtacagtggaaacttccttgttaaccttcttgggaagtggaaggagtctgaatactctggccattctattcctgttggtggtcttgcttactatgtaactgccccatcaagtttggctgatgtccttgcaaatccattccatgcactgttttatgtggtcttcatgctgtcagcctgtgctctgttctcaaagacatggattgaagtttcgggttcatcagcaaaggatgttgctaagcagctcaaggaacaacaaatggtgatgccaggccatcgtgagtcgaacttgcagaaggaacttaaccgatacatccccactgctgctgcatttggtggtgtatgcattggcgcattgaccgtcctggctgatttcatgggtgcgattggttcaggaactggtatattgctcgctgtgacaatcatataccaatacttcgaaacctttgagaaggaaagggcgactgagcttggtttctttggtttttgattagtagctgtggaaccttaacttggctatagctgaattttcttgtaagtccctgtagtgcttagccagttgtaacttaaagagttctgtttaggttgccttcttgcggccacaatcatgtagcagaatgtgcgtgtgtttcaggttagcgtgggggtatgtgcatctgtccaaagagtctgcaatttggcaaccggatattttgttatcaatttcagttacttcgaactgagcatgttctcatgaaaaaaaaaaaaaaaaaagcggcc

SEQ ID NO: 164798 - DNA, 391 bp, Zea mays
  Clone ID: MRT4577_8187C.1
ggatcggatacatatgcattttattaatctatgtgttttgaagtggtttgatacataatttagacggcggtcatatggattcatatgaatcagtcttaaaaaaatatccgtttggcacgactcctccagatcctcgcttagaatcaggagatggagctgtgccaaacgggcctaaagaatctccgcctgctcgtatccatatccggctgggacgggtttgcacaaaatcaagcgcacatgtcaggagaaggccacatgcagttgtaggggtggacgtgacatggttagtaaatcagcggcgggtgggcgggcggtccagcgacagtaccttgtgaacccactcgtactccccgctcctcgtgtcgaaggtcccatgctgctgcaaggtgag

SEQ ID NO: 164799 - DNA, 381 bp, Zea mays
  Clone ID: MRT4577_81880C.1
cttcattgattgttcaagagacagagctactcctgcaccacaaggatcgagtaggaattggagctgcggatcaagaagtcgggtggcgtatcaagctgcaagcgcggcaagaaggagcctgacctgcaggagaccagcaccgccgcgcagcccaccgcacatcctcggcgtggccccggagaagaaggacgcgccggagttcggcaaggcctagatcgcaaccgagaaggccgcccacggctgcagctgcactagcggctgcaagtgcaaccccagccactgctgataacagccattgacgaccatggatatgaatatcatctatctagcctgagttggcgatcgaacaacaataagcgagcacgagctggctgccataca

SEQ ID NO: 164800 - DNA, 169 bp, Zea mays
  Clone ID: MRT4577_81881C.1
ttttatttgtcagtgctatattatatatggtttttagataattttcctttgtacagtgatttcctggtaccttattttggatgcggggaagaaaacgtggacgacatttcaaattgagtgtttaaagcactttgtggcaagaaacgcacccaacagggtttttcagatg

SEQ ID NO: 164801 - DNA, 294 bp, Zea mays
  Clone ID: MRT4577_81882C.1
gatttggaggggaggggagcgccggttcggattgtgcaggctcgctgctggttcttgcagcggcccgacacagaggggtgtgcgtcccaaccattctcttaaacaaggcccttccttgacagctcgtctctatgtgggtattcttgacgaatgatgtactgattacctgccttcgctcgctttgtgaacaactcaaccgcgatgtcaatctgacggggactaaagatgatctcgcgcttcttgtgttaaattttaaaaaggaatttgatgacacgagggctaaactttttactg

SEQ ID NO: 164802 - DNA, 226 bp, Zea mays
  Clone ID: MRT4577_81884C.1
tagcaacatacaaagcacaatagtgtaccaacaatggcagccaaaatattttgcctccttatgctccttgttctttttgtacgtgctgctactgcaaccatttttccgaaatgcttgcaagctcatatagcatcccttcttatagcataccttttaccagcattgccttcattattgaacgattcaatttttgaacacttaacgcttcaacactacatgatacaac

SEQ ID NO: 164803 - DNA, 596 bp, Zea mays
  Clone ID: MRT4577_81885C.1
tgtttgtgattccattttgtgttgttattggttggacgatgggacaaaagatggacttgaattttcagctatttgagacagcaactctcttcataacagtacttgtggtggcatttatgttacaggatggcactgcgaactacttgaaaggacttatgctgatcctatgttatctaatagttgctgccagtttctttgttcacgttgatccacaatcaagtgaaggctgaagccatatatcctgtaagtaacgcgccaaataccttttgagacttaataatcttgttttgttccgcctgtctcaagccgggttccttcatgaactgcagaaggaatttttgtattttgttttgtggaaactgatgtgtactagggtagtctcgatgtatacagaaacaagaagtggcagcatgttatattcgattaattgtatgggtgcgcccccctttttctgttttccttgaaatttaactattgggctgaatgtaaatttgggtatatgatttgatgatggcagagatctttcatcattttttgtagttgatgaaaaaaaaaaaaaaaaaaaaaaaaaaaaaaaaaaaaaaaaaccccgggcc

SEQ ID NO: 164804 - DNA, 221 bp, Zea mays
  Clone ID: MRT4577_81886C.1
tcggtttaacacagtaaacgacacctaaaatgaagggcttttctgaaggatagcgttcttttaatcgagcgttccaaaccgttaagtcttaaaaagctacgataagactgtcaagctccaaaaccctaatgaacggctcgtccaaagatcaaaccacgatctcactgtagacgacttaacacatgcacccaaagactccgccagatatgtaagtacggtac

SEQ ID NO: 164805 - DNA, 316 bp, Zea mays
  Clone ID: MRT4577_81887C.1
gcaaacaaaaacctcgctgattacctttttgtatcgttgaatcacgggagcaaactaagggaacaacacggggcgccaacagctagagcacaaggtggcacggaaactaacacggagtccgaacctaacggagtcgctatagtatacatatgatccatagctctggcgcacacggcgggtgacccaaattgatttcatagagacaacggctcaatcgtctgataagcaaccagcgtggtcgcggcagcggcattagccgggacttctgtctagggagtcaccagctgcgcgaagttctacacagcacatatcctgt

SEQ ID NO: 164806 - DNA, 556 bp, Zea mays
  Clone ID: MRT4577_81888C.1
ggggcggtccaaaaaaaacacgacgcctcatcacgaacatcccaacaaaacaacagtatcatggtctgttaacaccgagcatgactagacgtaaacaacggatacttacacatcccggctgcatactaacttggatgtaactgaacgacttactgaacactggtgcaaccattcttggcgaccgcacggctgacgataaggagcagtactcgacacttgaaaccaaaggggactgcccgggtacagacctaccagccatggattgggatctacttttgctaccacatgccacatatcacgcagccaggtgcagctagcgctcagaacttggtgccgatgacgggatacacctcagccaacaaatactgaaaagcgtctaacgattatggaacagaattgctaaggaatctaccacggacttattgatatgcacgccagggccgtatggaaccacaaatcaatcaaggtgttgatctcattctgcttcgctcagagcccatttgtgtataagagggaccaaaaatgcttaggacctgcggagggcaggacctctatg

SEQ ID NO: 164807 - DNA, 195 bp, Zea mays
  Clone ID: MRT4577_81889C.1
attatttttttctagctaggacagacaatacactgatgagggttttaataaaacttgcggttggagaaaagatcctacaggtctacacataccaactagttactcaatactatgtactaggagtgacggcacatatataacttactcgataccatcagccaagattaaacggggggggcggcaaaaaaacaagaa

SEQ ID NO: 164808 - DNA, 590 bp, Zea mays
  Clone ID: MRT4577_8188C.1
gggcgattgggactcccgaggccggccgggatatccaacaaccagcagtgcaacaagcaagatttacctgaccatcgatcatatcgacaactggtccggcagttcgcgacaccatgagctccacggagtgcggtgttggcggcggcggtgccaagacgtcgtgtgctgaggtggtcggcctgagcgtgaaggacgccaagaaggtgatcctcaaggacaagtcggacgccgacatcgtggtgcttagcccgtcggttccgaggagaccgtggattatcgacctaaccgagtacaaatcttcttggacatcgtcgaccaaacgccccacataggctgatattatattctatagcggctatttctgtttcttgtcccacaacttgcactaactatatatactactgagatatcgtctggcatgccgaataatgaaatgcgtgaattctcatgaagtaaggactgcataaataaacgtgtcccgcaagggctggaaggtcgacaaggacggcatgctcacctgcgacggtgccagtttcgtcgcctgccccatgggtgacaacctcgagaagacctcttggtctgtctgggtc

SEQ ID NO: 164809 - DNA, 445 bp, Zea mays
  Clone ID: MRT4577_81891C.1
ggtccggaattcccgggtcgacccacgcgtccggcgtcctactcgcagccctcggcgacgccggcgcagccgatctcgaagccggagccggtccaggtcgcgaagccgctcccgctacagccgctccaagtctcggtcccgcactcgctcgcgctccagatcaacctccaagtccagatctgcccgaagatccaagtccaagtcctcctcggtctccagatcccgctcgaggtcaaggtccaggtcgcgatcgagaagccctccgcccgtgtcgaagcgagagtccaagtctagggtcgcggtccaagagcccacccaagtctccagaagaagagggagcagtttcttcctaagaaaatggtaatgtctgcgggaatctgagacacgccctaactcccgtggggtatggagtagggtttttttgagccttgtgagcatagagact

SEQ ID NO: 164810 - DNA, 398 bp, Zea mays
  unsure (1)..(398): unsure at all n locations
  Clone ID: MRT4577_81892C.1
gatttagntagtttcccccaacaaccagcagcacacagcagcttattactttgattcggacatcgatcgtttcatgctagctctgcggacggccgcgcgcacgtacgcacgttcaacggatagctagctagctagctgacacaccatggcacagcaagctgggcgcgcagcacgggcaccgccaccaccacagccacaacggcgtctccccgacgccgccccccacgaggaggcacagcggcggcggcggcggtggcccgggggcccaggcggcgcacctctccccccccatgaacctcgccgccggcgccaaggagttccgggacatcgcgccggagctcacaggccgcgactcccccgacgccgacccgaccctcgacgccgcgggcccccccccc

SEQ ID NO: 164811 - DNA, 117 bp, Zea mays
  Clone ID: MRT4577_81893C.1
cccctatcgcggagttacccgtgatctataccacttccaccctgatacctcgttccattcaaaagcgcccctggcatgcatgtctacccaaagctatccatactttattcttgacaa

SEQ ID NO: 164812 - DNA, 260 bp, Zea mays
  Clone ID: MRT4577_81894C.1
aaaacgaaccatccaaactgcgaataaaattccctgcaatttatttctcattttttacattatcatgcacacggttcattttccatacatccaaacattcctcgccatttttttcgtcgtcaggaaactctaataaacaccacaaacctcggggcagttcatcttcaccaccatgatttccaaagtcaccctagtaggaattaaacaccttatagtattgtacacctgtttatgccaacagacgagaagatcctcctcgc

SEQ ID NO: 164813 - DNA, 319 bp, Zea mays
  Clone ID: MRT4577_81895C.1
ctatgacatctcatgcacacctacctaaacttgtatcctctaccacggccgacctgattttgtgattaaattttctcactcatatatacaaaattcactcttttcattatacatcaatactacaaaaacaatagctacaattctccctaatttctatactctctactatgctaccgacacataaacattagggtaatacagaaaagtgggacaagcatactgatttaattaaaactcaatcccaaaatccattgaagtacccagtaaattccctacaacacaactatcttgaaatcctataaaaagagcttatatatct

SEQ ID NO: 164814 - DNA, 951 bp, Zea mays
  unsure (1)..(951): unsure at all n locations
  Clone ID: MRT4577_81896C.1
ttgttccacgcgtccgcccacgcgtccggggggaaaaaaaaggaggctcactgtacaccgagctcacgcagggcgtagcaaatcaggtaggcgaaatcggagcagaggccagggacgcgccagcgcgagcgataaggcacactgacatggccgccacggcgtactccaccgcgctccccggcggggcgcgcctccccgctgccggagccgccgcaccgccctctgccctcctcctcccgcggcgtaataaactgtctccgctccctctccggctccaagatgcgccgaggctgtcgttgctccgggtgaaggcctcctccgacgactcctcggccgcgagcggggacgagctcatcgccgacttgaaagccaagtgggacgccgtcgagaacaagagcactgtcctcacctacgccggcggcgctgtcgtcgctctctggctgacgtccgtcatcgtcggcgccatcaactccgtgcctctgctccccaagatcatggagcttgtcggcctcggctacaccggatggttcgtctaccgctaccttctcttcaaggaaagcaggaaagagctcgccgacgacatcgagtcgctcaagaaaaagattgctgggacagagtaaaacatgttgttctcgtgaaactttttttggacgattctttcgggaacacgttgtctctggagagctttgtacgacgatggagaacaacagtgtacgatcgaactggacgccatcctcggggattgttttcttaaaatgaaatagggtatgtatccgggttttcttttcatcacttcattttgcaatccgtatgtctgtcaggacctggcacccagttcgtaatccttgacttgccatcgcgactgtgatttgtttaagatcaatagcgatttgctctaagtttcgatggtatnnaaaaaaaanaaaaaaaaaaaaaaaaanaggggccggc

SEQ ID NO: 164815 - DNA, 956 bp, Zea mays
  unsure (1)..(956): unsure at all n locations
  Clone ID: MRT4577_81897C.1
gccggccggtccagaaagaggcgcaggatacgncgggggttaaaaaaaggaggctcactgtacaccgagctcacgcagggcgtagcaaatcaggtaggcgaaatcggagcagaggccagggacgcgccagcgcgagcgataaggcacactgacatggccgccacggcgtactccaccgcgctccccggcggggcgcgcctccccgctgccggagccgccgcaccgccctctgccctcctcctcccgcggcgtaataaactgtctccgctccctctccggctccaagatgcgccgaggctgtcgttgctccgggtgaaggcctcctccgacgactcctcggccgcgagcggggacgagctcatcgccgacttgaaagccaagtgggacgccgtcgagaacaagagcactgtcctcacctacgccggcggcgctgtcgtcgctctctggctgacgtccgtcatcgtcggcgccatcaactccgtgcctctgctccccaagatcatggagcttgtcggcctcggctacaccggatggttcgtctaccgctaccttctcttcaaggaaagcaggaaagagctcgccgacgacatcgagtcgctcaagaaaaaaattgctgggacagagtaaaacatgttgttctcgtgaaactttttttggacgattctttcgggaacacgttgcctcttgtctagactccagatcagtgctacatgtctttgcacttttttttttgttgcataccttatgtcctcgtctctctggagagctttgtacgacgatggagaacaacagtgtacgatcgaactggacgccatcctcggggattgttttcttaaaatgaaatagggtatgtatccgggttttcttttcatcacttcattttgcaatccgtatgtctgtcaggacctggcacccagttcgtaatcctcgaaaaaaaaaaaaaaaaagcggcctct

SEQ ID NO: 164816 - DNA, 889 bp, Zea mays
  Clone ID: MRT4577_81898C.1
gggtacctcgaggccggccggggggagttcattctcacgggcagcagttctgccagttcaacttgatccgcgcttctcgtgtcccctgccccttctgtcctcgccaccgcccagcttctcctcagtcctcaccctcgtgtgccttcggatccgcggttctcggaggctgttgcagttgcaggtggtgtctggtcgcttgcggtagccggtaggcgggttcgctgcgggtggtcggcggcgcgatggtttccttcgagatgaacgacctcaagaagattgggctgggcttgactggatttggagttctattcacattgctcgggatcattatgttgtttgacaagggattcctggcgatggggaatattctcttcgtttctggcgtcttactgaccattgggttgaagccaactgtgcagttcttcaccaagcctaagaatcacaagggttcaatatttttcgggtttggctttttcctggttctcattggatggcctgtctcaggaatgctggtggagtcgtatggcttcatcacgctcttcagcggcttctggccaacagctgctgtttacctgcaaaagagcccctccttcggttggatattccaccaccctcttgtgacttcgctgatcactcggttcagaggaagacgggtcccggtgtgagtggataggatcaccccgagggcatgcgaaatcgcctctactgtacagaagtaggccaattgacatatgcactttattcgtttatgttcgtcgattctacctggtttaaagagagactaaaaggtggccgctgttgctggtattggatcttcctacgctgctaccagtagtctgtccatagcgtaactacattgattgcaagagagcatctgtcggttgttaat

SEQ ID NO: 164817 - DNA, 506 bp, Zea mays
  Clone ID: MRT4577_81899C.1
ccggccgggatgcgcgaacaaagcaaggatggataatagagagagaaagaagaaagaagggtaaagggtcatgacgctggggcataccagtgctcgaggttcatcgccgggattaaggtcgcgcggcctcatcatcggtcaagaacaggtaccacaagatgaggtgtaagaaggatgctacaatgagtttgtgagtggtgtaggccgtcgtctcccagtaaaatttgggttgctggatcgttgtcttcatatgatgtatttatttatttattttgtatagaactccgattatatagtaaagatgtgacattcgtttctataccatgagtcatcatatgtgtaagacttggtcctagcacacatggtgattatgtctacgcccgggtccctaaaacccgggtgtgacagagaaagagaggtcaacttagagccagaccaaatatcgtgaaacaaagtgaatgacatttacgtaatgttgcaaaaaaaaaaaaaaaaaaggggcggcc

SEQ ID NO: 164818 - DNA, 337 bp, Zea mays
  Clone ID: MRT4577_8189C.1
ggacgcgtccgagactcaaccgtcctcactcaccgggagacggcgacgtgtcacggttcctgatgcgtttgagtctgcgcgaagaaggcgagctgacgatgcagtcccgtatgcttcatcggagggcttgcctgcgccactagcaccgagtcactggtgaatactctcgccgccgagggcgagatccgcgactccaacgtcatcatcgaccgggagacggggaagtcccgcggcttcggcatcgttgccttctcctccgacatctccatgctcgacactatctactacatcaacggcatcgaccgcgacggccgtagcatcaccgttaaccaggccc

SEQ ID NO: 164819 - DNA, 299 bp, Zea mays
  Clone ID: MRT4577_818C.1
tcggcctgaaggcaagggcgtttgccgccaaccgtgtgccacgaacggggtgcgtaaccattatgggcggcgaaacgcattggcttcttttggcaagaagacacaagccagaacaacaaccagcagcttcgccagcgcgggggtgggccttgggccggcgcccaacaaaaataggtgcgcgacgacggcgagaccgagccaacatcatcaccatcaacaacaacagcagcaacagcaggagttgaggctccacaacgcctcgtgcgtgggcgtgctggctccacgggtctcgacgatcg

SEQ ID NO: 164820 - DNA, 526 bp, Zea mays
  Clone ID: MRT4577_81900C.1
atggtcatgtgtagcgagctccattttttttcccagcgctctcgcctgctcgacagaatgccacagcgtgaagcagccatggatcctccctgtgtagcgccctcggcgtgcgacgtattgcagcagcagcgacgcccttcgctgcgacgcgctcgccaggtcggtccactcgccgtcgatctgcgcagcccctgcacgtcgtcgtcgaaacccgcgccctccgtcgatgtcacgcctggtgctatgcctatgcaacgcaatgctagccggtggacaacacatgcgactcactgatccggccaggttgcttttgtttcatttacgatttagtcgatgacgtgaatatgtgcgtgaaaatataattgtatgaatagacacgaatagaaagaaaatgaagtagaaaagaactcggatgtttttatatttttattttgattggaaaatatgtgatgcgttgtttaatacgaaaactaagttacaaaatgtggattatgttttgggaaatgcatcgatatgtgtttatgcc

SEQ ID NO: 164821 - DNA, 132 bp, Zea mays
  Clone ID: MRT4577_81901C.1
gtgccacagccgcggttttgatgcatggtgtcagagcctgcatcaagagacaggttaccctacactatcccatatgagatggtgcatttgattagacgatacacagtgtgagcaggcatatgagtagcatag

SEQ ID NO: 164822 - DNA, 768 bp, Zea mays
  Clone ID: MRT4577_81902C.1
caaaaatgatggcacttctccagaaccttcgccattaaaagataaaacagcaacagaagattcataccgaggatcgctgggtagtgcaaaaggtttgcatggtccagtaactactccggtgtggttctcattaatttctttgcctaaccagaaagaagatccacaactgaaagaagatccacaactgcctcagttatcaaagaacggcagtttgcagatttcctcgatacagaggtacatcatgaagaaactggatctagctaatgaaaatgaggtggagatcatctgccatggcgaaccgatctgcccctcgagcacgctgcgtgggctgatggagctgtggcatcgtagacagccgacggagcccgtggaggcgtcggtgggtgcgccagccgaggagttcgtcatggtgctgggctaccgctgccaccgccggcacccttatttggcgcccggcaccaccgtcgccgtgcctccagagctgccctcctgatcaggtcggcaaggttgactgcaccgccgtggagcctcaactgcactgcactgctccgctcgctgtcgtccaatccccagtcagtctagccgtttaggatggaacagaggaaagaaattactcctacagttttttttacacatttcttagactttcttttggatcgtactcgtttcttaaacttttgtaaagatagatagagagggaggagagaagttagtgtaccagaagtctgtggcaaatgattaagcaccttaaaccatcgtgtttactct

SEQ ID NO: 164823 - DNA, 848 bp, Zea mays
  unsure (1)..(848): unsure at all n locations
  Clone ID: MRT4577_81903C.1
gtaccctccgggctggccgggatgaaccgccgcctccccgcccggcagacgcccatcaacctccgcggcatcttccttggcaacccgttgctggatctgtacctttatgagaaggggaagctggagttcatgtggagccacggcgtgatctccgacgaggtgtgggcgagcaccctccacaactgcagcttcctccacgacctgtgctcctccaacgcatcggagcacacgttcgagggagggaggatggactgcttcaacctctacgctccggtctgcctccagtcgcccaacggaacctactactccagcagccaccgaccattacgtcagatcttacctcaatagcgtcgaggtgcaagaggccctgcacgctcggatcagaaactggtcagcctgcatgccgaacttggtctggaacgattcccctgctatcatggtgccaaccatcagatacctggtcgattgtgggctcagagtatggatctatagtggcgatttcgattccatatgctcgcttaccgcgacaaggtactccgtcaaggatttcaatctagccgtcaccaaaaagtggggcccctggtacacccctaacggcgaggttggaggctatgttcagcagtaccaaggaggtttcacgctggcgtcggtgagggcggctggtcacatggtccctacgttccagccggagagatcgcttgttcttctcaaggctttcctgagtaacacgctcccgccggctgacatcgtcacgaactgaagaacgtacgaaagccttcacattntccacttttgtggtcgaaatcttcagtgtctagctctacctattccaacactagtatagacgt

SEQ ID NO: 164824 - DNA, 619 bp, Zea mays
  unsure (1)..(619): unsure at all n locations
  Clone ID: MRT4577_81904C.1
agtcatggatgggtttctgtatacctgttattggccgccgtaggggccccagttgtttttctgtatctgtctttcttctttaatataatatcacgcagttctcctgcgctttcaagaaaaaagtaatatttttctcacatgatttatattaattaacatagaatatacttttattagttaatcacctaaanacttcagaaaaaaccatatattttaaccgtaactccgattttagtggttctcgaacctacggattcgtatcaacgcgtagagaatattattgtgtggtttgttttcatctttggtgtaatgttattttattcattatttgcttatatgtatgttttgctacgagtagaagcgaggtcacgagaaacctgacgcccaaacttggggaaatatctggtgttgcactaaaaaggcaagttgtgtccttgatcacattttttacctaataatatttactcatgatctcatcctgcttgcattgacaggttaacttgatgggacctaataggttaccagccctacaccttgcatactaatgaattattgggtagtcttgctattgctctaccaggttttgagatttatattatatatgaatcatgatcatgcc

SEQ ID NO: 164825 - DNA, 848 bp, Zea mays
  unsure (1)..(848): unsure at all n locations
  Clone ID: MRT4577_81905C.1
cattgggtacctcgaggccggctggaacgtagggaccatgtgaccagccgccctcaccgacgccagcgtgaaacctccttggtactgctgaacatagcctccaacctcgccgttaggggtgtaccaggggccccactttttggtgacggctagattgagatccttgacggagtaccttgtcgcggtaagcgagcatatggaatcgaaatcgccactatagatccatactctgagcccacaatcgaccaggtatctgatggttggcaccatgaaagcaggggaatcgttccagaccaagttcggcatgcaggctgaccagtttctgatccgagcgtgcagggcctcttgcacctcgacgctattgaggtaagatctgacgtaatggtcgctgcacggatcgtagccaggtaactgacagaccggaattaattgcaacacttcagtatctatctgtgtaccagcgactgcaagatactacgtgcacgtttttcatctcacaagaagaagagcggctggagttccatggacacggcatatggcgggcgctaggtacgtaacgtacgtggctgctggagtagtaggttccgttgggcgactggaggcagaccgnagcgtagaggttgaagcagtccatcctccctccctcgaacgtgtgctccgatgcgttggaggagcacaggtcgtggaggaagctgcagnnttgtggagggtgctcgcccacacnctcgtcggagatcacgccgtggctccacatgaactccagcttccccttctcgtanaggtacagatccagcaacgggttgccaaggagnatgccgccggaggttgatgggcgtctgccggcgggg

SEQ ID NO: 164826 - DNA, 354 bp, Zea mays
  Clone ID: MRT4577_81906C.1
agcagtggtaacaacgcagagtacgcgggccttcggtctctatatatagacctatgtaacactgaatgctcatgttatgcttatgaaatgcacgaatagaaaatgtatatcaagctgatggttgataaaggtttactttacgggactctaggaaacttaggtttttggtgttgaggtgactatttcatagggcatacaagtgcttaaaagattatcgggtttgcagatcactgatcaaacattgcccaaatcatgtatacacttactcacggggtctaaataccatattaagcttatccacaaaggtgcgcgatttttggaatcttcaaataattcccaaaaatgcaagagact

SEQ ID NO: 164827 - DNA, 1901 bp, Zea mays
  Clone ID: MRT4577_81907C.1
tgtccaatctatccaactctgctgcgcctttacgatatatttagcttggcaacccgttgctggatctgtacctttacgagaaggggaagctgaaggtcatcctcgaggccggcggggtctcaccactttattttgctgtgctcagcgctcggccgggagagttttgtttacaccctcgcagctggctgggatcttctccctgcacctgcaaagatgaggaggagcaacaccaccaccttcgtcctcctctccgtcgcaatcctgctgggcacgtcccacgtcgttgcttcgtcgcaggaggctcagctcagcaagctcatggcgtccggaagaagcaggcccaggctcagcctcagccgaaacgggcgtgccgagaccgacacatgctcagactccggcacctacgcgccgctgcccgagcgctgcaggcgcccgccgagcggcggcaaggaggcggacaggatcaaggagctgcccggccagccgccgcgcgcctgcaggttcggccagtactccgggtacgtgacggtgaacgaggagcgcgggcgcgagctcttctactacttcgtcgagtccccccgccgacgcggcctccaagccgctcatcctgtggctcaatggagggccggggtggctcgtcgctgggatacggggcgatgatggagctcggcccgttccgtgtcaaccccgacggcgagacgctgagcgagaacaagcacgcctggaacagtctggcaaacgtgatcttcctggagtcgccggcgggcgtcgggttctccttctcgagggacgccgccgactacaagaccgccggcgacaggaggaccgccgaggacacgtacatcttcctggtgaattggctggagaggttccccgagtacaaggggcgcgagttgtacgtggcgggggagagctacggcggccacttcgtcccgcaggccgccaccgtcgtcacgctcatgaaccgccgcctccccgcccggcagacgcccatcaacctccgcggcatcttccttggcaacccgttgctggatctgtacctttacgagaaggggaagctggagttcatgtggagccacggcgtgatctccgacgaggtgtgggcgagcaccctccacaactgcagcttcctccacgacctgtgctcctccaacgcatcggagcacacgttcgagggagggaggatggactgcttcgacctctacgctccggtctgcctccagtcgcccaacggaacctactactccagcagccacttacctggctacgatccgtgcagcgaccattacgtcagatcttacctcaatagcgtcgaggtgcaagaggccctgcacgctcggatcagaaactggtcagcctgcatgccgaacttggtctggaacgattcccctgctttcatggtgccaaccatcagatacctggtcgattgtgggctcagagtatggatctatagtggcgatttcgattccatatgctcgcttaccgcgacaaggtactccgtcaaggatctcaatctagccgtcaccaaaaagtgggggccctggtacacccctaacggcgaggttggaggctatgttcagcagtaccaaggaggtttcacgctggcgtcggtgagggcggctggtcacatggtccctacgttccagccggagagatcgcttgttcttctcaaggctttcctgagtaacacgctcccgccggctgacatcgtcacgaactgaagaacgtacgaaagccttcacattttccactttgtggtcgaaatcttcagtgtctagctctacctattccaacactagtatagacgtacagtgtacatgtgttcggaaaaagcactcgttgacaatcaaaaaatcgagcggtagtgccgttcaccgtaaaaaaaaaaaaaaaaagcggcc

SEQ ID NO: 164828 - DNA, 1052 bp, Zea mays
  Clone ID: MRT4577_81908C.1
ggccggccgggaagtctcagcttctccgaggaaggggcgcaattgctgaagcagccacttcaccttggggccatacagaaatggcggcttcttgcgcctccacactcccttcactttccttcgtttcctcctccagttcatcccgccgattcagaaggtgtatgcgcccggtgtggcggtgtcggagggcaatggcgggctgccgaaaatcgacctcaaatccccgcacgggagcgaggctgagatttatctgtttggagcgtgtgttacttctttcaaagtccctaatggcaaggacctgctctttgttcgaccagatgctgtgtttaatggacagaaacccatcagcggtggaattccacattgtttcccccagtttggcccaggtcccatgcagcagcatgggtttgcacggaatgtgaattggtctatcacagattcagaagtcacagaaggagatccagctgtaactttggaactgaaagatgacacttatagccgttctatgtgggatttcagcttccatgcactgtacaagggaagaggtgacttttccaggattcgtcgactgcgtctaccttggtgcaccaagtgaactcatcctggacaatggattgggtgacaaaattgccattgcaaattcaaattggtcagatgcagtcttgtggaatcctcacttgcagatggaggcctgctacaaagattttgtctgtgtggaaaacgccaagattgaaatggtacaactggagccaaaacaatcttgggtggcagaacagaaaattgaactagtctgatgataatgtcttgcagcaactgcatcaagtagagtgagacgcaaatggcgctcccccagtgtcattcttcatggcacatgtcatctcaatagctatacatgtgatgttttctgttaaaaagaataaatgatgcaaatcatgaatttttttctagcagtctgatgtgtactgaattgcaaatgtacaatttgaactgcatggatctgttgaaataaagggagtgcccatttgatcaaaaaaaaaaaaaaaaaagcggcc

SEQ ID NO: 164829 - DNA, 176 bp, Zea mays
  Clone ID: MRT4577_81909C.1
cacgcggatctaccggcactatatattttttttgtttgatgtgtaatgatgatactgatcaacgcttattaccctactatactgctggatggtctttgggcctgaagaaacgctgatgggttatgacaaagcaagaagagcctaatggcaaaaaaagaagaaaaaagaattttttt

SEQ ID NO: 164830 - DNA, 378 bp, Zea mays
  Clone ID: MRT4577_8190C.1
gccacgcgtgctaccacgcgtgctactgtccgagcgttctctgcatggatggtgacacatacaacagctcgctcctgagcctcatcatcctgttcggcgttgtcaaggttgtcttcatcctcatcggcatggctctagccgaccgcgtgctacggagcctactcctgctgctcagcactagcggcatgacctggtagctgctcgtgctaggctaggtgttcgcggtgtacgtgaaagccatggatgacgctaagtacgcttacaggacgcgagaggctcacgactgcatcgtcgtgggctcatttgcaaggtcggcccctgtggccaggccgtactgttcaagaatgctgactactcctgctgctactactagacctc

SEQ ID NO: 164831 - DNA, 1632 bp, Zea mays
  Clone ID: MRT4577_81910C.1
ccctcagcacgcatcactatagtctatagctcagaagatccggtccattttccagctctaaaactaaggcatagcggtaaacaccaccgaagtctcagcttctccgaggaaggggcgcaattgctgaagcagccacttcaccttggggccatacagaaatggcggcttcttgcgcctccacactcccttcactttccttcgtttcctcctccagttcatcccgccgattcaggcgctctggtgtggtggccatggccagcgttgggcagaaggtgtatgcgcccggtgtggcggtgtcgcacgagccattttccagctctaaaactaaggcatagcggtaaacaccaccgaagtctcagcttctccgaggaaggggagcaattgttgaagcagccacttcaccttggggccatacagaaatggcggcttcttgcgcctccacactcccttcactttccttcgtttcctcctccagttcatcccgccgattcaggcgctctggtgtggtggccatggccagcgttgggcagaaggtgtatgcgcccggtgtggcggtgtcggagggcaatggcgggctgccgaaaatcgacctcaaatccccgcacgggagcgaggctgagatttatctgtttggagcgtgtgttacttctttcaaagtccctaatggcaaggacctgctctttgttcgaccagatgctgtgtttaatggacagaaacccatcagcggtggaattccacattgtttcccccagtttggcccaggtcccatgcagcagcatgggtttgcacggaatgtgaattggtctatcacagattcagaagtcacagaaggagatccagctgtaactttggaactgaaagatgacacttatagccgttctatgtgggatttcagcttccatgcactgtacaaggtttccctgcactctaaaagcttgtcaacaactctagcaataataaatacagatgacaagcctttctcattcaactcagccctccacacttatttcagtgcttccataactggcgtttctgtgaaaggtctaaaaggttgcaagactctcaataaggaccctgacccgaaaaatcctttggagggcaaagaagagagggaagaggtgacttttccaggattcgtcgactgcgtctaccttggtgcaccaagtgaactcatcctggacaatggattgggtgacaaaattgccattgcaaattcaaattggtcagatgcagtcttgtggaatcctcacttgcagatggaggcctgctacaaagattttgtctgtgtggaaaacgccaagattgaaatggtacaactggagccaaaacaatcttgggtggcagaacagaaaattgaactagtctgatgataatgtcttgcagcaactgcatcaagtagagtgagacgcaaatggcgctcccccagtgtcattcttcatggcacatgtcatcacaatagctatacatgtgatgttttctgttaaaaagaataaatgatgcaaatcatgaatttttttctagcagtctgatgtgtactgaattgcaaatgtacaatttgaactgcatggatctgttgaaataaagggagtgcccatttgatctttgacataaaaaaaaaaaaaaaaagcggcc

SEQ ID NO: 164832 - DNA, 719 bp, Zea mays
  unsure (1)..(719): unsure at all n locations
  Clone ID: MRT4577_81911C.1
attgggtacctcgaggccggccggggcttcctttccaactcggtcgacgcgttcgccacggctgcgcaggcctcctcctccgcggtcggctccgcctccgatcccctcccttcttcgacgatgcgagcacacccgctcatcctcttcgtacctgcaccgccacctcatcctcttcctcgccgcgccgacacccaccgcgctctctcctccccgtgcaggcgccgctaccctgttgccgcgtccacacctccttccccatccgcgcccgccgcggctcctccggcagctccgccacgcgcccaaccgcaacctgtccgcacggccacaaaaatggtggcgctcacaaggtgccacggcccgctgcagctgtctatccccaaggaaggcggcaacgaggggagcctcggcaaggggtttgggttccccctccccttcgatcggtcgagagcaaccaagtgaagcgccatcgccggacaccagatctgcaagttgtcggcgtcaccgaggcaccgcctacttctcacgaagcatccgagtccagtatggaataaaactattgttccccttcatctttgcgtccatggcagactagatcacaactagatcatgcgatatactttatcgttcatttaggttccaaatgatgcgtaccctagattgtggccttttatttaatanatttgtaaattatatcgaaaaaaaaaaaaaaaaaagcggcc

SEQ ID NO: 164833 - DNA, 580 bp, Zea mays
  Clone ID: MRT4577_81912C.1
gcttgcttctctctttccccctcctcctccttgactccgccgccgtctcttgggagagctgggattggaggagacttccgacgcagcgacgcaggcgagaggttctttgagtttccgaaaccatggggcagaggctcctcttattggtgaccacttgtctgtgggcgctctcatgcgccgtgccgcatgatgcttcctcgcgtgatgggctgttaaggatcaacctgaacaagaagagcttgacctatgaatctctggccgcagcaaaggtcgcgaggcagcacggcgccctccgactgaagagcagcgattcagacagcgacatcgtgcctcttgtcgactacctcaacacccagtactatggggtcatcggcctcggcacgccgccgcagaatttcacggtgatattcgacaccgggagctccaacctgtgggttccctcgtcaaaatgctatttctcgatagcatgctacctccaccccaaatacaagtccagcaagtcaagcacttacaaagcagatggagagacttgcaaaatcacatatggttctggagcaatctctggatttttcagcaacga

SEQ ID NO: 164834 - DNA, 829 bp, Zea mays
  unsure (1)..(829): unsure at all n locations
  Clone ID: MRT4577_81913C.1
gcttctccctttccccctcctcctccttgactccgccgccgtctcactcgcaacacccccgtctgctatctcttgggagaggtgggagtggaggaggctagccgacgccgcgacgcaggcgaggttcttttgagtttctttctgataccatggggcagaggctcctcttattggtgaccacttgtctgtgggctctttcatgcgccgtgccgcaccatgcttcctcgcttgatggactgcttaggatcaacctgaacaagaggagcttgacctatgaatctctggccgcggcaaaggcagcgaggcagcacggcgccctccgactgaagagcagcgatttagacagcgacatcgtgcctcttgtcgactacctcaacacccagtactatggggtcatcggcctcggcacgccgccgcagaatttcacggtgatattcgacaccgggagctccaacctctgggttccctcgtcgaaatgctatttctcgatagcatgctacctccacgccaaatacaagtcgagcaagtcaagcacttacaaagcagatggtgagacttgcaaaattacatatggctctggtgcaatctctggatttttcagcaatgataatgtgttggttggggatcttgttgtgaaaaatcagaaattcatcgagacaacacgtgaaacaagtgttagttttttcgtcgggaagtttgatggcatccttggccttggctaccctgacatctcccgttgnggaagcccctccagtatggctgagcatgcaagagcagaagttgctcgctgacgacgtattctcattttggcttaaccggggatctgatg

SEQ ID NO: 164835 - DNA, 632 bp, Zea mays
  Clone ID: MRT4577_81914C.1
ccggccgggaaagactataaaacccgtgacattgatactttctttatcgtaaacagttgtttcggttaaagtgaaagttactgcatatactcgaagaaagcgcatctgcagtttggtagcgtcatttagatccaccaaccgccaactcagctcaagccagcacagccttacctatcaaccgacgcctcaatcgctggtagccgactctactcgcttttcccaacaaacaatattcttcccctcacgatattcctgcacagaaacattgtttcattcttttccaattccaattaccacaaaaatggctgcccctgctgaaaagaccatcactgacctcagtggtaaatgggttctcaacaagtcactctctgatagctcagagcccatcctcgccctccagggcatcggctaccttactcgcaagggcattggaatggctacaattacacttgatgtcaaccaatacagtgcccctcctaaagagccaaacacctctactgacgtcttcactcacatcgacatcactcagtctgcctctggcttgacaagcacccaggagaaccgatgtctcgactttgagcagcgcgaaccctctgactggctattcggctctgtcagggccgttcccgatt

SEQ ID NO: 164836 - DNA, 176 bp, Zea mays
  Clone ID: MRT4577_81915C.1
cgaatttccggggccaaccaagccttccgccaagccttccggggacccggggggccaaaatcttttccttcgagttcccaaccatggacctggttctctttcaacttaacgggcttgcccacgggggattattggctggatttctccgtcgggcccttggggcctttaaacaacac

SEQ ID NO: 164837 - DNA, 943 bp, Zea mays
  Clone ID: MRT4577_81916C.1
gcgctccactccaaacaaggggaaggcgagcgacagacaaacccaccccatcgcccctcctctgtctcctctcttgcccacccgccccaatgtcgccgcccctcgagccccacgactacatcggcctctccgcctccaggagcaaggcgccggcggaggaggccgcgtccggagctgggcccatgtacgtgaaggtgagcatggatggcgcgccctacctcaggaaggtggacatcaagatgtactccagctacgaggacctctccctggcgctcgagaagatgttcagctgcttcatcgctggtcaaagtggtctgcataaatcatcgagcaaagacaggctgactaatggctcaaaggtggatgccctcaaagaccaggagtatgtccttacatatgaggataaggatgcagactggatgcttgtcggtgatcttccctgggattattttacctctatctgccggaagctcaaaatcatgaggggctctgatgctgttggaatagctccacgaaccgtcgagcagacaggtcagaacaaataagctttggcctttgcctgcatccaaggaagacatctgagctagctgggagagtatgttgaaggctgaagcctgaaatagttgccgggaatcgtcaaaacccgtcaagtgtttagtgtagttttcacgtgtccttgagacatgtgcatttgtatgtttgtgacgtgatccgttagatcgtgcaatcgtaggttgctgttcttgtgccctttaaaggccagacagatcagggagctctctgcttccttagtgcacttgctttgcagcattccttgttattctactctgaaatcatacatcatgccacaagaaccgatggttcgtgatgtcaagagagctgccctaattgttccattgtaacctcgtaattgtgttcttccgcaggagaaattggttctgca

SEQ ID NO: 164838 - DNA, 1439 bp, Zea mays
  Clone ID: MRT4577_81917C.1
ccgggtcatctcacctccactccaaacaaacaagggacggtgagcgaggaaccccaccccacgtcgccctccccccacctttctctctagtctctagtttctagtctctacccccaggccccagactcctgcctcttctctctctcgcccacccgccccggccccaatgtcgccgcccctcgagccccacgactacatcggcctctccgccgccgccgccgcggcgccgccgacaccgacctcctcctcgtcgtcctcgtcctcgccggcgccccgcctcaccctccgcctcggcctgccgggctccgagtcccccgaccgcgaccgcgaccgggaccgctgcgaggacgtcgccgccgcgctctccctcggcccgctgcctgctacccccaaggcgcccgctgccgtctccgccaagcgcgccttcccggaccccgcccagcgccccggcgctgccaaggctagcgacgacaagcaggcgtcccccgccgccccgccggccgccaaggcgcaggtggtgggatggccgcccgtgcggaactaccggaagaacaccctcgccgcgagcgcctccaggagcaaggcgccggcggcggaggacgccgcgtctgcggcccggcccatgtacgtgaaggtgagcatggatggcgcgccctacctcaggaaggtggacatcaagatgtactccagctacgaggacctctccgtggcgctccagaagatgttcagctgcttcatcgctggtcaaagtggcctgcataaatcatcgagcaaagacaggctgactaatggctcgaaggtggatgccctcaaagaccaggagtatgtacttacatatgaggataaggatgcagactggatgcttgtcggtgatcttccctgggattattttacctctatctgccggaagctcaaaatcatgaggggctctgatgctgttggaatagctccaagaaccatagagcagacaggtcagaacaaataagcttggtctttgcctgcacccacgcaagaaatctgagctagctggaaggccatgttgaaggcttaaatagttgctcggaattatcaaaagtcgtcaaatgttagtgtagtttccacgtgttcttgagacgtgtgtatttgtatgtctgtgatgtgatccgtcagatctgttcttgtgcccttcaaaggccaaatcagggagctctctgcttcctgtgtatgcttgctttttccagtattccctgttattctactatgaaatcatccatcgtgccacaaagaactgatggttcctgatgtcaaaaaagctgtccgaattgtcttctttttacaggagaaattggttctgcccaaaacaccaataatgtggagcaaaaaacccgtcaaatgtttaatgatattttaacgtgtcacttgagacatgtgcattttgtttgtctgtgacgtgatccgtt

SEQ ID NO: 164839 - DNA, 1235 bp, Zea mays
  Clone ID: MRT4577_81918C.1
gtcaatcccaccctatcgcccctcctctgtctcctctcttgcccacccgccccaatgtcgccgcccctcgagccccacgactacatcgggctctccgccgtggccgcggccgcgccgtcgaccccgaccccgacctcctcctcctcttcctcctcctcgccggccccccgcctcactcttcgcctcggcctgccgggctccgagtcccccgaccgcgaccgggactgctgcgaggacgtcgccgccacgctctccctcggcccgctgccggcggcagccgccgtctccgccaagcgcgccttcccggaccccgcccagcgccccggcgcttccaaggctagcgacgccaagcagcaggcttcccccgccgcgccgccggccgccaaagcgcaggtggttggatggccgcccgtgcgcaactaccggaagaataccctcgccgccgcgaccgcctccaggagcaaggcgccggcggaggaggccgcgtccggagctgggcccatgtacgtgaaggtgagcatggatggcgcgccctacctcaggaaggtggacatcaagatgtactccagctacgaggacctctccctggcgctcgagaagatgttcagctgcttcatcgctggtcaaagtggtctgcataaatcatcgagcaaagacaggctgactaatggctcaaaggtggatgccctcaaagatcaggagtatgtccttacatatgaggataaggatgcagactggatgcttgtcggtgatcttccctgggattattttacctctatctgccggaagctcaaaatcatgaggggctctgatgctgttggaatagctccacgaaccgtcgagcagccaggtcagaacaaataagctttggcctttgcctgcatccaaggaagacatttgagctagctgggagactatgttgaaggctgaagcctgaaatagttgccgggaatcgtcaaaacccgtcaagtgtttagtgtagttttcacgtgtccttgagacatgtgcatttgtatgtctgtgacgtgatccgttagatcgtgcaatcgtaggttgctgttcttgtgccctttgaaggccagccccccccccccgctctttgcttccttagtgcacttgctttgcagcattccttgttattttactctgaaatcatacatcatgccccaagaaccgatggttcgtgatgtcaaaaaaaaaaaaaaaaaaaaaaaaaaaaaaaaaaaaaaaaacac

SEQ ID NO: 164840 - DNA, 425 bp, Zea mays
  unsure (1)..(425): unsure at all n locations
  Clone ID: MRT4577_81919C.1
cccgggncgacccagcgnccggcctcncgccncgacgccgncgnggcccgccccgacacgcaggccaagaagcagggcaacggcaaggccaagcaggccaacggcaaggcgcncgaccccccgcccgccaccgggaacccccagaaggaggccgagaccaaggacaaanncgagcgccaggncggcaacaaggagggccagggcggggncaaggagggcgccaagggcgggnccaccccccncnccacgccggagaccgagggcaacagccccaagcagcagggcgcggacgacaaccggcncgagggcnccgccgggcggccgcaggcagccgcccacgccaccccngccgccaaggagaaggagaaagacgacgaggaggaccacncncgccgccccgccgagcnnaaggcccgcggcngaga

SEQ ID NO: 164841 - DNA, 306 bp, Zea mays
  unsure (1)..(306): unsure at all n locations
  Clone ID: MRT4577_8191C.1
cgnccaatgttttgccaaacgttgcggtcaccaaacgagcgggtcgtatagtaggggacctgtgggatttacaaacaaaacaagagggccggtggggccgatcacagctttatagatgcaaggctgaagcggtggaggatattatataccgcggggacaccgactccagatacgaatgaaaacaaagctgtgtcgagcagcaatatgataatgaaagagaggaacgcttggacggaaaaaaccgagcagtctacaaatatggatacggtaccggtattggcttatgtggagaaacatttacttgat

SEQ ID NO: 164842 - DNA, 863 bp, Zea mays
  unsure (1)..(863): unsure at all n locations
  Clone ID: MRT4577_81920C.1
cgtaatcgtaatcatactcagattctccccacagccagattttcagaaaagctggtcagaaaaaagctgaaccaaacaggccctttgaccctctgttgtttctgttttgcaggaactttactttagatcacaatcacaagaggatgagatcttgttgcttcgcaagaaaattgctgaggcatctctcaaggagctgagattactgggtgaaaaacatattctggagaggaggctcacagacttgaggatggctgttgacgagaagcaggaagaagctatatctggtgctttgcaacaattgaaccagaagaaaacccatcttgaggacaatatgagactggcaaatgaactaaaagttgaggaagaagagctatacttttttacttcttcattgcttagcatgctagcagaatacaatattcgcccacctcaaataaatgcttccatcattacaactgttacaaagcgtttgtaccaacagatgcatttgaagctcagatctttaaatgacaatttaggtgatatgactcaacctggaaatatatataatcccaatcttcagcaagtaaccctatcaagaaatgaaccttccccatcttataatttggattcaaataggaacactcttcaacagtatgctcaaggtccaagtgaccgacatatggatcaaatggatactggcggtactactccctctaattattttgagggagacagaagagtagatggtgactcacagttataccaacctgatggtgacgctttacctggtattgaggggtttcaaattgctggtgaacctagaccaggatttcaattaacagcatgcggnntttcctactaatggtactaccctttgcaat

SEQ ID NO: 164843 - DNA, 380 bp, Zea mays
  Clone ID: MRT4577_81921C.1
gagcgcgcgccctttttttttttttatattttttttttttttttttttttttttttttgggggtttttaaaaaaaaatgcggggtttaaaaacccaattcctttaaaactaaaccatgggagggggggcctttccattcttatcccgggcaaaaaaatcgtaccatatacactaaacacgcttggactactaaatgtaatttatgaatgttaacagaaggaacgcgtataaattaaaatttgattccgggtggccggggagggggcccttaaaaaactataaaagaggaccgggggagtatttcaataacacaaactgttgcaaaaaagccccgcggggaggccccgaaatgtgccatgaattaaaaagggggggaccaa

SEQ ID NO: 164844 - DNA, 433 bp, Zea mays
  Clone ID: MRT4577_81922C.1
gtataaatccactccacaggtgacagcacaacacctgcggacagatgcacctaacgcaagcggctgtcttgcatgatgagttgcaattcccaccgttgctgctgctagagagcatggacaccatatcacatgtaagatacgtgatcatatcagcacggtgaacggtgctgcgctaacttgtactggcccgcgcaatgtgatccatgtcatgagacctagacatgctccccggcagaatcatcagcgtcaagtcagtgagcaacattcgatctgctgctaccagtggcaatgcagtgaactcgaaggtcgacgactccttccatgaactgtaggatcacgacctcgatcgcttgatcacacacgatctgatgtagagtcggtttgtcggagacgcgacaagattgtgagcatgtccaccacgctcaaactacta

SEQ ID NO: 164845 - DNA, 732 bp, Zea mays
  Clone ID: MRT4577_81923C.1
tggtacgcctgcaggttccggtccggaattcccgggtcgacccacgcgtccggtggcgcacgccggtaggatctgcctcccaagtgctgggattaaaggcgtgcaccaccaccgcccagcagctcagaactttttaatgtcacctctgtaatttgctaaacccccctctatgtgtcatcctgacacctgagatgcccacagggttgactcttctcaggatgacaggacaggtgcaggttgggagtgtgatgtgagacgtggaaaatgctttctgactatccccctgcctcacccccagtttgctgagaagtttcaggaggtgaaagaagctgccaggctggctcgagagaaatctcaagatggtggagaattcactagtactggcctggcccttgcctcccatcaggttcctccaagccccttggtcagcaccaatggtccaggcgaggaaaagctgttccgtagccagagtgcggacacccctggccccaccgagcgggaacggttgaagaagatgctgtcagaaggctctgtaggggaggtccagtgggaggcagagttcttcgcgcttcaggacagcaaccagaggttggcgggagcccttcgggaggccaacgcagcggccactcagtggaggcaacaactggaggtccaacgtgcagaggctgaactcttgcggcagcgggtagcagagctggaggcccaggtggctgtagagccagtccgggcagg

SEQ ID NO: 164846 - DNA, 346 bp, Zea mays
  Clone ID: MRT4577_81924C.1
ttttctttcttttattcttatgctcttttttattagctagatcaatcgaccttcgttctttttgctctcgcccaaccggttcataggatgagattgtagagcgcctcgacccaaccacaaaattggattaccttctacaggagcatcaaaaaggcgggggcccctaaagaataaaccctcaagagattttttaaaaaaagacccattatcagcagtgttaaaaaaaagtcctgaccgtcaaataaatttctgtaaaaacatttcttaaaaaaaacacgtttatattgtcgagtgctaaaaacgctacggaagctcccatgcaattcttggaagaaccaacacaggc

SEQ ID NO: 164847 - DNA, 209 bp, Zea mays
  Clone ID: MRT4577_81925C.1
gagacgatcttgcatcttcgatggcaccatactgcacctacactggcagacagaatagagtgccttgttatgctcgtcggtctttctgaacgtgctacttcctccaccattctacaacactgatcatgaagcttgtatatgttaccttcataacgacgtacctcacaccagtagtgcatacgctatatgaaaacccagttatttaacac

SEQ ID NO: 164848 - DNA, 467 bp, Zea mays
  Clone ID: MRT4577_81926C.1
acggaacgcttttcactaaacaagagtaccaaaggcaccaagataggatgtacagcacatactttggctgaactctgaacaccttattccaggacaaagactaggcgttgaactaaggaagacactgtcgtgcaacgggatgtgatgtgtgttcatatatgcctatgtggtcggcatgcaacattattggctaagctgcagagttacatgcgaggaacgttgtagtactcgggcctctcgccaatgagggccgggcgtttgcagttctgcgcgcaacggttggtgaggctgcccaggaacgccctttggctgaagccgtaaccatggctgctcatgaggagcaggtccgtggccatcttgaaggctgcgggggatatgacggtgccggggaccccggtctccaccgtggtgtgcaccttggacggcgggcggtcggagcagacacccttggccttgtggaccgccgc

SEQ ID NO: 164849 - DNA, 368 bp, Zea mays
  unsure (1)..(368): unsure at all n locations
  Clone ID: MRT4577_81927C.1
aggtgcgattttttttgttcatgttacttggcttaatttggcggaagccattcagatttttgttgatgaaccttcggagcctgttctttgcccttttattttggcgttttaaatgtgattttgatggctcgttcctaatcccgctaaccagtgcacatatgattctgatccagttaggatttgaatcagacaactgtactaattctcatgattatatgaagctatgcgacggttcaggaaaagtggatggatgggacaagccaacatcaataatgtggtggttcaggattgattctcacagaaaatctgtaaaaaaagaaggaaattgctgcttagctctcaacgaattctattgtgaaaaaanaaaa

SEQ ID NO: 164850 - DNA, 846 bp, Zea mays
  unsure (1)..(846): unsure at all n locations
  Clone ID: MRT4577_81928C.1
cggccgctcgagccggccggccgggattcatcacgcacgcctcctccccaagctctccccatcgcaagaaccaacttttgcccccaaatccccccctaaactctccaatcccctccccccattgcgagatcccgcaccagattcgatctcccccctcccaaaacccacgagggacccgtctccgtccccgaatccgccgtttccctcccccgaatctggcggccggagatcgggcgcgggagccggcgtccggcggagctcgatctgtccgtccgagctgaggcggaccgcgaggaggctagctgcggcgcggcattgggcttcggcgcgctttttcgacaaaaagaatggcggcgccggggagcagtaatggcggtggcggcagcagatcccagcagcagcagccgcagcaggacaagcagagtatatgggctggctgtttctctggcttgtcatgcttcggggcgcagaagggtggaaagcgtatagttcctgcagcacgtattcccgacgggaacgcttcgactaaccgtggaaatgctcagtctggtggcaatcccaaccaaaatggggctatgaatctgccccttctcgcgccaccgtcatcgccggcatccttctccaactctgcacttccttcgactgcccagtcacctaactgcttcctgtcaatctctgcaaattctcctggtggcccaacatctaacatgtttgctgttggaccatatgccaatgagccgcagctcgtctcgcctccagcagacttttcgacctacacaaccgagncatccacagcaccactgacccctcctcctgaactggctcaggcaacactccatcctctcc

SEQ ID NO: 164851 - DNA, 423 bp, Zea mays
  Clone ID: MRT4577_8192C.1
gacatactgtgtggctgctgcatacattccacagacccaaactactatgctgcatggctgggggtgttgaggctgtcacagaacagctcgtggcggaggaagctgctcctgcctgcttctaaaagactctatattcaggctgattcaaaccttacaccttacatacgttctacaagctgctcacactgatcaggctaacaggatctactgagcgaaggcacttttaagcacaagtgacagaacaattgatggttaacaatggcatatgcccttgcctgtgcacacaatatccagacgattggtaccaaaagctagaatgtacggtgacaggtgcaacatttctcactagaggaaacaaatgtcaggagagaccagaggttcaacacatcgaaatcaaagctatcgttccaggtataattctcg

SEQ ID NO: 164852 - DNA, 507 bp, Zea mays
  Clone ID: MRT4577_81930C.1
aatagaaacatatgcttgattttcatgtaaaattgtaattttttacaagccaatgaatcaatataatacaagaagaagcaacttaagttgtaaaagtactaaatgccacaaagggtactcacttgtgtggtagccattttctcctcctcgtcgtagacaatttcttgtgtagaggtcgtatcatggattttctatcaacaatctcccaaacttgtcccctatagatgaggtgtttggtggctttccatccattgatactagtgtcaatggtagtgatatcaatgctttggggcctctctatgactgcacttgtcgtatccctagtgtcatgattattcttgaattttgtgctcttttccttctgtaaggggacctctttatccttctcatacttttcttgtagattggagaggagactaaaccttcgctttccctttatgatggaatcatgttgttcaaaggtctgcttaggaattttgctagaggccattaagtcattgctacaaa

SEQ ID NO: 164853 - DNA, 996 bp, Zea mays
  Clone ID: MRT4577_81931C.1
cactcctatagggcgattggggccctcgaggccggccgggaagctagccacaggcaagggcgcaaccaataatagcaagtgtgatcatccgttgatccatcttgctaataagcctgcgtgcccttcgttcttcctcgtctcgatcccgacgacgctccgttcggctccggcaaaccacatcaagtcgcgatggagatgaagaaggtcgcctgcgccgtcctcgccgccgccgcctccgccaccgtggtcctcgccgccgaggccccggcgcccgcccccaccagcgcctcctcggccgcgttcccggccgtcggcgccgtgctgggcgcctccgtgctctccttcttcgcctactacctgcagtaaaattaaaggaggatcggagggagaggctgctggctgccattgcctgtattcggttggattccgtttatatatatatttaagtactttaatttgggtctgaacatgtcgattgatccattcattttatttgctttgccatttctcccttttctgttaatttcgatatgtaaagaggggagaatgggagacactattcgtttggacatgacaattggaaattaatcaatacccattgttagttaaaaaaaaaaaaaaaaaaaaaaaaaaaaaaaaacagccgccggcccctagggccaaaatttctaccgttatgttataacttttgtctttcccggctcacttcgctgtcaactacatattcacaaatgcggcaatgtggacgtctagttcagaaggcagcgatgctagtaccccgccggtaagaagttcgagttacgcagcgagaagggctgcaaccccaactacctgggcgtgctggtgtagtatgggtcgtacgacggcgacatcgtgctgatggaaatccaggacaagttgtcggatgagtggaagcccatgaagttctcttgggcgcccatctggaggatggacactgccaaggcgctcaagggccccttctccatcgcctcacag

SEQ ID NO: 164854 - DNA, 389 bp, Zea mays
  Clone ID: MRT4577_81932C.1
atatcgcatattaataaatacagaagtagatgcgcttatacatcatcaaattgatagaacagacgacaaattcgtataacgggaaatgagccgtgtattgctagtgctacttaggctacgaaaggcgtctcttcacggaaagacagctccaggattttttgtgaatacccctttcgacacctcaatagtttttgcattaaacaccattgtaaatgccttctgatataaatttcagtgataggactccaccagcagagcagcagagcagtcagtaccaaaaccagcgcgacctgccagtgcggcagtgccagtgcccaatggttcacttcacaaacaactgcttcttgacgggtgcaataactggagttgcagttttgattggatcaata

SEQ ID NO: 164855 - DNA, 219 bp, Zea mays
  Clone ID: MRT4577_81933C.1
ctgaagcaacagcaagttcagcagtcagtgcaggaacaacagcaaatagagatacagccttttcaggtacctaatgatgccaacatggtaacacagttatctgatcagatgacaatacaactattgacggctctacagccatagcagcctctggtcatggaacagcagagaatgatatctgatttgcagcatcaagcagtacattctcagtcaactgct

SEQ ID NO: 164856 - DNA, 234 bp, Zea mays
  Clone ID: MRT4577_81934C.1
gtctcatactgacgagctgtcttgtgagaggaagagaacaagcgatcggctcatgctgccctcaagaaacaatgttccatagggctagcagcggctgcagcatagtaccactatcatgaacgagctgaattttcaagtaagtacctactcgctcatttacctagtaatcagtcctccccatggcgtctgactgggctgaagggttggtgatgctcaaaaaaaaaaaacaacaac

SEQ ID NO: 164857 - DNA, 372 bp, Zea mays
  Clone ID: MRT4577_81935C.1
acacatccgcgcccgtcgaggttccacgggaagctctgccaagccctgactcacatgctgcgcgtagggccaatgttgactggttactatctatcatatcagcaatgtgtcctcgttttcgtcagatcacgtccttgtcacctccggttctaccatcaccctcattgccagagggtagtgacatgagatcattcacaccgtcatattgatgactgacgtcataactctcactgcgctgggattccgcactgcattgtctactgcggtcgcgttcactcataatcgtattactgcgcacatatatcgtgctgtcggtcttccgtgtaccatggggaagagagcacattataaaggtttccaagtgtacagttt

SEQ ID NO: 164858 - DNA, 3127 bp, Zea mays
  Clone ID: MRT4577_81936C.1
cctcgaggccggccgggaaaattccattctggtcccttcctcgccttctccgcctccgcatgaccgcatccatccggtctccagttgtctcctcccgcctccttccggtcccctcccggcgcagcctctcccgccccctccagccaagcggaccctaggcggagccaccttccacgcttcccgaagctcgcccgtgaggggaggccaggatggcagcgacgtcggcgccgcccacgagcgtccacgccaacggcaacggctccctcgtgggggtggcggcgccggtgggagcgcccaccaaccccatggcgacggctctgctcaccgaccagtaccagttctccatggcctacgcgtactggaaggccgggaagcacgccgaccgtgccgtgtttgacctgtactttaggaaaaatccatttggtggggaattcactgtttttgctggccttgaggagtgcatcaaatttattgcgaattttaagttcacggaacatgacatttctttcctgcaatcagtcatgccaatgtgtgagggtgcgttcttcaattatctcagggaagttgactgctctgatgtagaggtgtactccattcctgagggatcagtagtttttccaaaagtgcccttgatgagagttgagggtccagttgctgtggttcaacttctggagactccatttgtgaatcttatcaattatgcctctttggtaactactaatgctgcgcgtcatcgtcatgttgctggaaagtcaaaggttctgttagaatttggtttaagacgggcacagggacctgatggagcaataagtgcctcaaaatattgttttatgggaggttttgacgcaactagcaatgttttggctgggaatttgtttggcataccacttcgtggaacacattctcatgcttttgttagctcatatatgagccttgatgagataccaaacaaggccctcaggaacaaagatggctcaagagtttgcgaggattttgttagtttagtgcaagagtggcttcaaaagtttcaggcagcagattcattaggtggtgtatttggtgatacaaataaaagtgagctggctgcatttgcatcctacgcattggcttttccaagcaactttcttgctcttgtggacacatatgacgttatacgaagtggtattccgaatttctgtgcagtggctctagcacttcatgacttagggtacaaggcatctggtattagattagattctggtgatctggcctatttgtccattgaagcacgaaaagtgtttcgtgcagtagagaaggaattcaatctacctggttttgcaaagatgctcattactgctagcaacgatctgaacgaggaaacaattgatgccctcaacaaacagggtcatgaggttgatgcctttggaattggaacttaccttgtgacgtgttattcccaggctgctcttggttgtgtctttaagctagttgaaataaataatagacctcgtattaagctgtctgaggacgtggcaaaagtttccattccatgcaaaaagcgatgctttagactgtatgggaaagaaggctacccactggtagatatcatgattcgtgaaagtgaaccatcacctaaggcaggagaaagaatcctctgccgccatccattcattgaatcaaagagagcatatgttgtcccccagcatgttgaggagcttctacagtactattggccggggacatcagataaacctagagcagagctgccctccttggagaagatcagaagccgctgcatgcagcagcttgaaaagctgcgtccggatcacatccggcggctaaatccaacaccgtacaaggtgagcgtgagtgcgaagctgtacgacttcatccactgcctatggctgaacgaggcaccagttggtgaactgcagtagatgatggccacatgaaagaagttttgggtcatctttgacacagcagcaaaccatacaagaggatcagagcttttctgcgcaatatcagcagttgagcccatggcccatggcaggattttgctcttcagatttccatctctaatccccggtatagaggcaggttaatcaagtcgtctagtttatacatcctttgattggtgggatactatacacatcatcatcatgaaaagaacagaaatcatttggagtcaatgggaagattaatagcccaacaaacagggtcatgaggttgatgcctttggaattggaacttaccttgtgacgtgttattcccaggctgctcttggctgtgtctttaagctagtggagaaaaataataaacctcgtattaagctttctgaggatgtggcaaaagtttccattccatgcaaaaagagatgcttcagactgtatgggaaagaaggctacccactggtagatatcatgattcgcgaaagtgaaccatcgcctaaggcaggagaaagaatcctctgccgccatccattcattgaatcaaagagagcatatgttgtcccccagcatgttgaggagcttctacagtgctattggcctgggacatcagataaacctagagcagagctgccctccttggagaagatcagaagccgctgcatgcagcagcttgaaatgctgcgcccggatcacatccggcggctaaatccaacgccctacaaggtgagcgtgagcaccaagctgtacgatttcatccaccgcctatggctgaacgaggcgccagtaggtgaactgcagtagatgatgatcatataaaagaagttttgggtcatctgcgatacagcagcaattcatcgaagaaaattagagctcttctgcacaacatcaacagttgagcccatggcaggattttgctccccaaattttcatctctagtcaccggtatagaggcaggttaatcaggttgtctagtttatacgtcccttaattggtgggatgctatacacatcatcatcagaaaagaaccgaaatcatatggagccaaaaatgttactaggtcgtccggtgtttgtgctcgacggtgtcacatttgtttttctagccgatcgtgcatatggtcatataaaacactgcactgttgattgtactgtttatatagtgaaatttgaaatgatagatggaataggagatagaatgga

SEQ ID NO: 164859 - DNA, 604 bp, Zea mays
  unsure (1)..(604): unsure at all n locations
  Clone ID: MRT4577_81937C.1
aattcggcacgaggggagactccatttgtgaatcttatcaattatgcctctttggtaactactaatgctgcgcgtcatcgtcatgttgctggaaagtcaaaggttctgttagaatttggtttaagacgggcacagggacctgatggagcaataagtgcctcaaaatattgttttatgggaggttttgacgcaaccaggtcaattattttgcatttatagtttagaactaaaatccagcgtatttgtgatccttgctctttataataatgcttgaagaagtaaactttcagttatgcttgcatatttgcctttctgtccttcaccataaaaaatactttgtccccaaaaatgttaaatgtgtttaccttttgctcacttttttgttgcagtaatgttttggctgggaatttgtttggcataccacttcgtggaacacattctcatgcttttgttagctcatacatgagccttgatgagataccagacaaggccctcaagagcaaagatggctcaagactttgccaggattttgttagtttagtgcaagagtggcttcaaaagattcaggcagcaaattcattagngtggtgtattttggtgatac

SEQ ID NO: 164860 - DNA, 388 bp, Zea mays
  unsure (1)..(388): unsure at all n locations
  Clone ID: MRT4577_81938C.1
gnaaaggcaggtgattcaaaaaggcgaacccaatccagatgaccttgcaggtaaacatgttttaaaataacagtttggatccccaaacaacagacacggggcccacaaccaatatattttaacagatggaattttccgggcccaagtccaaaataaacgggggcccatgagaggacccatttttttttttttactgcagccttggtcaccttggcaccagtggggtcctttttttccacgcttttgatgactccaacagaaaccgtttgcttaatgttacggccagcaaaacgacccagggggggatactgagagaaggtctcaaccaccatgggtttagggggaataattttaaccatacgcggttaaccatttttaaggaacttgg

SEQ ID NO: 164861 - DNA, 1227 bp, Zea mays
  Clone ID: MRT4577_81939C.1
gggagttgcggttgcaggcatcctctgctcgccgtcttgctgccgttgctgctagtgctagcaatggtgcccgagtcggcgcagctgcagtcgtcgcagacgtggtcgctgctcaagatccagcagctgctcagctacccgccggtgctccgcacctggggcaacggcaccgacttctgctacggcggggactacaagaccgcctccgccttcgtcgagtgctacggcgacagcgtgacgcagctccacatcatgggccccggcggcgccccgccgctgcccaagacgttcaacctggacgccctcttcacgacgctgacgaggctccccgacctccgggtgctgacgctcaccgggctcggcctctggggcccgctgccggggaaggtgtcgcggctggcgtcgctggagatcgtcaacgtcagcggcaactacctctacgggcagctcccggaggggctatcccggctgggcggcctccagacgttcatcgccgacgacaacatgctctccggcgagctgcccgggtggctcgggaggctggcgtcgctggccgtgctcagcctccggaacaactcgctgcagggcgcggtgccggagtccgtccgggacatggggtcgctgcggtcgctggcgctcgcgtgcaacaacctctccggccaggtgccggacctgagcgcgctgacgaacctgcaggcggtggacctctccaacaactcgcttggcccggcgttcccgcgcctggggcggaaggtggccagcgtcgtgctcagcggcaaccgcttcggcaacggggtccccgccgaggaggtcgcctcgctctacctcctggagcgcctggacgtgtcgaggaaccggttcgtcggcccgctcccgccggcgctgctcgcgctcccgtccatcgagtacctcagcgtcgccggaaaccgcttcacgggcctgctcgccgccaacatgtcctgcggcgagaacctccggttcgtggacgtgtcgtcgaacctcctgacggggacgctcccgtcgtgcctgaagacgctcccgtcgtcctccaactccaagcaggtgacggtcctggcggcgtccaactgcctgtccggcggcgccggcagcacgcagcacccggccctgttctgccagaaccaggcgctggccgtgggcatcgtgcccgtgcaggcgcggggcggcggcaaggccaagggcaaggccggagccgtggccggcgccgtg

SEQ ID NO: 164862 - DNA, 371 bp, Zea mays
  Clone ID: MRT4577_8193C.1
aaaaatcctactttagtcacccatttagtgactaaatgactaaactttagtcacctcctttcgatcactctgtttgtttctttagagactaaaaataactaaagtttagtaacactaaaccaaacgggcctaaatatactatcctcggagatttccatgtgtaaataaacaaccgtacagcagcaacacacgcttctccaggatctccttccctcatggccggaatcttttatcctgatgctgccctggcactatataggtatgctcatcatataattttggtcaagccgcgtaagtttgaaacctaattcacaggaatatacatcggtgttctcatctgtctaataaccagttaaagactgtctttttgg

SEQ ID NO: 164863 - DNA, 720 bp, Zea mays
  Clone ID: MRT4577_81940C.1
ccggccgggaaaaaacgttcggcctctgccggtctgccctctgtgtcctgtccacccccgttcaccaccggcatttcgcgagaacaccacacgtccacccaccggccgccaccatggccgctgccgaccccctcgtcgtcgtcgtcgccgtcgccatcgccttcctcctcgccgccgccgccgccgccgcccccttgcctggcggcggtgggggcctcccgttcccgctcctcccggccgaccccggcgccgggtgccgtgggcccgtaggcacgtgcccggcgggggacgaggcgccgccggatttcggcgaggcctccaccatggcggtcgacgatcatcccgtacgtgcccggcgggtgcagcaccaacggcgcgacagcgtgccgtgctcgcgccgcggcgccagctactacaactgccggcccggcgcgccggccagcccctacagccacgcctgctcccgcatcaagcactgccacggctgaagccatgcatgagcatgagctcctctttgccatccatcgcgcgtccagagaactctgcgtaccaccagctgcacacgacgccacaggcctgtctagtagataccgagagctgatcttgttgcttcctccgatccatccggcccattattcccatgcataatggggggaacacaacacacacgtataggattataggaataggatcaaaggagacaatctatctagtgcctgc

SEQ ID NO: 164864 - DNA, 367 bp, Zea mays
  Clone ID: MRT4577_81941C.1
acagcaaaagggttcagttcaacggagcatccatccaaaatttgggcgttgcaaaacgaccatttccctggccattttagcgggctaaatgctgactgcaactgcaagcaaaaaaggtccctcaaaggagcccgggaacaggatttgcgcccccttgtcgcccccgccccggggccccgacaagggccacttgaggaaactgggcgtgccgggcctggacaaccccggggccgccttcctggggctgccaagcaacaacctttgccaccaaagcttccgccattgccggcattttgcccacaagggaacgggctttttccgattgcttgaacaccaagggcctccctttgccggggttgtatctggt

SEQ ID NO: 164865 - DNA, 468 bp, Zea mays
  Clone ID: MRT4577_81942C.1
cccacgcgtccggccaccactttagttacatcatgatcaacatgtcgcgttaggatatcttttatctttgaaagtataatgtgttacctaactacaagaactcaaatataggacttcttgttggagatgctctaaggagatcgaggatgatcccgtctacggtggcaagcagtactacaattaagtaataatggagggcggcctggtgttgacagccaaacagcgacaggaataccctggcggatggaacccgttcgtgttatggcgcggcgtgcctcgtggcgccatagagcttcattacaatcatcttcttcgtgttctacgctatcttcatgacactatctatggttgtctatatttagagagagaatatggatgaaggagtatcctctatatttagagtgtactctagaggacatctttgaagtctatagaggagagaatcttttctatatttatagctagtag

SEQ ID NO: 164866 - DNA, 377 bp, Zea mays
  unsure (1)..(377): unsure at all n locations
  Clone ID: MRT4577_81943C.1
ccggaatattccgggtacgactccaccgcgtaccggtatcaatcgtaggtctgtatgcgtganntggcaacggcatccactcgatattctccaagaagtttgctcaacaccttagntggctcgcacagatgagaggatcactcgcatctctgatggaagtagactcatagggaggctcttctcgctgtgttgtgacataggacacagaatcggtcttctatctcngtgtccgccgagcctctcgnnncatgtcatgacaananntcttggtgagaaagctaatctgatgtaggcaggtggtacgagatgaatccgtgagggctgatgtncgatggtgatgggccagatcaactacnaggaagtttgtcaaggtcatg

SEQ ID NO: 164867 - DNA, 519 bp, Zea mays
  Clone ID: MRT4577_81944C.1
aagactgacatcaacattgtctctaatgctagctgcacaaccacttgccttgctccagttgctaacggcatcaatgacaagatcggtattgaagagggtctgacgcccactgctcatgccatcactgctacccagaatactgctgatgggccctcatctaatgactggaggggtggaagggctgctagtttcaacaccattcccagcagcactggagctgctaaggctgttggcaaagtgcttcactgtccttaacggaaagctgactggaatgtctttccgtgtcccaaccgccaatgattctgatggtgatttgacaggaaggcttgaatagtcagcatcctatcattagatcaatgatgcgatcaacgcccaaccagaatgtagcctccagggcatgctgggatacggtgaagaagaccttgattccacccattctcagggtgacagcacgtctaacatagttgatgctaaggctggcattgccttgaacggcaacatcctgaagctcgcgtactg

SEQ ID NO: 164868 - DNA, 237 bp, Zea mays
  Clone ID: MRT4577_81945C.1
ctgggtgcaggcgcttttcaagccccataaacccgagcggatctgtcacatatggtcgcaggacgggaaacaaaagagcaaaacatgtccagactcatctgaacgtgccgacccaaagccccaccatccacattaataccaggcatcttttttttgacaccgtgggtgaaaagcacgggggaaaaaccccttttgttttttgaacatgtggcggatcaggcacgaccacccggcagc

SEQ ID NO: 164869 - DNA, 539 bp, Zea mays
  Clone ID: MRT4577_81946C.1
gaattcccgggtcgacccaagccttccggggccttaggtaacctgcaggcggctgccaagaaacacatactcgtcaagcttcctgtttggaaacctgcagcatgagcaccaatttgagagccctcaggataccaaggagaaactggaagttaggagaaaagaagtccttggccgaataaaatgtgtgcctacactttactttttggtctctacagctttgcaggagtatttagtattttgatttgacagcaacacataatgacataactactatgagcattgctaattaatttacaccggtaccttcgtttgagaaattttcttgcatttccagcatctgctggcagacctgaagggtcatctccagctcagggatcatctagtgggaatcaccaccaaatgaactctaataagagggaatatatgaagacaattgatgcttctactattgaagatcctcgtttcagtcatgtgccctgagacaaggattatgttccatccgagtagatgaatgctactgtaaagctagtcagagggaa

SEQ ID NO: 164870 - DNA, 499 bp, Zea mays
  unsure (1)..(499): unsure at all n locations
  Clone ID: MRT4577_81947C.1
ggtggggaaaaaactatggtaaataagaaatattttattataggcaatgctttttaattacaacatccatcagatccctgaaacctgcaagatgcaagggctttcatgatctttttttttcttctctacanaattttttttttttgtgggggacnnctcctnccctcttntnctcctccnncaacnncaagttaaacatcancttnactctttattcnncnatcttangtcccttcnctcccntnnccccatccatcttccanagcttnaccttccaaaccttttttttncttcccctttnnncggggacgggctgcgcccggtcttttttttcttgggcggnncttcggnnggggnggtttttttttttttttttttttttttttttgnncccctcccccnttgcgcgcccnncctccncttgccttcgccccngngncnncctctttcngttttttttttttttcttttcctttttttttttttttctttttttttt

SEQ ID NO: 164871 - DNA, 1115 bp, Zea mays
  unsure (1)..(1115): unsure at all n locations
  Clone ID: MRT4577_81948C.1
gaggatatctcttacgcttgcggctggtggagggggtaatgaagaacctacaagtgttgatggcctaaaatcacagccaaaagttccatcaaaagaggcaggagttgaacctttacttgatgctgcctgtcaaccatttccaggatcatcgaggttaacttttgaaggcaggcatcttagcttctgctctcccaagcatgaacaatgacagatgtaatggatctaatctaaacccgagaaggattgaaaatatattttctcatcctcgccaaccacggtctgttaggcctcgtttgtgtttgtcattagattctgattcagagtagttcggacatcacactgggatagctgaatttgctattaatctggcaaagttggcttccagaatcttgatttttattgtggagggctatcaagttattctggttgatacaaagagaaacaccagtgtggatgctttattgcattaacctggtaagattcaagtgttctatatgatccaagtgggatctccatagagttcatctaatgctgccgctgtagcgggatgacccaggtttgccgcagatgacccaggtgggactatgcggtggccggcagccccagatttggtgggggatgagataggaggcgtcaaggacgcccacgcgatgccttaaaaacactgcttatgtgaatattgtttcaaaatacgtctgcttgattgtttagcatgaattgagtcgatgttggtacaggatattttctaactgggagtggtttaacgtggctagtggagcaggctgtacattttccctgacatttactgggtataaggaatagggggccatcacttggcacaagacaaatacatgtgaatgttttgtgtgtaccatcattgtatttagggttcgggtgttaatttagatgtttatgaccctgatgtttgatggaaaataaattattccttgatgaagcggcggtcaatgaacagagcccttcggttttcagtcggagcttnnnnnnnnnnnnnnnnnnnnnnnnnnnnnnnnnnnnnnnnnnnnnnnnnnnnnnnnnnnnnnnnnnnnnnnnnnnnnnnnnnnnnnnnnnnnnnnnnnnnnnnnnnnnnnnnnnnn

SEQ ID NO: 164872 - DNA, 1040 bp, Zea mays
  Clone ID: MRT4577_81949C.1
gcaaaggcccagccgaggcccacccccaccgggaccgccgtcccgctccacgcgtccgcaccctctgcgcggcgccggtcgagaactcgtgatgccccgcgaccgcgacgagccagccgccgtgcgcgtctacaccgtctgcgacgagtccaggtacctgatcgtgcgcaacgtgccgtcactcggatgcggtgacgacctcgccagtctcttcgggacgtacggccccgtggaggagtgcacgcccatggatgcagaggactctgagccctacactgacgtcttcttcgtcaagttctcacaggtcaacaacgccaggtttgcaaagaggaagcttgacgagtctgtgtttcttggcaaccgcctgcaggtgacctatgcccctcaatttgagagccctcaagataccaaggagaaactggaagttaggagaaaagaagtccttggccgaataaaatcatctgctggcagacctgaagggtcatctccagctcagggatcatctagtgggaatcaccaccaaatgaactctaataagagggaatatatgaagacaattcatgcttctcctattgaagatcctcgcttcagtcatgtgccctcagacaaggattattttccatccgagtcgatgaatgctactgtaaagctagtcagagggaagcttgataagatacaatctggtggtgataattccagtacctcagcagcatccaggaaaccaggggtcgataagcgcaggcgaatttgattgcagataatgccgagcacgcgttcaatgttttggtgtaatgttgatattagcataacataccaggattttaatggccttttttctatcaattttctcactcacattctaggccattaagttgtttatgtttcagggtggcggtgctgtactatatggttagctagaattgccggaatatcgataaccgagttaagttaaaaatgcctcgcgtttagttttcccagggtggcggtgctgtaatgttatgttactcttgcaatcaattgtatcggaattctcatatttt

SEQ ID NO: 164873 - DNA, 413 bp, Zea mays
  Clone ID: MRT4577_8194C.1
gaagaacgggggggatcaatttttaaaaaccaccgaggccaaggggcgggttctcaaattgaaagggggctcttttaaaaaaggaccagtctggcaatcttttgtttccccgccttaacaaactgaaacccccccagacggggtgaaccctccccaggttcataaaattccactttaattaatccaaaaacaactacccgaagaatgccaggcaggaaaaatggggggctaaaaaggacctcccaaacgcgacaaaaatgggatggggggccaggctgttcagggggggggcccactggttaaggggccctttgccgggggggggcgtccgacggcaaacacaggaaggcaaccttggcgaggtccccctttttgtattccacaagtttgaacagttcctttttttaaaggta

SEQ ID NO: 164874 - DNA, 438 bp, Zea mays
  unsure (1)..(438): unsure at all n locations
  Clone ID: MRT4577_81950C.1
gcggtgtggctaccatgtcgtccaatanactatagaatgcatcccacaggagaagatacagttcatcatttctgctttttacggacatgtggtggagttttctcatgcatccctatggttgccgcgttattcatagggtattggagcattgtgatgatgaaagcacacataatgccatgatggaagagatcatgcagtccgcggctactttaacagaggaccagtatggtaattatgtaatccagcatgtcctgcagcatgggaaaccagaagagcgttctacattaattacacaactcgctggacagatagtgaaaatgagccatcagaaatttgcttctaatgcaatgatgaatgaccagttcgcacactatgtggtgcacaaggttctggagatatgtgatgaccagaaccgtgaattgattctttcccgtatca

SEQ ID NO: 164875 - DNA, 190 bp, Zea mays
  Clone ID: MRT4577_81951C.1
actagcagatgcgccatctacaactccacgaccagacaacagaccatgacatcgctcgctaactgataagccaaatacccgcctaagcgagcaccaccataaatagagcttacacaacatagccaacatgcaaatcattttataactgaccagatgcagaggcaggaattctcgaggcgggctacacaag

SEQ ID NO: 164876 - DNA, 2659 bp, Zea mays
  Clone ID: MRT4577_81952C.1
gtttgttcatctatctcaagaagcaccacccctgacccccagctgatacggagaactcctagtccttgccttcctccagttggagttcggatggggagttctgataaaaaaagttgaagcttctgtttcttcacttaatcatgatggtgctgacattgtggcaactctgtctagcttaagcctatctggaaataagatgtcaaatgtggaaaatcaagctcagaatcatgtttaccagaactttggtgaccaggcagatgtgctctttaatgtaccaaaggaacacaggcaattttcaccacaaattttaagtcaaaataccgatgacggctcgtttaatgcccctgaatatgcagtttttccaaatggggggagcaacttcagtaatttgcatgctagtaaggtggcatctcatagcaatagcaagttttctatgcaatcaccacacggtaatgccaacaagaaaggatctttgatgagctcaactggatcagtttctcagtaccagaacttgaatggtgatagccatgacattgatgtatctgggcaatatatgaagactcatgcaggcggttttacttcatccatgctgaacaatcaattgaatcctgatggtgactatggcaatgttctttcgaacaatggggtatcgggttaccagggccaaccaacagagacgatgtacgcacaatgcttgcaggcaaaccctgattcaccccttggcgcagctgcaagcatgagccctttccaagggaggggttttactggttcaggacacttggatagccctgggtaccaaaaggcttaccttgggacattatttgcccagcaaaagctacagtatgggatgccatacctgggcaagtctggtgctcttaatcaaagtatctatggcagcgatcctgcatttggcattggaatgacttatctaacaagcccaccatctagtcagtatatctcatctcctcgaggccatgtcaggcaagcagatcggccgactcgacttccagcggtgaggaacactgctggaggatccttgggatcatggaattcagagaatggtctgatggataatggttatgggtcctccctgctggaagaattcaaaactaacaaatccagatcttttgagctgttagatattataggccatgtggtagagttcagttcggatcagatggggagtcgctttatacagcagaaactagaaactgcttctactgaacagaagaatatgatttttcctgagatccttccccaggcacgtactttgatgactgatgtttttggaaactatgttatacagaagttctttgaatacggaactgaaacgcaaacgaagcaactggcaaccctgcttaagggttttgtgttacagctgagtcttcaaatgtatggctgccgggtgattcagaaggctttggaagttgttgaagtggaacaacaaacacaaatggctttggagcttgatggatctatcatgagatgtgttcgtgatcagaatggcaaccatgtcatccaaaaatgtatagaatgcatccctcaggagaggatacgatttatcatttctgcattttacggacatgtcgtggagctttctatgcatccttatggttgtcgtgttattcagaggatcttggagcattgtgacgatgaaagcactcaaaatgccatgatggaagagatcatgcagtccgtggttactttaacggaggaccagtatggtaattatgtaatccagcatgtcctgcaatatgggaaaccagaagagcgttctactataattgcacaactcgctggacagatagtgaagatgagccagcagaaatttgcatccaatgttgttgagaagtgtcttacttttggttctcctgagcaacggcagattctaatcaatgaaatgcttggcacaactgatgagaacgagccgttacaggcaatgatgaaagaccagttcgcaaactatgttgtgcagaaggttctggagacatgtgatgaccagaaccgtgaattgattctttcccgtatcaaggtccacttgaatgcactgaaaaggtacacctatgggaagcatattgtgacacgtgttgagaagcttattgccgcaggagaacggcgcattggcgcactaccctcctgctgagatggcaataaagctatatacaggtcgcagaataacacctgtacagacagacagggatagcgaggcctagctttttaccattaccagtagtcggtaatattgagcaagtacaaccgcagaagttaaaaaagaaaggctcccaaatcctttgatgtaaataaaggatagccgctggaaataaataaaaagaatgagaaaagatgaagagattttgcttgtccttgagggaagagttgtatatttgtgtggtttattttcccctcttgaagcagatggataaatgttttaggatcatagatgatgggaagcaagggcagctgtagattatcctttctttttttccttgggtttcattagtcaatgtataatgtattaatgttcatggtgatgctaatctctgtaaagcctgccttgagtttactgacattttcctgaaatgaaattaaatgcatgtttcctggtacttgtgaaatgcctgcgtctaggcagctcatcaaatatcagttgtttcccacc

SEQ ID NO: 164877 - DNA, 1920 bp, Zea mays
  Clone ID: MRT4577_81953C.1
aatatatttctcaaccggccccgttcacgtagtcctcgaggccggaagtgccaccacgacgctacccgtcctcatccggtcacgaaaaatcggaatctctgaaaaatcctccgtaccatgaagctccggttgcgatctatgcaggcgcgcggcggctccgccgccgtggagacccaccgcgtggacctgccgcccacggccactctggccgacgtgaagaccctcctcgcgtcgaagctctctgcggcgcaacccgtccccgccgagtccgtccgcctctccctcaaccgtagcgaggagctcgtctcgccggaccctgccgctacgctcccgtccctcggcctcgcgtccggtgatctcgtattcttcaccctatcccccctcacggccctagcgccgccggctcaggccctgccacggaaccctagcccgagctctggcgctgcagcgtcgatcgctgaggctgccgaccgcgggaagggttcgaagcaatctggtactggagatttctcttcctcgtcactggcgcaggctgtggttgtgagccctagctttccggtcgcttccggtacgcgggatgtggtgatggaggaggaggccgtcgatgccacaaagggctggtcgagttttgtgcttagggatctcaagagggagatggacaacgtcggggccgcggagggaaccgccgcaggtcgcctggttgcggccttgcatgcagctctgcttgatgccggttttctcaccgctaaactgacgggctctcacctctcgctgcctcagggctggccgtcaggtgctttgaagccattgaccatcaagtatactataccagagctttcatcaatggtatctgtgactgaggaagggaaggtggtggtgctgaactactccttgatggccaatttcgtgatggtttatgggtatgttcctggggcacagtctgaggtttgccggttgtgcttggagttgccggggctggagcctctactttatctggatggcgatcagctgaatggagtgcatgagaagggagttcatgatctgtggagagtgctgaaggatgagatttgcctgccactgatgatatcattgtgccaactgaacggtctgcgcttgccgccttgcttgatggctttgcctgctgatctcaagactaaggtattggggtttttacctggggttgatcttgcaaaggttgagtgcacatgcaaggaaatgatgaatcttgcatcagatgatagtatctggaagaagcttgtatccaagtttgaaaattatggcgagggctctaggctggcaggcaagaatgcaaaggccatatttgtagaagcttggcaggccaataagagacggcagaagaggcccaatccaaccttttggaactatggctggggaaacagtccttatagccgcccacttaggctgccattgattggtggggactcggacagacttccttttattgggaatcatggttctgttgggcgccactttggaaatcaacgaaggaatatctcaccgaactgcattcttgatggtcaccgtcataacttcctttgaagccatgtcaatgagttttacttgtatgttaagagtgttttataaggacttcaatggtgcatatacggttagaccgccttgttcatatcgtcaagtcgcacacttatgcttgtgcacagcactcttatgatcttatcctaatatatccccttagtatcttagatcgtatctttactatctttttttggtaccaaatgtaatccagtgtcctagtaataaagtacccttgttctattctcaaacaaaaaaaaaaaaaagcggccttgtaatttggttgaatgtgtagatagatgtattcgtgtgtaatagctttaaacttcagggtgctgcttaaatttatttgcattaaatattcaatct

SEQ ID NO: 164878 - DNA, 144 bp, Zea mays
  Clone ID: MRT4577_81954C.1
attcggctcgagggattcgccccctgtttgggaccctatgtagggctcattgcgggctggccctagccatggccgcccaacgcgtgtctgaaattcatctgtaaggcctcccggagacccagggtcatcaggcggtacagactc

SEQ ID NO: 164879 - DNA, 513 bp, Zea mays
  Clone ID: MRT4577_81955C.1
cattgggtacctcgaggccggccgggatccacattctcaattgcttgtctgcgtcgcttgagatgccacgggatgactgtgctggtcagggctctccctacttcgcgctattctacggagacccgctgacctgctgcccgaagtacgccaatacgttcgcgagctgaataacacctgctccagatactcctccctgatacaacgaacggcccgaggaaactccgatcagctgaataacgaattacaagatcactgactgggaggtgatctacatggcaccgtcttccggatcgtgggatgtctgcagctctccagcgtcgtgggcatcaaaggcgttatccacaaagggctcctcttctcccacatcgccgatgagctggagaactttgccgattcccgacccgaagctgtcggttatgtcatgccgttacctgacgaagaacctcgacgtggtcatcgcgttctgctgacctccagaccatcttcaagagccatggtcgacgactactgcca

SEQ ID NO: 164880 - DNA, 4364 bp, Zea mays
  Clone ID: MRT4577_81956C.1
ggtatcggggataggaggaggccttcggcggtcgggagtggaaactcgctgttctcggtgcagccaggggcgcatggagagaaggcgctgctgaatcatagagtggggcagggtgaaaggaatgggctcgcacggcagcagtcgtcggagtggctcgggagaggcgctgatgggctcatcggcttgtcagatgtcagtggccatggatcacggcgcaagagctttgctgatgcattgcaggaaaatattagccgcactgctgctacagccggtcacctttcacgttctaatagccgcaatgctcttgagggcccaactccaatcaggtcatctgattcacccaagccacaactgcagcatagatcagaatccatgaatggcctgcgatctggatccacttcacccagtttggtcagggtgcaaagtcttggttcttcaatgtctcatacatttgcttcagcagtaggctcatctatctcaagaagcaccacccctgacccccagctgatacgtagaactccaagtccttgccttcctccagttggagttcggatggggagttctgataaaaaagttgaagctgcagctgttgcttcacttaatcatgataatgctgacattgcggcaactctgtctagcttaaacctatctggaaataagatgtcaattgtggaaaatcaagctcagaatcatgtttaccagaactttggtgaccagacagatgtgctctttaatgtaccaaaggaacataggcaattttcaccacaaattttaagtcaaaataccgatgacggctcgtttaatgcccctgaaaaaaaaaaaaagaaaaaaaaaaaaaaaaaaaaaaaaaaaaaaaaaaaaaaaaagctaggcgaacccgtcccacaagcacgcgcgacgcgagccaaggaagacgagagcgaggtggagagagagagagagaggaaaaccctgccccgtccaggcagccgtcgtcgacgcaaacggcggaggccacagagacgccacgcgagggagccccgccgcagcagcacccgcgccgtcccaattcggcgccccgatcgccggatctcctcgccggcgccggggccctcgatcgccctctccccatgcccgtgcccctccgggggtttcattgcgcgggcgccggccatgtcggacctcgcttccagctgcaaggataaacttgcgtattttagaataaaggagctaaaagttatcttaaatcagctggggataccgaagcaaggaaagaagtaggatcgtgttgaaagggtattgcctattttattagatgagcaaggtcaacatcatcatggatggggaaggaaaaatgctcttacaagggaggcggtggcaaaagttgttgatgacacatacaggaaaatgcaagtatgtgctcctgaccttccctctagaagccacagtggatcagatttcagtcatttcaggcccaaagaggaagcgcctgacttctaccatgtggatactaaggtccgctgcctttgcaatagcacattgctaaatgacaatatgagtaagtgagaagttggcaaaagccttgtgtggcagcatattacctacgtactcattccatataagcccacagagggtgctggcccttattttccacaaaatttttattgtgatctggacggagtgacctttgaagacccggtttgggtgtttattcgaaatcgatgaataaatgtcaaatttatgtcatctggtgttggaaatgatggagcaagtgtacctcaaattgtggagaagactttccaactttcccgagcagatagagaaacagttcagagacaagaatatgatctccaggtttggtgcatccttataaatgacaaagtccagttcaggatgcaatggcctcaatatgcagaattgcaagtgaacggtattcctgtacgagtaatgaccaggcccggttctcagttactagggataaatgggcgggatgatgggccactggtaaccacatgcagtagagaagggatcaacaaaattagcttatctagagtggatgctcgaaccttttgctttggagttcgaattgttaggaggaggactgttcctcaggtattaaatttgatcccaaaggaaggtgaaggggagtcttttgaggatgctcttgctcgtgttcgtcgctgtcttggaggtggaggtgctacggacaatgctgatagtgatagcgacctggaagtggttactgaatctgttacagtcaaccttcgttgccctaatagcggatccagaatgaggattgctggaaggttcaagccttgtgttcacatgggctgttttgatcttgaaacttttgtggaattgaatcaacgctcacgcaagtggcaatgcccaatatgtttaaagaattactctctcgagaacttgatgatcgatccttatttcaaccggattacatctttgttgcacaattgcagtgaagatgttaatgagcttgatgttaaacctgatgggtcatggcgtgtgaagggtgatgccaggaccagtctgtgtttgtcattagatactgattcagggtagtttggacatcacactgagatagcaaaccctggtattgatagtgttaatgagttcaagagagagggtacttctgatgtacatagaactttgaaacttggaattaaaaaaacccctaatggattatggcaggttagcagtaaaccagatgataagaaacccgtggttagaaatcacatccaaaacaacacggggtactcaataccaaacatagtacctatgatcagtagccccactgggagttgcagagatggtgaagatgtaagtgtgaaccaagaagggggtggtattcagtttgatatatcattgaaccaagagtttgacagttttgcgcataactttggtcaaacatacaatacagaggataggcaacaagagccacaacataatgctgcagatgtcattgttcttagtgattctgatgaagaaaatgacccgattgttcagcctgccagctgtctatgcaaatactcctacaaatggtgacagtttccctttcgtcactgatgctgctgtatctggatatcctgaagggtaccaggaggatgctggggttggtacaagtggccttggtttattgagcaacaatactggtgattttgaaataaataactggcaaatgcattcttatccacaaccagagcaagggttccagttttttgggactgatactgatgttggcaatccttttgttggtccgcataattcctttagtattacaccagaagactactcccttgactgtaatgttggcatagaggatccatctgcagctcacgatgtctcaatttgccgaaacagtaatgatgtgcatggaagcttggttgataacccattggctttagcaggtgacgatccatctttgcaaattttccttccaagtcaaccttctactgttccccttcaggaagaactgagtgagcgcgctaatactccaaatggagtccaccctgatgattggaggatatctcttacgcttgcggctggtggagggggtaatgaagaacctacaagtgttgatggcctaaaatcacagccaaaagttccatcaaaagaggcaggagttgaacctttacttgatgctgcttctgctctcccaagcatgaacaatgacagatgtaatggatctaatctaaacccgagaaggattgaaaatatattttctcatcctcgccaaccacggtctgttaggcctcgtttgtgtttgtcattagattctgattcagagtagttcggacatcacactgggatagctgaatttgctattaatctggcaaagttggcttccagaatcttgatttttattgtggagggctatcaggttattctggttgatacaaagagaaacaccagtgtggatgctttattgcattaacctggtaagattcaagtgttctatatgatccaagtgggatctccatagagttcatctaatggttggtacaggatattttctaactgggagtggtttaacgtggctagtggagcaggctgtacattttccctgacatttactgggtataaaggaatagggggccatcacttggcacaagacaaatacatgtgaatgttttgtgtgtaccatcattgtatttagggttcgggtgttaatttagatgtttatgaccctgatgtttgatggaaaataaattattccttgatgaagcggcggtcaatgaacagagcccttcggttttcagtcggagctactgacccttcatctgttcctgtggtgaagtggttgctgccgcttccgtggtgggaccaaccatgccgaagtcgtgtctagcagagggcaatcaatctcctaa

SEQ ID NO: 164881 - DNA, 189 bp, Zea mays
  Clone ID: MRT4577_81957C.1
caaattcgttccgtccaggcaaggaagtaatctagcagccaaggagaggagaagatggcgcgggctaagcaaaccggccgcaagtccaccggaagcaaggccccgcgcaagcaacttggcaccaaagccgccaggaaatccgcgccgaccaccggccgcgttaaaaaaccccacaagtacaagccccgg

SEQ ID NO: 164882 - DNA, 366 bp, Zea mays
  Clone ID: MRT4577_81958C.1
cgcctgatgaatacgattaagtcaaggctcggtccactcaagggatgtgatctcgcctcgcccgagcccagtctcgggcaagggcagccgaccccggaggatttacgtctcgtccgaggaccccctcaagcaacggacacaccttcggctcgcccgaggcccagtcttcgccaagaagcaaccttggccaaatcgccacaacgaccgaccgtatcacaggagcatttaatgcaaaggtggcctgacaccttatcctgacgcgcgcccttcagtcgactgatctgaagtgatcgcagtcacttcgccgctccactgaccagtctgacaagaagacagcgccgcccgcgtcgcttcgactacaggcga

SEQ ID NO: 164883 - DNA, 484 bp, Zea mays
  unsure (1)..(484): unsure at all n locations
  Clone ID: MRT4577_81959C.1
ccggtccggcatctcccgggggtgtgcccggtgacagcagccctcctttngacaagaagctttcagctaaggtgtgacatccttgctgttcactgcccactgttcaggatcgtgaggatgctattgcaatagtagctgatggagaaatggaaatgattttcaaatgatgacaggattggcagaatgagatagtacaaaaggaaggagctgaatcttttgaaatatgaagcactcaaggatgaattgctgctcttgaccacagggattggagcagcatgtagtttatactgtctgctggttttctatctcgagactgctgtcagttatgctttgggggttggtttcaactgcttgtatattaaacttgtgagtgaacatgctgataacctatcaaagcaagatattgcacatgtttttgtaaagaagaaagggaagaaaattggatttcaagtgatgattggggagaatacagttcataaaacat

SEQ ID NO: 164884 - DNA, 645 bp, Zea mays
  Clone ID: MRT4577_8195C.1
ttgggtccctcgaggccggccggggtctcttcatacatcacccaccgcctccgtcggcgacgacagcgtaatgtaatgcttttccgttgagggttgctgagagtctactgatccgctgtgtcgaccgaggaggctgttgtgcgctgaggtcccggtgaccgaggtgccaacggaggtcccgtcggcccatgtggccgaggggcccaaggataataaggctcctcaaggagaagaaggtgcctaaggagaagaagctttccgcgccgaagaagccggcggcgcaccctccctacgctgagatgattgtagaggcgatctctgccctctaggagaggaatgcgtcgagctcggtggccatcaacaagtacgtcgaggggtaattatggcggcaagctccccaccatcttctgctggtagttcactgtgcagctgaataatgtcgctgtcgtcgggaagctgacgaggctgaagaactccttctagctggcgtgcaccgacgcctaggccaaggacgtcatgtccaatgcactctatgtcgcgcccaatgccaagccctcgacgagagtgatgtcaagaccgctgcgaattccaaggctgtgtcgtctcaatcctgcgccaaggacatggccaagcctgtcgctcctg

SEQ ID NO: 164885 - DNA, 132 bp, Zea mays
  Clone ID: MRT4577_81960C.1
ggccatgacattcataagataagagtcgatatgttcatggttcaaagttctcacaagaccgcattattagcaacacataattcgatggtgtctagaatttcctttcagaaatagcaccgatcagtttctaca

SEQ ID NO: 164886 - DNA, 584 bp, Zea mays
  Clone ID: MRT4577_81961C.1
cctcgaggccggccggaccccacccattcactcgcctgcgctccctcgccgccccagttccccaccccctggtcaccacccgcctcctcctgctctcccagtggctcccatcgttgtcagcgacgccctcaccgacggtcaggtcgggcggatcgaccagaacgaccagttgcagcaggactccgtccacgcgctacgccgccggtaatgagggcatcctcttcggcgaccccgggagcttcaccccgacctgcagcaaccagcatgcgacagggttcatcacccacgctgagcagctcatagccaaaggggaatacgaaatactgcttatcagcgcgaacgaccccttcgtcatgtaggcgagggagaagacctaccgcgagaagaagcaggtgtgactcctctacgacggatctggagcgacaccaaggggctcgacctcaagttcgatctgagggacatgggggagggagtgcgctcaaagaggatcattctactgtgcgagggcctcgcgggcaacgtcgctagcatcgagggaggagctcacatggcgatctccggcggtgacgagatcccgaaagggc

SEQ ID NO: 164887 - DNA, 271 bp, Zea mays
  Clone ID: MRT4577_81962C.1
gctgtataaaaaaatgccaactctttctctttcttacattagttacacgccacggggggggtaaattatatgcatgtgctacaaaattgattcaacaacctcaaagaacctaaaggcaaagaatatttaaaatttatatgccttctgtaccttatttgaagaaaagagcgtacaatactgaccatattaaagatgctcccctcttgcatattattgctgacaacatgaaggccggatctacataacttatttttgttcaaaaaatcaacat

SEQ ID NO: 164888 - DNA, 693 bp, Zea mays
  unsure (1)..(693): unsure at all n locations
  Clone ID: MRT4577_81963C.1
ccccccccacgagcccccccccccccccccccccccccccccccccccccccccccccccaaaaaaaaccccgggaaccggtccaaatcaaaaaagggaaacagtttcacggctacaggggtcaaacataactacagcccactccaaccctaaaccctgccaatacaaaaaaaggccgggctcctaaagggggtaaataacaaccccaagcttgccctcaatcctttcgttttttttgggctaaaaggccataaaaaaaacgtgggcgtccatgaacctttcggaaaaaagcctccttatggtccggaaggcgttgtcgtcaaaaaaaaatggaagggtgacccgaaggtccttgaagttggggggggcaacggaaataaccttgctggggcccctgtgcataacctttgcgtgcacaaagcgcttgaaaaaaaaaacattgaccagaaaggggcgcatgtacagtgtccgtgcgctgtttccacaatttgggggttgggccgttgctccgcctccccgggcaacgcgccgngtccacgccgaaaacaccaccggtcttttggcggttgccgaaggcggaaggattcactaggtgggtgaaccgcaaggccagggcctggcggaatgcggaaaacggcaatggaggcggaccataaaagcaacaatgcgctaaaagagggggcagggaaatgg

SEQ ID NO: 164889 - DNA, 1180 bp, Zea mays
  Clone ID: MRT4577_81964C.1
ctgtgcggcgctcaggcggcggttcgaagtgcgtgacaaatctatcatctaccccctcctcgctagccagttggttaccggtttctctctcgcgcgaagatccccgccgcggagacgtcgagcggcgtcggcggcggcgaagtccacatatcgatcccgcccatggcggccaccaccccagacgggatacgcgagagctcggcagcaccgagccccttacgtagccgcggtagcaccccgccgcggcagctcaaggcagccccagcgcttgcggtagctgacacgccggcgacggccatggacaagacgctggcgagcgtcgccaatctcgcgaagctactgccgactggcaccgcgctggcgttccagtcgctgtccccttctttcaccaaccggggcgcgtgtctcccctccaaccggtacctcacggccgcgctgctctacctctgcctcgtctcgtgcgtcttcttctccttcaccgacagcttcgtcggcaccgacggcaagctctactacggccttgctacggtcaagggcttcctcgtgttcaactacaccggcgacgatgacgacgagggcgatgccgagcgaaggaggcaggtcttcaaggacctccgcaggctgaggatacggtgggtggactacgtgcacgcgggattctctgccgtggtgttcctgacggtggcgttcggcaccgccgccgtgcagagctgcttcttccccaacgccggggagaacgtgaaccaaatgctcatcaatctgcctctcggcgccgggttcttctccaccatggtgttccttgttttcccgacgacacggaagggaatcgattacaccgggcatttcaccaatgtttagcctcgcagtcgcaggaagcgtcgttgacgcgttgtgtgtgtcgtcgctgaaccgtagctttctttctccccgtttgacatcgactccgttgtgtcaagtttagagagtttgtattagaaatatgccattcagttttggccctttgtctgggctccagcttccattgcaatggcgttaagttttgtactttcaaattgcaatggcgttaagttttggccctttgtctgggctccagcttccatcgctgaaccttagctttcttgctgggccttcggcttttcccttgtaaacagcatccttcaatctcatttgaatatattct

SEQ ID NO: 164890 - DNA, 319 bp, Zea mays
  unsure (1)..(319): unsure at all n locations
  Clone ID: MRT4577_81965C.1
ggannaaaacggcctttacaaaaaaggcaagaattaaggggggggttaccntttcncctttaaacaaaaggggggggggggccccctattttggggccccggtttcgcgagggaacccagtgggggggatggccccttgggccccgtatcccaaacccacccttcattttcccccccgggggggcgggttccccaagggaaaaaagcctttccccggacccttgggggggttttttcccggaaccccgaactcggttggacgcttccccggcgaaccaaaaccccggggcccaaantaaaaccccaacgcctctggggg

SEQ ID NO: 164891 - DNA, 263 bp, Zea mays
  Clone ID: MRT4577_81966C.1
ccactttcttatttctgggaagccacacacatcatgacaaaagactttattattgaactataactcataagaaatctaataagagggcaccaccaatgatgggttgttggcagaacactgctaggctagtcaaagcaagttgcttgaatggcaacagttgtagcagatcgaagagggtgctagcagctagcgcgcactcgtgctcgatatgaacaggcaacaacctgtggtatgtgccacagacaggctagcagggcctcaca

SEQ ID NO: 164892 - DNA, 265 bp, Zea mays
  Clone ID: MRT4577_81967C.1
tccgctccagagaaaaatgaaaccccctctaaaccggcccccgcctccttttttaggttttggccaacaaccaaaagaagggccatcacaataatataacccaaaaaacttgaaccaaaaaactcttggaaaaacaccacagaagaaccaaagggtgaaaagttcctccccctcaacacaaaaaaagcaacttttaaaaatgggggaaggattgacaagccaatctatctttcgtgccacaaacaatgtgtgccccccacccccc

SEQ ID NO: 164893 - DNA, 283 bp, Zea mays
  Clone ID: MRT4577_81968C.1
atttgccctgtccctctgcttcgggacgagaggaggtccgtttcttgtgacggtatgttggaggtagtcacctgagaccgctttgcatgtccttctcttgggctcggcagcgttgtgtaaagtttctggaaacttgaggagcatccttgtcagatacctcattggctcttgctgtggctttcctggagcgaagctcataccttaggcataccacgggctgcacacttttccattgtatcaagtcttctaccaaagatgtgttttactactggaaatgaacttc

SEQ ID NO: 164894 - DNA, 169 bp, Zea mays
  Clone ID: MRT4577_81969C.1
caaaagaggatggggcatgatagtctaagggaatggggacaagctggtagcagacggcgcggcgccttctgcattggaagaaaggggtatgcccactctacaatgggagagattcattgcttggttcttcgatcatgtctttctgtcttgcatggtgcttttatgtaca

SEQ ID NO: 164895 - DNA, 492 bp, Zea mays
  Clone ID: MRT4577_8196C.1
cacacggccgaccttcgtttttttttttgggtatttttagattttaaacttttttttaaacactccaatcaagtttattgggcataatacactcaaatggacttgattgtttatgcaatcacatattctttggttagaatcctctttttttaaaacaacttgcacattaacttaccaaggttttttcggatgttcctttttcaactaaactcaacgaaaacttgctgttgaggttgcaaattcttaggttaaatactctagccttggtatatttgggccaaaacttagattaatttatagagtgagactttttcactggttgaacaaatgatcaatcgtgcactacctttcttaaattaaaattttgagatggatctgattttttttattgacggtgaccaatttaattattgcggaaataatggtagagccgaggtcgaaaggtccgatttactggtaaaaccgcgcttgatatgacggtatctacatcaa

SEQ ID NO: 164896 - DNA, 278 bp, Zea mays
  Clone ID: MRT4577_81970C.1
caggagcctataacgaacggcccgcactcgacacagtctcactagtacatccgcctgcccttttttttttcttctttgtttccatttctggtgggttttactagggtttgggtgggtaccttatccatcatttccatcttcttcttatgtgttgcgtctccattattagactctaggcgtgggcctcacttctccctttaatcagctccccattattttcatagatcctccatatcttccccacaaatgtgcatctaattccttttcttatacctgct

SEQ ID NO: 164897 - DNA, 564 bp, Zea mays
  Clone ID: MRT4577_81971C.1
ctctctaaacgcccgccctctgttatggttttcagttacccacccagcgagaggaggcaggcaatcagatcatccttcggcatggactcctccaaaaagaatcagtgcccacgggaggccatgatcactcctgtggggccgcaaccaaatcatgcaaggccaggcagcatcatgaggggtgccggctcgatgctagggagcgcccgcgctccagcgccggaggccattcatatgctcaggcaacgagcagaggctgcgatgccgccctgctgcccgacatcctcagcagtaagcctgcgtcctctcgactattaatgatgatggtagtagctggctgcaaagtgaaattagctgcaactcacaaccacatactacctgcaagccgcaagataaagaatcaagccaggccagaccagcgagcgagccagcttacatctcgctgcgctcggcgcactgactgctttagaaacgggaggccagctcggtccagccagcattcatacatcggtcaacgagcggggagagagagggtagcgttttgagtagctctctcgctcactggct

SEQ ID NO: 164898 - DNA, 172 bp, Zea mays
  unsure (1)..(172): unsure at all n locations
  Clone ID: MRT4577_81972C.1
agtagctcgaatcggctcatgattaggctcatgagtgacgatttcattcttatatcagacagtgcatacagcagngagcatatcctttacgatgataagggaatctgaatagtctgnagtggagctcattgtccctacagtatacatgttccttgttcgtattctgaaggcg

SEQ ID NO: 164899 - DNA, 3336 bp, Zea mays
  Clone ID: MRT4577_81973C.1
aattcggcacgaggagaacctctacgcaccgggtatcgaacgcatctacgatggagggcgacgacttcacgccggagggcggcaagctccccgagttcaagctagatgcgagacaagcgcagggtttcatctccttcttcaagaagctgccgcaggatccccgggccgttcgtctcttcgatcgcagggattattacactgcccatggcgagaatgctacgtttatcgcaaggacatactaccacacaatgtctgccttacgtcaactaggtagcagctctgatggaatcttaagtgccagcgtgagcaaggctatgtttgagaccattgcccgcaacattttgttggaaaggactgactgtacattggaactctatgagggaagtgggtcaaattggaggttaacaaagtccggaacacctggaaatattggtagttttgaagacattctgtttgcaaacaatgacatggaagattcaccagtgattgttgctttgtttccagcgtgccgggaaagtcagctgtatgtagggcttagttttttggatatgaccaataggaagcttgggttggctgagtttcccgaagatagccgattcactaatgttgaatcagctcttgttgcattaggttgcaaggagtgtcttctcccagcagattgtgaaaaatccattgacctaaatccccttcaagacgtcattagtaactgtaatgttctgttgactgagaaaaagaaggctgacttcaaatccagggatctcgcacaagatcttggtagaataatcaggggttctgttgagcctgtacgtgatctactatctcagtttgactatgctcttggtccccttggagctcttttatcttatgccgagttgctagcagatgacactaactatggaaattacacaattgagaagtacaatttgaactgctacatgcgacttgattctgctgcagttcgagcattaaacattgcagaagggaaaactgatgtaaacaagaacttcagtttgtttggtttgatgaacagaacttgtactgttgggatgggaaaaagattgctgaacagatggctgaaacaacctctattagatgttaatgaaattaataaccgactagacatggttcaggcttttgtagaagacccagaacttcgtcagggactccggcaacaacttaaaaggatatcagatattgatcgtctaacacatagtctccgaaagaaatcagctaatctgcagcctgttgttaagctttatcagtcctgtagcagaatcccatacatcaagggcattcttcagcaatataatggccaattttcaacattgataaggtcaaagtttcttgaaccgttagaagaatggatggcaaagaatcgatttggtcggttttcttctcttgttgagacagctattgatcttgctcagctggagaatggagagtacagaatatctcctctatattcttctgacttgggtgtactaaaggatgagctttctgtggttgaaaaccacataaacaatctgcacgtggatacagctagtgatctggatctttctgttgataagcaactgaagctagaaaaaggatcccttggacatgtgttcagaatgtcaaagaaagaggaacagaaagtcaggaagaaactcactggcagctacttaatcatagaaactcgtaaagatggtgtaaagttcacaaattctaagctgaaaaatctaagtgatcaataccaggcattgtttggtgagtacacaagttgtcagaaaaaggtggttggtgatgtagtgagggtttcaggcacattctcagaggtatttgaaaattttgctgcagttctgtcggagttggatgttttacaaagttttgctgatttggcaactagttgcccagttccttatgttaggccagacatcactgcgtcggatgaaggagatattgttctactgggtagcagacatccttgtctagaggcacaagatggtgttaactttatacccaatgattgcactctggtgagagggaaaagttggtttcagatcatcactggaccaaacatgggaggaaaatccacatttataagacaggttggtgtaaatgtattgatggcacaagttggttcctttgtaccttgtgatcaagcaagtattagtgtgagggattgtatttttgctcgtgttggcgctggtgattgccaacttcatggtgtatcaacttttatgcaagaaatgcttgaaacagcatccatcctaaaaggcgcctctgataagtctcttataattattgatgagctggggcgtggaacttccacatatgatggatttggtcttgcatgggctatctgtgagcatcttatggaagtgactcgagcgcctaccttgtttgcaacccatttccatgaactaactgcattagcacatagaaatgatgatgagcaccaacacatttcagacatcggagttgcaaattatcacgtgggtgctcacatagacccattaagtaggaagttaactatgctttacaaggttgaacctggtgcatgcgaccaaagttttggtattcatgttgcagaatttgctaattttccagaagctgttgttgcccttgcgaaaagcaaagcagcagagttagaagacttttctactacacctaccttttccgatgatttgaaagacgaggttggatcaaagcgcaagagggtatttagcccagatgacatcaccagaggagctgcacgggctcggcttttccttgaggaattcgccgcattgcctatggatgagatggatgggagcaagatcttggagatggccaccaagatgaaagctgacttgcagaaagatgcagctgacaatccttggctccagcagttcttctgaagctaattaatccccgcgtgtatggaggcaagaccatgagagaacctcgctgatgctaggatctcctgatccattttgttaatacgcatcagcagatgtactctagtctttaggcttagccgacagtgcaacagggaaaaccatgtgcatatttaacgcggcggtagtgctgctactcctgcataccgttcgggtgcagctactctgctctgccgttctgccccgtctgtgattgcacgccgtcctttacagccgtgaagtctgctgtgccagtctcgtcgaagcttgaagtttctgcacgtctattggctattgctgtgctgcttgtctagcaaaattctttcagtgcaagtagggattgatagtttgtagagattgttgggattttgtcgaggatggcctcacaacgacctttaatcagcttttcaacccagccaaaaaaaaaaaaaaaaaaaaa

SEQ ID NO: 164900 - DNA, 318 bp, Zea mays
  Clone ID: MRT4577_81974C.1
gaaattttagttcaatcattgtatctattagatatgtcagagtcctcttgcatacatctattgaccgcgtaactcaaacggggagctggcaatgattttacacattggacttcagcagttcctactgcaccccgattgcctctcaccatgtctgcactgacatggttcaatgctccggtgccaccatttatgactaccacgacggtgatttcgtataccaactacatgaccaatgctatcttctctaacgccatgggcatcaccaaagtgtagcctcaaagagcttgcattcttatagaccctaaattaattgaccca

SEQ ID NO: 164901 - DNA, 540 bp, Zea mays
  Clone ID: MRT4577_81975C.1
aaacttaaaatatatatctctaattttttattactgaaaagttgcccatatcatgatgagaaatttattattacagtgtaaagcttaaaaaatctagaagatggcaccaccagatggggggctgatgcaataagggggaaggattcgacaaagcgagttggccaaatggcaacaattgctgctgttgcaacaaggctaaaatgtttgccacatcctgagggtaaaatggccgcatttgttgttgttgccagaaggcgcttatggtccccacaacctgtggtgaaaatggaccaacttgttgttgttgcacgaaagcacctatgtctgcatacaacttgtggacggaattggaccaactgttgttgcaataacaagggagctggtatcccgacagatggttgaaggggacctcttttagagcctacattaaatgaaaagggatcaccaaggtttgttggttgaatggaaaaaattgttgttgctgaaggtaagcagcaaggttcgctgcaactacttgattacccgcgtacctgcccgggc

SEQ ID NO: 164902 - DNA, 642 bp, Zea mays
  unsure (1)..(642): unsure at all n locations
  Clone ID: MRT4577_81976C.1
ccggngtcgacccacgccgtccgattatgatcatatttatgcatagtaatttctcaggtcttgtccatacatttaaaccaatatagagatcatattatatccatttgcattgtctcactggttatttaaccttgtgttgaacctttgttcactgtcattatacactattcaagtatgttcatcatactgaatttcctgttcaacacttaccaaacttgttagtcctttaaatgtgttgtcatccaaatcaccaaaactcacaaaagggatgaatgcactttcagtctccccctttttggtgattgatgacaacacatttaaagcttacataagatttgataaataagattttgaatccaatgatatagtttcctccccctaaatatgtgcatttcagaaaataccaattttgtactcaaatggcaaaagcacatatttgggtcaaagtatggagacaactatatcatactattcatggggtgcactgagccataaaataaacgtcactcatcaatttcctacatcttatgttttacttatgattctcccccttttgtcaattatttccccccttttcaaaagcctttttacacttagtttcattaagattaaggtaagctttactgccaatttctccccctt

SEQ ID NO: 164903 - DNA, 604 bp, Zea mays
  Clone ID: MRT4577_81977C.1
acaaggagcagggggaggatgagttgttgcaagccacgatgggtatctcgcgtgactcgaggcaagagcgccgagccaccggaggaaaccagaaggccgggaggaagaagccacagtatcgagcttagggcgccatgccaaccaacaccaaggtgacaaacaatgagacagtgatgagggaccgtgaccgtgaaggaaatgcgaaatggagggctctccaccttgatactggtaactactcgtggggaatcgacgatgatgcccgcatgacccgcatcctcgacgacgccctaccctgacatcaaacaatgaacttgtagaggacacaaacccctgcgaagactgccaatcgtgcaactcgatgctgccccattcaagtagcggcacctcactcactatggagttgacattggaacgaaaaataaaaccgctgctgcacacaacgatgaatgctctccgacaacaggttctagtgccagatgaggaaacgaaaatcatctaccatgtcacgaggacacttgtgaagcgcaatgagggacgcccccttgacccacacattgaggagcaccttgtcagcgaactgctgctggcatgcatttcttcc

SEQ ID NO: 164904 - DNA, 1701 bp, Zea mays
  Clone ID: MRT4577_81978C.1
tgggtacctcgaggccggccggggcatcatgtgcactaaaattctatgtgcactcgataagttttcctggtgtccggtccggctacccctgttccctctcgcagtcgcagacttctcttctcgccaaaccctaatcctgctcctgcctttctcgtctccaaccgttggccgagcagtagcggtggcgatggagggcaaggaagaaggtcggatcttcgtgggcggcctgtcgtggcaaacggacgagcgcaagcttgaggacgcctttggccgcttcggcaaggtcgtcgacgcccaggtacccgtgcccccagtccgtctacgttagtgctcatgcccgccccaggtagttttgctagatccatcgatttcgtgttgtccgcggtgcgatattgttgggtatgatggttggaagatcggtgggtgaggtggaaaggcggatctgtagattgtttttgcgttctgtcgaacagagatgtgtgttttgcgtaggaaggaggattgcgatttctgctcacttttatgtctttcgttgttcagcaagaggcgtaacttggtgagagaaaatatttttcttctctttagtttgcagtagcaaagttgaattctttggcatcactgagagcgaaattaaaatgatgaaacggtacttcttgttgcgatgaaccaagaaattagtatcctgtagacctgtacaaacatgcatccttggattccttgcttcttaaagagagtaaggacctaaatagtctagtgtcatttgtctattatggttcatgtttatttttctatgttgatagcttgctctcagaaattcatgaatactcactgttcttgtttttccatctttctttgcaactgggatctgttctctcggccattctttgtttgctgaggctgaatgagcggcagatttccagagttggaatgcaaagcgaataagcgatgcttgttgctttctagagctgaattgctgatgtggttcattacagttagatgcctgatttgagcactttgtctatgaaattggattgaacaaatggagaacagccattggtcctactgttgctggtgttctgctatttcttagttcagtttcatggtctgatgaaagagagggaatgttactgttgatttttttggctagaattggatgaacaacacctccttagtttctgatctgtgggaattctgctcggccagcacgagttgtgcacacctgcagagaactacaacagggactatgctcatgacactgattgatagatgaagctgtgtgactaattggcagatctgcacacgttactgctccagtgggttgaactgattttattggctgataagatgcaacagtaattatcaatttgttataagtgtttggttgtgttgactgccctgggcatgttttcagttgagttcattggcatccttgctgcagatagaatcatgactgcagttgacttcttttgtttttattgatatgacttgcctacatagctcctcgtcctgctacctttgtcagcatttagtgaactggcagcaattttttttcttttctcgccttttgtgttttgttagaactagatagagcttgcaatgatatatggctgcaactctttacgcaagggcttgtttcttaacagctccagcaaaatttgttttttgcacttttttctgtttaaaactcaagcaacttctttt

SEQ ID NO: 164905 - DNA, 244 bp, Zea mays
  Clone ID: MRT4577_8197C.1
cccagcgtccgccccatgtgggtgccgggggagggccaaacaaaaaaattcttcaaggctgtttgcttggaagataaaaatgctggctcaactgcctgaacagctattattgtaggtggcccccttctttttaccaaccatgcgagataataaaacccatatttctataaagggggggggggggggggagtcatgcgatctcacacctgaacagacagcatgagagagaaagaaattaggacac

SEQ ID NO: 164906 - DNA, 351 bp, Zea mays
  Clone ID: MRT4577_81980C.1
ccaacgcatcagaattagctttaatgttctagaaaatctacttattatactgcaccagttaaatgctgtgattgctgtgaaatcaattctttcatgcgaaaagcgtattgattttttacactcacttttggataagtttgttacacctgaatcatttcagggagaggtgtcaagtctacttgacaaagaggaaatatcttccatatttttagagtttttggttctctttggggctgttggaataatttatattttatagtagttactactaatatctaaggtcaggatttacatgtttatttacaatattgtctatctcaaacgattcctgcctttatacttgataataaa

SEQ ID NO: 164907 - DNA, 927 bp, Zea mays
  unsure (1)..(927): unsure at all n locations
  Clone ID: MRT4577_81981C.1
gaggctggccgggattcttccttttccgctcggcacctccccatctacggatctaccgagcatcgaaggcacacgatccaaatatgccttcggcgccgctcgtcgcggctgccatcggcacgcgcgtcagcctccgcccgaacctctcactcctcgccgatcgttgcgctacgccttgcgccctagcccgcgtgcacgccgccatgctcgtctccggccgcctcgccgaggacgctttcgccgcgtcccggctcctggacgcctacgtcgcgctctctccggatcccgctgccgccgcactcgcgctcctctcctccctgccctgcgcgcccaactccttcatgttcaacaccacgctccgcgtgctcgcttcctccccggacccggccaccgcattccccttcttctcccgcatccacggcactggagccctcgtgcccggccggcacacattccccttcctcctgaaggccgccgcgcgccttccgctctctctccccgtcaccgaacagctccacgcgctcgccgtccggcacggggtccacctcgatgcctacgtcgccaatggcctcgttcgggcctactccgtggcgggccttctccgccccgcgcgcagggtgttcgacgaggtgcccgagcggaacgcggccgtgtacactaccatggtctccgcgtacgcgcagaacgggaggcacgaggacgcgatggcggcgttcgtccagatggtccgcgtgggcttcgagccctgcggcgccgcgctggcctcggtgctgtctgcgtgcgcgcggtcgccgtcgggcgggctcgagatgggccgtcacgtgcacgacctaatggtggcacggnngcgtggcagttggtcccatcctcggcacggcgctggtcgacatgtacgtcaaaaatggcgccatttgagaggccttggca

SEQ ID NO: 164908 - DNA, 622 bp, Zea mays
  Clone ID: MRT4577_81982C.1
tacttgatctgttgttttctttagctcccggaagaccttttagctgcaccgatcgatctcgatcatggaggatgagaggagcacccagtcataccagggaggtgaggccgccgagcaggtggaggtgacagacaggggcctcctcggcaacctcctcggcaagaagaaggcggaggaggacaaggagaagcaggaggagctggtcaccggcatggagaaggtctccgtggaagagcccgaggttaagaaggaggagcacgaggatggcgagaagaaggagaccctcttctccaagctgcaccgatccagctccagctccagctcgtctagtgacgaggaagaggaggaggtgatcgatgacaacggtgaggtgatcaagaggaagaagaagaagggtctcaaggagaagctcaaggagaagctgcccggccacaaggacaccgagggtgagcacgtgacgggcctacccgcaccggcggcccccgcgtctgtgcagacccaccatgacaccgacgtcgtcgtcgaaaagatcgacggtgacgtgaagacagaggcggcaccggcagtgcccgaggaggagaagaaaggcttcttggaaaagatcaaggagaagctgcccggc

SEQ ID NO: 164909 - DNA, 253 bp, Zea mays
  Clone ID: MRT4577_81983C.1
ataatgcagaactttgacgaccaatagtggcacctattatccgcaattcaagaacaacgccctcaagatgccgagaagaaaataaacgttcacaccctccctcgttatttagtgatccatccaagaaaaccaacaaataaacacacatcctcttcagtctggagcacgaatcgacctgctactgtcgccacagtctcatagaagtcacaatcagaagtgaaagacggaaaatacgttgtgcaaaacctcttaa

SEQ ID NO: 164910 - DNA, 193 bp, Zea mays
  Clone ID: MRT4577_81985C.1
ttctgccatcattgtggcgcagtgggaccggtttgccactcctaagcaccgggaggccatatgctggcgggttcctgggacttggcttgagtggcgtcgtgcccaccatgcactttactatcgctgcgggctttgtcaaggccaccacagtgggccagatgggctggttcttcctcatggctgtgatgtacat

SEQ ID NO: 164911 - DNA, 284 bp, Zea mays
  Clone ID: MRT4577_81986C.1
gggccgacccacacgtcaagcgtggcgaggactacaggaggttcggagggataagactcagggcactacatggacgtcgtcacgggaggcgacatgtggcagttgctgaactattgcacgggggagatgaatgaggcgctggtcaatcttcaccacagccaaggcatgctgcagaagtgcaacctctacaagttgagcctgttcttgcacaggtggcaggaggagtcttagcccggcgacatcggctggaatctttcgacatggtcgccggtcaggacgatgct

SEQ ID NO: 164912 - DNA, 807 bp, Zea mays
  Clone ID: MRT4577_81987C.1
agatacccagggtatcgctcccggccactgaggtcgggcaactttcccatggccaagagaaggcgacgcgagcgacctccataagccgatgtccgcggcctccctacgccaccgtcctcatccgccgccgtcgtccactacaccgccacggtcgtcctcggtcgcgaccacgcccttcgccgtcgttctcatccagcgccacggtctagggtttgagcattcctccatcgtctccttgcctcttctccatcatctccttgcctcttctctcctctgtgttctccatcaagatctggcgtctatttttgggccaaatgcttatttcttgcagaaaccacgcatccagatctagcgtgttctgagcacgaaagttgtacaggcatggcctactgatcaggaaagttgtagcagacacgttcgtcgtcgcgaacatcgtcgagccgtgtggctactgccctggccggtgagcatcgtcaagtcgtgtggctgctgcccctgaccagcacgatgcgtctctggtcgcccatgatgattagatggcacctgatcaccacgtctctgagcacctgatcaccggtatttgtcaacgaagatcactccatgaagaccgaaaactgatgttaccatcggtgatgctacaaaataatcatgtttgctagctttctgtatctgtggccggtcttccatagtttgatgggggaaatgagcaaaaaatgaaggggaaggcaatatcaaggaccttgggttgcacctgaatgaagatgatgattttttgtaatttggatgcatgaatggggatagtttttt

SEQ ID NO: 164913 - DNA, 714 bp, Zea mays
  Clone ID: MRT4577_81988C.1
ccggccggggcgctccctagctctcccagccgccgccgcctccacctcttcctacgcttccttgtctccaccgcgagcgacctccatacaacggtgtcagcggcctccctacgccaccgtcctcatccgccgccgtcgtccactacaccgccacggtcgtcctcggtcgcgaccgcgcccttcgttctcatccagcgccacggtctaggaaaccaggcatccagatctagcgtgttctgagcacaaaagttgtacaggcatgacctattgatcaggaaagttgtagcagacacgttcgtcgtcgcgaacatcgtcgagccgtgtggctactgcgctggccggtgagcatcgtcaagtcgtgtggctgctgcccctgaccagcacgatgcgtctctggtctcccatgatgattagatggcacctgatcaccgcgtctctgaacacctgatcaccgggagctcttcatatttaagaaggcatggaacatcagtgcttgcacaagagtttatggtgtctacacatgattatgacattgaagaagaagaagaaatccatgggtttgcattgcctcaccagtctgcacctcgtgatatggaaagcaccgggagacatccattcagacatcaaatagttcggttatctgaaacagctgatataaagtttaaatggcgggtgcttcttcaaccaggaattaggcatgccttatgttatgac

SEQ ID NO: 164914 - DNA, 265 bp, Zea mays
  Clone ID: MRT4577_81989C.1
cgccgccgtcgtccactacaccgccacggtcgtcctcggtcgcgaccgcgcccttcgttctcatccagcgccacggtctagggcatgacctattgatcaggaaagttgtagcagacacgttcgtcgtcgcgaacatcgtcgagccgtgtggctactgcgctggccggtgagcatcgtcaagtcgtgtggctgctgcccctgaccagcacgatgcgtctctgggtctcccatgatgattagatggcacctgatcaccgcgtctctg

SEQ ID NO: 164915 - DNA, 264 bp, Zea mays
  Clone ID: MRT4577_8198C.1
cggtcgcgtggtcggacgcgtgggcaaagaatttccttccctatccgccgccggcgctcgtgtgcctgagaggtgcctgtacctaggaactggccgagttctatgtagagaatatgttttgcttgtctgactacgagatctgctgcgtctggtggaggcgaaagggagaaaatcctctgatctgtttcgtataacgcgtccgagctcgcaaatgaagggttttacacatagatatcccgattcgaatttgaaagactaatggac

SEQ ID NO: 164916 - DNA, 401 bp, Zea mays
  unsure (1)..(401): unsure at all n locations
  Clone ID: MRT4577_81990C.1
agaacacctggagcgctgatcagccatgcctgcgcttatatagaacaccgcgtcggggtcccccagcgactgaatgctacacctccatctcggcccgtcacaggacacacgagcaccaagnactcgcccaaagcagaggtgctgaacaccatcattcagcaccttgtgactgtcgtactacgacatgtgcaagatgatgctcgtctagcgagcctcgccaaaggcgcagaccaaggcagcttaccgctcggtgcaaaaccgatgccacaccaaagtgggctgggccaccggatgacagaagatggccgtcttcctaagctatgagtacgcgctgttctcctacccgtacacgcgcctggcctacgaccaccagcaaacgcgctgctacgagctaagggggt

SEQ ID NO: 164917 - DNA, 1333 bp, Zea mays
  Clone ID: MRT4577_81991C.1
cattgggaccctcgaggccggccggggccgccgtcgcctccacctcttcctacgcttccttgtctccaccgcgagcgacctccatacaacggtgtcagcggcctccctacgccaccgtcctcatccgccgccgtcgtccactacaccgccacggtcgtcctcggtcgcgaccgcgcccttcgttctcatccagcgccacggtctagggtttgagcactcctccatcgtctccttgcctcttctccatcatctccttgcctcttctctcctctgtgttctccctctggtcacggtcttgtttgctcttttgtttttcattcaaatcgtcgtgcatccagatctggcgtctatttttgggccaaatgcttatttcttgcagaaaccaggcatccagatctagcgtgttctgagcacaaaagttgtacaggcatgacctattgatcaggaaagttgtagcagacacgttcgtcgtcgcgaacatcgtcgagccgtgtggctactgcgctggccggtgagcatcgtcaagtcgtgtggctgctgcccctgaccagcacgatgcgtctctggtctcccatgatgattagatggcacctgatcaccgcgtctctgaacacctgatcaccgggagctcttcatatttaagaaggcatggaacatcagtgcttgcacaagagtttatggtgtctacacatgattatgacattgaagaagaagaagaaatccatgggtttgcattgcctcaccagtctgcacctcgtgatatggaaagcaccgggagacatccattcagacatcaaatagttcggttatctgaaacagctgatataaagtttaaatggcgggtgcttcttcaaccaggaattaggcatgccttatgttatgacatgttaattcaagccattcagcaatctacaggaatcagtggtcttctccgctgcgctcctgaaatatttgagcagtctggagtggctagtttgttttcagacattggagtttctcctcattcaacatcaattctcatgagtacccttaatgctttgctgatactcccttgtataactgccgcaatgctgctgatggatgtctgcgggagaagataaaacatgagaccccatgaaaattagtgatgtagttgtgggcttttgaacaatagctggagtgatataaaatattagtgatgtagttgtgggcttttgaactgcttcaagctggagtgatgtcgctgtggtgcttttgtgactgatcatctctggagcttttgtgaatgatctagctaacaatctgtaaatgatctaattgtgaatgatattataattgtgatgcttttgtgaat

SEQ ID NO: 164918 - DNA, 2093 bp, Zea mays
  Clone ID: MRT4577_81992C.1
attgggtacctcgaggccggccggggtccatcgtcctcgtcctcgccgatcactcgctgctcccctctctcgccggagcgagccccgggccggatggcggcggcagcagcagctcctcccgccgccgcgatcgcgtgatggacgccgacgccgacgccgccgcgatccgccgatggacgacgccggaagggcaccaccacccgcgccagcggcggtgaccgtctccgccaccgccgcacccgcgcctaccccgccctccgccacggtcgccgccgacaagtcctccctcgaccccgacgcgctttatgaagaggggatgtggcaacagatggccatgaacagcggtgccacaatgcaacctgggtcatatcctgagcgaccaggtgaaccggactgcacttactacctcaggactggattgtgtcgatttggcatgagctgcaggttcaatcatcctccggataggaatctggctattgcctctgccagaatgaagggagaatatcctgagagagtgggacagccagagtgtcagggaaaaggccggaattgcagggagggtgcagctaaacacattaggatatccacttcgcccgaatgaaaaaggagtgtgcgtattatttaaaaacaggacaatgtaaatacgcaaatacttgtaaattccaccacccagaacttttcaatgtggtgccttcgtcacgtggttcacctatttatacttctgtacattcctctgcaagcgctggtccacagtcatatactggaactatgtcaagctggacttttccacgagcttcttttataccaagccctaggtggcaaagtccttcaaattatgcaccaatgattgtacctcatggccttgtccaagtgccgagctggaattcatatcctggtcagctgcagtcacctggggctcaacaaacttatggaagttcacaacaaggcgaagctagtgcaggaaaccagggaatgctatcaccctatagatccagttcgtttcctgtgcctcaatatgcgctgcagagggataatgtatttcctgagagacccgatgaaccagaatgccaatattacatgaagacaggagattgtaaatttggtgcagtgtgcaagtttcatcatccccgtgtgagatcacagccccctccggattgtgtcttaagtccaatgggccttccaatacgtccaggtgaagaactgtgcaaattctattctcgttatggcatctgcaaattcggcgccaactgtaaatttgatcatcctacaatggctgctccaatgggagtttatgcatatggtttctctgggtctgcttctgtcgcacccgcttcaactaatgcacctatgacgcgacatcttcttggatctccatcaggttctggatatatgtcttaggtgtctttttttcagttgacctactttgatgtataaaatccacggcatcgcctcaggcgctgtgaatgtttctcctaacttcccgccgggatgaagttctgtaaattgagttgctgccggagatgtacagcccccccccccccctcccaattaatccagaactttgggaataactgttggaacctaataaacttcagatacagaaacgctggttttcaggtgtttgcactattttgacactgctgcacctatggtccctaacagttgaggtaggaattcctctgaaggagctgaaacctgaaacctgtagctgcaggtgtgcagttgaaattatattattgcgtcaatttatttgtaacctgtattcagctggtgttggggcagatattggcattcctcttatctgtgaatgctggttttctgatatgaacagtgtatcccagcctacggcttctgccaagacaataaactcaggacctgtttgggactgttccactattcaaaaaatgaatttgaatctgggattcattattaaagtttcgccgacgaatctgagatcctttttagatagcagcttattattcacgtaaggatattctgtttgaaatagactaatttgtttttatgatagacctcatttgtcagtgtgtattcttttatctactatataaagcgcggtttttactgtcgtcacc

SEQ ID NO: 164919 - DNA, 449 bp, Zea mays
  Clone ID: MRT4577_81993C.1
attcaagcgggcggcggggcgaggggcgggtgttttttttctttgttcattttttaacttataatttttaatttattattacatttttataacattggtgaccaatatatttgacctaaagaggggccctcccaattctacaaaaagtaattaacgcaacacctgggggggggggggcacaatctaaaatagggaacggaacttcctaatacgggggggccacaatagctatccaaaaagaaaacccagggattcaaccataaaagcaaaccaaaagaggggccccccaaaacagacctttatgggacgaggggtttgggcattcaaaaacccgatgggcaaaggggaacaatggtgcaaacctataaaaggggtgcgggggtagccccaaaccgcctctaaaaaggaacaaactggtgttgggaaaaaaaggaaacaccacttggtgc

SEQ ID NO: 164920 - DNA, 429 bp, Zea mays
  Clone ID: MRT4577_81994C.1
tttttacggatggcatcctcgtgcagacggtgactagagacgacatatgtgtgttcatcgcggtgcacacccggtgacagatcaagacgtgggctccggatggtgaccaaatcagactcattgcagaggatcacagcaggcggtgcactttgctgtgcccccctgagaagacaattcaagaagtcatgtttgccaggttcgtcgacccatagggcatgtgcggcaacttaactgtaggcactcgccacactctcaacgcaaagctgatcgctgagaaggattgcctctacaagccattctgcatgctgtccccggatcacacagtgcacggcgcggacatcaactgccaacaaacgactgctacactgctggagcaggtgagatgccatagacgcaagaagggtgcctgagaataacacgatggatgct

SEQ ID NO: 164921 - DNA, 1472 bp, Zea mays
  unsure (1)..(1472): unsure at all n locations
  Clone ID: MRT4577_81995C.1
ctcgatcgcggccgaggtccatcgtcctcgtccattccgatcactcgctgctcccctctctcgccggagcgagccccgggccggatggcggcggcagcagcagctcctcccgccgccgcgatcgcgtgatggacgccgacgccgacgccgccgcgatccgccgatggacgacgccggaagggcaccaccacccgcgccagcggcggtgaccgtctccgccaccgccgcacccgcgcctaccccgccctccgccacggtcgccgccgacaagtcctccctcgaccccgacgcgctttatgaagaggggatgtggcaacagatggccatgaacagcggtgccacaatgcaacctgggtcatatcctgagcgaccaggtgaaccggactgcacttactacctcaggactggattgtgtcgatttggcatgagctgcaggttcaatcatcctccggataggaatctggctattgcctctgccagaatgaagggagaatatcctgagagagtgggacagccagagtgtcagtattatctgaagaccggaacatgcaagtttggtcctacatgcaaatttcaccatcccagggaaaaggccggaattgcagggagggtgcagctaaacacattaggatatccacttcgcccgaatgaaaaggagtgtgcgtattatttaaaaacaggacaatgtaaatacgcaaatacttgtaaattccaccacccagaacttttcgatgtggtgccttcgtcacgtggttcacctatttatacttctgtacattcctctgcaagcgctggttcacagtcatatactggaactatgtcaagctggacttttcacgagcttcttggggttttttgggagggggtttttttggggggggtttatgtttttttctttttttttttttgggtggtttttttttttataaaatccatggcactgcctcaggcgctgtgattgtttctcctaacttcctgccgggatcaaaactctgtaaattgagttgctaccggagatttacatagcccgttttctgcacctcattgaatggcatgtcgtcttgattatcctgtccccaatggtttttcagggtgaagaactgtgcaaattctattctcgttacggcatctgcaagttcggcgccaactgtaaattcgaccatcctacagtggttgctccaatggtctatgcgtatggtttctccgcgtctgcttcccctgcatccgcttcgactaatgtacctatggcgcgacgccttctgggatccccaccggggtctggatatacatcttaggcgtcgttttttttttcagttgacctacttcgatttataaaatccatggcactgcctcaggcgctgtgaatgtttctcctaacttcctgccgggatcaaagttctgtaaattgagttgctaccggagatgtacagccccttttttttggttaatccagatntttgggaataactctc

SEQ ID NO: 164922 - DNA, 411 bp, Zea mays
  Clone ID: MRT4577_81996C.1
acccggagaaggggtttttggggctggatttttgggtctccaagggaattacaaaaaaaaaagctccttttttaaccagaaaaaaaaggcgcatgggggcacttgaaaaggcggtaaatattaaaaaaaatttggttgaagtttgagcaaaccccatgttgccaaaagtgttagttactagttatgtccaaatgaaactcccaactcaaccaaggaaggccactttgattttttcaaaaagggggccatgaaaaaacctaattatttggttccccaaaaaattgatgggggggcctacttccagccaatttgtttaaaaaacaattttattaggaggccttgggaaaaagtttttctggaaacaaaaaattggttggaaaaacttttaaaaagggccttgaggggcccaaa

SEQ ID NO: 164923 - DNA, 674 bp, Zea mays
  Clone ID: MRT4577_81997C.1
aaaaaaaaaaaaaaaaaaaaaaaaaaaaaaaaaaaaaaaaaaaaaaaaaaaaaaaaaaaaaaaaaaaaaaaaaaaaaaaaaaaaaaaaaaaattcccttggggaaccgaaaaaaagggggttttcgaactcccttattcccggaaccaaaagggtccccccttccccattttttttttatttttccaccacggccgcggttaccccttttgaaaaaccccagggggggggggttttcaatccaaatgggcaaggcgggaatccaggtggaaaacggggggggggagttgaacggccccaagaagggatttcgggttgggggcaaaaggccgggggaaaaaaccttgggggggggggaggaggttttcaacccctttttcagggaaacgggggtgggaaaaccccccccccggggggtttttgtggaccttgaccccccggccttcaaggggggggggaggggcccctatcgccggtttttccatccggagaagtttatcgggggaaggggggaggcggccaaaaatttcgctgggggccacaaccccatgggaaaggaaattgttgacctgggccttgaccgcatcaggaagtttgaaaaaaatggcccgggtccccggggtttcctcgttttcaaggttgtggggggagaaacgggctcggggttgggttccc

SEQ ID NO: 164924 - DNA, 373 bp, Zea mays
  Clone ID: MRT4577_81998C.1
gcgacgcgtgcggcatcacgatcgtgagcggggccctttgtttactttttcctcactatatggactgctattatgcgcacccaatcctgggacaaacaagtacaggtggcagagtcttggtaccggtgtaatgaccagctggaacttttcatgcgacttgcattattctgcgcgctacatggaagggcgagattgtagctgtacacggagtcatgcatgaggcatggttagtggacggagcgcgccagcagggccggccaggtggctcccagagcgcgtgcgtgccagcgtaaacccgcccccggccgtgcgtgcagggagcgctccgctcctcagagcccgctgacaaccgcgcggaacgcaccagtcgccc

SEQ ID NO: 164925 - DNA, 523 bp, Zea mays
  Clone ID: MRT4577_81999C.1
cattgggtacctcgaggccggccgggaatcacacgtcaccatcacagaatctcatctcctctactcctctcgcgctcagtttcgtcttcctcgcccacgtccatagcatcctgcacttgatggcgaacggacgtgggtgacactcccgaggcatagctgcaggcggtccccgagacccctgctaaggaacctgctacgcccgcccctgatgggaagcctactaaggcctgataatgctcatctgcgggccaacgaaccgacgccaaccgcgacttatacctacggagacgcgagatgtatctcagatgatagctcttcaactccaggagcgcacgctgctcactcatcaccacatcgctgagtgcgacgatgacacatcacaaagacaaaatcacggccagcttccgcactatcatggtctggcagctgcagaagctcgacaagtaccagcaagctcaccaaggtgaagaacttctacaacgtgtacgaacgccacgcggacgtcgacaagtggaagcccaag

SEQ ID NO: 164926 - DNA, 375 bp, Zea mays
  Clone ID: MRT4577_8199C.1
gatctaaaactttttttttttactacattttatactgtttttacttctttttttttttggagcaaaaacgggtgctttacccaacaaatgcaacgggggggaccccaaaccttgatttaaaaaaaaaggaccggcccacccccaccattgctaaccccaaaatccaaaaaccccctctggcaaagcgagggcggggcccccccaaccctaaaacccttggggaaaaccccccaacccaaaagccccgccaaaccgaaccccatttaagtttaaaaccaatggaaaacaacccctagtcaaaatggccccccgtgccgaagccccctccttaaacaggaaatctgacccctattttgacacattgggggggcggga

SEQ ID NO: 164927 - DNA, 271 bp, Zea mays
  unsure (1)..(271): unsure at all n locations
  Clone ID: MRT4577_819C.1
gcttcctccaaagccactccaaacccccgcttccagaaccttctcgaaactctccgcctcctccnctactcgctccgatggcgaaggaaccgatgcgcgtggtcgtcactggcgccgcaaggcaaattggntatgctcttgttcccatggttgctaagggagttatgcttggtgcagaacaagctgtnatctgnanatgcttgatattccgccagcagctgaagcccttaatggggttaagatggattggttgangcggattccctcttcg

SEQ ID NO: 164928 - DNA, 1302 bp, Zea mays
  unsure (1)..(1302): unsure at all n locations
  Clone ID: MRT4577_81C.1
ctccccattgttaatatgctatgtggtgactggtgattcgctaagccttttatgctgctgacacggcgatggtcgttgcttgcttctctgcagtaccatctgtcgcccagcaccaagttcaacttccagcagtacatcaagcggtccttggaggacgacttcaaagtcgtcgttggcatcagtctcccgctgtggttcgtcgccatcttcactctcttgatcgatatcaagggattcggcacgcttgtctggatctcttttgtcccgctcgttgtaagtgttgacgccatcgtcttcgtctctttagttttcttagagcaactccctctatctgcctgtccgtccctgttggcacagacaaagagccaattggtcattccaaaacagatccagctaaaaccgccttggaattaatgtaatactacagtatagtataagcaaaggcgtcgtcgttgtttcagatactcctgctagttggggccaagctggaggttgtcatcatggagatggccaaggagatacaggacaaggcgacggtcatcaannnnncgcccgtggtggagccaagtgacaggttcttctggtttaaccgccctggctgggnnnnnnnnnnnnnnnnnnnnnngctcttccagaacgccttccagatggcgcatttcgtttggacactgctcaccccagacctgaagaaatgctaccacgagaggctgggcctgagcatcatgaaagttgcggtgggcctggctctccaggtcctctgcagctacatcaccttcccgctctacgcgctcgtcacgcagatggggtcgcacatgaagaagaccatcttcgaggagcagacggccaaggcggtgatgaagtggcgcaagacggccaaggataaggtgcggcagcgggaggcggcaggcttcctcgacgtgctgacgagcgccgacaccacgccgagccacagccgcgcgacgtcgccgagccggggcaactcgccggtgcacctgctccacaagtacaggggcaggtcggaggagccgcagagcgcgccggcgtcgccggggcgggagctcggggacatgtacccggtggccgaccagcatcgcctgcacaggctggaccccgagaggatgaggcccgcctcgtccaccgccgtcaacattgacatcgctgatgccgatttttcttttagcatgcggtgaccttgaacgaattctgtgtccttactcttgtatagggaagcaaaagcatagacggagaacataatgacacgttacgttagagaaaaaaaaaaaaaaaaaggcccctagggcc

SEQ ID NO: 164929 - DNA, 297 bp, Zea mays
  Clone ID: MRT4577_82000C.1
ccaaacgtcttcctttattaacaaactttgttccaggtcgcaacaccgatggagccactagcacaagctttttgtccgcgaccagaaacgtaacacaaacaatagagcagacaaacttgggcagcaacagcgctttttccaattccaccaaaaagaatgagctagaagaaatccaatctatcaactgcaacttgtgctgctgctagcccgccaccaaaaaaaatgtacagggaaccagcgaggcagcctaggaaaaatgctcaaagcaaagaaaacaatctcccacgctcacaagca

SEQ ID NO: 164930 - DNA, 762 bp, Zea mays
  Clone ID: MRT4577_82001C.1
atggtggagggctcaccagagaagatgacctcgccggagccgaggacaaattcgcagattgatgatgaaccgtcgatcgaatcgacaaatcgaaggaaccatgacaaatctctcgacgagacgaacgcaatgcccattatgtgctacgatccatcattggctcggttaaattatggtgataacacgaacaacaaggaggcgctccccagcaatgtgacacaagttgagatggtcggccccaacgaagaggagatgacgcctctgatcaagcgctttaagaaagcgttgaaggggcacaaggatttctccgacaagggaaaatcaagggggaagcgtgcctacttcaaatgtggaagggtgaggaaggtagaaaagaagaaattctacaagaagggtgaggcgcacattgtaaaggaatgggattcagactgctcatcatctgattccgaagatgaaggacttgttgcttctgctttcgacaagtcccacctcttactcaagaaggtatattctagaaaaacctctaagtacacttcttctagtgaggatgaggatggactaatagaaaagcaagagaacttaattattgaagagcatgacaagtttgttaatgtagaaaagtcccttgctttagagataaataagaatgaattgttatctaaggagctttccgattcttatgattctatcaactgtcttaagtctgctaatgctgatttgagtgctaagatagttgatttaaacagaagttctacatcttag

SEQ ID NO: 164931 - DNA, 428 bp, Zea mays
  Clone ID: MRT4577_82002C.1
ggaaacgtaagaggagtatatctgtggttaccagttaattacaaaatgagaggcttgaccagctctactcgagtctgacctttctatgtatccaacactagccaaacaaaccttagtaagcaacaggcatccgaaagaaccttagacatctgtgatgcaaaactcggcgaatacctaatgaactacccccaaatctcattcctgtgcccagcaaggaacaccctaggaggaaaaccactccacggtaaccaccagacacctttattagcattattaaggtgacaactgatttacacccttatgacagtggagggatcatatgctccacatgaacatctatttggacctcaattgtcgcctaacaacccaggttaatgggagcacaatacatttacatacccgaaagggtagctaactgcatatggaac

SEQ ID NO: 164932 - DNA, 492 bp, Zea mays
  Clone ID: MRT4577_82003C.1
ccacccctgggctggaggctgcaggaggcgcttccccttgtgccgtcctcgcttcgccttctgcatcccaccgccgccgcgaggcaggcaagacatcctaaatctggcagcgcactactattgttaggcagcaccgtacccaggcagccattactcagcactcacccacccactgcagttaggggcgtttccatttccatttcgccgccgaccggacatcatcgcaggagaagctagctagccaccagcccaccacacatccaggccgccgcgccggccgttcttcgaaaccggccgggcgtacgtcgtcttggcgaattggctgtcggtgtttggcgccggtggtttccgtttgattcggacacgtacgcacgcgcatgattgattgatcggccggctgcttagtcggacgtcgtcgtcgccggcggctggctcgtgcaatgagcgacgtgtccgtccgcttcgtggccctggccctggccgacatctcga

SEQ ID NO: 164933 - DNA, 674 bp, Zea mays
  unsure (1)..(674): unsure at all n locations
  Clone ID: MRT4577_82004C.1
cattgggtacctcgaggccggccggggctcaccattcgcacgcgcgcgcgggggggcgggacatatgacattgtcgtcgatgcgatctgcccgggaaaacgacatggcatgggcgggcgcgaaaggcgtggcggcggcggtgtcggtccgtccgttcacggctcacatgacgctgcacccgaccgtgttgtcgtcgttgaagaagtcctcgtcgaagcgggacggctgcggccggacctgcgggtggtgccgctgggccacccccacccccatcgccatcgccacgggcaccggcggcggcatgccgtagtagccgtagtacggcaccgccgcggccggcggcgcgtagtacgccggcacgtgcaccggcaccaccgtcggcggctccgcgcggtggtagtgctgctgcacctgcgcctgcgcgtggcggtgatcggcggccaccgccacgggcggcttggtgtcgaactcgtcggcgtcgccgccttcctcgcctgtccagcncggcggtgccgtccnttgggcgacggcgccttcttcccgctgccgcggtcgccatcgacaccgccaccgccctcggcgcgcgaggccgcctcgccggggcacttcttgcatccctcctgctcgctcggngccgccgccgccgccgnccttgtcaccgggggtcgcccttg

SEQ ID NO: 164934 - DNA, 659 bp, Zea mays
  Clone ID: MRT4577_82005C.1
aataccgaaagccaaagctggcgcatccttagcacccaaggcaagaagaaagaggcgtcccggaggcagagccaagaggatccatggatcggccccaggtggtcagcgagaactatgccaatcctataacatgcctcttccatgtgctcttcaaggcgtcggcgctggcgttctacatcctcttctcgctcttcgtgaagagcttcgtcatcatctttgtcatcaccgttctcctcgctgcgcttgacttctgggtggtgaagaatgtcagcggaaggatactcgtcgggctgcggtggtggaatgagattgacgatgatggcaacagtgtgtggaagttcgagtgcctcgacggcgagtctctcgctcggatgaacaaaaaggactcgtggctgttctggtggactccttacttgaacgctgctgcatggatcattcttgggatattttcactcattagacttgaagctgattaccttcttgttgttggagtttgcttgactctaagccttgcaaacatcgtggggttcaccaaatgcaacaaagatgccaagaagaacatccgagcttttgctgaaaatgccgctcaaaacgccatcacatcccgcatcacatcatcccttcagtcagcattcggtatctgaagtccagattacaga

SEQ ID NO: 164935 - DNA, 394 bp, Zea mays
  Clone ID: MRT4577_82006C.1
tctttttttttcacgcttgataggagaggaagagcgcgcttatagtgagagcgggggggaagcatcttctgtgggcaagattgtgcagcggctcacctaccggaagcggcatagctactccaccaaatcgtacctgacccgcttcgtcaagacacctgttgggaaacttgtgtaccagttcaccaagaatcgcgcgagcggtccgaagtgcccagacaccgggaagaatatccaaggaattccactcctgatacctgcttgtttacaataggtccatgttggctaggaaccatatgactgtgtatcgtccatatggtggtgttttgtctggtactgtagttaggtataggatattccgtgcctttttggtcgagtaacataattatagtgaatt

SEQ ID NO: 164936 - DNA, 360 bp, Zea mays
  Clone ID: MRT4577_82007C.1
ctttcttaaagaaaaaaaattcttggttactgggagtggtgggaagccgtacaccctttcttcacaattcttaaccaatgcttgttgttcaccttttccatttggttcagggaaaaaggcttctatattttctaattggcttatagctcagcaaaagaatactacagacagtggagtttatttgtatccagatatacaatgtggagaaattgttcatctattctctctggttttgtcaggaaaccttctcatttcacctttcttgcctagtgaaggagttggtgaggctgatgagcctaacagctctggtcctttggtcgtagataccagcggtttggctgacaacagtcataagcgcaa

SEQ ID NO: 164937 - DNA, 292 bp, Zea mays
  Clone ID: MRT4577_82008C.1
agcgccactgtgcagtgcgcgcagcaagcttgcttagctagccgccatagactgcctcgggggcgtaatacataaactcgtggtcatgaagggtactggcgtctgatccatctacggaaggaatctcgtcggcttcagaacgtcacgccgattcatcctgaggcacctctcatacgacgagatggcaatgtcggcgacaagatgcgttactactgacctcgaccacatgcagatcacctgcgcacagtgagacctctacagatctgactcgcccatgggctacaatccgtta

SEQ ID NO: 164938 - DNA, 790 bp, Zea mays
  unsure (1)..(790): unsure at all n locations
  Clone ID: MRT4577_82009C.1
cctcgaggccggccgggttatcagaagaagnatactcagaagctgaagacattttgaatttgatgatcaacttggaccatacaatttagattcttatggagattggaaacaactttcggactacttgtcaccgaatgtcattgagcgtcttgaaccaattggaggagaaatcacaattgcgtgggagtcatcatggatggataaagctccccaaagtgacatggagagacgtttggtggaacaactaagagaaggaaagtttgcaaagaatgctcctgtacagtctgggcggagaggatgctactacacaagtatccctgcttcagttaagcataaggacatctctgggggtgacttgacagccctaaacttggacaaaacaagtttgctggagactattttggccaaaaattatgaaggtcaagaagatctattcttgggggagcttcagtttgctttcatagcttttatgatgggtcaatcactagaggcttttatgcagtggaaagcactagtcagccttcttttgagctgcagtgatgctgtgctttgctgacataaacttgccaactttgaagtttggaaggccctctcaggagtcaggacacatgttgctgaaattgtgaaaccatgcttccacatgtattaacaacaaacagtagacatttagtatgtttatgaacttccttctcaacacacatctttatgagccccttcatacaaggactaacatgtttataaagtttataaggacattatactatnncactcagcatggnntttcacatac

SEQ ID NO: 164939 - DNA, 289 bp, Zea mays
  Clone ID: MRT4577_8200C.1
gtttgtagacttaacacccagtgaaagcccagccatcatctcaaatccttgaatgttctcttaagaaaatgatgctggtcatcgcagcttcagcatctcctgttttttgatgcttggctccctctgctgatctcagtttcctggcttttcctccctcagcaccttctcacccctttgctgtcctgtgtagtgatttggtgagaaatcgttgctgcacccttcccccagcaccatttatgagtctcaagttttattattgcaataaaagtgctttatgccggcttttctc

SEQ ID NO: 164940 - DNA, 994 bp, Zea mays
  Clone ID: MRT4577_82010C.1
ccggccgggaacacccgccgtcacttatccgcgccgcgtcctcccgtcccctggccgtcatcagaaacccccgcaccctctaactaaaccctcaccggccgccacccatggcgatggccggcgccgccgccgccgccgccggtcgctgcctcctcctctcccgcccgtcccccctccggctccgcctcctccacgctgccctctccaccgccgcccccaccctcggccccacctccactccggctccccctccgcggcacgagctcctcctcgagcgcctccgcctccgccacctaaaggacgcctcctcccccggcgccccgaggcctacctcgaggagctcggagcggagctcgcagcaggggaaggggaagagggtcgaggccgcggagagcttcgaggagctcggtctcggggaggaggtgatgtccgcgctgggggagatgggcatctccaagcccacggagatccagtgcgttggcgtgccggcggtgctggccggaaccagcgtcgtgctcggctcccacaccggatccgggaagacgctcgcctacttactccctcttgttcagctacttcggcgtgatgaggcaatgcttgggatgtcaatgaagccaaggcgtccaagagcagtagtactctgccccaccagggagctaactgagcaggtttatcgagtagcaaagtctatcagccatcatgcacgttttcggtcaacgatggttagtggaggcacccgtctaagaccccaggaagattctttgaacatgcccgttgacatggtcgttggcactcctggaaggattcttgatcatatcaaggatggtaacatggtttatggtgatattaagtatctggttctggatgaggcagatacaatgtttgatcaaggctttggaccagacatacggaagtttcttgctccggtgaagaatcgtgctgcaaagcctgatgatcaaggtttccaaacagtattagtcactgctactatgac

SEQ ID NO: 164941 - DNA, 106 bp, Zea mays
  Clone ID: MRT4577_82011C.1
tgaattcttaggtcggtcaccacttggtcttctgctctcggacgtcgactaagccgacttcgtcagcacgatggagtgccttgacgcatgccttctctcctctgag

SEQ ID NO: 164942 - DNA, 606 bp, Zea mays
  Clone ID: MRT4577_82012C.1
tgggtacctcgagccggccgggaacaatactttccacggctcttcttctgcgcccctctgctccaaactgcgcatagagcaatagaatgccccacacgattgcgagcgcacgcacgtaagcacgagtgtcggaacctcaagttagaataagcaccagtgcctgatcgatggcggtccacgactctcctctccgaccgacagctgctgggccaccccgtggagtacggtcgcctctaggacagacgcccaggaaggcgcccatcatcgacatggccagctccaaccctccaatcaagcaaggtgtccacaggcggctgcggatactcgtccaagaaattcctctcctacctccatggcaggctgcccggctactatggcttcgaccccttgggcctctcggactcggagggcaccggcgtctgcatcgagcccaagtggctggtctacatgcgaggcgatcgacgtcccgctacgacatgctgagcgcggtgggcgccatcggcgcggagatcttccgcaacatggtcatcatcccgccggagaacgagctgccgtggtacaagacgggcggtatcccgcctgcggatacctacgactactgggacg

SEQ ID NO: 164943 - DNA, 406 bp, Zea mays
  unsure (1)..(406): unsure at all n locations
  Clone ID: MRT4577_82013C.1
actgttataaataaccacacaccctttttttcttaacccaaccaatcanttacattgatgagcctctctactactcttagttactaccatcagcttgcttcaacagtataatagagctatcctatgatttcgtcacctaatccctcttcagcggcccttctcctcctttcttcttcttccgttctaacacattctctcgcttaccttactcacgacaactgctttaataacaataatgtgactgtgcataacctgttcatccactactttactcttactctttatcctctttccaacatcctccctctgttctctatcacctacactcttcaccctctcaatcactccgaattccccctgtgctattttacagttctccttctctcgccctactcctcccattttt

SEQ ID NO: 164944 - DNA, 664 bp, Zea mays
  Clone ID: MRT4577_82014C.1
cgccctgggcgtgggcgtgggcgcggccggggtggcggtgcccacgtactcgccggacccgcacgccgacttcctccggtccatggaggagatggccgcggcgctgcggctggacgcgcggcgccgcggcgacagggcgcgcctccacgagctgctgctctgctacctcgcgctcaacgacaggcgcgcgcacaagtacgtcgtcagcgccttcaccgacctcctcctccgcctcaccgccgccgccgcagccgccaacctcagcgacgacgaccggcacgagtaaccgccttttttttcacggtcatggccgtgcgtacggacagaatttcgggtacggcggaggctcaaaaatcctcgacagcatgagcgagcgttccaagatcacccagagctgtacatactgcctccagctccagatcgagctccgtagctagaaatctgttcgtgcgcgcagcattttgcttcccatttacctctagctccgggtgtgttcagttgtgtgagtgtgactgtgtgagcagtgagcgtgctggcgaagatatgatatggtatggtatggccagcctctaaaaacaaagcggcatttgcatcgtgctcgcttggtttaaaaaaaaaaaaaaaaaaaaaaaaaaaaaaaaaaaaaaaaaaactcgagaggggg

SEQ ID NO: 164945 - DNA, 569 bp, Zea mays
  Clone ID: MRT4577_82015C.1
gccggccgggtcagggagtcgggacgtcccggaaaataaatgaataggcggggattgctgcgccgctccaccacctccactcggtctacgtgctccgtcaccaaacccacccgggtctcggctaagaatcgctgctttcgtgctccaccacatccggtgtttgcccctgccttcacttacactatcatgcacgaaccaacaaatggactctctcgcgggatctgatccctcgtacgttgtcgcccagcgccaatgggctgcaagcttaactcgctccgtctactagcgcgcggcgttaagggatgccgccatgtaacccgacgtagagacgccaatgacaatgacatttagcacccccaccgccgcgagggcgctccggtgcatgacgttgtagcatgtctgtgtcaacagcatccctcggtactctttggataccactccgaagtgttgaacgagtacttggaggacatctccgatggccttgagttctgcggctgcaataatgctgaaagcatcggggggagaaactgcaagttaggacctcgtgttgcctgcctcttctttggctg

SEQ ID NO: 164946 - DNA, 186 bp, Zea mays
  unsure (1)..(186): unsure at all n locations
  Clone ID: MRT4577_82016C.1
tctttgtgggatatacagcaacccccgcgacgctaaccgagcttggatttctttggtccagagagactcacccgtgaatctncctcgtgtcccctcagccttccaattgcaatgcccgcgccccgcggcatcctggncggaccatgcaactcgattttgcataggctggccccccccgacaagcat

SEQ ID NO: 164947 - DNA, 642 bp, Zea mays
  Clone ID: MRT4577_82017C.1
cctgccttaacctacgactatagttacatgaacatcatatattaatgataattttgaagaaaaaaaaaaaaaaaaaaccggccctgccttatcctacgactatagttacatgaacatcataaattaatgataattttgaagaaaaaaaaaaaaaaaaaaaaaccggccctgccttatcctacgactttagttacatgaacatcataaattaatgataatttggaagaaaaaaaaaaaaaaaaaaaaccggccctgccttatcctacgactatagttacatgaacatcataaattaaggatatttttgaagaaaaaaaaaaaaaaaaaaaaccgcccctgccttatcctacgactttggttccaggaacattataaataaatgatattttggaaaaaaaaaaaaaaaaaaaaaaacggcccctgctttttcctacaatttttgtgccgggaccaccataaattagggttattttggaaaaaaaaaaaaaaaaaaaaaaccgccccggctttatcctccaattttggttccgggaacctcaaaaataaagggtatttttgaaaaaaaaaaaaaaaaaaaaaaccgggcccggtttttttctcagtttatgtgcccaggcccttcaaaaataaagggttcttggg

SEQ ID NO: 164948 - DNA, 310 bp, Zea mays
  Clone ID: MRT4577_82018C.1
cctgtttttagatctgttaggttagttttatcagtgatgcttttcgtgaagctttatggtgtgtactagctgcgatctggcggctgatttcagaactttgttagttgaactttgtcaggtcatagatattaagctggtgatttgaagtctcagttcttagtggagggtctgtttttttttttttgatggtcatgggtgtcatgtgtggagcttccctggttaactggttatcccagttcaacgctgtggggtgtgctctatgtagctacctctgttattgctttcttaaaagctgagtaaaatctccttt

SEQ ID NO: 164949 - DNA, 259 bp, Zea mays
  Clone ID: MRT4577_82019C.1
cagatgcatacaaccgatgctgagtgatatggtggtaggaataattcatcccgcaatgatctgacgctgacgctcagaccttgtgatgctcgtcatatgatgctgcatgagcgccggcaccacgtatgaagttactaagaatgaattcaccgtgggactagcgatcagttgcctgttatacaatcgagaagtcgcgtggaaaactaccataatgacgagctgagctatcagaagacaattgattccgtgatatatacaa

SEQ ID NO: 164950 - DNA, 166 bp, Zea mays
  Clone ID: MRT4577_8201C.1
gataccgattcacactctcacaggaaataccccatattgcctctccaaagacctagtattggaacctaagacgtccggtcaaccgggaagacaacccatcatccaagagctgtacggacgccaacgagattggagacctcaacgaaaacttaatgctcgaggtcct

SEQ ID NO: 164951 - DNA, 410 bp, Zea mays
  Clone ID: MRT4577_82020C.1
attcggctcgaggttcagcaacgtcgagctgctcgacgacaaagggaccataatagaggggtgccagtacaagacctaccacagggtcagtgcggaagaccatcacaagtgatgacgcattaggcatgtccagctgagtcgtgttgagcgggcgctatggtagaagtatacatggcaagcgctatatacagagccgtggtaattaatagatgcacaatggtccaccgtacgggtatgcgctacgacaattattcacaggacatcgtggctgaaaagacagaaaggaggcagctcgtatattggggagctcaacaatagtgtagtgataatcgaaacgactcctgtctaattacagggctgaccttaagaagggcgagtcatagacttcccggaagttggatctgtccact

SEQ ID NO: 164952 - DNA, 682 bp, Zea mays
  Clone ID: MRT4577_82021C.1
actatagcagtggaaaccaactcaaattcactcgcgagcatacacgaacacacgacaaaccgtatagatcagtcgtcgaagccagtgtaagcaaacatgcaaccgcagcaggacgccgccgaggacgtggtcattgtcggcgccggcctcgccggtgtcggcgtcgccctgggactccacaggaagggcgtgcggagcgtggtgctggagtcgtcgccggcgcttcggacgtccggcttcgcgttcatgacatggaccaacgccttccgcgcgcttgacgccctcggcgtcggcgacaagatgaggagccaccacctgcaggttcagggggtgcgcgtcatgtctccgactaccggggaagtggtgcgagagctggatctccgggtgcaaggcaaactgggaccccacgaagcccggtgcgtgcagcgtaacgtgctcctccaggcgctggaggaagagcttccggcagacaccatccgctacaactccaggatcgtctccatcgacgacgacaaagaaggcggtggcgatgccaagatcctccatctcgccgacggttcgatgctccgagcaaaggtgctgatcggttgcgacgggatcaactcagtggtggccaaatggctggggctcgccaagccgctggactcggggcgtatagccacgcgggagcacgtcaagtacc

SEQ ID NO: 164953 - DNA, 491 bp, Zea mays
  Clone ID: MRT4577_82022C.1
aggaagagacataatataagatcgatgaagagattttacaacaatatgatcaatgcatacaaaacggagacaaagaacatcgatgccgaaatagagagagagcggcatatgtgagccagagaggcagagcgcggagtggaattgtgaacatcggtttgcccagagtttttgtcggagggagtaactggtgaaggaagaatcatctgcggaggaaaaggtaatgtttgtctcgtcggggccgcggctggtggaagacgtggccttgttggtgacaatggagccatggaagtttggttataattggtagtcttggggagcccgatatcataagtcatggttagatcaggtctaaacaaaccgaaggctcgttcaaaacctttcccgggcttgagattctcgtcgtacaatgcgaacaagtatgtggcgatcactctcccgggcataagtggcgtcccggacccagattttaaatgagcaatgagatttttatt

SEQ ID NO: 164954 - DNA, 335 bp, Zea mays
  Clone ID: MRT4577_82023C.1
gctggaagcgcgacacactgagggacctggatgagacccttgccattacgcagagtgtaatctttgtcaacaccctccatcaggaggactggctcactgacgggatgacgaccgagtaccacacactctctgagactcatggtgacatggaccaaatcactaaagacatcatcacgagggaggatgggcctggctatatcggtatgctcatcactactgacctgcctgctactggtatggatgtgcacccagtgttcctggacattaactatgatcttgccaccgatccctagaactgcctggatcgtattgctcgacttggaacttatgggcgg

SEQ ID NO: 164955 - DNA, 326 bp, Zea mays
  Clone ID: MRT4577_82024C.1
ggcccaacaccaccccctttttattccccaaaggaaacacacagcgggtcccttttatttccggggtttccaccatcaaatgggctttgggccccatcaccgggcgcttggtttacccatgcctttggtatattacccactgacccccccgtcgaattaaaaaagggaaggggaaaccttgcccaacttaacattattggccaaaaaaacacggctttttttcgcatttataatttccccggtttttggatattaaaggcgggctttacttccttgtgggatcgggggggggttttctttccctctccctcttattccccttcttt

SEQ ID NO: 164956 - DNA, 312 bp, Zea mays
  Clone ID: MRT4577_82025C.1
gtaatattgattaattattttgctcatgtatgtaagcagttgaactgcaaaaaaaaaaaaaaaaaaaaaaaaaaaaaaaaaaaaaaaaaaaaaaaaaaaaaaaaaaaaaaaaaaaaaaaaaaaaaaaggggggcccgcaaattaaagagctccagaacccggaaaaaaattccgaaccgggaccttaaagggaacaagtttacaaaataagaaggggtataaaagctaggcgaaaaaaagggcataaaatgattcctatgagaaagggtaaaccgttaaaaattcaaaaaaaaaaaagaaccgaaaggaaaa

SEQ ID NO: 164957 - DNA, 984 bp, Zea mays
  Clone ID: MRT4577_82026C.1
aacctccattgcaggcaggcacatcactagctagtacagaaaatggagcaggccggtgacgagacgccgggagagatcgggcgagaggctgctcgccgtgaagctgcgctccggagcggcggcggagacgccggagagcgcgtagacaaggctgtggtggacggcggagaagacgagcggtttcgcgtgcagcggaaatggaggcggttcttggcccatgtcgggcccggagctctcgtggccattgctcgtggccattggcgtcctggatcctagcaacttggaactggggctgacttcaagtaccagcttctgtgggtgattttagtcgggatggtcttcgcgcttctgatccaaacactggccgccaaccttggagtgaagacaggcaagcatctcgctgagctctgcagggaggagtacccacgttccgtcaacatctgcctgtggatcatcgcggagatggcggtgatatccgacgacatccccgaagtgctgggcacagccttcgcgttcaacatcctgctcgggatcccgctgtgggccggagtcgtcctcacggtgctcagcacgctgctgctcctcggggtgcagagattcggggcccgcaagctggagttcgtcgtggcggctttcatgttcgccatggcggcctgcttcttcggcgagctgagctacctgaggccgtccgcgggggaggttgtcgtgggcatgttcgtccccaggctccgagggaaaggcgcggcagccaacgccatcgcgctcttcggcgccatcatcacgccgtacaacctgttcctgcactcggcgcttgtgctctccaggaagaccccgcggtcagtgaaaagcatcagggccgcgtgcaggtacttcctcgtggagtgcagcctggcgttcgtggtggcgttcctcatcaacgtggcggtggtcgtcgtcgccgggtccatctgcaacgcggcgggcggcaacctgtccccggtcgac

SEQ ID NO: 164958 - DNA, 869 bp, Zea mays
  Clone ID: MRT4577_82027C.1
cccacgcgtccgtacctccattgcaggcaggcacatcactagctagtacagaaaatggagcaggccggtgacgagacgccgggagagatcgggcgagaggctgctcgccgtgaagctgcgctccggagcggcggcggagacgccggagagcgcgtagacaaggctgtggtggacggcggagaagacgagcggtttcgcgtgcagcggaaatggaggcggttcttggcccatgtcgggcccggagctctcgtggccattggcttcctggatcctagcaacttggaaaccgacatgcaagctggggctgacttcaagtaccagcttctgtgggtgattttagtcgggatggtcttcgcgcttctgatccaaacactggccgccaaccttggagtgaagacaggcaagcatctcgctgagctctgcagggaggagtacccacgttccgtcaacatctgcctgtggatcatcgcggagatggcggtgatatccgacgacatccccgaaggttgctgatcgattaggcaatcagctagctagcttcctgccttccttcctcctcgagttcttcttcttcttcttcctcctgtcatcctgtacgtgtgtttgctctaaacgatgcccagctacctttggtttcactttcacctaccgcagtgctgggcacagccttcgcgttcaacatcctgctcgggatcccgctgtgggccggagtcgtcctcacggtgctcagcacgctgctgctcctcggggtgcagagattcggggcccgcaagctggagttcgtcgtggcggctttcatgttcgccatggcggcctgcttcttcggcgagctgagctacctgaggccgtccgcgggggaggttgtcgtg

SEQ ID NO: 164959 - DNA, 375 bp, Zea mays
  Clone ID: MRT4577_82028C.1
tcctctatagcgggcgacctagagtttgtttcttataacagattagcaaacatcgagctccttgctgggcttattactggagtcaatcactacgatctcaattggaaacgcaagccagggtacacccacaaaatatgtgactgtagcatgcacggtatcttacttcacatgtatggagacaacatcagtccttattacttggacacttattgtgctaatcctgcacccagaatggcaagagatagcaagataatagagtttgatgcaatttgaaacaactacaccgggggatcgatatcttgagcccctttcagactataaccatgattctacatgaagcccttaagttggacgaaaacgctacccttctatcaa

SEQ ID NO: 164960 - DNA, 114 bp, Zea mays
  Clone ID: MRT4577_82029C.1
cacaattgttggagctgtgtctcctgatggtggtgatttttcagaccctgttacgtccgaaaccatcagtattgttcacgtcttcaggggtttaaatacaaagctcgctaaaag

SEQ ID NO: 164961 - DNA, 616 bp, Zea mays
  unsure (1)..(616): unsure at all n locations
  Clone ID: MRT4577_8202C.1
aattcggcacgaggcgcaccgcgaagcaaacgagaggggaaaaaaaagcgcgaggaggccgcgcccgcgagggaatcacttgcccgggcgcgggccgcccaccggccaccgcccagccgctgccgcctgcctgcctgcctggtgcggtggtgcctgcccacgggaacgggatagctggctgacggacgcattgcggagcggactgggagactacgggtaagataataaaagggccaggcgtggcggggcgcaaccaccgctgtgcctcggagaggaggacagctctcgcgccgcggctgccgccatgtggacgccgtcgcgcgggagcaacgcccggcgcagcggccaccgccgcatcgcggactacctggcggacgaccagaccaccaccacagccaccgacgcctccgacaacgagtcctacactaccgcctatggggaggagttcttcgccgccgccggcgggagcggcggcggcgccggcggcatgctgccggcattcctggcggaccagggggacctggtggaggtcatgctggagctggacgaggagtccatggtggtgcgcagcgtcacgcccaccagcgcggcgctctacggcgccgnctccctcccg

SEQ ID NO: 164962 - DNA, 610 bp, Zea mays
  Clone ID: MRT4577_82030C.1
aaaaaaaaggaccccccttatattctttccttactttgcaaaaaaaggttacagcaggacacctactactaaaaccctactaggggggggattacaacaaggagggggggggggcaaaaacccaacaagcaacggggggggaaaaagagaaacaaagcttttaccctaccccggacccggtttataaactccccttgttcaacccgacaagctactatttacccggaaaaacttaacataaacccaaacggccggttctgttgggggctaaaatcatgccccacgtccagaaaatcggcccccctttcttttccccccttttgggcccggggtttcggggcccggcccggttgctacccaagtcaggcgtacccaaccccggaggaaacccccatgaccaggatggccggcccctctttcttgccaagggggggcctcccccgaatccgccgccgttgtttaacaccaccttcttgccaaaccccccgggcggagctccacggggaccttgcccgcctctttggtcccgtcccgttccccgtcccgttcccttttccttttccggttgggggaggggggcccccccccccccggggggccctttttttcc

SEQ ID NO: 164963 - DNA, 530 bp, Zea mays
  Clone ID: MRT4577_82031C.1
aaactgcaagtgcaccagagggagttagtgtccttagaagaaatttagatgatgtgggatgggagtatggggttcttgttgatataaacaataaggacaaggtaaagcgcatactgtgtgacaagcaaatgtgtggaggggtttatcggttgaagcaacatatcgccaaggaaggaaaaaatgcgaagaaatgccaaggcatgaagaccaccaaagagaagttactggaggctcaagaaaagtgcaagaaagcactagatggagcaaaaaggaaaagggaggtgaagactgttcgtgagctagaacttagagaggaagttcatgtgtctagggttggaggatcagaagaagtgacttgtgttggaagttcagagcctcacaaattaggccccatggacaaatggacaaaagctattgatcctacagcaaccaaatctgaatatttgactcaacagaggctgaacaaggaactttggaaagaaagattacatgagatttcatattcatcagatttccttgctgttttgtaa

SEQ ID NO: 164964 - DNA, 774 bp, Zea mays
  Clone ID: MRT4577_82032C.1
ccggccgggtttgtaaatagaacgctgttgaagttgtttcttttatgagtagagccctatattttaagatagtgcactgatttaagacactgttggagatgctcttagttactactaacctacacaattgttcataaaagcatgagttttctgctcgggactgtagtgcaatctcatgcaattgccacttgcttgagggttgcagtaatgatgtcatatagttttcttcttggtcaacatacaatgggatttgttgcagacacatatagtggttttggaaagtgaatttactttgctgtggggttgtgccaaacctttataagctacacaatctgacctaacccattagacatctccatgtgttgttgatgggatttttttcacgtagatgaactacagttgaagtataaatcggggaaaactgaagtctgttaggttaattaatccatgtccttgtagaccagctagctaaatctggttcaaggaacatcatagttgataaaaagaatgcagtttgattgcaacaggcccaaaataacattttagaacaaggtaaacagtgtccttgatgttagcttgataatttgcataactactggttttccaaactttcgggtagcaacttgagactgctctatatatttatgtaatataatcttggacttgatggatacctgtacaagtatgccatttgcacaattactggtggttttctgagctttgggtcagcaactaagactatttgtatgtgatacaatcatacaatcttatgac

SEQ ID NO: 164965 - DNA, 157 bp, Zea mays
  Clone ID: MRT4577_82034C.1
ggtccaaccgggaaaaccacaaacgtgataaggaggcaaaaagcaccgggacgcaccacacgagagatctggggggggacaaagggggttttaacgtgaagaaagggggggggagggatagaggacatttcccaaaggcctggaagccccagaaggg

SEQ ID NO: 164966 - DNA, 2943 bp, Zea mays
  Clone ID: MRT4577_82035C.1
atgaggcaagaaaggatggtacgacaacaacaagcaccaatgcctccaccaccaccaccagttccaccctgggacaagcaccgagagttcatgagtcacaagatctctatgtttgccagctctccagatccattgcacatggatgattggctgaagtcagtggagaagatgctgaatattgctcaatgttctgaccgggagaaggtgctttatgcttctgatcgtcttactggccccgctgctgattggtggtattcttacactgctgctcatgatgctgccaataatatcacatgggcagaagtcaccacacagttcagaaactatcatattcctgctggactgatgaatataaagaagaaggaatttctgtcactgaagcagggcaacatgtcagtcagcgaatattgtgacaagtttattcagctatcaagatatgctccagatgaagttgtggacgatgaaagaaagcaggaacacttcatggaagggcttaatggaccactgcagtattcactgaggattgctagcacacccgtccaaaacaagcaacaaactccaggttctcgcaagggattcagcattgccagagtcaatcaagttagtgctgatactactgcagacggagctgacatcactattggcaacaacatccgtgtgattagagattttcccgatgtctttctagaggagttacccggaatgccaccagatagggaagttgagtttgtcattgacctcttacctggaaccacacctatttcaaaaaggccatacaagatgtcagtagaagaactaaaagaacttaagaaacagttaacggagttacaagaggctggatcacttaatgatgtcacaattaagaacaaatatcatttaccccgtattgaagacttattcgaccaaatgagaggtgccagagtattctcgaagattgatctcagatcgggttaccaccaaatgatgattaagccttatgatattcccaagacgactttctctacccgatatggtctatacgagttcgcagtcatgtcatttggtttgactaatgcaccaacctacttgttgaatctgatgaataaggtgttcatggagtatcttgatagattcgtcgtggtattcattgacgacattcttgtttattccaagaatgatagtgatcacgaggaacatctacgggtggtgctacagaagctacaagataatcaactctatgccaagttcagcaagtgcgagttctggattgacgaagtgccattccttgggcacatcatctccaagggtggaatctcagtggatccggctaaagtaacaatgatagtaggttggaagatatcaagttcagtcaaagaggtccagagtttattgggacttgcaggctactaccggtgttttattgaaggcttctccaagatagcgaaacctatgacctcattattggagaaggggaaagagtttaagtggactcatgaatgccaagagagtttcaatcaactgaggtttaaattgatgtcaaccccagtgttgattatgccagatctacagaaagaactggcagccgtagtgcatgcgctcaagatatggaggcattatataatgggaactaagtgccaagtctacatcgatcacaagagcttaaaatacatcttcactcagaaggatctcaatcttaggcaacaccgttggttggagctcatcaaggattatgacttggagattcattaccatccgggcaaggcaaatttggttgcggatgccttcagtcggaaggagcatgtccacgcagctattgttgcacaattgccctatgagttagttgaagactttataagactcaacctgggaatagttgcacacactaaagggataactattgaagtggaacctaccttggagcaggaaatacgcaagggtcaggtcggtgatgctaaaattcaagagatcaaagatctgattactgaaggtagaggtccaaaatttacagaggatgagcaaggcacaatatggttcaagaaccggatatgtgttcctgagattgatagcctccgtgagactatactgaaggaagcccatgactctgattactctattcattctggtagcactaagatgtatcaggatctgaagcaaaagtgctggtggtatgggctaaaaagagatgtggctgcacacgtggttgtctgtgatgtatgtcaaagagtcaaagctgaacatcaaagaccagctagactactgcacccgttaaaggtactcgaatggaaattgaccaaagtggctcacttcattccggtcaatactacttataaaggttctcaactggcagagttatacatggctcaaattgtgtgcttacacggtgtaccgaagaagattatttctgatcgtgggtcccaatttacctcaaggttttggaagagccttcatgagaacataggtactaagttgaaattcagttcagcctatcatcctcaaactgatggccaaactgagagaactaaccaagtagttgaggatatgcttagagcttgtgcccttaagcatggaggcagttgggacaagagcctaccatatgttgagttctcttataataatagttaccaggccagtctgaaaatgtcaccatttgaagctttatatgggaaagacaattctttgggcctgagattattcaagaggcggaagaacaaagttcgtgtgatctgggagaagttgagggtagcacaaacagaacagaagagctatgctaataatcaaagaagaccactggagtttgaggagggtgatcacgtgtatctaaaggtgtcaccaattcgtggaatgaggagattcaaagttagaggcaagttatcccctcgctttattggacccttcagaatctttaggcgagttgggggatggcctactagcttgagctaccagatcatctatctgatgtcatga

SEQ ID NO: 164967 - DNA, 491 bp, Zea mays
  Clone ID: MRT4577_82036C.1
gggaagcttaaaaaaacaggccttttctttggtttaaattaaaaaaaaggggtattccacaaaacccacccccctttggaaaaaaaaacgaaaatccaaaaaaccctttcccctggtttttttaaaataaactaaaagcttccaacttggtctttccccattttcaaaaacacaacccccagttttttgtagtaataacacagtcctccatcgccactaacctaaattttgggtctcggatactgaaggaccaggggcccccaccctttccgatataaaatttacagaatcgcccccccctttttggccgttttattttttggccttacgggacggggctttccgcaccgggggccccgccttttttaagggaggggcctttttgggaggggccttttttgggggagaaggggactttttggccaccggggcctttttccttggggggtccttggccgacgttttccccgctttggcggggggggcggttt

SEQ ID NO: 164968 - DNA, 292 bp, Zea mays
  Clone ID: MRT4577_82037C.1
ttttatttttaaacatagtgatgtcaaacagagcagtgggactacttgtcattacaacaacaatagaacatcacaaccactgtacaccatacttctattgtcttaaaataaccacccaaacaaatggacaaccttacaaaaacatgctccacgaaattgatgtacccgcaataaggtccgatacactaaacaaaaatcacaggcctgccacatggaatcacaaaacaaaaacatactctatcaaacacattggagaacggagaacaccaccctctttaggtccctctccaac

SEQ ID NO: 164969 - DNA, 134 bp, Zea mays
  Clone ID: MRT4577_82038C.1
tgctggtgcgggaggctttgcagtacttatcgcgtcgagatgcctttttccaaggggccgacggctactggacatcaaatagagtgcgatgacaaaagcctattcttcggcgtttggagggcggtggagcagtg

SEQ ID NO: 164970 - DNA, 282 bp, Zea mays
  Clone ID: MRT4577_82039C.1
agcaccgcgccagcagcaagcgacccgaaaaaacaacgaggagcgcgcaaaggagcggaggaaggaccaaagcggcgacgacgaccccgacggcgccgggagggacgagctgaagcggaagcagaacgagcacaaccacagcgcccagaaggagaccaacgggcgaaccaagacgacccgagccgtggcggacgacgacacggacatgaatccggaggcccaggaattcatgaaagcgctggacgggtgccgaccggaaaggagcggggccaacgcgaggga

SEQ ID NO: 164971 - DNA, 779 bp, Zea mays
  unsure (1)..(779): unsure at all n locations
  Clone ID: MRT4577_8203C.1
ccggccggggacgcttcaggggtgcgagtggggggatctgcctttaaaaaaggggccgatcccacgggcagtagacattcctcgctcctcttgcgaccaccgcgcccttccgccttccgggcctctagatggggtgtgccggtgttctctagagggatccgtgtcaaggtcatctcttccggtgacttcaccatcggagagcatgcgcccgtggtggtgtcgccgatcttgtcttcttcctgccgccattggaggagtgcaaccccatgggggttggcatcctttcgccactattcggcttcaaggattttcatcacgtagcccggctgcagtcccccgccggcggtcacccaggaggatgaccaccagccttgtggtggggagaagcaagccgggttgcggcctctctcccaccctcagcttcaaggatgttcatcatccttgctgtggtgggaggcaggttgagccggggcccttccctccgcttgggttggtgacccgcttcttcctccagcattcggaggggaagggtgttcaccaatcctgcggngggtcggtccttggctacacggggtcggccgactgcaggctatcagctgcagcgtgtctggccctttgnggctggatagctctggtgctgcctctgtcgctgcctcctgctgcctggtcggggtgtggttacccatccaccacacgggcgacagtcgtgtcgtgcgcgggtttgccacattcatggcttcctctgccggtcgggtgcattgggggactataccagacgt

SEQ ID NO: 164972 - DNA, 600 bp, Zea mays
  Clone ID: MRT4577_82040C.1
gccggccggtcccgaatcaccataacacagccccattctccccgtactacctcaatccacgaaaggtgaaccccatctcgccgccgccgcgatgtctggcctatatgacagacgcagcgactatgttctcgacgagagggaggtctctaccaccgggagtattcgatcggacgcgatcggcaacgccgggatcacccctcggaatactagcggccgaaggtgtgcacctcctcacgcacaagaaggagacctcacaagctcctctggacctccggctccgcacgagattatggacgagatcgactcccacctggggtgagctctgcacgtgatcatgtccgacccacaaaatcctcataaacatcgctcgcctccactacctgagctacccggtctcctaccatgaacccatccccgtcgatgactgcgtgcattactcgtctgcgagacgcatatgtaggggtacactccaacttggagtgagctccgccccttggacgtcttcttcttattcactgattgcgacaataacctcgggttctgaatctaactgattcacccatctgggaactacagcgaatggaacgccagcgctgttgg

SEQ ID NO: 164973 - DNA, 215 bp, Zea mays
  Clone ID: MRT4577_82041C.1
tttttttttttttttttttcccttttaaatccacagcacgatcttcaacttatgagcagtttgttgttgaaattacacatgcagacacttaggaacagcagggggggtgaccgggtgaggacggacgagatgtcgagatctatacggcgcgaatcgacagacgggccgcaaggcagtgggggcggccatgctgcagcttcggctttcagttcgcc

SEQ ID NO: 164974 - DNA, 375 bp, Zea mays
  Clone ID: MRT4577_82042C.1
cggactctatttttttttttttttctgtttttttttgggcacacctgatcaggctcatgatcacgtgcctccaaaaccgaacaaactgaagagagaatgcccggacagacgactggatgccaagagagttgtgtttctctccgcgaatgtttgttcatgaggattatatgctattttattgagcaatgcggtaaacactcttataacacggatgtatgcgtctagtttgcataacgaagtgctcagaaacatgtgtggagactattgtataaatataagcttggactatgggcaccatctaaagaacacatgcttagtgcgaaggctgcctgttcttcttcttgacaccagacttggcaacctggaggctgcggt

SEQ ID NO: 164975 - DNA, 415 bp, Zea mays
  unsure (1)..(415): unsure at all n locations
  Clone ID: MRT4577_82043C.1
gcgctcactcgtangatgtgattatgcaggtagaggagaaccgctttgacctagggacttcggagacggggtactactgggcggggggagatcaangatcccgtgcctcacttctacatgccaccactgcaggatcataaggattatctaccgccgccgccacaggcgtggactctgtcacagtcgggcatagcatgacgtcgccgtctggtaatcttcgagagttattggtctactacaagtttggtttgctcccaaccgactgacggagacagaccaccttctgttgagttggcagtggcagtggcgtttaatatatggaagcaggttgtctggatgtctatgcaacgctactccggtgggtgtcggataggttttcattaacagtctgtattgttggttatggttttgtggg

SEQ ID NO: 164976 - DNA, 409 bp, Zea mays
  Clone ID: MRT4577_82044C.1
gtaccctcgggttcggccggggaaaaaaaaaacaataccaccgctctctttacctctctcgcatctactcaacgcctgaagctacactcgtacctcgccctactcgcacgcggatcccgcactactccgggagcaaaatggatgacgctgaggatatccagcccctcgactagcgacaacggaactggcatggtcaaggctgggttcgccggcgacgacgctccgaggaccatcttacgcaggaggggaggacgcccgcgccacaccgcaagaactacatgtgaagggggatcaagcaggtgcacccggacattggcatcacgaccaaggacatgtccatgatgaactccatgatcaacgacattcataagaatctagcgcgcgctgccgccatgctcggggggggcaa

SEQ ID NO: 164977 - DNA, 413 bp, Zea mays
  Clone ID: MRT4577_82045C.1
aaaaaaaaaaaaaagggggaattaaaaaggggacaatcccgggaaatggaacggaaagggtttgggggggaaggggtttgggttttggaaaaccaaaagctgggggcccaactgaaacgggggaaattttttaggggacaaaagggatgcttttggcccagggggggggggggcaaaaaaaaatttggacggaaaaagttaaaagggggaaaccccccgggggtgttaacccccaaaaggacccctggggcccccccttcccaaaaaatttaacaagccccctgactttgggggggaaataaaaaaaaaccccaaacactttggcctttagggccggcaaaaggaaaaagggggccttaaaaccccaaagggctttgaggagggaaaaaaagggtttggaagggaccttgcaa

SEQ ID NO: 164978 - DNA, 363 bp, Zea mays
  Clone ID: MRT4577_82046C.1
ctagttctagatcgcgagcggccgccctctatttatatcttaattttcgttatcattttttttgttttttgattatattattatactttttttttttttttccccccaaaaccccagggccgttttttttttatttgcccaaaacattatatttttaaaggaatacctaaaatacttggtggccccgcccaaacttccaaaaaaaaagggaaaggaaaattgtctttctcctctaacgggaatcaaaccgttcaatttcttaaactccaaacctgaaacttcatttgtttaaaaaaaaaaccttttaaaaaaccgacatgtactcggccttcaaaaaagaaagcccgggttttccgttttcct

SEQ ID NO: 164979 - DNA, 676 bp, Zea mays
  unsure (1)..(676): unsure at all n locations
  Clone ID: MRT4577_82047C.1
cctcgaggccggccgggccgggcaccaccacaacccacaccccgcacggtcgatctatcttgttatatgcgtgcatggaggggagcagcagccagctgctggagacctgccttcctgctagcctctacgcggttactcctcctccatgcgcccatcctcatccccttcttgccccgctgccgaaccagcagcacatgcttctgcagatgccgtttgtcaaggagcaggctgcgaataatcatggcctgatgctctcttcggaccaccaccaccacagcggcctcctgtacccgctgcttcttcccggcatccctttctgcccctccgtcgccgccgcctgcgagaagactaccaccaccggctccggggcgctcgatgccggcgaggcgggcaccagctcggcggcggcgaaagccaccggcgagatcgctagtaccgccgccaccgcatgcaacagcccaagttcctgcaattggtggaagggcccggcggcggcagcagcgggggagaaaggaggacggatgaaggtgaggaggaagatgagggaaccgaggntctgcttccagacaaggagcgacgtggatgtgctggacgacggctacaagtggagaaagtacggccagaaaggtgtcaagaacagcctccatccaaggagctactaccggtgcacccacag

SEQ ID NO: 164980 - DNA, 208 bp, Zea mays
  Clone ID: MRT4577_82048C.1
cactaggttcctctcgtcggtctcactattctggagcagagactcggctcttcgacgtatacatgcggtctgtagtcgctgttgcttacatctacttcggattatgctcactgtcggcctcgtggctttatctccggtggtagctgatttcggctcctacgccgcggactgctacgattcaatcatctggctaggttcgcatcgctgt

SEQ ID NO: 164981 - DNA, 507 bp, Zea mays
  Clone ID: MRT4577_82049C.1
ggaaactgaaacttattcaaccttcaattgggataagctttaagcaaacatgaggctcggatcccacgggttatacaggccgttccaatgtcataggaatggggggggggggggttcccaacaacatacattagtggcaaatggtggggggcaacaggtcaagatcccgaagttccaggggtcttttttaaggttggggacataaagggccttttcaagaagggcttcagtggggctgggagaacaaagcggcaaccagagttttacaggtctcaaagttacctccttggagggcctcccagcctggtgacctccgcagggcctggatttcggggaagcttttcgagctgactggcttgctttttggcagttgtgtgtccgggcagggccttcagcttggggtgggggcttggcacggggggtgcctccgcgttgttgggatccctggatggggtgggtcggcgggcattttggctccccccggtcggggcttgtttgggggttttt

SEQ ID NO: 164982 - DNA, 354 bp, Zea mays
  Clone ID: MRT4577_8204C.1
aaccgcgacaaaaaatgcccttttgttttttgaacttgagaggggggatgaaacaaggccccaaggcgccggaactgttcaattgacaaaaaaaaagaaaggaatgggggggttccattatgacctgaaaaatcgacctgttttttttgcttccaaaacagggaaaagcttttttgtcgcacaaccaaatcaaagggtgggtggggcccgaaagggctatctccggtatgccctttaatgtgccgcgggtccctttggtcgcttccctttaaacataagcctgaaggaaaaaataccctcctttttccaaaaaccgaccctttggcccaaaccccccgtgaaaaaccccctttt

SEQ ID NO: 164983 - DNA, 675 bp, Zea mays
  unsure (1)..(675): unsure at all n locations
  Clone ID: MRT4577_82050C.1
agcgagcgcacgaaagttggttcggaggtttcttgaggggtttagctttggcggcaagtcaaatgcgagcggagtgatgtggcccatggaggaagaggaggtgttcgtgacggtgaggcggacggagcacgtcgacgtcacctcccgggcggtggtcgtggctgcggggcgcgccgccgtcgcggggcccaggacggtgcgggtcttctgcgacgactacgacgcgaccgactcgtccggcgacgaagcggaggaggaggaaaagaaggccgcgcgcaggagggtgaagcgctacgtgcaggagatccgcctggagcgggcggcgaaggaggagganggaggaggaggaggcgacggccgcggcgtctctgggggcggtgctcccggggcggaagcggaagcggaagcccgacggtgaggcctcggagccccggttccgcggcgtgcggcagcggccgtggggcaagntacgcggcggagatccgcgacccgtggcgccgggnttggcgggtgtgggctcggcaccttcgacnaccgccgaggaggccgccaaggtgtacgactcggccgccgccaaggctccgcgggcgcgacgccaccaccaacttccaggcagcaggtggaccccgagcgctctcacagggccgggcggggtccaagagcgccgcgacatcg

SEQ ID NO: 164984 - DNA, 541 bp, Zea mays
  Clone ID: MRT4577_82051C.1
tcgcgatctaggaaaaaaaaaaaaaaaaaaaaaaaaaaaaaaaaaaaaaaaaaaaaaaaaaaaaaaaaaaaaaaaaaaaaaaaaaaaaaaaaaaaaaaaaaaaaaaaaaaaaaaaaaaaaaaaaaaaagggggaaacttttttttttttttttttttgggggggggggggggggggaaacctttttccaaattttttttctaactgttggtcggcccgggggcccgtcccgtcccctgttctgatggcttcccaatgggtgttgcggggttgtttttaggggttttcgctgggaattacccgggggtttttgggccttgggttgggccttcccgggtttgcccccttttccaggggtttggggggttggtgggccttttcctaaccttttttgtttttttttccctgggctttgtcctgggcgccccccttgctaatccttttttttggccttgggggtaacttgggcccttttgttggtttgttttttccaggggttgggaaaggggccttttttcagccctttttttgttttttttttt

SEQ ID NO: 164985 - DNA, 338 bp, Zea mays
  Clone ID: MRT4577_82052C.1
ataaaatattaaattttagtatttcttcaatgactctgccggtagctggagttgtgtttatttttaagtgaatttggttagacaatgatgttttcctacacttgtagccagtggcagagcttggacctgtatcaagcagaggccaaccattaaggaacaaggctaatcttaaattttcttttgtcaagccaaatggtgttgctattgcactgccactgcttgtaatcctatcacatctggatagataccccattttcagatataatggaatgttcctctctagatttcttttattgtctacaacgtagagcttattaccaacttatgtttttccctct

SEQ ID NO: 164986 - DNA, 264 bp, Zea mays
  Clone ID: MRT4577_82053C.1
atcgaacgtgtgatttgtgttgttgggtacactagttttttgtgttgttgcatttgatggcagcgtttttgtcaaccaggggagagggaccttgaactgcataaatgtgtagaaggctggacctgagaaaggggcttgtagttcgaggattttgaaatggacaaaaatgatgacgtgagatccatagataccaaagctgaacctttgctaaagtaaaaaagtccctgtacccattaactacatagcaggggcagatgattgtgg

SEQ ID NO: 164987 - DNA, 392 bp, Zea mays
  Clone ID: MRT4577_82054C.1
acgcccacggccacgcgaacgtcgaataccattcatactccgactaccctccaccttttttatttgcgcgctccgatccaaaatatgggggtgccggtgatgccaaataaaatcgttatgaaacctccctagccattgatgacgccccatgtcaaccgatataaatgccttaagcaaatctgcagcaggccaaagggtctagactccccaatcagcaggaacttcaagtgcatgtaccttgcagcccaacattggatacggatctgacaaattaaccatgctctacctgcccacccagtacaagaactcagaggtgcacaacgtctttcacttgcagttactcatgatccacaacagaacctactgcgcctaaagcgcctacaaccttttaa

SEQ ID NO: 164988 - DNA, 771 bp, Zea mays
  Clone ID: MRT4577_82055C.1
tttttttttttttttttcggatacttttgctatattccaaagaagttgcgccagaggcacgttacaacatcaggtcggaagcactacggacaatatcatccacagacacctatgcacaatgcaacccgctgcatcgtcataatactccaacacctcccttagactctcgtccggtaagaccgaaggaggacctatgactctccgtaggttacaaccggtctagatctctccaataagcagtgtcgtggcaacaccctggcgagcgccgagaccagcaacgccccaaacacaatgtgggacatcattcaaatgtcccaccagagaggagccacgagccttgataaaaaaccagaacttgacctaaacgagagcgtagctcctctagctcggcctccagggctgttagaagagaaaacgataatgccaagggaaccaccgaggaatctagaaaacaaggggtgaatgccttactggacacatgaccatcagactcggcaagtcgagaccggagcagctcgacctcggcctcggcagcctcctacaccatacgaaaaactccataactctcccgggaagtccgagagagagagagagaggacaatggatctggccacgatgagcctatagacgacccctcggcagatcccatttaaggtgagagcctaagggccaagagcttggaggtaatggtaggcaaatgctcgcttaagtttttgaaagaaggaagaaacaaccatccctgccgtaagtagaaacagagtatgcaaagat

SEQ ID NO: 164989 - DNA, 300 bp, Zea mays
  Clone ID: MRT4577_82056C.1
tcgtctcgcgtgagcgaaagtgagcgcggaattcgggacgtgatacgcaccaatggaggagacaatagaaggcgtcaggtgcattcaggaacgccgtaaggtagggcagtggagtgacggactccatcagcatcctcctgctcttcatctaacctgtctgggcccgtgtgctggcaagtcctgtcagcaaccacgatagcctcagtgtttcccctgtgtggtccaagcgtataagtacgttcccgttcgtgcgcgatgcaatgctccctctatagtgatacgtgatcctgtttcacgagt

SEQ ID NO: 164990 - DNA, 278 bp, Zea mays
  unsure (1)..(278): unsure at all n locations
  Clone ID: MRT4577_82057C.1
gctattggaggtactggcaaaaaaaacggtgggggaacaaaaactgggatggtgctcaaaaaacaactatnnaaaaagcccaanaagaagctacaaaagangttctaccactggtagaaacagaggccttgcctctagcagcggaagaagaaatagaaatggtgccggaagcagaggcagaagtggagatgaaggtggcaatcacggcagtgtgtgattcaacctctaacatccatgcatggcgtgtgcaggcaagagcacgacacactcctcaagca

SEQ ID NO: 164991 - DNA, 232 bp, Zea mays
  Clone ID: MRT4577_82058C.1
gagctctcctgtcggcggccgcccccaccaagatccttaagaaaaagtccagccagctaattaaatagggtgggatcgcgccccaggacaaggctagctcccgtgcccgcatgcatggtgaggctcggggacacccgacgatctacaaggtgctggagctcagttaccaagccgatcgcgaggtatagctagttaggaccttcgaaacagagatattggaggctcgatcgct

SEQ ID NO: 164992 - DNA, 151 bp, Zea mays
  Clone ID: MRT4577_82059C.1
aatgcaacctacttgatataacaacatgccaagtcaagccccaccatgggcttcagagccaaatgcatcaaaagcatcttcgatgctacagctcaatcctctaatgtgcacattccacgcttgtgccatcctgagcaaactgcctctattg

SEQ ID NO: 164993 - DNA, 226 bp, Zea mays
  unsure (1)..(226): unsure at all n locations
  Clone ID: MRT4577_8205C.1
cgagagtcgatcgtcagtgatggatgacggcatggcagtgatggatgatcacacagatagatgagatgaacacaacgatggcatgagatgggatgaaccacaacgatnggagaatgacatgngatgcgatgaacanggatgcgatgcgtctcaatgggatggtcctgtgatgccgtgctgtacatcnatggcgcgcgtacgtgcacagcatacgtgatacagtaga

SEQ ID NO: 164994 - DNA, 536 bp, Zea mays
  Clone ID: MRT4577_82060C.1
ggccgcttttttttttttttttttggttttttttttttttttttttttttttttttttttttttttttttttttttttttttttttttttttttttttttttgagctgcatggggggggaggccaacccacttcttaccccattttccttttccccttctctggttggtcatcatctaaacatctactactcaaggcttaaaaaatgacgggggcacgcccccccatggctcttaagcataaaaaagaaaaccctggtaccccccccttgaatttgatccggaaacaactttttcatatgggcttaaaaatcaaaaatggggggggaaaacacaagtcacgaacgggaaaccattacagggcagttcgaacacccccatggtaaaaacatttagggataacaaatttaaggaccctgacatgggggtatccaaaaaaaaacaaccgggatgaaaaaaaaaacatgacccccaaagtccaagggtataccaaagggatgggattcaaaggaagggggccttctcgaaaaaattcaaa

SEQ ID NO: 164995 - DNA, 394 bp, Zea mays
  Clone ID: MRT4577_82061C.1
aaaacccgggcaaccgggggagttgaaaaaaaaaaatttcaaacaaacagtttttacccttagcacggtttttgggagggcagccccaaaatttgtaataagttttggccgccgttaaacaccgttacaaaatttggtttggtttccgggacttcacgttaccaccaccattgtccatttacaaccatttacaggttgtggggggcgtggtaaacaccgccgttagggttaccgccaggggccccccccgaccgtttggacacggccgacacgatggggttgcacacggcctccaccttcttgggctttttcttgaaggcctccttttgggccgactggttgtcgcccagccactccagcgccttcttgggggccttctccacctttttttttt

SEQ ID NO: 164996 - DNA, 183 bp, Zea mays
  Clone ID: MRT4577_82062C.1
ctacgagccgctcgtcgccactcacccgtttttttctttgctgtccgttcttccatctctttcgctatccattagatagattcctgaaggtgcccatggcctgagaataagctcgcgtatattaacccctcggcggataatgtcttttttgaagccaagtgctcagacgctcgtgctctagca

SEQ ID NO: 164997 - DNA, 836 bp, Zea mays
  Clone ID: MRT4577_82063C.1
aaacaaccatatcattgattgcaaatcataagttgataatattttacaaataatcttttgtttggtgtattcgaagtgagctgatgaatatgaaccatgaactttttaaggacctcgatcacaaaatcgtggcaaggcaggcgaagaccagtagcaaacaaactttcgaagactaggacttcgtcatctggcatgagaacagtctccgatccaaacgactccatttcattcaccctccgccacaaaaagtcttcaactggccgcccaccggattggaggccccttcgctcatggacccctcgtcgacagtcgcccctatagaatcaaagacccctttgcagtgaccctaagtatggttagtataagacaaaaattatggccttcgctctgtgatcgaggctgtgttcagtctccgcccaacagtacccctcgaggaattggttcatcctgatgggcattcctgaagttacttggtttttaaggtgacgaacggtgccctcgatcatctggtgaaccgtctgggggtggcgatgtgactgttggtgaattcgatgtcattactgtggcgacccgtgcccggctatatatatgaaggttcgcatgggggggccgctagactccagcttgtcgctttctggtctaggttaaatcgtcgcttggtcgttgctactttcttaccggcgacgttgttacgcagacggtgagctcgtcgtcgatctgcggaacgctggcccgcctgaagaccgccgatcagcgtcgtctttggtacaccgccatgcttcctcctccgagtggtggcggtcctgcctccgctaatacgccaactgaaggaattc

SEQ ID NO: 164998 - DNA, 625 bp, Zea mays
  Clone ID: MRT4577_82064C.1
tttctccgatctcgtcctctacaacctctttgccgctgccgataactcctccactttggactactcacttgcgacgcatgtgatactgtgaatctcaccgacgattgggggtattgagaacccggaatctgcgaacgggatcaccaccgggcagcttactccgacgatcggaagcatcgacgagcctgtgatcggacaggcgtgaccaaatacgccgccatgaaggaacaagcgcgtcttcaagcttgctctggagctctgacaccgtcaccgactgagagagcaacgagtgtatgcatggatcatgcctatgcttacataatagaccgccaacgtactattgtgtcactaccgatgaggctgccacagcgtgtctttatcgacaacatgatcactggcacctcgccacttaactgtggctggcattatcacctgactccatcatgtgacgaccgtgcagctgctatgtccaacgagggccctactgcatgagcatgttctactggtgctcacacttgctatgatacggatgattagatgatgcaacgagatggatgctaccactcacaaatacgcctagggacgatatgatgagattgtgaaggaaggctcatcacaccgcgag

SEQ ID NO: 164999 - DNA, 312 bp, Zea mays
  unsure (1)..(312): unsure at all n locations
  Clone ID: MRT4577_82065C.1
actttcccacagacccgggaccggacagcttgcgtgtatcgttgcttttgttggaggacctcgccttgccttgattttacttgctcggtgcttcctgagctcgagcccgccccttctgcgccttgcccaagtcccagtgggcttctatcggctcgagagcttggactagcgggggggggaggaagccgaagaagaacttcgttcagaggtctataaggaggcatgttccatgccggcatgtcactggccctcccgaggagtntgaaggggcctgccggtgagatccaccttgccaacaccctgacacatgct

SEQ ID NO: 165000 - DNA, 2346 bp, Zea mays
  Clone ID: MRT4577_82066C.1
cgagaaccttctccttctctcgaccattgatccctccaaggaccccattcgctctgggcttaaaccttgccttgagaggcctgagggaaaccctaacggtgaaggcgggattaatgcgattgagaataagctaaagatgagagcaaggagggtgcttgcaaagcttgctgagaaaagaaaatcagctgtggaatcttcacgctcagaaaggagcttggatggaattgatctgacatgcaagattgtggactttgggaatgcttgctgggctgacaagcaatttacagattttccacgcgtccggcagtatcgggcgccagagatcattctaggtgcaggatactcgttttctgttgacatgtggtccttcgcatgtattgcttttgagctcgcaacaggagaaatactatttacacccaaggaaggccatggatacagtgaagatgaggatcacttggctttaatgatggaactacttggcaagatgccgaagaagattgcaaccatgggaacacgatcaaaggaatattttgaccgccatggagatctgaagcggatacgaaggctgaaattgtcatccattgaacgtgttctcgttgacaaatacaaaatttctgaatctgatgcccgggaattcgccaattttctttgccctttactcgactttgcaccagagaagaggccaacagctttagattgcctaaagcatccatggcttcattataacgaggataaaacttgtcagtctcttaacaataatgatgccaagaacattgacctggtccaaagcacagggagtatcaccaccgtaaactgtacaaatattgatttgacgagcaaaaaaggcagctccactggaacttgtgataagactgttgatgcaaaatacaacacaagaagcattaccagcaatgctaccatgaacacttatgtacaacccacttctggaagttttgccaacagacttgcgaaaaatgttgatgtaaatccgaacattggatccatcagtaatagagatgccaagagttctgatatgaaggcccacatgggaagcaacaccatcagtgacgccaaaagctctattgtaaagctagatacaggtaacatcactgatagaaatgccaaaactgtcgatataaagcccaactctgacaacatctctagcagagatgacaagagcagtaatgtggacaccaccacttccagtgttgtcaacaaagatgcgaagcgcagcattagaagtgtcgttaattcttatatcaagaacttcgatgcaaagtgcaacactggaagcactgctaacagtgatgctagggacccatcagatacgaaatccagcactaaaattgttagtagtgctgataatgccaagtgtgtggacataaaaccgatcaatggaagtgataagagcaatgacaccagtgataagagcaatgacaccgtcgatgctaatgtgaaatccaactctggaattgttgcaaacagtgatgctagtaacaccgatgtacagactaacactggaagtgtcaacaacagcgatgattacagcattgactcaaaaccaaacattggccgggttgctgcaagcatacagaggttggagagcagtatggggaaatacagggccgacctttctcaagattgaggatccggcaggtaccagctggcgttattgtatatctctattcctgctgactgtacaaagttttgtatttgcctacagaacttacacggagtgggtaaacgtggaatctctttgggaatatacttgtacatgcagtagtaacagaagattgctgttcctagtatggtggatgcactggaaagggaagaattatactctgaccagtcacacggcgtctctcttgattatgttcatattctgccctcagtgaaaaaaagagatttctttatgtcatttaacaaggatcaccatttatctgagcaagggtgacatttttgtttggtttatggtgtgaggtttgcttgtaaaaagcgggacatgtgttgtataaaactattctttgttcattttgtagtgaaacaatcatatagatgaaatgtttttttcactttaaaaaagaaaaaaaaaaaaaaaaaaaaaaaagaaaaaaaaaaaaaaaaaaaaaaaaaaaaaaaaaaaaaaaaagaagtggaaccccgatcgccagtaagagagcggggggatagatctctttggtttatggtgtgaggcctgcttgtagaaagcggcacatgtgttgtataaaactattctttgttcattttgccgtgaacgaatcatagctttgaaatgttattcgcacaaggcataaccgggcaccaaaggatattctgcaagatact

SEQ ID NO: 165001 - DNA, 374 bp, Zea mays
  Clone ID: MRT4577_82067C.1
tttttcctcggcctcccattcctcgcgcggcgaccacccgatttatatcgtgcggcgagaccgaagaagcttgagagatggttctgtcacttgctgacctgctgcgcaaggctaccgcatgtaaggctcaccatgaaggaagtggatatcaaggctgatcggacaggccgccctccactgcgggaacgcaagctgctagccgttctcgctctggcacggcagtcatgctggtgatccgatgccctatgacaagacctttgctggaggtgatgaagctgcccttccagaggctcgtcagagaaattgtacaggactttaaaactgatttgcggtttccagagccatgccgggggtaggcccttcactgaggctag

SEQ ID NO: 165002 - DNA, 236 bp, Zea mays
  Clone ID: MRT4577_82068C.1
cgaaagaagtcgcctaatgctttcaatcgaattacgtgccttcttcgtcacaggctccgtccttatttgtagattgaagcttacatgaacatttgactagatcatcgaaggattggtaggcctctttaaagttggggtcgtgaagggcaataaacttgcctagcggtattcaagatggagcgattcgtagttcgtcctaggacttggggagaagaagtttaacaagaacgtgaaga

SEQ ID NO: 165003 - DNA, 366 bp, Zea mays
  Clone ID: MRT4577_8206C.1
aagcaaaaccgtgcgggttaacttccattccttcttgagattggacactgtacagtatgctctgtgtcagctgacgtgcacatgccaaccccaaaccctgtttggcgaataatcctccgaaaacacaagcgggaggggcgcgcgacgccgatctcgttctcgggagaccaaatgaagttccgggcaacaagtgatctcccgccaactgttggatctttcatgggcaccagccgcaccggcagaagctcgggcaggagcatatgcagcatccgcatttccaccacgggcaccggctggacctggagtaattgaaccagcagcagccggagtatgagcaccccgcgttgacccctccggcgtttcttc

SEQ ID NO: 165004 - DNA, 550 bp, Zea mays
  Clone ID: MRT4577_82070C.1
attcggctcgagaccgccgccacccctttttacaacctccgcccccggccgtaggggagggagggccggaggaagcgaccgagcaacccaccgccggagatgcagatcttcgtgaagacgctgacggggaagaccatcacgctggaggtcgagagtagcgacaccgtcgccaacgacaaggcgaagatacaggacaaggaaggcatcccgccggaccagcagcggctcattttcgccgggaagcagctagaggacgaccgcaccctggccgactacagcatccagaaggactccacgctgcacctggtgctccggctccgcggcggcggcaggggtggctaccccctcatgagcgtcccgtgggacctcatcaaccttgcccgcaagcataatgaggacaagatgatctgccgcaagtgctatgcgcgccttcctcccaggtccaaaaactgccgcaggaagatgtgcggccacagcaacgagctgaggtcaaagaagaagctcatcttcaagtttagcatgtgaaccttgcaaagcgacattctggagt

SEQ ID NO: 165005 - DNA, 285 bp, Zea mays
  Clone ID: MRT4577_82071C.1
ctttttcttacggtctgacgtgtgggtgcagctcaaatctctgtgatgccctctattgaccgcacgcttcttggtgcttgtgagccaccaactgcatcttttcaacatatcacagtaccagtctgtccgagctatgttgctctccacaacccagatccttgattgcaagacaaatgcacctgacactgctgcggacatttgtaagctcactctgtcaaaccctggccggctgcgctcacagctttctgcaagggaaggtgcagcccggttcaacacatatgcagt

SEQ ID NO: 165006 - DNA, 673 bp, Zea mays
  Clone ID: MRT4577_82072C.1
gggcgagccacggtcggagggggatcgctccccttgccgctgctccccgcccaccatccgccactggattttttagccaccgcaagtaccggcagctccagcaagagtgccactcccacccacacgcacactttgatgcgcgtagccgccgcggtccatggcctccgccgtcaccagtaacctccccgctggcgcgccggcgccgtacccgcacgggtggctcagcccgcgcgtgtccatcagccgcgacgtgaccgcggatcccgtggccacgaccacgccagagcccgcgatctccaaggacttcatcgacttcgagttcagcctgggcggctccgccaccatgctccccgcggacgagctgttcgccgacggcaagctgctgccgctgaggaaggtagcgccttcgccggatccggcggaggccgccgcgcccccgccggtgcggccggaggaggcaatgctgccggcgcccagcaccgcggagccgatcaagcccctccgcgcggcggtcgcggcggctgacggcgccgacccctacgtgttgtcgcccaaggcgcccagctgctccggccgctggcgcgagctgctcggcctcaagagagcggcggacgcgcggagcccgtgggatgccaaggggctcaaggtctcggtggcggcgcaataccccgcg

SEQ ID NO: 165007 - DNA, 211 bp, Zea mays
  Clone ID: MRT4577_82073C.1
gcttcaagagggacgctttcatatagacaggtttttcttccaaaaaaaaaatcctatacactattacttttcttaagctttaactccgccaacgacaatgtaacatcctaccatgcccattttgccccacaaccaaatggaacctattgaataacctagctgaaaacccacataatctatctcaagatactaactatcgtatacacaaacc

SEQ ID NO: 165008 - DNA, 226 bp, Zea mays
  Clone ID: MRT4577_82074C.1
attcccgctgcagcccgtgggcgacctgatcctcaacccatacatgatctcttatgcgcagtcgtgcaataccagtcttgtgcatggtctttggatcgactacgatccaatgaagggttgtcctacacatcatacgcgggatctagaatcgtttagtgagatggttttggttgagcaatcccaaaaagcaggaaccgatgaggatggatggaaatgcagactggat

SEQ ID NO: 165009 - DNA, 433 bp, Zea mays
  unsure (1)..(433): unsure at all n locations
  Clone ID: MRT4577_82075C.1
gggaannnnggggcggaccacaggcgtccgaccaattaaattcttgggccggggcaaatgtcgccaccagggatgacaggtaaggtttcgtccaatcgaagtagggttatttaatgcggggatcagatttggggctatggcattaatggttccctgtggtggggcaccatgcattttggtttaagttggtcgatgcgaccaaagtggtttttgttggttgggagctggggtcctgaatattaactttaataatattaaaatgggcccgaaaaaaaaaaaaaaaaaaaaaaaaaaaaaaaataaaaaaaaaaaaaaaaaaaatataattaaaataaaaaaaaaaaaaaaaataaaaaaaaaaaatgggggggggccgtttaaagggatcaaggttattttcccggggttggggaggtaatatttttttttatgg

SEQ ID NO: 165010 - DNA, 618 bp, Zea mays
  unsure (1)..(618): unsure at all n locations
  Clone ID: MRT4577_82077C.1
ngataattcagaatctattctcttctctccagtcccgttgttatagtcttcactcatagacttaagatgatcccatcaccagagaggtttctctaccattagcttccctcttccggccattcttcacaaagtcatttttctaaattctgtgtcacatacgatgatggcatttctggaaattccttcaggtgctctcaagccctgctgcagagatccttttcagagcacacactgttccagcccatctgtctcaccctctcctgttgtatccagctccacgacaaacttctgccttccccaacacctttgtgcctttgcatatggtgttttcttgcccattttctgctcgactcgcccctgattttcaagttcaagacttaactcagggttcaggtcttccaggaggccttacttatgtcgtcagtctggggaactctccatgtgcttctatcactgtgcggttacctctttcacagcccttttaaagttctatcttccctttcccaccttttttgaccttccactagaccatgagcacctgngcggaaagccatatatcttattaagctntatatctgctacctggccgagggcctaattcatagtggagaataaata

SEQ ID NO: 165011 - DNA, 481 bp, Zea mays
  Clone ID: MRT4577_82078C.1
agatataacgcataaaaccacgcatctatatccaatcttagatccggctcgagaccgacaggatcgtaggtagagcacgcatcgccgtcttaaagcccacaggacgttcagacgaaccccaataccagcacacgcaggctaagagctaccgaccatgggtaatggcggacgcagttgacaggatcttatttactggacgccgctgttatatttatacaccatggttatcgtcctcctgctatggactcttgtgcagcaatcagccgggccgggccagttaagatgtagctgttgtaggagcacctgaaggtggcgcctaactttcaagagatatcagcacaccgcgccgccctcgaagaccacgccaaaatccacctgtgctgagccatgtggctggtgctggcaggacctatggatctactcttttagcggccggagcttctacttcagggtacataccgcacccactgcttcccatgcc

SEQ ID NO: 165012 - DNA, 1132 bp, Zea mays
  Clone ID: MRT4577_82079C.1
ttttttttttttttttttttttttttttttttttaaaatcagaaaatctccatggctccaccaattgcttaagatataatccgatgttagcaatgatcaccctagtctctaagatccaaagcgataggagttaacaagtacgagcgaatttcccagaacaaaagaattgatttcatcccgtttcagtatttcactgcaacggaagtggtaaaagtaaatagacctcttacccctcattagtaggttttgatctagctcttcctttggaacttaacctaactgtagcagaaggcttgaagtctttactgcagtatgtcgcacgacaagcatctgttatgtagcgcacgtgagcatcttccttttgtatctttttcaacaacttcttagccgccttacgtcccccagatgaaagaaaagcttgatacatcctcaaggaactcagcacgttgtgtggaagaccagcagattcgtattctgtccagatctgttgggcacgtcgcaaatcctttgcttttacacatgcgctgagaagaaagtcaaggcttgtccgagaaacattaagtccaagctctttgacagcatcaagaaacaccattccaaaatccaaatttgtggtctccatgtcccatatttggcaaaaaacctgatcaacaaccatatatgtactcatttcatctttctccttgatctgcttaagtagatcaattgcagcatcaggatagttgtgctggacacagtataaaagtactctgccacagccatcaaaccagctgtttgagtcattcagcccatcgagaagttgatgcattatatccagttcaccttctgttcgaatatgctcaatcaaggcaatggcagcttttggttccagggagccgccggattgcattatctcatcatgcaagcgaagtgcatccgacacttgcccatttaatgccagcgctcctacaagtgcgctcttgatgtcactgaggaacttacatggtatttctttatcgagtagaacctgcttggccatatcaaaattaccaagtcttgcgtatgcaacaatgagtgcaacatatatatttctggtcattggaattaaatcttgccgtaattggtcacagtacttagaaatgttctcttcagt

SEQ ID NO: 165013 - DNA, 1366 bp, Zea mays
  Clone ID: MRT4577_8207C.1
gcacgagaaattgtcaaatgcttcaaataatacacggaagaagcaagcagctctgccaaattctactttcagtccttcctcaatacaagcagcagcaattgctgctggtgggcgacttgccacagcctcaactgccgcaaatcttttaaaagctgcacaatctaagaatgctgtgcacataagatctctaggagcaacatctttgaaatcttctgcaagctttgatcatgggacacaatctgggggctcccagcacctagaatctctaaatgctagcgcagttaatggtgtttcaggagtttctgcagttaatcaatcagggccacctgctggagcggaaactaagaaggcattgggtaccacactagcacctgtcccatgcgacagcgaggaaaatgaggatggctctgaattttgtgcgattacgttagatgacttattccctgaagatgcaaagcagccggaaactgtggataccaaggcaaagcaaccagaaaccacgggtcccaaggcaaagcagccagaaaatgcagatcccaaggcaatgcatcaagaaaccatggatcccaaatcaaagcagccagatacactaaaggttgggatattagatcccaaagataaagacatgctagagttcgatcaatatgttgcttctcaaggagcacacttaaacacggatgatctgaataaaagcaagtgtaccaacagtgcttcccaagcccaaggtcttgttggcagccagaagaacccactgaaactgactcctgtggacgggaaagctaaccctgtaactgcggctgggagaggtaagcctgtagctgctggagtggcatcaaccggaaagaaggctacaatccctatctcacatttgggagcagggaccccacgcggcatagttgacacagtcaacgccaacgccccaattagaagaacactaacaaggagggcagccgcccctgtccccgctggttgccaagctcctcccccgaagcatgccatagacgtgaaaggctgccaaatgacgaacagcattgccacgtttgtcagttctggagtaccaggcagcagccaggctagcacgcccgcgaaagatgctaacaaagcaagcccaccgtccagcagctgccagcccaagccggatagtgtggcggtgaacggtgctatcagggtggtgaatccaccgtccagccaggctatcacggccgtgaagagtgttgctaagaaggggaatctgccagcagcagcagccaggcaatagacaggaccctgaataacacggtaaattttgtagtaatacccgtaggacttttgcgcgtcgattgtaccttggaatgtgaatattagtcgttttgcatgtcatcttttc

SEQ ID NO: 165014 - DNA, 247 bp, Zea mays
  Clone ID: MRT4577_82080C.1
atcacgagcgagagcaggacggtgtcttcattgagctggaccacgcctaatgactgtgacaggtacatcagtgtacgccaagctctttacgactaggtgccacaaggactacatcataatctatagagagcgaagagctggacaagctttctatggtgctgacgctatcacgacagactcacctgagtagctgtggagctatcacgagcatgcattgattgcgaccggactgacatggtatgaatag

SEQ ID NO: 165015 - DNA, 683 bp, Zea mays
  unsure (1)..(683): unsure at all n locations
  Clone ID: MRT4577_82081C.1
gttcaaaggttctaccaactcgcgcgcctcacagaagcccagagcagagcgagagcggccatggcgtcgtcgagcttcaaggtgacgcggatctcggagggcgcggtgaagccggcgtcggagacccccgaccacacgctgccgctggcgtgggtggaccggtacccgacccaccgtggcctggtggagtcgatgcacatcttccggtccggcgccgacgcggcccccgccgtgatccgcgaggcgctgggcaaggcgctggccttcttctacccgctggccgggcgcatcgtggagcagccggagaaggggtgccccgccatccgctgcaccgccgacggcgtctacttcgcggaggccgtggcggagtgcagcctggaggacgtgcggttcctggagcgccccctgctgctccccaaggaggacctcgtcccctaccccgccgacgatctctggggcgtcgaaccccacaacaccatcatgatgatgcagatcacgaagttcacctgcggcgggttcgtgatgggcctgcggttcaaccacgcgtcggcggacggcatgggcgcggcgcagttcatcaaggccgtgggcgacatggcgcgngggctcccggagccggcggtgaagccggtgtgggacagggagaagttcccaacccgagcatcaagccggggccgctcccg

SEQ ID NO: 165016 - DNA, 323 bp, Zea mays
  Clone ID: MRT4577_82082C.1
aggaattcaggtgaaggatcaaccgttttttgcatgtccagggtacataaaccaaacactccttaatgcacaattttcctgccgtttacaaccccaacgggactttttcagggctaaaactccaaaccgcctttaattcttggtgcccccacgggggggggacaagagtgcacaaaaaacttttggccgcgcggcgggttaaaaaaagctgtaccgaacacctttcaaccaaaggcggttcggaattaccccttccaagaaaaaaataatcctttgaacaaaaaattaggcgggtttttgcattttcctaaaccccttttttt

SEQ ID NO: 165017 - DNA, 269 bp, Zea mays
  Clone ID: MRT4577_82083C.1
cgcggacgaagcacggacccacagagcggccgcccaccttaatataccccccccgcgcacgcccccccgggggagaaaacagacaaggccgggaaaacccgccagcaaagggaagaccaccacgacgagcaagaccaggaaagacgagcgcgcacgaccaggaaaaagcaaacaacctcggacaagaaggggccaaaaaaacacaagggcgcgccagggcagcaccacaacgagagcgaagggggacgcgctgcagcgacgcacccccc

SEQ ID NO: 165018 - DNA, 374 bp, Zea mays
  unsure (1)..(374): unsure at all n locations
  Clone ID: MRT4577_82084C.1
ccgtccgnnattttgtaagaagccttgctctttgcnnttcggttaccatgcctattnactctctnntttggtttaaattactgggcanggcgaacttgtgttggttgtgaagggaaatttgttttctacaaaanggaattattaatatgtggattccctctgtcatgacagtattacacgtcaacccttatcaacatcattgagtattcgtattaggtctaccgatcatatcanctttggcgtctttgtgtgtaccttggttggcaactggatggctttgaaaacctcaaccgattattatctgaaaanaatatatagttttcctgaaattttgtggtttcccgtgaccttgtttggcacgaagaaatgtcatt

SEQ ID NO: 165019 - DNA, 327 bp, Zea mays
  Clone ID: MRT4577_82085C.1
acactcaccaacgctttttcccagcaccacgcgggggcggccgccaccatggacagtcgagaagaacacgaggatctccaagggaaagaagcggggggaagaaaaacaccgtcgctcccttctctaagaaggactggtatgacatcaaggccccatctgtcttcagtgtgcgcaacattgggaagactctgggggggggggcacacgctaccaggattgcctatgatggtgtgaagcacaaacactatgaggttagcctagctgatcttcagggggacgaggatcacgcttaccggaaaatcacgatccgcgctgaagatgtgcaag

SEQ ID NO: 165020 - DNA, 296 bp, Zea mays
  Clone ID: MRT4577_82086C.1
agcggacgcgtgggtcctgttagaatttctgtgcgtcattcattccttgttttactcgttatgaagaccgtatcagtggggaggaggaggttcagtgcagtgtttcaactggtcttcctgctgttcaacgggctcacacggagaccttttatagtcatcttcgtcatccgagaatcaatctccggcatgtcggttttggggcaccgttgtttgcatccgtgaccataaagctaaagaattcggtgtttcacacgtatgcggattctggcatgcctgtcattagcatcattttcctg

SEQ ID NO: 165021 - DNA, 371 bp, Zea mays
  Clone ID: MRT4577_82087C.1
cccctactggcatgagcgccaccgagaatatgataccccaaggaggatacgttgcactacaggggttaaggtccagaacactcggaatctgacacagaaagagcaacacctacgacttggtgtgtcacatcgaccgacatgagacgatctgcaacgagacatccactggcacgaccccagtcgtaggggcgaatgcgccgcatccgcagaagttaatcgccccatgcccctgatatcgaggaccacattcattgcgggaaatgtgccgacgatgctaactggctgattgcttccagattcacctatctgtccgtccacatcgacatccacctgtgttaccgcgttgaactcgctgtagtgggagaccagac

SEQ ID NO: 165022 - DNA, 738 bp, Zea mays
  Clone ID: MRT4577_82088C.1
aattcggcacgaggtaacaaaagaatcacggaaacgtctctcaaattctttagcaaagatttgctattgcctagaagatgctggtcttctttgtgctagtgaggctactaaaatctgcattgaaaggggccagagaaaaggttggctgaaggggggcagtgacaccactgatcagcaaagtggtcaaaatggacctatcctgtttgcagaaatttcaatgcttcatatggagttttttcaggaagtgttggatataatcggcaaacgcgtccaacagcaacaaggaattgatgcccttctgaactcagagcgtggatgtgtggaagcaaaaaatatgggctatatttcaccaaagctctatgagctcatgcaagtatttctctctttcagtgaccctgataacgttagatgccttgtttttgtggatcgaaagattagtgctagagtcattgagcggacgatgaagaaaataggccaactctcctgtttcagagtctcttttctaactggagggagttcttcagtggatgcactcacccctaaaatgcaaaaggatacactggattcgttccgctctggaaaggtcaacttactgtttactacagatgttgcagaagaaggtatacatattccagactgctcgtgtgtaataagatttgatttgccgagaactacccgcagctatgttcaatcacgtggacgagccccgacagaggactctcagtacatactaatgat

SEQ ID NO: 165023 - DNA, 264 bp, Zea mays
  Clone ID: MRT4577_82089C.1
gagccggccgggatgtaggtaccgggtacagacaaaaaccctacccgactccgccgccgctccgcctcagcgcatagcccgccgcgacttcatcgatcaccttcaactttcaatcatggcggacgtcgatgtcgaaccggaggttgccgccggagctcccaagaagaggacgctccgcaagcacagctaccgcggcgccgacctaaatgagcttctcgacatgaccaccgacgacctcctccacactcttccccaagctttgcg

SEQ ID NO: 165024 - DNA, 2173 bp, Zea mays
  unsure (1)..(2173): unsure at all n locations
  Clone ID: MRT4577_8208C.1
gaaaggtggatctcgccctgtgttctccaagcgcgcacccgagccagtatcagtgtttcactgctggctgatgatcatcatcatcatcactagtaaatgtagcagttctgtgtctatgtataaatgtactgaagctcgtgtagcaccctggctcttggatgaaagcccattattgttaccagacggacggggtccaatctcctgagtcgctactcacacgggtcaccaagcgagcaatacaaaattaggaagcgcgcggccgggcgccgggcggttgcggtggcatccataggactctcagattcccatctcgtcttcttatctccacttctccctccacacacatcccctcctctctctcctctgtttataaaactcgccaggcgcaatctctctcgctccgtccatccccgtcgccagcatcgcttccacttcggtctcagcgacggtcgccaccaccgctcccctccctctccccctcctcgcccagcggcaattaccacagcctccccagcaagccgggatggctgcactcaaggcatcgttccggggtgagctcagcgccgcttccttcctcgactccagcaggggacctctcgtccagcacaaagtggattttacgtttcaaaggaagggcaaacgagctatttcactgagaaggacatgctgttctatgcaacaggctccaccaccagcatggcctgggcgagctgttgctgagcctggccggaggtcatgggatggcccaaagcctatctcgattgttggttcaactggttccataggaacacagacattggacattgttgcggagaatcctgataagttcagagttgttgctcttgctgctggatccaatgtcacgcttctagctgatcaggtcaaaacattcaaacctaagttggttgctgtaagaaacgaatcattagttgatgaattgaaagaagccttggctgattgcgaagagaagccagaaattattcctggggagcaaggtgtcatagaagttgctcgccatccagatgcagttacagttgtcacagggatagtaggttgtgcagggctgaagcctacagttgctgcaattgaagctggtaaagacatagcattggcaaacaaagagacacttattgcaggtggtccttttgtgcttccccttgcacacaaacacaaagtgaaaattcttccagctgattctgagcactctgcaatatttcagtgtatacaaggcttgtccgaaggtgcacttcgtcgcattattctaactgcatcaggtggtgctttcagggactggccagttgacaggctgaaagatgtaaaagttgctgacgctttaaagcatccaaactggaatatgggaaggaagatcacagtagattctgctactttattcaacaagggtttagaagttattgaagcacattatttatttggtgctgaatatgatgacattgagattgtgattcacccacagtctatcatacactctatggttgaaacccaggattcatctgtcctagctcagttgggatggccagatatgcggttaccaatcttatacaccttatcatggccagatagaatctattgctctgaggtcacctggccccgtctggatctttgcaagttgggttcactgacattcagagctccagacaacgtaaaatacccatcaatggacctagcctatgcagctggccgcgctgggggcaccatgacaggagtcctgagcgctgctaatgagaaggccgtggagttgttcattgacgagaagattagctacctggacatattcaaggtggtggagcttacatgtaacgcgcatcggaacgagctggtaacaagcccgtcactggaggagatcgtccattacgatctgtgggcgaggagatatgcagccagtctacaaccatcttctggcctgagccctgtccctgcataataggtcgtcacgacaacgttgtacagcaggagttctaagatatgatgtgtttgtggctcctgtttccatgttcaattttcaggcctccacatgaataaaatgcatctattccatgtgaaaaaaattaaaaaagaagcgaaaaaaaaagggtgggaatcagatgcatccctttcggtggagttcttacgtagggttgagcagnnnnnnnnnnnnatgagctacctggtctga

SEQ ID NO: 165025 - DNA, 476 bp, Zea mays
  Clone ID: MRT4577_82090C.1
ctgcgaatcgtcgcgtcacgcgtcaatctatcgccgagctcaaggcgacacgtcaactattaggacaacccagaccacgactacagcagcacgcgcgccgccgagttctacatgaacggacatccggaaggcctacggcgaggaaagcctctagaagaagcgcctggatgcgttacccgcctccgccgctgaagggccagcgatggcccattccaccacgctccaacaaaatctcgatggcttggcgaggatgacgcatggcggccactccaacaacccctccgtgcagcttgaggccaccacacagtatcaggaatctgctttctatagagcggagtcccccgatcaaacaggtgatcatcacaggagtgacgtcgagattcattgagtttcctacacgggaagatcatccccaaatccagtgtgaagctgcatgggcactcaccaacattgcatcaggcacatcatagaacact

SEQ ID NO: 165026 - DNA, 1108 bp, Zea mays
  unsure (1)..(1108): unsure at all n locations
  Clone ID: MRT4577_82091C.1
cggggcctttttccagttgagttcacctcttggctcttgcctcctgcatctctagagaggcacatcccagctccaagcttcgcgccttgttggatcgtggcgtccaagcaacggtggtagcggagcgcgaggcagtggccgcagaaggaagcgcgaagcatccatggaccaacgccaggtggttagcgagaattatgccaatcccataacatgcttcttccatgtgctattcaaggcgggggcgctagccttctacatcctattctcgctctttgtgaagagcttcgtcatcatcttcgtgatcacggtgctcctcgcagcgcttgacttctgggtggtgaagaacgtcagtggcaggatactagtcgggctgcggtggtggaatgagatcgatgatgacggaaacagtgtgtggaagtttgaatgccttgatggggagtctctcgctcggatgaacaagaaggatgttgttggagtttgcttgagtctaagcattgcaaacattgttggattcaccaagtgcaacaaagatgccaagaaagacatccagactttcgctcanaatgcactcgcttnnccgtgtaaaatcatcgctgcaatcagcatttgtgaactctctgaagtcctgctgcagcatggatcgtagtatattactcattcactcatcaggcttatcacagattaagctcgcagctgtgtaactgccgccctctgattaagcattgcaaacattgttggattcaccaagtgcaacaaagatgccaagaagaacatccagactttcgctcaaaatgcactcgcttcccgtgtcacatcatcgctgcaatcagcattcggtgtcatctgaagtcccacgcggaggccctggtattagtatattactcacagcggtgtacaatttgtcaaaaggatgagcttgcattctacgtttactgcctttcctctgattgcaaggatgtaattctaccagcgtagacagcaagcatattgtactgtcccgttatcattcttttttacctcatacaacaaataggtcgattttgatgtcattaccaaaatcctctggtttaaaaaaaaaaaaaaagggcggcagacaactagtgagcta

SEQ ID NO: 165027 - DNA, 308 bp, Zea mays
  Clone ID: MRT4577_82092C.1
aaaacaaagggcctgctggggcccaatttatccctcagaggcttaaatccccagcaattttcaatccaggggccatatacaaggggggtttgatagcccccccccattttgatttcttttttaactaaacaattccaaattttgcgggggtatatagcttataacatatgctgggacccaggaaagaggcattttcgccctcccacttatgccccatccctcttaaaacttggccttaaagaaacccccccaccccttgttttttaaaaacctttggtcccctgggccctaatagccaggggccaccc

SEQ ID NO: 165028 - DNA, 390 bp, Zea mays
  Clone ID: MRT4577_82093C.1
ctcgagccggccgggtccggagaatcgtcaggcagggactggtatatagaggtatgacatgccatgtggacacgagcggccgacgacgtgttcgtgttccgtggagtttacgattggacattccttcgcgttcctgctgctcacagcgaggagaagagagcacgaactaaactaggaaccatccctccccggtattcattcccttgccctttatttcacccaactgtatcgcctgtcgctttcctgctaatgtgcctcgcttgtgcgcttcttcccacgccaacaaccgccggccgtattgctctccgaaatctcccaccgcggtggtgttgctcgagtgatcgagtaccgctcccctattgcgccgcctgtgcctggtctgcgccctct

SEQ ID NO: 165029 - DNA, 1111 bp, Zea mays
  Clone ID: MRT4577_82094C.1
cccaagcgtcctttcggctcaaaagacgaaacatctccttagcttgccgtacatttttcttttcttctttacgcaaatggtaaaacgcttgggaaacacaattcagccctggcctttttccagttgagttcacctcttggctcttgcctcctgcatctctagagaggcacatcccagctccaagcttcgcgccttgttggatcgtggcgtccaagcaacggtggtagcggagcgcgaggcagtggccgcagaaggaagcgcgaagcatccatggaccaacgccaggtggttagcgagaattatgccaatcccataacatgcttcttccatgtgctattcaaggcgggggcgctagccttctacatcctattctcgctctttgtgaagagcttcgtcatcatcttcgtgatcacggtgctcctcgcagcgcttgacttctgggtggtgaagaacgtcagtggcaggatactagtcgggctgcggtggtggaatgagatcgatgatgacggaaacagtgtgtggaagtttgaatgccttgatggggagtctctcgctcggatgaacaagaaggattcatggctgttctggtggactctttacttgactgctgctgcatggatcgttcttggtatattttcactcatcaggcttgaggctgattaccttcttgttgttggagtttgcttgagtctaagcattgcaaacattgttggattcaccaagtgcaacaaagatgccaagaagaacatccagactttcgctcaaaatgcactcgcttcccgtgtcacatcatcgctgcaatcagcattcggtgtcatctgaagtcccacgcggaggccctggtattagtatattactcacagcggtgtacaatttgtcaaaaggatgagcttgcattctacgtttactgcctttcctctgattgcaaggatgtaattctaccagcgtagacagcaagcatattgtactgtcccgttatcattcttttttacctcatacaacaaataggtcgattttgatgtcattaccagaatcctttggtttatctcttgggtgatttatccatgaagcatacacttgtctcaaaaaaaaaaaaaaaaaatttgcggcc

SEQ ID NO: 165030 - DNA, 562 bp, Zea mays
  Clone ID: MRT4577_82095C.1
actcggtatggttatgccccatttctggactgaaacaccttcacattgctgtccttttatgctgatcttgttaccaagataggtatggcgatcctgtcgaggacctgccataatgatcccaaatgtctcaacaacggtgatgctgagctgtgtaagacggtgcccactaatcacatggtggcttttaccttttgtcaccatccttctcttgggcgatttgctgtacgtgacatgatgcttacggaggcttgttgagacccgaacactgtggagatgattgacccaactggagccagggagacgaatgctgcttgccataaatactagatctatctgaatgttgacgaacgctgctgccataataaaatgatgctatcactctgatgctgagcttgcttgtaggttaccttgtgcaaacttacaatatcgagtcttgttgacatccttggatgagtcgtcgtgacaagtaatctatgatggcgatgatcgactgatcatgaagcattattactttcgctgataccgagatgctattaagactgatttcgttttatggaacatg

SEQ ID NO: 165031 - DNA, 343 bp, Zea mays
  Clone ID: MRT4577_82096C.1
tcctcctgtagcaagcagcctaataaatccgtatcgtcttgcctgttcagtattcttcttcttttcccgtagcccggtttgccgaccaggttccaccgttccagagttgccaagcgattcccgtgtctggctcgtgcgatggcggaggatcagtccaacccccagcaccagcaagcggtggagagggaggttatgttggagcagtagcagccgatgagggccccgaaactgaggtacctggacttagtccaggaggcggctgcccaggccgtgttgtgccttgttggactatacggcctggccaaggaccacgccgtaccgatccgtcccatcgatgactccg

SEQ ID NO: 165032 - DNA, 315 bp, Zea mays
  Clone ID: MRT4577_82097C.1
aatgcaaaattttgttttgtttttttaattttttgtgggggggggactttgcgtggggatattaacggaccaaatgcattggttcaatgcaaaattaggtcttttttggatatttacccccacatcaagtccttgtgaaaaaggaaccaaatggtttatgatttcagagtaaccttaattttttttttccaaattccagggacttgatactacgctgaagctacaaaatgaacaaggggggctcagaagggccgtacaatttctaagaattagaagaaacccttaaccctagggtctttttttacctacgatggg

SEQ ID NO: 165033 - DNA, 418 bp, Zea mays
  Clone ID: MRT4577_82098C.1
cccacgcgtacggtttgcttgtttcttgtataaacattgtaacttaatagttaatggtaatacctagtgcttggcgtaagttctttaaggactacacattctttttaaattggcactgtaccatatgaataaataactctagtaatgtgataccgattttgattatgcattctgaaggacaggaaccccaatggaaacatatacctgtgggcactgcatgagcaagctgtattttggcaaagagtatatatgctgatcagattgctttgatccatccattatggacatgaatagacaactgggttactgcaaaagtggctcctacttcacaatgtaataaacactacaaaaaacctttcgatgggttgttggcccatggattacatgcttactaccatgtgattgttgtatttgcttt

SEQ ID NO: 165034 - DNA, 613 bp, Zea mays
  unsure (1)..(613): unsure at all n locations
  Clone ID: MRT4577_82099C.1
gttcgttgggcggtgctggtttttcgctcgtcgactgcggctcttcctcgggcagcggaagcggcgcggcggtcggagaagtggcctaaaacttcggcgttgggtgaaagaatatggcccgaaccaagcagactgctcgtaagtccaccggtgggaaagccccccgcaaacagctggccacgaaagccgccaggaaaagcgctccctctaccggcggggtgaagaagcctcatcgctacaggcccgggaccgtggcgcttcgagagattcgtcgttatcagatgtcgaccgagctgctcatccggaagctgcccttccagaggttggtgagggagatcgcgcaggatttcataaccgacctgaggtttcagagcgcagccatcggtgcgctgcaggaggctagcgaacgtagcctggtgggtctgttcgaagataccaacctgtgtgccatccacgctaagagagtcaccatcatgcccaaagacatccagttggctcgccggatacggggagagagagcttaagtgaaggcagttnttatggcgttttgtagtaaattctgtaaaatactttggtttaatttgtgactttttttgtaagaattgtttataat

SEQ ID NO: 165035 - DNA, 885 bp, Zea mays
  unsure (1)..(885): unsure at all n locations
  Clone ID: MRT4577_8209C.1
cattgggtaccctcgaggccggccgggctccgtcctctgtttatataataataacttgccaggcgcgcgccatctcgctccgtccatccctgtcgccaccaatccatcgcttccgcttcggcctcaacgacggccgccaccaccgctcccctccctctcctcctcctcgcccagcggccattaccacagcctcccccatcaagccgggatggctgcacagcctgcactcaaggcgtcgttccgaggggagctcaacgccgtctccttcctcgactccagccggggacctttcggccaacacaaagtggattttacgtttcaaaggaagggcaaacgagctatttcactgagaaggacatgctgttccatgcaacaggctccaccaccggcatggcctgggcgagctgttgctgagcctggccggaggtcattggatggcccaaagcctatatcgattgttggatccactggttccataggaacacagacattggacattgttgcggagaatcctgataagttcagagttgttgctctttctgctggatccaatgtcacgcttctagctgatcaggtcaaaacattcaagcctaagttggttgctgtaagaaacgaaacattagttgatgaactaaaagaagctttagctgattgcgaagagaagccagaaattattcctggggagcaaggggtcatagaagtcgctcgacacccggatgcaattacagttgtcacagggatagtaagggtgtgcagggctgaagcctacaattgctgcaattgaagctggtaaagacatagcattggcaaacaagagaactttattgcagnnnggtcctttcgtgcttcccttgcacacaacacaagtgaaaatcttcctgctga

SEQ ID NO: 165036 - DNA, 403 bp, Zea mays
  Clone ID: MRT4577_820C.1
agaggcacacaagagcacacgaccacgacgacgccgcacgggccgcacacggaagcccagaacaccgccgccgagaaccggagccacgggcgcaggcgcaacaccgcgcccagggccgcaccggcgaagcagccgagccgcgagggcgagcacgacgaggaagacgaggaacaggaacccgcccgcgacaacaacggccccgccacgaaccagagcacggcgaccacaaccacgcaaaagcaacccgcgggacaggccgggcggcacgcgacggcgacccgccaggcgacggcggcgcagaagccggaggcgcgcgaccccggccggcagacgcgagaccccgccgggacgccccacgccgacacgcgggaccgcggcgccgacagacacaaccacggcggcg

SEQ ID NO: 165037 - DNA, 703 bp, Zea mays
  unsure (1)..(703): unsure at all n locations
  Clone ID: MRT4577_82100C.1
taaaaaaaaaaaaaaaaaaaaaaaaaaaaaaaaaaaaaaaaaaaaaaaaaaaaaaaaaaaaaaaaaaaaaaaaaaaaaaaaaaaaaaaaaaaaaaaaaaaaaaaaaaaaaaaaaaaaaaaaaaaaaaaaattttttttccttcccgggggggcttttttaaagggggtttttttttgaatttttccacacttttgggggccgtttaaccttttttttgggggccctatttccccttttggggggttttttaaaattttgtggcccgttttttaaaaacttgttgttggaaaaaaccttgtttttccccaatttaacctnnnnnnnnnnnttngtgtttttttttttttttttttttttttnggngggcctttgaaaaaattccttttttcccctgttgtcttaataagaaagaggcccccaccaaccctttttcaaaaattttgcccacttttattgggaatgggccccccctttttgggtttttttaaccgcgggggggtggggttttcgcggaagggtgactttttatttttgccagctttcttaccccccccttttttttgtttttttccccttttttttcccgccccttttttggggttttttcccctttatttttttataaatgggggccttccttttagggggcctctaatttaaggttttttagcgggcccctttcccccccaaaaattttttttt

SEQ ID NO: 165038 - DNA, 184 bp, Zea mays
  Clone ID: MRT4577_82101C.1
aacttccaatcaaagatactttcgatctttttaacacccgcaatgcccaaccaaaaagcgtcctcctttatggacctccatgcacatgaaaaacattgcttgcacgtgccgatgctcatcacactgactgcaccttcatcaggatgtctggttcttaattggttcacaaatatattggtgaaag

SEQ ID NO: 165039 - DNA, 187 bp, Zea mays
  Clone ID: MRT4577_82102C.1
aaaaatatgtatgacgatgcacgcactcgtaagcaagctattaatctcgagcgaggtcttttctcgcctgggcgcagcacaatggctcgcacctgcgcgcggatcgacgcgggcagatacggcccccagcggcgctcccatgtgcacaggttcgacccacaccaaggtacagaagcatagggttgtg

SEQ ID NO: 165040 - DNA, 379 bp, Zea mays
  unsure (1)..(379): unsure at all n locations
  Clone ID: MRT4577_82103C.1
cggacgcgtgggcagacatggcacatattagtgagcttgctgcaactggagtcagggcatctccttttgattatgcaaatctantgactaccactactcacaaatcactccgcgagccacattgagccatgatcttttacaggaagggagtcaaagcaataaataatcacggaaaagaggttatgtatgattatgaggacaaaatcaatgctgttctctttacctaggtctgcaaggtcaccctcataaccataccatcactagcttgtctagtgcgctcaaacaggcaactactccataatacatagcttaccaagagcaagttatcactaattgagctaaaattgcgcacaacctgatctcaaaacgatatgaactc

SEQ ID NO: 165041 - DNA, 272 bp, Zea mays
  unsure (1)..(272): unsure at all n locations
  Clone ID: MRT4577_82104C.1
aaaaaaaacgcgggcccaaacanncaaaaaaataaaacacccttttttttttttcaaaccccacaaaaaaaacaacgggggccttgcaacaaacaaaatcaaatcgacccatccccaccaaggcgataacataacatattttcccccgcggcccccccaggaattacttaatttaaaccggccctggcccccacccaagggtggttccaaaaaaaacaccttgcccgaaaagccccaccccttaattgcctaaaaaaacattttttaaaacc

SEQ ID NO: 165042 - DNA, 402 bp, Zea mays
  Clone ID: MRT4577_82105C.1
aaaaaaaatcgtttaaattattaaaggggggaccccctaaaattacaaagacaaaccaaggggacaaaacaaaacaacccttgggttattggcccctccccatccgaaaaagctatttcccaaaagccaaattcgggcccccccttaaaaaaacgggcccgggggaactcagaaaaaaaatatgggtaccacagtagggggaaccccccggagggggactccccttccaaggggaccacccccgggggcataaaaatcccgggggccctataaaggcccataaagggggggggacccccccttggggggggattcccaagggaaaggggcaaaacccttgttcgggagaaaaaaccgggtaaaaggggggggtgtccgatcggaaattggaccaaaatttcc

SEQ ID NO: 165043 - DNA, 361 bp, Zea mays
  Clone ID: MRT4577_82106C.1
cttaaaacggtatcaatttcgtgttatacaaagatatatataaaaaaattcagccggaatttggagattcgcagcaggacaggagcacaccgaaccgaaccatatagatcacaccggtcaccaccaccaccggtaccaacaaacagcagcgttatcatcgcactattgtttgcggcctcctatatctctttctgtggacgcttatctgggatggccgaactggtcgacggaagaataattgtttggaacagtatggagagcaacacataaccagcaccctgcatggacggatcgctcggggagcatcggatcattattccgcctcgcagtaaaaatagatgacagttgaagaataggagag

SEQ ID NO: 165044 - DNA, 319 bp, Zea mays
  Clone ID: MRT4577_82107C.1
gataaaaaaatgaatataggcaggagtgactcgaaagcacataaccctgatacattcgcactactacttgttacagatctccccacttaagaactgacacggtatggtcgtgcatgcaagatacaaatgatagataccgctgattatgctttgcacgcacccagtgggcaacagcccaactgcaaatgccagcatcctctgcaccatatataaaaccaactactagagtgataaacgacaaacaaacatcactttctctccaaacaataatgcacgagctcgacctttcttaaatagaaatcaataacaaattactgtc

SEQ ID NO: 165045 - DNA, 116 bp, Zea mays
  unsure (1)..(116): unsure at all n locations
  Clone ID: MRT4577_82108C.1
gccaaacnnacacaaccccntcttgggggacattctttacaaactgtcccgtccaaatacaggtttctgtatcggctattgacccataccccacgctaacctgaaacacacgcaca

SEQ ID NO: 165046 - DNA, 246 bp, Zea mays
  Clone ID: MRT4577_82109C.1
gagactactgttgtgactattgtgtgcgcgagagagatacagaacatgaaaaggaatccatggctgcgacgctggcgaggagggctgtgcgctccgcggcgacgactcttttgggcgcggcgaggggcttcgtatcggtggggtgcgacatcgtttctgaggagcccggggtgtagatgcacaaggcgcggtcctggaactagggcgtcgcccccaagttttctaccacgcctttcaaggacattt

SEQ ID NO: 165047 - DNA, 173 bp, Zea mays
  Clone ID: MRT4577_8210C.1
ttttggtatgttactgaggaaaaatatgtggcagcagactgataatgccagtttagatttggattcggtttgcactaaagcttgcattgctcggaaacctgacatcggaatcataccttctatccaatcattggcatagcttctggctagctgtttgggactgaattgcttct

SEQ ID NO: 165048 - DNA, 556 bp, Zea mays
  Clone ID: MRT4577_82110C.1
attcaattgctgtctacattttgtttgtttttttttgttcaaacacggcctttcaattggacattattaattacccctttttttatgccacactacacataacaggataacccaagattaggcccacacaccattgatcgacaggctggggtgcgactggggactactaatcccaatcccctgacgagacagattaacgttgaccccacgatgagtattgctttggagcaacagtgtgcatgtgctaagtgaattaaacaatcctcaatactgcgaggaacaagatataacattaggtcgatgcattatcaggccatctatctcttgatgacataacctagtagcatcttggaggagagcactggcctcctcgaccacagacgagaaaccatcattgatggttgccggcctcggctcctgggacggcccagtgcctttagagacttattggcctgcttattggcagagattatctgttctgccaactttgaaaccatactagatgcgccggaggtgtatgccttctgatttatgtgaactattatagccgacaaca

SEQ ID NO: 165049 - DNA, 123 bp, Zea mays
  Clone ID: MRT4577_82111C.1
ggccgccccacctcgctgttacgtgtatgtgcttccctaacctcgaagcttctacgcgagaggcggtgaatccaatggcgggcgaggaatatctcactgtatgctgctgctttcccattctgc

SEQ ID NO: 165050 - DNA, 327 bp, Zea mays
  Clone ID: MRT4577_82112C.1
aaacaaaaacagctccgcattaaagatttggggatcagaaacccaacaaatgaagttcaagccttggggggtgggttttttttacatgatcccagcctcccaggaatagctttacaaaacacttgggttcactaatatcatcgccgagctggtgaacagacaatttagcactcactcagttacacatgccaggggcattacattttccactggagaaaactttagttggttgggaagctgcattttttgcttaccattaggcagtccacatgacagccaatgtagataaaagcgtaacccggccgcttgtgaatttttttccttttg

SEQ ID NO: 165051 - DNA, 368 bp, Zea mays
  Clone ID: MRT4577_82113C.1
cgagtacatgccgaacggcagcctagaccagcacctgttccggcggggcgcgcacgagcagcggcccgtgctggactgggcgagccggtacgcgatcgtgcgcgacgtcgcggcggggctgcactacgtgcaccacgagcacacgcgcatggtgctgcaccgcgacgtgaaggccagcaacgtgctgctggacgcggcgtggcgcgcgcggctgggcgacttcgggctggcgcgcgtgctggaccagggccgtgagtcgttcacggacgtgcacgtggccggcaccttcgggttcatcgcgcccgagtactccgtgggccaccgggcgacgcgggagacggacgtgttcgcgttcggtgcgctcgtgc

SEQ ID NO: 165052 - DNA, 444 bp, Zea mays
  Clone ID: MRT4577_82114C.1
gacaggcctccgatccagcgcagcacaggtctcaacgcagggtgacgcgaaagaagacggcgcgggagatggcgaaggtgttcagccggctcttcatcaagatcgacatcctgatcctcatgcacatcctcaacgccggccacaaaaccaccattctatacaagctcatgcatcgccacatcgtcaccaccatccccaccatcatcttcaatgttgaaactgatgattacactaacattaacttcactgtctgctacgctgactgtcatgacaagatcagacctatgagcaggcattacttgcagcacacctagcgtctcatccatggtgtgaacagcaatgaccgcaaccatgaccatgaacccagagatgaactccacaatatgctgaacgaggatcagctacatgatgctgtacttgatgcttttgtcaacgagcaagatc

SEQ ID NO: 165053 - DNA, 440 bp, Zea mays
  Clone ID: MRT4577_82115C.1
gcgaagttcggatttggtttggcgttagcaggcattacttttccttactccctcacagaacccaggaggatatttttaggcccgccgccgggacggccccacgccgcctgatcgtcctcgccggcctggccctcgaggacaccgaggacggggccaactccggctacggggactccaacccgaaccgccctgttaccgaccgcgcggactgcgagctcgagaccacggccttcgccgggctcggccgcacccgagacgggctacgatgcgcacgctcttggcgtgaggccacggcaagagctacgagagcgcggcggaggtacataagcggatcaggatcttctccgagagcctgcagctgggacgctcaccaacccaaaaggcctgtgctaaccgctagggatcaaccgcttctcggacatgagctgggaggagttccg

SEQ ID NO: 165054 - DNA, 175 bp, Zea mays
  Clone ID: MRT4577_82116C.1
caatgtctctctgaagtcatagggcagtggggaactggctgatgacctggcaatggtgtgtgcagaagcatcagtggttagagcccagcccactgagtcccaggggagtatcctttggggcaaggggcaggacagggtcagggtgagggttggcacaggccacctatgcagggat

SEQ ID NO: 165055 - DNA, 534 bp, Zea mays
  Clone ID: MRT4577_82117C.1
tttttttttttttttttttttttttttttttttttttttttttttttttttttttttttttttttttttttttttttttttttttttttttttttttgggcccctgaaaaccccggtgaaaacaaaaactaaatgttttttggccccagggcggggggggaaaaaaaaaaaaaaatccaggtgggcgaaaataattatggggggggaaactaccgcctttttgggggtaaaacgggcctaaagggccaaagacttacttcactggggcgggttaaaaaacccctattttccaccgggttaactaaccccccaaaaaaaaaacagggggggccttacttttttgcaaaacttttagaaggggggggaaaacaaaaagaagggccaaggggctttaagggaagggcccccaggaaaaagggtcgccccccaaatttgaatggccctttggttaatttggggggggaggtacaagggcaactttgccgaactaggggcaaactatgttcgccttttaagggttggaccctttaggat

SEQ ID NO: 165056 - DNA, 1668 bp, Zea mays
  Clone ID: MRT4577_82118C.1
aaaaaacgccgacccggagcaattgcatcgctgcatcggtgtttcgccgccgccgcaaaaagaggcggccgcggtggagttcaagggaggaggaggaagagggtgtgaggcgctgcagaactcctgtggatcggtgagccgagggcgatatggggatattcttcagcaaggcggaaccgccgccgcccatggtgctggtgccgccgctcttcgactaccctcccatcgctgcccgcaccaggatggcggtgccagcatatgagctaatgtttgggaaagtctccctgcagaatctgtttgaggactactttgatcaagctgggaatatgacctcaaggatcatgttgaagccgcttgaagatcctcacgttgatttgattgctactgtgtctgctgctgctgatagaaacagtggaacagaagtaaaaggggatgctttatttcgctggcagagagagctggatgacccccatacctttgtggaccttcttgtgtcaacttcaaatcccttgttgcagctgagattatgtgcatatcatcctaagtatcgtattggtgcctttggaacattacctttgctaatggggaacagggtgcattcagaagactatggggtcatgggtgtaagatatggttcagagaatttatctgttggagcatcctttgtgccaatttccttatccagtgaggtaccctttggtgcatggttggttgggagaaaagggagcttatctgcaggagtacaatacaagccacttagtggcagcaaatatcctatgccatttacagaattggagaactggaattatgcaatcagttatggtgttggctcaactagcccgctcagcccttcattcattttctccctggaacttgccagaagcacacagctaaccgcatcattctatcagcacctggttgttcaaagaagggtaaaaaatccttttgaagatgatcaggttgttggcattacaaactacatcgattttggacttgagttggctgccaaggttgataaagataaagtgagtggggatggcaactcgtttcagttggctgcaagttggcaagctaacaaaaactttctgctgaagggaaagcttggtccttccacgtcctctgtagctctggcattcaaatcatggtggagaccatcctttacatttagtgtaacagctgtgaatgatcattcaaagggcacaacatcgtatggatttggcctccgtgtcgaggaccttagacgagcgagttaccagcgcgctgatccaaactacgtcatgctgacgccaagcaaggagcacttggcaccaggtgttctgcgggagtacgggaagcggcccatgttccagacacaaatcgattcgggcaactacgaccatctgcctacagagctgaagcctcttggcaggattttctaactgtaggctggctgctcgtggtcgtctttcgctaggagatttttctttgttgttgttgtagatcttatccgtcttggtcctttagacatgctgctgtaacttgcattgacacgtgagcggattgcgtcatgatagctgcatggcttttggaagccagaaggatcatccaacgcttcttgcattgctatgtacttgggtggatatatataatggtatggtgcagtggacaggcggtcttgaatccttattc

SEQ ID NO: 165057 - DNA, 694 bp, Zea mays
  unsure (1)..(694): unsure at all n locations
  Clone ID: MRT4577_82119C.1
aattcggcacgaggcgagcatcagcacctgagcagaagagagagaccgaggcgagagagaagggcgcctgcgatgaactgcggctgcagcatcaccaagcggtgtggatgcttccccatggatgtcgatcatgactgggggcgttgtgtggctggagcgccgcagcaaggatactgacagctcgtcggagctcacgtcccatggcagaactactctgtgtcgtcgactgccttgtccgtgtcgccgctcacggtgagaccctaccgagaatactctccatgatccccgcatagacttaggcaagctagttcttgggtcgggttgctgactgggccggagctcggcgcgccggcgggacggcgccgtgggggctcgtgctctggtgtcccggtgcggtcctgaggaagatgtgccctctgtcatcggtttgggaatgaacgatgtagattaaacgatgtcgtacccgttcgtgttggtgcgtgtgtgccgtccgatctggcggacggtcaggatttgatctgcgcaccgatccgtaccggccattgatcgcttgatcggtgacactgatcgcgtcccggtactttatgttgtgagggtcgatcagggccattcaattctgatcgcaccgtctagattgangaataccccttcgccatagatgttntacatacgagtccctcgggttaatacaaat

SEQ ID NO: 165058 - DNA, 355 bp, Zea mays
  unsure (1)..(355): unsure at all n locations
  Clone ID: MRT4577_8211C.1
gcggccgcccttttttttttttttttttacatggaacggcttttttttntgagtggggagggagcgagtgataatcacaagactacttagaactacggacggatacacaaaaacacgcggctgcggggggggcgggatctgacggacaccatttcacagacaaaaatcggccggatcgaatgatgttgaaaccgacctgtaccatgaatacgccttttttaccaccacaccactcacgcacctttgggcggaagactgtcgggttctccttgtgcaaacctgcaaaaacctttttcttggtccaaactcctgcagccaacccagcagcatatgcagcttcgagggctgggggctt

SEQ ID NO: 165059 - DNA, 150 bp, Zea mays
  Clone ID: MRT4577_82120C.1
gggccggcatcccgggtcgaccaggcgtccgtctacattagttaaagcccaccaactccattgaagacaatagcagagataaaggcatggctttgtttatggggatcgaaatcaatagaataaggcgtggttgggaagaagacagtaagg

SEQ ID NO: 165060 - DNA, 350 bp, Zea mays
  Clone ID: MRT4577_82121C.1
ctgacacgtccggtgaccaatgtacctcaagcttccgtgtatttgccttgcataggggggtgatactagagattgggatcttcataactgacaggcatactaaacatattgtgataaagatcggtctgccaggctatggcaatttcttagagcagacataactgatgcctatggaccactgcttgtggttatcagaatgcataaaaaacctgtacttggaactgatatactaggaaaagatgtctgtatctttatgcgtccaagagatccaatacatgggataactagaccgtatataggacgcatagatgctactggtatagctagctatgataccatatgcttgtcat

SEQ ID NO: 165061 - DNA, 555 bp, Zea mays
  unsure (1)..(555): unsure at all n locations
  Clone ID: MRT4577_82122C.1
aggccggccgggattatcaacttcacgagtagatacagcgtccaatatggcggagacaaaagaatcacaacactcgttggtttagccaatgatatcctcgagaccaccaacaacgaggaaaatggcgtatacaagacccccacaaagctcattcatatggcgaggcaaacccttaatagcctgactggtttcgtccataaaactggtgaggacgaaaaccctccagctgtccatatacctcaacaacaatctcccgacgatcgaacttcgctacagtattttctcaacaaacacatgagtgatgtgaagcatcaaactagcgaaaacaagaacaccactctaaaacgcggcaagcttcgggggatggttgattatgtcagagaagcaaaccagaagtcatgagcattagacccaggttagacatgtgtagatagcaccaagcgtttttcgtttatgaatagaaagcctttcaatcgcatccatatgaataccccaagcatgacacaacttgngcacggtattatatgcgagtgctttggaagtgataccaactaa

SEQ ID NO: 165062 - DNA, 341 bp, Zea mays
  Clone ID: MRT4577_82123C.1
tttcttccctccgtcataataccgctgcagcttctgtgcttgccttgcctcttcacgttcttcatcctcgccgacgcggcggcgccacaggtcggcgccatcggcatcccgctcattcgcggtggccatagcaggccaggagcgccggccaagctcgcgccaccgaagccgatacctctcaggcacgcggcgccggcgccaccgaagctgacgccgattgcctcaggcgcctacatcgtgcggagcctgtgcctgaagaccgactactccgacctgtgcatgtcgggcatcgcgaagctgccgcagtcgcagctgccggtcgggaagcggctggacagcgc

SEQ ID NO: 165063 - DNA, 358 bp, Zea mays
  Clone ID: MRT4577_82124C.1
gccctgggttgagttgccaaaaggtacggaagccaaagggcaccagagccgacaggggccagcgggggccaaagggaacaaaggggaggggggggaaacaccacttaccgccaaaagcgcctgggaccacccggaaccaacaggatccaattggaaaaagaccaaggcaccccaagaaccccgtgcaggggccgccagggcccagccggggccggcaccagcagggccccgaagcggcccaaaccggcgtcgggggcccgggggggcccgggccaacccaggccaaaaccgccgaaagggggcagaaggggcagggtcccgcacggccccggcacgggccagggcaggaaagtgaagg

SEQ ID NO: 165064 - DNA, 289 bp, Zea mays
  unsure (1)..(289): unsure at all n locations
  Clone ID: MRT4577_82125C.1
tttggccgggaaaaaaaaaaaaaaaaaaaaaatttcttttcttcggtttcttccattttacccccaggcccgcgagcgtgcggntggtctcctttcctttctcgtggcnngacgaccgagcnnnggccgtcgcttgcctttacgtgcccanngtcctgnnttcgtccctttcnngccggcganncggcccacggcnncctggcttattaggcaannnagtttgtcccctgannactgttnncatcatggntnnggaagggctgggnnntattctcgcgcttttttgtta

SEQ ID NO: 165065 - DNA, 389 bp, Zea mays
  Clone ID: MRT4577_82126C.1
ggacctttgggctgctttatgtgcttgtttgagattactgatgagtactccctcgtactcgtaacggtcgttgtcattgcgcttgctttttgtactaagtcgggtctttaggggtcagaggctcttgtgtagggttctggtcgtacgggtacgcttgttcctcatggcttgtttaagtttgagttcgatacgactaagtctacttattatgttgctgttgttggggctatttcttccgatattcttgatacgcatggtttgtatattaatgagacttcgtcaggtaaggtgtcctaaggtggcgcaagggagaaggctgagtcggttattaagcccgttgctcttcctgttgatggtaagtgtgagacttgtggcgatttggtgcacgc

SEQ ID NO: 165066 - DNA, 630 bp, Zea mays
  Clone ID: MRT4577_82127C.1
gttttcctactttgtatcttgaatgcaccagcatggtggctggtttttttatcaagaggagccgggttgttcaatcgcctcttagatcagtgttttttgtgattctcctatgcatcgacagcaaccttgtgcttggctaaagctacaataaggataatattatgaacttatttgccttgataatgttgtaggtttacacaagacagatattcaggcagatccacttgctgttgccgtcattctgatacaacctgacttgatgactctcaatgaagctgaatgctgaaaggtgttgctgccttgcagaatgaagttttgagtccaatacatggaattcatatttggtggtgttgttttggaacttgtttatctgctaggtgttgctgccttgcagaatgaagccgtcagcattttccttgtttatctactagatgcctgcctgctctatttcttactcttcagtcttgactggtgcctactgcctgagtgcagattcagtgtgatagttagattctgctgatgtgttcacatgttcattgtaaacaaatttcttgctgagtaacttattaaacatgtgtgatatcttcaagaccatgtgactttgacctaatatattgcgaaacattctgt

SEQ ID NO: 165067 - DNA, 864 bp, Zea mays
  unsure (1)..(864): unsure at all n locations
  Clone ID: MRT4577_82128C.1
caaaatataagggattctaggtgtacaaactctataaaatgtaacattcacatgcatacctaccaggctaccgttaatgtccatcaccaatccaaacatgataatcaaggagggttacatgtgtcatttgttttactatataatatgtcctaaaattgcttagataccttatttcaggatggagggaggatgtctgcatcccccagaggagaaaaagggtatatggattacacttagggatgcaagtccgacatgttttgggttattgggtcgaccttaggcttgttaaaatgaactagaatgccatgccacctaattaatttagggagagaaatgaactaggctagctgacccacaagacaccattgagtactcacctgcgcccttaactacactcgatatttgtaagaacgtactgatgaagatgcttacttgttttcatgttgcttctggcttgaaaacatctgcttaagcactgcatgtgcttataaatatggatattatgatatgatttttttttagcttggattgacctgtcatggaacatggaagcttgggtgtctgatagatacttttgcctatggtctccatttctgctacaccaggctgggagtctcattgtgcatgttgagcagtgcatgacccagtgcttttgtcttattggtcttctgtagtacataagaatttgaccaacatttagcagttcacatagcattgtatgtactaaactatgatttatcatttaacttttacatcatgcacttgcatgtntatattatgtgtccattgcaattttggtattaaatattctcccaatctttcaggagttggtaatatcttgtanattacatgtgctgtttgatg

SEQ ID NO: 165068 - DNA, 1617 bp, Zea mays
  Clone ID: MRT4577_82129C.1
ggattgggttttgggtacctcgaggccggccgggatcaagccattcgtccctgtggaagtttccacactcccttcccttcccttgtacccactccaatggcgccctccctcctggccgccgtctccgcctcgcccttcctcctacccggcagcagcggcatcagccgcaggccactgggcgctgccccaacccgccgggccggactgcgcgtggccgcgcttaagtacgaccctgctaaggtggcaccgcagaacgaccgggtgctcgtccgtcttcagcagatccctgagaaatctgctggtggtgtattgctaccgaaatctgctgttaagtttgagaggtatctgatgggtgagattctatcggttggtgctgatgttagtgaagttgaggctgggaagaaggttctcttctcagacatcaatgcttacgaggtggaccttgatacggatgagaagcactgcttctgccgggagtcagatttgttagctgtagtcgaatgaattttaccatgaaaattacagacttacctgcccatgctccaactgcatggacttatcttgcacctactttgttgtacttgaactcggcttctagatgagtgttagttatcattgtattttggccgcaataaacaggaatcgtgtcaatgccccatttctttacagcacgctctcataaagtgcttagattttgataggaaggcgtgaacggaacttggaagatgaaatgcttacattgttcatcttgaaaaaaaatttctgcacattcttttagcaccgttttttttcagcacagaatcaagaagcttagggagtcgatcaacgggtttgaccggtcttcagtacagacatgctttccaacgagctatggttggattgaatcattgaattgaaccctagaaatgttaggcacagattgctcgtggacataaacaaaaactacatccaacccgaaacaccaccaagcaaccaaagaacttgagagagtccacgacgcctatcactttcactgattaaagctactgtgcctccatcctccaattgctcctccatcttcctgaacctgggtctgggtggaggtgaaggtgatggcgaccttgatctcgccgtggtacgtcttgtcggcgaggaccacgttgtgcttggccgcgttgaggtggtacgtgccgcgctcggcgcccaggctgacgatgtccgtcacgtcgatcgtcgcctcgccgaggaagtcgtcgctggagaagttgtcgtggtccatgatccggaggatgagcttgtgctgcacgttggccgcggccgagttgatctggaacttgaacacctcgttccagcacgggttccttccttggtctcgggcgacgctgctcttgcgctcctggctccggtactgcatgatcacgtaggggtccagcttccctaagaaatcgttgccggagagccccttggcgtcgacgaggtgcacctccaggacgcccttccccatgttcttcttcctcctccccctccctggcgcgctgtcctctcctccaggtggcgttggaggtggtctctcctcctctcttgcggcggcgcggctctatgtaactaacgaagatcccggccggcggcgaggggtcc

SEQ ID NO: 165069 - DNA, 254 bp, Zea mays
  Clone ID: MRT4577_82130C.1
caacaagcaacatagaaagtggaatccagtagcatttattgagccaccatggagacccagaattgggggttcttatgctccttgctctttctacatgtggtgctaaccccacaatttttccttaatgctcacaagcttctattgctttccttttttccccatacctttcattaattattgcttcagtattgtaaaacccaacttttcaaccatattggcgttaacaagccattgcagcaaggcacataccttta

SEQ ID NO: 165070 - DNA, 802 bp, Zea mays
  Clone ID: MRT4577_82131C.1
ggccgtggggaacctcgaggccggccgggataagcatttgtccttctggaagtttccacactcccttcccttcccttgtacccactccaatggcgccctccctcctcgccgccgtctcagcctcgcccttcctcctacccggcagcagccgcaggccgctgggcgctgcccccacccgccgggccggactgcgcgtggccgcgcttaagtacgaccctgccaagggtggcaccgcagaacgaccgggtgctcgtccgtcttcagcagatccctgagaaatctgctggtggtgtattgctaccgaaatctgctgttaagtttgagaggtatctgatgggtgagattctatcggttggtgctgatgttagtgaagttgaggctgggaagaaggttctcttctcagacatcaatgcttacgaggtggaccttgatacggatgagaagcactgcttctgccgggagtcagatttgttagctgtagtcgaatgaattttaccatgaaaattacagacttacctgcccatgctccaactgcatggacttatcttgcacctactttgttgtacttgaactcggcttctagatgagtgttagttatcattgtattttggccgcaataaacaggaatcgtgtcaatgccccatttctttacagcacgctctcataaagtgcttagattttgataggaaggcgtgaacggaacttggaagatgaaatgcttacattgttcagctggtgttcgtgtttctgaacatcttcaagcaccgtcgtaaacattcaactaagagactgcagattttac

SEQ ID NO: 165071 - DNA, 421 bp, Zea mays
  Clone ID: MRT4577_82132C.1
gccggccgtgccgggtcttgtgctaccgcaacgctctctgcttttcgtcgagttcgtctatagcctacgatggagcttgataggggatcgcggagactgtatgagaatgtagcactgacgcgcgcacgcgacacgacttaccgggagcattactactgaatgtccgactacatccgcgcggcggtgtctggcgtggaccatgagaacttaatgctcaccttccaggaccatcaagtcctcctgccaccggacattgatggccagttcggatgtctccgttttgaggcctgctggcatcgaatcgtctgcgccaactgtcacacatcagaacgcctgggacgcatgctcgtcttcaactctggtttttacgcaacgttcccgatgagcactatcactcactatttgacagagattgcatttg

SEQ ID NO: 165072 - DNA, 209 bp, Zea mays
  Clone ID: MRT4577_82133C.1
tcctctagccgtctcgcgcgcttctttttccccaccccggcgccggcatcgcacgcccgcagccgcatccgctatgggtgcgtaccagtacggctcgggagctatggcggaggcaaccaccagatgtgatgcgagctccagcagtgcgcgcgctgctgggagtaccagacgcagacggccatcgggcgcctcacaaggcccactcgccc

SEQ ID NO: 165073 - DNA, 1685 bp, Zea mays
  unsure (1)..(1685): unsure at all n locations
  Clone ID: MRT4577_82134C.1
gcaggtgaaaactcaaattgcaagtttttattttttaatcagtaccattcggagttgctataaatttcattagcgaacaacaaatgtttgcagttattttcttcttaacgctgttttgatcttgtttggatacagagactaaactttagtctctatcatgttggatgtttaaatactagttagaagtattaaatatattctaattataaaactaattacataggttaggactaaacgaaatcgattaaacttaattagtacatgattcgctcatatgacactatattaaacatttgctagtcatggattaattaggtttaataaatttttctcgtcgtttagtcttcatctctgtaatttgttttataattaggatatatttaatatccgtaattgacattcaaacgttcgatgtgacacatactaaactttagtcaggggaaccaaacacccccttcgtattgtacagtttcctcttgtacagtttcctctcattttgcacccattaaacatattctgcttatagataattaatgcagtcatgagtggaagagatgttctggtcataatggcagctggtggagggaagagtctatgttaccagctcccagctgtacttcgtgatggaattgcactggttgtcagtcctttactttcccttattcaggaccaggtcatgggactgtcagctttaggtataccagcatacatgctaacttcaactaccaacaaggaagttgagaagttcatctataagacacttgataaaggagaaggagaactaaagatattatatgtgacacctgaaaagatctcaaaaagtaaaaggttcatgtctaagctcgagaaatgccatcatgccggtcgtctttctctgattgcaatagatgaggctcactgctgtagccaatggggtcatgattttcgtcctgactacaagaatcttggcattttgaaaattcaatttcccagtgttccaatgatagctttaactgcaactgcaacaagtaaggtccaaatggatttaatggagatgctccacatcccgagatgcatcaagtttgtcagcacagttaacaggcccaaccttttttataaggtgtctgagaaatcgccagttggaaaggttgtcattgatgagatcacaaagtttataagtgaatcatacccaaataatgagtctggaattatatactgcttttcaaggaaggaatgtgaacaggttgcaaaagaactgcgcgaaaggggtatttcagcagattattatcatgcagacatggatatcgttaatcgtgagaaaattcatatgcggatcgacacacaagggatgtgattgggactggccgtcgccgtaaatcttcgcctcgcctctacatcttggacaccttgcgtcttccttcacaccatatcactacaactcatgtgcttgctgcttcaggtcccacgacgtcgttcgcccagtggcatcattgtcttggtcacttatgtggatctcgtctgtctactctaataaagtcaggatgtttaggtcctacacatgttgagtctagttttcattgtaaaggttgtcatcttggcaaacaaatacaacctccatattttacccgtttgtttctaaaggtggtcataaatattatgtcattttattgatgattattctcgntaataccttggatttacttcat

SEQ ID NO: 165074 - DNA, 235 bp, Zea mays
  Clone ID: MRT4577_82135C.1
acaaaaagggttccttttttttacaatatatttcacttagggttaacaacaaatcattgtgggggcaatgcatttagaaaaccctttgtttttacagtagcaatttaatctaattttcagccctttaaatggccaaagcggcataaggccttcctaaccagactctccctaatcatgatcttggcattcttggggtcccctcctgttttttcctcccacaacttaacgggctttt

SEQ ID NO: 165075 - DNA, 323 bp, Zea mays
  Clone ID: MRT4577_82136C.1
ctttaccaaatacaccgccggctctgtttgcccatcttcacgccaagcacggaatgtccgatggcttgtttcgaagcatacagcgctcaagtcgacgggcggtaaggcgccccctaagcagctgtccaccaaggcattacgcatgtctgtccccgcaaccggtggcattaagaatcctaaccgcttccgtcccgacaccgtttcactacggaagattctcatgttccatatgagcacggagctgctcatgtctatgctgaccttccagcgccttttccgtgtgatcgcgcaggattttaagaccttccttctcttccagtcct

SEQ ID NO: 165076 - DNA, 606 bp, Zea mays
  Clone ID: MRT4577_82137C.1
atggccatgatgggttcaacatctaaaaagatgtacctctgtcaggtgatgaaacaactgagttctgctatttctgttccaaggtggtgcccaagaaggaggaagaacactaaaacttatatggggagggtattttgcctcccgcatggcgcgtaccaagactacccaatgaaaggcaaccagacctcgagggagcgtgcgcgggatagccgccacattgctgagctatcggcagaggttaatcgcttgcagcaggaaatcgtggaacgagacacgactatagactgggtcataaattcacgctcttttgcctgggattgtgaggcaaattctctagcccgggtatcgaaactaagcgcaactctgaagaatctgcaagcatactgtaacactgtgcatgaggaagtgcacgtgttatacgaccgactgcatccgaatgtgccatcggaagttgcagcaatgggagccagaccatctggagcagctagtggaggacctgatggggagttggatcattttggagcccctccttccatgaacctcgcagatgaatgttctcttggagctggcagtggagcggcagtggctaaggacgaagataattag

SEQ ID NO: 165077 - DNA, 255 bp, Zea mays
  Clone ID: MRT4577_82138C.1
gtggggtccgggcgtcaccatagctggtggggtccgccagtcagtttgagttttggtgcgtgaagacagtgttggtagcccatcggcgcgtagagcgccatacaaatacaatctgccgtacagttaccttgcagttgtaaaatacctgcgtgaaaaagagcaaaaaaattctgagtccaggttatccctccacatgttcatgtactcggaccggaaaaaatgtaatcactttgaaacccgattgttctgatatat

SEQ ID NO: 165078 - DNA, 343 bp, Zea mays
  Clone ID: MRT4577_82139C.1
attcggctcgagctggagccgggcgattatttgtgacttcaatctccgggtctctattgggtggtccccagggtatatgaatgttgcaaccggacaagatgtgtaccgtgcctaaattgcaggggtgttttggcttcatcgacccaggcttccgttgatggggtaacgttgcagcatgcccttgctggcttgctctgggcttaggatatttgcttggaatataagatcataaatatttgcctgaatgttcgggtttcgagcctgtgttcttgtcccagtataagatctgcgatgggggggggctcggactagggagctactcatcccgataatgaattgcatg

SEQ ID NO: 165079 - DNA, 328 bp, Zea mays
  Clone ID: MRT4577_8213C.1
aaaaaaccggctcactacttcaccaacctgcacagctccttgcccgatgcgcgccatactagggtcgacgtatggtgccagtactacttcgacttcagtgacgaccaccgaaagggcttcaagcgctagaccatccacgccatttgctcccaggactaactgtatctttcgtacgcgccctcgtgcttgagctcggctgagccctggtaaaacatcagctctgtgtgtttatgcacccatatctttgggaagaccccctgcgccgtcagggaacttttggagggggttgtcataggggactcagaatactcaacgggttcttcatggt

SEQ ID NO: 165080 - DNA, 291 bp, Zea mays
  unsure (1)..(291): unsure at all n locations
  Clone ID: MRT4577_82140C.1
tacctaagcttggatcctctacacccgccgccctgtttttggttcaaaaatttttcttcttaaatctcaatcactatattcattatttttacaaaacacattcccctataaccccaccattatcgaatacatctcatatttaatctaaaaaatgccaccaccaaccattctttcctcctggaggggggcanccaccaataacttaaccacctctattcaattaaataacttttttcccttttntacntacccaacaaanttcnacacaatcaatttnttaaatcaaantat

SEQ ID NO: 165081 - DNA, 366 bp, Zea mays
  Clone ID: MRT4577_82141C.1
agtgaccctccctcagccgcgtcgcgtcgcatcctacgatccaacgctctctctgctcgcagccatggcgatgaactacccgaccgtgagcgccgagtacagcgaggctgtggagaacgccaggcgcaagctccgagccctcatcgccgagaagagctgcgccgcgctcatgctcagcctcgcgtggcactccgcggggacgttcgaagtgtcatccaggatcggccgtccattctgaacgatgaacctctcgtcggacatggctcacggcacttccactgggctagacttctgcagttccgcgagccggagacggtcaggggagcactccagcactatctgcctgcgggtagggtttctcccggt

SEQ ID NO: 165082 - DNA, 336 bp, Zea mays
  Clone ID: MRT4577_82142C.1
accaagccttccggaaccttaaaaggtggattccggtaccaaaattagaccaccattggcggccaaaatgttttccatccttatgctcgttgctctttcggaatgagttgctaacgcgaccatttatcctcaatactcacaagctactatagctgcccttcttactccataccttacatcaatgaccgctttagtatgtgaaaacccagcccttcaaccctacaggatccatctagcaatcgcaacaagcatcttacctttatcacacctgttcttttaacaatcgccagccctatctttggtgcacacattggtacaaaccatcacggcataaca

SEQ ID NO: 165083 - DNA, 358 bp, Zea mays
  Clone ID: MRT4577_82143C.1
aaattatcggggggggctttttaaaggggaaatttaaaaaaactggggggccatattaggggaaccaactttggaaaaaaaatgggggaaattattgttaaagtttttttttggggaaaaattttttcccgtaaaaaatcaacaaaaaaaataaagcgaaaaaaaaaaggggaaaacctggggggccaaaagagggaactaaattaaattaattgggtggggttcaatggccgattttcaaagggaaaaattgtttggccaattgaataaaaaaatcggaaaacccacagggaaaaggcgttttttaaaagggagtttttcaatttcctcgaaaaatgaaacgctgacctggggcctt

SEQ ID NO: 165084 - DNA, 465 bp, Zea mays
  Clone ID: MRT4577_82144C.1
aagggcaaacctcaaacttcataggggttcaagccctactggggcagaagaggttgggggcccacccagggggcacaacggggcccttaaaccaacggagccccaaccccggttcagggcccacaaaccacaggtggtttttagacgacgacctccattttgggggcccccagggggccccagacgacgcagatacccagggacaggagcagcttaaatgaaccatgggttactggccaccacggggggggggcaccagggggggagggctctccttctggatggtggagtctgctagggggcgggcatcctccagctggttgccagcgaaaaacaaaccctgctgggctggggggatgccctctttggcccggatctttgccttcacgttgtcgatgggggcggagctctcaacctccaggggtatgggcttgccagtcaagggcttcacaaagatctggatac

SEQ ID NO: 165085 - DNA, 216 bp, Zea mays
  Clone ID: MRT4577_82145C.1
ccgggtcgacccacacgtccaaaacagtacaacctgtgcatattgttgatgttcccggtcatgctatgctcaagcccaagcttgctgaactcctgcctaaagctgctggggttgtccttaatgttggagctcaagatttcttgtccaacatgcaagctgccggaaaataccctttatacattctcacaaaagcatctgtcactaacataaggatcc

SEQ ID NO: 165086 - DNA, 343 bp, Zea mays
  Clone ID: MRT4577_82146C.1
taaaaaaaaaaaaaaagaaaaaaaaaaaataaaagaaaacagaataaaaaaaaaaaaacataaaaaaaaaataaaatctacaataagagaaacataaaattaaaatatagctgagacgtagatttactaacgcttggcactggagaaaaccttggtgtttactgggcttttttctgtttgaaaccacattttccttggggggggggtcggcgttatagcgccatcggcctgtaccgatcggacttgcttacagttgcgctcccttaattgcaactgtggtgcggcatggcgcggtggcttacgcgcggtgcccgtggtggtaacgcgctttttgtctcggtgc

SEQ ID NO: 165087 - DNA, 295 bp, Zea mays
  Clone ID: MRT4577_82147C.1
tcatcctaccactcgtacgaccactctttctacgatttctacatctactaatacctatacgtcaaatgtatattcaacaatgggccatgaccctcatcccaatcatcatcccacctgcttcactctctactaatcctaataccatataaacaacctattctcataacccatttcacacttactcatcatctcttctcatcttatcatttatcctctcccatactaccataaacatcattatccagtatgacattacatgatattaactatctgtataacattttatccatttact

SEQ ID NO: 165088 - DNA, 723 bp, Zea mays
  Clone ID: MRT4577_82148C.1
attgctcgctgcgccgacgcctcccactcctcccttcgtccccacgaagaaccgataatccgtcggcgctgagatgctgcattatccggatctcctatctggtgaccagctcctgtcggattcattcacctacaaagagctctagaacggctccctgagagatgtcgagagaatagtgggtcccccaaggccctgttgatgtggacattgttgccatatccatcctccgaggatgatgaggaccaaagcgttgatgacacagctgtgaaggcggttgatgattgttgacacattccgtctacaggacctaacctccttttgacaagaagtcatgagagtcttacatcaaaaaatacatcaagaatctcatctgctgtgctgcagccagaaaaagagaatgagtccagaaagggtgtcgagggtgcaaccaagtttctcctgtagcagctgaaggacctccagttgtttgttggagagtccatgaaagatgatgcgtctgtgactattcgcctattactagtgatgcgtgccgctaatccgacattcctctatctcgtctcatgctcttaaggagacccagggctacgtgtgcggcgataagtatttacccatgtcgggcacgatctatgcactattattatgtccaagactatagatgtcctgactgaattgaactcagaaggatttgttagataaaaaattggcccaagattggagtgcttg

SEQ ID NO: 165089 - DNA, 340 bp, Zea mays
  Clone ID: MRT4577_82149C.1
gcctattggcctaaactgaataggtgtccgttgtttactgtttaaatgctgtttaggtgaacacttcttgtaggtagagggcgaggtgctggattgaatctgagcagcgagggtgccaagatgccgactggctgtgtgcgggttcactgtgtgtcatcagaagtatatgtttttttttgtgtcgggacggggctagatttgggggtttgacagctgtgtgagtgcagaagctgaaagggagtaggtgggtttcttaggattaacaaattacttggatttatgaatggagagtgttatatgatgaagtctcaactctggagatgtctcacttgttccttac

SEQ ID NO: 165090 - DNA, 235 bp, Zea mays
  Clone ID: MRT4577_8214C.1
atccggatctgcgtaataatcccccgtcttcctcgtgagtgagacccggtcgtggctcactaggtttagggtgccatctcgtccgttgtctgtgggattcttgacctgactggccctgcccctggctttgcagccttggtcgccgcttcacagtcgttcgtcgtttgatctgtattcgcggttctgggcgcgttcaacgggttccgcaggactccgaaaagttctgcatcgtcgg

SEQ ID NO: 165091 - DNA, 204 bp, Zea mays
  Clone ID: MRT4577_82150C.1
cagattcagtgggtgaaaaaagagaacgggtggaagctgttagaggaagagagattgcgcgacgggactggggtcatgatgatgatgatgatggggattttcagcgtcagaggcgctgcggcaaccgccgtcatcgcagcttgtctggttgggcgcgctcgtssssatgtcgagggggcatggacgactgttacagttccaatg

SEQ ID NO: 165092 - DNA, 230 bp, Zea mays
  Clone ID: MRT4577_82151C.1
cttgtacttataatcatgcttaaatggttgattctccaatttctttttttagaaataagttaattgcttttgcaggttgacactctcacctgacagatgatgtaattcttcaatttctataatcttaaaatttatatattttatatttgtaaatacagtacacattttattgcttggattttgagagacattgttaattttgggggaattggcattgcgaaagacttcat

SEQ ID NO: 165093 - DNA, 111 bp, Zea mays
  Clone ID: MRT4577_82152C.1
gctaaggactaggctgccaatctgtacgtgcgagatgctatagcggttgcttacaattgtcgtctctaagaggaatgttcttatatctgtcctctgggccaaatgaaagct

SEQ ID NO: 165094 - DNA, 226 bp, Zea mays
  Clone ID: MRT4577_82153C.1
ttatttcaaagaatgcgaatatcggcacaatggaactttgaatttgaacgggggtagcaacatttacggcatagccagcttgcgtctggatacggttaaaaaccacaaatccttgcagttatccaattagcctctgtgggcccaccttgctataacatatttgtctacggaatagcagacaagcatccatgttccaacatattagcttcctaattgacacaacaac

SEQ ID NO: 165095 - DNA, 216 bp, Zea mays
  unsure (1)..(216): unsure at all n locations
  Clone ID: MRT4577_82154C.1
aagaaaaaaaaaaaccgaagaggacaacaaacaaacaagcgnccaaagagggagaaggncccaagggcggcaggnggaagacaacccagacggaggggagcgaaggcagagaggcgcgnangaggagggacnaggaacgnaaacgggcagagcaaaaaaggccggcagacccaagagggaacgaaagacangncaaaagaggaaagaagaagggaa

SEQ ID NO: 165096 - DNA, 191 bp, Zea mays
  Clone ID: MRT4577_82155C.1
ggcgtcttcttccctgcccctgtcctgtttttctctgcgcaggatttggagccctgccatggccgcaagctcgctctgccccctgcttttcctgcacgcgtccgttctcgcgccggcgtcgatctcctctacgcgacactcctttcctcctggtatctcagcgagtgggcagggtcatttttcggggactc

SEQ ID NO: 165097 - DNA, 284 bp, Zea mays
  Clone ID: MRT4577_82156C.1
cgagtttgattgatttcaaagcctagcaagaaggaggggatctgtttcggggttggggggccactggtccaagatcgcgcagtaccttcgtgtacactacaatcatagccattttataaagcgtcaaacgcgcgtgcaggattaagtgtatgcttttaggaaatcttatggtttaactatcattattccgtcagttatgctctagttctggatgccccgtcttgttgagcgcattcaggccgccgcagccaacaataacgccagcggcgccggggttccgccag

SEQ ID NO: 165098 - DNA, 465 bp, Zea mays
  unsure (1)..(465): unsure at all n locations
  Clone ID: MRT4577_82157C.1
ccggccgggctctccggcctccccccaantnnnggtggtnattanatctaccccaattgntggcccccttggacctcgtggtactcctgtccgtccgaggttaataactgctgtcttctgaagttgataaagcctcttcatctgctggcacacaataatacgttaaccatgcgggatgaggaggtaaatgatccaaaggagattttaaaggaacgttgaaaggctaacggtatgacagagggcgatgaatatcacaaagacgctaacacgattgagaatgacgagaatacggagaaacactagtactgggcatgactttgactactggaaatgcggagaaagatacgagcagaaaaactcttacagatgtaaaaatgacaagaccaactttccatacttgagggatacaccgaacgagttagtaattgtataagatgatgggagcaatacactgtgagagcactt

SEQ ID NO: 165099 - DNA, 325 bp, Zea mays
  Clone ID: MRT4577_82158C.1
tcgatactactcttaccaatcaagatttcatgtctgatctcgacattcagatcccaactgccttcgatccctgtgggtgatgccaatgctggggactctggcgcaacatcaaggtcaaaggactacattcacgtgcgcatccagcagcgtaatgcgcgcaagagcctgaccaccgtccagagattgaagaaagagttcagttacagccagatacccaaagatcttaagaaagaactctgctgcaatggcacagaggtccaagacccagaacttggacagcgcattcacctccagggtggatcagactaagaaacgtctgaaattt

SEQ ID NO: 165100 - DNA, 377 bp, Zea mays
  Clone ID: MRT4577_82159C.1
aggaagaacagggttcccacaatatacaatgtgaatcattctgacgggacacccaattgtccaaaccacaacaattgtgatagctaaagcacaacgaaagacttgttggcaaaaaataaaaattatgaaactatggtggagacacaaccggaaaagagccgaaacaagctaatttatgcacctctgctgcatgatgtttcgcttgaaccttaatcttcataaccataacctcacgcttagaatcaggatctgaaagtgtctggttgatatccctcgctatacaaaagaaaacccgttcgacattgaagctatgattttcgctcgtatcaaaaaactttattccatattcttctgcgagacgcttgcacctttgaagt

SEQ ID NO: 165101 - DNA, 182 bp, Zea mays
  Clone ID: MRT4577_8215C.1
gagtgactacctatccgatcgatgcaattagctagagaacccttaaaaataacatgcccgtataacgtagcagcacaggccacacacccacccccgacgcgaccgattttttaaaggggggggccaaccctcactcactcaggcctggttttattcgctgcaaagcacaagaccggagcacg

SEQ ID NO: 165102 - DNA, 265 bp, Zea mays
  Clone ID: MRT4577_82160C.1
aataactatttttttttataaatttttttttattttttttttttaaatatttgaaactgtaatagatataaagaccaatttttatcacatggatagcattaaccttaacaaaaaaaaactgcatagaggtaacaaaaacatcaaagaggcaacaaacactggcaacaaagatacttgagaagaactacaaataagattctagaacgaaaacagacactccgtttgcttaaatagatttccttggtacaacaacaacgtcagccta

SEQ ID NO: 165103 - DNA, 465 bp, Zea mays
  Clone ID: MRT4577_82161C.1
accctcgaggctcgtccgggaaagctgctaaacctcggtccatccatcacccgcggcgcgacacacccaaaggcctctccctccgtcagcctcgctgacgccgcctacgtcaagatctccgaggccgactttggatacgtcctcgacgacgtgccgcacttcaccgactacctccccgacatcccgacttatcctaatccactacaagatcatccagcctattcaactgtcaagcagtattttgtcaatgaagatgacaccgttcctcaaaaggttgttgttcagaagaacagtcggcgtggtgttcacttccgtcgtgctgggcctcgtcagagggtttattttggcaccgatgaagtgaaagcctgcattgtaacttgtggaggcctgtgccctgggcttaacactgttatcagggaactggtgtgtggcttgtcacacatgtacaatgtcagcagcattttt

SEQ ID NO: 165104 - DNA, 295 bp, Zea mays
  Clone ID: MRT4577_82162C.1
tacatcccgcccctccacgcgggcgatctttttatttttttctaggttatttttgcatccttttataattatccaaccttttcgagactatcatgtggtgttactaaaaacaacgatgcgtgcgtaaaatacaaggaaatgaactttcttattggtgacattaaacccagccaggatcccttacaatactttaacctgaaagagaaccagacaccacttatccttattcaagatggagattacaagatcctcttgaaggatcacattgaggctgaccaatatccattttgcctga

SEQ ID NO: 165105 - DNA, 3405 bp, Zea mays
  Clone ID: MRT4577_82163C.1
ggccgggccgggctgaccgaccgaccgatcggggccctctcactttccgtgcctcgtcgttattaaaaaaacacaccggaggcgcgaccgcctcgtccgcgtctgcttctgcatctgcttctgcttgtgctgctgctgacatcgaatcaaagctgctaaacctcggtccatccatcacccgcggcgcgacacacccaaaggcctctccctcccgtcccgtgtcccgatcgcaccgctccccacgatggcgtcgcacatcatcctgccgccggacgacgccgacgagaaccacaaccaccaggcggcggcggcggcggaggaggaggaggaagagcgggacgagctggggcgcgacgacgacgacgacgagcacggggtgccaccggcgctgccgcccaaggcggcgctgccgttctcggccacgtgcgtgcggatctcccgcgactcgtaccccaacctccgcgcgctccgcaacgcctcctccgtcagcctcgctgacgccgcctacgtcaagatctccgaggccgactttggatacgtcctcgacgacgtgccgcacttcaccgactacctccccgacatcccgacttatcctaatccactacaagatcatccagcctattcaactgtcaagcagtattttgtcaatgaagatgacaccgtacctcaaaaggttgttgttcagaagaacagtcggcgtggtgttcacttccgtcgtgctgggcctcgtcagagggtttattttggcaccgatgaagtgaaagcctgcattgtaacttgtggaggcctgtgccctgggcttaacactgttatcagggaactggtgtgtggcttgtcacacatgtacaatgtcagcagcatttttggaatacagaatgggtacaagggtttctattctagcaactaccttcccctgacaccaaagagcgtcaatgacatccacaaaaggggtggtacagttcttggaacatcacgcggtggccatgataccaaaaagattgttgataacattcaagatcgtggaatcaaccaggtgtatatcattggaggagatggaactcagaagggagcatatgagatcttcaaggaaatccggaagcgtggcctcaaagtttctgttgctggagttccaaagacaatagataatgacattgcgatcatcgacaagtcttttggttttgatacggctgtggaagaggcccagcgtgccattgattcagctcatgtggaagcttgcagtgctgagaatggaataggtttagtaaaactgatgggccgttatagtgggttcattgcgatgtatgctactcttgctagtcgagatgtggactgctgtttgattccagagtctccattttatctggatggagagggtggattgcttcaatatgtagagaagaggctgaaagagaacaagcacatggttattgttgttgctgagggagcagggcaggatcttatcgcgaaaagtttagccacatcagatcaacaagatgcgtctggaaataagctgcttcttgatattggtctttggctgactcacaagataaaggactacttcaaaagcaaaaagatggagatgacgattaaatacatagatcctacatacatggtccgtgctattccaagcaatgcatcagacaatgtctactgtacacttctagcccacagtgctatccatggtgcaatggcggggtacagcttcactgttgggatggtcaacggaagacatacctatatacctttctacagggtgacatccacaaggaacaaggttaaagtcactgacaggatgtgggcaaggcttctgtcgtccaccaaccagccaagtttcctgagtcagaaggatatcgacgaagcgagtgaggcggataggctggcaaacaggccaccactgccaacgggtgccagctctcgcgtggtgaggtctttcgatcaatcttcgtcgtgttcttccaatggagagatctaagtgattgctggtgcaccgcaattgtgtacagaacctacttactatcgttctgagctctggtgcttgggcagcttcgccacgcaacgagttttgctcttgttgttagtcgttatgcatatgccttgagttgtgtaggaggacacgcggatgtgggccctgttagcacgcgtaataaagaaacaccattgatgaagctacttactagaggctctccatctatcatgtatttgctgcagttattatgcaatcggctggtgttctatctgtcttcgcctatctgtactaccgtgcattttcctttggcaccgtgaaatttgtaaggacaattctacatatgccattttaattttatcttctagtgttacacttgctagtcgagatgtggactgctgtttgattccagagtctccattttatctggatggagagggtggattgcttcaatatgtagagaagaggctgaaagagaacaagcacatggttattgttgttgctgagggagcagggcaggatcttatcgcgaaaagtttagccacatcggatcaacaagatgcgtctggaaataagctgcttcttgatattggtctttggctgactcacaagataaaggactacttcaaaagcaaaaagatggagatgacgattaaatacatagatcctacatacatggtccgtgctattccaagcaatgcatcagacaatgtctactgtacacttctagcccacagtgctatccatggtgcaatggcggggtacagcttcactgttgggatggtcaacggaagacatacctatatacctttctacagggtgacatccacaaggaacaaggttaaagtcacggacaggatgtgggcaaggcttctgtcgtccaccaaccagccaagtttcctgagtcagaaggatatcgacgaagcgagtgaggcggataggctggcaaacaggccaccactgccaacgggtgccagctctcgcgtggcgaggtctttcgatcaatcttcgtcgtgttcttccaatggagagatctaagtgattgctggtgcaccgcaattgtgtacagaacctacttactgtcgttctgagctctggtgcttgggcagcttcgccacgcaacgagttttgctcttgttagtcgttatgcatatgccttgagttgtgtaggaggacacgcggatgtgggccctgatagcacgcgtaataaagaaacaccattgatgaagctacttactagaggctccatctatcatgtatttgctgcagttattatgcaatcggctggtgttctatctgtcttcacctatctgtactaccgtgcattttcctttggcaccgtgaaatttgtaaggacaattctacatatgccattttaattttatcttctagtttcttatttgtcgtctttctatactaaaaaaaaaaaaaaaaaagcggcc

SEQ ID NO: 165106 - DNA, 360 bp, Zea mays
  Clone ID: MRT4577_82164C.1
tgattttccaaaatccgtcctaccttatttataaaaacaaaatgaacgccaaaactttgatcgttgttttcggattacttgccttggttgctgctgatggaaacagcactaccaacgatactaaatgcttcaaatatacctgcaacagcaccttaaatggatctaactgtggttacaactttaaagattaacatgcagtttaacttaaagcttgcaatgaaacttaaatgtgcatcaatgtttaccccggagctgaaactgctgatgtcccttgcaccccaaaacccaaccaaacttgctcttactgcaagaatgtcgatgaagcctgcgaataagcttctgaatgcaaatctgccattt

SEQ ID NO: 165107 - DNA, 481 bp, Zea mays
  Clone ID: MRT4577_82165C.1
cacgcctgcgtgtaccgggctcctaattacacggccgacctactctttcttatcttagtaacatgtactgcctatatttgtgccacccctggcactcaaacataaagctttatttatgctctttgacttatatgcaagtgaagataccgcaccacacaatgacgcattgctgacagaacactgtagatttcgttataacaagatacctgtaacggaaggaattgttgaatgtgtgaaaaggcaccagctgatagccttcagggtgccaagcagaacggcacacaatgcatttgaccaaataagcattggggctcacataacctagatgcctataacagaagataccttggtgccattaataagcacaaaacatcaatgctcataaactacagaatggaagaaattgctaccttgctgcatactctaactagcataatggtaattgcatgcaaccaactagctgcatagaactctcatgctt

SEQ ID NO: 165108 - DNA, 236 bp, Zea mays
  Clone ID: MRT4577_82166C.1
tcgcccacgcgtgcgggggccgccctttttttttttttttacacaagcataataatttgattagggggaatagccatctataacattgtaggcatcgtgttcaatgtaatgtatacacaagatcagtaataatactatggggtaccattaacgtgggaggaaagtatacattctattatccagctctagcgaactcagaacgaaaaggtctagtactaaaaacaaccacttgaagg

SEQ ID NO: 165109 - DNA, 432 bp, Zea mays
  Clone ID: MRT4577_82167C.1
ccctttcgttcaaacgttgaccccgagctcagggggtcgtccgcttcaaaccccacataccttcgatcataatcagacacacggtaaactcacctttgctgcgagccatcacacgctgaatggtacactctgcagttagcaagccgcatatgcctgcgcaaaccgtacaaccaacctagatgtagctctcgacatgagagcacccccacacccacatctataaggcgcacacgaaagcgactcatgtcatacgctgacacacagatacaaactcgcacacgagaccaaccaacggcatcgttgccactggctcaagagtggcttcaactactcacagaaaggtcacatcatacgcgtgagacatgcataacatgtcttaaagactggatcatgcgcgaatcatacggagatctacgcgcggttgacaggcct

SEQ ID NO: 165110 - DNA, 435 bp, Zea mays
  Clone ID: MRT4577_82168C.1
tttttacttaacatttgcactttttttttttccaagcacgaatattaagaacaaaacagggggcgtggtaattaaggaacaataatgaacttaaacaatcaactggcacaataataagaaaaaactaggcccaaataatatcaatgctgaaaataacaacacactaaaacccagactggcacggcgactcactacaccggtatcatcatcgagcacataaaccgcccacaaattgggcaatcacccccaagtaaaaaaaactagcagatagcacaaaaatattcaataaaataatagaggcaacggggaactcacaccacgtaaattggataccgtgggaagaccaactcaacgaaccacaggttctgccccacaaaaccaattcacgcgcccacatccggaccttcaccgccggagggtgacagagaaattgga

SEQ ID NO: 165111 - DNA, 451 bp, Zea mays
  Clone ID: MRT4577_82169C.1
ccggggccaccattaaaaaaacacgggcgggcacctggcccccattcccccattttccaaaaagaccaaccccccggccgtgccttttttaccccccggggtaaagatagaaaaaccggcccctttgcccgggaacccagccccccaccaccccgccccaattcattcagattccaacccgaccaatgggctagcccccccttttaaaacccggggccaccataaaaaaacaggacccttttgccatcatccaaccccaaaacatgcccccccccccagggcaagggggaccccttccctggggcccatggaagagggccaatttagcctccaggcccatgggtcttttcttcagcagagcccccccccgtttcttttgaaagccccgccttgtttgtacccaccaccttaccttccttgttcccaccaccggctgggggggggggtttta

SEQ ID NO: 165112 - DNA, 831 bp, Zea mays
  unsure (1)..(831): unsure at all n locations
  Clone ID: MRT4577_8216C.1
acacgccctagagtagaggctgagctgcatatatcaccgagcaccctctctctctctgttcccctccctcgctcgacatggaggtcgccgccgccacttgtacgctccttgctgccgtcgccctaccagtttcgtcctcagcagcagcagcacgctctgcgacgaaacagagctactcgaggaggaagacgacggccgtgcgagccgtcatggcgaggccgcatcaggtgccgccgcctgccactgccaccgccaccgccaccacgtaccgcgacaactggttcgacaagctggccatcgggtacctgtcccggaaccttcaagaagcttctggtacgtacgcagtacgcacagcacacttgttgcgccctgcacacgctgcacacagcaccggctgctagcgatccaaatctttgtgctgcatgcatgtcaatggtcgatcggtcgacccttcttggtggatccgccatgtaactaataagcgactgcatgcacgcgatgcatgtagattatatcgcttgtagcagctgggtcgactaatataacaactagcgtacttgatgtctactttattgggtttttttaagctggtgtcatcggttttaatggtatcctcatttttattattagtcatgtttttttttcagttttacctttctgctctatatataacactagaaggttaaaactgagaagaagaaaaaacacgactaagttttaaaaacgaggacaccaacaaatctaaggacaccagcttaaaaaatcctattttatttntcatctctcttgtaaaattaattctgtgtcgacatagcagctagtagcatatct

SEQ ID NO: 165113 - DNA, 383 bp, Zea mays
  Clone ID: MRT4577_82170C.1
cgctagacctcgtcgaccgactcgatgtcaccttcgccttcggtccacgcccccgccactaactccaggcgtccagcagtctgctcgcttgcttcgggcctccggacgttcgtgtgcccctggctctgccgctccggccacccatgcacaaccttcttcagccacctgtgtgccgcttgatgctggcctgctctgctaggtgcagcgccatggcttgtcacgactgaaatgacaaggaaccaacccattgctgcttctactaccagaaaggatttctgcatgttcacgaagaagtcgaacaactgcaaatagaacagcatgcctgacgagcactacattggctgccgacgcccttgcatctgatgatatttcttacactttca

SEQ ID NO: 165114 - DNA, 728 bp, Zea mays
  Clone ID: MRT4577_82171C.1
ccggccgggttcgagttcagttcagatgcatttgatgtagcccaaaatgcaccctgtggacatcacaccatctctattcaagttccacttatcaaagacatgatttcaagcaagattcagcaactccctgcatatcaccatcccaaatttgaagcaaagctgcgtgcttacgactcagaggttggcaagtcatttgccactatcaaccaacgtcttagcaagattgtcaaaaagcagtacgacctagcagacacatttggagagttgattgacgaggttcttcgtgctgagataaatagtccagacaacaaagatgacatgatagaaccttccaatccctcagcatcagccacacagctggagtcgcagatgatagtcactcaggtggaggccatatataaaagacaacaggaaatgtgccgagccttcgagagttctcgtgatgattcagtcacacctcaaaacatccggggtgacacgacggaagatgatgctcttcaacttgactctggcctagttttggaccagattctaagtggcaatgagacatatatgatgcacaaaacacgacgcgactctgtgccactcacacaaatggacttgtgttcgcgcccttcgacaattcctgtgtgctaaggtcatggatttgaacagaaatgtcattgattttggtgaatatggccggtactttgtcgtgatatacaaccgatccgtttgccgatggggga

SEQ ID NO: 165115 - DNA, 355 bp, Zea mays
  Clone ID: MRT4577_82172C.1
gagcaagagcagtagtttcaaaatcactacatgctttgtcatcactctcaatgctacagactgtgaacgttgttatatgtgctcatcaccaggatccgaacaaaaaaaatttgaggggcagatcgaacatgctactttcatgagtcaatttaccatgattgcggacacagtcgtttaattctagataagttggcctactacaaatatatgatcccataaaattgctcgcaataacagcttggccacatatttaggtcccatgacctgcctccagaaacttgtgcgctaccctgagtgctttatttgtggtgcaagtacacaagctttaatatgaaaaaagcacacattgttgcta

SEQ ID NO: 165116 - DNA, 151 bp, Zea mays
  Clone ID: MRT4577_82173C.1
ggattatggttacccaatggagcagcatcattcagaatcacagcagggtctatgtcaggggcccctatggtgcctgctctaatcctacccggagctggtccttccgccgccgtcggccaaccatgtgaggtggaaggagaccgtctgcgct

SEQ ID NO: 165117 - DNA, 2113 bp, Zea mays
  Clone ID: MRT4577_82174C.1
tgcaccgggcgaagctcggaattcggctcgaggattttcggagcagctcagagacctgttacgcccctacacctgaatttcatggtcaattcgagtttcagttcagttcagatgcatttgatgtagcccaaaatgcaccctgtggacatcacaccatctctattcaagttccacttatcaaagacatgatttcaagcaagattcagcaactccctgcatatcaccatcccaaatttgaagcaaagctgcgtgcttacgactcagaggttggcaagtcatttgccactatcaaccaacgtcttagcaagattgtcaaaaagcagtacgacctagcagacacatttggagagttgattgacgaggttcttcgtgctgagataaatagtccagacaacaaagatgacatgatagaaccttccaatccctcagcatcaggtcagtcatccagttactatatatgtatcctgtatccaagcataaattacaccaatacatcttcagctggattaacatgctccagtttgaagattgtttcaatccatacactcggtaacttttatacttcaatggttactagttttttacagagcattgcacacagtctactgaccaattcatctcagatccactaatgacagccacgcagctggagtcgcagatgatagtcactcaggtggaggccatatataaaagacaacaggaaatgtgccgagccttcgagagttctcgtgatgaatcagtcacacctcaaaacatcgtttgtttctacctttaactttatgatttcttattctttaatttctgtacgaccgttttcatacttaaccaaccgaagcaacattatgagggccacaatgtttgcaattggctaggtttgttactttgtttatcaattgtgcattttattctgtttttaaattgtcatattgttttgtgaagcggggtgacacgacggaagatgatgctcttcaacttgactctggcctagttttggaccagattctaagtggcaatgagacatatatgatgcacaaaacacgacacgactctgtgccactcacacaaatggactgtgttcgcgcccttcgacaattcctgtgtgctaaggtcatggatttgaacagaaatgtcattgattttggtgaatatgtcggtacttgtcgtgatatacaacgatcgtttgccgatggggagtgccttgacaatgttttcatgcaatgcttcattgattgtgttcgtgatgacgccacaaatcatatccctccactaactgctcatcaacttatcctagacgccattgttggggctatattgaacttcgaggagcaggaacaacacagtaacactcatcggccgtatgacccagccatcctagagaattacttgtcaaagacactgccttcgttcaagcagttggacgaatacaaatcgatcatggtccctatgctccgcgcgggacattggacgttgtatgttatcaattttcagaatcgatgcatacacattctagactccaatccatacggaccagaacttggtgagactacatgggaaagttaccattatgttcaaatggacatcgggaaaaggaagttaccatgggccagactaataatggttagactaaacatggctctccaacatgttcgaccaagatcaaacctacctagatttgacaactttccaatcgacatggctccaaactgtcccacaatgaaagcagggtctaacgactgtggcttctttgctatgaggtacatacaatattatgactatatggatggtgctatcaatgtagttatagactcggataattcaggtgacctccgcgctcttgccttgtattacctgatcttccatcgactaaacaagaatcgctcattgtctccagaattagaaagattcaagttcccccattattagattagtctagagcaatatcatcagattgatcgttgcactcaaaggtgtgctagcatgtatttagtgtatatgtttgtccatatgtatagtgatctagtgcctaaaactgttttacaacctttacacgttataaacttctgtcacttcttatggatccatgctgatcaagtgcttaccaccagtttttcct

SEQ ID NO: 165118 - DNA, 202 bp, Zea mays
  Clone ID: MRT4577_82175C.1
aactgttgctgtcacacgtcgcctttcgcggccgaacactatgatctcgagaggcggcggcgaccaatgcactaacaagtcttcgtcccaaccggtccggctgactcttgacgacgccaggatggtgatactatcccacaagcccgacgccgacacaggaacgctgggagtaccatccccagatacaatggcttcgagcccc

SEQ ID NO: 165119 - DNA, 541 bp, Zea mays
  Clone ID: MRT4577_82176C.1
gtacaagctttttttttttttttttttttttttttttggtttttttttttttttttttttttttttttttttttttaccttccctttctgactttcaaaagggctaattccaccccactgggggcctttacaaaggaacccaagcccggacccaagcggggcgaaacaaaggccaaacctgttccctggaaaaaacggccacccgcccccaatcccaaaagaacaaacacccccaaaaccaaaaagggaaaaaccgggggccccaaaagaggaaacaaaccaaaaaaaaaggggaagccccaaccccccgggaaaaaagcgaaaaacccgccggcccaaaaaaaaaaaaaaaccggccaaaacccggaaaaaggcgggcccccaaaagggggcccaacccctaacaaggggacggaccccctccccccggtccaaagggggaaaaaagcgggaccacctcactaaaaagggggaaaaccgccacccaaaaaagggggggaaaacggaggaaaaaacacgggaccaaaagccacaaaaaggc

SEQ ID NO: 165120 - DNA, 187 bp, Zea mays
  Clone ID: MRT4577_82177C.1
gtcattttgcgaacaagccgcaccacccactggctgctgtaccaggagccccatccatgggcggttactagcacgatcagcgtcgtaagtcattcacagatatgactattactctttgcagggagtaccatgggtcccgactcaaaatcgatgcccttgatcaatataaggccggttgtcgaaaaga

SEQ ID NO: 165121 - DNA, 503 bp, Zea mays
  unsure (1)..(503): unsure at all n locations
  Clone ID: MRT4577_82178C.1
gcgggggggggggggtttttttttttttttttttttttttttttttttttttttttttttttttttttttttttttttttttttcggcccccaggggcccctataaaaaaaaatatgggggggaaagggacattccaatcttccaatggggggggtgttggggggttttcggaattacttgggggcccccccccgggggggggagggggggtcacactaagacccccccccggggggggggaatttgatccttgcccatggggcccagccgggggccttttaagatcgatcattttcgaatcaaggggccccgggccctcgcnnttgccctcggggacggggtcattggcggtttggttgtttgccatttgcccctgggggggggttgggcttttttgggtttcaggggctttgatctccctgggcgcggcttcctttgggcccgggttttttcccgggaaatcaaccctttggcttagggggggggttctaccagggggttt

SEQ ID NO: 165122 - DNA, 256 bp, Zea mays
  unsure (1)..(256): unsure at all n locations
  Clone ID: MRT4577_82179C.1
tgtctaccgacttgccctggggaggattgancgggaaaaaaatacaaatacgtacaaaacagcacaatgctaacagggcaagatttgtctaccgacttgccgttttatagctaatgatattggtagattctttcctggttcaataaactagcaaagtcaagttgctggggggggggggttttcaatanttgattgaacactcacaactggtacctgggtgcgagaaaaaaaaaaaacccccccccacaaaataaaa

SEQ ID NO: 165123 - DNA, 546 bp, Zea mays
  Clone ID: MRT4577_8217C.1
ggtaccctccgggtcggccggggtagcgggtatagtttagtggtaaaaaagtgcatatttaaaatctatgccaattaattattgctttttcttctctacgacattgcagctggtggaaagaactccgcgtcgaatcaaacttgagttttgtgagggatagaatagtagaggtgtacttttggatgagtgggggatgctatgatcctcaatattctcattctcgaattatacttacaaagattgttgctttcatcacgattctagatgatacccttgactcacatgctaattcttatgagagtatgcaacttgcagaagcagtcgaaaggtgggatgaaactgcagtctctctactcccagaatacatgaaggatttctacatgtatttgttgaagacattttcatcgtttgaaaatgagttaggaccagacaagagctaccgagtgttctacttaaaagaagcggtgaaggaattagttcgggaatataccaaggaaataaaatggcgtgatgaggattatgtccccaaaacattgaaagaacacc

SEQ ID NO: 165124 - DNA, 209 bp, Zea mays
  unsure (1)..(209): unsure at all n locations
  Clone ID: MRT4577_82180C.1
aaaaaagacctcacgaccgccagaaacacagccctgtgagtggcaagcactactgaccttcgacgctcccagcgctgngagcggctcaaggacgagcagccgttaccactcactctttccctcaacgtctcctccttatgtccttctctagggccccttcttactctgactcccacccccatggaagatagctagcccgcgcctccacc

SEQ ID NO: 165125 - DNA, 149 bp, Zea mays
  Clone ID: MRT4577_82181C.1
ctttttataccgcgtcgccggcccgacgcaaagcttctcctctttctgcgcctgccagtcgtcgctccttgatcagcgagtcccggagtggaagatcgggcctttttagctccttgtggtggttggtggttgtgtttggggagttgcac

SEQ ID NO: 165126 - DNA, 474 bp, Zea mays
  Clone ID: MRT4577_82182C.1
acccgtccgtctagccggctcaccatgcggcacggcgcgggggccattaggaccactaataggtcccttctcctgcggccctggaggcgcgctccttggctcggtgcacggacgacctgaacgcacccagtggggggtccagcatctgggaggggatgaaccaggagagctacgcgctgtacgcgcagaaggacgtccgggacgggggcaaggagcccctggacaagaagctgtcggaggcggagaagaagaaggtcacgtacgtggaggaccgcagcggcaagggggactacaccaacatcaccgatgagctggaggatatcccggcgagcaacaccaagcgcgtgatccaggatctgaaggccggctctcagctccgcgagaaggtgctactgaacatgagcaagccggtcatcacgtgccggacggaccccatgaagaccgccgtggtgggctggaaccacactgcggcca

SEQ ID NO: 165127 - DNA, 293 bp, Zea mays
  Clone ID: MRT4577_82183C.1
tccgcagaaagaacgttagcattcatgcataggtcagagggtgaaggtctgggtgttggtctactggcgacatcggcagacccatatgcctttgtatgctttccattccatctcttgcgcttgcccttcttgcaagaagcacccttttcgctttgaatcttccaaggccaccaaagctacccattcaaacttaaaggacctgcaccgagtttcaatagcttctttctttcctcacgtttctccatgtaagatgatacgctaacacccaatgctttgcctgctttggcgcagaa

SEQ ID NO: 165128 - DNA, 463 bp, Zea mays
  Clone ID: MRT4577_82184C.1
gccggccggttcgggactggcgaatcgagagggaggcaccacgcaccatcttacattgcctgccgtaagcagatcgactactcagctcaaggttgaaggcatggctgcatccaagttctacgtcgcgagctgcgccctcctcctaatcggcgtggtgctgctggggcagcagggtatagatggcgccgtcgctgcctgcccccagttctgcctcgacgtggactacgtgacctgcccgtcctccggctccgagaaactcccggcgagctgcaactgctgcatgacgcccaaaggctgcacgctccatctctccgatggcacgcagcagacctgcagctagctctgaaccaaagtgtgcgtgattcgatctgcgaataaagctttggcgcgtgtatatggctatccgaataaatgtgtgatcgtctatatagaaaagcaaaaaaaaaaaaaaaaaaggccccta

SEQ ID NO: 165129 - DNA, 645 bp, Zea mays
  Clone ID: MRT4577_82185C.1
ccggccgggtcggggcactggcgaatcgagagggaggcaccacgcaccacgcaccatcttacattgcctgccgtaagcagatcgactactcagctagctcaaggttgaaggcatggctgcatccaaattctacgtcgccagctgcgccctcctcctaatcggcgtggtgctgctggggcagcagggtatagatggcgccgtcgcctgcccccagttctgcctcgacgtggactacgtgacctgcccgtcctccggctccgagaaactcccggcgagctgcaactgctgcatgacgcccaaaggctgcacgctccatctctccgatggcacgcagcagacctgcagctagctctgaaccaaagtgtgcgtgattcgatctggacaaagaccaacctgctggttttcgcaaataaaactttcgcgcctgtatgtggccatccgaataaataaagtgtgcatgatcgtctatatagaaaagtgaaaaactagtcctttcttttttaaaaaaaaaaaaaaaaagtcctaaaaaaaaaaaaaaaaaaagcggccgcggccaaaatcgaaattcaaggacaggaccgaaggactacttcaagaaagtgaaagcggataagatccgatccaatcatccctgaagggccccta

SEQ ID NO: 165130 - DNA, 378 bp, Zea mays
  Clone ID: MRT4577_82186C.1
gcgaggggaacaagcacaccgcagtctcagtcctccggctctctttcctttcaagaactactcgaggtctaattgtcccagcctgccgcgcgcgctcggcacgccagaaggaaggacgtaccagaggcacacgatttcaaatggcggactgcatgcaggagtggccggagcccgtcgtccgcgtgcaggcgctcgccgagagcgggctgtccgtcatcccgagctgctacgtcaagccgccgtgcgaccgcccggccccggccccggcaccgatcatggcaccaccggcgccggcagtccatccgaggaagaaggagcccagctcggacgccttcgccagcattccggtcgtcgacctcggcgacctgctggccgcag

SEQ ID NO: 165131 - DNA, 521 bp, Zea mays
  Clone ID: MRT4577_82187C.1
tcgagttttttttttttttttttttttttttttttttttttttttttttttttttttttttttttttttttttttttaaaacagccccaggttgctccaaaaccaatttttgggaaggacgggttttttcaaaaaagcatacaaatttacccggggccccgttttttaaaacaacaatttttccaaaaaaattgaaggggttaaaaccccttcccgggggcaaaaaccgggataaagggcttaaaacggcccctccatttggaggaaaactttaaccccctttcctttggggccccccatgaggggaaacattgggccatggggctgtccctgaaaaaaaacgcgaaaagcttgttttcaatatccataagggaggggcccttggcagggattggaaagctaaacaaaaacttcctcagtttgacaggggagtttattagccggggatacattcttttccgacgggggatcgccccccaaaaccccccctttgggttcgccctaaaattggcggggaaccc

SEQ ID NO: 165132 - DNA, 442 bp, Zea mays
  Clone ID: MRT4577_82188C.1
ggctctggacctttgggctgctttatgtgcttggccgaggtctttaagattgattcagatccccggaaagcttccgcattggccgtcgcggtatagataaccggttacgccgtcgtgatagcgagtacgctcaacgcggtagcgctacctatatatacatccaacagcgtagaattcgtacctatcgccccggtgctaaagccttcttccggggagatgcccttagccttagctcactcacctctcctccataactaccggcggtcgcgtctcagtcgtcgctatagagtcgaatccctacacggccggacccacgggcgtcacgatgcttaattccgtacctgccccttgtaatactcctctgaagaggggtacgaacgggaagcttgctagcggtacgaaccatcacgtccgttcgctaacaacgctgacggctacatcg

SEQ ID NO: 165133 - DNA, 237 bp, Zea mays
  Clone ID: MRT4577_82189C.1
ggacgcccgggcgaactccagagtggcctgggttatttaggcatggtgtctcaaagcctcgagaccgcctttggcgtcgtggggagcttgcccgatgctgctggttctttcagtgacgagtacaacagcaacaggtcaagtgcagacttcatgtccagcaacagcaacagactggagcagcgggtgggcggtagcagcagtggaagaggagctgccacgaggaggaaatcagatgga

SEQ ID NO: 165134 - DNA, 909 bp, Zea mays
  unsure (1)..(909): unsure at all n locations
  Clone ID: MRT4577_8218C.1
ccnggccgggagtcaataagccgaccntctttcgcaacaacacaatttnttgggacatgaatgacatccatttatagtcttttcatgccattccggccggggtttatctcaaggtcattcgaaattcgaaaggaccaagcaatgttccgatacattgttgctctgattcttgtcgccattttggtggtgtctatgaacaagtctattgatgcccgcatggtccaccccattgtcacccctgaggccatcagcccctctcccgcctacaacgatggtcgtcgcctgatcggcaccaccggccacgatgaactcgtagcgttatgccaacagatgcactacaagacattatgcaccacgatgacgacgctgcccggggtgatgacaccagagcagttattggacgcatccctgcggattacagcggtgaaggcggcgatgacggagatgaagctagaccgggcaataaagtcgagcggtgcccagggtaacgcgatgatgtcatcgcttgagacgtgcaaggagagctatgcgtcgctggtggactccatcaataccacgcggaacacgctcaagagcggcggtagcaatgcagacatcatgtcggagctatccgcggcggccaccttctccactgactgcgaggacaccttcgatgagcggccagagctcaaatcgcccatacccggggcgcagcgccacattagccgcctcgtcagcaactgcctcgacctagcagccaccatcacggaccagccctagacgcctatgcgtgcattgatgcggtgcaaacatggtacatacatgtatgtttaattaatttatgtttatctttgntgggttcattgctctattgtacatttgccattgggggtctacaatgcgtttataataggcttatattttatgtta

SEQ ID NO: 165135 - DNA, 675 bp, Zea mays
  unsure (1)..(675): unsure at all n locations
  Clone ID: MRT4577_82190C.1
aattcggcacgagngcggatatatatatatatatatatatatatatatatatagatactgtagagatacagagcgatagcgcctgttatatagctggcgcttgcgcttgcattgtactagtcagaatccgtgcacgcacacgccctgactttgactttgtggtgtcgtactatcacagacacgcacccacacacatagatatacatatatatatatggataacaatatatatatatatatatgttgctctttgatgttcacaaaagagagatagataaagataatgaaaacaaatactcacacacgcgcgcgaataagaagaggaagatacactttctactattaataattatttggggtatataacttaacagaatatcccaccctcaccgaccctaacagtggaagtctctctttttctttttctgtatatatatatggacatacatagaactacatacatctggatattgatgtgcacaaaaacagaccaaggccgacacgtactggtatgtacatatatggatatagatatatacatttctggatcaatatagggcaaccatcgtgtatctaaatctgactctgtctcaccctcacgagcatgagaatgttgcatatacacacacacacagacactgacgctcacctcaaaatgtgtaaatatgtatatgt

SEQ ID NO: 165136 - DNA, 478 bp, Zea mays
  Clone ID: MRT4577_82191C.1
gccaacgactcgagacagcgcaaggtgagacgctggcggcgcgggaggcgaagaagcgactgtgcgcagcctcgacggcgaccctccccaccaccttctcaccattgctgagcactggagacgccaccaaataacctctggagaccctcacctcggcggcggctacagatgctgcgacgagacacggctggcggtggggggagtggaggaccatagcgactagcagcggtgttccaaaaatctgcgtctgtgtccccggtcaggaatagaaacaggtctgttttcaaacccaaacagacgaacgggcccttagcttcttcatcgccatcggctcctctgctgtcgtgaagcaccagttgcaagcaacgatcgcagtcaggcgtgggggtggcagtgccggcacagtgttcaagggctgctgtcgacaagagcatctcaacggtcgactacacagctgccaacaaacacgtcactcgga

SEQ ID NO: 165137 - DNA, 192 bp, Zea mays
  Clone ID: MRT4577_82192C.1
cttattaccggaaaatttatactgttaagtttataatggaacatctgaacagttgttcttttacacggtcagcatagaatttagatgccgttgaacccatttgctcggtcatggtttgagtacggcatgggtcatctgggagggagcacttctatgttaattattacattgttgttatcagtggattttgtt

SEQ ID NO: 165138 - DNA, 285 bp, Zea mays
  Clone ID: MRT4577_82193C.1
ctatggcgctcttttttttgtttttttttggcgccacaaaccctgacaaaaagaaggggatggctgccttaccatcttctgctccaagccagtggttgtcacgaacatggaggccgcctgggtcgttaagtttctgcaggagcgcatcacggcccccttcgggggggctgttgaactaggcgggtccggggccatatatcgcgagaagaccaatgtcaccgttacctgtgacgggcccttattcttttggtccccgcagttcttgaccaagatgtacttgaagaa

SEQ ID NO: 165139 - DNA, 330 bp, Zea mays
  unsure (1)..(330): unsure at all n locations
  Clone ID: MRT4577_82194C.1
ggaggccacattccctgcagtcaccactcccaagccatcacccacagtcctacgagcagtcgcacgcaagtgtcaagagacgaaacggtcgacatggctcgcacgcaatctgccgtagcggtcgccgtggtggccgcggtgctgctgctggcagcggcggcgacgacctcggaggccgccatcacctgcgggcaggtgagctccgccgttgggggggggctctcctacncccgcgtcacggggtccgacccctccgtgtcctgctgtctcggggtctggaacctccggtgcgctgtgctgactcgcccaggtccggtggcgctgcctgct

SEQ ID NO: 165140 - DNA, 1051 bp, Zea mays
  Clone ID: MRT4577_82195C.1
ggacagtcattgattgtgaatatggagcgaagtacaagaagaagcatggttttcaacagcaaaggatttctctgaggatgtgatggttgcgtatgattttgacaaggttccagcattggtttctgttaacccaaaatataaggagcagagtgtattctatggtccgtttgaaggaacttttctgcaagattttataaggcaatccctactgcctgcaactgtgcccatcgatagagagacagcgaagctattgaaagatgatgggaggaaagttgttcttacaatcttggaggatgaatcagatgaaagctctccgcagctaataaaagtgttgaggtctgccgccaatgcaaaccatgatttagtgttcggatatgtgggagtcaaacagtgggaggagttcaccgagacttttgatgtgaaggtttcgcagctgccaaagattgttgtctgggacacaaaagaggagtacgaagtggttgagggttcagagagtctcagggaaggtgactatggatcccaagtcagtcgttttctagagggatatagggaaggaagaccaccaaagaagaaagtgggccgtggttccccaacactgctcggccttaacgcggtatacatcctcgtcctgttggtcgccgttctcgttgttttgatgtatttttccgcgcaaggcgaggaggatcatcagccaagaagagcccatgaggactgacagcaaatctgagatggcttagattcaaggcgttgatccggaggctgccgagttatttttgaaggggggtaacatataacatctgatggacaaattttcctgatcttcatttcacgtgccctagggtcgagttttagatatttgttgcagagctatgcatgagctcccctgtgtttctcttgaacccttgaagtttttggacttgttacttgaggaccgggtttcctcaggtttatgtcattgtaattattcggcactttgtaacatagcattcatgtgttatatttgagacccttggagaaacgacttctatagattgaacagcttatatctggg

SEQ ID NO: 165141 - DNA, 182 bp, Zea mays
  Clone ID: MRT4577_82196C.1
aattcccggacccacgcgtcttctagccgggggccgccctcatctttttgggggaacttgtgcagaggaagcctgcacctcaggaggacatcagaggccggtgcccatctaatgataacgacgcggcttgcctgcgccccgaccacggagcacacactacaggcaccaggcaaggcacatgc

SEQ ID NO: 165142 - DNA, 388 bp, Zea mays
  Clone ID: MRT4577_82197C.1
acacgcatcacatgtagatgtagctagcttagctatgctcgcgtaaaaaccctagcggcagtcacacagcaagttgcatgtgtctcgggggcaacaagcaggcggccgaggcagcaggccgcatggagaaccaccggcgccattcgggctctccggcgagcagcaggcggcggcggctgcactacctcctcgccctggctgccgactacctcaggtacctcttcatgaagcggcgccggctcctgcacaaggtggcgcggagaacgctcgcgctcgtccaccgccacggcctgccgcagcgcggcggcaggaaccacgaccagtggcagtggcctcatcgcgcgctggcggagcacgagttctcgtgcgccgacagccccagccccgc

SEQ ID NO: 165143 - DNA, 123 bp, Zea mays
  Clone ID: MRT4577_82198C.1
ggagattgatctgtttaagtgcattacttcagcatttagtagtgcggtgtccttcactagcaacgaatggtacacatagactgttggagtattaatcgggacaatgctaattacgctcagacg

SEQ ID NO: 165144 - DNA, 727 bp, Zea mays
  Clone ID: MRT4577_82199C.1
aattcggcacgaggatcagcacctgggcttgtcataaccgccgcgccgcgccgactagtcggtggccgtagcgcacctgtaccgcccgcaccgcgcggtcgaacacctcgcgcgcatccatggccaccacccacctcctcactccaccccgcgtccaccacccttccccctccgcttcctcctctgtggctcgcgtccgcgccaccgcctcgctcgcgctcgtcgagctcgtcgccccgcccgaccgcctcccggcgctgcgcgcggaggcggaggcgctcccgcgggtgcgcctcgcccccgtcgacctccagtgggcgcacgtgctcgccgaggggtgggccagcccgctccgcgggttcatgcgcgagcacgagtacctgcagagcctccacttcaactgcgttcgcctccccgacgggggcctcgtcaacatgtcgctccccattgtgctcgccatcggggacgccgacaaggagcagatcgggggtaagccggacgtcgcgttacaagggcccgacggcggtgtcgtcgccatcctgcgcagagttgaaatatatccccacaataaagaagaaagaatcgcaagaacatggggtacaactgcacctggtttaccctatgttgatgaggctattgcgtcagctgggaactggctgatcggtggcgatctggaggtgttggaacccatcaaatacaatgatggtgcttgatcactacagacttt

SEQ ID NO: 165145 - DNA, 480 bp, Zea mays
  Clone ID: MRT4577_8219C.1
gggaataaaccggcacccaattcccttgggtaaaaacaaacttaaccaaataaagcggggggggccccaggcgggggcgaagggccatttaggaaatttgaaaccccagcggacccaacacaaaaaatggggggaaaaaaaggccgacccctcgctgggtgatcgacccggccgggggtaccctcttcctcccccggggggcccttttaaggtggggaccgcaaagcaagccacctcccttcagggggaactttcttaaaaccaccgaagaacggggggggggcccaccccaaaacccatgttcacgggtaaatgggcccctgggccgggggctgccacctaggccaaaacaaaccgggcagggggagcccgggggggggtttttgccccaggggagggggggctggggcccccgaggcagggtgagggtgatttttaggacccctaccttggtgggggggcaaagggaaaagggcggct

SEQ ID NO: 165146 - DNA, 343 bp, Zea mays
  unsure (1)..(343): unsure at all n locations
  Clone ID: MRT4577_821C.1
tgcgtagcttgttcagtttttgctgggcgcggcacgactcttctcaagcagggacggggggcgtgcggatggttggcttcatgccgtcgagttctgctcggtgagcgttatcggtgtgtgcctcgcctgccttgtgagacgcgcactggtctctacaggatacgtagagtccggccctacgtgactccggtgagtccacgtgtcggtaagggtctgtcgcgtgtacggtgatcaaaccgttcgccggcgttttacagtgctgctgtactccccaagcatcgtcttatctggcggcagtgcgcttggcccctncgctgttttcctcgtcacatctctggggttg

SEQ ID NO: 165147 - DNA, 2093 bp, Zea mays
  Clone ID: MRT4577_82200C.1
cggaataaaaaagaaacactcgtaattcggcacgaggcaaatcagcacctgggcttgtcatcaaccgccgcgccgcgccgactagtcggtggccgtagcgcacctgtaccgcccgcaccgcgcggtcgaacacctcgcgcgcatccatggccaccacccacctcctcactccaccccgcgtccaccacccttccccctccgcttcctcctctgtggctcgcgtccgcgccaccgcctcgctcgcgcacccgctccacctctgccgcctccgcctcgccgccccgcgctcgcgctccccctccccgcggcacgggcggcgcgccatgtcggtccgcagctccctcatcgacccggacggcggcgcgctcgtcgagctcgtcgccccgcccgaccgcctcccggcgctgcgcgcggaggcggaggcgctcccgcgggtgcgcctcgcccccgtcgacctccagtgggcgcacgtgctcgccgaggggtgggccagcccgctccgcgggttcatgcgcgagcacgagtacctgcagagcctccacttcaactgcgttcgcctccccgacgggggcctcgtcaacatgtcgctccccatcgtgctcgccatcggggacgccgacaaggagcagatcgggggtaagccggacgtcgcgttacaagggcccgacggcggtgtcgtcgccatcctgcgcagagttgaaatatatccccacaataaagaagaaagaatcgcaagaacatggggtacaactgcacctggtttaccctatgttgatgaggctattgcgtcagctgggaactggctgatcggtggcgatctggaggtgttggaacccatcaaatacaatgatggtcttgatcactacagactttcacctcggcaacttaggaaggagtttgacaagcggggggctgatgctgtgtttgccttccagttgagaaacccagtacacaatggtcatgcactattgatgaatgacactagaaggcgtctcttggaaatgggttacaagaatcccattctactactacatcccttaggtggttataccaaagcggatgatgtcccactgccagttagaatggaacaacacagtaaggttttagaagatggagtgcttgatcctgagactactatagtgtctatatttccctcaccaatgcattatgctggtccaacagaagtgcagtggcatgcaaaggcacgaattaatgctggtgccaatttctatatagtaggccgagatcctgctggaatgggacatccaacagaaaagagggacttgtacaacccagatcacgggaagaaggtcctgagcatggctcctggtttagagaaaactcaaacatactgcccttcaaggtagcagcttatgatccagtagcaaaggagatggccttttttgatccttcacgcagtcaagattttctgttcatctctggaaccaagatgcgcacttatgccaaaactggagagaatcctccagacggtttcatgtgcccgggtgggtggaaggttcttgttgactactacaacagcctgcaagctgaagaagcgactccagtccctgtatgaggcaagctactatttgactaagagattattcaatggcggggaaacatacaagcaagtgatcagatcatttgagcttttttccttattgattctttaggttagtagttgattgatatatgatcagatcttttcgattgtttgtttgtcttaaatatgagactctgaagcatggaaaaactaaagatctgcccaagttgagccaaaacagcatggccattgttttgtagcgaagccggttgaactatataataaaagatgaaagggggcatattttcttgttgctgtagtagatcatctatgttcccaaaacatttgttttttttttgccctacgactgagtgaaaggaccctacatttatgattcctttgagccctttcaaccaagtgtttttagtgaaattcatcagaggttgttaaagctgtctttacatgttatataggttcccaaatttcaaaacgtaaaaaaaaaaaaaaaaaaaaaaaaaaaaaaaaaaacccgagggggggggccggtacc

SEQ ID NO: 165148 - DNA, 389 bp, Zea mays
  Clone ID: MRT4577_82201C.1
ggtgggtccaaaattataacctttttgtttttgctccgaacaaagcccaacagaaccaaaacttaacgagatcagaacaggacggcagaacaaaaaggaaaacccaaaaaggcaaccgggaccaaaaccagcagggacccaacggccaggggccccgcccacattattccacaacaacgacccgcctgaaaaatggggtgggaccaaagggcaaaggggacgaccctccatggggaggcagaaatatctctctacggggccttgaacatggggaggagcacgtcagccaccgggaagcgggagccccacttgaagccgcaccacgaggcgagctcgacgaagggggcgcccagggcaatcccggccttggggtttaaaaaggtcgacct

SEQ ID NO: 165149 - DNA, 410 bp, Zea mays
  unsure (1)..(410): unsure at all n locations
  Clone ID: MRT4577_82202C.1
aacggccgcccttttttttttttttttttttttttttttttttttttttttttttttttttttttttttttttttttttttttttttttgggaaaaaaaaaaaaaaacgggaaccattataaaataccgggggttttaaaaacccttattccaaaaggccacaagggggggggggcacttattccaaaaggccccgggcgggaaccacttacgggggggtccaacatgctttaaaaaaaaaaaactttgcaacaacatccccaaaaaacaaacaaacaaaaaaaatgggatctaagctggcttgaaactggggaaaaacccttccaggccggccttgcacttttccattgcccctttngncttgtttccaaggggggccccaaacccaaatacccttccctctctttggg

SEQ ID NO: 165150 - DNA, 365 bp, Zea mays
  Clone ID: MRT4577_82203C.1
aaaaaaaaaaaaaataaaaataaataaaataaataaaaaaaaaaaaattaaaaatgggggaaataaatattagatgaaaaaattaaataaataagaaaatttaaatgctaaaaaatggaggatatgtttataggttccacatttaccaaagtatgctttggaagtgtatttcattcatgttgcatgttaaattatacacaatgctatcttgtttaatacattctgacttgaaaatccttattgtgaattatttaattgtgcttactgcattttctattttagacagttaagcaagataagaatagtatttcgagaatatgacattatatgaatttagcatgatcattgcattaagggatcgctct

SEQ ID NO: 165151 - DNA, 399 bp, Zea mays
  Clone ID: MRT4577_82204C.1
taataattctggcaacatgatccacagccgaccgggcagttgttagattggcagcaacatgtacagaagcagcggtcggacaagactcttcatgatgaagatcatgcagcggctagacaggaaacagtctgctgtgtaccataacatacaaggagagcaacaatacgcggtgacgcgatattggggggaagctaaaccgaacgagattgactcgaggcatcttgaatgaaattaggacggaggacggcaatctccttggctttgccaccaatattgtgctaaacaccatggattggttgtgatccagtgcttccgtttctgtgagcggtgatacaagctgtagtaataacttatttaacggcgataagcgtggcaaaaacgcagagtggatcaatgcta

SEQ ID NO: 165152 - DNA, 362 bp, Zea mays
  Clone ID: MRT4577_82205C.1
ctgaaacacaccaagcgaatctcattttcttcatcctttcaacaatgggtaccaagatattatccctccttgcgcttcttgcgctttttgcgtgcgctactaatgcgttcattattccacaatgctcacttgctccatgttccattattacacagtttcttccaccagttacttcaatgggcttcgaacacccatctgtgcatgcctataagcttcatcaagcaattgcggcgagcgtctttaaacatccaatttcccaactgctacaacaatcgctggcacatcttacaattcataccatcgctacgcatctgctacaacaattcctaccatcactgagccacctagccatggtgaaccct

SEQ ID NO: 165153 - DNA, 248 bp, Zea mays
  Clone ID: MRT4577_82206C.1
ggcctacctccttccttactagagaacgttttgaaggtgaagcatccatgaatgtacatccatggtagccaaggacgtctaattcactaatcctgattcaaaaattggtgtgagcttgcggcataactaggctctgctattacaaggactgacccaaaagcgactctgacttgaaaatccaaaaattcatggcaaggaacaactcctctaattaaaaaacagggcacctcggcgtgttagggaatttc

SEQ ID NO: 165154 - DNA, 350 bp, Zea mays
  Clone ID: MRT4577_82207C.1
gggaaattaaatttttattttttggggggcgcgttccttagccaaaaaaatcatttttggatttcaacttataagcaatttaaaaaaggggacccccaaaaatttgttgttgggagaagggtgctgggtttgtcaaaacaaggtgggcaaagggcgcaattggtgcagttgtaaaagggggccaaggtttggggcaacgtgctggttgaacgggaacaactgggggtgtgtcaaaaagggggcaggggttacaccaactagctgggtgaatgggggtagttggtgctgctggtaataagccggaaagttcaatgctgctagttgggtgaaaggaaaaaactgtttttgct

SEQ ID NO: 165155 - DNA, 434 bp, Zea mays
  Clone ID: MRT4577_82208C.1
gccggccgggaaagcctaatatcgctgcaacggcggcgccgccgataaaacggccagccgggcagcggagacgcggagtggggcacgacggcgcgtaacctgtggggtttcaggttttatccctgcgtggcggcgaccctccctcttctctccttcatgaataacaccctcctgcctctgatcagatttctacttgaagttatgcactcccacctctctaacatatactagcccacatttaatgatacgattgcaatagcgcaataactaaagaatactaacaccctctttatctttaatttgagactcactacatatcctcaaatctctttgtctctggctccacaactataacctcttgtctcaaaccaatttctatcccaaatctctctttctctctaaagagaatgctactaactactgatattgctata

SEQ ID NO: 165156 - DNA, 318 bp, Zea mays
  Clone ID: MRT4577_82209C.1
gttgccataggggggaaattccggggtatcccccccagccgcggagttttaagagcggaaacttaaaaaagaattgacaaccttgtaattacaaacagacggaaacaaggtgccgttttgataattcgcgcacatgccctttctggacaagaaaaaccctttgtctgaaactacccttatccttttggggctggggaccaccggttaaatactttagtttgccccccacgtcccggggggccagaccaataaaatggtggctgggatcaaaggacaccttgttgaaagaaggaaccatggcgggggaaacccccctgg

SEQ ID NO: 165157 - DNA, 673 bp, Zea mays
  Clone ID: MRT4577_8220C.1
cctcgaggccggccgggagtcccgctccagatcgcgccccgaaaccgtcgcccccggcctcccctcgcctcactcgattctggctggccacaaactccgccccctgcccctaccccgattatgccgccgtcgtccgatcccacccgcaaacgctgctccccgcctcgaggctcgtcggaacggacgcctggatgtcgcggctgcaacccaccgccgcgcagggaggctccgccaccagcaactcagaggatgcgcggaggccggagggcatgggagatccgccacctcctcctcggcccacgacaaaaatggcgtgggagatccgccacctcacctcctcccattcccgcgcccgcgcccgcgcctgatatggaaggtccgccgaagggactcggacgtcgaggccatggctgagccgcaccacttctccccctgcctcgcgcgcggcggccgagatggtgatggctgggttgttcgggatggtggtcctacctgccctccctgctatcctcgccccaaatcgacgagaatcatgcagcccaaatctaaggtggaggcgcctgcactgtcgatggaggtgtcgagtctgcgatggtgtctgtagatgggaaagcatggtgtgcagcggcagcggccaggtggtgtcgctgaggctgcccctctacagggtcac

SEQ ID NO: 165158 - DNA, 3138 bp, Zea mays
  unsure (1)..(3138): unsure at all n locations
  Clone ID: MRT4577_82210C.1
aattcggcacgaggtggattctgagattgttactgtggatccagaaccagatcgagctaaccagaattttacagatacaaattaccaaaattatggcaccacagatatttcatctgaaagacatgaggtttcattgatcccttctgcacaggatgcagttcaagagaaaatagttatcctcagcagttctgaggctgtggagggctcactagatgcagttccagagaaagtagtcattctcagcagttctgagactgtggatagctcatatgctgtgtcctgtattttggatgacacagttcatgatgcttctgatatctcacaggctgacggtgtacaacatgaggagcactctagtatctctgatgggagtacagaaaagctaatttctgaggaaagttcattagtatgctatggtgttcccagcaacaaaaaagacttggttaatatagctgttcaagaaagtaaagcctttatcttaaaaaatcctgcctcccaaatcttggaagagagtggtccaggtttggatgtatctacagacagtgtttccctttcacatgcagactcagctcctgatttagcttgtcagcatgtttctcctaatgttgaagatacaacaagttatgagcctggcattggtcctgaagatgtaacaaaaaactcagttgtggaaaatggagcatgcagcggggaacttgttgtttctgttattcagacctcagcgggagatggactgacaaaatgcattgctcatccagctgttttttctaataaaatagaagtagaaggctcaccaacttctgctggattttccagtttgatcagtgttgaagtgcaaaacacaaaactagaagatgacacaaacaaatctagttctgtgattggagatgaagctggttttgtgcctgaggctacagctgagcttgatgaagaagcagaaccagttatatcattatctgaatatacagaagaaattcagtttcaatttagtgatgctgaaaattttgcagatagaaaggccacggatgacatggtggctaacaaaacaacaggtgaagtagaacatgatgaatctgattgtgacacagagaaacaggaagaaggtgatgtaggtcttgtaaatgacttggagaactgttctgcgtcattaaagcctgtgagtagccctgtttctattcctgcaattgacttccagtcaggaaatagtaacagagaggctaaatctctaccaaatctccgttctcatatacatgatcttgaaaggtcttatagttttcagctaagccgctcactgcaatcaactgctgaaaataatggaattgatctagtcaagagcatgaattatgcttttcttgagcagaaatcagaagctattggtgatttttcagaagaaaataacagccctcctgaggttaccaacactgtagcacttgatggcaaccatgctgatgatctgaaagttgatgcgttcattccttttgcagaattatcactatgcagacacctgttatctgaaggcatgggggaggatgctgcttgcagtgcatttgattctgagaaggtaaccttagaggagttccgtaacatgaagcaatcactgatgcgaaacaacaaactagttgttaggattgctggccgctactttccctgggatgctgctgcacctatagtactcggtatgatttctttcagtgaggaacaagtttttgaacccaaaggaatgataaatgtggagcgagttgagcaaagtgcagctccaggtggcagctggagcatctggccatttagtttcagacgaacaaggactattactgctatccagccagtttgtgaaagtattgttgagacttctgtatccactcctaaagaattgacacattttaaagaactagatagagaaaggaataaatccagggtaaagaggattgagaggaaggtgcgatcactcactccaacatctgacgagcttgcatctcttgatctcagagagggcaggaacgtggtaacatttacgttctcaactgcaattgttgggaaacagcaggttgattgccacatatatttatggagatggaatacacgcattgtaatatctgatgtggatggaactatcaccaagtctgatgttcttgggcagttcatgccactagttggagttgattggtcccaaaacggagttgctcatttattttctgcaataaaggaaaatggataccagcttctatttctgagtgcacgcgctatttcacaagcccacatcacaagacagtttcttttcaacctaaagcaggacggcaaagcacttcctgatggccctgttgttatatctccagatggtctcttcccgtcactttacagagaagtcatcagaagagctccgcatgaattcaagatttcgtgtctagaggccatcaaagatttatttccacacgactcaaatccgttttatgctggatttggaaatagagacacagacgagcttagctacctcaaggttggtattcctatgggcaagatcttcataataaaccccaagggtgaagtcgcagtgaaccgacgggtcgatacaaagtcgtacacatccttgcatgctcttgtccacgggatgttccctccaatattgtcgtcatctgagcaggccagcattcccgaggactacaatgcttggaattactggaagatgccattgcctgatgttgatttgtgaggtacaagtcgagtctgcacaacagcactgcactaattttatgatgtgccgtagtgatcatgagaaggtaaccacggtgaaggggccattacttggttggctacatgtggatgctcctgctcctgatataagttcctgcaagatggaattttgtatatataggatcataatagatgtagtagctatttcttgtgtctcctgttgttgttgttgttgtcgtcgtaggactggaaatcatacctccgtgtgtcctgtaactgaaggtacaaaatttactggatggagggatctgatagtatgttgcagccccccctttttcgtttcatccttgatgtaattgtggtaccgatgtattttgtacaagaacaaatcaataataatgcaatcgaaagcgagctgttcatacgcagaaaaaaaaannnnnnnnnaag

SEQ ID NO: 165159 - DNA, 631 bp, Zea mays
  Clone ID: MRT4577_82211C.1
tttttttttcttttttttttttttttttttttttttttttttttttttttttttttttttttttttttttttttttttttttttcaaagaaaaattgggaaaaaacaattctggagccggtttggcctttacctgcaaaaaaaaaaaaccaaaaagggggggaaagccctccccaccagggttttcaaccccccccaacttagggggccccaaggggggccccccttttttttttttaaaagggagcctttttttgccccccaaagaggggcgggttttttaaaatttcccaccggggggccgggtccccaaacctttcgttttgggggttttggaccccattcccaaagttttgggggggccccccccctttttttttggcccccccccccccggcccttggggcccaccgttcccaaaaaagcggcccttgggggccccggttttgaaaccaggggggccccccccccccccctaatttccaagggccccccggggaaaaaaaccccccttttcccgttaggtcgccccttaagaaccggtggacccccccccggccaagcccccgtcccccggggaaaggttttttcccgccccctttccccaactctttttttgggggggggggggg

SEQ ID NO: 165160 - DNA, 288 bp, Zea mays
  unsure (1)..(288): unsure at all n locations
  Clone ID: MRT4577_82212C.1
cgtgttgagccgttganggcatgcaggccatccccctctcgcaagctcggcatcgagctgagccagactccggcgatctcccctaccccatggccgccgccggcgaggcccccagcacgctcttccgctccctttacttcgtcggcgcgcggagaaatctgcaccaaggccatcaacacctatcgctactaccagcacaagatgtagtccaccgccgccctcgccgccgccgaatcggcagagtctgctgccgcggcggccgagcccgctcctgcaaaccgccgcgcg

SEQ ID NO: 165161 - DNA, 257 bp, Zea mays
  unsure (1)..(257): unsure at all n locations
  Clone ID: MRT4577_82213C.1
cggccaaaaaaaaaaaaaaaaaaaaaactttaggaattggaggtttgaccctttcgtgccttgcgtccgcgtctggtcgcgcgctgctgcccgccaaccgcctctcccaatcccatccaaatcctccgcgtcttttcgagatttattcttgggagggggaccgcccccggatcggggaggaatcccattccgcntggtgggtcggctcccctgtccggttttggctcttttcccctctcacagggcggctcttggat

SEQ ID NO: 165162 - DNA, 519 bp, Zea mays
  Clone ID: MRT4577_82214C.1
caacagtagcatatgaatacaattcaactatactgggaatatttcagaagtttcaatccaaaggcaaaacggggggaaaaagaaataaagatatctgactacctgactagtaaaagataacagatcagcacataataatgctggctgctgccaaaccaaattatacccaatcactaagccggaatggaatgggtatgcagatgcttaggcgattgccaaaaccttgcattatccttctttatgttcatcttgtagggagcaacatccagcctctgatcaaacacactcatccaggatcagacatgcttgtaggtaacaacagatccagaggaaagtggtcctgatgtccacagtgactctcccaaccttaagccagaagccttgtcgaacttgaggggcttaaccacctcccatgagaagtcattgttgtcacggtcgaagcggtcacaggcgtgagtcatgatgaacctgttggcgcccttcttcatgtccaggttgatgctgatcatcccggacctg

SEQ ID NO: 165163 - DNA, 711 bp, Zea mays
  Clone ID: MRT4577_82215C.1
ccatcccaattcccaagtagtggcaagttcacgtatataaaacttgatgacagatggcacagccacttagttgcaaggaatctcccagctattataatataatcaaggccatctcttccaccatgatcagttctctaaaattcatcatcactgctgtgttcattatacacgtcccaataatactctgcttcgtccgagctatatggaagggtcagtttcttcactttcgcacattttgcatatagctctgcatccattataccatcaaaacaacctgtaatgtagagatcttcgagtacagggcaggaatcaagtatgtttgtcaatccttcaacagtaaggtaataggacaacaattctaaggagcgtagctcagacattcttgtgaatgtacctataatctctttcctcatccagtcatcaccataataatattcaacagcgcagaacctgattctaagtttcctgagaagggggcaagcttggcacacagattccaagaaattatcggtgctacatttaagcaacaatggagatacttcaagatcctcgaggacagggagtttgttgagcactgcaacaaacacttggctgccatcgaaagttgagagatggaggcttttcaaacagggtgctcttcccacaagatagagcagcatctcactgtcgcaggatccccataaggcttcgcactgccccgcgctacgatcc

SEQ ID NO: 165164 - DNA, 508 bp, Zea mays
  Clone ID: MRT4577_82216C.1
gggggaaaaaaaaaggggttaacggggggggcgggaaaaacctgggttaattataaccgggggtatttccccccattgggggggggccccaaccaaaaccttttggggttttttttttggttgggggggccccattggggggcgggttttatgggcctttccccccccctttggaaaaggccgggcgggcccctttggaaaaatcccccatgggtgaactttttggaaaaacccaacccccagaagtttttttttttttggccgaaccgaaaaataaccccagggggaaaaaaaagcccccgtttccttggggggggaactctcccgggtgggaccaaacgggttgggtccccggtttcctttttttaattaattggaaaccgggggccctccgccgccggagctcaccaggtggacccgccttggctcaggggggtttttgtttccccggacgaggtggggcaggactttttttattgcgggttcgcccgggggttttttcccgggc

SEQ ID NO: 165165 - DNA, 413 bp, Zea mays
  Clone ID: MRT4577_82217C.1
gcacgagatattattccgacgtaaggcgagaaaacagctactaaatggaaacagtctagagagatctaaatgtcggtacaagcttgtcaagtgatgcgcataccaatgcgtgctgtagtagcgtcacctgtgcgaacgtacaacgtatctgataagcgagtttgtttaggtcacttatcggaccaggggcgtcgtaacacatcaggcaaggggatgacgcgtgcgagggctcggcgtcggcgaactgtggtacgtcagaacatatgtctctgagagcacatgtgagatccatggtatcatggcagatgcataggcgtagatgagtattcagagcatagcaggacatggaggcacagccatcgacaaaaagtggaaaagagaagtgagacgtcgtatatgaactgtcgacgact

SEQ ID NO: 165166 - DNA, 719 bp, Zea mays
  Clone ID: MRT4577_82218C.1
tttactgactaatgtagcttcatgtattaatttcaggaggctgtttatattaaaagcactgacagggacagtggatattatggagtatctgccaccctggatgtctatggatacaatctcaaagatggccaagtgagcggggcagcaatttcgataagtaacttcgaggctgattttagcaagaacgtcagtgcaattactgttggatgggtggtgtggccgtcttactttaatgactcgcaaacttacctttatacggcttggacgaaagacagccggcagagcacagggtgtgtcaactatgattgtcctggtatccagcttgtgagcgggtctccaatattccccggggatgtcatagccccagtatcccaggctaatgggacacggcaaactatcaccattaagctgttcaggaccaagttgaacgggaactggtggttgcacgctggtgtaaacgacgaggacccgatcccggtcgcctacttcccggcgtcactattcgacgactttttctacaaagcaactcaagtcgtgttgggtggccatgctctcaagtctaaaactaccacacctcctccgatgggcagtggagccttcggctctgattggggcaatgcggcgaagatccgagacattcatgtcatcatggaggacgggaggagcaactttatcgatgatgatctgtccaccgatgtcactgacatcaagctttactc

SEQ ID NO: 165167 - DNA, 273 bp, Zea mays
  Clone ID: MRT4577_82219C.1
cggccaacgccccaggtgctgcgcactagcatacaaccggattcagttgcgaggagggggtaaccttcgctcatcagaacgcgggtgctcaacttggacgtatcgaccccctaccacccccagactgacctggactctaccctaactaggcacctagtcgcgtgtgcctttccgggaattactgggcatgcgcgtggtttgtaggcggtgcttatggcgtttgggggtgctatgttatttatatgcgaattgctgtgaaagaaggctgtcact

SEQ ID NO: 165168 - DNA, 301 bp, Zea mays
  Clone ID: MRT4577_8221C.1
ctagcagactagcaaccagcgagctcgggcggcagcattcagccctcatgtgggaggagaagcaccaccacttcttcaatcagcacaagaaggaggaggaggagcccgccgtggcaggacgggtactccgcgaccgaggtggtgaccgccaccggtgcaggggcagacgacaggcacaagaccgcagagaacgaccacaagcgcaagcaccacctcggcgagggcgaagccatcgccgacggggccttcgcagtccacgacaggcgcgagggggacaaggaccccgaggacgcgaacagga

SEQ ID NO: 165169 - DNA, 658 bp, Zea mays
  Clone ID: MRT4577_82220C.1
ggggtaccctcgggttcggccgggctcgtcgtcaaaaaatccccattcgttccccttctcgcctccacgagccttcacaaattgccctctcagatcttctcctaatcttactcaagccctagccaaatcccagacccatcccagccctagcgacaccaaccagctcgccagcgaccatggggaacccggagaagctgatgaatcagatcttcgacctcaagttcacctccaagtcgctgcagcggcaggcgcgcaagtgcgagaaggaggagaaggagcagaagctcaaggtcaagaaggcgatcgagaagggcaacatggacggcgcccgcatctacgccgagaacgccatccgcaagcgcaccgagcacatgaactacctcatcggcaagtccatgcagtccatcgtcaagtcgctcgactccgcgctcgccaccgggaacctccagaagatgtccgagaccatggacaatttcgagcgccagttcgtcaacatggaggtccaggccgagttcatggagggcgccatggccggctccacctccctctccacgcccgagaccgaggtcaacagccctcatgcagcaagtcgcggacgactaccggctcgaggtctccgtcggtctgccgcaggcagccgcgcacgccatccttgccg

SEQ ID NO: 165170 - DNA, 1541 bp, Zea mays
  unsure (1)..(1541): unsure at all n locations
  Clone ID: MRT4577_82221C.1
cattgggtacctcgaggccggccgggcccgaaccttcacaattgccctctcagatcttctcctaatctcactcaagccctagccaaatcccagccctagcgacaccaaccagctcgccagcgaccatggggaacccggagaagctgatgaatcagatcttcgacctcaagttcacctccaagtcgctgcagcggcaggcgcgcaagtgcgagaaggaggagaaggagcagaagctcaaggtcaagaaggcgatcgagaagggcaacatggacggcgcccgcatctacgccgagaacgccatccgcaagcgcaccgagcacatgaactacctccgcctcgacgcaggccaagatgcaggtcatcggcaagtccatgcagtccatcgtcaagtcgctcgactccgcgctcgccaccgggaacctccagaagatgtccgagaccatggacaatttcgagcgccagttcgtcaacatggaggtccaggccgagttcatggagggcgccatggccggctccacctccctctccacgcccgagaccgaggtcaacagcctcatgcagcaggtcgcggacgactacgggctcgaggtctccgtcggtctgccgcaggcagccgcccacgccatccctgccgccaaggataaggagaaagtcgacgaggatgacctttctcgccgcctcgccgagcttaaggcccgcggctgagaggttgtttcaggctttatcagatgcgattcaggcttatgctgttgagccgcaacgacccattgtcctgtggactgctatagattcgtaaatactactgttatatgcttgaaggcgtgtgttggcattgccatgtggggtttgtgtgactcgatggaaactttgctgtcttattgctttaaaatcctttggcggaaaaaaaaaaaaaaaaaaaaaaaaaaaaaaaagaaaaaaaaaaaaaaaaaagcggccgagaccgaggtcaacagcctcatgcagcaggtcgcggacgactacgggctcgaggtctccgtcggtctgccgcaggcagccgcccacgccatccctgccgccaaggataaggagaaagtcgacgaggatgacctttctcgccgcctcgccgagcttaaggcccgcggctgagaggttgtttcaggctttatcaggtgatgatagattcatcctagccccccgtgaccttagcctatgttttgctgcggtagcctttgatcattgttgaagaactgctatcgtgaatcgtgagtgtgatgctttataaaattgtgcccaattgcatgtgaaggtggtcaggtatgtatatctactacctgttgaaccaagctttttagcgatttgagttgtactctagagcagataactttagcaaataatggcgtaccttagcaatggtataagaatttcacaggaaatagttcaaaaaatacaggaaaacacagggatcaagaaatatccattggtcctaaggagggctaagacgaacatatatnatgngggggtctttctatatcttgcacttacaatgaccaatatagctg

SEQ ID NO: 165171 - DNA, 765 bp, Zea mays
  unsure (1)..(765): unsure at all n locations
  Clone ID: MRT4577_82222C.1
acctcgaggccggccgggatttttgatcnccgggtgagggccttccatggcttttgcttgtgcttcctctgcaattacagctgttgccatctctacgccgagttccgggcagaagaatggatcaggaggttgttttcttagtggaaggaaattgagggtgaaaaaggagagagcagcaattggaggacgatcgatgggcactacagtgtgcgcagttgctgagcctgacagacctctatggttcccaggcagcacccctcctccatggcttgatggcactctacctggagacttcggctttgaccctcttggtcttggatctgacccggagagtctgagatggaatgttcaggcagagctagtgcactgcagatgggcaatgttgggtgctgctggcattttcattccagaattcctaacaaagattggtgtcttgaacactccttcatggtactcagctggagagctggaatacttcacggacactactaccctcttcatagttgagctctttttcattggctgggccgagggtagaagatgggctgacataatcaagccaggctgtgtcaacactgaccccatctttcccaacaacaagctcaccggaaccgatgtgggttaccctggtggcctttggtttgacccccttggntgnggaaccggttctcctcagaagatcaaggacttgagaactaaggagatcaagaatggcagactggccatgcttgctgtcatgggtgcatggttccagcacatctacac

SEQ ID NO: 165172 - DNA, 1321 bp, Zea mays
  Clone ID: MRT4577_82223C.1
gcgggaggagagacacggtcgcccgacgacgactcccacccgcagcctgggcacggccgtgttggcgccaaaccgcgtggtggtgttaggctcttcgcccagatcaaaatcgaatcgatcccccaacccgatcgcctcgtcgtcaaaaaatccccattcgttccccttctcgcctccacgagccttcacaaattgccctctcagatcttctcctaatcttactcaagccctagccaaatcccagacccatcccagccctagcgacaccaaccagctcgccagcgaccatggggaacccggagaagctgatgaatcagatcttcgacctcaagttcacctccaagtcgctgcagcggcaggcgcgcaagtgcgagaaggaggagaaggagcagaagctcaaggtcaagaaggcgatcgagaagggcaacatggacggcgcccgcatctacgccgagaacgccatccgcaagcgcaccgagcacatgaactacctccgcctcgcctctcgcctcgacgccgtcgtggcccgcctcgacacgcaggccaagatgcaggtcatcggcaagtccatgcagtccatcgtcaagtcgctcgactccgcgctcgccaccgggaacctccagaagatgtccgagaccatggacaatttcgagcgccagttcgtcaacatggaggtccaggccgagttcatggagggcgccatggccggctccacctccctctccacgcccgagaccgaggtcaacagcctcatgcagcaggtcgcggacgactacgggctcgaggtctccgtcggtctgccgcaggcagccgcccacgccatccctgccgccaaggataaggagaaagtcgacgaggatgacctttctcgccgcctcgccgagcttaaggcccgcggctgagagggtgtttcaggctttatcagatgcgattcatgccttatgctgttgagccgcaatgacccattgtgctgtggactgctactcatgtttggtagattcgtaaatactactgttatatgcttgaaggcgtgtgttggcattgccatgtggggtttgtgtgactcgatggaaactttgctgtcttattgtactttaaaatccaataatttgcgcgattgcggacaaaaaaaaaaaaaaaaaaaaaaaaaaaaaaaagcggcctcgagactagttcctcgtgcccgagacgtccagcctcatgcagcaggtcgcggacgactacgggctcgctggcgcaggcagccgcgcacgccatccctgccgccagggatagggagagagtcgacgaggatgacctttctcgccgcctcgccgagctt

SEQ ID NO: 165173 - DNA, 1099 bp, Zea mays
  Clone ID: MRT4577_82224C.1
cttacatttgtgaggccaaacttcgctccgctgatatacaagctgctgttcaggtttgctcgctccttcatcaaagatacaaggacttctctccttgtcttatagaaggtctactgaagatcttctttcctggaaaatctggagatgatttggatgcagataaaaattcgagagccatgaagaagagaagcacattgaaacttttgattgaactatattttgttggaattgtcgaagatgctagcatatttgtaaatattataaaagatcttacatcagcagaacatttgaaggaccgtgaaggaactcaaacaaacctatctcttctatctacctttgctcgtcaagggaagttttttgtagggctacaacctcatggtcaagaagcttatgacgagttctttaaggacctaaatgttactgctgagcagaagaagttctttaagaaagccttgaactcttactatgatgctgtagctgaactactacaatcagaacatgcgtctcttcgtctaatggaggcggagaatgcaaaagttttaagtgccaaaggtgaactaagtgatgagaacacatcctcatatgagaaactcaggaagtcttttgatcagttactacgtggtgtttcctcgttggctgaatctcttgacatgcaacctccagtgatgccagatgatggaaatacaacaagagttactacaggaaccgatgcgttgccttcttctggaaaagaatcatctgcattggaacctatctgggatgatgaagataccaaagctttttatgaatctttacctgatctcagagcatttgtgccagctgtattactgggagaggttgaaccaaaatcaaatgagcaacatgttaagggccgtgagctatctggtgagtccacttcagaacaagagactgaactacatgacaatgttccaacttctgccactgaacgtcaactagaagttaaagtagatgatctagtgaaagagagtgaagacagagataaagagaaggggaaggatggagaaaaggaaaaatccaaggagaaggatctggataaaaaaaaaaaaagagagaaggagaaaggaagagccatggacgg

SEQ ID NO: 165174 - DNA, 464 bp, Zea mays
  Clone ID: MRT4577_82225C.1
tggcttggaacctttgggctgatttatgtgcttgtttatgtgcctggaaagaatctgaactaacaaataggtagcacttacccgaattctcgaggcgctcagataaaattccgaagtcgatccacgaagaaggaacctaaacgccgaaggaagttggaatagaaactgagttcacgggcgattctaacattgaagtcgagaaaaaatccggctggtccgctagggaaaagcacgatatagacccccctacttcgcactggcacttcccggtcgcatgcttgcctcatattacgttccgccacgataatttagtgcatattaacctccccgacgctcctacctgaggtgaggagacaacactcggagtataaaggacatatatcttcgagtcgtcggttaaatgtgtgatagaacgcggaactgatgcgagtatcactctggttcataccgaacttcctagtcac

SEQ ID NO: 165175 - DNA, 634 bp, Zea mays
  Clone ID: MRT4577_82226C.1
ccggaccggtccggtcgcttcgacccacgcgtccgctcgccatcgctagtctcaaaccacaaccctagagaagaagaagagagagagaaagggagatggtggggctgcagtacgatctcgtcgggaacccattgggcgcggtgcgcgccaccttcgagaggacggccgccgccgctgcagcgcagtctggaggagctgaccctgtggcggcgttccgtggcaaagactggggcgccggtgacctcttccgctccttcctcttcgagcaagacggtcttggcaaggttccggtgttggattcgtcaaatcttggattgatcaaaccgaacaccctggtccggtatcggggaatggttcaggatatgcttgggaatgagtactacattggtgctttcaaggatgggtcaacttggaggacaaacaagtacactgacttctcaccgtactcaatgccgcatccttgtgattcacatctttgggagcgccatctcttccactgtgtgcctgcacctggacaaaattcttggacactggagtcttcaccaggacctgatgtctgcaggatgtcgaactgtttggcacctgaactaagagagaaaaggaagagagatggagatgacgatgccatggatgt

SEQ ID NO: 165176 - DNA, 528 bp, Zea mays
  Clone ID: MRT4577_82227C.1
gctttcttttgattgatttattttgttgttagctagctgattcacattggatcctaccaagttccgttcgttcagtatccacgacacgacggtgacgactactaacgctggcgctcctagagaggaacgacaactaggcgctgactgcggggccttgcgaacccatcctgctggaggactaccacctgatcgagagggtggcgcacttcgcgcggcagcgcataccggagcgcgccccgcacgcgcgcggggccttcggcaaaaactggggcgagcgcacccacgactttacatttttttacgtgcgccgtccccctgcgcgcgcccggggtgcggactctcgtgaacgttcgcttcgggacagaaaaccacgagcggtggtttttttatacgaaccaagaccggggcggaaatgggggggatttatagaggcccggggggaatttttaactccagggcaacagcttccctggggggggggtgctatacaaagggaccggccccccgggatccacttgggggagccca

SEQ ID NO: 165177 - DNA, 311 bp, Zea mays
  Clone ID: MRT4577_82228C.1
gtgtttgaccatgcaatgcacgaagggatactgagctgtgaagagccgctatgaaaactataatccatctaaaagacctcccatataaatagatgttatgagatgtttttatttaaaatcagatttttgggagttacacacgagttgggagatggattttgttaaatgcctagatgggatatcctatttagaatgcactctgattgagaacaccgcttacaaacaaggtagacatttagtcaaacatacaccaatacattacgatggctcacactttatttgtaattaattggatcattctaggctataga

SEQ ID NO: 165178 - DNA, 690 bp, Zea mays
  Clone ID: MRT4577_82229C.1
atggcgttagagagccagtggtatgagtacaacaaagaatggagttacgtccaggcttccacacggaagttacaaggaattaacgagattgccaaggatgtgcaaaataaaatgaccgctcatggatcgtcaagaaacaagggtggtcaaggacaagatagcggtcctacagtcagcaaggctttgataccacttatgtcacacccggttttgaagagcgagcactacgccccggtccccattgacggccctccagcaaagccaactacaccccaggttcatctaattaatcagctaagggcgtcccattccaccctcatggctgcactgttatcccgggtggtcactccccaaacaggtccttacggagaggcactcaggaaacagcctgagccctctaaagtatcacaggaacatcatcgggataacatcatagtatcataagtattcacatcatgttcattgattaaagtaaagcattagcatgaatctaaccatagtaacccaaaaggtaatcaaggatagggtaaatagaaagctagtcaatccttaggttgttcatggtatgcgggacagtgaattataaagtaaatgggacataataggtcagaggacacttgccttcaccaaacagatgctcagggtcttcagccttgtagaactcgaagagttcgatcccttcccggccgg

SEQ ID NO: 165179 - DNA, 857 bp, Zea mays
  Clone ID: MRT4577_8222C.1
caatcacagaagaaagccctcacttggagcacctcagcacgggcattccatggagaggtgccatcacttcagtctcgtaataaggcagcagcttgtagttcttcccagaaaaaggacaagatctaccagcgcatcattaatgtcacgcaagatagttccaataattcagcaccaaccgagctgcgtgcatctgattcggctgccccattgagtgatgagcagcttgcattattgttgcatcaacaattgaacagctcccccagagtaccgagggtgccacgttgccatcaagcagctggtgcacagatgcttcattcaactggatcatctgttttttctaagcggtattcatcacatggaggaagggatcatgcagcggttataaaaaagagaaacagagaagattcattaaaagatagcgaggacactaagaggacagaaaaaaggcatagagtttctagcacggagcatgctcctgtgaaaaactcgtgcagatcagctgaaaatatagcatcagaacagaaaattcgtggcatatgtccaactggagccaatgctggtttagcaaaggatgatttgatggatactattgtttcacacaatttacctggattgattgatgaaattgtcagtaaagacaggaatataacatatgtggaactctgtgatgctatccatcagcattttagggactcaaggaaatcgaatgggggagattctttgtatcgcagttatgcggatgccatcaaaggttgccttaggaagaggagggagtgggctcacctttttgaccaagcttcaaaaatgaattcaaataaaaggcgaacaggggaaagcaactcattgttacctgacgt

SEQ ID NO: 165180 - DNA, 634 bp, Zea mays
  Clone ID: MRT4577_82230C.1
ccggccgggccgggttccaagccaacaacagagctccaactcagcgggcgtccgctgcttgttgcttgatatcctacgattaatgcagtagtttaagagtgagttcagaactaaccaagacatgacatctaagatatactccatcctctctctcgagagtaacccatccatccattaccttgcgcacatagtgtaagagaaaatgttatctctaagaatcctcttgtgcatgcattaggcaatcaatcctgcaaggcggtggcctggaatttcactaaaaccagtaactcctccaaataaggcaatgtatacatccacgtccatgagcaatcttataatcaataacgtatcctgtcgccgcactatcacactcgcacgctggaactgcctacgggaatcaaattcaacatggtgcttgccactcttaactgatgcaggagcaccttactttctggatgagacacttgtctgccatagtcgttattactctctgctgggcctgctagtgatggccaactagctcacgctctcagttcgtatgcggttacttccaggattgaactgtctctgcgtgcctagattctccattcattatcatatgtgctactatgctggcatactgaacatactgagg

SEQ ID NO: 165181 - DNA, 225 bp, Zea mays
  Clone ID: MRT4577_82231C.1
ggcaccacacctcttcctcctcttcctcctcctaccacagctagcgcctgctccccttcgtctgtgatcatgccttgcagcagcggcaagtgcaactgcggctccagctgctcctgcggcagctcatgcgactgcatgtcccctgacgtggacaccgccgctgccagcagcatcacgaccatggcactcgctgcgccgatcaccaaggccagcgccgtcagcttc

SEQ ID NO: 165182 - DNA, 299 bp, Zea mays
  Clone ID: MRT4577_82232C.1
ggaaggctgccgccggcgagcgacgccaggggccaaggaccaaggcaagaggagtcgacagggtctccggcgggcgacgccagggagcactacactcagcttcccgtcctggtggggaaaacagacaagccaaaccctaacggggggagggcgaacttcaagcagaaaaatagaggagagtaccatgcgccttaacggatcgttagacaagttaggggaacagcacaatccacaaaagagacaacacagagggggacagggagaaccctgacacaccacccaagcccctgctagacgtg

SEQ ID NO: 165183 - DNA, 388 bp, Zea mays
  Clone ID: MRT4577_82233C.1
ggcggcgcctgtcttcctactatccctaccatggacaagaagcgccccctgtcgcctacctaccttcggtacccactatcagagccgatcccgcgatcctacgctggcgcccacctgtacgcgtgacctagcagttcgacagcgatcgatagctcttctcccaccgacttttctgccgcgtactcgacagtctcatcaatctctgactgcgtattaaccatggcgctctgggaggagggatcctctggggcccgactgatgtgtggctcctggcgctgaacttctccgtctttgtttaccctgcaaccctacgctccatgctgcgctgcgccgccgacctactcggctcgctacgactgctctcctttcacaacaccaaaatgttaat

SEQ ID NO: 165184 - DNA, 742 bp, Zea mays
  unsure (1)..(742): unsure at all n locations
  Clone ID: MRT4577_82234C.1
ggnnnnnnnnnnnnnnnnnnnnnnnnnnnnnnnnnnnnnntgtattgatgtactttgttatttactctcccgatatatcaagttttataggttctaatttgcgtcctgcacagttccgttcgagatacggcgtacaagataagtgctcatgtttgattcagaaactatacatcatctcgtattacagatagtggtacattgatccagattcatgatatactgctggtggtagctcacacatcccaaatgctgggataggtgtataaactccaatctccaaacaatcctgtggtgctgttgtgcatgatatctctgattcagcaggctatctgcaccctcgaggaaactgatgtccaccactggagtggaaatggaatcactcctgctgctcttccctgcgagggaaatggaaatgtcagctcgactcgaattcttacaacagctgcaaaagcgtagcgatgtgttcatgttcagagagagagaaaatgcgtcccttcgatcgttgatcgttgatcgacacttacttatccacactcagctacatattcggggaaaaaaaaatcttcacatcttagtcgttgagatcgttggttcaagatcgggttctgaattctgatggtatctttgtcaaatcaaagcatatcagagagtggtgacttactcaggttctggttctggctcgaccgaggtgtacttccggnnnnnnnnnnnnnnnctctccttgtccctcgtcgggaacgac

SEQ ID NO: 165185 - DNA, 581 bp, Zea mays
  unsure (1)..(581): unsure at all n locations
  Clone ID: MRT4577_82235C.1
gtaccctccgaggtctgccgagccgcgcccgcgcctggaggcttcctgccctcgccaggtcgccccgcgctgtgcggtcgagcagcgcccgtgccagcacgcactggggtcgggccggacgtgctcgcgccggagcgccgctgagcctgcgccggcgtggccgctgctgcgctctgcctgagccgtagcagcacccgcaccgcttccctggtggaagaaggtacgtacagcatgtttaccttggttcatcggaggtcgaggcctccctgtggaagcagtggcaagatgtcgctgcatcggcgcctcgcagaacgtcacactcgtccggggaggatcgctcggtttgccaggaagatttaacgcttgcttcaccggaaaaaccctctcgcttgatgcaggttggcaaccgctcagtggagaggaaagtgctgataacgtattagaaactcagtggcaaacaagtgaacagagggaataacggttgtattgatctcatgaagtatgtacatatatacatnagtggagagacaccacgaagggtcgcaccccttggaattagatcacatgaaaggttttctagc

SEQ ID NO: 165186 - DNA, 745 bp, Zea mays
  Clone ID: MRT4577_82236C.1
ggtaccccggatcggccgggcccggcccgagcgaacaactgaacaagcaaccggcaccaatggctgcgtgaccttgcgggcgagggcggcggcggcggcggaaaggagcaaaggaggcttccagaagctttcgtccactgcaagctccaacctgagaagatacgggctcgccgcgatggaattcgagtcagcggcgcggcggcggcagcgcagactctctttcgccgtcgttgaggacccacctcacgcctgcttttgacgccgtgtcctcctctactccccgcagtccgtgccgccgcagatgagggcggcgtacctggcagcggatgatggggtcagggcacctggcgtcaaccactacggatccaaatatgaggctggccggcttactggcgcgccaggttttcagggttcagaaaaccacatttcttttgcctccccgccgcagacaagtagcaatattcctactacagttctgggcgcctccacctccaccaagcttcctgctgaactccagttgccagaaggcagcgtcgtagcgaccaatgcagagctcaagacgccaggaccagaagctacgccttcaactctcaagccatctgataatccagaaccacgcgtggatggcgatgacatcactgatgctctctacggtgaccatggtcatcgcaggctccctattttaggggagatctgtccagattgagtgccagcctcagcattctcaacgtcgctgatggatgca

SEQ ID NO: 165187 - DNA, 1214 bp, Zea mays
  Clone ID: MRT4577_82237C.1
tgggtacctcgaggccggccgggaattttctcactttttcctatccgcaatgcttcgtgttcccttcccgcccggccgaagcgaacaactgaacaagcaaccgccaccaatggctgcgtgaccttgcgggcgagggcgagggcggcggcggcggcggaaaggagcaaggaggcttccagaagctttcgtccatgcaagctccacctgagagatacgggctcgccgcgatggaattcgagtcagcggcgcggcggcggcagcgcagactctcttcgccgtcgttgaggacccacctcacgccggcttttgacgccgtggccggtggggagggcggcgtgtctgggtactcttcatcgtcgtcttccagcggtctcgaactcgggttcgacgcctctctcctccgcaaccgccgctccggtttcgccgccccctcggacctggacagccgtgtcctcctctactccccgcagtccgtgccgccgcagatgagggcggcgtacctggcagcggatgatggggtcagggcacctggcgtcaaccactacggatccaaatatgaggctgcccggcttactggcgcgccaggttttcagggttcagaaaaccacatttcttttgcctccccgccgcagacaagtagcaatattcctactacagttctgggcgcctccacctccaccaagcttcctgctgaactccagttgccagagggcagcgtcgtagcgaccaatgcagagctcaagacgccaggaccagaagctacgccttcaactctcaagccatctgctaatccagaaccacgcgtggatggcgatgacatcactgatgctctctacggtgaccatggtcatcgcaggctccctattttcagggagatctgtccagattgagtgtcagcctcagcattctcaacgtcgctgatggatgcatttcggccctagctgtatattctgtttatctatcttgtacccagggtcttggtagcaattactctggagggtcatttctagtttcctaaaggagaatctctcttctcttgatctattcataatcgagaaagctatgatataatttacttgattaagccggcaattgaccgttttgcttgacgttggttgtagatgaaccttgtcatatatatgaattgagcctaggttcaaaaaaaaaaaaaaaaaagcggccagggtttccatatccatcgatgactgtcttgc

SEQ ID NO: 165188 - DNA, 2757 bp, Zea mays
  Clone ID: MRT4577_82238C.1
ttttttttttttgagcaaaatcaaatcatgattatcatataagaatgagatggctcatgtgtggatgctactccacagtgagaactgagcatacatcaaaattaatcgacatagaattgagggaaacaagaactacaggttcacgtttcctcggcagagcactgcttaattcaatttcctattatctttaccaagtactacccctttcccctcgctccgccttcttctagttctggtacatcttgccctgtgtggtgagcccgaacccgagcgggaacagcgggtcgtagtgcgcgtcgccgtagttcatcggcagctggtccaccgacctgaaccacgtccgcggcagcttccccgtgaacccgtagtccccgaacagcacgtcggtgacaccctggccctcggtccccggcagccaggccgccacgaccgcgtccatggcgcccaggaacggctgtatcaccacggggcggccgctgatgagcacggtcacgcaccgcacggcggcgcacaccgtctgtacggtgctcggcccggggtccgggatcgtcaggttcatgctgtcgcccttggtctccgtgtacgggtgctcgcccacggccacgatcgcgtacgagaagccgccgctccggacgaactcggcgtcggggctctccgcgaacaccacctccgtcgacgggtccacggccgccttcacggcgtccaggaccgtggtgccgacggtggtgcgccccgtgtcgccctgccactcgatcgtccacccgccgcactggtaccccaggttgtcggcgtggctccctgcgaccaggatcctggcggccttcttgggcaggggcagcagcggcgcgtcgcccggcttgccgttcttgaggagcaccagcgacttgcgcaccgcctcccgcgccaggtccctgtgctcctgcttccccagctggtccgcgaggctggggtccggcatggggttctcgaacaggcccatggtgaacttgacgcgcagaatccgagtcacggcgtcgtcgatcctgctcatcgggatcaggccgctgttgacgtgacccgtcaggatggtgatgaagttttggtagttgttgggcaccatgatcatgtcaatgccagcaagaatcgaagcctgcacagagtaggagtagttcgcccctggagggctggtgatcctgtcgatgccctcccaatccgagatcgtgaagccctggaagttgagcctgcccttgaggaagcctgtgatgaggttgtggttggcgtgcatcttgagcccgttccagctggagtaggagatcatgacggtggagacgcccttgcggagcgcgtccaggtaggccggcatgtggatgctcatcaggccctgccggtcgatgatggtgttgttctcgttgatgccgttctgcgtgccaccgtcgccgacgaagtgcttggcgcacgccgcgaccttgtcctttccggcggcgaagggcatgccgctggtgaagttctgcgggacgtcgccctgcaggcccgggatgagctcagtcatggcctgcacgatacggtggtcctcgctgtagctctcgtagcaccggccccacctgggatcacggcacaccgcaatgcatggcgcgaacgcgtactggatgccggtggctctcacttcaagcgcggtcgcggcgccgatcctcttcaccaggtttggatccctggtggctccgaggccgacgttgtgggggaagatggtggcgccgtacacgttgttgtggccgtggacggcgtcgatgccgtagatcatcgggatgccgaggcgcgtggacaggcacgccctctggaagtcgccgaccatggcgacccactccgccgccgtcgcctgcttccgcggcacgctcccgccgccgctcagcaggctgccgatgtagtagtccctgagcacctgcggcgacgcgacgagcctctcgatctgcgtcatctggccgaccttctcggccagcgtcatccggtccaggaggtccctgacgcggacctccacgtccttgctggcgtccttgtacggcggcggcacgccctcgccctgggcgtcaccgccgtacgccgaggaccagaagaggagcagcagcgcggccaccgccggcgccgtgagcagcgccatccggtggcggcgtaggagcgggacgaggcgcctccggaccagaaaggtggagcagcagatgggactaggaggaggtgaggaggaggaggagtgtcctgcctgcctagtgctcctcccgacgagtgtcccttaaataaaggagtagagcagcaaccggagagcaggtatggcggataagggctgaggagcgagtggttggagcagggaccgccgcgcccgccattggcaccttcgatgcgagccacaggccacagccaccccctcccgcccgataatatcctgtttccctccgtgacgatccgatcgtcgtccccgattgttgccttccggcgcggcgcggcgaaagcaaccctcgtccgtgatggatcctgtcctgttctcctccggcgagaattacgggtacagctgggttattactacttactgctcccgcgcggttagtgcgcgagcgagcacagcgcaggcgcaggcgcgcacgacaagagggtggtggttcgaggaagaagacggtgatgaggacgtggacggcgagacccgccgggcggtagtgctagcaagagaacaaaacccgtgggactgtgaacaagcgcagaaagaaatacgaatgcaacaagtcctccgttctg

SEQ ID NO: 165189 - DNA, 353 bp, Zea mays
  Clone ID: MRT4577_82239C.1
agcaatggcgccgcgaacagctcgagcctcaacgcggtcccgctcctccagattctgcggtccctgtgcctcctggccctcgccgaggcggcaagtggtgtccgggcggcgccacggggcctccccggcgcgcggcagcgggcagagcatgtacctggcaccattctgccgagcgcacacggtgtcggtggcggactttggcggggtcgacgtcctggagaggcggagcttcttcctgccgccgctctcccacaagttctttccggcgccggcccacccctggtccggtcagatctgggcgcgcacgggctgtgcaggcgccatctctcaatttcactgcgccaaaggcgact

SEQ ID NO: 165190 - DNA, 414 bp, Zea mays
  unsure (1)..(414): unsure at all n locations
  Clone ID: MRT4577_8223C.1
acggcgggggagtcnttcagagccacctaattccctgtttcctttttctcgcccctctctcccctagggatcggtgaaaggaatggcgagaggcccctctcattccagtaaggaagccttggagcacaacgaggctggatgccagtcccctgagggacccatcctctgcatcaataactgtggttttttcggtagctcggcgaccatgaacatgtgctccaagtgccacatggagatgattacgaagccagatcaggccaagctggctgcctcctctattcacagcatcgtgatcggcaccgacgccattatggagccggttgtttgctgggagggcaggggaggagtcttctcccaacttgagttgcaaacaatgaacgtgcagcatcccgctgatgttgcccgatccatcga

SEQ ID NO: 165191 - DNA, 294 bp, Zea mays
  unsure (1)..(294): unsure at all n locations
  Clone ID: MRT4577_82240C.1
aaacaaantctataaaggaatcacagcacttcttcatttctttttccaaaaatccctcctattcacttctttcaacattatactcctccacctgtttaacctctactagagtgcaaacaccccaaatttattattgtcaacaaataccttaaagtgagtttgctttgtttctccagactcacgaacacaaacccctattgtccatctagagaaacaagcatttccatttccacccttcccgacgagatccattgccatcccatgcacggatcgaccaatctcggttttggatct

SEQ ID NO: 165192 - DNA, 727 bp, Zea mays
  Clone ID: MRT4577_82241C.1
cccctcctcgagttttttttttttttttttttttgagcaaaatcaaatcatgattatcatataagaatgagatggctcatgtgtggatgctactccacagtgagaactgagcatacatcaaaattaatcgacataaacttgaaggaaacaagaactaccggttcacgtttcctcggcagagcactgcttaattcaatttcctattatctttaccaagtactacccctttcccctcgctccgccttcttctagttctggtacatcttgccctgtgtggtgagcccgaacccgagcgggaacagcgggtcgtagtgcgcgtcgccgtagttcatcggcagctgatccaccgacctgaaccacgtccgcggcagcttccccgtgaacccgtagtccccgaaaagcacgtcggtgacaccctggccctcggtccccggcagccaggccgccacgaccgcgtccatggcgcccaggaacggctgtatcaccacggggcggccgctgatgagcacggtcgcgcaccgcacggcggcgcacacagtctggacggtgctcggcccggggtccgggatcgtcaggttcatgctgtcgcccttggtctccgtgtacgggtgctcgcccacggccacgatcgcgtacgagaagccgccgctcctgacgaactcggcgtcggggctctccgcgaacaccacctccgtcgacgggtccacggccgccttcacggcgtcca

SEQ ID NO: 165193 - DNA, 1751 bp, Zea mays
  Clone ID: MRT4577_82242C.1
ccacgcgtccgggccgccctttttttttttttttttttttttgagcaaagtcaaagcttgattaccatatatgaatgatatggcccaatcatgtggatgctacaccacagcgagaactgagcatacaacaaaattaatcgacataaaacaaggaaacaagaactccccagttcatgtcccctcgccagagcactgtttaatccaatttcctatctctaccaagtaccaccccatctattgctccccgcgccttcttctagcaccccttcttgccctgtgtggtgagcccgaacccgagcgggaacagcgggtcgtagtgctcgtcgccgtagttcatcggcagctggtccaccgacttgaaccacgtccgcggcagcgtccccgtgaatccgtagtccccgaagagcacgtcggtgatgccctggccttcgcttcccggcagccaggccgccacgagcgcgtgcacagtgccaaggaacggctgtatcaccacggggcggccgctgatgagcacggtcgcgcagggcacggcgccgcacaccgtctggatggtgctcggcccgggctccgggatcgtcaggttcatgctatcgcccttggtctccgtgtacgggtgctcgcccacggccacgatggcgtacgagaagccgccgttcctgacgaagcccgcgtcggggttctccgcgaacaccaccgccgtcgacgggtccacggccgccttcacggcgtccaggagcgtggtgccgacggtgatgcggcccgtgtcgccctgccactcgatcgtccacccgccgcactggtaccccaggttgtcggcgtggctcccggcgaccaggatcttggcggccttcttgggcaggggcagcagcggcgcgtcgccaggcttgccgttcttgaggagcaccagcgacttcctcaccgcctcccgcgccaggtccctgtgctcctgcttccccagctggtcggcgaggctagggtccggcatggggttctcgaacaggcccatggtgaacttgacgcgcagaatcctcgtcacggcgtcgtcgatcctgctcatcgggatcaggccgctgttcacgtgaccggtcaggatggtgatgaagtcttggtagttgttgggcaccatgatcatgtcaatgccagcaagaatcgaagcctgcacagagtaggagtagttcgcccctggagggctggtgatcctgtcgatgccctcccaatccgagatcgtgaagccctgtaaaaatacacaggcagcttccaagtctgattaacgtttaaaaaacgcatctatctgcttcttcttcttctcacctggaagttgagcctgcccttgaggaagcctgtgatgaggtcgtggttggcgtgcatcttgagcccgttccagctggagtaggagatcatgacggtggagacgcccttgcggagcgcgtccaggtaggccggcatgtggatgctcatcaggccctgccggtcgatgatggtgttgttctcgttgatgccgttctgcgtgccaccgtcgccgacgaagtgcttggcgcacgccgcgaccttgtcctttccggcggcgaagggcatgccgctggtgaagttctgcgggacgtcgccctgcaggcccgggatgagctcagtcatggcctgcacgatacggtggtcctcgctgtagctctcgtagcaccggccccacctcggatcacggcacaccgcaatgcatggcgcgaacgcgtactggatgccggcggacgctgggtcga

SEQ ID NO: 165194 - DNA, 731 bp, Zea mays
  unsure (1)..(731): unsure at all n locations
  Clone ID: MRT4577_82243C.1
ttcccgaggccggccggggtccatcctgtaccaccaccgtcgtgatcggagcacgaaaccaagccgagcgaacaccagtcatcaagcgggtgagtcgtcgtgaaagagagaggcgctgctatgggtgggatcgccgattcgttgatgttgggaatcccggtgcgagcctgggagcgtcaagaaaggcttgaggaatctgtagggcgtgtcgtcgcgcggggagattgtcctgaccccgggaaattcctctccggggatcggtatcgcggcttagccgccgtgtgccggcgatgcgagtctgcgcttcatggctgtcgaagtgtggtggcgagaaatctgaagacccacttggtgaagcacctggaatcgcaagtataaggcaagctatgcccttgatcactcttctttaactaatattgttcctattaatcgctgtgacatgctcaggttaacttgattggaggctcgatctagaaagaagctataaggcagaataatcgatgtcgattagaggctagaatcggcactaaagttaagaatttagtaccagttggttgatagaacatatacttaatgtagtagtaccgatttatgtatgaaactattattaaatccttaactttagtaccggttctaaacaccaatggtactaaacccaatggcaggtgcaaccggtaatgaaccttccattattttttgtgcctcaaaaaaanaaaaaanaaggggcggcc

SEQ ID NO: 165195 - DNA, 346 bp, Zea mays
  Clone ID: MRT4577_82244C.1
cctgccccggcgcccggtggtcggggctaatggcaaaaccctggcggccggtggtgggggttcggggctccgccccaagcccgccggggggggggtcaaagggggtagctggggccaggggggggccggtcacaggggccaactccccacaacccgggagccgaaagaataaagcccggggccccggacgcgtgaggaaacaaacaacaaacgggtggggcccggggcccactggccggtcgggaaaccggaacccccagcggccagagggaataaggaaacgcccgggggggggggggaggggggttgggaaataaacagattaccgggtccccgccccccggcc

SEQ ID NO: 165196 - DNA, 304 bp, Zea mays
  Clone ID: MRT4577_82245C.1
ggggggggttttttattgggttggttattctatttatttatcttatatttcttgcggacaaaaaaacgggtatttttaggggtggtttcggttaaaattttccaaaaagttttaggttaaaaataatatacacaggtaattctatcccttatataacaactatgatttttttacagggaaggggttttttaaaaacctgttctatcccctaaataaaaattcttggaataatggccacataaaccatttttttaaaaaggttaatgttcgaaaacaaaaaattttttttaaacaaaaggggttt

SEQ ID NO: 165197 - DNA, 623 bp, Zea mays
  Clone ID: MRT4577_82246C.1
ttctcaaattcctcgaggcagcacacgattgcacagagctcgataaccgatcacctcgtccctcaatccattccttctgctaccaaatctcctgctcccccgagatttccttgccgactctagaacaggtaacgacaactgagcccaaccaatgaacgagcgcctgcataacttctacggggctgttcggcgctctccttccgccgagggcatgccgaccgcacgacagcgtcctgattgacaataagatgcccgaccactatgcgttacaaaagctgccccatctccctagcgtggattcggtgtgtggcactcgaagaatcacgcatcatgctactacacacctgcgcacgaacgggcggaacaccatagtcttattctgagcgaagcaataaatgctggctagtgacccttgctggggatacggtactgcaggctatgaagatcctgattatacttcatcggttgagccatgtgacattgaagcagcatgtggtggatgatggatagatatgcggctatatgctctgcggaaagtgttaatccttggaatgatcgctgctgaaggaattaaatggccttatggtccatcagagaatggctgtatttctcgtatctgaggg

SEQ ID NO: 165198 - DNA, 303 bp, Zea mays
  Clone ID: MRT4577_82247C.1
gacgaggcgcatgatctgcacactctggtcccaacgccgcatccgatcgacactgggctgatgatgcggaagggacccaccgacgagatggtgctggagaggaggcaccgccgtgtgatcaagaccatatagtctgccttcatgccgcgtgccaggaagcaggcgtacataatggatctggaagctgagtggtaaaccttacgaccacatcaggcagtgccaaataagctcgtagcaatgctacacaagcacctggatcaagtactggacctattacaccagctacatggaccacatgcattg

SEQ ID NO: 165199 - DNA, 3396 bp, Zea mays
  unsure (1)..(3396): unsure at all n locations
  Clone ID: MRT4577_82248C.1
ccggccgggttttgttggtgttcgttcctttgtactcttgtcctcatctccctttcccctccataggatgctgtcaggagaggaaaagctactcagcagcagccccaaaatggtgggctgcaagccgtctgcagctaagagcgaccgatccactcaactcctcgctgtcactgaagatataaagcattctttgctggaccataaggtatggctatggaaaaagaaatcatcagaaaggaagttggaggaggagaaggattagttcctggaagggagctggcaacacttaaatagtgacctttggcgttgtccttacgaaggagaaggggagcggcagcctttagcagagcatcctgaaggagaggaagaaggaagacatggccaagaaaaagctgatgctgaggtcttagctgaccaaaagaatggaggtgatggacatgataaaaaaacggcaaatgagcagatgaagtgtgatcgttagtgtgtgcagccatgttcatgtgaggtgagtaactcagtcacaaggtgctgcgtacatgtggtatgtattagtgaaaactatgttcgtatgcgtcaagataagatagtgccctgtaataacctaattgctattttttatgctgactacctcctaccttgtgtgttcttgggaggttcaggaacctgcatcacagagctagttgagtccaagggaataatagagtcaaagttcaaggaccttgcagtaaagctagagtcagccgaaagatctaactcttcacatagatatgaaggtttgcatgctgcagaagcaacttgagattcgaagcgaagaaaggaaatttagtctcaaatctgctgacgctgcacacaagcagcatcttgagaacgtaaggaagataaccaagctcgaatcagaatgccagaggttgcgttcaatggtacgtaaaaggttaccaggtcctgctgccattgccaaaatgagaagtgaagttgaaacagtgggtatcgatacaggaatcacacgaatgagaaagtcgaattcagtgacatcacagaacccctgtggtttagtacaaaactctcatgatacatcacatggaaattctccgttacttgcaaggctacatgcaattgaagatgaaaataaggtcataaaggaatctctttctagaaaggatggtgagcttcagttttctcgcactatgcttgctcgcacaacttccaaactttcccaagttgaagcccagcttgaagatttgtcaaaaggtcggactactgcagaattggtaaaaggtagccctactgttgttgaaaaccctctttcatctatctctgaggatggctttaatgaagataatgtgagttgttcaggctcatgggcatcagccttgctgtctgaactggaacacttcaagaaggggaaacacacagcacattctagtaagagcacaggagtatcagacatgagtttcatggatgactttgcagagatagaaaagttagcatctttatgtaatgataaacatgtggaacaatatggttcaaagagagaagccacagagtcatctggaaaggagctagttccagttgatgtctccactggaacagccgaccaaattcgccaaccgagaattgagaaggctgtccggaagttaattgaacttattgagggagttatccaaagatcatcaaaagattgtagtagcacagttgtgctatctggcggcgatgaggaaaacggccaaggaacactatcaggctatgttgctcgtgcattcttgtggaatacatcagaacttacttctgtactgcaaaattttgtttttgcgtgcaacgagcttctgtatgggagtactgatgtcgaaagctttgttcatgacctacaagtcacattagattggataatgaaccactgcttctcacttcgagatgtatcagacatgaaggaagccatcatgaagcatttggaattaaacaacagtgatggacttgaaattgttgcggtaggcagtcacactggaatccatacaacagatgagcctaaaacgccggaaaatgttcagacgtcattattaactgactcaagctgtgtagatattaagcctgatgttagcaaacagaggacatgcaatgaagtagctatctctaaatttgaggggatagaagaaaaggcttcacatttgcgggcagaacttaatgagctgaaagaatccagaaaaataatggtacacgtcgatggtaaatcaacaatgactgaatgcattacacatgaatccatcttcatatctggacaaaatacgggcaagcaagagggggttagttgtcttgaacccaagcatcagcttgaacgttgctccactaaacaaggctcaaaaagtgtcaccgagaatgaagataaacatttgcaggagcttgagatctcaacagcatcagagaagctgatcgagtgccgggagacaatcataaacctgggaaaacaactgaaagcgctcgcgtcgccaaaggacgccatcctcttcgaccaggttcttcagaccgctgttcgttctgagcggaaaccccgatcgcagtcactaagcgagatgttatccatggaggacggaggattctattactcaggctccccaaaaaccaaggagatcatctgtactgaaccaagtgcgtcaggcgaaggaaaccgtcctgccgacgacgagggagacggcggttccgccgcagcatgtagctcttcacacccaatgccggtggctccacacgtaaagcaggcgtgcagggtgaacaggacctgcaagggagaagccgacgtgaaggtagtgaggcttgccgttgtcccgagaaagcagaaggggaacggcagcctgctgaagaggatcctgacgggcaggaggaaggaggccatggccaagccgcaggtggtgttgagttcttagctgaccgaaagaatggaggttttggacatggcaagtcatcgtttcatgtgtagatggagtttgttcgtttgtgtgtggagccatgttcatgtgaggttagtaataaagtcgcaggctgctgcgtagatgatgtatgtattagtgtggtgtgtgtgtgtgtgtcagtgtgaggtagtgctctgtcatgaactcatgaccctgttttctgaagactacctccttccttgtgtgttctggggaggttcctgaacctgtttgagatagtgctagttgcctagtatgttggcaatgatatatgttagtgtgcttcgtctgacgaaagaaccttgttctgaatgactgtagttgtcccctctaagtttcagaaaaaaaatnnnnnnnnnnnnnnggcaacgtcagttttgtttctaaacttggttacatctcttatgtgcactttctactctatcaatagaaaccttgcactataagtgtcgatttgttc

SEQ ID NO: 165200 - DNA, 296 bp, Zea mays
  Clone ID: MRT4577_82249C.1
tcgggcgggttctttcgcaaaccttaacaccgaggcagggcttaaaaagcttgatgaggaccttctcactcgcagctacattactggctaccaagctttcaaggatgacttggctggctacacttcgttttcgtctgctccctcgtccaagtatatcaacgtagcaaggggggttaatcacattgatgcgctcgtgaggcttagcggaattactgcagagggccaaggtgtgaaaggtgaattcttaacagttcctcaaccccaacttcagatggtgcttaaacacaagccccaac

SEQ ID NO: 165201 - DNA, 371 bp, Zea mays
  unsure (1)..(371): unsure at all n locations
  Clone ID: MRT4577_8224C.1
cccacgcgtccgcggactcgtggtcgcttttctacttcctctaactctatgatatcgccgagaccctcggcgtctcggccgacttctccgacatcaactacccatccctgaataaatgtttcatctatcacgaccagctctagtatgctctctatgactccatcttcgtcgtattatgacacggtctacccatgccgcccaccttcactagtgtatatatgntgaacgacaacaactgcatcaataaagaactctgcactcgcattagaaaacacaggcttaacgatctcgtcaatatgatcagctaccctgtcaactgcactgtcccgattgcagcacatgttctcaagaatgctggtacttatcatgag

SEQ ID NO: 165202 - DNA, 744 bp, Zea mays
  Clone ID: MRT4577_82250C.1
cctcgaagccggccgggacatcactctggaccccacgatccgaggccagactgccccccagcctgcctgtctgtacacgctgccctcgtgcagacgactgaagtgctcccaacgcgccccgactctgcacttcttgctgcgccttttgctgccgtctggccctgatcgtcttcgcttcctctgggatccgccccctcccccagcaccagcccagcagccctgcatctggccttgtccggcccgcgcgtgctgtgcacaattgcccccccccccccgaccagccagcgacggcgatagcagctgcgacagacgacaatcagacgactagcaacgcgtctgcgccgccgcccctcgctgtccaccaccccgccagtcagcctccccaggactcgactgttacatccaccatcaccaaaaaagcttgttccgacgacgcattaccaaggcgcgctctgctctgtccaaccacccccagtttaccctgctgttcgcccattgcctcctctcatgactggtgagaatgcaccgcggctaactgcactgcctgtttacgctcaacatcaaccacttcgtccgccacaatcgccgcccgcccagcaccaccaacgccaacagcctcaccaccatcaacaacaacaacaacaacaaccgcagcagcagcagcactcaccattgacccaacgctccccatccacaaacaaggcatccccacagcaaactccaggcccccttgatgccaccagc

SEQ ID NO: 165203 - DNA, 255 bp, Zea mays
  Clone ID: MRT4577_82251C.1
cacagctcgagataaggccgctgctcttgcagtcttcctcctccgggctccaacttcccagggcacggttgcgggtcttgcagggtagcacggaggttccttggttgggggttcttggtctgccttgagcgatttggcgcgccgcggcttggtgaggggttgtgagctgcgactgcagagacaagggccgagtggagagccgagccacagaggcctatgaggagggaaaggaaagcggggcgcatgggctggcca

SEQ ID NO: 165204 - DNA, 245 bp, Zea mays
  Clone ID: MRT4577_82252C.1
ggggtaacgcggggtaacccttgatattgaattaatttgcccttagaaagcattccgaacaaatttttttggaaataaaagattgtcagtacctttcctttagatccacacttgtttttttgaaactgtcttggtttccttcatacaccccacatttattggggctgctggggaaactcatggccgggacccaaaagggggttggcttgaagcttttcgcccttggtgcttgcaaagaaaacttt

SEQ ID NO: 165205 - DNA, 355 bp, Zea mays
  Clone ID: MRT4577_82253C.1
ctttcaatatgcgtcccccaataactaatattcatggcaaaaccgttgacccttgtgttaggcctctccttagtgacagctatgtctgccataatctctcatgctgatggatactgcgagaatgaccttcaaagccttataagtgactgcactacatacgtgatgttcccatctaatccaaatgtccctacttccgatgcttgctgtcgtgtcattaaaaaggcaaacgtctcttgcttatactccaacgtcaccaaagatactgataaagctgtgtgcatagagaaagttgtgtatgttcctcagcactgtaagacgccatttgagcattgcttccaatgccgcagctacaaag

SEQ ID NO: 165206 - DNA, 374 bp, Zea mays
  Clone ID: MRT4577_82254C.1
cgcgccgctctgtacctccgccccctactgcttccggctctcgctgtcacatgtcatgtggtgtgggggcgctctgatccggatggcgcagcgccgcgggatcgcccactgccatgattgatcgggaacgaccagaggaaatgcacgctaataatgaggcgccagtagggtgcctaaagccaaatatgtctaatgataacttttcagagcagattggtggtgttgaagggtttcctgagaataatgaaaaaaggaatgatatatgatgctgcggaaaaaatctgtgaggcaacttcaaaccaaggccttagcaggcccatgtaccgacaagaattgtatgcctggtcatatatttatgcagattatcaaatcga

SEQ ID NO: 165207 - DNA, 284 bp, Zea mays
  Clone ID: MRT4577_82256C.1
ggggtggaatgaacggacgctatgcgcagatgagcagctgagcattacaaatcgacacaacacatggcatgatcagtgcgtcaggcatctatgttacacaacctactgaactgatgggatgtactgtagcttcgtatatctcaacatgcgatcggcttgagagttagcggtcgaattcgattgtgacacgcacaacaatgactggatagacaagagtatcgcacctacatgatatatttggactacaatgattctgcaagatatctactctagccaaattacat

SEQ ID NO: 165208 - DNA, 394 bp, Zea mays
  unsure (1)..(394): unsure at all n locations
  Clone ID: MRT4577_82257C.1
ggagagtgaaaccccaaccctaattgggggttgggtgtatattggatagacgagttangtgggccaagcccattacaagagaaccctaacctaaccctagacaagattctaacatatatatgcactatggttgtgcaccatttcaaaaattttgagaatttctaggtatgtgtttcaagggatttttcatgattgcattgcaccagacagggcggttggcactttgcaccaaatatttggcctatttttcattccttcaatctaaacaagtcacacaactaatgaatggattgctaaaacagttaaacaagcttaggatacaatgaatcttacagtatcattgtcctgttagctactaatacaggcaacacggatacatgtatgatcttacctg

SEQ ID NO: 165209 - DNA, 1770 bp, Zea mays
  Clone ID: MRT4577_82258C.1
gtgagcagcaaacacacagctagactccgcgagaaccgtcaatgggttctataggaggacccacagccacagccaccgccgaccggcgccgccgcgtgctgttcttcccgctcccgtaccagggccatatcaaccccatgttccaactcgccggcctcctccacttgcgcggtttctccgtcaccgtcttccacaccgacttcaacgctcccgacaagtcccgccaccctgcctacgacttcgtccccgttcccgtccgcggctgcttgccgaagggcagctcggatgccttgcaggtgaccgtggagcgcatcctcgccgtgaaccgcgcctgcgaggctccgttccgggagcgcctggccgctctgctggcgcgggaggacgtcgcgtgcctggtcgctgacgcccacctgctgacgctgctggacgtggcgcgggggctcggcgtgccgacgctggtgctgcgcaccggcagcgcggcgtgcctccgcatgttcgcggcgttccccgcgctctgcgacaaggggtatcagccggcgcaagagtcgcagctggaggcgccggtgactgagctgccgccgtaccgcgtccgggacctgccgtccaccaccagcgcctgccacggcgtaataagcgaggtgatttcccgtttagtgacggccgtgacgacctcctcgggtctcatcctcaacaccatggacgctctcgagtgcggcgagctggcgtcgctccggcgagacctcggcctccccggtcccgacatcggcccgctccacatgctctctccggcggcctcgagcagcttgctactgcaagaccgcggctgcctcgagtggctcgacgcgcaagccccggcgtccgtgctctacgtcagcttcggcagcctcgccagcatgtccgccgccgagctggtggaaacagcctggggcatagccaacagcggctatcccttcctgtgggttctccggccgggcctcgtccgcggctcgcagacgtcggaggcggcgccacccctgcccgacggcttcgacgccgcgacgcgcgggcggggcatggtcgtgagctgggcgccgcaggaggaggtcctggcgcaccctgccgtgggcgcgttctggacgcactgtggctggaactcgacgctagagagcttgtgcgcgggcgtgccggtcattgcccgcccgtgcttcggcgaccagatggggaacgcgaggtacgtggaccacgtgtggcggaccggcctcacgctcgacggcgtgctcgagaggggcgaggtggaggcggccgtcgcggcgttgatggcgcctggagagcccggcgacggactgcgtcggagggcgcgggagctcaagagcagcgcggcggagtgcatggccaaggatgggtcgtcctgcacgaatgtcgacaagctggtagaccacattctgacactgtaggcgtttggtacaggagcagccacgtggtgctgttcttgggtactgtttttctttgcggttgaaaaataaataaataaaacccgatggagcttatgatccgcaactcgacactcacagtcacagctatggttgataattgattctaattttccactatatgatttaaagataagatcagattagaattagaccttatttctatttatttttgaaataaaatttatttaaagttttgttattttgtgaagaaacatttgtatcagattagattaggatcaaatctaattttatttatttttgaactaaaatttatttaagatttatttattatatgaag

SEQ ID NO: 165210 - DNA, 274 bp, Zea mays
  Clone ID: MRT4577_82259C.1
tccgcgagcgcggagcggcgcccatacgccacaatgatcaacgacgctacaagctcctactgcccccgtaccacacaccagcggagcattaacgacaggaaaacccaaagaggcagccgtacaggacccaacaggccatctagggcgacatgcaacctgcatccaccaaccacctgcaacaatgatgcaacatatcacagcacttacctcgggagcatctcatgggcccaaaacagcagcgcacacaaaacgacaacatcactgggctaacaaa

SEQ ID NO: 165211 - DNA, 449 bp, Zea mays
  Clone ID: MRT4577_8225C.1
gcggccgggccgacggacccgtgctttcgagctccttgaatagatggttctgctgttgtggttgataacagcgcgcgtatgccacccagtgacagatctttgggggctgtatctgaacctgtcataactagttcgagcggcattgggttgtttgcgagctgataagcagatatgaacctgatagcaccgtgcatgacatgggtcccgatcttgcggatggaatgcagtatgataaacgacatcacagactctgaagcggatgccttgcatggtctcttcaaggagggcgccctgcttgaatagacactggcaaccattcgctacaaagtccttgatttcattgatatagctgactctcttgcacatagtagcggccgtgttattcccgctgcgactagggtcctatatacttattatttttgagacgagccttggctgatgcaacctgt

SEQ ID NO: 165212 - DNA, 313 bp, Zea mays
  Clone ID: MRT4577_82260C.1
agcaagacaggaaacgagctagtgaacagtcatacaagtaagctaaaatgtaaggatccaatactttcacggtggttacaagaatcacaactatgtgcacaaaaatgagatgcaccatatcaagtaaatagacagttgaatcccttggattatttgatgagaagcacaaaggagcatctactttaacctagcacgaactgataatggggagcccacaaacaacagactgacctgactaaaagggctaaacaatgctggtatatcccagccattgaaacatccatgaggaagttattgtggaattgccattcgg

SEQ ID NO: 165213 - DNA, 263 bp, Zea mays
  Clone ID: MRT4577_82261C.1
cgcgagggccgcccttttttatttaatttggaccaataccggcttgaattaattaaacccaaattaagcgtggccaaaagggatacaggggttctgttccaagaacctactagcattgcaccaatagcaaaccaacgcaaaagggattatcacctagcaggacttcccagtttctttaccgaaagaatgaaggggcatcctacgcctcctggatgtaaacgtaggggagccctcatttaccgcagtagagccgttcaaagtga

SEQ ID NO: 165214 - DNA, 307 bp, Zea mays
  Clone ID: MRT4577_82262C.1
accagctccgctcaggtagtcccccaaagtctccacgaaccacagtccatgacaagtctgcccaccaaacacacagctcctggacaccccccaacgcacagtactggtcccagtttcacagcgtgaggccacaggggccccagttgaggcagcagcaacacaaacaaaacaaacaagtgctggggtactgcctcctcctcatgctggcgggcatgggcctgcactacattgccttcaggaaggtgaagcagatgcaccttaacttcatggatgaaaaggatcggatcatcacagccttctacaacga

SEQ ID NO: 165215 - DNA, 539 bp, Zea mays
  Clone ID: MRT4577_82263C.1
ttggtccttaacggcgtcggactagaactagatctccaccttgaattgagaaggcttatatttgactttgaaaatggtgaaatatcaaattccaaactaaataagttactttattgagtgaatgccaatttctctataatgaagggatccaaacgctccataggaagaattgtactcctgggtgtacgtgtatcttactatctttaacaatcttacaaattatcattcttgagaagaggtacatctgtccatcagcaatgtccatagaagagaggaagagaagtatgataggcaagagtactgcgctcaatccaaatgcaggaatttgttctttgtcccttagatctgttagtgataattcctgtaagagcttagatgcaactatggttgtctcagggccatctaaagtatctagcacagacaagccaaaatccattttacaaaataactcttatgaagaagcacatcagtattggcaacaaccgctccctgatgacattaccactgatttcaaaatcctgggacaagatgaaagtcct

SEQ ID NO: 165216 - DNA, 2228 bp, Zea mays
  Clone ID: MRT4577_82264C.1
agcaagcagccttatctatcccctcagctctgcagctcagtgtccaccaccgccgcctccttccagctgggtggaagaaacatgtcgcgaatggcgcccccgtctccgcctcagtccctgaagcccccgacgctgcccttctccccgcccaaaaagccaccgccgatgccggtgtacaaggacctgcacttcaaccgcgacctctccgccaccaagaagctccaggccggagtggacctggtggcacggttgttgggggtcaccctggggcccaaggggaggaacgtggtgcttggcaacaagtatggccctcccaagattgtcaatgacggggagaccgtccttaaggagatcgaattggaagatccattagaaaatcttggagtgaagctggtccgacaggctggagcaaggaccaatgatattgcaggagatggttgtaccacatccataatccttgcccaaggcctcattgctgaagggatgaaggttcttgcagctggaatcaacccagttcaggtcgcacgtggcattgagaagactgctgctgctttggtgtctgagctcagactgatgtcgcgggtgattgaagaccatgaaattgcacatgtggctgcagttagtgcgggaaatgattatgctgttggaaatatgatttatgatgcttttcaaagagtaggtagacaaggaatggtgagaattgaaaatggaagaggcaccgagaacagtctggaggttctggaaggaatgcaatttgaacgcggttacctctctccttactttgttaccgatcgtggtaacatgacggtggagttcactgactgtcagatactattggttgacaagaaaattacggatgctagtgagattataaggatactggacagtgctgtcaaagaaaactatccgttgttaataatcgccgaggatgtggaagaacaggcaatggctgatttgataaaaaacaagctgaaagggacaattaaggttgcagccgttaaggccttctcttttggggaacaaaagactcaatgcttggatgacattgcaatcatgacaggaggtacactagtgagggatgacatggggcatatactggaaaaggcaggaaaagaggttcttggttccgcttctaaggtggtaatcacgaaagattcaacactaattgttactgacggaagcaatcgtcgagcagttgaggaaagggttgctatgataaaaggccaaattgagaattctaaggaaagttacaacaagaagatattgggtgagaggatagcaaggttatgtggtgcaattgcagtgatccaggttggtgctcaaacaatcattgagatgaaagataagaagctgaggattgaagatgcacttaacacaacaagggcagctattgaggaaggtgttgtagttggtggtggatgtagcctactaagactgtcagagaagattgacgcaatcaaggaatcatcgttggataatatagagcaggaggttggtgctgacatcttcaaacaagccttgagttaccctacctcactaatagcaaaaaatgcaggggtgaatggcgactttgtcattaaaaaggtgttactgaatgatgatgcaaattatggttacaatgctgccaagaactgctatgaggacttgatggctgctggaatactggacgcaacaaaggttgtgaggtgttgcattgagcatgctgctgtagttgctaagtcctttctcacctctgatgtggtgattgttgaggcaaaagaaggcaaacctattcgaataagacccccaatgcctcctaggcacttaattcccccaatgcctgcttcaatttcaggtattcgagtgtagcaggcgtcctttccaccaagaatcagcctcaacacaacaagactacgggcccggtacccccaagtttctaagataataaagcaaagaaaacatagtgaaattttgacgtcaaacgtggctttgtatgattgctccaagaagctctatgcacgctatcgcatcatcggagcagcagcaagggtggatgatatgtgttatatagggaatacaaaggtgaacaattcaattttgatgttcaaatgctccttaccgtcataaatatacttctgtttttttaggaacatatactttaatagcttcgcttagtttagaattttttttttttgaagaggagaagaattactcattattatattaagaaacaaaccgttttagtcctg

SEQ ID NO: 165217 - DNA, 658 bp, Zea mays
  Clone ID: MRT4577_82265C.1
gccctccctcgagtttttttttttttttttttttttttttttttttttttttttttttttttttttttttttttttttttttttggagcccccctcgcgggcagagggagaaaaaaaattttaggcttggcacacacccaaaaaattttccccttttattggacccccaaaaaacgaaaaaaaaacaaccccccttttgggccggtccccggaccgggttaataaaaacccaaaaacgaaaagcacccgggggggcctggaaacaggcatcactggaacaaaacctaaaaaaagggagggtcgtcgtcgggggccggggcaggcatgaaaaagggggggcttcgggaaagggccccaactaaagcaacgggagaaaatttgacgtaacaggggggaccactaaagctgggggaccaagcgggagggaaccggggggggtttttgcatgtcccccccgggaaaaaaaggggggccaaaagaatcgccacctggggcgtgggggggggggaaccatccggaacggttccggggggggagggggcggccatggccgtggggggacctcccataagctgaaaaaccagaagtagggccaccaccgaacgggccattttttttttgccacccttaaagaaaaaaaatcccctggggccaaatt

SEQ ID NO: 165218 - DNA, 1122 bp, Zea mays
  Clone ID: MRT4577_82266C.1
cccggtgtcgcccacgcgtccgtccgcgtccgggcctcctttgtcaatgacacagagatacaagatgcttgttcgggtagtttgacggactctagccctctggttcttcaactggggaagacatatgccaaattagcaaaggacattatgaaaaagtttggatggttggatctttctagaaaagttcgaataagtcatgatgggggccatgttctttttcctattaacgaatctttctgtgccctaaatgctgaagagcatatcaataggaatcttgatgattcatgtacctttggggaatcattagtattttctgaaaagaagcttgtaggggacaacctatctcttcaggatgcattaatttttttttcatcttgcaatggttccgttatgaaagatgaactagccatcagccgaaagccttccaagtctcctcaaactatcatgaaagaacttgtatcttctctactggaaagtaaagggatgccctctcagttgttgcagcagcttccggctaggtgggagaacttggtgatatcgtcatacttccaaagacatgttttaagaatccattgtgggaatctgttagcgaggaactttggccactagttgccaagtcacttggtgcacaacgtcttgcacgccaaggtaaaatcatgccaaatggcacaagagatagtacactggaacttcttctgggtgataacggatgggttacccattatgaaaatggcatctgctattcacttgatgcaacaaaatgcatgttttcttctggtaatcgttcagagaaacttcgcatgggacagctaaactgcagagatgaggtggtcgtggatttgtttgctggaattggatattttgttcttccatttcttgtgaagtacattctctttagcccttggtcaaacacttctgattctgattttatcccctctaaaaagtattattcttaatatcttactcttgcagggctaatgccaagctagtttatgcatgtgagtggaatccacatgctctgggagctcttcggcgcaatgttagtgacaacagagtggaggatcgatgtattatacttgaaggagataaccgggtgactgcacccaaaaatgttgctgatcg

SEQ ID NO: 165219 - DNA, 220 bp, Zea mays
  Clone ID: MRT4577_82267C.1
ctagcaacatagaaagctcaatagtgtaccaccaatggcagctattatattttgcgctcttatgatccttggtatttctgcaagtgctgctatggcgacaattgtcgcgaaatggacgataactccaatatgttcacatcaatacctgtatctggcgacagcggtgagatcggaatgtgcaaatcatcactactctaaaggtaacgggaggacaacgcag

SEQ ID NO: 165220 - DNA, 474 bp, Zea mays
  Clone ID: MRT4577_82268C.1
ctggcgttgccctttcgctacttttctcggtgtgactactggacgaacgctgactcccactggcccccggcgacagttgccatgtggtcgccgggcccttagtcgccgatgagcacccaacaggaggataccgtgaactacgcaaatgctaacacatgctttttccatgttcttttcaaggcatcgacattggcgttctacatactgcccacactgttcctgaacaactccctcatgatctttgtaatcactgtgctactcgcaccacttgactattgtgaactgaagaatgttagccaacagatactggttgccctcgccgggcggaatgagattaacgatcagggagagagtgactggaagttcgagtgccttgatggacagttcctggctaggatgaataacaaggactcatggttgatctagtgcactatatatctggctagggctgcaacgattatacaccggatattc

SEQ ID NO: 165221 - DNA, 1173 bp, Zea mays
  unsure (1)..(1173): unsure at all n locations
  Clone ID: MRT4577_82269C.1
ttgggtacctcgaggccggccgagaaagctctgcttccgtccgtccgtccgcttctctctctctctccggttctccctctctcccccaccccgcgagaccgccggcgaatttgttgcagtgcactgaagccaacagctgcaggacaggactcaggaggaggaggagctgtttcaacaattatcccccgcgcgcccaggccagccccgcccccgcccgcccactctcccgaggatttccaggttctcaacacaacaccgctcaccgcatatagatgggttctgaggggccttctcccgtcaccgtccacgtcaccggattcaagaggttccatggagtcgccgagaacccgacggagaggatcgtgcgcggtctccagccattcatggagacgagagggttgcccaagggccttgttctcgggagctgcaccgtccttgaggccgccggtcagggcgcgcttggcccgctgtatgaactgctggagtcgaccgtctccggccgggaacgtcaggagcgagtcattctgctccattttggcgccaacagtggttcacataggtttgctcttgagaatcaagctgttaatgaagctactttccgttgccctgatgagctaggatggaaaccacagaggacacctatcatatcgtcagatggaagcatcttacacgcaagacagactacactgccagtggaggagataagcaagtctctccaacagatgggatacgacgtggtgccttcagacgacgctggtcgatttgtgtgcaactacgtctactaccactcactcaagtttgcagagaagcatgggatcgggtctctgtttgtccatttccccctcttcctggcaatcgatgaggaagtccagatgcagtttgtcgcttcccttctagaggtcctcgcttccttgaacttccagtgaacctagtggtagatctaccacttcccggtggtgtattgttcccagattatttgggaaaggtttaagttgttcccaacttacctgtggtggagaataagatcgaggaatcattcgtggaattatgtgtggttcaaaatgtgtaggcgaaaaaaaaacaagtcttctcaaagaacatgtacatgcagtccagatgtacagatatcccgagcggtttatatgacaggtgctgntgtagcgttgctctcac

SEQ ID NO: 165222 - DNA, 351 bp, Zea mays
  Clone ID: MRT4577_8226C.1
cccggcggaccggccggaaaaatacccgggcgacagccttttcacggcggcgcccacaacccgggggggacaagaacaaaaaccggtccccacaaatcaaggaaccggacgaacgaaccgagaaatgcatgcaacaacgagccgggcctaaacagcacacaaatgagcaagcaacaagctcactccacacgcacgaagcccaacgcagacacacggagggcaaacgccccaacgccgagaatccaggggcaaccagagacgccgacgaaggaggccaggacgcacccggcccccgtgacaagggtggcggcaacagaccgcccgcacctcccgcgggcagcccggcaggac

SEQ ID NO: 165223 - DNA, 795 bp, Zea mays
  unsure (1)..(795): unsure at all n locations
  Clone ID: MRT4577_82270C.1
ggaccctcgggttctgccgggctaacatttagggttcgaaagcttatttgctttcaacaagttcaatgttcatgattctggtttaggatctcacatttagggttttcaagattagggattttgcacactgcactaaggataataaaatagaatcgctattttcaattaaaatgcattacattttcagttacttcttgtactcaaccttcatttcattgtggtttggccgaagatacatttagttcttgtactaaaccttcaaatcatggtggtttggccgaccagacattgagttgttgtactcaaccttcatttcattatggtttggccggatacacattgagttgtatgagctactagattttcctagaaataaaggatggctcattgctgtcaagtttggttgaaacacgacacaattctagggattcaactaacaacgaaatttatttatgcagtgtaattccgtatgttcatttgaacgcgtggactactaacatttgaggttctacctccttttcattctctttccgatgcttgattcattgttctatctttggatatattatttactctacatacttcaagtngtgttgtttttgattctgccatggtactgcagagtcaggttttatagcccttgaagtcttatttcataactatgcataatagtagttctttcacaacatacttgaaatggtagtttggcggtctattcaaaccttaatactttgcattgtgatatgttactagcaaactagtcactatcctaaacatttaactacagatggatgg

SEQ ID NO: 165224 - DNA, 189 bp, Zea mays
  Clone ID: MRT4577_82271C.1
caagctttttactttccacaaaaacaggcgtcggcaatactatgaactgtctggcaataacaaccacaacacacagaaaccttatctgtaccctgcaacagaacatgcatgttgataccaaccttcattttgttcactcacatacttataaccctgcctaaggtactaccgccctggctattcacaaca

SEQ ID NO: 165225 - DNA, 1578 bp, Zea mays
  Clone ID: MRT4577_82272C.1
attgcccggccgggagaaaagctcttcttccgtccgtccgtccgcttctccctctctccctctctcccccaccccgcgagaccgccggcgaatttgttgcagtgcactgaagccaacagctgcaggacaggaggaggaggaggagctgtttcaacaattatcccccgcgcgcccaggccagccccgcccccgcccgcccactctcccgaggattccaggttctcaacacaacagacaacaccgctcaccgcatatatatatatatagatgggttccgaggggccttctcccgtcaccgtccacgtcaccggattcaagaggttccatggagtcgccgagaacccgacggagaggatcgtgcgcggtctccagccattcatggagacgagagggttgcccaagggccttgttctcgggagctgcaccgtccttgaggccgccgggcagggcgcgcttggcccgctgtatgaactgctggagtcgaccgtctccggccgggaacgtcaggagcgagtaattctgctccattttggcgccaacagtggttcacataggtttgctcttgagaatcaagctgttaatgaagctactttccgttgccctgatgagctaggatggaaaccacagaggacacctatcatatcgtcagatggaagcatcttacacgcaagacagactacactgccagtggaggagataagcaagtctctccaacagatgggatacgacgtggtgccttcagacgacgctggtcgatttgtgtgcaactacgtctactaccactcactcaagtttgcagagaagcatgggatcgggtctctgtttgtccatttccccctcttcctggcaatcgacgaggaagtccagatgcagtttgtcgcttcccttctagaggtcctcgcttccttgaacttccagtgaacctagtggtagatctaccacttcccggtggtgtattgttcccagattatttgggaaaggtttaagttgttcccaacttacctgtggagaataagatcgaggaatcattcgtggaattatgtgtgtggttcaaaatgtgtaggggaacaaaaacaagtcttctcaaagaacatgtacatgcagtccagatgttaatatccaaaagggttttaataaaagcatgggatcgggtctctgtttgtccatttccccctcttcctggcaatcgatgaggaagtccagatgcagtttgtcgcttcccttctaaaggtcctcgcttccttgaacttccagtgaacctagtggtagatctaccacttcccggtggtgtattgttcccagattatttgggaaaggtttaagttgttcccaacttacctgtggtggagaataagatcgaggaatcattcgtggaattatgtgtggttcaaaatgtgtaggcgaaaaaaaacaagtcttctcaaagaacatgtacatgcagtccagatgtacagatatccgaagcggtttatatgacaggtgctgttgtagcgttgctctcagatatgctggctatggagacggttcgctttggattaaagccggttgtttgaactggtgcaactgcaatttatagac

SEQ ID NO: 165226 - DNA, 566 bp, Zea mays
  Clone ID: MRT4577_82273C.1
ccggggggccggcccccgcggggggggggtgtttaaaacacaaacttcctcgccgtcctgtcggaggtcttgcccgcctttttttgggggggaaaaaagggaacccctatatacacggccctctttaccaaaaatttaaaccccccccggggttcaatggggcccttttctttggggggaaactttttttttggcacttctttaaaaaaccccccaaggggggaaacccctttgcccccttttttaaacccaaagaaaaaaaggccccccctccaaacttccccaaagtggttccccccaaaaagggggttcttccccccccccacaaattctttgggggggggggaaatttggaaaaaaaacacctttttaatgaacacccacgggggaagggttttacaggggaaaattttgggggcccccccggggggggtttcaataaaaaacccccttttggcggtaaaaaaattgggaaattttttttcccccaatttttccgggttgaaaaaggttttaaaaaaaagggggttgccctcaaactgggggggaagccaaacccggtgttt

SEQ ID NO: 165227 - DNA, 477 bp, Zea mays
  Clone ID: MRT4577_82274C.1
cgcaccctggctccggggcgaactgctggctttctccctattcccaccggcgcaaatccggcctctcgtcctggcgctacacgccttggccttccgcggcaccgggagtggcgctgcctaccccgagcatggggagggcctagaactactacgcgtgtctggggttttccgtggggaggatcggtcacgtcctccagagcacgcccggtacctggaacgcggggagcgccctggctcctggctacctagacgttgaagaagagtacgctccagctcaggttctgcaagctcgatgagaactcacagagggatatcatgaagactcgaatcggccgctgcacatccaggtcgccgtgcgcaacgacgaagagcagaccaacgtggttggccgcgccaccatcgcgagcggcggcggtactgcccactgtgcactgtgaactaactaccaagaagggtggctctaccaaggctagcact

SEQ ID NO: 165228 - DNA, 328 bp, Zea mays
  unsure (1)..(328): unsure at all n locations
  Clone ID: MRT4577_82275C.1
ctcatggaccgatcctgctgctgctgctattgtttccgttgtacgagcgccgggccgggcacgttgccatattccatctccctcccgccgcccccctccccaccccaccggcctagccaagttgcttctgttccttgtacttgctgtttctttgccctctggtctggagccgttgctgttccttccgcccgtggacaagtagtatgatgggttagcacacaagtctacttcttcttcctcctcctcctcctcctnngcggntggtnnggtctggtctgnctctgtnngtgtgagcgcatttgntttgggctttggttccgtgctttga

SEQ ID NO: 165229 - DNA, 295 bp, Zea mays
  Clone ID: MRT4577_82276C.1
attttcgtcgtggttacgacggtgacactaacaagcaacatgatgctactggtgtttatcccggaatagacattggtagagatcatgggactaccggtgtttatggcctaaacaccgacagacatcatggaacttctggggtgaatcccgggatagacacccataaccaacaacatgggactaccgttggttatgctggttacactggaaggcagcatgggaatacaggtggcctttactatggaaccgacaccgcggacacaggaaccggtcctagagtggaaacacggtggca

SEQ ID NO: 165230 - DNA, 325 bp, Zea mays
  unsure (1)..(325): unsure at all n locations
  Clone ID: MRT4577_82277C.1
cccacgcggccgacagagcgcacaagaacccgatcgacaccatgagggtgatgctcggggtcctcgctctcctggctctcgctgcgagcgccacctacacgcatacaagcggcggctgcggctgccagccaccgacgtcggctcatctaccgacgncggtgcatctgccaccttcggttcacctgccacctacggcgcatatcccaccggcggtacaactgacgccgacggtgcacctgacaccgacggtccatgtgccgtcgacagttaatatgccgacgtcagcatgccactacgctactcaaccgcaccggactnaagctga

SEQ ID NO: 165231 - DNA, 208 bp, Zea mays
  Clone ID: MRT4577_82278C.1
tcgttctttctgtgtattcctcaagaagatgagagagatgatgcagaacacaagccgagatcatgacaagattgtgctctcctttgaaggggcgaatatgcatgatcggatgcatgagactgagaaggaaccatgtaagaggcaacaacaacgctctggtggagtcaagcacaaggtattcgttatcctacaaaggtgggtaattgag

SEQ ID NO: 165232 - DNA, 840 bp, Zea mays
  Clone ID: MRT4577_82279C.1
ggtaccccgtcgaggccggccgggaagaattgcgtgctgtgtttatctctgtggccctgcgcccctgcgtgcctgcgttgtgtgctctcgctctctcggcggaagttggcgacgactgggcgaccgccgccgccgtacgccaggtgctcaggtctccgtcagacccttcgccaggtcttcttccgcggcgagcaccgccagggtgtgcacccaatcttcttcactgggtcctccgctgcttctagtcacgcatctaaatccggagttgccagcattcgcttgaggtgccggaccacagcacaccatcatgcaggctagcgataggttcaacataaactctcagcttgagcatcttcaagccaaatatgttggtacagggcatgctgatttgtctagatttgaatgggctgtaaacatccagagagacagttatgcctcttatattgggcactatccaatgctagcatattttgccattgctgagaacgaatcgatcggaagagaacgttacaatttcatgcagaaaatgctgcttccttgtggccttcctcccgagagagatgaagattgaagagctagctggtgctgcatagtttctgtgtttccagtggttcctgtagtgtttgcttttagctaccatcgtactatgtgcgagcatgcctttcacgtttcttcctttagtctcttttgtgatacatagaacccgtatgtattgttaaccaaatgctggcctgccccattgttgtgtttttgtggtgtgttcagccaatgtgaaagaaaaaaaaaaatagcccaagagattgatgactgcctaaaaaaaaaaaaaaaatattaaattaa

SEQ ID NO: 165233 - DNA, 527 bp, Zea mays
  unsure (1)..(527): unsure at all n locations
  Clone ID: MRT4577_8227C.1
ggggggggttttttttttttttggggttgatgtgagctttcccccgtgcaagaggggatatttaaatatgtgtggggcgtgcaacttcactcacaaatgtgagagaaacaaggggtaacaccaacaaggggctgcaaccctatggggggggggggaaacacttcnggtgcggggggtagcgcgaaaaacttaagcccatcaactgagtataccagcgtcaacgtgatccggtcatcgaatcaggcgtgttcccagacctgggatcaaaccaaggtttgggtattgtgcgcttaatatcctcgtggccctcctgggcatgtgcttcattaaggccataattcctgacatgggagctttttccttgtgcatgtgtgggttgaacttgtgttccttgagaggcaagtgtaaccaggtgcctttagaacccttgaaaaggtgacaacaaccctgggtgggtttaccacaaccttacatttgtaaggaacaatttccttgtgcaggtttgggatagcacaccgggaattttt

SEQ ID NO: 165234 - DNA, 426 bp, Zea mays
  Clone ID: MRT4577_82280C.1
gctttggcttgtgtgattggaattgctgtttgttgctgccttccgtgcattattggtatcttgtatgctgtaactgatcaggaggagggagcatctgaagatgacgtaaacaacctttccaaattcaaatttcggacaatgagtgatgcagacaagctagctgccggcattgcagcacctgtgggtggagtgatgacagaatgcggagtgctgtatctgcctatgcccgtatgaagatggcgtggaactacttgagctcccttgcaaccaccattttcactgcagctgtatagacaagtggcttcacataaatgctacatgcccattgtgcaagttcaacatcgtcaagagcaatctccacagagaagaggtctaggtcaataaggggaaaaaaataatcattgcaacacatttcggcatgttcca

SEQ ID NO: 165235 - DNA, 619 bp, Zea mays
  Clone ID: MRT4577_82281C.1
gcattgcagcacctgtgggtggagtgatgacagagtgcggtaccaatcctccctgtcgaacgatggcacgatattctttcggctgaggatgcagagtgctgtatctgcctatgcccgtatgaagatggcgtggaactgcgtgagctcccttgcaaccaccattttcactgcagctgtatagacaagtggcttcacataaatgctacatgcccattgtgcaagttcaacatcgtcaagagcaatctccacagagaagaggtctaggtcaataaggaaaaaaataataatcatggcagcacatttcggcatgtcccatcccagctgtgctcgtcagtattgccacatttgccaactggagttgtgattacctgtcttgtagtcaagtcataaaagtcactggtgatacgcaggtggttgcaatgtcggttctcgtgaatattccttgtaacagtttgctgcaggggttgtacattctcgttctgctcgatctgattgcattgcgatttatttgtacatgaacacgtgaccatgttggatcatgaaagcagtcagtcatttgtaaaatgattcatgaatcggaggctagtatgcaggctgctattagccaaatcctctctat

SEQ ID NO: 165236 - DNA, 3722 bp, Zea mays
  Clone ID: MRT4577_82282C.1
gtttttcgtgcactcctatttgttagaataatggacgcactaactagtccgccttaaaatcttgacttgttagaagaaggtaggcaatccacttatatacttcaacacccccactcacgtgcagccagagagaaaagcgcaaacggggtggaggcacaaatgaagcctctgccaggatttaaacgtaagacttatgactctgataccatgtgagagcggacacattaaccagttcagcccaaaagtttaagatgctgggagaaggtaggcaattcatttatacacttcaacactattcaaagctaaaactttggatatattttatcctctcaaatctccttttactaccttgccctatgtcaactttcggcctttccatgtctcttcctattgctattgtgccttatgatcccactatgcactagtgcctttggaggtctccgttggacatttctaagccatcttaacgatgttgaacaagttttttttttcaattggtgttatccctagcttatcatgtatagcatcatcctggtctcttatcctttcttatatggccacaaatctaactcaacatacacgtttccgcatatctgagaagttctgaactcgatccgttctgtcttgtctgaaaagttccatatctgcaacttgaatccaaattaatggtaaacaaagttgatacattgattccaaatggtttacttttagatttaaaattcaactttaagtttaaaggggaaactacatctatgagaaatgagcttacaccacctctgatatttttaccaattttggattaagtaaaaagtaacctgcatatgatttcagatgtaagattgcatatttggaagtaattgagtgatttctctttcatcattctttttcctataaaaacgttttacctttctatgacctttcaaaacagtgagatcttttcaaattttgacagtgatgatttagtgtaggatataatataatgtccattatcactagtatgtacaaatgaagaaaaatgacagtagatccataaccacactgttttatttttccaggcacgtttgcaacatacttctagagtagggagtgtcatttgaattccacggcaacggtcaatttatatgatagaatatggggatatggaaataattaataaaattgtaatattctcgtaccagcttatctagctggcatgcaacctctatactatatgattttttcgaaacaaatatgccaaaattgtacacaatgggcaaaacccatgcttttctttaagcaatcaagttcggtgtcataaatcttgtagacatgtgacaagcagctgatctcaatcaatgataggctcagtagtgttctcagtgtccgcaagatcaatgtttccgatttgctcatgtgtgagcattcaactggtcagttggcaacatggaattactgcatcttggactgtgccattcaccttttgtgtaggtaccagtccttatggagctgatgttcaattctgaatgttttgggctggcttaaacctttgttatcttctggggaagaggtattatgttgagctcctgttttttgctacttgagtcaatacggagtactgtcatacacttgagttaccctgcatttttacactcttattactagtcagagtgctactctaccagactcaatttgatcatctcatttttaacgcaggccggccgggaaagcgaactcgccgccctcgaaaaaaaaaaaaatcagtgccaaaacgcaaataacgcgagggagaagaagagacagaaacagtaagggtttgactgtttggctaacgtcatggcgtcgacctctccgcgccgctcctctggcggggactcagcttccccgtccgcacccctcatcccctcgccgccgacctccccggcatccggcccctccggtggcccgctagggcggctcacgagcctccgcggcgcggcgcggttcatccgccgcacggggagccggcgcctgatgagggagccctccgtggcggtgcgggagacggccgccgagcacctcgaggagcgccagaccgactgggcctactcgaagcccgtcgtcgtgctcgacatgctctggaacctcgccttcgtcgccgtcgccgcggccgtactcgccgcatcggtgggcgagcggcccaccgtgccgctccgtgtctggatcgtaggctacgtgctccagtgcctcctccacgtactcagcgtcaccgtcgagtacaggcgtcgacgcaggaacgcggaccaggagggagcgggtgatgaggatttaaagctcagtattgtgaagcacttggagtctgcaaacacgatgttttcctttatatggtggattcttgggttctattgggtgtctgcaggtggtcaagctttatcacatgatgctcctcagctttattggctgacaattgtttttctggcgtttgatgttttctttgtggtcttctgtgttgccttggcttgtgtgattggaatcgctgtttgttgctgccttccctgcattattgctatcttatatgctgtaactgatcagcaggagggagcatctgaagatgacataaacaacctatccaaattcaaatttcagacaatgagtgatgcagacaagctagctgctggcattgcagcacctgtgggtggagtgatgacagagtgtggtaccaatcctcctgtcgaacatattctctcagctgaggatgcagagtgctgtatctgcctatgcccgtatgaagatggcgtggaactacgtgagcttccttgcaaccaccattttcactgcagctgcattgacaagtggcttcacataaatgctacatgcccattgtgcaagttcgacatcatcaagagcaaccgtgacatagaagaggtctaggtcactaaggaaaaaacgccgcaaaacttttcgtcatgtctctgctgtgttcttcagtactaccgctaccacatttgcgatcctgagttgtgattaccggtcctttaggtgatgcacaaatggtactcgtgaatattctttttattagcagttttctgcagggcctgtacattctctttctgctcgatccgattgcattgcagattgatttgtaaatgagtacatggtcacgttgaaccttgaaagcagtcaatcatttcaaaaatggtttatgaaaaaaaagaaaaaaaaagcggcccctgtgctcgcctacagggtcccgcaaaatctagggccccaaatatgagtgctgtatctgcctatgcccgtatgaagatggcgtggaactacgtgagctcccttgcaaccaccattttcactgcagctgtatagacaagtggcttcacataaatgctacatgcccattgtgcaagttcaacatcgtcaagagcaatctccacagagaagaggtctaggtcaataaggaaaaaaaaaaataatcatggcaacacatttcggcatgtcccatcccagctgtgctcgtcagtattgccacatttgccaactggagttgtgactacctgtcttgtagtcaagtcataaaagtcactggtgatgcgcaggtggttgcaatgtcggttctcgtgaatattccttgtaacagtttgctgcaggggctgtacattctcgttctgctcgatctgattgcattgcgatttatttgtacatgaacacgtggccatgttggatcatgaaagcggtcagtcgtttgtaaaatgattcatgaattggaggct

SEQ ID NO: 165237 - DNA, 123 bp, Zea mays
  Clone ID: MRT4577_82283C.1
cgacgtaagctgtttccttagagtctcccacttttttgtatttaacaactcctcccaaatgcagggttcacttacttacgggctgggcgccaaacaccaaaactcctatttccgcactaaaca

SEQ ID NO: 165238 - DNA, 629 bp, Zea mays
  Clone ID: MRT4577_82284C.1
cttctctcattctctgagttctctctcctctcccaccttctctctcctctccccacgaaccgcgccaccttttctgacgccgcatcatcggcgacttcatcgccgtcgacaagacgcatcaaggcagtgcctgctactcccgcctccgcattcttgccccacggagcgtgctcctgctctcggccgccgtcctggtgctgaacagctgacacagccggagagatccgcccggcctcggatccgtttcttctcctgctggtgccttggtgatgctgatgcggactcgggactcctacggagagctgaggtgaccttgttgagtgtgcccttacccagcgccgcctgcctccgagccgagatctcctccgcgcaccccggcattctctctctctgtctctggtgccgacgaccgcgcggccgaccccgccctacgccaggtgctcaggtctccatcttcgggaccttcgccggcgacgagcacccgcccaggtcaacatcatgatggctactttggggaggaagaagcggcaaggcgcaacaaccttcatcgtgctttgcatcttgacatccttctacatctgcaaagcgcagcttcacgacctgcggacagaataccttgattgactgcg

SEQ ID NO: 165239 - DNA, 319 bp, Zea mays
  Clone ID: MRT4577_82285C.1
aaacccaaaaaagatactaaatcttcagattaaagggcccagctgaaatcacaacattgcatatagggacatgaattaaaaacatagctaggggggggcccaatttttggaaaacaagatgaaaaatctacgggttgatatcagccttttttttttgccaaagcctgacaaaggagctgtttgtattgccctgggcccggacaaacccagagagggcaaatgttgggaagtgaccataatacaggccattcgtatcaaaggggccaatgtttatctggacagaggcatggtccttggcagtgatgaccctgttgggggc

SEQ ID NO: 165240 - DNA, 237 bp, Zea mays
  Clone ID: MRT4577_82286C.1
attcggctcgagccgaccacaaccaaatgtgtcaacgccagaaaaacgcgaccaaaggcacgatcttagagcgagagactccaccgagccaaagaggacgcaacgaggaacagcctctacaccagaacagggaaaccaggaaagcgcagacaccacaacaatgtcaacaggcgccgatgctagcaatcgactacaacgaacgagaccgaaagcacaataagtatgggggggaacgga

SEQ ID NO: 165241 - DNA, 245 bp, Zea mays
  Clone ID: MRT4577_82287C.1
gtcactatgctgtacaaaacaatctcttgaacttattctattgactataattatgtattttttgatcaacatcttttcaaacactcctttctcctaaataacttgtgtctggtggccacactttacttcaatgagattacgttttttagaatccctttgtaagtgaaatcatgcaataataatctttgtagctggttcatttcgacaaatacaatgttttcctccaggttaattcgtgtgattga

SEQ ID NO: 165242 - DNA, 280 bp, Zea mays
  unsure (1)..(280): unsure at all n locations
  Clone ID: MRT4577_82288C.1
attgaactataactcattagaaatctaaaagaggccnccgcgcttacgcttattgattgtcaagtcccactggtcttgctctaaatctgcgtctgtggttttgcacatgacctcatcaagaatgcctgctacgtcggcacccctggcaagggtattcttgctgctgatgagacaactggcaccattggcaagcgccttaccagcactcaatggcgataacgtggaagagaaccggcgggctcttcgggagctcctggttttgctgccctggtggcctcca

SEQ ID NO: 165243 - DNA, 455 bp, Zea mays
  Clone ID: MRT4577_82289C.1
tttgttttttttcaggcttttcatgatcgcactaatactgggcgactgattcacagaaaatgtcccgttggactgaaggctctgcctgatcacacaaaccaagctgatacatgtgcgaaacgaacatatacagacctaagcaacttacacagtcattgaatagttcaagaactagacataaattgccaccactgatttgtgcaaacccttacataacctcacaccgagttaggttggtcagtcagcaaccaataggtcgggctgatcaggctacaaaatcacattccacctatgtatacagctatgacctgcatcaactgcagccaggacaaggccctagggctttgatgtcatcgatgagcaggccatacacctccttttccagaccatgggtgggcatctgcatgcgcatatctgcctcaagctgacgcctccatttgacctcggtgtcacta

SEQ ID NO: 165244 - DNA, 376 bp, Zea mays
  Clone ID: MRT4577_8228C.1
cggacgaccaaactagttaaagataacacaccagcagatcataatgctggctgctgccaagccaaattctacccaatctctaagccagcatggcatgtgtagctattgcagcggcgattgccaaagcccttgatcatccttctctccgctcatgttctatggagcagccgccagccactgatcaaacacacacatccagctgcaccaatgctagcaggttacagcagacccagaggaaggtagtgctaatgctcacagtgaacactcccaaccttaagccgatgccttgacgcacttgaagggactaaccagctgccaggtgaagtcggcgtcagcacggccgaaatggccgtaagctgccgtcttgatgaacctg

SEQ ID NO: 165245 - DNA, 306 bp, Zea mays
  Clone ID: MRT4577_82290C.1
atacgctcactcttccgattcctatctatgtgcaattgagaaacgtcataaccaatctgatactatgtaacattccaatactgtcgagggcaagcaaaattaactgactcaagatcctatataaaacctgcactacttgcagacggtagaatccgacataatattagacaaatatatagacgatgaccatgccaataacattcttgccctcaagagcaatgagccagcaaatccagagaacatcaagcatgaaatgaataacgactaacagatccagaatcatacaactgataaagatactttcct

SEQ ID NO: 165246 - DNA, 265 bp, Zea mays
  Clone ID: MRT4577_82291C.1
aaaaaaaaaagaaaaacctgtcacaattgcccggggggggaaataaagccgggccggggaacaaagtttttgggggggaatacagaaggccccccccgaaaggtctactacctaccggataacttgggcgaattcaacaggcaaaccattggccagccccggaatgaaaggaaacaagggttcaaatgggggggggcccaaaccccccttactcgtgttggggggcccccccgcccctggattcccgccctcaacaaaaaggggc

SEQ ID NO: 165247 - DNA, 469 bp, Zea mays
  Clone ID: MRT4577_82292C.1
aatccttccccgttcacacgctcccgtgccatggacgcagggagcggaagctagttccggcgccgccccatccctctggcatccgcgccgctactcaccccgccccaagacgctgccttgccgttcccgtacaccaggccgcacgaccaccgaccgccgtcctctcccgctcgagcaccgaccgcagcagcccatctctgctcgcgcacaggccgccgccgcccctctccgcttgagcatcgaccgcagccaccctacccactcgtacaaaagggaaaagaaaatccctttttcccatcgccgccgcctcctctgatctatccacgcagccctctgccacgtcccccccaggggaagacaagctggcggggacctccggagcccagatccccttccggcgggcggctaagcgaccgaggggccttctcgatctgcgccgcccctcttcttccgcccacatcctaccatg

SEQ ID NO: 165248 - DNA, 212 bp, Zea mays
  Clone ID: MRT4577_82293C.1
cgctcgcgtccggtcagacacccccagatcgatggcacttcaactatccaggtttagttttatgactgacatccttatcgatgtatccctgcttgtgaagcattgatcctaagtaacgaaaagtgcctttcttgggtaccaattgcccatcaagactaacatcgtcatactaataccctatgggactggaattactacttaataaactctgt

SEQ ID NO: 165249 - DNA, 236 bp, Zea mays
  Clone ID: MRT4577_82294C.1
ctccaggcgggcagccttgatctgcacatcttaccatggacttttagggagcgggttacttcgctttttgtgctggggggatgcccgcggctgatactgatcaccgccgcttcgtgagcgggcttgcctgggccaccctcaacgagtcgttgtacaatgcctcctgctccatacggggaggtcgtcgacttcaacgagatgacggtcctgctgacggggaggcctcggggcttccg

SEQ ID NO: 165250 - DNA, 496 bp, Zea mays
  Clone ID: MRT4577_82295C.1
ttgctctttcagttctgatgacagcagcaagcacttttgctgcagcgttcatgacccctctcctgacgtccaaactcgctgggcagtatgtcgcagtagatccaatgggactgttcgtgtccacatctcaggtcgtcctggcacctgtccttctgggtgctctgcttaatcagtactgcaatggtctggtccaactggtgtccccgttgatgcccttcattgcagtagcagcagtagccgtcctctgtggcaatgctattgcgcagaatgcttcggcagtcctggcatctggctcgcaggtggtcttgtctgtcggttgcttgcatgcatctggctttttcttcggctacgttctttcaagagtacttggcatcgatacctcctccgcgagaacaatctctattgaggttggaatgcagaactcagtgttgggccttgtccttgcaaacaagcacttgggcaaccctttacgggtgttccgtgtgctgttcgagca

SEQ ID NO: 165251 - DNA, 513 bp, Zea mays
  Clone ID: MRT4577_82296C.1
ccggccggggttggcgggggagtacaggcactggaaccgctcgggagatggcagcaacggcccgtccttgaggatcaggagtacacggtccggcacggcgaccgcgtgccggatttggactgacggcagcacggtggtgtcggcgctgctgccacctcgccgcgctctggcatcggaggaaatggcgttcagggttgccgccggccacgccgtcctgagcactggccggaacgttgctgcatcagagacaagaacatgagcacctcgtctatagtgaagaaacaaagcaaacggatggacagacacattcttcatgtgatggcgtgagtttttcctgatgtattcacttggtaacgttccattccaacccaggtcaggtgcgtttccagtgaactcattagcaaatagaccgaaacgaaatccgaatccaacgcaaatttcccgcgagtggtacgaccgcattcagatctaccgcaacgcccccacaaaaaaaaaaaaaaaaaatttgcggcc

SEQ ID NO: 165252 - DNA, 723 bp, Zea mays
  unsure (1)..(723): unsure at all n locations
  Clone ID: MRT4577_82297C.1
tgtggcggccgcttcgannggccggccgggtctgcgagaatgcaaaccacaaaacaaagtcaaaccagctgcaacgatcaagagcgaggcttccttgtccagctctccgctcagccgacacacacagattgacagatggcgtctatgtcgctgagctcgtcgagggcgcagtggacggcgaagcagaacaagctgttcgagcaggcgttggcggtgtacgacagggacacgccggaccgctggcacaacatcgcgcgcgccgtgggtggcaagtcggcggacgaggtcaggcgctactacgagctgctggtgaaggacttggagcacatcgaggccggcaaggtggccttccccgcgtacaggtgccccggcggctacgacgacgccgacagcgacaggctgaagcacctgacctgaagatctaggcggcaggcaagcatcatgagaaccactgaacaagtacgtcctacatacgtacacttcgcgccatgtgagtgtagcacgtgtggctacaaaagaagcaagccaagcgagtgggtcggacggattatctgttcaagcacgcatgtgaattagaattactactagcaatagctataggatgttgatcaatcgatctccgttccccccgtgttgcgatgtaaaatctcagcatctgtagcatatatattctgaggagtgaaataaaatacattcactagtttgtggacttttatttgtcct

SEQ ID NO: 165253 - DNA, 1817 bp, Zea mays
  Clone ID: MRT4577_82298C.1
ctgcgctgggtgcgccccacgcgtggcttctcccccgcgcccctcggcaagctcgcagtcaaggatcagactctcgcgtcgccctcccgccgcgcccctcggcatctcaactacctcgcgatgcctcccccacccccgatctataaatcggccgctcgccactcctcccgtacgctcgccccgacgtccacgatccgcttctcccccacccccccgatgatgctcgcagtccagtatccgcctctcgcgcgcccccgccgacgcacgcaactcgcagacggcgcccccccagatccacttctcgctggccgctcagatcctccatatcctgacctctccctcctcttgctgcagatgatatgctagagcgtcagcaaggcggactctccaaacctccagagagggagggaggcagcagccaatgcccagcacgtaccaatctgcgtggcgggaggtgcccggactgcgtacccacgggcgagcaggattttgacgatccacgacccgatgaagtcgccggcgtcggtgacgcacaaggcggcagtggccatcgtgcgctgacgcccagtcccttcctctcgcgagcgaaacggggggcggtggtgccgccgggcgaatggattcgtccgagagcgagcaaataggggtaagcatttatcaagcggaagtgggaagaaatggtacagtgaagtggaggaaatgacacagaacacgagcgaagctggcatctcaaggcggtcgcactcgctcggcttgtgtgttgcagttctattcttgtgtagtgcagctccgaagtcgctgctaccaggtgcccccgtgctggggcataggtgcagtcgccgctgcgcccagcctacacaaaggcagctaccgttgcgacaacgagagggagctcccaaggcaccaatgttgttgctgccagttcttcaaagagttattgatggttcacaaaagaccactgttgctctgccaattcacaaagccttgatgattgttatgatggaaccaatgttgaggcctacaacaatgatgtcattgttcccatgggacctcaatctccaaaaaaccaagaggccgtgggaagaggaatgtgacaatgagaaggttcagttaaagactattggaaaagatgtcgccctaaccgttgggcaaacacctggatgacatcatcttctctgctaaaggcaccatattctcttcaaggatccaaacaattaccccacttgggaagaggaatgtgacggagttagcactacctccacataatgggaaggttgggttaaagcctattggtacctgctccggcaccgttgctgttctggtctcggccgtggagatggaactatgattaaaagaaaagagaacactacggaaggaacctactgatgctcagtgtactgcgactttcccacgatgctcatgatgtcgaagtctgcagttgctagactggcccgagtaattgctaagttttgtagaaaatgtttaggcccatttttgaacgcatgaatttcgtataggctgtatttcacacgaaatacacaggaacaaacatttttcctgccttccaaacaggtcgttaggattagttgaagttccagtttgatcataggcacctaggtcgatgctctttagtaagatgtaagtaatatgtcttctggccaggttgagcaaggcttagctgcagtgtatcagtgtggtacagctgatgtatttatactgttacaatctaatgagactatatggattagagctatcagaacctgcacagatatttcacaataaactcttaggttaaaaaaaaaaaaaaaaaagggcgg

SEQ ID NO: 165254 - DNA, 450 bp, Zea mays
  Clone ID: MRT4577_82299C.1
ttttatatttttttttttttttttttttttttttgggtttttttttattttttggggggaatagacccctgaggcttcaagaattattcaaaactcacatgggagggtagccccttcccaattttaccaacagaaaacccaaaatattacgtagttccgaaaggattataaaatttggagcaagcaaaaaatttcttaatactgacccaagcttcttaaaaacctttcagaaaacccggaaattcatatggaacgggaacgtctcaaaatttggtggggaaatggagggcaaccttcttgagctccttggggtaaaagacctggggctggttttaccccacctggggaaaggccttgttcttggccggggacccccctttcaagaaggggcccaaaacctttgccctcttgtaccaaaaattgcccaacctgggctttggtggagggggg

SEQ ID NO: 165255 - DNA, 319 bp, Zea mays
  unsure (1)..(319): unsure at all n locations
  Clone ID: MRT4577_8229C.1
tgaatnggcgggaggacgcactctaacccttttcctactttccttctctacatttttccattatccagaagctgttcacctgggagaggtgattctatttaacagtactactcgtttcttttacgcatatttccctcctacacattttctaatgaccagtcagaagtctgcaccataacacacatacgatgtttcggacatctttttattcgttgtatctctacctgcgtttgaacctatatcacgttttccgatactttaattacatcaatacctctcttctcaattcccccaacatcatttcctgatttcctaaatt

SEQ ID NO: 165256 - DNA, 1152 bp, Zea mays
  Clone ID: MRT4577_822C.1
atggcggctgccgtggtgccaagggcgaagggcagtgcactttgtgccggtggcgagataccggcactcactgccgtcagggacgaggcgggtgccgtgtcccaccgactggaggagatgaaggaggcgctatgtcaggcggctgacttcgcaaaccgcgcggcgtcgggggccctgatggcagttgtgtctgccgaagtcgagagacttcggacgcaacatgctgacgccgtacgagaaaagtcggccgccgacagcaagtgccgcaagctggcggacaaggtggctgtgctggagggtgagaaggctgacctccggcgccaactggcggcggagaggaaggaggctactgaggccctcgccaaggcgcaggctacgcaagtggaggccaatttggcgtgggcggagggcagcctcgccaggcagcgcgccgagcagctggaggagcggctcaacgcgctgcagagccgtgtggagagggccgaggcctcggcgcgcacggaggctgagcggacacgcaaacagctcatggattcataccgtgagctgggcgcgcggaccggtgagtttgatgtgccggaccgagagcccggacttcgctgccttgagtgggtgcaggaggagctgcaggcgctccccaccatcgtggaggggtttatgtcttatgcttctctggtcacctgcgagggggcgatgaacgcgctctctcgcgaagggtgccggcactacgaggtcttcgaccaagctgatgaggatttggagcgtgatatctacaaggttgaggaccccatagtgaaggaatccgccggagccctctacgatcggatgtggggcccccacggtcgagaggtggtcagggagcgggccgagacggcgaggagtcaggcggcgcgcggcgagagggtggatgactttggagctttgaacagcgcgctgcctgacccggagccgaacccggcggcggctgtgcccgaggccgctccggagctgcccccagaaagcgccgaaggcgttcccgatgcccctgcagccactgcgaccggcggagacctgtcgtcaactgctgcgccgagggctgaggatcctgtggcggtggctgcggaggcgacgacggaggctcccgcgacgactgggtcttcgcaggtggcctag

SEQ ID NO: 165257 - DNA, 692 bp, Zea mays
  Clone ID: MRT4577_82300C.1
cgttgctgtcgcaccctttcgcttcaaaacctccttgaactttatcttctcaatcggtgtaatagtctttgcctttaggccagcacgtactgcagcaacaccagtatcacctccaccctcataaacttctgaagttttaattttattttttgtttttattgactgatctggaaaacctgctgaggggtttgagaacagcccctgctcttgcattagagtttcccagtcaacatcaccctcatatgccatgtcaccatgtttgcgttttttggaacctcgtgtaacacgtttcacctttgatgtgttctccttgtcttcataatccaatggtgttgcaacatcaactatatccacatatttcacaggtgctgccatgtctgcacctagacacataggactatttccaacaatgtcatgtgaagaacaagaatccttgggggccataacaggcagctgatccaaattttcctcaataaccggagtagtacttgcttcaataatttctgttgtatcagttggtttattatcagcgtcaacagataatacttcctcttttcgtcgaacagatttcccaggaacctgttttggttttagaccaattttcctttttatggttgatgttggtgacttgccttgagaacaatcaacatcatcgctgctttccttccctagcgtttgggaacctgtgtgtg

SEQ ID NO: 165258 - DNA, 284 bp, Zea mays
  Clone ID: MRT4577_82301C.1
ctgttacggaggctgctgctgccccggccgaggctgctgagcctgagatagccgccgagaccaaagaggtggcggctgcggaggctaacgaggaggaggagcaggcagcgcctgctgttgctgccactcctgaggtcttagcgaccgaagaggaagcggcggcccctgctcccgaggccgccgtcgagaagtccgtccagtgaatccagccagcgccggacggcgggcgatctagctcgctgcgtcagcctgtcacctgaagtgcgcccgcgctggtgccactg

SEQ ID NO: 165259 - DNA, 2161 bp, Zea mays
  Clone ID: MRT4577_82302C.1
cgcgttgggccgggagactcttgttgtctttgtttttgtggtcggcgagcatggaggaggcggaggcggctcacgggctctgattggcggatggcgcgtcggatcggagcagtcgagcttcggggatttcctgtccctctggaagggatgaaatgcggcgactacctggtgaactgggtggagctctagtgtcagccagtgttcctgctgacgcctgcctcatctagcccccccccttcgttcagttcttgtggcgagttgttaatccaccgtgtccgggatccgtttggcctggggttttgaggagatggacgacgaggactactcgtgggtgcggcgcaccaggttctcgcagtccatcgtcagatccagctctggcagggagcagtatggcgcgttcatcgagcagttcagccgtggcgccgagctgaggcagaatgggttgggcacagggtacaggaaccctcgccagagtgtacagcccttggcgaagggatccggggtctccaactctgcaagggctgccgattcccagcgaaggccgatctccatctggcaaccggggaccggacgatcaactcatccgcgcgactccgcttcgtcacgcggcgtcgccggcctcctcccgtgcccgtggatgcagtgcgcagtgcatctacgaaggtgtccaagccgccgccgaaaccgaagcgaagagccaagtcccctatccccaagcgcgtcatctcggacgtgttcaaggaggcgaaagctgccaccaagaggttctccagcccgcagcggcagaggaagcccatgtccccgcggtcaccagacgacagccctccactcggcttcgcctcgctaagagcaccgagcaagctgaagatcaataccagagcatcctcatggccacgaacaaaccttgacagtggaccggcaagagttgctgcgccggagatccttgagaggtggacggtcgatcgctccgagttgctcatcggccatagatttgcatccggggcctatagccgattgttccacgggatctacaaggaccagcctgttgctgtgaagtttatcaggcagcccgacgatggcgaggacgacgaactgtctgctaagcttgacaagcagttcacttcagaggttacaattctggcaaggctccaacatcgtaatgtcattaagcttgttggggcctgtaattgcccgacggtcttctgtgtcatcaccgagtttctgtccggcggttctctgagggctttcttgcgaaagctggagcgtgaaactcttcctttggagaaggtcatttccatcgctctggatatcgcacgcggcctggaatatattcacctccaagggattgtgcaccgtgacatcaaacccgagaacatcttatttgatggagaattctgcgctaaagtcgtcgattttggagtggcgtgtgaagaaaaatactgcaatttgttaggcgatgatccaggtacttatagatggatggcaccagagatgtacaagcacaagccatatggccggaaggtcgatgtgtatagctttggacttgtcttgtgggaattggtcactggttcactcccttatcaagatatgactccgcttcaggcagcttttgcggttgttaataagaacttgaggccggctattccattgagctgcccagcagcgctgaagcttctgatcgagcaatgttggtcctggcaaccagaaaggaggcctgagttccagcaaatagtttcagtccttgaaaacctcaagacagttcttgaaagagatggaacactcgacaagatcccaagctcgatctgccaggccctggaacccaatgaccagaacaagaagaaggctggcaactggatccagaggctgtcatacgctcaacctgctttctccggacctccacccccaaagttactgtagttacacgtcttcttgttcttagcagcttggtatctggtactccagatagcaagtgtgtaaattgaatctttcttggtttcgctgggagaccagagatttcttcatggtatatactcggatacagtacatacatcaatttttttttcggctctttaaaaaaaaaaaaaaaaaaaaaaaaaaaaaaaaaaaaaaaaaaaaaaaaaaaaaaaaaaaaaagaaaaaaaaaaaaaaaaaaaggccccta

SEQ ID NO: 165260 - DNA, 2081 bp, Zea mays
  Clone ID: MRT4577_82303C.1
ctcgaggccggccagggcgtcagtctccgcgaccgcccgtgagccgtgatctgacgaggaggcgcacctgcttcgcccgcgctgcgacgactgacgactgacgaggcgtgcggcgcgcgtgaggaggaaggcttctccatctggcaaccggcggcaggaggacgatcaactccgcgactccacttcctcacgcggcgtgtcctctccccggtgctcatccgtctctgtcatcctgctcccatgcttttttttttagttcctcgcacggttcacgcgcttggcgttctgttccgtagccgtggtgatgattgccgttgttgatcgggagcagctgcgattcggatttggattcggatttgatccggtccgatttgacgtgggtaatgggttggttgctgcttcgtcagagagggtgtgcttgtcgcggcgcggaacgagcttccttccagtcccatgcgggccggtagccgccagcagagctcgcgtctgcctgggactggggagcgacgtctcgctcgctttcccccctttcctgtacccgctgtgatgtgaggaatgacggtctccgcactcatggtcctccccggtcgcggtcgccctccacggttgctcacccttgaggaggcggaggcggctcacgggctctgattggcggatggcgcgtcggatcggagcagtcgagcttcggggatttcctgtccctctggaagggatggaatgcggcgactacctggtgaactgggtggagctctagtgtcagccagtgttcctgctgacgcctgcctcatctagcccccccccttcgttcagttcttgtggcgagttgttaatccaccgtgtccgggatccgtttggcctggggttttgaggagatggacgactttttttactcgtgtgtgcggcgcaccaggttctcgcagtccatcgtcagatccagctctggcagggagcagtatggcgcgttcatcgagcagttcagccgtggcgccgagctgaggcagaatgggttgggcacagggtacaggaaccctcgccagagtgtacagcccttggcgaagggatccggggtctccaactctgcaaggctgccgattcccaaggcgaagtcagcagttgcccagtcggaacggaagctgaagcatgcgtcttccgaaggccaattgaacagagacggtgatcgcccgttgcaagaatcatcggcgaagcagagccggaaaggggccgtcggcctcagtctggacatttccgcagctgcatgtggttcggccatcccaggagagcccagacgcgctggatttctctttccactcggacgagcacagccagaggctccagagagtgtgttccagcccggctcctttctctacgaaggatgctacggcaccagctggtgattccagagcgagcagtgcatctatgaagatcatcggacaagtgtccaaacccgcgccgaaacgaagagccaagtcccctatccccaagcgcgtcatctcggatgtgtttaaggaggcgaaagcagccaccaagaggttctccagtccgcagcggcagaggaagcccacatccccacggtcactagatgacagccctccattcggctttgcttcgctaagaacaccaagcaagctgaagattaatagcagaacctcctcatggccgagaaggaacctcgacagtgggctggcgaaagttgctgcactggagatccttgagaggtggacggtcgatcgctctgagttgctcattggacataggtttgcatccggggcttatagccgattgttccatgggatctacaaggagcaacctgttgctgtaaagtttatcagacagcctgacgatggtgaggatgacgaattgtctgctaagcttgagaagcagttcacttccgaggttaccattctggcaaggctccaacatcgtaatgtcattaagcttgttggggcctgtaattgcccgccagtattctgtgtaatcactgagtttctgtctgggggttctttgagggctttcttgcgaaagctggagcgcaaagctcttcctttggagaaggtcatttccatcgctttggatatcgcccg

SEQ ID NO: 165261 - DNA, 390 bp, Zea mays
  Clone ID: MRT4577_82304C.1
caaaaggaaaaaggcaaaaaatagatggacccggggggcaacacccaacccatcccataaggggggggaacgaaacgagaagctgggcccagaacccccttaggaggggggtccaggcccccaattgcccctgaaatctaaacccagctaagggccccccccgggacggggggttggggcccccagggaaggacaccgggggtccccaattaaaaaaaggcatccggccacgggggggggggatagctgggggagcggcttcagtggcccccaaccgggtttcccggggaagacgccccccccggaccaggggggcccttgggcgaagggcggcccgtaaggaagttcccggtgtcctgcccccccgccctggggtggttttgggttggg

SEQ ID NO: 165262 - DNA, 843 bp, Zea mays
  unsure (1)..(843): unsure at all n locations
  Clone ID: MRT4577_82305C.1
gtttgagctttcgtctagaaagacttatctagcttgttaaccagacagacacttgcacggcaaggaattagttagattattaagcaccggtgcgccgccgcgcgacggctgtgctgcacctgcactgtccaagaagcgccgccaccccacatgccaaccaagaaagtggcgctgaaaagcccgagagcgcctcgacgccggagcagagcaagagggccgtggtgagctactggggcatcgaaccgcggaagctcgtcaaggacgacggcacggagtggccgtggttctgcttcaggccgtgggacacgtacaggccggacacgtccatcgacgtcaccaagcaccacgagcccaaggccctggcggacaaggtggcctacttcgtggttcggtcgctgcgtgtgcccagggacctcttcttccagcgccggcacgccagccacgccctgctgctggagacggtcgcggcggtgccgcccatggtgggcggcgtgctgctgcacctgcgctcgctccgccgcttcgagcacagcggcggctggatccgcgcgctcatggaggaggccgagaacgagcgcatgcacctcatgaccttcatggaggtgacccagcccctgtggtacgagcgcgccctcgtcatcgccgtccagggcgtcttcttcaacgcctacttcttcggctacctcatttcccccaagttcgcgcaccgcgtcgtcgnctaccctcgaggaggaggccgtccactcctacaccgagttcctcaaggacctcgacgacggcaagatcgacnacgtccccgcctcggncatcgccatcgactactggcgcctccctgccaacgca

SEQ ID NO: 165263 - DNA, 141 bp, Zea mays
  Clone ID: MRT4577_82306C.1
ctcaaccgactataccttacctggggggggtatctctaaagcatgggggggtaatctacctacgccttctcgactgtccattaccctgctgtctcatatctgctatcctgcttccaactctaccttggctactctgacccc

SEQ ID NO: 165264 - DNA, 522 bp, Zea mays
  Clone ID: MRT4577_82307C.1
gttcttccagctcacctgactgctgttggttgtataccctcttccgcaccgtagtacgctactggtccaacgttacctctggtgtgactgtaacgaagcaagcatgcgtgcgaagaggaaaggcgatcggataacgcgccgacgagaaagtgacatacagaatctccaaagctggactagagagccgactcggaagaatacccagactgctgaagggccgcctacatgtccagatagtcgaggcccgagcgcctgtctacctgcctgccccgctacaaggtccagctgctgaagatctagaactgcacgacgctgcgccacctgacaacactgagacccgcattggagcaagcacacatgcagctggacggacagaacgaccaagagctctgcagattgctgagcacagcgaccatcggtcgggggggagaggcgcccatcatctcataagactgcagctaccgaaaaacgccggagggcgcaacgccaaagctggagtaggagaacaggactaaccgcttg

SEQ ID NO: 165265 - DNA, 303 bp, Zea mays
  Clone ID: MRT4577_82308C.1
ctctagtatgatgccctctcgggtgaatctccaatctccacagttttcaagtaaataagcgaggcgaaaaatgttcgatgatatgaattcggaattatttgctattcttattagagcctatcgctgaagccaaaggaaatgagatcggaattcctcgtggaattccaattccacattttcaagacataaggaggcaaaaatgttcatatatgaattggaattatttgttatcttattaggcctatcctgaagccaaaggaaatgagatcggaattcctcggggaattccaacttcacattttc

SEQ ID NO: 165266 - DNA, 167 bp, Zea mays
  unsure (1)..(167): unsure at all n locations
  Clone ID: MRT4577_82309C.1
acatgnntgctctcatttttgacgggtcttaaagcttggatggccgggcattcttcaccactgcatcagaaaccatacacatttgctttatgtactgtttggatggcgaatggttcgtcgagcggcacaacctcagtggagaatcctgtttctaatagcagatctga

SEQ ID NO: 165267 - DNA, 208 bp, Zea mays
  Clone ID: MRT4577_8230C.1
tcggaattagaatatttaatatatttaaatatgtagaaagcatgtcacttatttctctaaatattacaacaataaggagcaggttacaacacatggtctttgtgttccacgtgctcagccttcggaattctcgacggtcttcgttctgacccattgagatggagggagcacccaagccttcgcccgctctatgcgcttcctccgtagc

SEQ ID NO: 165268 - DNA, 277 bp, Zea mays
  Clone ID: MRT4577_82310C.1
ggcaacatcgggctttacagaacattcagaaaatttcatctgcccagtttcagggggaacagcaatgcccgtttttttgccaggggttttttcacatccccataacccccaaaaataagaaatctttttgcaacgggggacggggggggaaaatatagcctcctaaaggggggggggccccactcccaaatatcccataaaggcaagcatccccgggatatgcataccgcaaacataggcttttctgaagcccataaataagcccccgcccaggctt

SEQ ID NO: 165269 - DNA, 346 bp, Zea mays
  Clone ID: MRT4577_82311C.1
gcaaacttctgcatttgtattaatatgtaaaggttctagcttacagacaatccatgactttacattgactgcaacaagaatttttaaaaactatatatccgaaatctgcaatgatagcaggtgacttctacagatattaaatacaataaataacaaatatattaatcacaaatgccagtaaaacctggctcacagttaaccatggtaaaagattcatattgtagaactctaatgatgagtgcgagtaattagactctcaaagatggtgtacaagtcactgttttcaggtccaaatatcgcatcagcttttcttagtgtatcctctctggtctgcttgggtgcattc

SEQ ID NO: 165270 - DNA, 334 bp, Zea mays
  Clone ID: MRT4577_82312C.1
cccgcaccacgtctctcctcttccgttcctctcctgcctccagctctccacgggctctgacccgcacaactgaacccgcgatggcgcgccgcctcctcgtcgccctcctcgccgcgtcgctcctgctcccgctcgcccgcgcggactcctcctcgttcaagagggacagcaaagagcacggagtagcttatgctacaagggtctcaaggggggggaggtgaggccctaagggttaagggggctccgaggggtatgggacttccgggggcacaggggggcccatgagtaaagtgactggatgagaggggaggggcgagggaggggcataagatgc

SEQ ID NO: 165271 - DNA, 276 bp, Zea mays
  Clone ID: MRT4577_82313C.1
gcggatgaatatgcttgaaacaattgtttggtcggaatttggcgcaactaattgtctggttgtttgagcctttgaggcgaacgtggaaatttcaataatttccgtccagattggatccgcaacagtaggcctcgttgttgatttctggaaaagaaaagttaggtctttttttttcttctgttgcttgtctccgagcaattaattcaaccttttcattgaatgtggtttggtattgagtcgccggttggctttgaattcgatttcctcagttaggtt

SEQ ID NO: 165272 - DNA, 689 bp, Zea mays
  Clone ID: MRT4577_82314C.1
cagatggaataggcttgaaatcttcttgttcaagggcgccaagatagagagtttgcagccaaagatgcattacagcctgttctaaagcttctcctgggtcctgatggggaggaattgcgtgtgttggttgtgaaagaggcagttcgtgtaacagaagccatcactattggaacactgatcgattcatacaatgcagctccagcgtttttgaagccattaatttccagtggcaatccagccggacccttcaagtttagtgaggctgaacaagaacagatgttggagctccgagaccaggttttcagagtatggggtcttttgagatcctcaaataactttgatccgagccttttgcaaccaatcgttcaggtgctacaagaaccagaggcccgcgtcttgggttctcgtgtcgcaggtggtgtaacacagcgccttgcggcacgtctgctgcaacagcttctcaggatcccttctcctggatcttcgtaacagattatatagagatgggctcgtatgaagcatgtaaattgacacgatacttttgacaggaaactgaggtgccatttgattcaagaaatgtaaatatagatatgggctcgtatgaagcatgtaaattgacacgatacttttcacaggaaacaggatgtcatttgattcatgaaaaaaaaaaaaaaaaacaccaaacaccc

SEQ ID NO: 165273 - DNA, 2592 bp, Zea mays
  Clone ID: MRT4577_82315C.1
gggtaccccctgggggcctcccgggaggccggtgtaagaaaacgcacgccccggcgctggccggtagtcaccccaaagctccgcctccgcacctcctctcactcgcccagccgcggctatggcggccaccacgtccacggcggcggcggcagtatccttctccctcccctcacccccgcactgccgcggggcccggcgccgccgcgcgccttccctcctccgtgccgcctccaccgccgcgcccccctcccccgacctctccatccagctctcgccccgcgcgtccccgcccgcgtctaccaacggcgccgccaccgcgcttggaccccccgtgtccgcctcctttgcccgtgaccgcgccgaggacctgcaggccgaggcccgcgcgatggcccgcgccgctggcgccacagtctacagtcccgagctcctcgccgcccgctacggctcccgccccttcaaggtggcgctccgggcagcggaggtgctgtccaagctggcgtcgttcggggtgaaggtcctactggacgagcggagaggggagtcgtcctcggagaggaggcgcgccagggcggtggagttgcgcaccatcttcactaggctcggcccaaccttcgtcaaaattggacagggcctgtccacgcgccccgacctctgcccggccgagtacctcgaggagctcgccgagctgcaggattcacttcccacatttccggatgaagaggcatttgcatgtattgagagagagcttggcttcacgcttgattcaatctactcgacaatttcaccttcccccattgcagcggctagtttaggtcaagtttataaagcacggttgaaatactctgggaagctggtagctgtgaaggtgcagagacccagtattgagaaagccattgggcttgatttttatctacttagaggacttggctttcttataaataagtatgttgacattgtaaccagcgatgttgttgccctcatcgatgaatttgctcgaagagtttttcaagagcttaattatgttcaggaaggccaaaatgcaagaaggtttaagaaattatatgccgataagcaagatgtattagtgcctgatatattttgggattacacaagtgcaaaggttctaacaatggagtggattgagggtgtaaaattaaaccaacaagcagttattgaaagtcaaggattgaaggttctggatttggtcaacattggtatccagtgtagcttgagacagcttctggagtatggttactttcatgcagaccctcatcctggtaatatattagcaacacctgaggggaagctggcttttcttgattttggcatgatgagtgaaacaccagaggatgcgagggtagccattataggacatgttgtccacttagtcaacagggactatgaagcaatggctcgtgattattatgcactagatttcttggaacccgatgtagatgtttccccgattgtgcctgctctcaagaatttttttgatgatgcactaaatgcaacagtgagtgagttgaacttcaagacaatagttgatggcctaggtgctgttctctatcagtacccattcaatgtaccagcatactatgcattgatactgcgatcgctcaccgtactggaaggtttagcactctatgctgaccctgattttaaggtgcttgctgcatcatacccttactttgcgaaaaggctactgactgatcccaacccatatctcagagatgctttaattgagcttgtattcaaggatggaaaattcagatggaataggcttgaaaatcttcttgttcaagggcgccaagatagggagtttgcagccaaagatgcactgcagcctgttctaaagcttctccttggtcctggtggggaggaattgcgtgcgttagttgtgaaagaggcagttcgtgtgacagaagccatcgccattggaacactggtcgattcatacaatgcagctccatcatttttgaagccattaatttccagcggcaatctagctgaaccctttaagtttagtgagactgaacaagaacagatgatggagctccgagaccaggttttcagagtatggggtcttttgagatcctcaaataactttgatccgagccttttgcagccaatcgttcaggttctacaagaaccagaggcccgtgtcttgggttctcgtgtcgcaggtggtgtaacacagcgccttgcggcacgtctgctgcaacagcttctcaggacccctcctgctcctggatcttcttagcagatatatagatataggctcgtatgattgtatgaagcatgtaaattgacacgatatttttcacaggaaatgagaaggaagcacaacccagaattcgagtatatagctagtttcttggttctaagtggataaagacattgtgcatcgagctttgtccagcagaccgtgtatatagttgtgtaaaaaacattgttttgtgctgtagattacactgtttacggagtgaagattgaaatgataaaacatggacgagtgagctgctaagatgtcacgcagcttagatccaaaaaaaaaaaaaaaaaagcggccagaaggatataaggaagaag

SEQ ID NO: 165274 - DNA, 271 bp, Zea mays
  Clone ID: MRT4577_82316C.1
cttgacaggacatgctgcgctatcgtctatacttcttacaactccattcttgtgcacattctggtggtcttcctatgcctgaccgcctttggcttcaaccgcctctactaccgctcacctatcaccacttcaacattcacatacagcttcaactccacatattacattttaccacttccattattactacatatctacaattgaacccacttcaatccttattctctgatcacacttactactcaactgtgctataatacacctgttcctt

SEQ ID NO: 165275 - DNA, 222 bp, Zea mays
  unsure (1)..(222): unsure at all n locations
  Clone ID: MRT4577_82318C.1
atgagcatgtgatcgctcactcttgcatctcgattattctntagctgctctagctctggcctctgtccctatctaataactagccactctgtcgtgtactcatcaaccttctgatcgtcaaccatggccactgcctagatccatacccccaccctcgtggcgacctaagaagcaccagtaatgtagaccccagctccgcccgccgtcttgcccgacgaggct

SEQ ID NO: 165276 - DNA, 243 bp, Zea mays
  Clone ID: MRT4577_82319C.1
caattcgagggacgagtcacgcgtcccgtagataggaccctgtttccaactattacactattagtgaatgctcctaatcagagtgcgtggactatgttgaagttgctctaatgcaaatagagcccaaacctacattttggtctcctactcttcaataacgcgtacatcgttcccaacttagatgtgtacactctcaaccgattctacctacactgacttatcgccggcctgtgcaagtacccc

SEQ ID NO: 165277 - DNA, 217 bp, Zea mays
  Clone ID: MRT4577_8231C.1
cccacgcgtccgcccacgcgtccgcccacgcgtccgcccacgcgtccgctgtgagcctgctgccgtcttcgtccgccgccgccgccgtcgtcttcgtgcataggtagcctcctctctccggtcgtcgcgtgatctgagcgactaggagtagtcctgatgagccgctgaaaaatctcgctgatattatgttaaccctggaaccgagagtgagtcttgt

SEQ ID NO: 165278 - DNA, 456 bp, Zea mays
  Clone ID: MRT4577_82320C.1
gtggggggtttttttttttttttttttttttttttttttttttttttttttttttttttttttttaaaagaaacactgggatccagttacccatttaacactttatataagggacatgattttttcttatgggtcaattccaaattcaaggggggccaaatgaacggaatgcagggcaatcttgtcacgtttaacatttgaggtggtacccaatcctaggggggggcatgtataaaaaggaactttttatactggggattaaatgggggccgggttttaagccaccccgccggtgggtgccgccctgatgatctgaaacaaccatgatccaatggcgacaaaaatgaaaaacccaagcactagaggggcaaacaggggagtcatttccctttttgacagggggttaagggacaaaaccccttctggggaagtttttttggaactttgggggttttc

SEQ ID NO: 165279 - DNA, 170 bp, Zea mays
  unsure (1)..(170): unsure at all n locations
  Clone ID: MRT4577_82321C.1
cagttcttttttctttcccctcagcctaacgaatnngtcaaaacctcacccaccgagcgtaggcgcaccatcatttcatctttcctcatggactccttcacataaaaacaatgaccccgaatgcccataattaccccaattatacccacacgaactcatcattttcatcc

SEQ ID NO: 165280 - DNA, 440 bp, Zea mays
  unsure (1)..(440): unsure at all n locations
  Clone ID: MRT4577_82322C.1
acaccccataattacttatatatatatatatacacacaaacaagcatagtcaaatacaaaacacacatatataactatacagatacataagggccggggggggggcaatccaacaaccaaatagcgacggagctggcagtcataactggccgcacgcaccccacaaaattccgccccaccaccacgcccacataggaagccaaaccctggagctcgcacagaaacaaaaaaaggggcctttgcactactttgcaccgggtgagaaccacgaggaggggaaatctaccccgcccgataacctagagacgggtactcatagacaaccccacgactgaaaaggagcccccctgtaacgcccacatgcctagcgcccttgataaaatttaccttgcggtctaaacccaactgaaaagaaaaccgnggcttgcttcgccctccct

SEQ ID NO: 165281 - DNA, 280 bp, Zea mays
  Clone ID: MRT4577_82323C.1
gatccatccagcaaagaggacaaccctaaatggtcaatggtggatgtacagtttgttcggatgatgaagcgcttcatctccctggatgagctgaaaacctatcaccaagcccacaaagcaactggtggtcccttaaaaagcatgactctcttcacccgccagagactttcagttcagcctctgactcaagaagaatttgattatattttgagcctggaggaagcagaaccaagttaatcagaaggctctactaatggatggagtgacgcaccgagatttt

SEQ ID NO: 165282 - DNA, 370 bp, Zea mays
  Clone ID: MRT4577_82324C.1
gacgtcgcatgcacgcgtacgtaagctcggaattcggctcgagcccacagccgccgacgtctggagccgtgcggacaacgcagctgctcatgttgcactgctgccttgatttgcatcagcccttgctcaaccttctggagcgtggcttgcatctttgcgagatcaactcttatgttggtccacaagtcccccatcgatggagctagtgattgctgagccgtggctgcccctagtggctgttaaggcccataaggcccatatattattgactgcctatatatatgctacagtaccccgaggggatcattatctcacctaatccaggttagtcacatggtaacagagcaggttagggttagggtttacatct

SEQ ID NO: 165283 - DNA, 616 bp, Zea mays
  Clone ID: MRT4577_82325C.1
cattgggtacctcgaggccggccgcgatactcgtgtagatcggttaccgattgttattcggaacgaatgtcagaatgtatgccgttgataaactgtaccatttttctcttctgacgtctcctgtgagtctctgtgacaggttccatcgatctctcctcctcgcctccggcggcagcgcgccacgacgacagactgtacaacggcctactgaccgacagcttcgacgaggaatcctgccacagcaggtaccagtccgccatgtaccgcgggaaccccggacggcgaccctccgcgtacctcatctccaagctgcggcgacacgaggctctccagcggcggtgcggcccgggcaccgccgcgtacagcaacgccctagagcagctcagggcaggcagcatgagcaccatcgcgccaccggagtgcgcgtacatcgtctccatctcgtacagcgggctcgggaaccggatcctcgccgcggcctcggcgttcctgtacgccgtgctcacggaccgcgtcctcctcgtcgaccccagcaacgacatggacgaccttttctgcgagccgttccccggcaccacgtggctgctgccgccgggcttcccggtggcgaactaca

SEQ ID NO: 165284 - DNA, 541 bp, Zea mays
  unsure (1)..(541): unsure at all n locations
  Clone ID: MRT4577_82326C.1
tgtctggcaagttcttccgagtttctggttgatttgatctgccacgcgctgcaaaacaccgtctcagctcgtaataatttaatctatgcagaatccccagagggcaggagaaattcctctgcatcgttgatctcaagggctgggggtactcaaactgtgacgtccgggcatacattgccgctatagagatcttgcaggtatacgttcatgttcatccatcacttactactaggtcctcttgaattttttacaattccagaaacttatctatcaaagtgaaataatatgatactcctatcatctcattgggattttggcttaaattctccatttagctcctgcacatttgtaacatgcgtcttgtttaaaaaagatgataggaatcattctagcatgtgctaatctgatatactttatgcaagatatgaaagccattttctcaggggccactaatatntatttatcagaggaagatctttggtcttctttgcaaatggttctagaacaggatacataaacctgatgaacatctatagtttct

SEQ ID NO: 165285 - DNA, 416 bp, Zea mays
  Clone ID: MRT4577_82327C.1
cccacgcgttcgaaaaaaataaaaaaaaaaaaaaaaaaaaaaaaaaaaaaaagaataaataaaaaaaaaattatatatataaaaagaaataacaataaaaaataaagaaaaaaaaaaaaatataaaattggggggggcctttttaggggatccaaattatcgatcccgtgcttgggaggtaatattttttttttggggcaacctaaattaaattaattggcgggggttttacaactgtgagattggaaaaaccctgggtgtccccaatttaatggctttgaaaaaaatccccttttggccgggtggggtattagaaaaaggggccgcaccaatcgccttttcaaaaagttgcgcagtctaaatgggaattgggaccccccttgtatgggcactttaagcgggggggttttgttgtt

SEQ ID NO: 165286 - DNA, 921 bp, Zea mays
  Clone ID: MRT4577_82328C.1
gtcctggcgcccattctgctgctggtggagcttcttgagcaccgcgtcgctgacgtggaaggagtagcacgccatgtcgcggcccgcggggaccagccagaggtcctcgatgggcccgacctgcttgacggagcgcggcgccgcgggggactggccctgcagcggctggttcggcggggtgaggacggtggcttccggcttcttgccgctcaggatctgcgcccacttgttgaaacaggtggcggccgacgggatgtcgccgatgaggtgcgcccagctgaaccccagcgccagcccaccgcatttgaagtttgtgatctggacgtagagcagcggcgagaagaagagctcggggccgagcaccttgtcgtagcagagctgcctgatcctgccgggcgcgccgtcgcggagccactcggccatgtcgcggtcgcacctggcctccacgatgcgcacgccgcagtcgttgcacttgatgtagggccggcgcggcgcggcgtccccctccgcctcggcgcggcggacgcggccggccacggggaagtggtcgtccagccacgggaacatggggtccttgagcaccttggtggcgaggccgtccccggaccggtagtagtacaccccgcgcaggtagtgcagcttgaaggccaggtccgcgtccgccagcgcgtagtccacctcccccgtcacggagctcggcaccaccgtggacagccggtgcccgtgcaccgcgcccggcaacaccgcctcctcctgttgctgctcgaacaccatgctgctttccttgtattgtactcggcgccggcgccggaaacgatgtggcctgtggcgggcgggcgggtaatggtggtggctcgtgggtcgtggctggcttggctggcgcgggagcgagttggttgggagctcgacccaaccaaaaat

SEQ ID NO: 165287 - DNA, 1816 bp, Zea mays
  Clone ID: MRT4577_82329C.1
gtaccggcgccctctctctcgagttttttttttttttttttttttttttttttttttttgagcatgcatgatctattcgagcagcttattaaggaaacatcatccgatacagaacaaacatcgcaaatcgaccacagtatttgcgcaacatcctgcaatacaatacatcccatcactagtcacgcctcattacgctactacactttcttcaagaggtggtactctgatatcgcgaaaccgaacgacgcaacgagcacgtaggcagcagcgctattattatgatacgtactagagttttcaggcgacctgcagcgcgctaccgagcgctgcgcggaggctgtcgatctcgtcgccgggcaaaaccgccgtgacgaggcggccgcccccgtcggcgtcgggctgcaccagcaccgcgccctcgtcgccgacgccgtccatgccgtactccacgtggaccgggcgctgccccttgatctccagcccgtacaggtccacctgctccatgtccacgagcgtcaggttggcgccgccgtacacgagcacgtccccctggaacgccgccaccgcggcggtctcgtcgaccacgttcttggccagcagcgccgccagctccgcgaggtccgtcttcgccggcgacgaccccgccgactccacgtacccgaccttcatctcgttggccagcgacttgccgctccgcgcggcggcgtcggccctgaccacggtcacggtgtccacgtcgcccctgatcttggccaccgcctgccacaccagcgccgacacgagctcgaaggtgccagcggccgcgtcctggcgcccattctgctgctggtggagcttcttgagcaccgcgtcgctgacgtggaaggagtagcacgccatgtcgcggcccgcggggaccagccagaggtcctccatgggcccgacctgcttgacggagcgcggcgccgcgggggactggccctgcagcggctggttcggcggggtgaggacggtggcttccggcttcttgccgctgaggatctgcgcccacttgttgaagcaggtggcggccgacgggatgtcgccgatgaggtgcgcccagctgaaccccagcgccagcccaccgcatttgaagtttgtgatctggacgtagagcagcggcgagaagaagagctcggggccgagcaccttgtcgtagcagagctgcctgatcctgccgggcgcggcgtcgcggatccactcggccatgtcgcggtcgcacctggcctccacgatgcgcacgccgcagtcgttgcacttgatgtagggccggcgcggcgcgccgtccccctccgcctcggcgcggcggacgcggccggccacggggaagtggtcgtccagccacgggaacatggggtccttgagcaccttggtggcgaggccgtccccggaccggtagtagtacaccccgcgcaggtagtgcagcttgaaggccaggtccgcgtccgccagcgcgtagtccacctcccccgtcaccgagctcggcaccaccgtggagagccggtgcccgtgcaccgcgcccggcgccaccgcctcctcctcatgctgctcgaacaccatgctgctttccttgtattgtactcggcgccggcgccgggtgtcagtagctagctagctcgcggtgcgcggggcggggatatggcgatatgcagatgctcgcggatatatagccgagcagggccggaaacgatgtggcctgtggcgggcgggcgggtaatggtggtggctcgtgggtcgtggctggcttggctggcgcgggagcgagttggttgggagctcgacccaaccaactgcgccg

SEQ ID NO: 165288 - DNA, 389 bp, Zea mays
  Clone ID: MRT4577_8232C.1
aaaaaaagggaccctttggaaaggggggaaaaaaattttggggcccctttttccgccaaaaaagcccctacattttttaaccggccccctggccctgggaacagggggcggggcacctttttggggctcaaacgccgggggaccccgcctgaactatgcaaaacctaaagggccccgtttgacataaggaagccactcccccctgggggaactcccccagctccacctgggggggggggggaacgatcccagggaaagattccccatgggcggggggaacagccacatccgtgggcggggcgggtctcactgaggggggaagggaaaacgagggtgtacccctcatgggcagcgaggccaagggaatcaggttcccccccaggtttgaa

SEQ ID NO: 165289 - DNA, 333 bp, Zea mays
  Clone ID: MRT4577_82330C.1
gtgatttagatcctgatatttctggtgggggagaaagtggctatcaagccattcttaaagttatagtattcttaaaggattccacccattctgaagcataggatcgccaggaccatatatacgagcgcgcaatattgtactctagacctaagaggaaagctatccaacttaggtggcacaacctagcagtatttacagaggtgcatactgagaactcttttcatggctttcggatggtgctcttgacgcagatgggatcttatatttgggcggtttcagttagactggaaacaaggaaaatgtcgctcattggaacgttgtgatggttgtggt

SEQ ID NO: 165290 - DNA, 384 bp, Zea mays
  Clone ID: MRT4577_82331C.1
tgcatcgaccaactcacatacccctactcctctaccaacgacctaccacccttaactgctaggttctatcctatcttccccttctagctctctaattgagccattcaactgcgatcattatttcataatgcttacttcattactaatgcctggcattccacagtttcaccaaccatctacttcaacaatctatatacattcaacctatctaacctacaagctacaactaacgcttgcatttagcgccttacaacaaccaattgcccaatccctacaacaatacttgtcacatctaaccctacaaaccatttcaactcaacaacaacaacaacagtctctcccatcaatcaaccacctatccacggtcaaccctctcacctactt

SEQ ID NO: 165291 - DNA, 256 bp, Zea mays
  Clone ID: MRT4577_82332C.1
ctctcttctgttcccttcccttctcttggtcttctctatctacattttctcttctgatattctctccagttacgtgactttagttaccacaggaagtatattcccagacttgtttaattcttggaatattaaatatatttggagccatctgttcctattgagaaaagaagcaaggcaacatagaaataaagtgttgttttaaataattggtaattaccatatggaactcaatcctaccaccaaaacttaattctgt

SEQ ID NO: 165292 - DNA, 484 bp, Zea mays
  unsure (1)..(484): unsure at all n locations
  Clone ID: MRT4577_82333C.1
gtcctggcgcccattctgctgctggtggagcttcgggaggggcgcgtcgctgacgtggaaggagtagcacgccatgtcgcggcccgcggggaccagccagaggtcctccatgggcccgacctgcttgacggagcgcggcgccgcggcgcccgcgggggactggccctgcagcggctggttcggcggggtgaggacggtggcttccggcttcttgccgctgaggatctgcgcccacttgttgaagcaggtggcggccgacgggatgtcgccgatgaggtgcgcccagctgaaccccagcgccagcccaccgcatttgaagtttgtgatctgtgaccagagaaacgatgtagccgaattttttttaacaaaacaaataggcgatgacattgtcactttgctcgatagcagaagagttcatgatcctggacgtagagcagcggcgagaagaagagctcggngccgagcaccttgtcgtagcagagct

SEQ ID NO: 165293 - DNA, 618 bp, Zea mays
  Clone ID: MRT4577_82334C.1
cattgggtacctcgaggccggccgggacaattccacgcatccctacccatcggtccagatactacgagattatcttgcagcatcaatcgcactacacaaatctagcacgatgtccggctcagcgcaaggaagcaacgatatgaagaaggccgtgaccaacgactcgaagaacggcgagcaaccgctggcaccggagaagaagcctgcgacacaactcgaggaggatgacgagtttgaggactttcccgtcgaagactggacagaagaggagacacagatccccaacggcaacacacacctgtgggaggagagctgggatgatgatgacacgaacgatgactttgccgtgcagctgagggaggagctgaagaagctgggcaaatgatgaacacaccaccacgatgttacgacacgatagcatttcaccgggaagccgcgatggtggtcaatagagggtgcagtacgacacggtctaagcggccagggcatatcacaaacggcatcacagcgtgtctgaagctacaaacaaaagactacaatcgaagcatggttcatcaatattgaaaccacaaagagctatatagctacattaccaaaaaaaaaaaaaaaaaagcggcc

SEQ ID NO: 165294 - DNA, 975 bp, Zea mays
  Clone ID: MRT4577_82335C.1
gttggtgcagaaaagggactttcatttgatctgtggacaacatatctagcggaacttttgaaggttcatcatggcaggcaaacacatcaaacgggagataattttttgtatgatgagaaagtcttatgcattggctctagtaaaaaaagacctgttctaaaatgggaggaaaataccgcatggccaggaaaccttaccttgacggacaaggcgctgtattttgaggccattggactgtcaggtaccaagaaaccaatgaggcttgaccttacaaatcagaattcaagggctgaaaagacgaaagttggaccatttggatccaaactatttgactctgctgtctcagtttcttctggttcaatgtcagatgaatggacattggagtttgttgatttcagtggggagatgagacgagatgtgtggctcgccttcatcagtgaaattatttcagtttatagattcattcgtgaatatggtccaggtggtgatgatccagcaatacataatgtgtatggtgcgtacaaagggaagaaaagagctgttagtagtgcagcgaacagtattgcaaggctccagtctctgcagttcatacggagattatatgaagatccagctaagctagtgcagttctcttacctgtccaacgcaccatttggtgatgttgttcttcagaccctagcagtgaacttttggggtgggcctctgactacaaaagccagatctgcaaatcatagatcaactcagtggcatagatcttcagaggacccatctagcggtcgcacacatgtttacgacatagatggcagcgtgtacttgcgcaagtggatgacgtcccccagctggacatctagccactcagccaatttttggagaaattcttctgtcaagtatggtataatattgagtagatctttagttgtagctgataaaaacttgtagaaaaggcatggttgactgtaaagagagagcaaagta

SEQ ID NO: 165295 - DNA, 3448 bp, Zea mays
  Clone ID: MRT4577_82336C.1
aattcggcacgagggcacgacacgctgctccccaccactaaccgcactcgattgagcgccatgctgcagctccagccccctgggttcctgcccatcccgcgccggcgcgtcaccgcccgcgggcgtcgcgcccgccctgtcatcgccttcaactcccagtggaagatccccgacgtcgacacagatgcggtgcgggagcgagtgcggtcttggatgtctctggcgcggggcgcgatcgccgacgcggggcgcgcggcgcgggagggagggaggcacaaagaggagcccgagggtgggaagaagaagcagcggaaggaggtgaccgtggaggagcaggcgttcgttgcggtgccagaggtcaccgtggagccgcgggtgccccagggttggctctcgctggacgccgtcgtctccatcgagcagttcgccaggttgaatgggttgacggggagacaggtgcagaggatatttgaatcacttgctccagagcatctgcacaatgacgctcgaagcctggttgagtatagctgcttccgctacttggcaaaagataattctgacttccatccaaacttgaaggagcttgcctttcaaaagcttatctttgtgactatgcttgcttgggaagatccatataacgaagacagcagtccactttcttcgctagacaactattctgtattgggaaggcttgttggagaagatgcctttgcccgaattgctcctgctgttgcaggtgttgctgatgtttcaacagctcattatctctttagggctcttgttggtgcagaaaagggactttcatttgatctgtggacaacatatctagcggaacttttgaaggttcatcatggcaggcaaacacatcaaacgggagataattttttgtatgatgagaaagtcttatgcattggctctagtaaaaaaagacctgttctaaaatgggaggaaaataccgcatggccaggaaaccttaccttgacggacaaggcgctgtattttgaggtaccaagaaaccaatgaggcttgaccttacaaatcagaattcaagggctgaaaagacgaaagttggaccatttggatccaaactatttgactctgctgtctcagtttcttctggttcaatattgttgttatgatatcatgtttttagtatgatctcaactctgaaggtaactggtttactactagcaggtcagatgaatggacattggagtttgttgatttcagtggggagatgagacgagatgtgtggctcgccttcatcagtgaaattatttcagtttatagattcattcgtgaatatggtccaggtggtgatgatccagcaatacataatgtgtatggtgcgtacaaagggaagaaaagagctgttagtagtgcagcgaacagtattgcaaggctccagtctctgcagttcatacggagattatatgaagatccagctaagctagtgcagttctcttacctgtccaacgcaccatttggtgatgttgttcttcagaccctagcagtgaacttttggggtgggcctctgactacaaaagccagatctgcaaatcatagatcaactcagtggcatagatcttcagaggacccatctagcggtcgcacacatgtttacgacatagatggcagcgtgtacttgcgcaagtggatgacgtcccccagctggacatctagccactcagccaatttttggagaaattcttctgtcaagtatggtataatattgagtaaatctttagttgtagctgataaaaaccttgtagaaaaggcaatggttgactgtaaagagaagagcaaagtagttgaaaggacacaagcgacaatagttgctgctacaatcgaaggtattcaatgtatgctgctacaatcgaaggagcttatgcttccttttgcaatagtggctgaaaatttcaagaaactgcaacgctgggaaaatccacgttcaacattttgttttctactattggttcatactgttattttcaggaacatgctttcttatgtatttcctttcaccttgatgacgatggccctttccatgcttgctgtcaaaggactgaaagaacaaggccggttaggtagatcttttggtaaagtgacgattagggatcaatcaccttcaaacacaattcagaagatcctagcccttaaagaggcaatggcctcagtggaaaattatctccagaatctgaatgtctccctgctgaagatccgcacgatccttctagctggccaacctgaggtgacaacacaggtcgcgtttgttctcctagcatcctcagccgtccttcttgtgtttcctttcaaatatgttcttgcattctttacatgtgatcttttcacaagggagctagaattccggagggaaacggtgagagccttcatgaacttcgtgaaggaacggtgggaatcaatacatgctgcccctgtggtcgtgttgccatatgaaggcgctgaaagcagccccaagacactcccggcagaagtttcggggcaagcagaaccccagaatgtccaacgtgggagcggttatgtctcctcaaagaatggcatcagcagttgatccgtgcagctttgagggcatcttgctgtaaacttgtgtacagttaaacttgtatagattactcgagagggcagattaggtatagatcgtaccaattggtggattttgcagagtaatgttccatttacgtcgtagtgaagataactagcgtagacgagaacttaggagagaattttgggtccaattcgctgtcttggatcgttggtctggcagttagggatgtcaagtaagaattttgggtccaattcacggtcttggatcgttggtctgacagttaggaatgtcaagttgacagatgcatgtattcataatccgtttggaacgctgcaggatcggggaatatatatcaaaaaaaaaaaaaaaaaataaaattaagaggtaaaagaaaacggaattaatggattggtttatattaattagtatttatatttttttgggtggggggggttttagtattgttcggcttcccgagacttaatatctgaccgggccggaacgttgtagcagtttcacttttgtgtagacggatatagttaggcttatgcttggacttagcttgatccctgtcgagagttgttttggttcatggtttgaatatacaaggtgtgcagtgcttaaatgtaaaatattgtggggcttaagtcatggttcaatttaaacaatttgatttgccctgcttttctcttttccttatataatacgaaaatatacgatgatgagttatatatagtagatcgtacgtgaagggagtagagtaatttattagtcttccatgtacatgataaatttttatttaagtgatggggtgtggggtaacagtaggttaattggaattggactggacgagaagtataacgattgtaattatattgagct

SEQ ID NO: 165296 - DNA, 380 bp, Zea mays
  Clone ID: MRT4577_82337C.1
gaccgaccgaattcggcacgccacgcttcggcacaagaaagcacctagcgtaccaacattggcagacaaaatcttcagcctctttatggttcttgttctttctggaggtgctggtgctgtgagcatgcgcaacaaatgctcgcatgattctatagcgctcatttgttcctagttccattaaccaacagtgtcttcgacctgtgactacaaaggtcttcaaacatacaggtgtgaacgggtattggctgcagcaagcgaacgttgatagcgcttgacaataacacattgatcagtcgtatcacatcagctagctacgtgtgcatttatagaccatagcatgaggcagcaacaactgctacaactagcgctgggacacctag

SEQ ID NO: 165297 - DNA, 573 bp, Zea mays
  unsure (1)..(573): unsure at all n locations
  Clone ID: MRT4577_82338C.1
cccacgcgtccgcggccgcgtggngaaaaaaaaaaaaaaaaaaaaaaaaaaaaaaaaaaaaaaaaaaaaaaaaaaaaaaaaaaaaccaaaaaaaaaaaaaaaaaaaaaaaaaaaaaaaaaaaaaaaaaaaaaggggccccggttccgcaattctaaaacgtccaaaatacacaaaagggcaacacaaggccggggcccttattttagaaggaaaacacaagtgaaaagggggagaaaatgtcttgccccaaccccgccccgccttttttgttttcccgaaccgccgggggcccccaaccgccccgccgggcggctttttacacggaaaaggtcgcttgcggaaggccccgccaagaacttccaacttttgtggaaggcttgaaaaaaaggtccccccaaaaataaagccccaaaaaacccccttttttttaatgaagccgcccccgcccacccgggttaccatcccaattaagttaaccgtaaatttcgtcctcccttaaaagtccgaaaatccccaacaaggagggggacatggaaattgtcccagttacaactggtaaaatggggcttttt

SEQ ID NO: 165298 - DNA, 243 bp, Zea mays
  Clone ID: MRT4577_82339C.1
cagagatagagagcatagttaaacccaaagttcttgtgaaagaagctgagaaaaaacttccttccgatacagaaaaagaggacagatcaccatctgctatattttcagcagagctgagtaaaacttcagttgttgacctcctgtactggagagacattaagaagactggagtggtgtttggtgccagcctattcctgctgctttcattgacagtattcagcattgtgagcgtaacagcctaca

SEQ ID NO: 165299 - DNA, 370 bp, Zea mays
  Clone ID: MRT4577_8233C.1
agccgagaagcgattcagcacgagcacgatatactcagaaatagctagtccccaaacactaggttatctgggcgcggcggctatggcgtgcgcttgtcccgaataaggctaatgcgcgcatgcctgctaaagggcatctgtggcaggaaatgagaaactatttatgaatgatggacatcagggagactttatgactaatccatgatcacctgtttttaaatgttggtggaactacataaaaccatgccatcaccaagaagatgattcttgttggtgaagtctttcgtttttatttggatgctttgaccttgtcagtcatttgtgcgcatgcctttccgaatcaagatatccttatctatgtactgactac

SEQ ID NO: 165300 - DNA, 777 bp, Zea mays
  Clone ID: MRT4577_82340C.1
ttgggaccctcgaggccggccgggaactgtactcctcccgccgcccgacggggatactcatgcgctatctctgtctacggcgacgactcccaggaggactatacagcgcatgccaccgtgtggtgatgcgagccggcgctccctctcctccagctgacatcccactccccagtatactaaggttgatgagcaccttctcactctcagctacatcactggctaccaagcctccatagggaggaccttgcgatgtctaccctctcctcctagtgtgatctgtccgacgagcctatcaacgaatcatggaggcataatcacatatgcatgtgctcataacgatgagggcaattcactgtccagggtacaggagcgaagggtgaatcgtcgacaatgccctcatacccaactccatatgttggtgaaacacatgccccatttgacgatgaggacaacgactattatggtgaactctaatggtgaggagaccaaagaggacaagaaagctgttgaatatcgaggtgcaattgacaagggttctgttttgaagaaagaatctgggaaggcgtcacctctacttgatgtgaagccatgcgacaatgagactgacatgcgcaatctcgaggaacctgttaagagcggccagatgtaaggaatggtctgccgcgcatcctagcttgtaccagctggatatgatatcaagaaggtgcaaatcgtgatgaccatcgacgacgaccttgtctctgaagacactctcattgacgactatctgtgcgctga

SEQ ID NO: 165301 - DNA, 415 bp, Zea mays
  Clone ID: MRT4577_82341C.1
agaaaccatgtttttttgtataaaggggcacggttttttgcaaccacatacaggggggtcaagtaaaaaaaaaaaccccaaaaattgatccagcgacccccttaaaaaccaaaccaaaagttacaaaacttccccttattaaccctagggggatggcgccaacaaaattttgctggggaggagggcaagcagggttaccgttacaaaaaaatttgggggcaaaccccaccaaaaaaccgggttgatttttaccccacgcctagacactactttcttccctggtaaatgccccgaaaaactggggttttctttggggggtccatttaaccttttcctaaaaagggaagggtggagggcctcctggggagttgtaaaaacctcacccccaaaggtttggggggcacaaggggctttt

SEQ ID NO: 165302 - DNA, 455 bp, Zea mays
  Clone ID: MRT4577_82342C.1
ctccctgaagatcatttctcaagtgtacatcgagcagtgcctatatttggactctttagaccttgcacctgtattggcctatttgagtttggctacatgtaatgaccttccagatgtcaatcaaactggaagctgctttgagtcgtcaacggcaaatcagtcactggatcatctgctcaattgtttcgacaaacttctaaatggaactgttagcaatccaccatcgaaattgaacaagaatggaaaagctttacgatcaaaagaccagcagaaaggagcatctgaagcgaaaggcacatttaatgtgattatgctgggtgcttcaattctgaagtttatcattgacacaaatatgaagccactcaatgatgacaaaataaggtgcctcaaatttgcatcatcctacataaaatatgcagtatcatccataaaaaagcatcaggaacagagttcat

SEQ ID NO: 165303 - DNA, 293 bp, Zea mays
  Clone ID: MRT4577_82343C.1
gagctagccgacgttctcctcccacttaaagcgacggccttctcgcagcgggatgcgtatgattcgctactgtacacaacacacctgcctgctatggactctactccttgctcaccgatgtaagctcatactccgatgctctcgacagctgtgctcatcgctatcaccagaaccgaaaaggtcattgccttacaagtacgacaaagctatgctactgactctacaacactgacgcctacaaaagatacggacgtgtagcgcctcttcgtgctccttctacatcaagccattgt

SEQ ID NO: 165304 - DNA, 1084 bp, Zea mays
  Clone ID: MRT4577_82344C.1
ctcaagcaaacttaactgcttttttttcctgaaaatattacacaacaaacattacaacgacaacagtagttgcgtacagcaacgaccacagcgaaccatgcatgcagatggacgctggattggtagtttcatgacttccatccagagacccatgtcttatttatttgtaaggaaacaaacacacacacaaacggtgcatcctctgcctacttctcatgacatgaagggcagcaccatcacttgatttacttcatttgcatccgtccaactgattatttatgttttttttttcttcttctttcctgtaggttttgcacttgagacaggatgcatgcaactgtttcgcatggcatatcacttggcgtgagcagaccccttctcggctatcactgcagcagaacctacgcagctggctgagccgttcgcgtagaaggcgtggatatccagctgccggaagctggtctcgggcgcgcttccagctattctgtgcttgatcgtgccgcgtgccagagccagctctcctgtccctcccacgacagcccactccccctccggtggaagaactcccatcacctggagcgtagatccgctgaacctgtcaccttggaacaccatgttgagggagacgaaccagcccacgttggctagatcagacaagacatgcacgccttgcgcgtgtcccaccacctttgcgcctggagcaggcgcgtctaccaacgtccagtcctgaacgacagtctcgccgaacggattagcgtgctggggtctgaaaattacctcctggttgtgatttggtccagcaccggcaacttgcttcagatacaggcgccagttcagctcgttctcgcaggtgtaggggcatgggcatgggtatcccagtgaagcagtagccaagaccagcagaagcgacatgaagaggatggtggtggtcgtcgggcgggcatgactagcaggatgtgccattggcaaaaggatttgtgggctcgggaaggagacgacagagtacgagtgtttagcttgctgtcttcgtgtgctgccgtcccggccgcgagcgcgtgggcggacgcgtgggcggacgcgtggg

SEQ ID NO: 165305 - DNA, 404 bp, Zea mays
  Clone ID: MRT4577_82345C.1
aaggcagaaaaaattaaaaaaaaaggctttgggttttaaaaggaaacaacccaaggggaccccctaccttggggggttcatcacggggaatggaaacccagaaaagcccttaccccccccccccgaaacccacaggcacagggaaaaggaaacccccccaatttatggccggggccagcagaagcagccagcacccttttccttttcctcgccgaagaaaaacccgccattgccggggttgaggggggcaaaaaaaaaaaaaaggaccttaaaaaaaacaagcggttttattttgggggggggcccccccgtttcgatgttgagttgggccagggcccccttccccgggaggatccccccgaggagggaaaaggccacccccaggtgggccatccgccccaaaa

SEQ ID NO: 165306 - DNA, 454 bp, Zea mays
  unsure (1)..(454): unsure at all n locations
  Clone ID: MRT4577_82346C.1
cgggnccgaaanccccgggcgggccacacccttccgccaacccttccgaatccaataaaattttacctttccaaaaaaaattaccatgcccctgggggagggttaacaattttaagttgggcactggaatatataaaaaatttgtggtttcctccttccagtttgtgtttgaaccaattgataaccattttccggataatcctcaattgatttcctttacttttcgggtaatacaatttgatttgaaaccaaatggtgtttcctttggtaggccactaaatttggcatttagtcttgatgggggttttgttgaacccaaaccttaagggaatgcatctccagtggacttgattttaaaatttgtccttccattcgcttttaaattcctttataaaaccaaccttaaggccagggttgttactttgcccaaaaaaattgggtgtatggttgtttt

SEQ ID NO: 165307 - DNA, 1868 bp, Zea mays
  Clone ID: MRT4577_82347C.1
cccacgcgtccgcgcgagaacgatcagccagcgcccagccgcccacccaccaagagccacaggccagaacgcggccacgccgtcctcttcaccccagggttgccgacgcggcgactccgatcacccaccaccgctgccccctgtcctccctgctgccgcctgtgccggggctagcccgccgcggagccatgtcgcggtccttgagcatgagagggagcatgaggtcgcgccgcgacctgcctcctcctgagaagacaattgaaaggcttgagagtatggtggatggaggaaatttctatgaagctcaacaaatgtacaagtcaaccagtgcaaggtatattgctgctcagaagtattcagaagccttggacatccttcagtcaggcgctttggttcaattgaagcatggacaggttacctgtggtggtgaacttgctgtcctctttgttgacaccctcatcacaggagagcttccatatagtgaacaaatttttgatcgtatcagaaagatgtatgaggcattcccaagggtaactgttccacatttccttggagatgactatgatgatgagggacatcaattatctgaagctatttctgctgccaaagtgcgggcagagagttgctcatcattcatgaaagctgcaatcaggtggtctgctgagtttggaacatcaagaaatggttcttctgagcttcacgttatgttagcagaatacatatattcggaatctccagagacggacatgactaaagtctcaagtcattttgttcgtggaaatgatccaaaaaagttcgcttctatgctggtgaactttatgagcaagtgttaccctggtgaagatgatactgcaattgcacgtggggtcctaatgtatctatctcaagggaacctgagagatgcaaatttacttatggatgagatgaaggaacaactaaaatctgctaactcggattttccgaaaacagatttgattcagttcatcatgtatcttttaccaacacttgagagagatgcttaccctctttttagaacacttcgacagaagtataagacaagtacagatcgtgatgctgtgtttcaggagttactggatgaaatagctgcaaaattttacaatatacaacgccagaaccctttagaaggccttttcagcgaaatgttcaagatataatgcacgagaaaagaattttatgtcgatgctttcatctaaaccattggctggaataatacagttgctgccacggcagctcatgatcaatgaaggtgcttggctgcttgcccaactagaatgtccaaagccatacatttagcatcttactgcatgaagatatatacttaactctggaaaatcgttgattagtctcagattgttacggagcatgtgtaacttaattttgttttctattacatgttttcctttgttgcccttgccctgtccacttttagagatgtatcttgcgtgacccagagatcaaaatggtaacctatttatattcattgattttaataaaaaaaaaaaaaaaaaaaaaaaaaaaaaaaaaaaaaaaaaaaaaaaaaaaaaaaaaaaaaaaaaaaaaaaaaaaaaaaaaaaaaaaaaaaaaaaaaaaaaaaaaaaaaaaaaaaaaaaaaaaaaaaaaaaaaaaaaaaaaagggggggcccgtttttagggattcaaattttctttcccgttgtttgcaaggaaatactttttttttggggccccaaaattaaaataaaggggccggtttttaaaactttggggctggaaaaaaccctgggttcccaaaattaaatgctttgtagaaaattcccctttttcccaagtttgtttaaaaaaaaaaagcccccaccaatacccttttc

SEQ ID NO: 165308 - DNA, 1742 bp, Zea mays
  Clone ID: MRT4577_82348C.1
gaggtcggccgggtgtgtattcagtgtaatgggctatgtattcagtgtaatggggctttgtgtaatgggcttaggtccaacatctatattataaatttagctcacgaccttgataaaaaaaaaaaaaaaaaaaaaaaaaaaaaaaaaaaaaaaaaaaaaaaaactctcggggccggcggcgaaagagctggctggcctccaccgcaagtcaccaaccacccacggactcaccagtcaccaccccaggccagccgccacgtttagccgggctaaacaaacacgggcgcacaatcggaactcgctgcactgcttggaatccaacgagccaatcattcaaatcctccccggaaccgcgttgagcagggcacggtcgattggatctagtaggtgagggtccgtcgccgaagaaactcgcaggcggtcacgaggaggcggcgggggagggcggaggagatggcctcggaggagatgacggcgacggaggtggctgcgctgctggacttgaagccgcacccggagggcggcttctacaccgagaccttccgcgacggctccatcacgctcaccacgtcccagctcccgccccactacaaggtaaaccgtgctgttagcaccgcaatctatttcctacttcccgcagggagtgtttcccgtctccaccgcattccctgtgctgaaacctggcacttctacaagggagagcctctcacggtcttcgagcttcacgacgacggtcacattgaccttactgtcattggcccacaccttgaggcaggccagcgcccccagtataccgtgccaccgaacgtgtggtttgggtcgttccccacactagacgtcgagtcgttcgcatctgatggcagcgttcttgtcaagtctcggaagagggaccctgagctgcattactcccttgttggctgcacctgtgcccctggcttccagtacgaggattttgaaatggccaaatttgaggacgtgagatccatcgctcccaaggctgaacctttcctcaagtttcttattccctctaccgattaactccagagcagcctcagatgattgtggatgggttctcagcgactttctatactgcatactgtacggatggtgtttctagtgtgattccatgagagttctgctttcacgacagtgtagacagtaaactgtacctttgtggtggcaccggttgaaacgtttggtgcattgaaacagaataacagctggtcttgatgttgaatagcaggtgcttttgcaaaacaaaaaaaaaaaaaaaggacgctgggagcataggaggatctgataaggtttcacgtgattaaattcaaccgttcatggctctcgatcgtgcagagcttctcccgctgcaaagagtaagcctgcaaggcagaagccaagcgagtcgtgcttgtccaatccgtttttttcatgttctgcttctgctgcttgtcattctcacttgcacggtgcgatgatacggaggtcagattgtggcccaagcgcccaggtctgctgtaaaagacggcccagatgttgggctaccggctgacaggcagcattgattgggcgccctcgctactcgcggacatgactcagattattcgagctttcggccttttgggccttggtaccgtagttgatttgcacgcattacccagttcttccaaggaacggcaacagacctgggtgctgtttggttcaagaaatgtaacgcaaagggtaatggtaatggtttacattcgatt

SEQ ID NO: 165309 - DNA, 637 bp, Zea mays
  Clone ID: MRT4577_82349C.1
ttgggaccctcgaggccggccgggagagactcgccggccgccgatctcccaacacaaccagactccatgactggcggaagcggcgggagacgagaccacgagtccgaccgagacgcatcgacggccttgcccgtcccgggaccctgcgcctcgacgcagcgcgcgctcgccgagtgccgccgccgcgccgcgcgcgggccgctgcagcccgaggtgctgtgccgccacctgaaccgcgcgctagcggagtgcgtcgtgaccgcgtgctgccccgacgagatcgacgccgtccgtaccctctgcggcagcgctggcaccgcgctcaagcgcaagcagtgccagcgggcgcgcatcgatctcgccctctgcctcgaggcgcatcaagagccctaaatcctaatctgctatccgtggtgcatgtgaggaatctcttcccgtgtacagcgattttcgttgataaccacacatctccgttctattctgtagtctatttatatattttgtaaaatacaatcttgttatggaacattggagccccaagctcccaaccaactgtctgtaaataggagtggtaatagatcacgattcaaatatttcttcacaaaaaaaaaacaaaaaaaaaaaaaaaaaagcggcc

SEQ ID NO: 165310 - DNA, 168 bp, Zea mays
  Clone ID: MRT4577_8234C.1
ccagacacacatacaacttataaaaaaaatttttgaactatatacacagctccttttacagagataacgggtttgaatactctgcaattgatactcaaacttctaaattgtaggcgcataatttcatttaattaatcctcacttacacacaattatcttgaaaataca

SEQ ID NO: 165311 - DNA, 468 bp, Zea mays
  Clone ID: MRT4577_82350C.1
ccaagggaaaaaagccccctttagccccaccccgaaaaacccccaaaccgggccggggaaaaaaaaaccccgggcttgtccccccacccacccaggcggggggtgcctgaaaaccccggcccccccccaaaggaattggaccggctctccccgcaggccctttttaactagctcggccggcccccgcccaaaaccccccaggaaccctgttcctgaaccacctaaagggccccccccaccaacctggaggttttaaaacaacccccccccaaaacccttcttcgcggtaaccccccggggggagatttacctgttcccccccatgttcaggggcccccccgggccccccccaatccccgaattggggttcccctccccccccctttggaaaaggccataggggaccggccaaagtcccccacctctgcaaatggcaacatcccccccccccaacttttaacccttttg

SEQ ID NO: 165312 - DNA, 173 bp, Zea mays
  unsure (1)..(173): unsure at all n locations
  Clone ID: MRT4577_82351C.1
tcccgggaagnaagacaatacgcattaccgactctgtcgcaagaaggtagaacgaatcagttatatgcatcatgagacatacccctgtcacgcgactggcacacataatgagcgaataacaaccggcatgtagttgggagttcatgttactcatcagcggacgctcagggttg

SEQ ID NO: 165313 - DNA, 242 bp, Zea mays
  Clone ID: MRT4577_82352C.1
tgttgatgggtgcttcattaattagcaagaccgatgaactagcaaggcttcttgcagaagcacttgcgcgtggccacgacctgcttgcactcgccaccgggaaagctctccttcatgcacacatcggtcttgctaattgttgatgggtgcttcattaatttgatttgatgggtctcatggctacgagaaacaaaactacttttgataaaatgcagggcatgaaaagcgtttctgcagtcctt

SEQ ID NO: 165314 - DNA, 399 bp, Zea mays
  Clone ID: MRT4577_82353C.1
aaaaaaaaaaaaaaaaaaaaaaaaaaaaaaattaaaataaaaaaaaaaaaaaaaaaaaaaagggaaaaaaaaaaaaaaaaaaaaaaaaaaaaaaaaaaaaaaaaaaaaaaaaaaaaaaaaaaaaaaaaaaaaaaaaaaaaaaaaaaaaggggggccccttttaaaggtccaaattttacttccccttccttgcaaattcttatttttttttttgggcccccaaatttaattcacttggccgttttttaaaaacaccgaacttggaaaaaccctggttttcccaattttattccctttgaaaaaaatcccctttttcccatttggcttattaccaaaaaggcccaccccaatcgcctttccaaaaatttgcaaccccttattggcaattggtacccccct

SEQ ID NO: 165315 - DNA, 220 bp, Zea mays
  Clone ID: MRT4577_82354C.1
tacatagctcttcagatcttgtctgcttgcatctggctgctgtccggttgatctaatatgttgagaattctcactagtagtaggcagcgtacaactactgtgacgtgactgatttgcatacagatgactaggtccatggagcggctgtcacattgggcatgtcgatgtacctccacagatggaggctgatgcttcaccactggatgagcgggttgaggat

SEQ ID NO: 165316 - DNA, 244 bp, Zea mays
  unsure (1)..(244): unsure at all n locations
  Clone ID: MRT4577_82355C.1
gttttattgaatatcaaattgaataaaacattttacttctgaagatggcgtanatcaacaaccacaagattattctggccgatgaaactgataacgatgaagatgatgatgcgtgagaccactgattagttccatcttgaagcataataagaagttgctagtggtcgtttgtcgtttggggggggttagtggctgaaactggcctgagccagtttgttctgtttactacagtgacttccttatt

SEQ ID NO: 165317 - DNA, 263 bp, Zea mays
  Clone ID: MRT4577_82356C.1
ctttatcgtaagagacaggggtgctgctggacaggctactgttcccaacgtagatgtagttacaaagacattaacgagtggaagagtcctaaaagctgatttggttagcgatgtaccatcatggagatcattgaccaaatcatatatggtcgaatgagggttacgagtaagtctggctctagaccctcgcatgcagggaaacaagtttggagggaatataggcgatcgaactatggagcttcctacttctctagctctacaac

SEQ ID NO: 165318 - DNA, 547 bp, Zea mays
  Clone ID: MRT4577_82357C.1
aatgttggcactactaccagagtcgtcgcgcctgacgcgccgccgcacatgaacaccgtcaccgctgcggcggcggcggccatcgcctcggaccccaacttcacggtggcgctggcggcggccatcacctccatcataggcggcggaggccatccagttccgatttgaattcatcatggcgggcaggggcaaggacgacagcagcagggcctgaccccgacgagtaacagcaacgccaacaacaacaatgcggtggtcacgagcagcagcaacaacactgccaccagcaacagtgagacccagtgatgttcaaaattaagctgtattgttgattcattgttccctaactttttttttactttatttcgtttctgctagctagatacattacacctactagtatgtatgctaaataatactccgtgcgccccagaatataattctttttagcttttttttctctgtcaatattcgaatgaatgacaataaatttaaacatatatgtaaactacatcatagattgattaatgaatagtgtattcagtct

SEQ ID NO: 165319 - DNA, 529 bp, Zea mays
  Clone ID: MRT4577_82358C.1
tcatgggctatgtgcaggccaccatgggcagcctcctcctccgcgggactgtccacctcccgctcgcagcatccgtcggactgacggacgatgggctgaccgtcaccttccgggctgagggcggtatacctatctgcgtacaactaggagcgctcttggacggacgcaggtgccgaggtacgcgaccctgactctgagtccaagcggacacacagccgattccctcgccagcgcgagggcagtctagatgacgaagacagccgccatcatgaacatcaccaatagtctgcgcgcggtaagaaggattccgaccagacgatgtcttcctcatattggatgaagaggaaaacttattgttgtgctgagcagagctggcctgacaccctatcacacgtttggggatcaacacaagctatacgcatgttttgctacgctataatcaaatactttctttgtggaaaacaggaggcatcatattaaacgcctgagcagctgactaacacatatagacagcacttgtgaaggggcc

SEQ ID NO: 165320 - DNA, 262 bp, Zea mays
  Clone ID: MRT4577_82359C.1
tcggcaggcagatccacataagaagggcaggagaacgagggacatggcggagaaggaagcaccacggtcctttctcgctcgccttcctcctctagatcgttcagcggacattggaaatgaagagcagcagcgctgcgtcgtcatcacgcatcatgcagatccagtcctcacagccccgctgctgatccatgatccagagcagagcaaagttcggaagaaggcactgaagtgtgcagcccaactcaccttgtcgctggtctct

SEQ ID NO: 165321 - DNA, 155 bp, Zea mays
  Clone ID: MRT4577_8235C.1
cggctcgagggaaaaaatgaattttccaaactagtccgaaatataggataagtggtgaaactaaatactagagctttgacatgacccacgtacggtcttgggggtgcatgcacttatgcgtgcagtggatgcatgccacccgagttcttctgcga

SEQ ID NO: 165322 - DNA, 1685 bp, Zea mays
  unsure (1)..(1685): unsure at all n locations
  Clone ID: MRT4577_82360C.1
ggggtccacttactatgtagctagcagctgcatccgttcccctcacataggtgagactagagtagagtagactccatgcttgccgccgggtcgcgctaccatgcttgccgccgtgctgctgccgccgccggcggcggcctccgccgtgatcaatcttgctcatgctcggcaggcagccacatatctgagtttgtcctgagcagacagatatctgagttactaagatatatacaagcgtgtgttattcctatttctatcgcccgtacgtacgtgttcgcacgcacgcggtacgttgcgacagtgaccaagggggcttctgtcatgaaaacggcgggaaataagcaatgatgaactacaagtccttctgtcgtcgtcctcagctagctagcctgcaggcgatacgccgcccacgagccagcagggcaatattgtctctggatcggaggatatatggtccttttgctgcagagcgtgctatatattcatatttctatggcccgaggatcggagtttgccgtggaacgtcgcgacagtgaccaagagatcgaccttctgagtgccatgcatgaaaacggcggaaaagcaatgaaattttttttttttttttgaaatgcgaatagaagttgtattgattcgattgttgatgatgacaaatcggccgtagacctctctttatatagaggaggggggctggaccctttacacgactagattccgagttaattccgtgaatctagccaacaatcatagcacaaaactcggaaccctaaactgttctgcgcaagcgcggaccgtccggcctcggggccggacggggcggaacaccttctaatttatttctggtgagactagtggagatagactaaacacgccaggcggccgggccgcgctaccatgcttgccgccgtggcggcctccgccgtcatcaatcttgctcatgctcggcaggcagatccacataagaagggaaggagaaggagggacatggcggagaaggaagcaccacggtcctttctcgctcgccttcctcctctagatcgttcagcggacattggaaatgaagagaagcagcgctgcgtcgtcatcacgcatcatgcagatccagtcctcacagcccccctgctgatccagctgttgtccagcaacgacaagaagctgggaacgacatggcagagggcagtactcgctgcagcaaacatcgtcatggctgccgtgctttgtgtcggctgccctcgtgctcgctgaaactatcttgcaagacctcctcgtcgtcggcgccatgttcccggtcatcgcgccggcgttgcgcacagcgtgggtgctcgtcgaattctgctccgtgcgtgacgctcgcggcgggcgcacggaggaggaaggcaaggtcacgcttggcacgatgtacgccggcatagcagtgacggtcgcgtcgatgtcctttggcgccattctagcaatctttgcggggctgcttggcggcaccgtgagcaaggagcagctgaagggtgttgagtttgtgatccaaattctgaagaaggcggccacctctataaatatctttgtaagccgcaggagatatctatctcaattgtaaatctcctgcgatctgtaacactgaanaaatagtgagaagttcccggtggcggnccatggttttttccttcaccctttggaaggggtttcacgtc

SEQ ID NO: 165323 - DNA, 1506 bp, Zea mays
  Clone ID: MRT4577_82361C.1
gatagactaaacacggcggccgggccgcgctaccatgcttgccgccggcggcctccgccgtcatcaatcttgctcatgctcggcaggcagatccacataagaagggaaggagaaggagggacatggcggagaaggaagcaccacggtcctttctcgctcgccttcctcctctagatcgttcagcggacattggaaatgaagagaagcagcgctgcgtcgtcatcacgcatcatgcagatccagtcctcacagcccccctgctgatccagctttgatcctttttctaccagtgcgtcaagccggaactgttcatcaccaggagtcaggctcagggtttctaagatcctcttcattcggcattgccgtggtttcgctcttctcgacaagcatatcgatcacctattccctcctgcccacagcctactacttcctgcctcgatcttgcattgatcccatcactcctttttggcggcttccacttcctctattatcgcgaggacgacactggttttaatttgcaggtaattaacggggagatcagtgatccagagcagagcaaagttcggaagaaggaactgaagtgtgcagcccaactcaccttgtcgctggtctctacgtcgttctcggggttcggcggcgttctgcttcttatatctccccaaggcagatagcctcgggcgcagcacttccgcacgtcaaagtcacggtgtgcctcctgctcggaggaagcgtcaccggaatgtttgcattgcttctgtgcaggctgttgtccagcaacgacaagaagctgggatcgacatggcagaggccagagggcagtactcgctgcagcaaacatcgtcatggctgccgtgcattgtgtcggctgccctcgtgctcgctgaaactatcttgcacggcctcctcgtcgtcggcgccatgttcccggtcatcgcgccggcgttgcgcacagcgtgggtgctcgtcgaattctgctccgtgcgtgacgctcgcggcgggcgcacggaggaggaaggcaaggtcacgcttggcacgatgtacgccggcatagcagtgacggtcgcgtcgatgtcctttggcgccattctagcaatctttgcggggctgcttggcggcaccgtgagcaaggagcagctgaaggcgtgcaccttcctcctggtgtcagcattcgtcggcgacgacatggacagcgcgggcggacaaaacgaaggtgagcaccgagttcgcggcgacggtgctcgcctgctgcagccttggcactctcgtgctcgcggcgctcgctctcttctatcagatcgtggcatgagctggagcaataagaatggagtaccctgtaccttttcatgacgccttctctctggtttatctgaaaacagtttcagctcaagtttctctggttttttttttcgtttggcaatcaactttttcagtatttttttaaaatgacgtataagctacctttttagtgctcccgctcctaataataaaatggctccgtctctcgag

SEQ ID NO: 165324 - DNA, 1109 bp, Zea mays
  Clone ID: MRT4577_82362C.1
acatcggatcgtctgtaaatctgatccgtattatgagtaaagcaaatttaatgaagtattatgctgatgcaaaactttctgcattgatgtccttcttgaaatttttatctgtctacaaaggagcgatttctaacaaaaacttggacttacctgatggaggcatatcagtagcggccacacaatcagcaattaaatgtgcatgtaatagggatgagtcaactgttgattcactgctgcctcaagctcatacagatgaggttttgtttcccctcttgtccgggcaagtggaattattgcttactttggcccgaatattgtttcatcaagcaaagaacaagaaatcaagccatctctgtccagatattgtacttctaatgaaaacttcaggtgccagcacttgtttgtttgttgatctcatgccatctgctcatgctcttaagcaaccagtgaagacacttcttgttctgcttttgtcgtcatatgagttcatgtacagcaaggttgacataaaagacctaccaaatgatattaacatttttggcgaattagcccttttaagtgtgagcttgctacctatactgtgcaaattggcagagaatagggaatgctctgatcttgctgttgcatcaatggacctaatattgaagggatctgtaccttctaatgtatggatgcctattctgcaaaagcattttcatctccagactatactgcataaatgccagaatggtgatttattatctactcaagttatacttaatttcctcttgaccttggggcgaacaaaggatggtgctaaagttcttcagtctgccaatatttttgcattcttaaagttacttttgagtcagttgtctctggatgactcctgtttgagaaattccttgagcgcccaagtgaaaggatgtgaacctatggggcttgggtctcggtattgttgcgtccctgaaccattgtttggatgatgacatttctcataacaatgtcgtgagcaacactatcagcttcctttcaggacatgtgcctttggtgtcatcatatctgtctacacagagtgctactactcatcagagcaagaaacgggcattgtcgcagaagtcacagacatc

SEQ ID NO: 165325 - DNA, 741 bp, Zea mays
  Clone ID: MRT4577_82363C.1
cctctgggagcaggtctccaggaagctggctgagaaggggtacaaccgcagcgccaagaagtgtaaggagaagttcgagaacgtgcacaagtactacaagcgcaccaaggagagccgagccggccggaacgacggcaagacgtatcgattcttcacgcagctggaggccctgcacggcaccggggcggctcccgcgtcggtggcggcgtcgcaggtgccccctgcgatctctggcggggtgtccggggcagcggggccgttagccgtgcgcttgcctgccgagccaccgcctgcggtgtcgggcggcgtggggatgccgatgacgaccgtgggctacccgagcttctcgacgtccaacacggaggactacacggacgaggacgactccgacgacgagggcacagaggagctggtgggtggcggcgggaacgagcgcgggaagaggaagagggtgtcagagggcggcgcctcggtcgccggcggaggcagcgggaagatgatgaggttcttcgagggcctgatgaagcaggtgatggagcggcaggaggcgatgcaacagaggttcttggaggccatcgagaagcgtgagcaggaccgcatgatccgcgaggaggcgtggcggcggcaggagatgacccgcctcgcgcgcgtagcaggagatcctggcgcaggagcccgccatggccgcctcacgcgacgcttgcgtcctctcctttatacagaagatcaccggacagacca

SEQ ID NO: 165326 - DNA, 252 bp, Zea mays
  Clone ID: MRT4577_82364C.1
cgtcgacggcattcgtccgccaccaggtaaaaatatgtcctcgatccgattcgacgagtgcacaccggcttttttcactgcgatcgaatcgatggccgccgagggcgagaagaagatgataaccctcaaaagctccgatggcgaggagttcgatgtggaagatgtggtggcgatggagtcgcagaccatccgtcacatgatctaggatgactgcgccgacaacgtgataccttttcctaacgttaactccaa

SEQ ID NO: 165327 - DNA, 408 bp, Zea mays
  Clone ID: MRT4577_82365C.1
aaagtcattcccttgcctgcttctgctcgcccgaaaaggctcccgttctgcaggcccgccccgccccgccccgattcaatgcagccattgccttgttgagctcgtctcgtcccgctgctttccctctcgtcgtgctcctccccacgcggccacgccacgcctcgctgtaaaccgaccctgttgaggcttggacgcacccgcgtgtccgcgcctgcctcccatcccacgccccctcccctccactccactccactcccgcgccgtcaccggccggggggaaagctccaaccgaggggtttttgtttgtacgcgcccgtttggcccttgctgtggtcacatcgcccgctcccccgctgcagcagcgccaaagatatgagaggaaagtttgggatcagttccccggtgccc

SEQ ID NO: 165328 - DNA, 316 bp, Zea mays
  Clone ID: MRT4577_82366C.1
attcggctcgaggtaataaacacggattggcataagcagtctaacagggactttgcaaggagatatacattacgcgagcaacacgagtgcgaggagttagcccggaaggtaactaacctaaccaccgacaacagcgctttcagagtataccttgacaacctcaagaaggcttgtcaagacatggaagcagcaaatccacgtatgttggaatggggttggctgacacacaattaccaagtgtaacgaccacactgagaatgagcatcgagccgccaaatttgcagctgcagctgtagcagcattatgatgaggaggg

SEQ ID NO: 165329 - DNA, 370 bp, Zea mays
  Clone ID: MRT4577_82367C.1
gggggggggggccttaatttgataactggatacacatccatttttaggtagcaggggtccatgtttgtgataacccattaataataattataatccccctccacttggtttggcttgtattggaacaaagggggacacgggcccgggctatacatatatatagagtttgcccatgcatgcgggcggggcttgaattatttctcttggccctggcgaccacatgcatgcgtttttatttttattgagcacaagcatgatgcatcacatgtttggcttcatgttgagccgggtgggaattttaatccccagggacgcgttgcacttggcgaggagggctatccagatggacccgagctcctggctgaccttt

SEQ ID NO: 165330 - DNA, 590 bp, Zea mays
  Clone ID: MRT4577_82368C.1
acagatgatgtcggtgtttctactccagcgaaagaaggaattatgcaaggaaacggagcacgatgcattgtagggtttcctccatgcaaagataacaagtgctactgctgcattggggggcgaactcatgctcgctactctacgatggctgagtgtagacatgcctgcttcaaaactaaaattcccatatattattaatagcattacctaccattacaatgtatcccacggataaaaaaacgtgttaccaaactcatgcggaaagttagtaatatatgatgttgacttgcaagttgcaaccaccaaataatttgttggacgtccatagctagaatgctacattttgtgtagaataactaaacatgattaatgttttcagtgtggtgtagaccaactaaacatgattaatgttttcagttttagaatgtgatcaagccatgttctgttgtcaatttctacctttctatatttggggctttgagctgacttccaagttggaaatattataattcggatggagaaggtccttagcctcttatgaaatactctctggacatcaagggcaagcactattatgagatggctcgact

SEQ ID NO: 165331 - DNA, 297 bp, Zea mays
  unsure (1)..(297): unsure at all n locations
  Clone ID: MRT4577_82369C.1
gtaccctcgnagttcggccgggcaaaaaaaaaaaaaaaaaaaaaaaaaaaaaaaaaaaaaaaaaaaaaaataaaaaaaaaaaataaataaagagaaaaatgaaccaaaaccaaaaaatagatacatctgcatccggacgctatcagaaatagttatgcgccggcggcattacctggagtgtttcctgcgggtcgatgggttaaataccgcacagaatttgaaaacctgcggaattcttgctggtgctctgaaaaagagaaccttttatgtgacaacattgatcattcctaagcagaa

SEQ ID NO: 165332 - DNA, 483 bp, Zea mays
  Clone ID: MRT4577_8236C.1
gccacgcgtccggcggctactgccactgccacggcctctcccgtgccggccccgttcggctcctcatcgtccgcctacacctccacctaatctttccctccaggctttttccgaggctattttcccgctgaatccacgcctcgctcgacccggcgctcgacagacgccaccggagacgcgaactgcgaggtccactggcacgagcctaaccacgaccaggaccaccaacacgaggacctcgactagggcatccacttgcatatcgacgtgtacaaggaccggaagctgaaccggcgcctggtgcgggctcaggctcgcgtccacgcgccgttcgacgccctgagggacaagctcagcgactacgacggcctcgctgacttcatccatgggctattcgagtgccgactccaggaccggcaccatggctaccagcggctctaccaggaccgggagcaggacctcacgctgggcttcaagggcaac

SEQ ID NO: 165333 - DNA, 1840 bp, Zea mays
  unsure (1)..(1840): unsure at all n locations
  Clone ID: MRT4577_82370C.1
cggccgggggaatttaggtgacactatagaagggggatttaggtgacactatangaaaaaaaaaaaaaaaaaaaaaaaaaaaaaaaaaaaaaaaaaaaaaaaaagccccggggcggccgggagctggaccttctcttcttggtcatgcccttccctcccatcaattcttcaatgctgcgtaatccctactgaaagaggcaccaatcagccattctgcaacttgccttcccgtgcttgcctcactgacatgaactcatcgtctttcttcctctgatccataagatctggccaacaagatcggtggcgcacaggtatcgggtcatcacttggtctctgaattctcaggattggagttgaagaagagcatcatgcttggtgggcagagcgagaccgtcaagtacagggtctttgctggaacatggaacgtgggcggcttggcgccgccggatgacctggacttggaggattggctggacacgaagaacgactcctacgacatctatgttcttgggttccaggagattgtgccgctgaacgcgaggaacgtgcttggccccaagcagaggcgggcggccatgaagtggcagctgctcatcggcgacgcattgaacagcacgaggcatggagctgcaggaatgcatggtcaaggacaggggggcgcgttcaggtgcctcatgagcaagcagatggtcggaatcttcgtgtcggtctggacgaggagcagcctctgccggcacgtccgccaccccggcgtgtgcagcgtcggcgccggcgtcctcggccggctcggcaacaagggcgcggtgtccgtccggttcttgctccacggcacgagcttctgcttcgtctgctgccacctggcctcaggcggcgagaagggcgacgcgctgcgccggaacgccgacgccgcgggcatcctctccaggaccagcttcctcggcttcggcggcgtggcggcagcacccggtgaggtgcccaagaagattcttggccatgaccgcgtggtgttgctcggcgacctcaactaccggatcgccatggacgatgacgaagcacggcagctggtgagggccaggaaatggggcatgctgctggagggcgacgagctgctgctggagctctccagtggccgtcagttccacggctggcacgagggccacgtcaccttcgccccgacctacaagtatcgccgcaactccgaccacctccactggtgcgctgacggcgtcgccgccggccgcgagaagcagcaccgcgcgccggcatggtgcgaccgcatcctctggcgcgggaaggggatgaagcaggtccggtacgagcgctgcggttgctaccggctctccgatcaccgcccggtcagggctttgttccacgccgtgtgcgaactggcggatggctaagctgtaggctagcttgcgtgctttgaatgaaaagcgtttaattaacaaacgagactcttaattttacaaagtgttcaaaaatttcggccagaaatttcacacggaactggttactggttcctgcatcgatgcgctttcaagctggtttgcgcctgattcctatctgctggagaaaattggagcacattttctgttctcggctgaggatatatggaaccaaaggatcattgaccaattaattatctgacaggttattgtccacacctgattcatgtgccggaggcatacaactttgtgcgccgggtcaactcgatgaaaccagtttttcgtggtttcaacaagatgcatgtcttcactatgatattgttattcgcatccatgaaaaagatgtatcaggtgtaaaccaagtttccatataaattttatacaaaccaactaac

SEQ ID NO: 165334 - DNA, 891 bp, Zea mays
  Clone ID: MRT4577_82371C.1
cccacgcgtccgcccacgcgtccggcgacgcgctgcgccggaacgccgacgcggcgggcatcctctccaggaccagcttcctcggcttcgacggcggtgcggcagcaaatcctctccgcttgtgtactgttcttggatgcgaccgcgtggtgttgctcggcgacctcaactaccggatcgccatggacgatgacgaggcacggcagctggtgagggccaggaaatggggcatgctgctggaaggcgacgagctgctgctggagctgtccagtggccgtcagtttcacggctggcacgagggccacgtcaccttcgccccgacctacaagtatcgccgcaactccgaccacctccactggtgcgctgacggcgtcgccgccggccgcgagaagcagcaccgcgcgccggcatggtcagacactgacgcccaggcccagcccgctcgacatatccatgcaagcgagatggtttcgttctcacgctgttcgccgctactgctatttaattatttgcaggtgcgaccgcatcctctggcgcgggaaggggatgaagcaggtccggtacgagcgctgcggttgctaccggctctccgatcaccgcccggtcagggctttgttccacgccgtgtgcgaactggcggatggctaagctgcaggctagcttgcgtgctttgaatgaaaagcgtttaattaacaaacgagactctattttacaaagtgttcaaaaatttcggccagaaatttcacacggaactggttaccggttcctactgtcctacatcgatgcgctttcaagctggtttgcgcctgattcctatcctatctgctggagaaaattgagcacatttactgttctcggctgaggatatatggaaacaaaggatcattgact

SEQ ID NO: 165335 - DNA, 1684 bp, Zea mays
  Clone ID: MRT4577_82372C.1
ccggccgggaaaaaaactggatcaacttgcctacctatatatcttccagcaagacttgtgcacatagctggaccttctcttcttggtcatgcccttccctcccatcaattcttcaatgctgcgtaatccctactgaaagaggcaccaatcagccattctgcaacttgccttcccgtgcttgcctcactgacatgaactcatcgtctttcttcctctgatccataagatctggccaacaagatcggtggcgcacaggtatcgggtcatcacttggtctctgaattctcaggattggagttgaagaagagcatcatgcttggtgggcagagcgagaccgtcaagtacagggtctttgctggaacatggaacgtgggcggcttggcgccgccggatgacctggacttggaggattggctggacacgaagaacgactcctacgacatctatgttcttgggttccaggagattgtgccgctgaacgcgaggaacgtgcttggccccaagcagaggcgggcggccatgaagtggcagctgctcatcggcgacgcattgaacagcacgaggcatggagctgcaggaatgcatggtcaaggacaggggggcgcgttcaggtgcctcatgagcaagcagatggtcggaatcttcgtgtcggtctggacgaggagcagcctctgccggcacgtccgccaccccggcgtgtgcagcgtcggcgccggcgtcctcggccggctcggcaacaagggcgcggtgtccgtccggttcttgctccacggcacgagcttctgcttcgtctgctgccacctggcctcaggcggcgagaagggcgacgcgctgcgccggaacgccgacgccgcgggcatcctctccaggaccagcttcctcggcttcggcggcgtggcggcagcacccggtgaggtgcccaagaagattcttggccatgaccgcgtggtgttgctcggcgacctcaactaccggatcgccatggacgatgacgaagcacggcagctggtgagggccaggaaatggggcatgctgctggagggcgacgagctgctgctggagctctccagtggccgtcagttccacggctggcacgagggccacgtcaccttcgccccgacctacaagtatagccgcaactccgaccacctccactggtgcgctgacggcgtcgccgccggccgcgagaagcagcaccgcgcgccggcatggtcagacactgacgcccaggcccagcccgctcgacatatccatgcaagcgagatggtttcgttctcacgctgttcgccgctactgctatttaattatttgcaggtgcgaccgcatcctctggcgcgggaaggggatgaagcaggtccggtacgagcgctgcggttgctaccggctctccgatcaccgcccggtcagggctttgttccacgccgtgtgcgaactggcggatggctaagctgtaggctagcttgcgtgctttgaatgaaaagcgtttaattaacaaacgagactcttaattttacaaagtgttcaaaaatttcggccagaaatttcacacggaactggttactggttcctgcatcgatgcgctttcaagctggtttgcgcctgattcctatctgctggagaaaattggagcacattttctgttctcggctgaggatatatggaaccaaaggatcattgaccaatt

SEQ ID NO: 165336 - DNA, 190 bp, Zea mays
  unsure (1)..(190): unsure at all n locations
  Clone ID: MRT4577_82373C.1
gcgaagcttgtatcctctataggggccgccctctttttttttttttttcataacaaatgaataaggcttttattgagggagtttcttctctttatgcatgcaacaagggcggaaccggaaaccctagaacatatatatatccntttcgtattctacagcatgacactcatatacatttaaggaaattaaa

SEQ ID NO: 165337 - DNA, 392 bp, Zea mays
  Clone ID: MRT4577_82374C.1
gcgagtgctactctttttttttccactttttttactcattcttgcaattgaaattttttattcctaatttaattttttttttttttttcaaaattccttttttttttttttttcggtcacaaactccctaaaaacacacatacccaagcctgcatccaaacaaagggggtttttaataacaaagctaactcatattaattggctaccactcaaaacccaatttccagaaataaaatcaaaagggccagcctctttaaattcttttcccacgcacaatttgagacaatattgagtacctgtaaccataaaccgcaaactcggtgactgactagctgctatcaaaaaaacatttattgccatacttataaggccacttaaaaacccgaataacc

SEQ ID NO: 165338 - DNA, 279 bp, Zea mays
  Clone ID: MRT4577_82375C.1
caggtttagctaataaatcatgtggaacacttaaaactctaactgattctgcgcacgcgtggacggtccacaccgctacgacaaaactctaactgattctgcgcacgcgtggacggtccacaccgctacgacaggttcttgttttagtaaagaagctgctctaccgtatagccgagctgtgtgcctgtgttctttctctgctaccaaaaacaacactagctagagcagcagtggtgtgcactactacctagctaggctaacgtacgcgtggtgaataat

SEQ ID NO: 165339 - DNA, 715 bp, Zea mays
  Clone ID: MRT4577_82376C.1
gtgtgccatcactcccctcttttcctcactcgccgttccccgtgaggtgactggcagattgctcctccctccgccgggatctctccgtccccatggccgcgatgtgtagggccgccgcgaagcagctcgtcgaccgggccgtcggatccagggccgcgcatacgtccgcgggcagcaagaagatcgtgggcgtgttctaccaggccggcgagtacgccgacaagaaccccaacttcgtcggctgcgttgagggcgccctcggcatacgcgactggctcgagtccaaggggcatcactacattgtcaccgacgacaaggaggggttgaacagcgagctggagaagcacattgaagacatgcatgttctgataaccaccccattccacccagcctatgttactgcagagaggatcaagaaggcaaagaaccttgagctgcttctcactgctgggattggatcggaccatattgatttgccagctgctgctgctgcaggcttgacagtggcagaggtcactggaagtaacactgtctctgtggcagaagatgagctcatgcgcatcttgattctgctcaggaacttcttgcctggctaccaacaggtcgttaaaggtgaatggaatgttgcaggcattgcccatagggcttatgatcttgaggggaagaccgtcggaactgtcggggcaggtcgtattggcaggctcttacttcagcg

SEQ ID NO: 165340 - DNA, 479 bp, Zea mays
  Clone ID: MRT4577_82377C.1
actagaatgtcctataattttatttaagatagaggaagtgctttcgaaaatcgaaatggaaggaaataattgatgcacacgtcaaatctctagcgagcacgaattgaacaaagcgttatacacgccttattatattgaagtaaaacaacacgaactttcagaacggctggcagctccggcggaaggtgatggcgctcgcaaccagcccgacaagatcttgcttccacgggaggaacgtcgtcgtcgtcgatttgccgccacccctggcggcgctcccgtgtccttcgccggcgccggccaggaacacgaacttgtccttgccggcggcgacccgccgctgccgctgccaccggaggaccgacaaaccggctgatgatcctctcgtccggcagcgcgcgggggacgcccgccgagaagatcctgctgctggcgacgcgggagacacaggcagtaggtctccgccggcacgccgtcgagct

SEQ ID NO: 165341 - DNA, 288 bp, Zea mays
  Clone ID: MRT4577_82378C.1
gggataatgtacactccaaataaccttgattttgtaacacctaacaggctagccgtttctacggaccgccactagtgggaacgggtttttagctgaaacacagggggaaacagaactacatgtttcatacaatgtctgttttggatcacacccaaacttgggttggttttcggggggcatcggggacccctacatatgaagacttcttgtagggacctatccaactgaaacacggaatgcctgggaaggctttccaccccttttctaaaactaaatatggcggacgcg

SEQ ID NO: 165342 - DNA, 244 bp, Zea mays
  Clone ID: MRT4577_82379C.1
cccacgcgtccgcttacgacgacgacatcctcggcgggttcgggagcgcgctgcgcagacaggccgaggaaaggaagaagccggtggctgtcgacgaccaagaactgctcggggcgttcgggaggagcccgtcagagggaaagagggaaccggctcctgcgcaagcggaccgagtggggagcacggggttcgatgatcaaaatcctggaatcgcggggagcagccccccgaatgagtaggaagt

SEQ ID NO: 165343 - DNA, 169 bp, Zea mays
  Clone ID: MRT4577_8237C.1
cctagggtaggggacaacctgtgactggatcattgcaatttttagcgcaaatagcactacctcaaaactatattaggtacttacaatttgtcgaaaatggaccaataacatacacggggagtcgaccataattggttgcagtgttgacaccatggggctcacacaaatt

SEQ ID NO: 165344 - DNA, 550 bp, Zea mays
  Clone ID: MRT4577_82380C.1
cggctatcgtccgggcggcctagggagcttgctctggtcctactttcattggttctacaccggaggacccggctggggcttcactgcgttcccgacgttcgggctcaccgcgtacaaacacggcttctacatcaatatgaatggaacttacgttggtgtgggcatgatcagcccttacctgataaacatctcgatgctcgtcggctccatcatctcctgggggatcatgtggccctacctcctaaccaagaaaggcatctggtacgacgccaatctccaagagaccagcctaaaaggcctcaacggctacaaggtgtttagcgcgataggtatgattctcggcgacggcatcctccagctcgtcgtgatctcgctgaagaccgtacacaccatgcgccaccaccagctagccgccgagacgatcaggtccttctccaacgtggactccatgccgcggccggtcctcagctttgacgaccgccgcaggacgcatgtgttcctccgggagcacatacccagcacgttcgccatcagcggctacgtcgtgctg

SEQ ID NO: 165345 - DNA, 355 bp, Zea mays
  Clone ID: MRT4577_82381C.1
gaaataaagtttctaacgcaagtcagacagctgcagcaaaaaatgaggggcgtggaggtgctaggcaatactgcagtttctttctagactgcattgccactacctaaatacaggtgcgagccgtgcttggtgaaaccactgctaaacatatttaccacgccaaggctcttgactacctcttcggctgggctccatagttacatgttaacgcggaaaacgacaacaggcagacccgcttcatgcagctccacgtgctattcgctagccataacaactcggagttctgcaagctattatcccgcttaactatctcgcacgggagcgggctcatcaacatccacttcttgctcctgcc

SEQ ID NO: 165346 - DNA, 3090 bp, Zea mays
  Clone ID: MRT4577_82382C.1
gaagaaaggtgaggagaccaagcgaaaaaaatcacgctttcattgcgaggggggaggatagggaggaagacgccaagccagctccagtccggcacccgatataaagcggcaggcacttggattgctgacgagatgggactcacacgccgtcacaatgctgtgcctcgtgtcgccctcttcctcgccgactccgcttccgccgccgcggcgctctcgctcgcatgctgatcgggcggcaccgccggggatcgcgggtggcggcaatgtgcgcctgagtgtgttgtctgtccagtgcaaggctcgccggtcaggggtgcggaaggtcaagagcaaattcgccactgcagctactgtgcaagaagataaaactatggcaactgccaaaggcgatgtcgaccatctccccatatacgacctggaccccaagctggagatattcaaggaccatttcaggtaccggatgaaaagattcctagagcagaaaggatcaattgaagaaaatgagggaagtcttgaatctttttctaaaggctatttgaaatttgggattaatacaaatgaggatggaactgtatatcgtgaatgggcacctgctgcgcaggaggcagagcttattggtgacttcaatgactggaatggtgcaaaccataagatggagaaggataaatttggtgtttggtcgatcaaaattgaccatgtcaaagggaaacctgccatccctcacaattccaaggttaaatttcgctttctacatggtggagtatgggttgatcgtattccagcattgattcgttatgcgactgttgatgcctctaaatttggagctccctatgatggtgttcattgggatcctcctgcttctgaaaggtacacatttaagcatcctcggccttcaaagcctgctgctccacgtatctatgaagcccatgtaggtatgagtggtgaaaagccagcagtaagcacatatagggaatttgcagacaatgtgttgccacgcatacgagcaaataactacaacacagttcagttgatggcagttatggagcattcgtactatgcttctttcgggtaccatgtgacaaatttctttgcggttagcagcagatcaggcacaccagaggacctcaaatatcttgttgataaggcacacagtttgggtttgcgagttctgatggatgttgtccatagccatgcaagtaataatgtcacagatggtttaaatggctatgatgttggacaaagcacccaagagtcctattttcatgcgggagatagaggttatcataaactttgggatagtcggctgttcaactatgctaactgggaggtattaaggtttcttctttctaacctgagatattggttggatgaattcatgtttgatggcttccgatttgatggagttacatcaatgctgtatcatcaccatggtatcaatgtggggtttactggaaactaccaggaatatttcagtttggacacagctgtggatgcagttgtttacatgatgcttgcaaaccatttaatgcacaaactcttgccagaagcaactgttgttgctgaagatgtttcaggcatgccggtcctttgccggccagttgatgaaggtggggttgggtttgactatcgcctggcaatggctatccctgatagatggattgactacctgaagaataaagatgactctgagtggtcgatgggtgaaatagcgcatactttgactaacaggagatatactgaaaaatgcatcgcatatgctgagagccatgatcagtctattgttggcgacaaaactattgcatttctcctgatggacaaggaaatgtacactggcatgtcagacttgcagcctgcttcacctacaattgatcgagggattgcactccaaaagatgattcacttcatcacaatggcccttggaggtgatggctacttgaattttatgggaaatgagtttggtcacccagaatggattgactttccaagagaagggaacaactggagctatgataaatgcagacgacagtggagccttgtggacactgatcacttgcggtacaagtacatgaatgcgtttgaccaagcgatgaatgcgctcgatgagagattttccttcctttcgtcgtcaaagcagatcgtcagcgacatgaacgatgaggaaaaggttattgtctttgaacgtggagatttagtttttgttttcaatttccatcccaagaaaacttacgagggctacaaagtgggatgcgatttgcctgggaaatacagagtagccctggactctgatgctctggtcttcggtggacatggaagagttggccacgacgtggatcacttcacgtcgcctgaaggggtgccaggggtgcccgaaacgaacttcaacaaccggccgaactcgttcaaagtcctttctccgccccgcacctgtgtggcttattaccgtgtagacgaagcaggggctggacgacgtcttcacgcgaaagcagagacaggaaagacgtctccagcagagagcatcgacgtcaaagcttccagagctagtagcaaagaagacaaggaggcaacggctggtggcaagaagggatggaagtttgcgcggcagccatccgatcaagataccaaatgaagccaggagtccttggtgaggactggactggctgccggcgccctgttagtagtcctgctctactggactagccgccgctggcgcccttggaacggtcctttcctgtagcttgcaggcgactggtgtctcatcaccgagcaggcaggcactgcttgtatagcttttctagaataataatcagggatggatggatggtgtgtattggctatctggctagacgtgcatgtgcccagtttgtatgtacaggagcagttcccgtccagaataaaaaaaaacttgttggggggtttttcttctaaaaaaaaaaaaaaaaaaaaaaaaaaaaaaaaaaaaaaaaaaaaaaaaaaaaaaaaaaaaaaaaaaaaaaaaaaaaaaaaaaatttttttttttgatttctctgtagtctgttcttgctaggttgacgaagatgtttgatattagatgccatagatcatgtactgtt

SEQ ID NO: 165347 - DNA, 1270 bp, Zea mays
  Clone ID: MRT4577_82383C.1
gggtagcgccgtatgttaagggtgtcggacaatcgtaacttccaggtttgttcttgcatctagcgcatggaggtggtttagcaacacactcatcaatgtctgcatacatacatacatatagagtatatagatctcaaggatactgtatgcatatattcttttgaggaattctttgctgtacttgcacacatttaccaaaaaaaatacacacacagttgcaacaccgacctttgcatccatcaggaaggtaaggattgccctcgaacccttggctgcagttgcagaggtagcctccactgctggaattgacgcacacgctgttagcgctgaggcaagcataggagtcctctttcttcgtcgcaacatcgcaggtctcgttgcccacttcccagatcaggatggccgggacacggccgccagcattctcatcaagaaatgctgttgtgttcagatatgttgtcttgaactggaatttgtcggtctccataaccacagcgtagcctcggtaatctgcccgcctgtctgtggcgtttctgtgttcgtagtaatccgtcgtattgtgatccggactgaaacctatgtcgtcaaagttcatgtcgtcggcgagtgcagcctggcagcagccggcactgtcgccgtcacacttgccatcttgtgcctcgaggtcggtagggtttgctctgcgacacacacccaatcacatgagtattgcataaaatgtatgcgagagtgttgatgtcgataaccgtggatatgttggactgccctgaatccataatcgtcgtgctggagagctccttgccccagatatcgtagtggatcttcttggtcgactgattatagaacatggatgagatgtgtttcatgatccgaacctgtccgtcgaccagcgatatattccgcaccgggattgcgccgaagatcgtcaagaagctgtggccgtcgacagcactcctgttgcagctgagctcgaacccttccattgagcagccatggccgccgcctccgaacgggtactggatctcaacgtcgccgcagtacctgaggcagccgggtcctggcagagccagcgccgtcgtcttgccttggaactccagcgtcgccgtgaggctgaagagcagcagcagcagcagcatcggtactgtaccggccgtggagttcttgccatggtagcagtacatcgtgtgtggtatggtggtcacaatgcgaaaaaaaaatttgtgcttgttgtcttggaaaagtatcccggccggcctcgaggtacccaatg

SEQ ID NO: 165348 - DNA, 1015 bp, Zea mays
  Clone ID: MRT4577_82384C.1
ccccgcgtccgcccacgcgtccgcccacgcgtccgcccacgcgtccgcccacgcgttcgcccacgcgtccgcccacgcgtccgcccacgcgtccgcccacgcgtccgcgatgaatgcgctcgatgagagattttccttcctttcgtcgtcaaagcagatcgccagcgacatgaacgatgaggaaaaggttattgtctttgaacgtggagatttagtttttgttttcaatttccatcccaagaaaacttacgagggctacaaagtgggatgcgatttgcctgggaaatacagagtagccctggactctgatgctctggtcttcggtggacatggaagagttggccacgacgtggatcacttcacgtcgcctgaaggggtgccaggggtgcccgaaacgaacttcaacaaccggccgaactcgttcaaagtcctttctccgccccgcacctgtgtggcttattaccgtgtagacgaagcaggggctggacgacgtcttcacgcgaaagcagagacaggaaagacgtctccagcagagagcatcgacgtcaaagcttccagagctagtagcaaagaagacaaggaggcaacggctggtggcaagaagggatggaagtttgcgcggcagccatccgatcaagataccaaatgaagccaggagtccttggtgaggactggactggctgccggcgccctgttagtagtcctgctctactggactagccgccgctggcgcccttggaacggtcctttcctgtagcttgcaggcgactggtgtctcatcaccgagcaggcaggcactgcttgtatagcttttctagaataataatcagggatggatggatggtgtgtattggctatctggctagacgtgcatgtgcccagtttgtatgtacaggagcagttcccgtccagaataaaaaaaaacttgttggggggtttttcttctactctgtagtctgttcttgctaggttgacgaagatgtttgatattagatgccatagatcatgtactgtt

SEQ ID NO: 165349 - DNA, 496 bp, Zea mays
  Clone ID: MRT4577_82385C.1
aataatggattgactacctgaagaataaagatgactctgtttggtcgatgggtgaaatagcccatactttgactaacaggagatatactgaaaaatgcatcgcatatgctgagagccatgatcaggtaccctgcattatataataactttataaggaagtatagttggatgcagcaaagtattttatttccttgtggggtagacaacacatggggcaagtatcttttaatcagacagtactatatttcatcacatttctatcctgattgctagtaactggattagttattcataaaaaattaggccctcctaagcatgtttaagaatttgcaatcacatatgacctgtttatcttatactggaaattaaaatcatgcaatttttcagtctattgttggcgacaaaactattgcatttctcctgatggacaaggaaatgtacactggcatgtcagacttgcagcctgcttcacctacaattgatcgagggattgcac

SEQ ID NO: 165350 - DNA, 1142 bp, Zea mays
  unsure (1)..(1142): unsure at all n locations
  Clone ID: MRT4577_82386C.1
tttgtaaagccgcccatcgactcctcgagctcgatcgctcgccgccaanaactacaagccatggagacggcgtcggccgcgtccgtccagggccccagcgcggcgccgtgggcggacatggacacggactgcctggttcacgtgttcgggcgcctcgacctggaggacctggcggcggcggccccgctcgtgtgccggggctggcgccgggccgccgccgaaccgtccctgtggcgcgccctcgacctgcgccgggaccacgtcgcgcgcttcatgccctggggcgcgctcgccgccgccttcgcgcgccgctacgccgtgcgcggcttctcgctcgcgggcttcctcaggatctgcgtgtggcgcgcgcgcggctccgccgaggacgtcgcgctcccgccgctcctcgccgagccggcgcacgagatcgaccacatttcgctccggtgccccaggttgcggcgcctggcgctcccgcacctgacggtcggcgacgaggcgcgcctgccggacctcgtcccgcggtggccgctgctggagcatctggagctggagacaaagccgtcgtcctcctccttcccggcgctcgccgcgcaggtcgcgctgcactgcccggccttcgccagcctcaagacctcgggggccttcaagcgcgaggacgccgcggcgctggcgcgctccctgcccaggctccgctccctctgcgtcgaccgctcctacctgcccaaggagcagcttctcgccatcctcgccgcctgcagggacctgcgggagttcagcgcgcgcagctgcgttggcttcgacgacgaggacgaggaggtgctcaggcacggggccaggatcctgcggttcgacgtcggagggtcgaagctggtggacgaactagacgacgagttccccggcggtggcggtttctgcgactcgtcctacgttgacgtgatgtgatctctgtcgctggtgctcgcggtcgcggcgcggctgctaagtgacagagcccacacataagtacacaacataattaatgcagtttggatttcattctattgtatgagcaggggaattatactattattattgtatttagaggcgtttggtttctaaaaataatttttagtctattattttatttaattttagtctct

SEQ ID NO: 165351 - DNA, 705 bp, Zea mays
  Clone ID: MRT4577_82387C.1
gcgcgactaaaatttacatcacctcgaacggcggcggcggcggcggcggcggtttctcatctgcggcgcctcttcgatgctgtttgctttgccaaggctttgatcccagatggggatctcgtcgggtgcagacttccaccagcagcccaccccacaggccgtgctgccgccacgcccccatggccgtgcgccgacgctgcagacgtctctctccctggctggttccgcctcgccggagcaggtcgggtcgcctccggacacacaggagccgctgtcgaactccgacgcggggcatgactccgccacagagagcgccagctcacgggagacttggcctggggagcccggcaagagtggtggcggcgacgctcctcccgtggcatcagcaccgataactgcactgaggatagctgataataaggagaaggaggtggttggtaatggcgtcgccgagctgcaggcctttcggagtaggatcccgagtgcaggccggatgactctcagggaggttgcttgggacagggtgggctcggctgggcgggaactgccactccatcggcctgctggttgttactacttgttattagacgtagtagttgttaactagcagtgtagtaagtttacatgatatatatactgcatttttttggggggaacaaaatgttgattacctgcgcagcattgtcctaggtgtgtttagtagcg

SEQ ID NO: 165352 - DNA, 148 bp, Zea mays
  Clone ID: MRT4577_82388C.1
ctcttgtttctccttgaaagctttgcctttgttttgaacttcctttcccacttggtagaaagagcccagaagcagccctggccctgtaagatggactctttcatccttcagttgtatttagctttgcttttctctgcatctgtcaccc

SEQ ID NO: 165353 - DNA, 2442 bp, Zea mays
  Clone ID: MRT4577_82389C.1
cccacgcgtccgcccacgcgtccgcccgaagaaaatgctttccccttctcagctaaagtgaccgtggcacattagcccgggtgatactgcggtgggcccgcgttttggttcctccgccattcgacgccaccggtgtgccgtctggtccgtctaccaagctggaatcggtagaccgtttcgttccatttgtccccacacgcgactaaaatttacatcacctcgaacggcggcggcggcggcggcggcggtttctcatctgcggcgcctcttcgatgctgtttgctttgccaaggctttgatcccagatggggatctcgtcgggtgcagacttccaccagcagcccaccccacaggccgtgctgccgccacgcccccatggccgtgcgccgacgctgcagacgtctctctccctggctggttccgcctcgccggagcaggtcgggtcgcctccggacacacaggagccgctgtcgaactccgacgcggggcatgactccgccacagagagcgccagctcacgggagacttggcctggggagccccgcaagagtggtggcggcgacgctcctcccgtggcatcagcaccgataactgcactgaggatagctgataataaggagaaggaggtggttggtaatggcgtcgccgagctgcaggcctttcggagtaggatcccgagtgcaggccggatgactctcagggaggttgcttgggacagggtggacctcgttgctgagaagatgaagggtatgagcgatgagctgctggacgaaaccaaagccgagctgcagtcgattctggaagggactggcggtcagcaccagattcaggagttcatgtaccttcagaagcttcttcagggcagggttgatctcaccctgcccatccttttgatggctcaccatgtgcagctggagatcctggttgccatcaagactgggatacaggcgttcttgcacccgagcgtcgacataccccagatccgcctcgctgagattttcctgtacaagaggtgccgcaacattgcttgccagagtgctgtgcctgctgaggagtgcaagtgtaacatatgcagtaacaggaacgggttttgtaatctctgcatgtgcgtgatctgcaataagtttgattttgaggtcaatacgtgccgctgggttgggtgtgatatctgctcgcactggactcacacagactgtgcaattcgtgatggaaagattgggactgggcagacgattaagaacggcgttggccatgcagagatgcttttccggtgccaggcctgccagaggacatctgaactgtttggatgggttagggatgtctttcagcaatgtgcacccaattgggacagggatgccttgctgcgtgagcttgactatgtttgcgacagattccgtctaagtgaggactcaaaggggaggaaattgttcagaaaatgtgctgagctagttgaaagattgaggggtggttctgctgaatcaatgactcctagaattctgctacaagcgctgcaagagctggacattgattcctccaagaactttgagcaccaagagccagggcggctgatcactccccaggaggcctgcaaccggatcgctgaggtcgtccaggaagcagtgaggaagatggagatggtggccgaagagaaattgcggacgtacaaacgcgcccgcctcgctgtggaggcgtgcgacagggagctggaggagaaggcccgggaggcccaggagctgaaggtggagcggctgcggaagctgcagcaggcggaggagctggagagcatcatccggctgaagcaggcggagtcggagatgttccagctgaaggcgagcgaggcccaggaggaggccgagcggctgcggagcgtcgcgctggcgaagcggaagtcggaggcggcggggcaggactacgcgagcatgtacctcaagcggcgcctcgaggaggccgaggccgagaagcagtacatcttcgagaagatcaagctgcaggagaaccagcatgccacgagcagcagcggcgggggtgcccgcctcggcggcggagctccctccgccggggaaccctcgcaggcgatgatgctgtccaagatccaggacctgctgaagaacgtgcgcagcgtgccgtccggcaagccagatgggcagcgctccaagtagcagtagcgtcgtggggtgggctcggctgggcgggaactgccactccatcggcctgctggttgttactacttgttattagacgtagtagttgttaactagcagtgtagtaagtttacatgatatatatactgcatttttttggggggaacaaaatgttgattacctgcgcagcattgtcctaggtgtgtttagtagcgacttgttttcactgattatgtgatatgtatgaattgtatgtgcaggtgattcaagtgtaaccaaacagcgtagctgctgtccggat

SEQ ID NO: 165354 - DNA, 291 bp, Zea mays
  Clone ID: MRT4577_8238C.1
ttttgtttttttaaagaactggcacgttttatattgtcgtacaaatgctgtgcgcccggggtgcactccacatgaaaacttcagacgagccgctttaacccaggagccgaccgggaactaccaaacatcccgaagggcgccatgaaacgaaaacttaaaaaactatacaatcctggtcccgggcttgctcaaaggacaaagacgccaagcaatccagcaagaaaactgaactgtgctacacatgcacacagatgatgcagaccacaaatgaagggcaaggcgaggccgccg

SEQ ID NO: 165355 - DNA, 362 bp, Zea mays
  Clone ID: MRT4577_82390C.1
tgcgatcatcgacggcgactaccacgaatgggtcgtggaagccaacgcggcgtaccgccagctcagcgcctacatcgactacaagcagtgcgagggcgtcgcggagatcatcgtggctcgctccatatccgacggtttccgcagcatcgtccagatcatggggctcggcaacctcaagccgaacatcgtcgtcatgcggtacccggagatatggcggcgcgagaacctggcgcagattccgtcgtcgttcaccagcatcataaacgactgcatcatcgcgaacaaggccatcgtcatcgtgaaagggctggacgagtggccgaacgagttccagaggctgtacgggaccattgacctgtact

SEQ ID NO: 165356 - DNA, 345 bp, Zea mays
  Clone ID: MRT4577_82391C.1
ggccgcttttttttttttttttttggcaactaagcacataacacgtccaataacaatatttagctttaacaagcaatccaatcttcgcgacagttttttcttaaaaaaaacctgagctcaggtcaagcagggcagatataggtgaggctataacaatggaacatagatagttcccaccgtgcgccacgcactgaatcactgggctccctgaagacccgagcagcaaaccgagggtgggcgcggcaggcaagcacggcctggggcgccggaggcgagaggcacgcgaggagagggctaggcgcgggcggtggacgcgagacgagaggaggtgcggggcccggccgg

SEQ ID NO: 165357 - DNA, 562 bp, Zea mays
  Clone ID: MRT4577_82392C.1
acaaatgcaagaaattcgaacatttccaatttatctagaaatataagatattctacgtgaacttacaaaagaaattaacgatgtccacaaacagtataggtgcatctatatttttggacaattgaagtacatgcacacagtagatgaacaacacttaattttatgctagagtacatttttacgctcctagtcgtgggagtacacggtacacctaattttacatggattatttatatccaatttgtgacgtcttgattgcatgcagtttgcttgctacctgcttcatgttcgaccgttcagatggtaatgagcacgtgcaagaaagcgctacttgcagcagatccaccaggcactggtacatttcttcgtttgttactttattgtcctgaattaaatgctcgcattcttccacaagatgtgaatccataatgtgaaatatttgatctggaaaactgttcttgacgaagctgatgatgtctagtcccccgatgaacacaggatctatcggccttttgccgatcaaaatctccaagcacactacaccaaaactataaacatcccc

SEQ ID NO: 165358 - DNA, 382 bp, Zea mays
  Clone ID: MRT4577_82393C.1
tcgtttatatacacaaggtcactgattgctgcgttggggttccatgcataccaacaggcggcgtacatgaccctggcaagagtgtcccctgatactcactcggtgggtaactgtgtcaagcgagtggtggtcattgtgacatactgtctgttctttcgcacccctgtttcgcctatcaactctctgggaaccggagtcgctcttgccggagttttcctgttctcacaattgaagcggcttaaacccaagcccatgactgcctgattgtgtcttggtatctatcgtgaagaaccgtagcagcattgccacacgccatcggaatgagtgtcttagctcagaatgatcctcggagaagctccatccagtgaactgatgctgctgt

SEQ ID NO: 165359 - DNA, 262 bp, Zea mays
  Clone ID: MRT4577_82394C.1
ggcttgaccgcttgtatagagccaaattgtactagtgtttacactcattcacattttctatatttggtcagcgagaaatctggaatagaagatgactatatctggatagccatttagataaactgttggaatgtatttttacaaaaatctctatttatatagattaggaaaaatatagagagactctttaagttcgtctcgctatctctatctcactctctatctcactctttgtttcaaactccaccccaaaaaaaaaaaa

SEQ ID NO: 165360 - DNA, 254 bp, Zea mays
  Clone ID: MRT4577_82395C.1
cgcagatcccttggggccgtctcgcctgcgcgcgacgccggctgcgagctgagtttggtttcgccgggttgctcggattttgggtccgatccggtcttaggcgttcgtcatggcgtcgtgtggcgaggagatggaggcaggggcaacaaagttttggaagtagattgaggcgttgactggactgatgttcatagtatcgggagaagatcgttcggatatatatatttacctaaatcgctcatctgttagttcaa

SEQ ID NO: 165361 - DNA, 604 bp, Zea mays
  unsure (1)..(604): unsure at all n locations
  Clone ID: MRT4577_82396C.1
atgagccgctgttacccctctgcggtcgtgggcgcttgttgcgctcatttcggcccccagtcgcagctgcgacgataggagcagcagacggtggcctctcgtagccgcggttcttcttcttcttctttttgccgtcctcagtgatggcacctgagccacctgtctgggcgaccccggtctgtggtgccgagtgccatgcacagccctcggcagccctagcgcacttgtcggccaaagcgaagagcgtggtgacagtttccacgtcatgcgtggccaacttctctagcatcttttcatcacgtaccccctggcaaaaagcggtgatgatggaagcatcggagatacggggtatagtccctcgtaccttggtgaagtgggagatgaaggcccagagagtttccccgggcacctgcctcactgcatggaggtgagcctccacgccatgccattgataagagctggcgaagttcgctatgaaccgcgcgcatagctcttcccaggagtagatcgatcctggggtgaggttcatgagccaagtctgggctggcccagacaaggctacatgggaagtatgttgccatcacggntggtgtctccacctgct

SEQ ID NO: 165362 - DNA, 423 bp, Zea mays
  Clone ID: MRT4577_82397C.1
gtattcatccgtaaatgttattaccgtgaatgtatcaatgctgaaagagatgcaacacagatagagaggcagcagcagggaacactttgagcagttacgagggtaatatacacacaagaaccggattggaagtaaaagcagcagcagcagcgtctcggcccaccctttgccgtggatctccctaccgacaacccagtccgccgcaaggcccgcgttgtcccccaacccggcgatgtcgttctcgtcatcgaagagccagctcctcaccagcctccacgcctcgtcggtcactagcacatcatcatcgcacgtgccaactcccggagcgttggaatagtgccgtgcggtgcaagggtacgcgcccccccagactttgctctggccgatgtcgagcagggcggcgttgacagagtcgattaggag

SEQ ID NO: 165363 - DNA, 501 bp, Zea mays
  Clone ID: MRT4577_82398C.1
tcgagttttttttttttttttttttttttttttttttttttttttttttttttttttttttttttttttttttttgggggaaacggaaacaactaaaccgggaagaaaatcaaagggggaaactttttttggggcctgggcccccgatcatacccaagcccaggcatacccccccgtttacatacaaaagattacggagccacccttattggggcataaaaggggggcaaacatacggacgcgcgcacaaaacggggggcgctcgatttcactttcacacccccccgcgtagcacacggggggggacgacaatccgggggggatcaatcagccgaaaaagggggggtttttttcgccgccggcctcctggggggccttgggggccttttttttttcggggggcccggggaaggggaaccccccggagccgacggccgccgcccccgggacctcctccttggttttgggggggggcgcgggctccgggcccttttttgcccc

SEQ ID NO: 165364 - DNA, 1491 bp, Zea mays
  unsure (1)..(1491): unsure at all n locations
  Clone ID: MRT4577_82399C.1
gtccgcnaccgtctcgcttctccccaccccgcccgctacagcgccggtggggggcccccgcggctgccggcgaccggtcgccgccgccgaggccgtcctcgccgccccgacattctccagctggcagcattagccatggtttagcggaggcgattctcgttgcagctgtttccggggtggtgggttttcaaggaataaagaatgatcaacctcttcgaattgagcgttggagccagcgccaaggtctcctcaagagatggctctccggtgagaggaactcagtcggagcggaaggagtacgccggatcaaaggcgcacatacgttatgtttccttcgattaggtttaatcacggaccaatcggtccggttgatgaacccgaagcaccctctgtgtctaagcctccagcttcgcttgagaagacgctatcatttgagattcgagcttcccacttcgaccagcccagccctacatcggtttttgatgtacaatttgaggatatcagcgagaaatcccccatttcatcagaaagcgcgattactgctaaacaagagcctctatccaggtctataccaatcggatcgatcgcgaggaccttatcatgggacgacgcttcccaagaggctcctccgcagtgttctaccaaaggagacagcaaccacgagcaggagcagcacgagttcgtcgagaagacgctggcatccgctggcttctgcaacgagaagacccaggacatctttgcccggtggcattcgctcgaccggcccttggaccccgccgtggtcgagcagctgctggaacgcaaggtggaggacgccaagtgccgagagaggcggtcgaaccagaggctcctaatcgactctgtcaacgccgccctgctcgacatcggccagagcaaagtctgggggggcgcgtacccttgcaccgcacggcactattccaacgctccgggagttggcacgtgcgatgatgatgtgctagtgaccgacgaggcgtggaggctggtgaggagctggctcttcgatgacgagaacgacatcgccgggttgggggacaacgcgggccttgcggcggactgggttgtcggtagggagatccacggcaaagggtgggccgagacgctgcggatggaggtggacgagatgagcagggagatatgtggcgaggtcctgggcgagttggttggggaggcgttttcggagcttgccggcgctgcggggtggcactgaagctgcctgccttctattttccctgcttgtggcgtccacctgctgctgctgcttttacttccaatccggttcttgtgtgtatattacccctcgtaactgctctgttctgtacgccgctcaaagtgttccctgctgctgcctctctatctgtgttgcatctcttcagcattgatacattcacggtaataacatttacggatgaatacagctgctgcacttgaaataaaaaaaaaaaaaaaaaaaaaaaaaaactcgagagtact

SEQ ID NO: 165365 - DNA, 355 bp, Zea mays
  Clone ID: MRT4577_8239C.1
tttcttacactactcttcggtaccattcgcaactacacattcttgtctattcgatcctacaagtatctattcgattctaccacatccatctcaagaagaagttgatcatcctaatcctagctagagcctagatggggtctctgatggccggctgggattcgccggttcttggcgatgacaccaaagctcgtgtgatgaggaaccggtccctgacaaaggaggaggtggaggccttctggaggcagcgcgggaagccggcgcgggaggacggcggcggtgagacccttgccgtccaacgtcccctcctggttcgccccccctggtcgccccttgggaaaaaaaacccccctgggaa

SEQ ID NO: 165366 - DNA, 312 bp, Zea mays
  Clone ID: MRT4577_823C.1
ggggctctataccattaactttatctactccagagcgcaaaacaacccgatcgacaccatgagggtgttgctcgttgccctagctctcctggctctcgctgcgagcgccacctccactcatacaagcggaggctgacgatgacagccaccgccggctggtgatataccggcgacggtgcatatgccacctccggttcagctgccatatccggagcatgtgccaccggcggtccacctgtcaccgccggtacacctgccaccgtcggaccatgtgccgtcgacggatcatgtgacgtcgtaaccatgccacta

SEQ ID NO: 165367 - DNA, 3144 bp, Zea mays
  unsure (1)..(3144): unsure at all n locations
  Clone ID: MRT4577_82400C.1
aattcggcacgaggctcgcttctccccaccccgcccgctacagcgccggtggggggcccccgcggctgccggcgaccggtcgccgccgccgaggccgtcctcgccgccccgacattctccagctggcagcattagccatggtttagcggaggcgattctcgttgcagctgtttccggggtggtgggttttcaaggaataaagaatgatcaacctcttcgaattgagcgttggagccagcgccaaggtctcctcaagagatggctctccggtgagaggaactcagtcggagcggaaggagtacgccggatcaaaggcgttgactggcagcacgaggaggagctcgtcggatnagatcgggtggtacgcccatgaaaatgctgatagctcaggaaatggcgaatgagggggacgcgaatcagaagaccactaacgttgtggcgaggctgatggggcttgacgataatgtggatcttgctaagcctgtcgtgcctccaaacaggaggagtttcccggacggccatttatctgctacactggcaagagtaaacaaccaaattccatttgagaagcacacgagttccgccgaagatgtggagtacaaggatgtctacgaagttgggtaccagccaccaagaggggatgaatatccaaggaggaggaggccgagtgaagatcatgacaagagaaggatggatcttgtccgccagaagtttgttgaagcaaagcggcttgcgtcacatgataatatcctccagtcgaaggaagtccacgatgctcttgaggttctgaattcaaacaaagatctgtttctcaaatttctcgaagaacctaactctctctttgcgaagcagtctgggggactcggttctgcaccaacatcacctcagagaaagcacattactgtgttgaagccctcgaaatcagtggagatgaagggtgacaaagcaattagaaggcagacaaaccatgcagccggaaacagaacagacaggagcaacgtgcacaagtctgatgcagctcatgtgaaggaagataagcttcccaaacacaccaggatagtggtcttgaaacctacctcggtaattgcttccatggagcaatctgagcaaagttatcatgctgatctcgatgattctgaagcgcctgctctgtcaaggcatctgagcgaggagatagattggtcggtgcatggaatttctcgacgccacactgaatctttgcagggttgcatgcagtcaaatatgttcggcgcagatagaccataccatcagtatgctgaagaagagggcaatagcttgagtgactcagatattggaaccccaacatcacatcactcttgggagtacatctaccggtttagcaatccttactttggctctttgagccatgcttcttgctcccctgagtcacatgtaactagggaggctaagaagcatgcttctgacagatgggcaatcgttccatccagtgagatgacccaggacaaggtaccagtgcgaagaagtttgagcacacttggtgaaatgcttgccatgcctgatatgaagaaagaagaggctgctgaacaagcatctcctgatgctacccaccagttgtgtgagccaacagttggcgtatcatctaactgtgctgttggcgaaggtgagggagaaagctccctcaggaaaatctcgaggtcacgatctgttccggtctcttcaacagcttttgatagcctgcggttagatggtggatgtttggatgctcagcataaagaacctacagtgccgaaggaggtcaaacctaagagtgggaaatcatctttgaagggaagaatcacgagtttcttctcaaaacgtaagaaagcagagaaggagaagcctagcccatctcccttgggaaccctgaacggtcgaggttcgtcagtcagcactgtagcagttgctaaaccagacgttccacagcatgtttgtgctagttcacaggatgatgtttccttcgaaagtttagaagaccagtttaatcacggaccaatcggagctccggttgatgaacccgaagcaccctctgtgtctaagcctccagcttcgcttgagaagacgctatcatttgagattcgagcttcccacttcgaccagcccagccctacatcggtttttgatgtacaatttgaggatatcagcgagaaatcccccatttcatcagaaagtgcaattactgctaaacaagagcctctatccaggtctataccaatcggatcgatcgcgaggaccttgtcgtgggacgacgcttcccaagaggctcctccgcagtgttctaccaaaggagacagcaaccacgagcaggagcagcacgagttcgtcgagaagacgctggcatccgctggcttctgcaacgagaagacccaggacatctttgcccggtggcattcgctcgaccggcccttggaccccgccgtggtcgagcagctgctggaacgcaaggtggaggacgccaagtgccgagagaggcggtcgaaccagaggctcctaatcgactctgtcaacgccgccctgctcgacatcggccagagcaaagtctgggggggcgcgtacccttgcaccgcacggcactattccaacgctccgggagttggcacgtgcgatgatgatgtgctagtgaccgacgaggcgtggaggctggtgaggagctggctcttcgatgacgagaacgacatcgccgggttgggggacaacgcgggccttgcggcggactgggttgtcggtagggagatccacggcaaagggtgggccgagacgctgcggatggaggtggacgagatgagcagggagatatgtggcgaggtcctgggcgagttggttggggaggcgttttcggagcttgccggcgctgcggggtggcattgaagctgcctgccttctattttccctgcttgtggtggcgtccacctgctgctgctgcttttacttccaatccggttcttgtgtgtatattaccctcgtaactgctcaaagtgttccctgctgctgcctctctatctgtgttgcatctctttcagcattgatacattcacggtaataacatttacggatgaatacagctgctgcactgcacttgaaaaacaagccaacataaaaacaaactcgagggggggcccggtaccc

SEQ ID NO: 165368 - DNA, 1382 bp, Zea mays
  Clone ID: MRT4577_82401C.1
aagcccttgcccacgccatgacgctcagcaagaagcaaggcgcaggcactgatcagcaggccttgctggatgctcagctgcagctctggcaccacaccatcgcttttgtcaagtccatggcgctcaaggccgccgtagacctccgcatagcggacgccatccacctgcacggcggctcagccaccctctcgcagatagtcaccaaggtcacactccacccgtccaagataccatgcctgcgacgcctcatgcgcgtgctcactctcaccggcgtcttcagcgtcaactccggcgccgttgtcgacgagcccgtttacgggctcacgccggcgtctcgccttctggtcggcccggggctgaaccagaccccgttcctgaccttgatgctcagcactttcttcgtgtcctccttcctcggcctcgacgagtggttccagcacgagacgggtccgtccccgttcgagctggccaatggccgggacatatggaccctgtccggccacgacgcgagcttcggcaagctcttcgacgacgggatggtcgcggacagcggtttcatcatggacgtcgtggtcaaggagtgcggcgacgtgttccgaggggtcggctccctcgtcgacgtcgccggcgggctcggtggtgccacccaaaccatcgcgaaggctttcccggacgtggcgtgcagcgtgctggacctctcacacgtcgtcgccaatgctcccaccgacacggccgtgaagtacatcgccggcgacatgttcgagagcattccgtcggcaaacgttgtcttcctcaagtggattctgcatgactggggtgatgccgaatgcgtgaagatactgaagaactgcaagaaggctatagcgtctcaagaagaagggaaggtagtgatactggatatggttgttggagcagggtcatccgacgagaagcatgtggagacgcaaatcgtattcgatctctttatgatgtttatcaatggcactgagcgagatgagacggagtggaagaagatcattttcgaagccgggtttagccgttacaagatcatacctgttctcggtgttcggtcgataatcgaggtctacccataaaaatctatgcaactcaagtatactgtatgcgtgaataatctgcgagtgaaatcaaaactaggtgtgaagaagtgagtatactgtatgcacgcgtgaataaatctgcgtgtgaaaaactaggtatgatgaagtgttgtgccatgtgcttgctttatttagttgctaaatgtatcgcatgtactcttgtctgttctaaattataataaaatgtaaaagctttgagcctttttaaagataaaaaaaaaaaaaaaaaaaaaaaaaaaaaaaaaaaaaaaaaaaaaaacaaac

SEQ ID NO: 165369 - DNA, 265 bp, Zea mays
  Clone ID: MRT4577_82402C.1
tccagggcggacggggcggggtttatcgaggtgagctgcgcatctggggtagagtgagtgaggcagatagcagaggctagagctcataaccaaccagggagacacagtcagtcctcctcctctaccggacctttccgttcagcgttcatacttgagcctacaaagaaagagatctcgtccaactacaagggtgaatgatgcggttgctagctaccataccgtgggcgtatctgtggcagtccttggatcgatcactcgatccctc

SEQ ID NO: 165370 - DNA, 696 bp, Zea mays
  Clone ID: MRT4577_82403C.1
gggaaacgaaaaaaacccctccccaactttttgccccccccggccaggccaattatcaggggccccccccccaacccgaaaaacaaaaacgggggggaaaaaaaagggcccccccaaggggggggggaaaaaaaacccctcaaaaaaaccccccttttgggttttctggccgatcccaccccccccccaattaccggggcccccgaccccccccccggggggtccccccccccccgggggggggcacccccccctttggggccccccacggggggcccctattcgggggcggggccccccttcccccccccccaaaaccggggcccatccgggggggcccccctaacaaatctcgcgctaaaaagaccccttttggcccaacacttaacaatcccgggaagggcccggaaaacacttccccccccccccgtcgggcccccacaaaggctttgggacccaaccccggccctaaaggggggggccgggccccacccccccgaagataaaggcacccccgggatacccccccaacgggggcccccgcaaaaaccccgaaacccccccaccccccgagccccccccccccggggcccccgaaacccccccccccgaggcccctcccctagggggccccacgggaaacaacaaagtccccgaagatccccccccccccccccccccgcaaaaaagcggggc

SEQ ID NO: 165371 - DNA, 202 bp, Zea mays
  unsure (1)..(202): unsure at all n locations
  Clone ID: MRT4577_82404C.1
accgaaagaacgaggcccacacggaacccattctgcacaaaagaggaggacaacacccagacaagcctggagataacacggggaaaccaaacggcaaatgagaagcacacaaccacccaacgcgaccccaacaagccggcctaaatcttggagattcgccgaggntgcgacacagggcgccaaccgaaaccctgaggaagga

SEQ ID NO: 165372 - DNA, 317 bp, Zea mays
  Clone ID: MRT4577_82405C.1
ccacagcaggctgacacggaactccaagatcatggaagtggtgggcaggtgcagggagaagggacggcactgtcccaagtcccaggacggacacctctgctgtcccctcccctccaggcctcagttttccagccctttaactgggggcatgagccaccctttccctctccccggcatcatacacccaagaagaacgagctcccccaaactgcagcccctcccctcactttctgccaccccctagttccctctgcacagccaagcttgtcatcagccctccagccacggctcctgtgagaataaaaggtagtgagtgg

SEQ ID NO: 165373 - DNA, 241 bp, Zea mays
  Clone ID: MRT4577_82406C.1
catggggcaatcgccactcccaataaagaatcttgtaaaggatgcacatttgcgtgtaccagaggacaaaggcatacccagcctttaagttaccgactttacatgtgccagcctgtatgcacaccttatacttatcgtcgtgtggaagatccctattaagccaacccgtgcggctacttaatggcattggctagatcatctattccattccacaggagcaataccttatgtaaacacaatg

SEQ ID NO: 165374 - DNA, 454 bp, Zea mays
  Clone ID: MRT4577_82407C.1
tttgttttgtttaatgtgaagtgacttaggcttcacagacttggaattgtttaactgtagttccgccctctttgttttgatgcttaatatgagtttcaaagcttagcatcgtgaaaactgtaggggccaatttcatgatgttcaacaattggcgttgcgatttacataaccacgttctcatttttttttgtgacaggatgatgatgccaaagtgaagagggcattccaaacactgcttacttacattggaaacgttgctaaaaatcctgacgaggagaaatttagaaagatcaggctgacgaatgcaacatttcaggtaacaataaataaatctttcgatttgggagagtccttgctttgtattcgaccttgttaatgtgtttggtttgttcaccccaccttacaggagagggttggaaatctgcatgggggcatagagttcctggagctctgc

SEQ ID NO: 165375 - DNA, 275 bp, Zea mays
  Clone ID: MRT4577_82408C.1
gcgaaggatgcacccaagtcattgctaagcccactggtggtaaatgcaaattggaagtcggtacatcatacagaatcaagactgagtaccaaactaagtaagcagattacacagaattcatcaacataagcacgcttcaagagggagcagtttccctttttgaagcgagaatgtgaagaagatcaattgtgagctaaaactctatgctaaggtttcggctcgagaaaaaaaaaaaaaaaaaaaaaaaaaaaaaaaaaggggggccccccattttt

SEQ ID NO: 165376 - DNA, 409 bp, Zea mays
  Clone ID: MRT4577_82409C.1
ttctttcgtgcggggcatcgtggtgccactcgatctctcacacttcaaggggcccgtgatccaatggccagctccgacaaatgaacagaggagggagttgactaccatcgacactgatatgttgcacaccctcagagaatcacgtacaattgtgcgaaacaagattggctgataagctcctttgatgggaaccgcgggggccccatgcacatttgagagttacattgcccaatggaccatgaccaatgcttacacaaatataaactgcatgtgcaatacaagtccatatgccttgtaagggctaatgtttaaaataacagacgccatattttactatatcatttacgaattttactgcagggtatagtgactacagatgtcccattcatgaagcggacagatcacatct

SEQ ID NO: 165377 - DNA, 327 bp, Zea mays
  Clone ID: MRT4577_8240C.1
tcagttttcttttgtgaggcgtaactgtccgtggcaccattcttcgtcgtcttcatcggtatgaaggagctgacagcctccgtcgtcttcgaaatgacccattgggctagcggctagccccaacttcttcccacccaccaacagcgccgccttgaacaacggcggcttaacatggcaggagctcctgcgtctgtcgcccagcttcataaactgcaccaccgcagctgggtgggccgtgggcgcggcaccggtggcggcgtcatccttggcagcaccaacgaggccaagctcgtcacgctcgtcgccgtgcgtgacgttgccatccat

SEQ ID NO: 165378 - DNA, 309 bp, Zea mays
  Clone ID: MRT4577_82410C.1
cattatggtgctcgtgcaccgcgcctgccacggccaccttcaactagttcatgctggcgtaccacctcctcaactgcgtgggcgggcgcgtctcctgcatggacctcgccaaggctcttcgagtggggggggggacgccgcacaacctgcagatggttgaacgagtactacacccccgtttcttgactcaattgccgatttgccggacaactggccgactgaatgtctgataagagatacaccaggaggactgaccgttacataggcgatatatataatgagatacaagatcaatcacgccatcttcgt

SEQ ID NO: 165379 - DNA, 1220 bp, Zea mays
  Clone ID: MRT4577_82411C.1
ctcgaggccggccgggccgggaatccgtcctccattgatgatcaacaacaataatcctcatatcgtctccctctagcttactagctactgcctagctagcttgtcccgatactagctagctagctatcgcgctggacgaccggccttgagctctatctctggtgatctggtccggccatcacaaagcgatcgatcgagatatgggcaccatggtggtggcgcagctaaagccctcctccttgttggccgcgctcgtccttttgctgctcctcacgtcggcaatggcggcgaactactggaacagtgggacggcgacgttctacggcggcgccgacggctccggtaccatgggtggcgcgtgcggctacgacaacctgtacaacgcgggctacggagtgctgaacgccgcgctgagccaggtgctgttcaacgacggcgcctcgtgcggccagtgctacagcatcaggtgcgacgccagcaggtccgtgtggtgcaagcccggcaccagcgtcaccgtcacggccaccaacctgtgcccacccaactacgcgctccccaacggcggctggtgcggcccgccgcggccccacttcgacatgtcccagccggcgtgggagaacatcggcgtctaccgcggcggcatcatccccgtcctctaccagcgggtgtcatgctccaggcagggaggcgtgcggttcaggatcaccgggtccaagtacttccagctggtcctcatcaccaacgtcgccggcagcggctccgtccagtccatgtcggtgaaggggacgagcaccggctggatcgccatgacgcgcaactggggcgcgcagtggcagagcaactcggcgctgctcacccaggcgctctccttcaccgtcacctccaccgccggccagacgctgtacatcaacaacgtcgtgccggcgtggtgggacctcggcatgacattcgccaccaacgcgcagtttgactattagctccatctccatctcggaaccgcataatcgcatgtgagctagtgtgtgtgccagcccggccggcctctgaaaatttaattcaccaaaatcagttgacctagctaatgtgggttgatctggattttgatctgtgatcgcgcttttttttgtcgaattagtttctactaccctgaacatatatatgtacactccagtataatgtattgtcgtcggccggttcagtgtgcaaaaaaaaaaaaaaaa

SEQ ID NO: 165380 - DNA, 445 bp, Zea mays
  Clone ID: MRT4577_82412C.1
tacatgtccttgttttacactgcgcacggacaggaaaagcaggcgggggtcaaggtgaaggactccaagacccttctctttggtgagaaggaggttgctgtgcttggctgcaagaaccctgaggagatcccatggggatcggttggcgctcaatatgttgttgagtctactggagtgttcactgaccaggagaaggccgcagctcacttaaagggtggtgccaagaaggttgccatttctgctcctagcaagggtgcccccatgatcgtcgttggtgtcaacgagtaggagtgcaaggctgacaataacattgcctttaatgctagctgcacaaccaactggcttgttcgctagctaagggcataatgacaagttcggttttgttgaaggtttgatgaccactgctcatgccttcactgtaccccaaagaccggcgatgggccct

SEQ ID NO: 165381 - DNA, 271 bp, Zea mays
  Clone ID: MRT4577_82413C.1
ctcggacttgttttgtatagagtttttggttggagattatcacagcattttgcttcttttctttctttctttttttttttaaaaaaaaggagctggcgcgaggaatcatttagcactcactcgaacggacctgatcttcccttcctcagaaaacaccacagtggagcaaaaaaacgatgtacgcggcgggcaggtgttgtgctacaatggattagcatagataacaaaccagcaaaaaaaaaaaaaaaaaaaaaaaaaggggcgcccccca

SEQ ID NO: 165382 - DNA, 877 bp, Zea mays
  unsure (1)..(877): unsure at all n locations
  Clone ID: MRT4577_82414C.1
aagatggatctcataccgtggaacatcgaggcattgacccctcccccaagccacaaacaatccatctcctctgtcctctccaacacctggagaaaccactccaaattgggcacctgagcgccccatggcctcatcccggatccccgatgcactggcggcgccggcgctaactccggcgcctgcggccgtcccgctgaaggtgcaggcccaaaaccctagcattgcccccgccgacccgccgtcgcccgagatggagaccacggcggaggcgctcacgcgggaggaggtcctccggcggcgccggcgccgcgcggcccggctagccggtgtgtaccgccagctatactgggccatggccgaggaggtgcgcgcgcggcaccggcagtacgtctgggacctcgcccggagcccactggaggcagagcagccgccagcccctccaggagggcccatcccggcggccggggagcttccgaggctggcgccggtgccgaggaggaacaagtgcgggttcccagggtgcaaggtgcgggctatggccacgacccgcttctgccactcccacatcctctccgatcccaaacagcggctgtacaagccctgcgcgtacatcaacaagagtgggctacaaggtgggcttatcccctgtagtaggccgatcataaagtctgcagctccctccctctgtaatattcacttgcaaaaatgccagaaaaacattgcacaagcttataagaaggttggcttgaacccaccccttacaggcaaggtcaccctanagttcagtgttttggttgctgaatgtgttcgtcagatccaagacaaaaggagaaatcactgaaagctacagcacgatagaaatgcccctaagacggga

SEQ ID NO: 165383 - DNA, 330 bp, Zea mays
  Clone ID: MRT4577_82415C.1
ctaaacaatatgtgtaagcatccagttttcaagaaatgttggcctttacaagcatagctcccaagtcttggaaaggtgaatattcaccaagcaggaaacattgtctgagtttccacaggttttcatgtcccctacttaatttagcgtacatgagtcatgtgaaggagctaccgttttacatctgcaattccctggaagaacaccataatgtgatccacaacttcagcatgagcactgtttgttttgtaaacattcataaaaaaatgatcgggaagaatagttatatgttcctcaagcaacagggctgcacatgtgatgaaaacagacatt

SEQ ID NO: 165384 - DNA, 325 bp, Zea mays
  Clone ID: MRT4577_82416C.1
gttgacgccttgggagcgggtccggagctcgacgcggccggaagatacgagaagatcgggactagtcatgcgcatgcttcaacagcgaacacgcacatgaagtgggcggtacctgggacgggcgacatggctctcatgtaagccgcgagcaggaattgttcaaaaaggaccgcaagcatgtaggcaacttgaattaacagataaactgaagggaacacgcatactaaggccggacgcattgaagactgccaacaaatccgaattgccgtcaaacaacatgacgtagatttcatggataatgacgacactaaggacgaacaagatg

SEQ ID NO: 165385 - DNA, 108 bp, Zea mays
  Clone ID: MRT4577_82417C.1
atgacagctcgagaaaaccccctaactcgccacaccgtgtaagacgtggggcaaggtctcgaatgactggcgtaaatgcacgtagcgggaatcgtttgaaagtgaaag

SEQ ID NO: 165386 - DNA, 856 bp, Zea mays
  unsure (1)..(856): unsure at all n locations
  Clone ID: MRT4577_82418C.1
cctcgaggccggccgggatctgtagcatagacgtggaggaacacccaatcatcccgaatttggtggttaaactctactgcggtgacgatactgtaggggccagtatcacaaccacaatttcaactacatctctaacgccaaacgcacactcataacactcttcacttcctcctcatacccataaacacacaacaacaaccaaaatggtctcttctcagcaaggttacgccaacaccaccgtcgacatgaagggcaacaacaaggccgtcgatgaggcccagtccaacctccctcttcccgaccagccaccagtcgcctccgacttcaactcttctgacgctcgtactgtcaacgttggctcgggcggccaagaagccagcttcacttccggcggcggagctatccgtgagcctgctgtaggtgctggtggtgcttcagcccgtgaggcaaaggatggtctcgatggtattcccaacgatgctgtttctcgcgaggccaagaaccactctggccttgccgacacaactggcaaggattacggatacccacaaaagaacgaccccagctccggtctcaagcagtagagtgttccacgaggagatgatgatcaaagatacccaaagtgtagtggggttggaggattttcttatcatacaaggtcactgtcactgcgttcagctggccgactgcaagagcagtatcttgatgacttaatatacgaattcaatgaatgatgaaatacatcagtttctaatcttcgtaatgtcgtctactaaatgtattcgctatcatgtggctagctgtccgactggtgcatttgatctctggatcgaagcanagccatgtcggaagtgtg

SEQ ID NO: 165387 - DNA, 595 bp, Zea mays
  Clone ID: MRT4577_82419C.1
atggatctattactccacgtgatttgtagactacagcagcagctttctctcgaccgacgggcgcagggaccggaccatacatatcgctgtgctaccggaccaatgactgtcccaacgcaggatgaacgcgagggggagcgggcgtcggcgaggtcccgcaaggccacgagctgcaaggcattggctgaccagaaagcaccgcagggagagatgcagactaggtttaaaggcgaatccgcgcaaaacaaagcagcagaccacgctgctgctgctccaggttcctgcatggcggcaccatgatctaggtgagaggcacgaaccgagagccagggacattcagccacgcctgacgccaaacatgtgccttgagctcgtaacttgttccgatagcatgtgatgcgacgcttgatgaagcatatactctgatgatatctgagatttggtgatgaacaataatgcagctggcctccgcctttcacaaaaccaacggcagctagcccaagggacgcaaggccgccctcaagcccaaaccctggtcgaaggcggaggccagggccgcagcttttgccccggtgaaggagggcaaatccaacgc

SEQ ID NO: 165388 - DNA, 702 bp, Zea mays
  unsure (1)..(702): unsure at all n locations
  Clone ID: MRT4577_8241C.1
ttttggccttttgtgccttttattcgtatttttttctcaaatatgtcacacatgctataataccattttgtcatttaataaaaacaataaaatgatatataattcccagcgagcactgcaccgccgccgacagtcggcggcgacgaaccaatcgagcgcgcgtggtggatggcgtcatcagcaatggctccgtcgtcggcgttggacgactttggtgctgaccgtggctcaggtcggcatgaggccagcgtcggtattggccgacgacctcgagcagccaggccgggttgagggcacagtccatctccgggctcggcgaggcggcaccggcacgccttcaagtgcgtctggtcagcggcggaggcactccgccggtggatggatggcaacgtcatgcacgacgacgagcgtgacgagcttggcctcgttggtgctgccaaggatgacgccgccaccggtgccgcgcccacggcccacccagctgcggtggtgcagtttatgaagctgggcgacagacgcaggagctgtgagccagtcgagtgcgaggcggacctcatctccgtggcgggctggcggctggcgcagcctgccatgttaagccgccgttgttcaaggcggcgctgttggtgggtgggaagaagttggggctagcccaatggccaatgggtcatcttcccnggcccggccggcctcgaggtaccc

SEQ ID NO: 165389 - DNA, 442 bp, Zea mays
  unsure (1)..(442): unsure at all n locations
  Clone ID: MRT4577_82420C.1
cggacgcgtgggcggcgctatcgacggagcttcgccacacgtacaatgtgcgttccatgcgcgatctcgcaaggacgaccaggtgcaggtcttgcgctgcacctacaagggccgtgagggcaaagtggtgcaggtgtaccgccgtcgctgggacatccacgttgagcggatcacccgccagaatgtgaacggctgcaccgtgaacgtgggcatacatccttacaaggtcatggttacaaagctgaagcttgacaaggaccgtatggctctcctcgaccgtaaggtccgtggccgctccggcgacaaggctaagggcaagtttactgccgacgacgtcgacgacgctgatggtggcgccgccgncactggtgcgtatctgcaagagatcgactatgcgcattctggtgatctgatggtgcgtctaccgcctattactgcttat

SEQ ID NO: 165390 - DNA, 203 bp, Zea mays
  Clone ID: MRT4577_82421C.1
tgtggccgctgactttgtctctgacgcctccttattcttttataccgactccacctaaacaacaacacactcctccacactcctcacctcctccacctcaacaacagttaccatcatggtgctgtcatctgcgctcaccctaacaaccccatccattgccgtcgcgctaaccacgttgctctctgtgtttactacgttaattg

SEQ ID NO: 165391 - DNA, 748 bp, Zea mays
  Clone ID: MRT4577_82422C.1
ccggccgggacgcgctcctctctcgccgtcgccaaccatcgccgcctcgcgtccggacccgccgttcctccgaggtgagaatccttgcgcatttcatctgacgacgatccagttcgcgccatgtaggccgttgtccacgatcggctttcggttttcagtgttgcctgctacacaaagtcacaaacccctgacaccaacgcgcacacgcatgccgccgcctcccgcccgcacgagcaccgaccggctacgcagcacgaaggacgggaggtgccccgttgctcgccggcgatgatcctccacccctgacacgcccgcgattaggttccgtcctctgccgccgcgcaaacgatgtctgccgtcgacccgcggtcgttcccacgcccgcgacacgagtcagcagcgaactcaacgggaatccggcgacccccagtgggtttaccccctttcctattctcgatctactatattcgttcagttataacaaaattatgtgtacaatttcatcgcactcggatgaattaatcccttctatactactgactatagcatagaaagggaagaaattgcatctgaatagcgttaaagcgattaggacattgtaggatgataaatgagggtaatgtacacaattacagtgacggaatcgccactgttgctccttttgcattgttccccgctttccttcctgatcgcgaatattcggatattccttcaggacggggcaaggaaaatgacactctttgcttcg

SEQ ID NO: 165392 - DNA, 612 bp, Zea mays
  unsure (1)..(612): unsure at all n locations
  Clone ID: MRT4577_82423C.1
aattcggcacgaggaaacccaaaccctcggcgaggacgccaccgtggcgaccgcggtggatgcagcgggtctggtgcccgccgacctggagcggcgggtgatggcggcggtgaaggcgtcggaggcgcgcggggacccgccgcttctgcaggtggtggagctatcccgcatcgtcgccgtggagggcgcggggaccctctccagcgccgaccttgccaggatcctcgtctccaacctatgcttcgcgcacaactcgccctcgctctggaagctcctgggccaggccgtcgtgtcccgcctcctctgcccgctccacgttctcgcactcctcacccctagggtgctgccgcagcggcgagcgcagcctgaggcgtaccgcctgtacctggaactcctcaagtgtcattgtcacgtcgtccttactgtcgatggaggctgggcctaatcgtgcaagcctgaagngttcagttctctacccagaggttgagttctattgaagcacagaggtgtccttggagactctactgccttctggcacaaaataatgaattgttataaattttggagagtttgcaaacagactataaccgaatacaacacttcttggtgttc

SEQ ID NO: 165393 - DNA, 324 bp, Zea mays
  Clone ID: MRT4577_82424C.1
aagcgctgcagcgacgtagctcggattcggactcgatgtggcgatccatctctcagcatgtcgtcagagaaggatgcggcgctcgacgcgtagctcgatgacagcccaaccgtatgtgacaagatcatcaaaaatgagataccgtctactgtagtatatgaggacgagacaggtactgtctttcagggtcatacaccctcaagctgcaatacacattctcatcatccccaaagtgcaggatggactaactggtctggcagaagctgaagagaggccatagaaatattagctatctcctctatgttgccaagttgtgcgacagga

SEQ ID NO: 165394 - DNA, 392 bp, Zea mays
  Clone ID: MRT4577_82425C.1
tcgggaaagaccaggaccttcgggcccgttaggatccacatcttcccgagcgagttcttggttgacctcttcccccttcggaccacctccaagggtatgcacccccacccccttcttcccctttccccttttcccctttactttctcgcaggaaatctgtgaatacttttttgtgtcctcgtaatttcgtcccggtctacctgtttatgatccactatgtgcttcttttcttcttagaaacccttttgttcagtgttattattcaagattcattcctcgactacgatggtgctaggaaattaaaattagttgttttactgagtatgtgctagcctgctgagctaaatttgtatcgatcttgctttttttaatgatgatcagccctgtccacg

SEQ ID NO: 165395 - DNA, 484 bp, Zea mays
  Clone ID: MRT4577_82426C.1
cggggggggggcccggggggggaaaggggccccccccccccaaaaaaacccaaaccctaaaaatttttaaggcaggcaacgggttcggaaagttggaaaaaacacaaacaaaaataaaaggggggaaaaaaaaacagggccaaagggaaaaaggttaacccgggtgggccccaaacaaccacaaaaaaaaaaaacatgtagggggggaaaagggcccaaaaaaaaaagttaaaggcaaagccaaaaaaccaaccgggcccccagaaggggaaaaaggaaaaaaaaaaaagctaaccggcccaaaaacttttaaacggaaaaaaagggaaaggcaaaggcaaaggtttgttccaaaaagaaaaacacggccccggaaggggttaaagtttttccggggggggggtttagggggcacttcaccgcgaaggggggaaggtgtccattgttaaacgggaccggggggccaacccgggaaatccgaacc

SEQ ID NO: 165396 - DNA, 300 bp, Zea mays
  Clone ID: MRT4577_82427C.1
tttcttctcgcccgaccacagcagcggggcgggcggatactacataagaagggccgagggcggatgacaccacaccgcgatgggagggggccactgctactaaccggacacgcgagataacctcacaggtcactacgagagaggctccaagtgcaaaggaacacagcacaatcgggcagcgagcatcaagccaccccggcggaaggacggtgcgctcagcaagggctcgccagtgcacgacgctaggaaccgcggtctggagagagagaggagggacttcaccatgatctgagaacctgc

SEQ ID NO: 165397 - DNA, 151 bp, Zea mays
  unsure (1)..(151): unsure at all n locations
  Clone ID: MRT4577_82428C.1
tagaaagttttttctccagcacgcacctcccgcaaggaggtctgccagatgtgttgggtagaccaacaccgnctagattccatgcctcaccctgactcaccggagaccacattcatccaaacaacctctcactcgttacaagtccgcaaat

SEQ ID NO: 165398 - DNA, 175 bp, Zea mays
  unsure (1)..(175): unsure at all n locations
  Clone ID: MRT4577_82429C.1
cccacgcgtccgcggacgcgtggtcggcaacttgtaaaggagcacgatttggcacataaactgatngttgaagatgaaattgcagaagcaatgctgcggcctttatagttgcaacatgcagcagatgaagcagttgtattagaggctgctctaattgctcagcttattacactta

SEQ ID NO: 165399 - DNA, 416 bp, Zea mays
  Clone ID: MRT4577_8242C.1
gggcaagccaatttaattggtgaaactctcgttacaaacacccaaaaacacaggccccggcatttggacggggccttaaatacacttccaaagtataagaaaaaaaaaaacccccattcccacacaaatcctgtaaaaccaaaagaaataaaattcccttctcttgaaacccttgcccgcactggaaactcttcttccctgaacccagaccgaaggggaggatcccaccccccagggaacaaaccgctctggttttgtgagcaaggggggcggaaaaacaaacatttcgcaatcgagagggggcaccaaacctgaaagctggccttgacccgaaaaccacgagggcgcccatagaacgagagcagggacaccaggggaaaaagcgaacccaatgctacaccactgggcggagaagg

SEQ ID NO: 165400 - DNA, 163 bp, Zea mays
  Clone ID: MRT4577_82430C.1
cttacctttcaagagatctctccaaacaaggacaccgttttccattactagtcacacattgcgttcacaatgccttgcctgtaccgcattttccaccgtatttatgtgttttacccctatttctacatcttgtcttctggcgcggacctttccatttattttt

SEQ ID NO: 165401 - DNA, 281 bp, Zea mays
  Clone ID: MRT4577_82431C.1
taccacttccagtaagaaaatggtaggaaaagcagcaatgcgtggttttcctaccacttccagtaagaaaatgggtgttttgaagaaatcatttgccttgtcctcacggaatctgattaagccctggcctcttgatacgtatagagtcattgtgtatattccagttacctagatattcccttgagattttgatacaatttgagggaggcagaagtctgcatttgaagaaaaaaaataagtctgtttgtcatatttaagtagcctgtggctatttttatact

SEQ ID NO: 165402 - DNA, 406 bp, Zea mays
  Clone ID: MRT4577_82432C.1
gaagcgcgccgggcatggcaccgccgacggcaacgaggccatctgcaccggcgaccacgacgggtgggtgctggaggagctcatgtggaccatgttctgcaacggcaagagggtgggctacgcggtgcggcgggaccccaccgaggtcggacatggacggccccgacggcgagatggcgtacatgcgcgggagcttcgagcacaccgtcgggtcccgggactcggagtcgctctacatggtcggaccgcccggcggcgactgcccggagctcgccatcttcttcgttaggctatgaattgaaccgagcgaaccatacgaatcgaacaatacagtgtacacgtcgcagtcgtggtgtctaatctctcgcctggtctcgttcgttgttcagcagcctcagctagcgtc

SEQ ID NO: 165403 - DNA, 1247 bp, Zea mays
  Clone ID: MRT4577_82433C.1
attcccgggcccaccaccgccggctatccattgcgcccggagccggccgatcgggggagcgcagcaggcgggccgcgccggccgccgcaccaccgggtagcccaggccgcgcgcgcgcgccgtccagctcgtctgctgtcgctcctccgtgatggccgacgtcgacgtggacgccaacaacgaggccgagcaaaggacgcgctcggagccggggacctccatgtcgccgtcatcggaggccgacgacgacacggccagcagtacacccaacgagtccccggcgcgcgccttcgcggggcacacgctcgaggagccgcctcggcggcgggcgccgtcccggcggtcccgtcccgttcggatgctccagagcgtgtgccggtcgctcccgctgctgaacccgcggtgcgggcggccgatgatgcaggccggggcgtgccgaacccgccggccgtctacgcggaccgccgtcgtcgacgacgtgccgtagtaggactcatcgagctcgctgctgacgcagctcatcgcgtcgtcctccttcggcggggccgcgtcgtcgcgccgccgcctcaccggcacgctcttcggctaccgcgacggccgcgtgtcgctgtcgctgcagcagaacgcgcggtgccagcccacgctggtggtcgagctggcgctcccgacgcacgcgctgctccgcgagctcggcgcccacgcgggcgcgcgcatcgtgctggaggtcgagaagcgcgccgagcagggcaccgccgacggcaacgaggccatcgccaccaccgaccacgacgggtgggtgctggaggagctcatgtggaccatgttctgcaacggcaagagggtgggctacgcggtgcggcgggaccccaccgaggaggacatcgccgtgctggagacgctgtgggccgtctccatgggcggcggcgtgctccccggcaggtcggacatggacggccccgacggcgagatggcgtacatgcgcgggagcttcgagcacaccgtcgggtcccgggactcggagtcgctctacatggtcggaccgcccggcggcgactgcccggagctcgccatcttcttcgttaggctatgaattgaaccgagcgaaccatacgaatcgaacaatacagtgtacacgtcgcagtcgtggtgtctaatctctcgcctggtctcgttcgttgttcagcagcctcagctagcgtcagagatattattcatttgccccatcaaaagatttttcaagcaaaagg

SEQ ID NO: 165404 - DNA, 210 bp, Zea mays
  Clone ID: MRT4577_82434C.1
gtacctcgaaggcggccgggacacggatacaaatgaggggcgggccaggactttcccacgccgctcggacaccaccgaactgctggacgtgctcccgaagcgctgtattgtcatccgggacgcctccacgtcctccccgagagatgccgatggacgccagtgcagcgtcgcgatgcatcccgcggcccgccgccgcgagatgcaccaagt

SEQ ID NO: 165405 - DNA, 584 bp, Zea mays
  Clone ID: MRT4577_82435C.1
catttctatagcctcgttattttggtctttttaattggcttactcttcgatataagaaaaaacaaacagatacattttttgaaacattagctaaccttttggcttcgtcaaatatagacatcacattacacctacggctgatgttatttgaattggtgaagaactctctctacgactccgcctggtgcaagaccgatatattaattttgataaagatgttcctccagtgagaattatagttgttgatggagaagaggatgttactatcaagggctcaactgcttagagtgatggagacttgcagaacagtcttacgtaaatagcaggctatggcctttgcacgtgctgtagcagcagggtttgttatcgacaaattgttgtatttggtcacttttgcagagcgttttggttcttctcgcttgattgaaagttaacgaaggagccatggtgtaggcaattaccaaacgagttgttgagaatccaaatattggtagtttttgcaatatgcaagtagcttcagctatttatcttttttccagtaccatatgtatcatgtcgaatcacattatagatggttcttgttg

SEQ ID NO: 165406 - DNA, 517 bp, Zea mays
  Clone ID: MRT4577_82436C.1
tgaacaccctgacgggggagcaccggctggaggatatcgtcgacgagcgatgcggcgacgtcgaggtggaagccgtggaagccatcctggacatcgcagcgatgtgcaccgacgcagacccggcgcagcggccgtccatgagcgctgtcctcaagatgctggaggaagagatcctgtccccctgcatgagcgagctgtgctacgagcagcacctggagctctgagccgaggaagcctgactacgatgcagtgcatgatggatgagactgtgtaggaagcaaaagttttgtagatatgacgatgatgaaccgcgtacgtagtgtaggtgtttgtgagcagctcaaaagtaggaaagtgcagaaccaacaacctgatcggcatgttacatacatagatcttctaacctttttgtcttctaagtctcagttttctttggagggccgtattctgtagatgagctgggaaacagtgaacggcattgagacctgagaatgaaagacggattaaagtaaataaa

SEQ ID NO: 165407 - DNA, 586 bp, Zea mays
  Clone ID: MRT4577_82437C.1
cccccgcgtccgaggacaatcacttcaccggcgaggtgccgtcagctcttgttggtcttccgaggctcagggaggtctatcttggggggagcgctttctccggcgagattccggcgagcttggggaatctgtcgtggctagaggcattgtccataccgaggaacagactcactggtggcctttctggtgagctcttccagctggggaacctgacgttcctggacctatcagagaacaacctcgccggtgagatacctctggccatcggtaacctgttggctctccagagcttaaatttgagcggcaatgccttttctggtcacattcctacgaccattagcaacctccagaacctgcgagttcttgatctctctggtcagaagaacctctctggcaatgtcccggcggaactttttggcctaccgcagctgcagtatgtgtcattcgcagacaactccttctctggtgatgttcctgaaggattcagcagtctttggagtctgcgcgacctcaatctctccggcaattcattcactgggtcaataccggcgacatatgggtacttgccgtcacttcaagtgctctc

SEQ ID NO: 165408 - DNA, 820 bp, Zea mays
  Clone ID: MRT4577_82438C.1
ctataatctctcttaaatcacctccatggacttggatcgttagcgatggtatcattttgtttgtcatgacatcacattacacctacgactgatgttatttgaattggtgaagaactctctctacgactccgcctggtgcaagaccgatatattaattttgataaagatgttcctccagtgagaattatagttgctgatggagaagaggatgttactatcaagatattttttaaattttcttttgaaaatgccacggcttgaagctattctcattgtgatatgcatggtatcttcacattattcaatgagctaaagaaagaaaaactaaagaatgttgttgccaataaaagaactgcaagaacaaaaactgaacaaaagctgcaggatgagctgcagaggaagggctcaactgcttagagtgatggagacttgcagaacagtcttacgtaaatagcaggctatggcctttgcacgtgctgtagcagcagggtttgttatcgacaaattgttgtatttggtcacttttgcagagcgttttggttcttctcgcttgattgacagtgacagttaacgaaggagccatggtgtaggcaattaccaaacgagttgttgagaatccacatattggtagtttttgcaatatgcaagtagcttcagctatttatcttttttccagtaccatatgtatcatgtcgaatcacattatagatggttcttgttgaaaatcctaatcctcaatcaggatggattgtgttgcatatattataaaaggagctacatggttgtatgttgtcgcagcgcatgggcattgtactatcat

SEQ ID NO: 165409 - DNA, 941 bp, Zea mays
  Clone ID: MRT4577_82439C.1
cgtccgtactgaaattaacatatatggcgctgctcattatacacttatgtaagtcgtataatctctcataaattaccttcatggacttggatcgtttaagggaatactgatcagcttttgatattaacagattcggattttacatttctataaatcctataatctctcttaaatcacctccatggacttggatcgttagcgatggtatcattttgtttgtcatggtaatgtcataaaatgttttttagaattcaatttggatgcctcttatagatcacataatttgtttgtgcacatttctatagcctcgttattttggtcttttaattggcttactcttcgatataagaaaaacaaacggatacattttttgaaacattagctaaccttttggcttcgtcaaatatagacatcacattacacctacgactgatgttatttgaattggtgaagaactctctctacgactccgcctggtgcaagaccgatatattaattttgataaagatgttcctccagtgagaattatagttgctgatggagaagaggatgttactatcaagatattttttaaattttcttttgaaaatgccacggcttgaagctattctcattgtgatatgcatggtatcttcacattattcaatgagctaaagaaagaaaaactaaagaatgttgttgccaataaaagaactgcaagaacaaaaactgaacaaaagctgcaggatgagctgcagaggaagggctcaactgcttagagtgatggagacttgcagaacagtcttacgtaaatagcaggctatggcctttgcacgtgctgtagcagcagggtttgttatcgacaaattgttgtatttggtcacttttgcagagcgttttggttcttctcgcttgatgtaagtacaacattcttatgtctaattataatattctggttgctc

SEQ ID NO: 165410 - DNA, 265 bp, Zea mays
  Clone ID: MRT4577_8243C.1
caaagcagggatggttaaaacggccggctttaattttttttttttttaactcccaaagatacagcctgagcacaaactgttaaaaggggaaaaccatggcgggaaggccacagccacaaacatgcaagagctgaaagttaactccgagccggggtggttctctcgcgacaacaacgggtccttttggaatcccgagaaggcgcacaaaaggggcttgtgatccattggaagcattggccccagggagctgggcctcctttggtct

SEQ ID NO: 165411 - DNA, 485 bp, Zea mays
  Clone ID: MRT4577_82440C.1
aaaaaaaaaaaaaaaaaaaaaaaaaaagggaaaaagaaaaaccaaaaaaaaaaaaaaaaaaaaaaaaaaaaaaaaaggggagggcggaaaaaggggaacaaggcgggggggccgcgggcaggggaacgaagaaaccgtccaatgggagggcaaaaaaaaaatcaaggggcgggggttcaaaaggggggggacgggaaaaaccttgacaaacccaaagtaagggaaatcgcgggagatccccatttgaaaggcgggggaaaaaggaaaggggccgccacggggggcccttccaaaaaggggcgaacccaaaggggaaaaggggaggggcctggaaggggggcataagggggggcggttgggggggcacctcaaagggggaccggaaaggtggcaacccccaaagggccggttccttgggctagctcccttgcgctgggggcaagggtggcgggctttcccttgaaggccaaaaagggggggttccc

SEQ ID NO: 165412 - DNA, 373 bp, Zea mays
  Clone ID: MRT4577_82441C.1
gagacgagaaaagcagacttttctctggaatccagtcccatgtaactgatacacaagatcgactgtatgacgactctatttgggcgggaactagacgttcatacggttgccggagaacacgggaacgcgcgctatggctaggaagcagaggtcgagcgtgctaccctggagcctgatggtgacccgcttagccagggtggggccgatgtcggtgacgtcgaagagacgcgtcaggagagcctcggctgccaacctggcgcgcggagtacggttggaaggctggacgccaggatcagtccttgaaatcctgctgtggacagaggagttgatgggatctttgcggaccgatgcgcgcgtggcagccaggagtacg

SEQ ID NO: 165413 - DNA, 225 bp, Zea mays
  Clone ID: MRT4577_82442C.1
catttactcttggtctaggtgcttgcttcgcaatggttttgcttctgcttttatctatgatgctggtgtccagggcaaggcacaacaatttgatggtcacattgttatgactgtaccatgtagtccaatgctaagactatccgcagcggtttcctctaaatttttccccctataccactttttacgtcacatcatcaacatttcatcgcctactttttttatctc

SEQ ID NO: 165414 - DNA, 540 bp, Zea mays
  Clone ID: MRT4577_82443C.1
ggccgcttttttttttttttttttgttttttttttttttttttttttttttttttttttttttttttttaaaaagctatgggttgcacatttatttaagcgggatcccagcttttattttgaacgcgcggggatgcggatcactcagactagctggcgtaaggttttagttattgaaaccccctgcgggatgcttcccgaaagccaccaacaagccggcggacgcgggaggcaaagcggacgccttgcaaaaaaaggtcctcggagtgcgcaaaaggaggggactgcacagggctggcggcgcggaggatgccctcctttggaggcttaagggaagccatcctaaggtggcttatgactccaaaggaggacatccattcccaggggatgtaaagaaccttgcaccttccgcctgaacggtcccttactcaatgaggggtagggaggcctggctcaacttggccccgcaaggctggcacgccctggagagccatcggaggaaccaccctcctgacgtcggggaaggaagacccttgtgact

SEQ ID NO: 165415 - DNA, 318 bp, Zea mays
  Clone ID: MRT4577_82444C.1
acgcgtccggccacgcgtgcgcccacgcgttcacggacgcgtggggcccggggggcggggtcaagccgcgcctaccgtggccagagctgaagaggaaatgctgacgggagctggcggacatcccggcgtactgccggtgcacggcgcttagcatcctcatggacggcgcgatcccgccgggcccggacgcgcagctggagggccggctagaagacctggcgggctgcccgagggaggtgcacaggggattcgccgacaccctcgtcaaggatgtcgagtgcaacctggccaccatcagcggggtcttcgaatgcccct

SEQ ID NO: 165416 - DNA, 381 bp, Zea mays
  unsure (1)..(381): unsure at all n locations
  Clone ID: MRT4577_82445C.1
gctgtacgcctgcagtaccgtgccgaattcccgggggaggacgcgtgcgggcaatgatccttccctgcagacacgcaggcctacatggaccagcttaactatgacatgggggacccttacgaggacgggcggtcttgattgatatnanatgctccngtcctatgccccccaaataatggcgatgcatgcatatagtttcctggngtatgcggaactatatatgtgttgaaactgcaccaacgattagctggctgattgtgatggttaccttaagaactccagtgtattggattggtgtgtgctgggctgtgttgtcagaagcttgcaactttgtatatgtacatgtatgggattctggtaggttcttggagctgcgcgcna

SEQ ID NO: 165417 - DNA, 515 bp, Zea mays
  Clone ID: MRT4577_82446C.1
cataaacataaagaatatgataaacatccggttttgcaatgtactgcttgtatatcatgcgtatgacaccaccaagtgaaatacagtgaacacctccatgtttttaacgacagcatactactccatcaatcaaaagggtacggtatcttgccaccctttaatgaggaaggccctgacccttgtcgacttccactcatattatttcattaatcccctggttcagcaccagcctcacaatgaacgtgcccctcaggacgatcatgcccttcctggagttccaaatctcctgaacctgggtcaaccacagaaggggctggctacggtccagctggaccttgggggcttcatcccatgcaggacgtgggcaaataaactctctctgagcaccggttcatggtattggccccgctgggaggcttggcagcgagtctcttgctggatttattgaggcggttgggctcatgcaccgacagggatgacgaggaaaggttacacctttgtgccattgctcggac

SEQ ID NO: 165418 - DNA, 356 bp, Zea mays
  Clone ID: MRT4577_82447C.1
ggcttgatgtgaacaaagagcctttcaagttcacaggcatatatattaggaaggctggatgatgacatcaaagagctgtacctagttatagaaattggacatcaccctataaggatgaccaaggatgtgctaagtacattggaatacatccagattttccgaactaagcgagcgaagtgaacgaggcaaatggagatgaacacttagatgctggtcaaaagggcaggggtcctaatgggaaggactgaagatgaggattcaccggcaagataaatggatgcaactagtaagacacctgaggatgcgacagtatgagagcaaagagatgggcatgttaaacctgatagtcccgacta

SEQ ID NO: 165419 - DNA, 458 bp, Zea mays
  Clone ID: MRT4577_82448C.1
cccacgcgtccggcagctcctatgggccaggcaggatcaatcaatggtcttatttatgatgactagccatgttccgtcctctgctctgataaccattggttcgggcatttgtcattttttgttcactcgtttagtttgcagagcagattggttcgatggatactggaacgattacttggtgcctcaatttgactctgtcccgtaaaaaaaagattctcctagctgttaaggaaggatcggatttggcacccaccacccagcacacataatagtgggagtgaccataaacagctaggaatatccacagttgcagatagataatggtgacgaaataaatgctaattggaaactggtggtttaaaaaatgaaacacagcccatagacttaattcagaagaggttagcagatcatttgatacaaacttgaatacttagtccctagatgtcttattttaagag

SEQ ID NO: 165420 - DNA, 352 bp, Zea mays
  unsure (1)..(352): unsure at all n locations
  Clone ID: MRT4577_82449C.1
ctttgaggcaatgcgcaagggcaagntttcagagggcgaggccanactacggatnaatctggtgatggaggatggcaagatggaccctgtagcctatcgagtcaagtatacaccacaccaccgcacaggggacaaatggtgcatctatcccacctacgactacacacnctgncttctgtgactccatcgagcacatcactcactcactctgcaccaaggaattccaggcccgacgctcttcctactgctggctttgcaatgcatggacgtctattgcctgtgcntnggagtatggccgctcanctgcactatgtggttgtctctaagaggaagntnccagctgtagnatggt

SEQ ID NO: 165421 - DNA, 901 bp, Zea mays
  Clone ID: MRT4577_8244C.1
aagaaaccgctgcacgttgaagacgcgcccaggccccgggaggactcagatttggtgtgactgcgacaagcaacacgttttggaatagttcgccaattgattgtgcaataatttaagacaaggttttctcggcttttgggtatgttcataaaatagccacttttgaaaaggctgcaggttttcaggcattgatccagtaactgatgcggctactgcttcagctgctagagaatccttagatggaaggagcatctcaagttacttgcttccggagcatgtaacatcctattgcctgcgaatttctttttctgcacataaggatttgaacatcaagttttagtcaaaccacaacagagagtagagacatctctaattcacttgagttggtcaaatttgttaacggtatagagcaactggtaaaggtttcagttcgtcaggttgtctcttgcctgctcatggattcagcaggtagttcaaaaggttgacctatttgggaatctctggatctatgcttcagttacaagatcaacacatccacaagcacctattgttcaagctgaaatgctggagtggagtccactgtcacggccaacatgtgactaaatttcctcactacagtctacaccctgtagtagtattcttacggacgaatcaaactgaacatcaacccgagatcaggaattggatgatgtgttgtttactatcctcggggctacatggtgtggactgtgaaggccggccgatgtacatagagaggccacggaaggtgtcccagagtttgagagagcatttagggagaggttctctgcctgcacattaactgctaagaggcatattgactccactaccatcttcgacatccaaggggctcacatggatcatccccgagcgcaagcaaact

SEQ ID NO: 165422 - DNA, 697 bp, Zea mays
  Clone ID: MRT4577_82450C.1
ggaccctcgaggccggccgggaattccctttgcatctgaaagaagaactcacagtggcttacggtcatcgatttcatagatctattaagattatctggaatggcagcaatttacagtctttacatcatcaataaatctggtggattaatctattataaggattatgggtctgctggacgaatggataccaatgatagcttgcgggtggcgagtttatggcactcaatgcacgctatctctcagcagttatcacctgtttcaggttgtttaggaattgaacttctccaagcagatacatttgatcttcattgctttcaatcactgactgggacaaaattttttgcggtctcggagcctggagcacaacacatggaaagtttattgaaatttgtctatgaattgtacacggactacgttttgaagaatccgttctatgagatggagatgcctatacgttgtgagctcttcgatatcaacctaacacaggcagtacaaaaggatcgtgtcacatttttgggccgataaattgatatctgaccgttttcacatttctctattctgattagtacataatataaagattgtctttcatatgcttgtaagggattgtgttacagctcatagcctttgtatttgctttttacacacaaatgaagatttactatgtctgaggaaaaaaaaaaaaaaaaaagcggcc

SEQ ID NO: 165423 - DNA, 561 bp, Zea mays
  Clone ID: MRT4577_82451C.1
gggtacctcgaggccggccgggccgggtttccgacatccgccggacggagaggttctgctcccgatgcccggggacgcctacatcctgaaccactgccgcaggagcgagggatggaactgccctactcctgccgcgccggcgcctgctcctcctgcgtaggtagatggtctccgctatccgtccccggttcgaccaaaccttactccacgactagcaggccttcgagggatttgtgctcgactgcatcgcctaccccacctctcacctcgccatccataggcacgaggatgatgcagctcggcgagtcacactactgtaatcggcgattaatgcaccaaggacgcacgctctccttgcgttgcatgcatgtaagaatatgaacagcgacgccgccatgaaataataactaactatgcctgtgccgcatgcgtatgcctaacatatgaatgagatgctcttcgcgctccacttggagagaacgcccctatcgggctcgagctccagaatgttggtcgcgttagggaggactatctgcacgctcgctggaagcctgaccatca

SEQ ID NO: 165424 - DNA, 597 bp, Zea mays
  Clone ID: MRT4577_82452C.1
tccgccgccgccacgccttacctctcctcggccctgtcctccgcctccacctccccgcctccaagcgatgacgacggcccgagatccatggtgacggcggctgcagtggcccgatggaagcggcggccatccctagccgttgccgcgtgcttctgctactcacgttggccatggatctgcagcaggggcctccctcctccgtttcccagagcccgcagctaattcgccatccggagattcggagcagcaagcgccggacgaggaccgtaacctgctggaggcccgagcgcgacctcgtcaacggcgacgacgccccgcacaagatcagtaggagctctctgcctctccaattccatggacggcgacgaccgggaccccacgctcaaacccgacgagcttgaacggcgaggtcatccgagccgaccatcatgattccccacagaacaataagattggagcctaaggttggacattttgatgggactgcggatcttcggatgttggtgctgagattgatgtggccctagctacatgtaagcgaagcttatgatgtcgatcctccaggctgcactgccatcgttttacctcagaaactgt

SEQ ID NO: 165425 - DNA, 652 bp, Zea mays
  Clone ID: MRT4577_82453C.1
atccactctatccagctgatacaagacacaattgcatagagctacaagagcgagaacatggcgtacaagcgactcctctcgctagtagctctcctgctcgccgccgttttccttgccgtctcacgagcatctaacgaccaccaaggccaaccgaggaacgacgcgggagagaacaaactccacgtgcaggactaccgcggccaccgcggaggctgtggcggagagggaggataccccggagaaggaggctaccccgggcgtgactaccccggaggcggcggctaccctggcggcggccgcggagtctactgcaagtgcgagggctgcaaccgccccgactatgcggactggcgctgcatgctcgcgcgacgacgatgccgcggaggccgtgtaccgcccgggctacacattcctcgaccactgcgagaaaaacaaggatcgctctgacgacataggatggtagacgactctaaaagcacctccacctcttcagctgactcgcatgtaccgcgacggcgcgcgtacgatatatatagctccggagcacacaatcagacacctatttaattctgactgcatgcgagtggaatttgatgtgtccaataatgagtccctctccggaccttggtagctgcttgtcttgtggtgagtg

SEQ ID NO: 165426 - DNA, 630 bp, Zea mays
  Clone ID: MRT4577_82454C.1
tcctcggccctgtcctccgcctccacctccccgcctccaagcgatgacgacggcccgagatccatggtgacggcggctgcagtggcccgatggaagcggcggccatccctagccgttgccgcgtgcttctgctactcacgttggccatggatctgcagcagggggctccctcctccgtttcccagagcccgcagctgattcgccatccggagattcggagcagcaagcaccggacgaggagaggacgaggactgtaacctgctggaggcccgagcgcgacctcgtcaacggcgacgacgccccgcacaagatcagtaggagctctctgcctctccaattccatggacggcgacgaccgggaccccacgctcaaacccgacgagcttgaacggcgaggtcatccgtgccgaccatcatgattccccacagaacaataaggtctatctcatggacacccagattttgtatgcaattttctcaacacccagattggagcctaaggttggacattttgatgggactgcggatcttcggatgttggtgctgagattgatgtggccctagctacatgtatgattgcgtaccgggctacttggtgctgcccatcacaatttgcactgacatgataac

SEQ ID NO: 165427 - DNA, 755 bp, Zea mays
  unsure (1)..(755): unsure at all n locations
  Clone ID: MRT4577_82455C.1
ccgggcaactcttggcctcgttttccatttcacagtatgtacgaagtaacctatactccaanattggaactgtcaacagatcaagcatggaacaactaggaagggttctagaatcctaacgaggcaatgcaaggcatacaagaccttgttcaggatgagctgccgccaatgagttctaaaaagaaaacagttcacaagaggctcaaaaatttcactgcaactgaggatgaatgtcttgtatcaacgtacttaaatgttagcacagacccaattgtgggtgtgaaccaaccaataaaaggctactaacagaggatcgctaactactgcgaagaacacaagaaaactccagtttctccgaccatatcctccctacagcattggtgggcagacattcaaagggacacttcaaggttttgtggattctttgcccaagttgaaaggcgcaaacagagtggtgtgaacgaatctgacaaggttggtttatggtttggttactctatacaactggcagtgcattcaagttcatgcattgctggttgatgctaaaggacgaaatgaagtggacaactcaattggtcgggcgtcaactaattttgagtccaacaaggcaacaagtgagaagccatgccctgagaaccattaacaacataactcacttcgggtccattccctgtggagaggtcgtcgaacacgggagagatataaccccctaaatctaggaaaaataaaggatgctttaaatatgtgattatggc

SEQ ID NO: 165428 - DNA, 368 bp, Zea mays
  Clone ID: MRT4577_82456C.1
agcaaaatccataaatgattttgccggacatgtgcgggcggccaacaaaggaaaggtgttacagttcaattcgcattttaaaaggcaaattccccccacttacacaatttaaaagcggttcaaataagcctgcgaagggaaaactaccggcgattggggccacatgcaaccagagatcatttagccaagccattcgtttttttaatgcctgcctcgggttttcgccctgctcgccttctttgggggagacgggaacagcttcacataccttggcccgatagtcattttattcttgcacattgccggtttgggaactttagctgttgggaacctaacaaagggtttaccggttggtttcccatttgggg

SEQ ID NO: 165429 - DNA, 585 bp, Zea mays
  Clone ID: MRT4577_82457C.1
gcacgagcggcacgagcggcggcccgggaccgcaacggcgacgccctcgacttctgccactggcccgcgcgggcggaggccgggcgcgacgagctcgccgaggcggaggcgaaggtctgggccagcttccagggcgccggcttctggcgcagcccgtcgcagcgcgaggagaggaggtgctagctcctgatcgaccgccgccgccacatctctccgtgccggtttcttggacccgatcccgatccgtcgcatgccgcatacaatcctcatagggaaaagatgaacgaactccagcgattggttgatcgatcggctgcagattgctgcgacggcgacgaccggtttcattgattgctcgcgttttttcctttttccgaaatattttcttgcattgggtgggaggagggaaggaactgtatcttctttcattgttgttcttgatcgttcgtgcgtctttcagatactgttgttctgacgtgcaaaaaaaaaaaaaaaaaaaacaaccttgtctcctactattcatcatgcactagggctggctgtgacgatgttctagctaagtagtaggagcagctataaaaaaaa

SEQ ID NO: 165430 - DNA, 268 bp, Zea mays
  Clone ID: MRT4577_82458C.1
ttcaattttcaaaatccaggttcaattcggcttcggttgccggtggcgaattccaaacctccaccggccggccaccagaagggtgagtgaagaggataagactgctgcttctgctgagcagccgaagagggcccctaagctcaatgaaaggatcctctcttctctgtccaggaagtccgtagctgctcatccgtggcatgatcttgagatcggtcctgatgctcctgctgctttcaatgtttgtgttgagatcacaaagggaagcaaa

SEQ ID NO: 165431 - DNA, 332 bp, Zea mays
  Clone ID: MRT4577_82459C.1
tggatcgaccggcgcgtccaaactggcacttgtgctattaacaattgggcatttcaaattttctacactcctgtctttttcttgtatgagccgattcatactgatgaaacattttgaaagcatacgattaaaaaacctgaaagtgaagaaccccgaacgttcgcattaccggactcatgatacatatcttccagatgagaaactttttcttagaaaccgatagaagacatccgatacatagaatataatggaactctataaagaccacattcgctaccgggaacgtcatcgtattgaccaggtcaaacttcgtggtcaggactattattgat

SEQ ID NO: 165432 - DNA, 337 bp, Zea mays
  Clone ID: MRT4577_8245C.1
gaacactttttcttgtttaggagggagggggtcgaacgctaaccacggcgctgggatgaaaaggacaggggtggaggaggaagcggaaggcctacaagggactgcataaccgtgctagaaggtgacatacagaacaccaacacccttgcactagcacgggcccatgtccttctcgttaatacgtacgcctccgtgatcgagcgcatgcttgagggttacgggggtgataggacacaccgacgacgactcctcggactgccgccgagatggcgcaccgcggaaggcacggaggcagatagatgggaccaaccgaacgcccgtttgccctcctccatcg

SEQ ID NO: 165433 - DNA, 477 bp, Zea mays
  unsure (1)..(477): unsure at all n locations
  Clone ID: MRT4577_82460C.1
cttcaaagccctgcggcgatttcgattcttccgtgctatctccaggtatacccatgggagcagcactgacaaaaattctccaggaactccaagaattcatctggttagtgcctgagaacaatagtcaatgtttgattcgtctaggattggggttgactttgaggaaaaggaggaaggaactgatgattaaaagcctttcgctgaaacttatctgtttcttttctacctttacagaatcttgaaattctgagagcggtccggttttgaatatccacaaagattcaatgtttattatccggaaatttcaaataaaaagattaggaaatttagctctgcactaactaattaggagtcttagtttatgattgcacaggacctaggtccaattattgtgaaatctacattcaaaaaaatttgattagtagtttccatactcctacctgaatnttatctaacaacttttcatctcactctaca

SEQ ID NO: 165434 - DNA, 257 bp, Zea mays
  Clone ID: MRT4577_82461C.1
gcgtccgagtaatgtgatcgcaagacaaacgatgttatttcaaaaaaaaaaaaaaagggggaaaaagagaaaaaaaaaaaaaaaaaaaaaaaaaaaaaagaaaaaaacacgctggggggccgcttcttaaaaaagtcccaagggggcgggccgggttaaaggaaccaatattcttttttcgggcatccacaacttaatttctggtgggggggcatttaaaaccaatgtagtggccaaagttttacatcctccaaact

SEQ ID NO: 165435 - DNA, 402 bp, Zea mays
  Clone ID: MRT4577_82462C.1
caaacaccaacccgacaaataacccattggccatgcaatttagacaaattttaaacatcgcaagaaaaattccaacaaaactcaggcccggggaacctcgatgggccccaggaatgggcaaaaaattggccaaaaattggctcaaacctaaagcatgacaaagtttttaagcaaaaccccggtgggaaaacctccataggtccacggccacgttcacccccaccttaaaaaaatttgggaaaatctgggcagagaaggggttcagccgcaaagataaccccgtcctggacaccaatcctttttaaggggacgggatctccaccttgccgccgtaaaactcctgggggaggtccttggggtccttgccgccgaaggggcacccgacgctgacggaggtaccgg

SEQ ID NO: 165436 - DNA, 317 bp, Zea mays
  Clone ID: MRT4577_82463C.1
cggacgcgtgggttcttatgtcagcaaagatgttaagttttactagataagcagaaaagataaatctcaaatgcagtgctatttactcttttcaaaacagttttcattttcttaagcacactgtacatttctgtagaacctgcattttttcttgcacgctaaaaacggtacttgcgtctggtgaattactgctgacagtttccacagaaaccctgtttcagtggaccaacattgtggcatggcagctaatgccagcattttggggaatagcagctaatctacaagtgaccttggttggttaactatgtttgtttgat

SEQ ID NO: 165437 - DNA, 1437 bp, Zea mays
  Clone ID: MRT4577_82464C.1
aatccatatcagcttctactgcttacagtgttttgtctctacagattacagctgcaaatccgaacaactgactttatgtaatactccctccgtcacatcaaatatgaaccctgaggctttaaacgttccaacactcttacatggctccaaacaatatgggtaactgaaaaatactgtgacaaacaatgcacgttggtgacctgaatagttagcatagacctaaccgggcgacattaactaaattgtctgtggaaagaaaacagagcccaatcactgaaacaaataccggctgtagcggcctttcgctgcttcggttgacggttgccaaatatccaccaagattatacacacatggcaaatacaataaagcctgactcagctttcagcataacgcaattcatatacacatttcacctcttcagtggaaacctgatcacagtgccatttcagcttgcagtgcagcaagctcatcatcttcagctgtagctttctgtggagcagggcgagctggttgcttgttgcctgggacatgcactggatgcacaggaagagctgcaacaggctccagaagctgagattccaactctgctccttccagttcttcaagttccgcttccagttcatcctcgtcaaaatcagcagaagctccaagaggagttgacaaagcatcttgaatttgtttcatattttcagtctgttcattaatttcatccatggtcttgtcgacatcatcaatgtttgttgctttttgcattgctttcatagctgcagctccagttctcaacgcatcaacagtctccgttgtagctttagctgcttctaacatgatcatctgatcatgaattctcaactgaaaatttccgagctgctcaatttgttgttcataaagttttttcctcttcaaggattggatagccgctcttttattcttagctttggagaactccttggctctctcaagctcagcggctgcttttttgtccagcaccttctctttcttctccagcatatcaagagtctcatttaacttgtcgagtgtggccaaggcactagagttggcctgctccttgggcttcccgaagatcctgttgaacatggacatggctgcactggcaacagaaactcaaaacgcctgctagacaaaacagcagcggattcgtcgccggcggcggcggaggctagcgttaccggagagaggaggggaggattcttgttggaaggcgcggccttggaggcaaaaacctatcgaggagatcgggtgagagttgggatccacggggaagattccgtattttggttagtttttggataatcggggcctcggggaggagagcgagacgagttggagttgggccgaatggagacgaccgcgtacgcacgcaccgtggaaggtgaccaagcgaagcaaacagaaacacgtttgccgttcccggccgg

SEQ ID NO: 165438 - DNA, 807 bp, Zea mays
  unsure (1)..(807): unsure at all n locations
  Clone ID: MRT4577_82465C.1
cccagcgtccgcggccgcgtgggagttgcacccactgcaaacactgattgtaccttacaactacaggngttcaagggcaaagtcgaagctgagacgacgatgaagaacaatgttggaaaccctagaagcgtcaaaagatggcaaagtgagagatgccagaaatggagaaaacaatggcactgaagatggtgggaatgaaggaatgaggagtgggaatgttggtagcaatgcagaagctgaagagtctcacggtcatggaaataatgaacgcgcagaacataccgaagatgacaagggtcaggaatgtagccacaatgagaacagtgcaagtgtaggaatccttggcgatggagacagtgaagctagagaaggcgatataaatgcggaagcggaacaaagtcaagcagacggtggcggcaatagtaaagcggaagatgctgagcacaatgaaaacaccaaaactgacgccaattcaagcaagaatggtactactgctgctgggaatggaaagaccgatgttgacgtgaagggcgcaacagcgatggcgcagctgaaggaagccctgtgtgatgagatggatgtagattgcaagggaggtggagtaggaccccggttatgtagatcgtagaagttgatttaggatccccagttgagagattatcagtgacgctttaactcttgtatttgtatgatagcttatgcgtagcttagatttgatgtgtatagcactggactactggagatctggaatacgggaatccaaacattaccttgtggaaattgagctttattgggggttggtattgt

SEQ ID NO: 165439 - DNA, 1506 bp, Zea mays
  Clone ID: MRT4577_82466C.1
acagctacaactgactttaagtaatactccctccgtcacatcaaatatgaaccctgaggctttaaacgttccaacactcttgcatggctccaaacaatatgggtaactgaaaaatactgtgacaaacaatgcacgttggtgacctgaatagttagcatagacctaaccgggcgacattaactaaattgtctgtggaaagaaaacagagcccaatcactgaaacaaataccggctgtagcggcctttcgctgcttcggttgacagttgccaaatatccaccaagattatacacacatggcaaatacaataaagcttgactcagctttcagcataacgcaattcatatacacatttcacctcttcagtggaaacctgatcacaatgccatttcagcttgcagtgcagcaagctcatcatcttcagctgtagctttctgtggagcagggcgagctggttgcttgttgcctgggacatgcactggatgcacaggaagagctgcaacaggctccagaagctgagattccaactctgctccttccagttcttcaagttccgcttccagttcatcctcgtcaaaatcagcagaagctccaagaggagttgacaaagcatcttgaatttgtttcatattttcagtctgttcattaatttcatccatggtcttgtcgacatcatcaatgtttgttgctttttgcattgctttcatagctgcagctccagttctcaacgcatcaacagtctctgttgtagctttagctgcttctaacatgatcatctgatcatgaattctcaactgaaaatttccgagttgctcaatttgttgttcataaagttttttcctcttcaaggattggatagccgctcttttattcttagctttggagaactccttggctctctcaagctcagcggctgctttttttgtccagcaccttctctttcttctccagcatatcaagagtctcatttaacttgtcgagtgtggccaaggcactggagttggcctgctccttgggcttcccgaagatcctgttgaacatggacatggctgcactggcaacagaaactcaaaacgcctgctagacaaaacagcagctggaacaacgtcatttcacaaactaattcgagaaactcatcgggtagcaattgcaagcattacccaaaaataactgaagaggaaaaggatagtttttccacggtggagcccccacctatgcgcggtgggtgcccaatccgagcagtgaccgccgactaatcaactacgatgacctaaggcagaggaacggctgatcgcaatcgaccctttccctaatcgcggggcgcaccgatctggcagccgtgtatctagcagaagcgaggaggcttaccggattcgtcgccggcggcggcggatgctagcgttatcggagagaggaggggaggaatcttgttagaaagcgcggccttggagacaaaagcctatcgaggagatcgggtgagagttgggatacacgggaaagattccgt

SEQ ID NO: 165440 - DNA, 1546 bp, Zea mays
  Clone ID: MRT4577_82467C.1
catgttcgaccgtcattctcaggcgaaacacactgctcggtacaaaaacaatactggtaattcagttgcaacgatgaaacatgctgactgaggtcgaaatagctgcaaaccggcacatcaaatgtgtaccctgaggctttatacgttccaacactcttacatggctccagacaatatgggtaaatgaaaaatactgtgacaaacaatgcacgttggtgacctgaatagttagcttagagctaaccgggcgacattaaactgtttgtggaaaacagagcccaaaatcactgaaacaaacactgcctggagcagctttttttctgcttgccaaatatcccccaagattatacacatggcaaatataataaatcctgactcaactttcatcttggtagcataacgccattcatatacacattccacctcttcattggaaacctgatcacaatgccatttcagcttgcagtgcagcaagctcatcatcttcagctgtagctttctgtggagcagggcgcgctggttgcttgttggctggggcatgcactggatgcaccggaggagctgcaacaggctccagaagctgagattccaactctgctccctccagttcttcaagttcggcttccagttcatcctcatcgaaatcagcagaagctccgagaggagctgacaaagcatcctgaatttgtttcatattttcagtctgttcattaatttcatccatggtcttgtctacatcatcaatgtttgttgctttttgcattgctttcatagctgcagctccagttctcaatgcatcaacagtctctgttgtagctttagctgcttctaacatgatcatctgatcatggattctcaactgaaaacttccaagctgctcaatttgttgctcataaagttttttcctcttcaaggattggatagccgctcttttattcttagcttttgagaactccttggctctctcaagctcagcggctgcttttttctccagcaccttttctttcttctccagcatatcaagagtctcatttaacttgtccagagtggccaaggcattggagttggcctgctccttgggcttcccgaagatcctattgaacatggacatggctacgctggcaacagaaactcaaaacgcctgcgaggcaaaacaacggcattcacaagctaattcgagaaactcatcaagtagcaattgcaagcacaacccaagaataactggagtggaaaaggagagcttgtccacgggtggagccccctgctatgcgcagcgggtgcccgatccgagcagagactgccgactaaccgaccgcgatgacctaaggcagaggaacggcggatcgcgaccgaccctctccctagtcgcgggccgcaccgatctggaggcggtggatctagcagaagcgaggacgcttaccggattcgtcgccggcggcggaggaggctagggttattggagagaggaggggaggaatctcgttgtaaggcgcggctttgggaggcaacagccgagcgaggagatcgactggaagttgggatcaat

SEQ ID NO: 165441 - DNA, 1643 bp, Zea mays
  Clone ID: MRT4577_82468C.1
ttttttttttttttttgggacaggctcacaactttattttcttgagagatacatcactgcatttagagcaactataataacagactgtaaacaaactaaatgctaagatggaagagaataaaaaaaaagttgtagacttacatgtacaataaatattaaaaaaaaatttataaaagagacaagtagaccatatattaacagtgaatagctaactgctatacgagtaagttgagagagactgcaaagatccttagccagtagcctactgtattattagtcttgctctagtactgataaaaggaaacatatcttgcctgaggttgaaagcgctgcgaacagccacatcaaacgtgaaccctgcaacacttttacatgcacggctccagacaatatgggccaattaagcaaaacactgaaacaatgcacgttgggtgatctgaataattagcgtagagctaaccgagcgacattaacagaagaactgtcatcgatcgacaacagattccaaagtcactgaaacaagcactgggctggagcagcctcttttttctgctgcggttgccaaatatccggccaagtttgtacacgcatggcaaatatatagtatagctgactcagctttcatcttcatttacatgtttcacctctccatgagaacctgcaagttcctgatcacaatgccatttccgcttgcagtgcagcaagttcatcatcttcagctgtaactttctgtggggcagggcgagctggttgcttgttggctgggacatgcactggatgcaccggaggagctgcaacaggctcaagaagctgagattccaactctgctccctccagttcttcaagttcagcttccagttcatcctcgtcgaaatcagcaaaagctccaagaggagctgacaaagcatcctgaatttgtttcatgttttcagtctgttcgttaatttcatccatggtcttgtcgacatcatcaatgtttgttgctttttgcattgctttcatagctgcagctccagttctcaatgcatcaacagtctctgttgtagcttagctgcttctaacatgatcatctgatcatggattctcaactgaaaatttccaagctgctcaatttgttgctcataaagttttttcctcttcaaggattggatagccgctcttttattctttgctttcgagaactccttggctctctcaagctcagcgtttgcttttttctccagcaccttttctttcttctccagcatatcaagtgtctcatttaacttgtccagagtggccaaagcattggagttggcctgctccttgggcttcccgaagatcctattgaacatggacatggccacaacactcgcaacagagactcaaaaacacctgggaggcaaaacaacagctggtggtgctcgtcgccggcgacggtggagaggcagggcggcaagggcggagacggcggcaagaagcaccacctcgccaagagctagtgagaaacgagagagggagctggttcgtgccctgctcgcgctcgcctgatctgaccattgctggcgtgttgctgttcctgacgacgccttctctttttcttcttttctcctactgttacccgtgggtttcgtctcttgcctcgctgatgcactgttttaacc

SEQ ID NO: 165442 - DNA, 603 bp, Zea mays
  Clone ID: MRT4577_82469C.1
ggccctaggggccttttttttttttttttttcttttttttttttttttttttggtaataacttttttgtttttatttttttttttttgttcttattgtttcaggtcggctgatatacggaggtacattcggaaatacaaaaatcgtactccccaccgactgaatgaacctcccttcaacgacagcaaaccaaaaaagacgcaaaacaaacaaggatggaggaccacccacgtaatttcgtgggcacccaccgttgcatgaaaaatagcttggaaggaaggggggcgcacaaaagaggccgccctcccccctcaaagaagggctgcaaaaaaggagggtgcgaaaaaaaatcgccttaccgccaaacgacggccctggaagaaaaggagaggtgcttgaagaactcaagaaattccagagagcccccccttgcttttcggacacccaccgtggagaaagagggaaccaccggaaggatcccactacctacggggaggccccccttcctgcctgggcgtacctttgccagccccaacaagaaatccttcggccgaacaaccccccccggaggtcctgcagcttcctctagcgggaaaattatttg

SEQ ID NO: 165443 - DNA, 1884 bp, Zea mays
  Clone ID: MRT4577_8246C.1
gaaaaaatccaaaaaaaaatacccaaaaaaaaaaaaaaaaaaaaaaaaaaagaaaaaaaaaaacgtcacacgccaacaacgcaaacgacccttgccacgcggaaacattcgtccttccctaccggcccggaggcagctgcccagctcccctacgaatctcgattccccaaacaacattgccaccgccgcctgggcgcctcgcttcccctcacctcgccctctccaccaagccgcgagccgcctcccccatagggttcctctccccggagccgggggcagcaagggggatggaggggtgggcgtccgcggcggcgtacacggccgccgcgctggcctccgcggcggcggcgacggtggtggctctgcggctcgtgcaccggcatctccttcactacgccgagcccacgcaccagcgtttcatcgtccgcatcatcctcatggtcccggtatatgcagtgatgtcatttctttcccttgtcttaccgcatcaagcaatctacttcaattctattcgagaaatctatgatgcttgggtcatctacaatttcttttcactttgcttggcatgggttggaggtcctggtaatgtggtggtaagtttgaatggacaatctctgaaaccctcatggttactgatgacttgctgtttaccagctattcccctagatggacgttttatacggagatgtaaacaaggctgtctgcagtttgtgatcctaaaaccaatcttggtcgttatcactttcatactttacgcaaaaggaaaatatgaagatggaaacttcagtgtcaaccagtcctatctatacataactatcatctatacaatctcatactctacggcattgtttgctcttgcactgttctatgcggcatgcagagatctacttcagccatataaccctgtcccgaagtttatcataatcaaatcagttgtgtttctaacgtattggcagggtgtgctggttttccttgctgcaaaatctgggttcataaaaaatgccgagaaagctgcatatctccagaacttcgtgctatgtgttgagatgctcatagcagccattgggcaccgattttccttctcctacaaggaatatgctggctccaatgcccgccctttcggtggctttaggggaagccttcttcacgcgatgaaattcaatgacttctatcatgacaccgtacaccagtttgcacctacatatcatgagtatgtgctgtacagtaacgagggggaggatgaaccaacaaaatacagccccagcactatggtgccaaccggagagcacatagtggagctggcggaagtcaccgttgtgaactcgaaggctccagggatgtcaaggtttttgatgtatgagcctgatcaggcagaaacaatgccctcccaagtcatggaagccaacagaactgcttccgcggaaccatacgacctcacaagcttcctcaacgtagagctatctgatcatcctgatgaggtccctgcgattcctgatgcaagagaacaatgacatgttgaggtgtatattcatggtgtaaatgggcgatagcgctgttgagctgatcatagattaaggtgtagtgttgtacatagaaacgtcacatgtcggtgacgtttcattgttcgctcatcttgggggcaagtttatgtttttttcttctttgggtgggttaaagatgagccaagctgacagatcaattcaaggtgtaagtggaaatatgcggtgtaagcaacttgtcgtagatttgcgctgaattccttttgccgatgaggtgggtcacgggtgtcggttgaacgtggtttgtgtactgattgttgtaaaggttcacttatataacctgcgaggttgcactgagatcaagtggttaactgtatgacgactt

SEQ ID NO: 165444 - DNA, 283 bp, Zea mays
  unsure (1)..(283): unsure at all n locations
  Clone ID: MRT4577_82470C.1
aaaaattgtttatgggtaaattttaaagggtttttggttttnnnntttngaaccaaattaaactaaggggttatacctgttcgttcaaagggtttttttttaaccttttttttttttgggaacaaaaattagttatccttccaggcaaattgtgggtcagtttatttacacccatgaagccttgttttatcgccttttttccaatgctgtagccgcctaaaccccagttggtgcataatgccacaccctaatgacgaccttggccaacttttaattccctttt

SEQ ID NO: 165445 - DNA, 291 bp, Zea mays
  Clone ID: MRT4577_82471C.1
atggcgcctgaccccaccacatgggcaggacaaagggcgccacgtggcaaggagagacaatatatcccagcggagtcaaggtcatccagcaggcggcgcgcctgctgggtctgctggcaaacagtgcgcccgtacagagcggcgcgctatactcgtcctctcttctacaagaagcttcccctgcacgccgaggatacggagatcttgggcgccagggcacaagaagattttctcggcaacagacatgttggaacttgctctccggagcaagatgatccaacgggggagtga

SEQ ID NO: 165446 - DNA, 480 bp, Zea mays
  Clone ID: MRT4577_82472C.1
gaaaatgcataaatcacgggggtcatagaagacttgtttttgtgcacaatatgccaaaatataaagtacaaatattttgtcaggattgttgcaatcatacacgatcacaggcaagagctagcgatggtcgtacatctacaaatctgtctcgagattcggttgtgaaaattggatcctttagcacttgaataaatgaaacagcgccatcatgtctgtattctatctatcttacatcatcaacacgttccacatcgcacacttggaagtcagatttataagccagtaacaaggcttgccgtagcaagccacctccacattcgagtttatcaaaagccaacccattgcaccttaattcattcatggaatagaagacaacataaccgtcaaatcccaaatctcaaatgcttttctgtttttggttttgtgacacactgacccatttcaattcttccaaagaaccttttgacccattttacacaa

SEQ ID NO: 165447 - DNA, 590 bp, Zea mays
  Clone ID: MRT4577_82473C.1
cattgggtacctcgaggccggccgggcacatgacgtagctagccagataaagagatatacgaaggagcaccgatgaaccactgacccgcgaggaagggagagagacggcttacgaccgtgaccggcactatcgctcgcaagagaggagaggccggagtcccggacgacatgcacatgacgcgggagcagagcctcctggacgcgacgcgcgacaacctctacgagcacatacaacgacctcctcgacttcgccaaccacgactacgacgatggcgagctcctcctgaaggctccggcgccgcgcgagaccactgtcgaagaggatattcaaacctggacccgccagttatgcgatcgcaccgacagctgcctccgcagagctaaatgatccccccagcggcttctaccctcccccggtcaaccatgactgcgacaccaatgactgcctgtgcgcgcacgtctgcgcatgcgactacgtcttcgttatcatgcctgaactgaatcggctgctgtgcctcttacgacgactactctcatgacctcaataacactgctctcggaacactactacctacggcgcggcgcccatc

SEQ ID NO: 165448 - DNA, 332 bp, Zea mays
  Clone ID: MRT4577_82474C.1
aaacaaattcttatttgattaataccgtattatttaaggttttgccagtttgtcgggataacaagaaccgaccgactatcactagggccaaaagaataaccaccacaaaaaaatcaacccaccacatttttaggtcaagcggacacacccgacggaccgacgacggctcccggaagcaactgggccttccagtaactggggcacactcaagactggcaacaaaccggttagaccacctccttgatcttgaggccagggccgtcgctgtcagcgggggcgttctcgtccatgccgtcagcgccgaccatgggttcacccaagccctgggacat

SEQ ID NO: 165449 - DNA, 255 bp, Zea mays
  Clone ID: MRT4577_82475C.1
ctttctaccagctgaagagaatgttgctcctgcaaacttcattaaatggcctacgacacaagatcatccaatcgagaataatatgcaatgggacaataactagatcgtcctgggatgtttcgctgcagctagagacaacaaacttcggtcgagcatgttctatcaagtgctgcgcagtggggggacgaccgtggatgaaggagctggtttgtttcatctagagaagcagggcgccgccatatgggtgcaattctt

SEQ ID NO: 165450 - DNA, 346 bp, Zea mays
  Clone ID: MRT4577_82476C.1
ggccgcttttttctttttttttttaagagggaagctgttgaggactgacactaggatttgaaagacaattgtgaagacacaacctttagaatacgaataaaacattattcaaaaaggaaataagtatcgattcctagatgatcgatcatcaatacgtcgtcaattccgcagagaatggatagtgggtgaagcatcattattatttacagctgattgcgacctgaccttgccagtcctgaggaagaaaggggacttgactgtcttcatcatcttggaatcgccgccccactccaatgcgagcttcaggattgtgggcccctccagcagatcacctcaattatccttg

SEQ ID NO: 165451 - DNA, 1198 bp, Zea mays
  Clone ID: MRT4577_82477C.1
gcacgaggtttcattggattcaagatctgattttgctattgttgataataaagttcgtaaacttattgaggatctaaaaaatgagcgtactgatcccgagagggcagcaataggagagctgctggtcctttcaaggcataacatggagagtagaatttccattgcaaaccacggtgctatacccttcttggtgaatcttctttactctgcagaccccagcatgcaggaaaatgctgtaacagtgatcctcacgcgtccgcccacgcgtaacaacaagattgggatcgcaagcgcggacgccatcaagcctctcatccacgtccttgagacgggtaacccagaggcaagagcaaactcagctgcaactctcttcagcctttcagtaaacgaagagaacaaggccaaaatcggacgatctggagcaatcaaacccctggtcgacctgctgcgagatggcagtgcacaggggaagaaggatgcagcaacggctctcttcaacctatcgatatttcacgagaacaaggcccgggttgttgaggccggggctgtaaagcccctggtggagctgatggacccagcagctgggatggttgacaaggccgtcgccgttttggcaatccttgccacggtgcaggagggaaggaacggtattgctcaggcaggtggcatcccggtgctggtcgaggtcgttgagctgggctcggcacgggcgaaggagaacgctgctgctgctctgctgcagctctgcacgaacaacagcaggttctgcagcctggtgctccaggaaggcgccatgcctcctttggtggctctgtcgcaatcgggcacggcgcgtgcacgagagaaggcacaggtccttctgagctattttcgcaaccagcgtcaagtcggcaaggtcaccaggcgctaaattcagacattgttgtggccgggcccgggtgtaaatgtagaatgcacaagcaattcagtagcagtagcatcatggtatgacgatgagagattgcatgctactttaattataggcaattcagtacaacaataggggcagttttgcaaagggtgttggtgtctttttacatctaatttagcatcgtcggtggttgttaacgtaatatgggtagacgccagctttggtttcaaaaaagaggtccgattttgcaaagtctggaaaagaggtctatttttacaattggcttgc

SEQ ID NO: 165452 - DNA, 919 bp, Zea mays
  Clone ID: MRT4577_82478C.1
tgacgcgcttcgccgccgacctcggcatctcgttcgagttcaacgccgtcgcgttcgaccccttggacccgttgccccccacggggctgtccgtcgcgcccggcgatgccgtcgccgttcacctctccgtcggctccggggtcccgtcggcagctactttccgcgtcgtgaaggagctccgccctgccgtcgtggtgtgcgtcgaccacggatgccaccgcggcgacctgccgctgtcgcaccacgcgctgagcgtcgtgcgctccagcgcggcgttcctcgagtcgctggacgcggccggggcgccggcggacgcggtggcgaggctggaggagtacgtcgtgcgtcccagggtggagcgcctgttgctaggcgacaggatgcctccatggcggaccatgcttgactccgccggattcgcgccggtgcagctcagcaacgccgccgaggcacaggccgaatgcctcgtcaggcgcacgcccacgccgggcttccatgtggagaagcggcaggcggcgctcgcgttgcggtggcaggactcggagctggtgatggtgtcggcgtggcggtgctgaatcggggcactgggacagttcctgtaaagattgaacctttttctgttctcatgtgcagtaaaattagctagtaacttgttgtcaagctgtttattttacaattttagttgcgatgatgtagcaattgggagcatgtgaattttcatcatctgtgatatgacagttttgaggaacgattggaagccacagatctgcagctaatagccccatttgccatgcccatattcctgcagttagttgctaggtccattaattgttagcattagttgggcatgcatgtggtccataatctacatttcagatcaaaaaagagcaagtacaaaaaaaaaaaaaaaaaaaaaaaa

SEQ ID NO: 165453 - DNA, 1074 bp, Zea mays
  Clone ID: MRT4577_82479C.1
gccctggagaccataatgcaattgcttttatttacctcatgcaaacataaggatatactactacgaaaggcatgtgttcagattttcgtgaatcttgtaaaagactggtgctctaactctgaagataaggttcctggcttccgagtatttatgattgagaagtttgctactaattgctgtttatacagtgtgcttgataaatcatttgatttacgcgatgcaaactcgcttgtcctttttggtgaaattgtgctggcccagaagattatgtatgaaagatttggggaggaattcattatgaactttgtagctaaaggtcttcctgaagttcactgcccaccggacctagctgaacagtactaccagaagttaaagggaaatgatatcaaggcattcaggtcattttatcaatcacttgttgagaagataagaccacaaggaaatgggagtcttgttttcagatagcatcattctttgattttcaatatgtcttccaccaaaagactcctcaactgtgttattcaattataggctagttgtgccatcaatgtacatagagctataatttctgagattggaagacgtattactgcggcattatctttaccaagtctggcaaccatggtggcgtccttattcattatattctatctgagatgcaggggaattcatcccacaacagtttctacttaagaaggaaatacatggttctactttctcatcttggcctttctccccaaatcggactgttctgctgtctgggcctgaaattttgcatggtatttcctgtgaactagttgtgtataggggcaaaaagagtgtcgtgtaggctgtgttttttcgtgacgaaaaatgtcgcaccgcctgttgtgttatgagtcgggttgtaccaaattttgcgaaacggcagcggtttttttgcaccccctgttgccatctggggtgatgtacatattttttttttggcattccccattttatttcataaattcttttatcggataaaaccatccacttcgccagctgggaaaaagcacaattttttctggcattcccgaaaaaaaaaaaaaaaaa

SEQ ID NO: 165454 - DNA, 243 bp, Zea mays
  Clone ID: MRT4577_8247C.1
gcacgaggaaagacgtgcttgtgctgtgcactgagacccatcatgtacacccccccggctccactccaatttgcctgagagcagagagactatgatgccgagtatttaacaggctgctggggccaacggtttccatatcatttctctgcgtctcatgagctctcccacatgtttgcgaggagaggtcagaagagaactgccgcggtcatgcatcaactgctggcccactgtgctcgcttgatt

SEQ ID NO: 165455 - DNA, 629 bp, Zea mays
  Clone ID: MRT4577_82480C.1
gcgggcagattaaaaacttcagatggttactcctttgcaaggttaccttacggtgttcatacattttgataaatggggggtgttttctgtcctattggtaccctgctgaggagactgaagcttaggactgcgccaaaattttttggaatggttggccgggaagttgatattacccagagactctgaccttttatggactactagggctcgggaagaaaagaaggtggattggtaatggccagcctgaaaaggtaggtaagcccttataaggattatatcgagtcgaatagtcagatcatgacaagctacttatgcggttgtctgttatatggggctatttcaaaaaaattgggggcggtacttgggggttcggactttggaacaagcttagtccaatacatgggcgtacgtttttattggataaaatgtcgttcccttacctttgcgcaatcatgtacaaccctgattcctaagtgaaaaagctgtgggggtccaatggcggaaattattcaactttaatgcattaagggtaatggccggtttgcctaatgagaaacctgactgacattaagtgttatgaattcactgaccgctttggagaagggaaatctgtaatggcagctgtttaa

SEQ ID NO: 165456 - DNA, 253 bp, Zea mays
  unsure (1)..(253): unsure at all n locations
  Clone ID: MRT4577_82481C.1
tctccctagccgncgctgccagcgatcgtctccctgagaggtggcgggaccgaggaacttgccgagtactaggtagagaaattcgtgagatctgttccggatcaggcgtgcgagctcgggaatcaggggtgtcacacatagcttcgtcgatgtgaatttgatgtactaatggagtctaatggtggcaacaagtctagcagtagtcgttctatgatgtatgaagctccccttggctacagcattgatgacgttc

SEQ ID NO: 165457 - DNA, 223 bp, Zea mays
  unsure (1)..(223): unsure at all n locations
  Clone ID: MRT4577_82482C.1
nataatttttttcaactataaaaaaggggtttggggatttttttagagtttttatcattcctaccaaaccgggtctagtaataatatactttaaagacaagaacagtatttacaagacaccccagaaacattctctttgtaccaaaataaatcaattcctcagagtgatcttaaaccaaactatgaacaagttagaccaagttcatctaaagagcatggcact

SEQ ID NO: 165458 - DNA, 138 bp, Zea mays
  unsure (1)..(138): unsure at all n locations
  Clone ID: MRT4577_82483C.1
tgccntccaaatcgaaccaggctctgaacatccgtaaagaacccccctctcattccaaacattcatacaaatctgctatattcccccaatataatcccaaatcgaacccatatcagagcaagttgggggccacataca

SEQ ID NO: 165459 - DNA, 507 bp, Zea mays
  Clone ID: MRT4577_82484C.1
agttctagctcctgcctatctatctagagagagagagagaggaaagttagctaggtaccatgaatggcgatataagaatgaacaagcgtagtgttgacgctgctggttctccagctgatgttagctcctacgacagcaacttgccgcctcctagcagctgatacctccaccgtgattgcactgtacatcatcgaaaagtgactggaacagccattgagaagcatcctctgtgctgaaacctgcggcttcctaccatgctatacgagagccatgtattgccaatgcattggtctaatctgcatgatgagatatctggactaccgctatttgtaatttgaggtgccgagagacacaaggacggaacgatagccgtctcaacttattgaatgtgcatggaagatctaatacagtaaagaatactaaacaggaatatgtcggatgtgctaggctaagtggctgacaaagttgcaggagggctctaggtcccacaaacgtccagctcatcga

SEQ ID NO: 165460 - DNA, 332 bp, Zea mays
  unsure (1)..(332): unsure at all n locations
  Clone ID: MRT4577_82485C.1
tgggacctcgagccggccgggagcggttttcggactcagtancgttcgccctggcgttgccctacaagggcctctccctggagcccacaccaccacctcttccttcccgcgctgcgaccgcgcctcgctctccgacggcggcgcactggacgtgccggcggagtcagtggaggagcgagagaacagcatcgatctgaacaagggacgcgagcccgcccagagacaaaaagcgagccgggcggatgagaagaatcaccgacgacagagacccagacatggagaagagcaagctgaggagccacatccacgtcaagatcatctcattggccacc

SEQ ID NO: 165461 - DNA, 260 bp, Zea mays
  Clone ID: MRT4577_82486C.1
cgtcatcatgcactaagaagtgctgcttaaccttgatcctggaccagatgcctggtcaatgatgaatcaaacttcaaggctgcacgaatatagaacgacgctctccggtatgaaccggagaagaagtcctggacagaactcatggaaacagcttcagtctaagagactatttctgcactcctggatgtttagacccctatagtgaaggctccacaaatgcctgtcattaagattgacaagcctgccatggctgaaatctc

SEQ ID NO: 165462 - DNA, 533 bp, Zea mays
  Clone ID: MRT4577_82487C.1
ggaagagaaacgcgatagcccctcgcctcgccgccgccgccgcgcaccgcacctgcccttccgccggcgaatccgcgcgtgccctagccggagtctaggtattggcccagatctgccggcagcgatgtcgggaaccgcggccccacggtacgcgccggacgaccctacggtgccgaagccgtggcgcgggctggtggacggcaccaccggctacctctactactggaatccggataccaacgtcacccagtacgagaagcccgtgccgccggaagctcagctcccgccgcccccgcctctcccgcctcctcctccgcgcgcccgcggccgggaccgtcgagaccgttcccgatctcgctcccgctcccgttcgcgcacaccgcctcggcgtgaacaccgggaccgcgaccgcgacaggcgccgtcacgacgagcacgactcgttcaagtcgtcgtcgtcccatcaccatcttcctccggctgccaccattcctaccgccgcagctgatgatccatcagccgaagcataccgcc

SEQ ID NO: 165463 - DNA, 2209 bp, Zea mays
  Clone ID: MRT4577_82488C.1
cccacgcgtccgcccacgcgttcgaggccctcgaggtcgagcgggccggggattctaatcaaccgaagcaatccgacctgagaccaagacccgcaccacgcggctcgccgccgatggcgaacgccgacgccgacgaagcgccgctgctctctgtggaacacctccgtccaggatcctgcagccgcgagctcgagctgcgggagttccgcgaccgctacgtgatccgttcgctcgacggcgccgccgctttcgccgtccttcgctccggcggctccatccgccctctctccccagaggaagccgtagctgagagcgactgcaaggtttccagaatatacggggtggtaggcaccataagattgctcgctggaagctatgtactcgttatcacttctcagaaagatgctggctcttatctgggctcccctgtgtaccaagtgaactcaatgaaattcttatgctgcaacgaggctatcaagcacttgactccacaggaaagaagggatgaggcatacttcatgtctctcctgagaattgcagaaactacttgtggattgtattattcatacgacagggatttgacactaaacttgcagagggcatccaagttggctgcagggagggtacataaaccactatggaagcaggctgatccacgttttgtttggaacaaaaatttgttagaggaacttattgaagctaagcttgatgagttcatcatcccactgatacaaggaagttttcagtcagcacaatttaccttgaaggatagaccagtgaggataacattgttctcaaggagatgcaacaggcgtttaggaacaagaatgtggagaaggggtgcgaatcttgaaggcgccacagcaaattttgtagaaacagaacagttggttgagtatgaagatctcacatcctcatttatacagcttcgaggttcaattccacttctctgggagcaaatagtggatttaagctacaaaccacggcttagcattattgaacatgaagaaactcataaggttgttcaacgccactttcatgatctttcacaacgatatggcaagataattgttgctgacttgactgataaacgaggtgatgaaggagatttgagcaatgcatttgctgctgaaatggacagaattcctggtgtcaggtatatacattttgatttccatcatgtttgtcgtggaggtaactttgacaatttgcaagctctctacaatcaaattgaggaagctattcataagcaaggctgagcagatattttcttatgaacactaaaggagagattttgctggagcaaagtggtgtagttaggtccaattgcattgattgcctggaccgtacaaatgtgacacagagtttccttgcaagaaaatcattggattctcaattgcagctgatgggagcattattgtcatctgaaagcatttctctctctgataacattcatgatacattcaaaaaattatgggttgagcacggtgatgagctgagcctggagtatgctggctcttatgctttgaaaggggatctagtgagatatggaaggcagacattgcctggactaattaaagatggaatgagtgctctttcaagatattatttgaataattttcatgacggagtgcggcaagatgctcttgaccttattagcggttattatacagtcagccaaggcagctcttctccttttcataatggtgttgattcttcttcgtatctgccggtggcttcagcaatcatagttggtgggattaccgcgacaactttcactctcagtcaagttggacggaacgcgcagcacttgatctcctccattatctgtgcgggcttaacagtcggagtagtagccttggtgaaagccaatgggaaacagttttgctctaggccccgtctgtgtggtctaatctaatccttggtcttttccccccttccctttcatattgccctttgttagaaattgaatgtaaaaggattagaatgttgttttattcgttgcaagagtaaggttaaataaggaggcaggatggcctgccggtcccgtaatctgaagctgctaatttgtaagcctatagtttggatttgcacattctatttgttatactttttatgtatccatgaatagaaaattacgcctcgaaattccaaatttgtaataaatccgagagaccacatatttttttagtgtgactggttggtagcg

SEQ ID NO: 165464 - DNA, 739 bp, Zea mays
  Clone ID: MRT4577_82489C.1
ccggccggggatagtattcaaggaattgtcacggacgacgcaccacaaaatggccgagaccgcgaccaagcaggcgaccccgtcctttgtcgggaccagcaaggtcgtccagaccgattatcccctcattgacaacgaccctcacttcaagcgagtcgttggatatgcccgaacctccgattacctcgccggcactgccgctgccgctttcgctcctgcagccctctatgctcttgagaaattcgccccatcacacgtaggaaagggtggtttcgccaaggccatgcgattggccggaggcattggtgtcttgggcggttttctctacttctatcaaagatcggccctccgattctacggtgctactgagaattcccgcgagattgagatggacatgcgcgagatggtcgataaagttaagaagggagagcctctttatggtgctagccgactaagccctcatcttcagggtgtcgctgccaggcagagcaggtactctgctctattcctgagcacgatcccctggttcaactttgtgaaccacaaccagcatggtgttgacacggccaagtactatcaacaggctgagcgggaactggaggcggagcgctagcgaacaagtgtagcggtaaagttaaagcatgcgccgatgaaaggtcaagagaaaaggggtgtacattaccagcggaggagggcactgcctcagtggcctggcgagttttcttggagatgcgtggaa

SEQ ID NO: 165465 - DNA, 499 bp, Zea mays
  Clone ID: MRT4577_8248C.1
agtcgtccgcggacgcgtgggcggacgcgtgggcggacgcgtgggttttggcagatgtcatttccatccccaagacaatggagaactacaggctgctttatgacaccaagggccgcttccgtcttcacccaatcagggatgaggatgccaaggttaggccaattctcttacacatcatctctcattgttctagttgagcatgatgatcttggtagctgtgtgaggttgttgttttcattagtagatctgtgtaccttgtccttgctatactgtctatatatgttgtgtgcatggaagtcttgcattgaaaatgtcatgtgctacaatctgtaggattgttaatagatgttgctttggctatctgtccatttacatcgctggaaattcccatgcctagtacgtatgtgaaatgctcattgctattctattggtttgtgtgcagttcaagctctgcaaggtgaggtctgttcagtttggccagaagggcatcccctacctg

SEQ ID NO: 165466 - DNA, 501 bp, Zea mays
  Clone ID: MRT4577_82490C.1
gccgcggactaactgccgggatctacccacgcctccggtgatgtcggcactattctcctcaccgtcgcggtcgacatgcttgatggcgaggcctacgtcaacatccgcaagggcaaggtcatcccggggtacgagactctcgctcacccctctacctgggatggccttgaggcccgacttctcacatgagacggacgcctcctgcatgccctttgctccacccaaagcatctgtctcattatataattctactcctgctcatacaatctcatcatctcctgtctctcgttttacacctccttctttctctttctttaattccatctcctctctaacattcttacttcttaacttacttttttatcccttctgctctcatttctctatccatccatccatgctactctttttagcttttgctgtccagactgcttgcgactgcagtacgctgcaacaagggactgaccaccaccaccaccaatgggcatgctgctgctgatg

SEQ ID NO: 165467 - DNA, 686 bp, Zea mays
  Clone ID: MRT4577_82491C.1
tctgtgcgtgctaatgccacgacattgatgcctgacagcgaaaccgagcgtgtctgggagactctccgctatctcgaagtgctgaccgtggctacgcttccgtactccccgctgagcctctccagacgtctcctcgtagtcgcgtacgctccggagtcgtacgagctcgcaggacgcgactatcccgcgacttcccggagcccgccgatccgattaccataagaaggtgaaaatgggtctcacagcggagcggaggacgcgtgagatgtagccggagcagatagccgtagtgatacggcggcataatgacccgttctgacccatccacttgcaatgggacgatactcgccgatactgacgctcctaccgtgcacaaagaattacggccgctctaccctccatggaacctgagaaaggtctaccacatctcacgaacgtactacgccgggatattacatactcctgatacggcgagtcactgattgtagataacaataccgaactctctcctgcataggacgtggaatgattacgatctaaattcctcaactaggatcccacgtagctaattaactgcgttattagtccgagtcaggagataagctgtctccggcataacttatctaccgatgcgagcctgcttatggagatgatgcggatccaataacactcgacccagcatgctg

SEQ ID NO: 165468 - DNA, 585 bp, Zea mays
  Clone ID: MRT4577_82492C.1
cggacgcgtgggcggctctcctctgtcttctgcatcgcgcccgaggaggacgacgacgaggcagccttggacgccagccttgatcagttggcgcgtcaggacaacggcagccggagctccagtgcgcgacaccggcaatggcggccgtcgctgcaaagcatcgacgaggccacgagctgatatgtcagctcaatacactcatcataccacacacaaccgtagagccgtaatcattgaccggtggacctgtattttcggtgatcacctggctggcctcgattagttcatcgcaaagggttgcgttgctattggcctactgctacatttgcaaactgtgagttggagttggacaccctaggatgagaggactgcttcagatcatgcagtatgtggcctcggatccgtgtaaattttcaggtgtttgttagtgagactgctttgctcttttttttctctctccatatggtttgcacatcgaatcatactagtaacaaactagagtagcttacgattagatttacaaccagacatgccatgtacttgctactctcttgcagatgggaatcgagcgtatagcttttgagg

SEQ ID NO: 165469 - DNA, 390 bp, Zea mays
  Clone ID: MRT4577_82493C.1
ttttcaaacctcttttttataaccttcttaacacgaaccatttttgggggggctttttaaatgcttttgcggtttttttcccgggcccccaaaaaaaaaccatgttccccgaaaatatagtacatgggggctctttttttggcaaaaaatttaaaaacccatattgctcttaatttagggcgggggggggcccctgcccccctggaaaatccccccaacggctaacaactgaaggggcaagccccaaaccttgaaacccaaaacaaacaagggagaggccaaaagccaagtggccctcacctaaatctgggttcaggccaaggcttccaacggtaatccccaattaggagggggttgaaaaccggataccgggggcattggtggggtaaa

SEQ ID NO: 165470 - DNA, 454 bp, Zea mays
  Clone ID: MRT4577_82494C.1
taaaaaaaaaaaaaaaaaaaaaaaaaaaaaaaaaaaaaaaaaaaaaaaaaaaaaaaaaaaaaaaaaaaaaaaaaaaaaaaaaaaaaaaaaaaaaaaaaaaaaaggggggggacacaaaatgggggggcgggcctcggttctttttccgcgggcccccccttctatgggccccccatcttcacttccccgtcctttctatggtcttaacctttatttttgttgccccctcaattccatttccctcgccctggcctttaacaacccctggcctggccaaacccttgcctttccccacctttccccctttccaccacttccccttttccccaattgcccctattcccataagcgccccccaccgttcccccttcccaactgttccccggctctctccccgaatgggcccccccctcttgcggctctttaagctcccccgctttggggcttcccccct

SEQ ID NO: 165471 - DNA, 418 bp, Zea mays
  Clone ID: MRT4577_82495C.1
ccggttagtagtcggaacttattgctcaccaattaacttaccattgctttaggatgttttatttttgtatataggcttagccggttagggcctgtttggatcagtttataagaaactgtttttttgaaaatcgaggtggttccaaatatatcacaaacagcatcttagttaaacaggaccttaaccttagttaaacaggaccttagttttgatatgaggcctgcactcagcccggcagcgatcaaaatcgaacgtgtgggatctctgatatttgactaggtctggtcggtagcaaaccaaacatgtaagaatttctacatatactcaacgtcttacaatttgcagtttagagaacagagtttttgtttttgtttttgcttagttcacgtctctttcatcgaagtggcttctcattttt

SEQ ID NO: 165472 - DNA, 393 bp, Zea mays
  Clone ID: MRT4577_82496C.1
ggctgccgctgtcccacatgtatttgtatattttcttcatggtcgagatttgcaggtacctcgtggagtagaggaactgttcagctcgagcgagtatacgattgtaaactcgtgttaagttactgaagcgattcgataattggactttaggatcatcatgcatgtatctttagtgcatgagagcataggattccagcaaattcaaatttcttgcagctgcacctcacttttaactccaaaggtgtgctctgtgttgctttgaagtcacttgtaacttcttcatatcgtttgtccctaagcagactgtcaaagtgctcaaaaaaagttttattcaatggatgcatccaagttctaagagaagatcatggagtaacttggtggcaagatttaaaa

SEQ ID NO: 165473 - DNA, 438 bp, Zea mays
  Clone ID: MRT4577_82497C.1
cttacttattcagtgtatattgaaacttatccattgcaggctgagatacgcagctctttaaacggaacctagaaagcacaccctagcgggactattagcataccttatgctcaaaggaaataatacgaggccacattttagtgaaagcatatagaagtcctattggaccccactcttaggccgcaccaattaactacaaaaacagaccaagttaacgccacccgagagcacagatactccatccaacaccctattgccgcaaaggcaacctgcaactctaacacatctattcacccccattgtgcgctataagatacaggtattattctgcccaaggcaaatctcaccgatgatgaggcaagtcaccaattaaaaggccctcagccaagaagcccacatagacacggtgcgtacttgacgaagacggagaaactacac

SEQ ID NO: 165474 - DNA, 656 bp, Zea mays
  Clone ID: MRT4577_82498C.1
tcggtgtccactactccacttatgtccgtttaatttgtcaggcattcctgtatgtgccagttttgacttttgatgtcttcaatttgttatgcatcaaatatttgctaggcagctgtctgtcagtgccctcgccgatggctacaccgacggagacgaagaacactaagaatctacgctagaacactaggaaactatactatgagtctgggaattgtattcatttccaaaactgtcttcaacttctcatacaactggtattaatagaccagcccagacttcagcgtacccactcaacggctgatacacgggaattgggcctcctctggcggcggcccaacaacatcttggttgcagcctcttgctcctttcctgcgctggcccgttcatcaccagctgcatcatcggcgttgctgatactgtcatgtttggagtcagttaggtcctagtttttttgaccctgttatgcgatggaatttgaccattgtactttacctcttgcgttatggttgtgcatggattttcaggcttctatttgctgtcctgataagatgattgttatcacagggcaattgttattctgaacatggaggttcttgttgcagagtgtgagattattgggaaatccagcactacctcctgaatctggagattctagt

SEQ ID NO: 165475 - DNA, 1727 bp, Zea mays
  Clone ID: MRT4577_82499C.1
ttgggtaccacgtaaaatgaaagcgtaaagttgacgttgacgtgtcgtcctgtcttccccgtctctcgttactcgcgccgtcgcgcgtggtctccgaacgtctcattcggcagcgaggagaccaaggcgggggggacttccgatctggtgtagggtacactggtttggcgcgagaccatggagggatccctggaggcgcggcccggtgtcctactcgtcggcgccccgggcgtcggcaagcggaccatcctctcccagtttcttggagcagaaatacctgacgtgcatgacttatcatccggtgtgctttgtcaggggtggacaattgaaacaaagtattattcagctgatctttccatctggacagcaaatcttggtgaagaattttctcttgattccctccctcatttagaccgggtggctgccctcgttatggtcttcgatatgagtgatgaatccaccttgcttactctgcaaagctgggctgccagtgttgatatccagaggtttgagatcttgttatgcgttggaaataaagcagatcttgtacctggtcatagcgtgcatgtagaatataggaggcgtatgcaaaatcttggggagtcaagttctgatccacaccctgattatttcaattttgggataaatgaaagtgagggttgtagcttgttatctgaggaagaaccatgcataaagatcagaaactcgactgcacagtggtgcattgagcagaacatagaatatattgaggcctgtgcttccaatgctgactttgataagtgtctatcagtggatggtgatagccaaggcttagagcgactccttggagctctttctgcacatatgtggcctggaatgattctgaaatctggaaacagaataactgtcccatccttggttgaaaaacaagaatccacagatgatgaatccaactatgattttgagtacgaggtcttgtctcatggatccgatgaccagtgggaatttattggagagacaagtacatccagaagatttgagagaccaaatgagcctgatggtgcacaggatcacacacatcaagttgtgaatgccggtactgactcttcagcatccaactctcccccgactaacacacccacagaaactgctgaagagaatactgtaactcagagcaacaaaaccgacaatagtgatcatgtggacaaaaccacagcatatagcactgaggatcatcaaagtgatcttcgagaggctaaccatctttttgaggacgagcattatggtctggatgacctggagaaaataatgtcggagattggcaacatgcgatcaaacttaagactcatgcctgacttccaaaggagggagatggctgcaaagctagccatgaaaatggcagccatgtttggtgatgatgatgaagaggcatttgatgatatctaaggcaattcatgtaactccaccttgctgattcccagacagggttgcagatgattgaaagatggctttgtacaagccgacgagcctcttgccacctagggcctttctcatgataatgtcttttttcttagtgaaaatttttgtggctgttgagcgttctatatgccttgtaagatgtattattatgaactttaactccttcaatcatccaggtggaaattttgtggaccatggtgcaattgaacaaaacggtgatattgtagaaccaaagacaaaaaaaaaaaagataacaagtttgcatattc

SEQ ID NO: 165476 - DNA, 155 bp, Zea mays
  Clone ID: MRT4577_8249C.1
tgagtcgtattaaacgagttgtcgagtgacgcgagtgaggtctgctcgctgacctgcgtcacggtgcgcgggcagtatggtggtcgtcattatcgcgacagcggggggttctactgcggtggtggcagcgcaacagccgggggcgctcatggggt

SEQ ID NO: 165477 - DNA, 454 bp, Zea mays
  Clone ID: MRT4577_824C.1
cttttttttttttttttttttattttttaaaaccttttttcttttttttcttatttttaaaaaaacctttgccctattaaaatcaacacttttccaaaacacacaccccttaacataaacccacagaaaacggggtgctaataacaaacaaaaaacgacctacaccatgtcccgtcaaaaaacccccccaccacttaggggatccgtgggaccctaaaaaaactgaccactagtgggggcaagaaggacccccttattatgcgccccccgggggacccccccttacacaggacatctttggggggacgactactactttttttttagggcccccctgaaaaccaaaccagctaccgccactttggttcccaaaaccacacaatcttcgggcaaacaaccccggggctaaaaaacccccccccctaaaaacgccatcttaccgtaattttggtgg

SEQ ID NO: 165478 - DNA, 402 bp, Zea mays
  unsure (1)..(402): unsure at all n locations
  Clone ID: MRT4577_82500C.1
cttagcagtggtaacaacgcagagtacttttttttttttttttttttttttttttttcctttttttttttttttttttttttttttttgggaaaaggaaaatagcagggctaattttattggagaaccggattccctttgttaatatcacaggatgagggctaaaacaagggaggggggggggcctaatacgcagtgcaagatgaatggcccaaagaaagattaaaaagtatgccctcgattgngctgtgaccgacacactcacattgagtcaccgatacaggtagtggtcagcctgcgcaaagccataataccagatatcggaaagcgaaggcgaggtgctaacatgacctaaaaaccgattcggaaatctggaacgaagagaagttaggaaataggcctt

SEQ ID NO: 165479 - DNA, 393 bp, Zea mays
  unsure (1)..(393): unsure at all n locations
  Clone ID: MRT4577_82501C.1
cccccccccctttttttatattcccccccccccccccccacacggggnnggaagccttttacacaaaaaaacgcacccccccaaaagaaaaccaaccaacaccaccccggctctaacaactggcaagccggccaacccccacccggtaaaacccccttcctgtcccccccccccccctgcttgacaaccacaaaaaccttaaaaacctcgtccacaaagccgaaaacctcccccttcatggtcaaaaaagggcacccaatcccccgaaaaaccgcaaaagccttttcccaatctctatcccccttaacaggggccgacaacttcacaataaagcccacaccccgtcccaggaatcccccccccacccccatgaaaaaaaaactctcccccccc

SEQ ID NO: 165480 - DNA, 1152 bp, Zea mays
  Clone ID: MRT4577_82502C.1
cgattacaagtttatcaagattttattatacctcatcggagtgattacaaaagaaagtgtttcaaaagaattacactttaaaatgttatagaatatttgtaaatttgaaatacatgctagcttaagtgacaatcctcattaaagaaactatagaagggatatacttatataagaaggccgagcccaccggcacttagcaccatccacaacagaacaaaaattacaacctgggataacactaagtcagtgttgttagatgacgatcacttggtgagcatctcccatcctggtacatgatcaaatcatccacttctctggtttattcatcagcatcactttgagattaatccaactattgtcttccacatcacgtgatcaattaacgtaccacaactaaatcgcctcgaatccgagagatcgacaacaacctccggttgagacgttccaccaagcacccggcgggcgttacctttagaacttcgagctcttcgccctccaacaccggaagtttctccgaggcggacaacgcaccatggttggcggcttgagaacaagctgcaggggcatggggatggagacctaggtaccatggatgaagagacgtcgaccatcaacagaggggggttaagtgcttcaacatgggaggaaaggaaaagggatcatcaggttgctgcaggaaatggacaagcagaggcgggaggcgagttccagggaggggcagcaccagaggtgttttcgaccaagggaaaaagaccaggcgctatttggggggatcctgcagggagaaaactcaaccatggagatccagggcggccatgggagctaggcatcggtctgggcgaacatgccaggaacctagcaggggcatcgagtaaaggggctggcatccagggcaccatggaaaaactcagctagggcttgagggaggagggcagagggcggccatggcagaggcgagctccacggatggaggttgaagacgacctggcggctagcgcacgtaggaaggagctccacagcgctagagaccagagagaggcggtcgagctagctgagggagatgagtgcgcagcaaatatcccagggagtcggcgtcactagaagataaaggagcgtatgtgagctcccggcccggccggctccgggggtacc

SEQ ID NO: 165481 - DNA, 339 bp, Zea mays
  Clone ID: MRT4577_82503C.1
ccgggccgacccacgcgtgctcttggttatactcagcatgttgtgtaagctttgaagaagggacttgactacatagatgtggtggctcttaagaaaatgaacaacaacaagaagcttgttaagaggcttgccaagaagtaccatgctttcttgtcatcataggccatcatcaagcagattccccgtctccttggtccttgtctcaacaaggcaagcaagttcccgaccctggttactcaccaagaattcctcgagtccaaggtgaacgagactaatgcaacagtcaagttctagcttaagaaggtcctttatattgttgtcaccttttgcaacttttct

SEQ ID NO: 165482 - DNA, 684 bp, Zea mays
  Clone ID: MRT4577_82504C.1
gccctctctcgagttttttttttttttttttttttttttttttttttttttttttttttttttttttttttaaaaaaaaaagcaatatggctttgggtggcttttttttttcccctcgggaaacccccggtttgttgggggagaaaaacctttacaaccccccccccccttggacattaacaggggggaaaaaaaaaaaaaaaaacctccctacctaacctaaaaagacgggttttttttggggggcaagggccacctaacctagggctgttttgcatgctgggggccaggatcacccacccgtccgtacgtacccccttttttggtctccaatcacatcaccggaaaatttttttttttttttttgaaacaataacatgactccgtcgtcgaaaaaacaacagggggggcagggaaaaggggttttcgtggacatcacagcacacatttaacaccgggtatttctgcgggagggggtcaatgcccagccccttgagcttgaccaccgactccacggggcccttggggggggggagctcccgaagcctcgaaatctgggggcgccttttggcctgctccggaatctcggcacagttgggggaagttgtttttggcgggaaacagcgggctggggggggcctccgggggttggagcccgtgcagggtcctttgggcgggggccca

SEQ ID NO: 165483 - DNA, 833 bp, Zea mays
  unsure (1)..(833): unsure at all n locations
  Clone ID: MRT4577_82505C.1
atgccgtacaacactggctctccctgctgatctctcgccgactgtcttggctcctcctagcccccagtgtcgactgcccctgctcctctctatccatggctgtgctcggcctccacctcaagccgtgccctggatctccatggtcgagtttttccctgcagaatccccccaatggtgcctggtctttttcccttggtcgaaaacacctctgcacttaaccccctctgttgatggtcgacgtctctccatccatggtacctagatctccatccccatgcccctgcagcttgttctcaagccgccaaccatggtgcgtcgtccgcctcggtgtatgactgnntatttccccccgcccccattcctcgctgatacttgtatctagatgatgtattttgcgtgaattgaatatgtggcttggaggacaaactttccggtgttggagggcgaagagctcgaagttctaaaggtaacgcccgccgggtgcttggtggaacgtctcaaccagaggtacgttaagtgatcacgtgctatggaagacgagtggaattgatctccaagtgatgctgatggacgaagctaaaatggatgaatcaaccaagtgccaggatagaagatgctcaccaagnggtcgtcaattaacaacactaacatagtgtttatcccaggattataagtttgttctgttgtggatggtgctaagtgccagtggtctcggccttctatataagtatatcccatctttaacctctttattgaggattgtcacttaagctagcatgtattttaaaacctgtaaatattttatacattttaaattgtaattcttttggact

SEQ ID NO: 165484 - DNA, 823 bp, Zea mays
  Clone ID: MRT4577_82506C.1
ttttataaaagaggtatcaaggaagataatcaaattccaaggaatggcaatgcatcaactgtttcatcactcaactcctatcacctaatgcagcatataagtgataaaagttttaaaacaacaaggaagtggcaaatacaccagggcttgcctgggataaacactacgttagtgttgttaaatgacgaccacttggtgagcatctctcctcctggtatttgactagatcatcaaatcttcatgttcaatcgtcagcctcaccttgagattaatccaactcttgccctccaactcacgtgattaattaacgtaccacaactaaatcgcctcgaattcgagagatcgacaacaacctccggttgagacgttccaccaagcacccggcaggcgttacctttagaacttcgagctcttcgccctccaacaccggaaagtttctcctccaagccacatacatgaacacgcaaaatacatcatctagatacaagtatcagtgaggaatactcgcaaaagaaatgacaagtcctcaccgagacgaacgacgcaccatggttggcggcttgagaacaagctgcaggggcatggggatggagatctaggtaccatggatggagagacgtcgaccatcaacagagggggttaagtgcagaggtgttttcgaccaagggaaaaagaccaggcaccattggggggattctgcagggaaaaactcgaccatggagatccagggcacggcttgaggtggaggccgagcacagccatcgatggagaggagcaggggcagtcgacactgggggctaggaggagccaagacagtcgccgc

SEQ ID NO: 165485 - DNA, 1355 bp, Zea mays
  Clone ID: MRT4577_82507C.1
aagaaaactaatgatggtgaacttatttattagctcacagagatgtcacatagttttatacaaagcagtcaccattaagaccagacacacgactaatacaaatagagcacaaatcattattcctaagtttcatctaatacataactaacaaagtatctactataacaagctagaacacatgtctcaatccgatatcacagttgcgaaatgtgcccgtctgttctcaagaaatctgtcgatgaaacgacgccttggaatttgaatcaacgaacgtcgaatagtcttcaagtggtatgtagtgtgatgatctgggttgaaatgaacggtgttgtggtccgaggtttccaagcatcctatgtgtccagcagtacaggaatctctgcgtagcttgaattggctataactctcttgtgaaatccagatagtttaacagaggtagatgactgaacttgactctgaactccactggacctggcagcacgttgagaggctttgcagtcgtcctcgctctccgtcacgcgcgtagtcctcgtcttccttggagtcgtggtagggatatcctgggataacactaagtcagtgttgttagatgacgtccgcttggggagcatctctcatccgatcctggtacttgatcagatcatccaagcttcaggttcattcatcatcttcacttgagattaatccaactcttgccctccacatcacgtgattaattaacgtaccacaactaaatcgcctcgaacccgagagatcgacaacaacctccggttgagacgttccaccaagcacccggcgggcgttacctttagaacttcgagctcttcgccctccaacaccggaaagtttctcctccaagccacatacacaaacacgcaaaatacatcatctagatacaagtatcagcgaggaatactcgcaaaagaaatgacaagtcctcaccgaggcggacgacgcaccatggttggcggcttgagaacaagctgcaggggcatgaggatggagacctaggtaccatggatggagagacgtcgaccatcaacagagggggttaagtgcagaggtgttttcaaccaagggaaaaagaccaggcgccattgggggggatcctgcaggggaaaaactcgaccatggagatccagggcggccatgggagagctaggcatcggtctgggcgtctatggagaggagcaagggatggagcggggagcaggacggatgccgcagccagaggaagtcgaggccgacggtgtccatggctgggggcgggggcgatcgccagggaggggctgtactgggtgctgtcacggcatgggaagagaagcaggaggctgccatcccggccggcctcgagg

SEQ ID NO: 165486 - DNA, 484 bp, Zea mays
  Clone ID: MRT4577_82508C.1
cgattattacccttatcaactaagtaataaagttgttacatgcccgttcacggaccggaccttcatgggccgggtctccaactcggggcaaccatcgatcgaccatgttccttccgagaccgaccgatggcatcatgcacacaatcgccatacttacagagatagataggtgccacatacatcaccacaaaatcaaaatcgtcagtagctttattgcgggaacaggataacgtacgggcggcaagcgaagggaaagcgccatggccccccacctcctggaaagatgccgggtcggggccacccctcgccgaagaagaagttctgtttggagctgacggaggcgtacccaaagtcctgcggggcgggggccttgaacgggcggacgtcccgccccaacagggggttcgccccggggcggagcctgaagagggggtgccgccacccggcggggcaccgggactaggccaggcctaacgggcgctct

SEQ ID NO: 165487 - DNA, 250 bp, Zea mays
  Clone ID: MRT4577_82509C.1
ggcaacttattgaagcagcctctctccctcgacggctcgacctcaacaattgtttgttcttgaggcccgccagaccttagtaatcttgctggctggctggctggtaactgaataatctagctagctataggcgctctgaccctctgataatggtcttggactccatcggcttcttcttcttcgtcgtcgtcgtcgtcgtcatcccccgcgcgctgcttaggaagagcttctatttctggatcttccacgt

SEQ ID NO: 165488 - DNA, 380 bp, Zea mays
  Clone ID: MRT4577_8250C.1
aattattcttctgatctgctcctccaacaacaacatcgtcgtcaacgtcttcaaccatctctaccatctgctccggtccaccagaaacgggaagcaatttatgtaaaaaacatgggtggacgggaagacatgccgcattatgcaatactggctgatacaaacttcacatatacctgggaacccaaggatgagatccccaacttcttctaattcccgtccatcgtgatgcaccagagcggtaggcggatatagtgccaacaaaatggacagacgcctccgcatctttgtcacgttcgattagcccccgccagaaaactaccacatggagttcaacgagtattggaaaatcaacgaccaaaatagtccaaccccccatatgg

SEQ ID NO: 165489 - DNA, 149 bp, Zea mays
  Clone ID: MRT4577_82510C.1
ggcaagcgcatcgcctacaaacttttcgattttccgcgagctcccatacataaggtagatggggctatggcactgagggataggaaacatcaatggctctatttggtagcatgacgtgtagtgttcaactcacattattgcgattgctg

SEQ ID NO: 165490 - DNA, 240 bp, Zea mays
  Clone ID: MRT4577_82511C.1
aaaaaaaaaaacaaaaatctatcacacactaaatatcaaaaaacaaaaacggtcgacatgggtggaacacaatcttaccttacggtcacccttgttgcccacattgcctgctgccgccttaaaagatcaaaaccttcttacccctccttaccatgggataatttttttttcggcgtcccaaccttccttttctttgcccccgtttcaaaatccccccccttcgaatacctttttattccc

SEQ ID NO: 165491 - DNA, 735 bp, Zea mays
  Clone ID: MRT4577_82512C.1
taacgggcggctatgacctctagggaatctttgtaaaggctacgtagtgataccctgccggaccacctaggaagtgatcaatggggagtcatgatccccgggcaaaacgggaatcacgactcatgggtaaagtgtgcgacctctgcagagggttaaaaactgatatatcagccgtgctcacagttaagagcagccaagggatcctctttgattagagatacttgatcagagatgttttgtttataggtgatgacgaggaaaatgttggtttctattatgattatgattttaggtattctttccgtttggaaagagtacttttgggttaacaacttgtgttaatgttaaaatctggctctctactagtaataattacctgaccaactaaaagcaactgcttgaccctaaacccacataaagctagtccacttcagccaaacaggacatttgctgagtacgttgatgtgtactcacccttgctttcacaaaacaccaggtttcctttggtgcaatctatgctcaggtaaagaaaaaggtgtagaggctgatctccaggagttccaagacttcgacgagttcgaggattaggctagcgacctcctccagtcagctgcttgtggtgggtttgtttacatcggctatgtttcgattctgtgtactttgatttatattatgtaaatggctctagtctgtaatattattacttactctttattgttatttgaagcattgtgc

SEQ ID NO: 165492 - DNA, 1210 bp, Zea mays
  unsure (1)..(1210): unsure at all n locations
  Clone ID: MRT4577_82513C.1
ccggccgggacccctcgtctccctccccagatctaaatcgcgtaggaccaggcatcccatccagacggttattggtcttcttgcgttcgcagactgcgatccatttccgagcttcgaggaatcgacagtcaagcttcgacgaccaagggatcgaactcttcgagttctacaaggctgaagaccctgagcatctgtttggtgaaggcaagtgtcctctgacctattatgtcccatttactttataattcactgtcccgcataccatgaacaacctaaggattgactagctttctatttaccctatccttgattaccttttgggttactatggttagattcatgctaatgctttactttaatcaatgaacatgatgtgaacacttatgatacgatgttgttattattattactatgttgggctggtgatactttagggggcggccggggtttctcgagtacctctccgtaaggacctgttcgttgagagaccacccgggatagcagtgcaaccatgagggtgaaatgggatgcccttagctaattaattagaggaactagaggtgtagttgcttcgccgtcgtgccgtcaatggggtccaggcacagtgcttgctctaccgaggctgagtgctgaggttctttcgttttgcttttgttagtcaccctcctgcggggagaggtactgtgtttatcaaactggagaaacctaacgtgcggctatgacctctagagaatctttgtaaaggctacgtagtgatacccggccggaccacctaggaagtgatcaatggggagtcatgatccccgggcaaaacgggaatcacggctcatgggtaaagtgacctctgcagagggttagaaactgatatatcagccgtgctcacggttatgagcggccttgggatcctctttgattagagatacttgatcagagatggttggttcacaggtggtgacaaggatgatggtttgactatggtaatggtaagtggtattcttttcgtttggaaagggtactttgggttaataacttgggtcaatgttaaaacctggctctcaattagtaataataacctgaccaactaaaagcaactgcttgaccttaaccccaaataaagctagtccactacagccaaacgggacatttgctgagtacgttgatgtgtactcacccttgctttccaanacaccaggttgcctttggtgcatac

SEQ ID NO: 165493 - DNA, 384 bp, Zea mays
  Clone ID: MRT4577_82514C.1
gctcgatgatgatgatgatgttcctcgaggaggaaatggttcacgggttggctattactaaaacttggcttccaataataataaatatctgaccaactaaaagcaactgcttgagcttaaccccacataaagctagtccacttcagccaaacatgacatttgctgagtacgttgatgtgtactcacccttgctttcacaaaacaccaggttgcctttggtgcaatctatgctcaggtaaagaaggcgtcgaggtggatctccaggagttccaggacgtcgacgagttcgaggattaggctagcgacctcccccagtcagctgcctgtggtgggttgtttacgttggcaacgtttcgattctgtgtactttgatttatattatgt

SEQ ID NO: 165494 - DNA, 578 bp, Zea mays
  unsure (1)..(578): unsure at all n locations
  Clone ID: MRT4577_82515C.1
acccacaagtcgtgattcccattctgcccggagatcatgactctccattgatcactaccaaggtgacctagcagggtctcactacgtagcctttacaaagatttcccagaggtcatagccgctcgttaggtttctccagtttgataaacacagtacatctccccagaggaagggtgactaacaaaaccaaatcaaagaacctctgcagccagcctcggcagagcaagtactgtgcctggaccccattgacggccctacggcgaagccaactactcctctggttcctctaattaatcagctaagggcgtcccattccaccctcatggttgcactgttatcccgggttgtcactccccgaacaggtccttatggagaggcactcaggaaaacagcctgagccccctttagtgccacaagctcatcctcatcgtatcataaagtaattctcatcatgttcattgattagagtaaagcactagcttagagctaaccatgataacccgaaaggtaaacaaggataaggtaaatagaaagctagtaaatccttaggttgttncatagtatgcgcggacgcgggg

SEQ ID NO: 165495 - DNA, 392 bp, Zea mays
  Clone ID: MRT4577_82516C.1
ctcgtgggtcgacgcaagcctctaaactggacgttctgggaggttgtccattatctgttagctatctaaggctatattggaacctctacagctattagctagctaataaattatttgcagggttgcttaatttgtcctccgccactgctcgagtcattgctccctccctccctgtttccctggcggactctgatgctgctgctctcctggaggctagcgctactcttcggctggatccccacagctggtcccctccggcagcgccccgtctcctcggctccggccgtgcctctcctcgtctgagaagcggacgaagaagaagcgagagatggcgcggcgcgggagccacaagcgcgggtgcgcttcgcggacgacgtcgtggacaaagacaa

SEQ ID NO: 165496 - DNA, 1409 bp, Zea mays
  Clone ID: MRT4577_82517C.1
gccggccgggctgggatcctgatgcttgtaaccaccactgcccctatcacctagttgttgccgatcccagcgcccagatgcaaaggcccccggcgcggctcttacaggcggcccggcacggtgctagcctgcgcagctagcgcggcgtgcggcggccagccaaccgacggccgtggcagcctgcggctcgactcggccagccgcccctattttcccttgcgtgcggccaactagcacagcgcgcgcggcagcccagcgtggttcggccatggcggcatgcgcggccctcggcgcccagtgcgagtccggcagccggcgggtgagcagccccgtgacgatcgtccctggaagttcccggcgcccgttcctagcctgtacgcgatcgccgagatcgcgattcgttttcgagctttgagggatcgaagatcaagagttggcgaccaagtgatctggttcttcgagttctatgaggctgaagatcctgagcatctgtttggtgaagacaagtgttctttgacccattatgtcccatttactttacaattcactgtcccgcatactatgaacaacctaaggattgactagctttctatttacctggtccttaattaccttttgggctactatggttagattcatgctattgctttactttaatcaatgaacatgatgagatacaatgatgatactatgattttattctggacatgatgatatacttgtggcatttaggggactcgggttgtttcccgagtacctctccgtaaggacctgttcgttgagagaccacccgggataacagtgcaaccatgagggtgaaatgggatgcccttagctaattaattagaggaactagaggtgtagttgcttcgccgtcgtgccgtcaatggggtccaggcacagtgcttgctctgccgaggctgggtgccgaggttctttcgttttgctttttgttagtcaccctccttcggggagaggtactgtgtttatcaaactggagaaacctaacgggcggctatgacctctagggaatctttgtaaaggctacgtagtgagaccctgctaggtcaccttggtagtgatcaatggagagtcatgatctccgggcagaatgggaatcacgacttgtgggtaaagtgtgcgacctctgcagagggttagaaactgatatatcagccgtgctcacggttatgagcggccttgggatcctctttgattagagatacttgatcagagatggttggtttacagatgatgatgatgatggttatgactatggtaatggtaagtggtattctttccgtttggaaagggtactttgggttaataactgggggtaatggttaaacctggctctcaattaataataataacctgaccaactaaaagcaactgcttgaccttaaccc

SEQ ID NO: 165497 - DNA, 417 bp, Zea mays
  Clone ID: MRT4577_82518C.1
attagaggcacaagcactggcagacgtgttaattttcctcataaacaactgtgcatacaccaagatttttggattttgaactctgcgacacaacaaaagacactcttcccatgacaagcttgctttttaactgacttatggacacgccgtaccacccgcttgctttccgccgttctccatgaaccacccgccgccggcgagctcccgctgacctgggcattactttaaccacttccactggtggtcccgacggggcttatgcgtgcctactacgcgtggacgagggtccttaaccgggtgagctccggcagtacgaccgttgctagggcccgccggtcccttcggcgcatttccgcgcacttgagcgcaagctttgctttacccatcgccttctttacaggccaatccttgacggtg

SEQ ID NO: 165498 - DNA, 723 bp, Zea mays
  Clone ID: MRT4577_82519C.1
cccacgcgtccgctcgctgcgcgctgggagccccgccgagttcgctgttgagcaccgccgcgaagactcttcctgccgtgcgtcgtcgcaaggttgcctttggtgcaatctatgcttaggtaaagaagaaggcgtcgaggcggatctccaggagtttcggggctttgatgagttcgaggattaggctagcgactacccacgcgtccgtgcctgcgtccgggagaaacctaacgggcggctgacctctagggaatctttgtaaaggctacgtagtgataccctgccggaccacctaggaagtgatcaatggggagtcatgatccccgggcaaaacgggaatcacgactcatgggtaaagtgtgcgacctctgcagagggtaatgaaactgatatatcagccgtgctcacggttaagagcagccttgggatcctctttgattagagatacttgatcagagatgtatggtttacaggtggtgatgaggaggatggttatgattatgactatgataatggtaagtggtattctttccgtttggaaagggtactttgggttaataacttgggttaacgctaaaacatggctttctactagtaataataacctgaccaactaaaagcaactgcttaacttaactccatataaagctagtccactacagccaaacaggacatttgctgagtacgtttatgtgtactcacccttgcttttacaaaacacca

SEQ ID NO: 165499 - DNA, 280 bp, Zea mays
  Clone ID: MRT4577_8251C.1
cggaaggttatgctgagtctttgaggaactacctggagggcacgtgcgtggagtggctccggagatacctggagaacgggaaggacacgctgctgcgcgcaaacccttcaaaagcacatgtgacccatcactccatctctggtcgtgaagtcaccctgaagtgctgggccctgggcttctaccctgaagagatctcactgacctggcagcgcaagggggaggaccagacccaggaaatggagcttgtggagaccaagcctttaagggacggaaactttca

SEQ ID NO: 165500 - DNA, 575 bp, Zea mays
  Clone ID: MRT4577_82520C.1
aaacccacaaagccacattttttattccttagctaaaatccatacatacaacgggaaaaccagggtttttattacaactcatcaaatacccatcaagcctaaggttaaacaacacaattttattagggcaataggcgattataatatgccccacccagggttgtatttagttaaaaaactacggcccaacaaaaggctaactattggtcttgatttttaaagggcctcgggattcttcctggagttggcatcatgggagggttaaaacgggaaggccggggcccttgccaaaggaaaagggctccaatttgggctgggctacttcaaggatttcttaaatgggaatctcggcctttgatctttccaagggggcaacgggatcgacttttggattataacccaggttagcatgctttctcctgacaaaagttttaaaaggggggtatttttgttcctgaaacagttcataaaatactcggagggaggggaatccgggcaacttgggttcgggagggccattcttgtggaggccttgaggccttgcattcctgaggatggggttgaaagctgttgca

SEQ ID NO: 165501 - DNA, 352 bp, Zea mays
  unsure (1)..(352): unsure at all n locations
  Clone ID: MRT4577_82521C.1
tantcggcacgagggtgggggtgctggggagggggataaaaaacatctggatgggaagaaaaaacaatttggaggagctgtaactagctggatctcatcatgctccttacatcttaccgggcgtcttgtgtgtgactactttactgtgtggtcataagcacttactgaatttggggttagaagggataaaacactttttttcctaaaacaaaaacatctaaaaaaaaagggaggggccaaaacaaccatgcttcccccgggggggggccggggccccatttcgccttatacggggggggtttaccgccgctcattggccgggtttttacaacgggggggcgggaaaacccct

SEQ ID NO: 165502 - DNA, 466 bp, Zea mays
  Clone ID: MRT4577_82522C.1
atctcgttctagcactcgcctgcctctgcgaacagcttgcactgtcgatcatcaccatgctgtccagctccaaagccggcggcaatggcgacggggagcacctggtttgcgtgacgggggcagggagcttcatcgggtcgtgggtggtgaaggagctcctcctccgtggctaccatgtccgtggaaccgccagggatcccgctcaccgcaagaatgcgcatttgctggcaatggatggagccggggagaggctcaacctgtgccgcgccgacgtcatggacggcaacagcctccgcgccgcgttccatggctgccgcggcgtgttccacgtcgcctccccggtctccaacgaccctgtcggttcactgcctcctctgctcctctgaaacctccggacgcgcgccacctaacacggacatggagcacttactagcccgtgctgcttgcgtgcaggagctcgtgcctg

SEQ ID NO: 165503 - DNA, 112 bp, Zea mays
  Clone ID: MRT4577_82523C.1
agggtctcgtcgggctgtgggcttgtgtcttggctcttggcttgtcgctcggttctgtccttcgcgctctcggttgcgtttgcgggctgtttgtggcgcttggctttgttgg

SEQ ID NO: 165504 - DNA, 218 bp, Zea mays
  Clone ID: MRT4577_82524C.1
gagaacatttcaagtgattgaatttctttaatatttggaatagtatatttattttgtatcaatagttatgcctatggatacctttaaagattgaaaactttaccttgaaagaattttcagagcctcctgatctttgaacaggtaaagatttagtaaatcactgtcacactttcttcataaattgtcaggtggtttactagctttagctttcacctttc

SEQ ID NO: 165505 - DNA, 267 bp, Zea mays
  Clone ID: MRT4577_82525C.1
atagagagaaggtgttatatgcaccgggtcgccttaccggccccgctgcggattggtgggatgcatactgcgctgctcacactgctgtcaacacaattacctgggcagaattctccactcaattcagaaattaccatattcctgctggacttatgaagattaaaaggaaggagtttctaaccatcaagtagggaggtatgtccctaagcgaatatagagacaaatctatccagctatctcgatatgctcctagggatgttgagaaga

SEQ ID NO: 165506 - DNA, 261 bp, Zea mays
  Clone ID: MRT4577_82526C.1
ctttttgttacttttttaaaccaatagtgaactggatttgtcgcgcatactgcaccaaaatcattcacacaaatgagtgggaaaaccttgtccttacccacaccatacgtctatgagtacatgcaactgacaacttctgccatggtaatctttaaccaccttgcttattagcactgcctatcatgaagctcaacactgtaataggctatacgtgaaatacgcacactcatacaatatgttgtggtataatctcacacattt

SEQ ID NO: 165507 - DNA, 251 bp, Zea mays
  Clone ID: MRT4577_82527C.1
gtctatgcgacgtcgtggcttttctataaggtccacaaaattcaactaacggtgcggtcacaatacacagcttataatgagacaaccgtggagaaaatcaactgaactatcgcggatgatatgcttcttgcgacagatcatgtaagcagcgaaaaggccatgacgccattgccctaccgaacaattgtcgcaacatgcatgtgcgaaagggacacaccctgttacctctcatcaagcgcagactgagaagg

SEQ ID NO: 165508 - DNA, 372 bp, Zea mays
  unsure (1)..(372): unsure at all n locations
  Clone ID: MRT4577_82528C.1
ccacgcttactattgctagccggcggttgcgactttaaactgtagatcgggctctagaactattttggctcaactttttacactcttcccactctttcctggcgaacgggaaactgacacagctttacaaaatctccactgcccttgggaccccccattgcactattttttcaaagggaatgaaccctgcctcgaccatccacctttaagttttttaagaatcctccaaaaacacatcgtatcttatttatcccggcggatttgatctaatctgaccactctagctatgccgncgcgcgatgccacaacgatgggagtgatcggagcatctactagctgcaactgcaatgcaagcctgcaaccgcgtggatt

SEQ ID NO: 165509 - DNA, 177 bp, Zea mays
  Clone ID: MRT4577_82529C.1
ctctacttgggacggccgcggtaagctgactgatctatttgttggccacccaactcgaaccgttttctgttagcccaaaggcggtaaacaaaatcgcagaggggggtacagcatgccattatcacgccatggcggtggagaactttttgctcaccctcatagcccttttttcgaggg

SEQ ID NO: 165510 - DNA, 448 bp, Zea mays
  Clone ID: MRT4577_8252C.1
attcggctcgagcccagttctttctgtcgattgtccatcccccacctcggtgggctcagctcagttcctaaaccgggacctacgtctttgcctgctgccctgacccatgatcgtgagttccccactcgtgagtcctacaccggagaggaggcacaggcccctgcgctagctgcagctgcaagtcgtgtttcacagatccggtgccgactagttagctgctgctcgtgacagctcccagagcctgccgcgcgcgcccgaagagatcgttatgcggacagccgtgcatagcacagccacagcagagctgactctggcgcttgttgcccgtgcttggctgatgctgctggcgagagcgcgcatgaggagcggctgaccacagattctctatggccctccctccctagcttcgttcgcgcggagtgcgtgcacgtaccatgagaagatgatg

SEQ ID NO: 165511 - DNA, 192 bp, Zea mays
  Clone ID: MRT4577_82530C.1
atctttaattatttatttattgcgtgctccacaaaatatccaggagtagcgaacgtacacctgctggaaacacacatgtaaatacgggaggagtactctcagggtccaacttttatttaggaggtgacacgatcgcataacttgaccgatcgactgattgattattcccgctcttccgggagcggctggaac

SEQ ID NO: 165512 - DNA, 414 bp, Zea mays
  Clone ID: MRT4577_82531C.1
gtggtgtcatcacctgaattggaattaattttggctgaaggtgctggtcttcgaggcggttatagcactgtagatagtttaagcaatcgagacagatgccgagttggtcaaatatcactgtatgatggaccgctggcacaatttggtgaaggtggcaaatacggtgatcttttcgtagcagctttaaaatcttatggcatgctttgtataggattgtatagatttagagacactagctcgagttgtgatgcaagtagcaaacgatatgttattacaaatccaccggacgatttttcgctactgtcaaccgatcaggtctttgttttaatgcaattcgatcctggacttgaatataaaccgtcgtcagtacgttgtgcaactaatgtgaatacacaaagcgccggtgtaggtggt

SEQ ID NO: 165513 - DNA, 539 bp, Zea mays
  Clone ID: MRT4577_82532C.1
caaaatcattcaactacagggctatgacattatcttggctatggactggttgactgcacatagcccaatgaaaattcactagggttctagatggatcaaattcttgcatcaccaagagaaaatcaaattgcaaggtattctacctcaagctgcaatgggacctcctatttcacctcttcagttacaagctctgaacaagatagactccatcctgtttgtagttcaactcaatgcagtagttgttccagttgacaaccactcctcattaccagctgatttacaaaaccttctacagcagtttgaacatgtttttgctccaccttccgatatgcctccttccaggattggtgaccacaagattccattacttgaaggggcatacccattctgtctcaggccatatcgttacaacctcttcacttgtcttgttggtgcgcaagaaaactggagattggcgcctctgtgttgatttcagacgtttgaatgctctcactacgaagaacaagtaccctctacccataattgaagaattgttggaa

SEQ ID NO: 165514 - DNA, 624 bp, Zea mays
  Clone ID: MRT4577_82533C.1
taagctcggaattcggctcgacaaggaggaagcgcatgtgaacatttgtgcatttgtcggacgttcagatctggactcacgatgctttcggtaaaacttgcctctgctctgatccacctccaccttcaacgacttggcaccctcgaagaccaatcctgcaagcaattctttgttccaagaagacattgaggccctcacaaagaagacacaagatggtgggacaaaagtggttgaagcaaaggctggcaaagggctctgcaacattgtctatggcataagtttagaacatatgaatcgttgtcactgtcagcatgtctattggttacactatagaatatcttgtctgtttattagccttttagaattttatgattactttcttctatgctttgtaactattcaatcagtagatgcttcttgccttcattgatttttctatgaaggactacttgtcattcaatgaattttctatgagactatggtataaattagttgctggaaaggggaaaaaaatgaataggaaactgcggatgtctaactcccaaaacttagcatctccaaagagtgagttctattatgtgaaagggaagaggaggtttagaacaaataaaattgagcaaggtg

SEQ ID NO: 165515 - DNA, 247 bp, Zea mays
  Clone ID: MRT4577_82534C.1
tcagtctccgtcgaccgcctctgccgccggaaggtgttcctgctgggcggcacgcagatgctcgcgtgccagatcgtcgtgggcagcctcatcggcgccatgttcggcttctccggcgtcgcggagatccccaaggggtacgccgccatcgtcgtgctctttatttgcgcctacgtgcccaaatgagagtgatgctgttggccccttgggtgcccacatcaaacacagaccctgatcttggttatcc

SEQ ID NO: 165516 - DNA, 1208 bp, Zea mays
  Clone ID: MRT4577_82535C.1
tcgccgcgtccgcgttcctctacgccgagctctacctcgtcgccatcggcttcctcatcctggagggggacaacctggacaagctgttcccgggcaccagcctcagcctcggcctccgcggcgccgccctcgtggtctccgggaagcagctcttcgtcgtcctcgtcgccctcgtcatcctgcccaccacgtggctccggagcctcggcgtgctcgcctacgtgtccgccagcggcgtgctcgcgtcggccgtcgtcgtcgtctgcgtgctgtggaccgcgctggccgacggcgtcggcttccgggccagggggaggatgctcaacgtcagcggcctccccactgctctcggcctctacaccttctgctactgcggccatgccatcttcccaacgctctgcatctccatgaaggaaaagaaaaggttctccagggtgcttgtgatatgcttcgccgcatgcactctcaactacgcatccatggcgatcctcggctacctcatgtacggcgacgacgtcaagtcccaggtgacgctgaacctgcccgagggcaaggtcgtctcgaagctagcgatctacaccacgctgatcaaccccttctccaagtacgccctgatggtgacgccgctctcaacggcagtggaggagaagctgctcaccgccggccgcggcggcaagagtagtaggtccgtcagcgtgctggtcaggaccctgctggtcgtcaccacggtcgtcgtcgcgctcgcggtgcccttcttcggccacctgatggcgcccgtcggctcgctgctcagcgtcatggcctcgatgctgctcccctgcatcttctacctcaagatctttggcgcggcgcgctgcggcagggcggaagtcgcgcttgtcgccaccattattgttctgggttccgtggttcttgcgactgggacgtacgcctctgtgaacaagattgttcaggactactgaagaagagatgtctggaaatgtcggtggcagtgtcacagtcattgttggcgttcttttgcggcgatcgacagtcccatatctcaacatcagcagattaggtaaaccaattagaaggtgttctttaaaaaatcagttagaagatggtcgtaggcaaggcaaggcaaggagacggaacgaacagtgatgtactgaaaacataatagggtgatctgtttatatatgggccgtgtgctactattttatctt

SEQ ID NO: 165517 - DNA, 438 bp, Zea mays
  Clone ID: MRT4577_82536C.1
tcctgtctgcacctcctcacgtctcgcacgttccttcccaactccgcatgcgtagtctctccgcggagcgatccatattcagtttttcagaatgggcctggtgaacgaaggcatctacatggaggagggaacccttgagatcgtgatggagtacaggactgtatctgtggttgctggacctctggtgatattgtataaagcaaaggcgccaaagtaccaagaaattgtaaacatccgacttgaagatgacaccaatcgccgtggccaagtcctgtaagatgatggctgaaaaagctgatgagcacgtctttgaaggaacttctgggaatacacaacgaatacgctaccgtgcagtttacaagcgagggtttgactactcctgtctcacttgatatgcttgcgcgcatttttaatggatctggataacctattgacaat

SEQ ID NO: 165518 - DNA, 291 bp, Zea mays
  Clone ID: MRT4577_82537C.1
gaagactttgcctcaggaaggttgttatccgaattctctatactcaccactttattttttttctaggtgtccaaaacagagtaaagtttcaagactcttttgtttagaatcgtgcaaaggatcatctagcagtgcatttatcatggaggagatgaaaagaagatttaatgatgcatggggataattgagaaaacctactactgaagaaaaatgctttagctgagtctgaatgagtagcacatcttatggattttttgtttttcatagatctgtaattcacatgagggctac

SEQ ID NO: 165519 - DNA, 747 bp, Zea mays
  unsure (1)..(747): unsure at all n locations
  Clone ID: MRT4577_82538C.1
cctcggagccggccgggtgcactccactcctaccccacacagaagcggtggcgccgcaccaaacgcagaccaaggcgcggctgcggaggcaaggagcaccacccatggtgctcgccaacttctaccgcaactatggtaatacggtcaacaaacctaggtggccttatgagaaagagcgctttgatggtgaagtgaagctgagccgtcagtatgagctgtaggtggaagcgtgagcatttgcaggtcccacgatggactgcacaagatccgaaatgctgcaaggtacttgttcacccttgcacgacaataaccccccccacatctttgatggtgaggnccttcttcccctcatgaaccctgatgggttgcttgactgagggtcagaacaagtattgattatgctattggcctcaccgatgagaacttcctcgcgaggcgacttccaacacttgacttccaggctgtcatgagcaagctccattcagcatgctcgtgctgtgatcagagaaaggaccatcactggtgaccaacaaattgacgacgtgccatcattcctggtgtagggtgtagcgtgaaaagcacattgacttttcactgctgagcctattcggtgcacgccccacaccaagggtgaagagaaacaatcccaagaaggtctagcgctggcccggatgctggcgatgacgatgacgagtgagcatggacaaccagcgttacccaatataataatattatctaggtctcttg

SEQ ID NO: 165520 - DNA, 176 bp, Zea mays
  Clone ID: MRT4577_82539C.1
gggggtaaatttcatggtttgtaggaaaccccggaactacataataataggatcaaaattataatttttacccggggggcacacattgggaaaaacccctttaattatgtcaaaagcaggactctttttcaaaagcggaaaaatacagtagtatagggacaagggtaaagggaggg

SEQ ID NO: 165521 - DNA, 609 bp, Zea mays
  Clone ID: MRT4577_8253C.1
ccgggccgaaatccagtagcacactagacactagcagtaacgccaagaaagaatggcgtgctgcaccaccaccagccgtctcgtcctctcggcggcggccgccctgctcgccgtggcctgcggcgccgcggaagccccgagctactgcgcgccggggcaggccatcccgtaccgtccgctgtccggctgcacctggtacgttgcgagccggagctgcgacgtgatcgaggccatgctcccgacccgggccgtcctcaaggagacgtgctgcagccagctgcgggacatcccggcggagtgccggtgccgggcgctgagggtgatgatggagacgcccctcggcgtgggcgcggagccgggggcccagcagaggtgccgggtcgcgcaggcccgcttcgcccccgccctcgtcgccgcggccgagtgcggtctgctcaccgcccacggcaggcgcttctgcaacgcgctcgacgccgagtgatgcggtgacgcatggtgatgatactgctcctcgtaccgtgcgtggtcgaataagaagggcgtatattattcctgtatctatactcatctattaagattctaatgtcaccgtctaggcttcccaccaag

SEQ ID NO: 165522 - DNA, 454 bp, Zea mays
  Clone ID: MRT4577_82540C.1
cgggggggtttttttttttttttgggggggaaaaacagctgcaaaagctttttgctccatttttttggattaaccaaacccattttcgggttggcccataaaaaacccctttaattccgatcatttaaaagcttggtttggaagcctgggtggcaaatttccaccacaactattttgttagccccagtaaagggatgacgagcccacgcaaaatttgatagacaacccagtaagggtgttttttaaaagacaaaaaaaattccctagtttgttcaccaactggggatgacccatcgaaattgcgggccttcatttaaaaatagggatgggggaattttaccacgaatggtggtcacatgaatggcgacccgacacaaacgagaagggggggtggttaaattggttaaaggtgggggaacgcccccgttagaagcccaaaagcggtggtgggagg

SEQ ID NO: 165523 - DNA, 332 bp, Zea mays
  Clone ID: MRT4577_82541C.1
gggaaggaaagaagatttaatgcttagggggaagaattgcaatttacataaagaagaaagaaagaatataataggagtaaccggttcattaagggaggaactatttggtaatatatttgttaatttacaggaaggaattttttatttaaaaggattataattggatcactttcaaaaaacgacctttaaaaacgatgattttaaaggaataaggttttcagatatttttttgggtgggttaattttttgaaaaaaatggtcccaggataaatttatttataaaccaataaggacaccttttgtttaaaagaatacaaattggaactaaatag

SEQ ID NO: 165524 - DNA, 234 bp, Zea mays
  Clone ID: MRT4577_82542C.1
atttccagctcccactgttctttcgtgcaatgcgcatccctgcagcccaaccgtgcaggctccggggggggggggaggccttctagaaccttctcgagatcgcacagcgccgtgtgctctccggccgtgccccactcggctgctggtgagaagtcctcgttgacccctcctctcggcccgcgcggttcgagtgtccgccgctggcgacgtcgctaccacaagttgggacgcggg

SEQ ID NO: 165525 - DNA, 841 bp, Zea mays
  Clone ID: MRT4577_82543C.1
ccgccggggcggccctgacgtcccttcgtctgtcgtgccgcagatcaagggagagcggtgtctccgaaccaacaccgacgttttaacgacctgcacgggtgccgacccgggaggtttctgggaagtgctttgcgcaagtccgctcaggatcgtcaccatcactcatggaagtcacaggataataaggatccaattactacacaaaatccaacaaaaatgcagtggaggcttgataaggacgacgcagttcacccgcggatattttggttctggaagtacttactgatggccggtgtgtgtccgccaaacaaattccagctagcgctggctgccagccggccgggcgttttcccgggcggtgtttgcgcgtgcccagtgtggccacgccaataaagacgagctggacatcaggaggactggaggaagaggaggagcatctcgatctcgatttccgcggaaatggtgatcggtctcgcctgttttcctgcggtttggcttggacgttcggttcagcgggcgggcggacggatggaccggaggagggaagaaagaagacaagcgtcccagcctttttcagttttcagcgacgacccaaaaatgcctttgctcagatgaacgcacatgcccctcgtcgtcagccacttgtggccttgtggggggcaacgtcctcccccatttcctttctgcgcaaccgcgtatacttgtgttcgttcgtccctggccttaagccctttttacaaaaaaaaaaaaaaaaatttgctgcctgggtgtcagtgctgcagtacccccaaaatttctgcagcttttctcatgttgcagaacacggtgaaatgctctgggt

SEQ ID NO: 165526 - DNA, 687 bp, Zea mays
  Clone ID: MRT4577_82544C.1
ccgctctagaaaaactaaaatgatagtattgattcatccattcccttgtcctgttgtcaccctggcatgaatcttcgctagcaagtagtagtcgcacattgcaatccatcagcttgggaatttgcatcgcattattgctgcctttgtgcaaaagaagggaaaaaaatctggttgagtggcagatagctggtgccttggtggccgcttgtcatgctagttggtggctgccatgtgcctgacttgattgagatacgctgtgtgcaaaatggctgaggatttgctctagtacgggagtgggagagaatatgcgtgtttgcttgtcccaatgctaggttggtaaactacttaatttgttcaacaactagtggcgctcacgaatttcagataggtggtgatgagattcttgcttgacaaatgttccacttttattaatcattttttactaaaaacaatagtaaaaagccagaacaagttcgcgctgacctgcaatcatgaattattactttcccctattctttttgggctaaagtagtgcttttccagtttcactgtaattcactgtaatgtaatgtagtgcattccttctttgtttcacatcacaactcccgcaccttatcgtgtgcttgcagttgatgctccttattgatggatacctttgttccaccacgttctaatatttgatttctt

SEQ ID NO: 165527 - DNA, 425 bp, Zea mays
  Clone ID: MRT4577_82545C.1
tcgcgatctagaactagcggacgcgtggggagactgggcaatgtaaggctgcagtctgtacatgctatcatattttcctacatccactcatgttcgacttttctctgagctttaaaacagctgcgtattgatagacatgcctgtttcccttcatttacagaccctgtacttccccgaaaactatacgagaaaattatacctggtctatgtttctacctacgtccctataacagcaattcatctatcgactgctgctgttggtctccttccaagcctggatcttctttcccgactctaagcacttttacgcctatgctttcttcggctcggtcaagctgctcctgcaattcatcctccttgtacaccaagacgtgcctgaggactatttttgtctgcctctccaaaacttttttcctttttggtat

SEQ ID NO: 165528 - DNA, 1452 bp, Zea mays
  unsure (1)..(1452): unsure at all n locations
  Clone ID: MRT4577_82546C.1
cattgggtacctcgagtcgggacgggccccaagtcagtgccgcggaccgcgagggttttaagagaaggcggcggcgccgttcactagggtttttcctgatctcgcctcctcctacttcccgagccacacacgctgccgccgtgagccgccgcccacaaggcttagcaccaaccatggccttcggagctctcgtcacgtcgaggctggtcaggtccggccacacccttgcatctgccgttgcccagggtcccgttgcccagcggatagcacctcctctgctctccaggcttggagcagtagctcgtcttctcagcacaaagccagccgcaacagatgtcatcggtatcgatctaggcacaacgaattcctgcgtctccgtcatggaaggaaagacaccacgggtgattgaaaatgcagaaggcgcgaggacgacaccctccattgttgccaagaatcagaatggtgacctgttgattggtatcacagcgagccggcaggcagtaaccaatgcccagaacacaatccgtgggtcaaagcgtctgatcggtaggacttttgatgacccacagacccagaaggagatgaagatggtgccttacaagattgtcaaggcgccgaatggtgatgcctgggtcgagatgggtggccagcagtactcccctagtcagattggtgcatttgttctcactaagatgaaggaaactgcagaggcttaccttggcaagacagtctctaaggctgttattactgtcccagcttattttaatgatgctcaacgccaggctaccaaggatgctggtaggattgctggactggaagttatgaggattatcaatgagcccactgctgcagctttgtcttatggaatgaacaacaaggagggccttattgcagtgtttgacctgggtggtggcacatttgatgtgtcaatccttgagatatcaaatggggttttcgaggtcaaggcaaccaatggtgatactttccttggtggtgaggattttgatggtgcactgcttgaatatctggttagcgagttcaagaagtcagacaacattgatctgagcaaggacaagttagcactgcaaaggctcagggaagctgctgagaaggccaaggttgagctttcgtccactatgcagactgaaatcaacctcccatttatcactgctgatgcatctggtgcaaagcacttcaacattaccttgaccagatctaagtttgagtctcttgtgagcaatctcattgagaggactcgcatcccttgtgtgaactgcctcaaggatgctggcatctctgctaaggagattgatgaggtcctactggttggtggtatgactagagtaccaangtccaggaggttgtttctcagatattcaacaagccactaagcaagggtgtcaatccttgatgaggctgttgccatgngagctgcaatccagggtggcattt

SEQ ID NO: 165529 - DNA, 360 bp, Zea mays
  Clone ID: MRT4577_82547C.1
gagctcactagtttttttggccgccctttttttttttttttttttggtttttgttaagaagcccgtggtaacgaaaaatgcttgttcgccagaaatagtgattggcatgggaaaagcaccggatggagactacatgaaaatatcaactttaacatgtccacatatattattagcatattgactacctatagaccaaacgcgttcctaaatagatgcttggtgaacatgaaagctgacaacatccaattgggtccatacgagattttgaccaaccaaatcttagtaccggtcattcccgtacagtctccgtaaatgttctgatgggtcacactttatcacaccatcttgatgacgaagttc

SEQ ID NO: 165530 - DNA, 981 bp, Zea mays
  unsure (1)..(981): unsure at all n locations
  Clone ID: MRT4577_82548C.1
attgggacctcgagccggcaagcctcgctgtcggccgtggctgctgctgcacgcgctcttctgcgccacatccatggccgtcggcttccgcttctcccgcctcatcgtcttcctcctcttcctgcccaccccgcccatcaaccccgccgcgcacctcgtctcgctcgtgtcctcgcccgccgtggcgctcgcgggggccaacgccacggccacgatcaccacgaccaccaccaccaccaccaccgtcaccaccaccaccaccaccgtggccgccgacatcggcggcgcccacccgcaccaccaccaccaccgccacggccccgtcttcgtcggccgccacccgatccgcgtccgcgcctggccccacccggaccccagcgagctcctcaaggcgcaccgcatcctcgccgccgtccagaacgcgcagcgcagcaccaagcgccgcggcgcgggacccgcgaggcccgtcatcgccgtcaccccgaccaccacctccgcgctccaggtgccgtcgctcacgtctctggcgcataccctccgcctcgttgacgcccagctcgtgtggatcgtcgtcgagccgggcaaccgcacagacgccgtcgccgcggtgctctcccgctccaacctcgacttcctccacatcaccggtcctggcgactccaccgcgagcctgcgaatccacgccctcagggagattcggacgaagcggatggacggcatcgtggtgttcgccgacgagaccgtgctgccggcgaaccggagcgacatgctgatggccagcaggctggagtggtccggcttcgtggtgaacgcgcgggcgctgtgggaggacgccaaggagcggccggtgtgggtgcgcgatctcagcgccatcgacgacgccgacccccgcgccgncagcccnctcgcgctcgtcaccgacgctggccgcgtcgagccgctcgccagctgcgtccaggcggctctcgcgtggtcctcgct

SEQ ID NO: 165531 - DNA, 576 bp, Zea mays
  Clone ID: MRT4577_82549C.1
ctcgaggccggccggactgctccatcccgcgccgcgcgggcaggcgctgccctttgccaaattcccaggggccatcgcccatccccttccccaccaggccagaggccaccgcttgccctttcttccctgccggctgccgcgctcctaataattgcatcgccgccccatgtccgccctgcttattcttgtggctagcctcgctgcttagtgcttatatcaccattcaccagctagcaccaccaccaccaccgccacggccccgtcttcgtcggccgccacccgatccgcgtccgcccctggccccacccggaccccagcgagctcctcaaggcgcaccgcatcctcgccgccgtccagaacgcgcagcgcagcaccaagcgccgcggcgcgggacccgcgaggcccgtcatcgccgtcaccccgaccaccacctccgcgctccaggtgccgtcgctcacgtctctggcgcataccctccgcctcgttgacgcccagctcgtgtggatcgtcgtcgagccgggcaatcgcacagacgccgtcgccgcggtgttctcccgctccaacctcgacttcctc

SEQ ID NO: 165532 - DNA, 423 bp, Zea mays
  Clone ID: MRT4577_8254C.1
gagcggccgctccaaacatttttcttccaaaccaaaaagaaaaaaaccaggggggggttttatttaaaattgccgggggttaccaaaacacaaaaaggaaccagggagcacacaggaagttacacaagactggggaaaaaaaggacacgggatagaaaccttcatgagcactgctaccagcaatgcgcacatagcacggccctggaataatacaggggaccaccacaagcaccagcagcaggcaacccggaggccaaagaggagagcaccccagacaaacacctgagccgcagcaagcctaacaactcgaacccagaaaggggagcaagaaacgtaaaccaggccagccctcacaaaaaaagccacaaacgaagggtctccacctactgtccacaaagggcccactaaaaaccaggcccaaca

SEQ ID NO: 165533 - DNA, 203 bp, Zea mays
  Clone ID: MRT4577_82550C.1
tgagacgtattatctcgaatctccacttaactcatacgcacctctctccggccatcctcgctgccgtctccatctccttcggccactaggctacgaaccccttcgggaccagggaccgtatgccgtatctctggcacgtcttctcgccgcctcgggcacctctcgtaatatcaatctccctgcacctggaacgccgctccagc

SEQ ID NO: 165534 - DNA, 963 bp, Zea mays
  Clone ID: MRT4577_82551C.1
ccggccgggactgctcctcgccgcgccgcgcgggcaggcgctgcccattgccaaattcccaggggccatcgcccatccccttccccaccaggccagaggccaccgcttgccctttcttccctgccggctgccgcgctcctaataattgcatcgccgccccatgtccgccctgcttattcttgtggctagcctcgctgcttagtgcttatatcaccattcaccagctagcttctcaccaccgccaccgccaccgccggctcctgctgccaccgcccgctggctggcttagcgcgtaggctgtgactgactgactgactgactgcgagaccacagcaccggaggacgcccgcgcgcgcgaaccgcagcgcagaggcaggggaaccttgtccgcggctcggccggcatgaagctcccgctgctgcgtccgctgtggccgggcctggggcctgcggcggcggggccgcccgacgcggcgccggagccggccaagccctcgctgccggccacgtggctgctgctgcacgcgctcttctgcgccacatccatggccgtcggcttccgcttctcccgcctcatcgtcttcctcctcttcctgcccaccccgcccatcaaccccgccgcgcacctcgtctcgctcgtgtcctcgcccgccgtggcgctcgcgggggccaacgccacggccacgatcaccacgaccaccaccaccaccaccaccgtcaccaccaccaccaccaccgtggccgccgacatcggcggtgcccacccgcaccaccaccaccacgccacgggcccgtcttcgtcggccgccacccgatccgcgtccgcgcctggccccacccggaaccccgtgagctcctcaaggggcaccgcatcctcgccgccgtccagaacgcgcagcgcagcaccaagcgccctggcgcgtgacccgcgaggcccgtcatcgccgtcaacccgaacaccacc

SEQ ID NO: 165535 - DNA, 1520 bp, Zea mays
  Clone ID: MRT4577_82552C.1
attgccaattccaggggccatcgcccatccccttccccaccaggccagaggccaccgcttgccctttcttccctgccggctgccgcgctcctaataattgcatcgccgccccatgtccgccctgcttattcctgtggctagccgatcccgtctgccacctcgctgcttagtgcttatatcaccattcaccagctagcttctcaccaccgccaccgccaccgccggctcctgctgccaccgcccgctggctggcttagcgcgtaggctgtgactgactgactgactgcgaggccacagcaccggaggacgcccgcgcgcgcgaaccgcagcgcagaggcaggggaacctcgtccacggctcggccggcatgaagctcccgctgctgcgtccgctgtggccgggcctggggcctgcggcggcggggccgcccgacgcggcgccggagccggccaagccctcgctgccggccacgtggctgctgctgcacgcgctcttctgcgccacatccatggccgtcggcttccgcttctcccgcctcatcgtcttcctcctcttcctgcccaccccgcccatcaaccccgccgcgcacctcgtctcgctcgtgtcctcgcccgccgtggcgctcgcgggggccaacgccacggccacgatcaccacgaccaccaccaccaccaccaccgtcaccaccaccaccaccaccgtggccgccgacatcggcggcgcccacccgcaccagcaccagcaccgccacggccccgtcttcgtcggccgccacccgatccgcgtccgcgcctggccccacccggaccccagcgagctcctcaaggcgcaccgcatcctcgccgccgtccagaacgcgcagcgcagcaccaagcgccgcggcgcgggacccgcgaggcccgtcatcgccgtcaccccgaccaccacctccgcgctccaggtgccgtcgctcacgtctctggcgcataccctccgcctcgttgacgcccagctcgtgtggatcgtcgtcgagccgggcaaccgcacagacgccgtcgccgcggtgctctcccgctccaacctcgacttcctccacatcaccggtcctggcgactccaccgcgagcctgcgaatccacgccctcagggagattcggacgaagcggatggacggcatcgtggtgttcgccgacgagaacagcatcctccgcaccgagctgttcgacgaggcgcagaaggtgaccaccgtgggcgccgtgcccgtcggcatcctgggcgaggacgacggcgccagcgagtccttcctacaggcgccgtcgtgcgacgcggaagggaatctggtgggctaccgcgtctcggaggagaccgtgctgccggcgaaccggagcgacatgctgatggccagcaggctggagtggtccggcttcgtggtgaacgcgcgggcgctgtgggaggacgccaaggagcggccggtgtgggtgcgcgatctcgacgacgccgacccccgcgccgccagccccctcgcgctcgtcaccgacgctg

SEQ ID NO: 165536 - DNA, 478 bp, Zea mays
  unsure (1)..(478): unsure at all n locations
  Clone ID: MRT4577_82553C.1
agcggcncnngcccctatctgtttgtttctatttcactactaagagactccactcggtactcatgatctgttatgaatactaaggtcattccgcatggtaaatcgggaaggacacagatgctaccacacagaggacatttctgataacacttctactgcagaacgctactactgactctcggcatacttattggagatgcgctacgttgtatttcttggggctgaacgcttactatctggactgaagggaccaacacagcatactccagggcatcttcactagagactgtctctgaaaactgctatacagaggctgcgcaggtgcaagcagttcagcagactgaggttagcgtatcctatattaaaagaaacactccgcctggagaatgcgtctccagatttcaggtgctccttccgggaaaacgcctgacagcggcaataatgtaagccatatgcagcttctaaatgtctgtcgaat

SEQ ID NO: 165537 - DNA, 368 bp, Zea mays
  Clone ID: MRT4577_82554C.1
cacccctgcccacggcccgcgtaagtaaaacccaagggcaccaccatgcaccgcacgcgagcacacatacacactcaccagcaggcagcagcagctagccaagctataccactagaaccagagcacaactcaaagcaatggcgccggctcctgctcctccgccccactcccacgcttcccatcccgcgccgcatgggcgcgagcagcactagcgcgggggcacacaggagggtgatgcgggtcgggggcgcgacgatggaccggggcgggtcggtggtgatggacgcgggcgcctcggagctgggcctgctcggcggcagatctagcaggctgctcaagcacgggcgggggcccaatgcggcgggggg

SEQ ID NO: 165538 - DNA, 495 bp, Zea mays
  Clone ID: MRT4577_82555C.1
gaggatgggggtagcctacacatcaggagctggcggaggcgccgctcgccggggagtacggaggaacagcgcaaccgcttcctggcgctgcggttgtaccaggcactcggctcctgcgacaatgcgccgggctcggaagctgctggcgcccgatctcgagtggtggtttcactgccctcccacacgccaacacatgatgcgcctccttaccggtgcggaccacacatgcaacatgagtcctagaggcggatgaacgttaagacttctccccgggctccgcatgactccttaagaatccaccattactcgcggagggcggcgctgacgaagcgcgccaactctactgcgtgcacgccatggaccggccgcccgacggggtcattaccacatcttaggactacttgaacacctacctaaccggcaccctactcatcggcactgacttcgccaagaaagctgcttcgactaagaagcagcaagacgctgcctattgtt

SEQ ID NO: 165539 - DNA, 405 bp, Zea mays
  Clone ID: MRT4577_82556C.1
ggttaaaaaactttagggcccccaatctaaacccattcactaccaacctacccttcttacaaaaacaaaatttaccttcttccttttttttaaccctttttccaatttcaaaattaaatcaaacttttggcctcaaacaccccctcaactttattcaaatttacccttaggtccccttgtgacaacctgccctccattgtatgggtcccacatcacccttcttatttaaacacaatttttgttttgggactccatggaaaaaattcccttgttactccacctggggtatttgcccttaaaccttcgaaggaaaccttgtgtgaagtgcttgtaacccccattttcctttttatgccacctttttgtattttaatatcccaaacaataaattattccctttttaac

SEQ ID NO: 165540 - DNA, 633 bp, Zea mays
  Clone ID: MRT4577_82557C.1
ttttttttttttttttttttttttggacacaaacttgacgctatatatatattcttagaattgtaccttgggcaaatgatatttttcagccctcgacgacagctcctgataatctgatatcatcgcaataccttattacacaatgggcctcccttcaaaacaaatcaaattattaccatactaattgtcgctagctagctagctttccattggtatccgagtccgagtcgatcgtcaggctccaaatctgaggagcgcatccagctcccagctatcgaaatccatcggtgcaaacgcagcgacgtcgaacggctcacgcatgtccagctcttcttccgcagactcgtcgtcgtcgacgatgggtttactgtcatgtggcaggaatgcctgatcgatgatctgatggccgccaccacgagcatccgcacagcaggtgatgctcgacatgctgctgctggactggctgtcgctgctgcttctggtttttattggttcagagtcatcatcgtcgacaggccggctcgaattagcgccgccgccatcgtcgttatggtccttattgctgttacagctatgctggccgtagtagactaccgtgtacatgagggcggcggtgccgctgctgctgctgct

SEQ ID NO: 165541 - DNA, 472 bp, Zea mays
  Clone ID: MRT4577_82558C.1
aaaagacccaagtcttcacagaaggaagtaagatgggaaacactgggaaccacgtacaaaaacagggacaggggtcacagatccccaatggatcgaaggaaaaacccctaaggaggaaagggcacaaagctcaactgacaaaaagctggtgggcaacactattaaaagacttttaagaggcgggagccccctccgggagctgcttcaccttggggaaggaggcattcatcgcctcaaccttcgattggccttaaacagccttccaggcatcccacttggccctggccttttgggaaaaaatgcccggacgaacgggattcacatctccaaccggggcttgcttggaaagcccgtataggaacagcttggtctcattgcccggggtctcaggcaagggctttgccttctcagcaggcccctcaaattccccccgcaaacccacggcttggtttcaggaatgttttccttcggc

SEQ ID NO: 165542 - DNA, 238 bp, Zea mays
  Clone ID: MRT4577_82559C.1
aggataatttcaacggtgaacctcgatggtggcgaagagtcctgattctgtggacttgaattagattagacatcgcatggtcattcacatggcagtctcctgatctcaggatcagcacgggtcaatgtgggcaccgctggctagtgtcagtgaccagtgaacacgcggactctattgtcatacagttcctacatgcatacgcatctagctgagcttgacttggtagtgaatgtagtct

SEQ ID NO: 165543 - DNA, 558 bp, Zea mays
  Clone ID: MRT4577_8255C.1
gcgggttatcatgcagattcatatgagaagaagagagatcgttttcgcagtggaattaacaccaagcttcgtgagcgcctcaacactgttcgtgctgacagcttcaatgaattggtcaaccttgccatatcacaggaagactgtattatagctcaccgggcagaaaagaagaggaaggcaccaatgtcaacaacttaagctccaccccagaggtttcggattgtctcccacaatcagagcagggaattccagcagcaggcaggaagatgggccatcaggccatcgcagcagcatcaagcacccatccatttccctgctcccgctacaaggaacaatcaacctcagcagcagcagcagttccgccaaggggatggaaaataggcacttgttcagcctatccgtcttcaggtggatccaccagcatcacctcatggagtaacctgcccgttacaccatcttggggtcgacttgggtcgtattccgcatcacgagatcatctaacgtacctagttgaaatgtgcaatgcatatgtaggagcataagggggaatatcaagac

SEQ ID NO: 165544 - DNA, 191 bp, Zea mays
  Clone ID: MRT4577_82560C.1
ggcaaacttgcatgcaatgaatagtggggtggttagggtatttatagccccaaccaccaaaagctgccgttgtgaagctgtctgctcgatggagcaccggacagtccggtgcacaccggacagacatctgcaccttgcaacgacatcactgccgatggattctgaccgatagagcttctcacatgtgggcc

SEQ ID NO: 165545 - DNA, 596 bp, Zea mays
  unsure (1)..(596): unsure at all n locations
  Clone ID: MRT4577_82561C.1
cttagaacaaattttttcccggagtgccatttcccaaaggtactcacagaacaatcaggtgtgaccataatggctgcactgagttgtctcttggacagtgtcagaagggacataaagaaggtggacagagaactaaggcaactgagatgcatcgacgaatttagcacacggtgcctgtgcgacttgtatatgcacccctattgctgctgtgacttgcacccatatccgtactgcttgtgctattccaagcgatcacgctcttgcggcctgtgtgatctctacccatgttgcctgtgtgattataagctttactgtctgcgaccatctctcagaagtttggagaggaaagccatcagagccatagaagatgagaagcgagagcttgccaaactgagaagaacaacaaatagaattctggcttcctcctgctgtagcagtaacattttaggatcggtgaatgtatgcggttttgaacccgatcaagtcaaagttcgagtgaaggatggaaagaggaaactgctttaaaacaggattaacgacggacaaacaagattactatggatgtgattntgaagctacaaaacaattttgaactc

SEQ ID NO: 165546 - DNA, 1609 bp, Zea mays
  Clone ID: MRT4577_82562C.1
ctaaaagcacttgaagaagagatgcagtcttttgtcacctcaaagggcaaggttgccggaggacttcaagagcatgtaagaaagctcaaagagagctttaattctaggatagcagaattgcatggttttgcaaatgaactcaagcataaatctatgttgagctttgaaaaccttaattcgcaagttaccacacacacatctagccttgaggattgcatgaaggacctattggttgatgccgatgaactactcattgcactacaaaatgggctttctcagcatgaagtgaactttgctacgtttattgagcaacagcatgaggggctctctagaaatttagagggaataaagtttgtttcggcaactacaatgaacttcttcagaactatagattcacatgcattgggactcctaaagattttggaagaatcaaagatggaacatcaaaagcaactcttccagcttcagaagaagtttgaggccgttgttgctgacgaagagaagtacttgatggagaaggttgcagggttgtttgcagaatcaaacgctcgaaagaaaaatatggttcaagatgacatatgcagcctcaataggactgtttctgagagttcgaacaatttacaaaccgaaactaccaagctgcatgattttacatcttctatgaaagagcaatgggaaggctacatgaagaaaactgaagaggcattccagcaaaatgtatcatctattgaacagaaaagaggcttcttggcagggaattttcagcagtgcaaggaaaaggtagaatcatgctcagaacaatggattactgcacaaaatttggtgttggcacttggaagaaggaatgcagaagccatcggtttggttataagtgatgggaatgaggtgagcaaccaactgggtgcaagaatttcatctgctgttgctgctggatttgaagataatgacatttcaagcaaatcccttctaagttgtattgacgattcattgaagttggaccatggtattcgcgagaatgtgaaatccatcgtcatgacatccagagcacaacttcatgacttggaacatggtcactatgagatgacaaaagcaataacagggaatgccgataggtctctgggagaagattataaggtggatgaagcaacttgttcaacaccgagaaggcgtgagataaacattccggacagccaatcgatcattgagttggtaacccccctagaagatatcgtgaagtcattttgggacagcagaacaccgacgaagcctgctctaaatgcaaaagggaagcagcagttggtagggtcgacgacccctgaaacacaaagagcccctctttccgcaataaattaggagtttcattactgtatatactacaaacattcttgtgtggtcaagtaatgttgatcaagaatgttgagagaagttactggtaaaggagagctgtgtattctccagattcatccaatgtatgaacggaatcatacatccaatgtattttggagtggagtgcaactccaaaatacagagcaaatcgagcatgaccatttgtcaagttccgtgaaatgaactcatttatttgtatctatgctgttgtgcacttgttttt

SEQ ID NO: 165547 - DNA, 152 bp, Zea mays
  Clone ID: MRT4577_82563C.1
agcggccgtccttattatatcatcctgtataatttttttggacggtggaggcaccaccaccggtcatgccctttatctcttttctgaaacatttaggtacaaaaaacatccttcccatacaaaataattagttaagacggaggggtgggggg

SEQ ID NO: 165548 - DNA, 335 bp, Zea mays
  Clone ID: MRT4577_82564C.1
cactaatgccagagaccacagttggcactaatggtacaaatactacacatgactgagtctagtttcaagctcttaacacagctgcgcaagagactataacaatcaccttcttactcgcgcagaacatcgttactggcaaaccatgaactgcttgtagatgaaagagccacaacattttcgcaagaagggacagagcctgcggtcaggcagcaaaagagatacatgatcctgatcacatcttcatgggctcatggcatattgagccgagaccgcagcctgcttgcgatgcagtcagggcttcgttcaacgtacttcctcttcgttgacgctggctt

SEQ ID NO: 165549 - DNA, 525 bp, Zea mays
  Clone ID: MRT4577_82565C.1
cccctcgagttttttttttttttttttttttttttttttttttttttttttttttttttttttttttttttttttttttttttttggctttttttaaaaaaaactgggtttggagggggtttgtttcccctgggaaaaaaaataaaccacccccctttttttcccggaaaaaaaatgggagggggggggggggtaaactttaaaccctttgggtgggggatacccgccccctttgacgggggattcccctttccggcaaaaggaaacaacccaagggggttattcccaaggggggggaaataccccccaaaaacccccaaattttggcccaaaaaaagggggggcggaaaatggccattaacccccccaataaagggggcccccccctaaggggacaagggggtaaccaaaaaaggccagaaccctcttttggggtcccgggcaaagttgggggcacccaaaaaaccgggggcccgggcaaaaaaacccttgggggggaaattatccaaaggaaatcccccaaaa

SEQ ID NO: 165550 - DNA, 282 bp, Zea mays
  unsure (1)..(282): unsure at all n locations
  Clone ID: MRT4577_82566C.1
ctatttttctaaaaaaaccgnaacgnatatgatattcagtaaactttttgcgggcccacaacccggnttgccaaccatgttccaccattccagagtttccaatcgaatcccgtgtctggttcgcgcgatatgcggaagatcagtcctacccccatcaccaacaaacagtaaataatgtaggttattatgaaacatcatctaccaatgtaagccccgatgctaaagtacctgtacttcattcaatatgcagcttcccatgccgaggtgtgccttttttaactc

SEQ ID NO: 165551 - DNA, 642 bp, Zea mays
  Clone ID: MRT4577_82567C.1
ggggggggaccaagaaaaaaatacccaaccccccgaaaaaaattttttaagggaaaacctttggaaaaaaaaaaaccccaggggggggcccccccccgaaaccaaaaaaaccaaaaaaaaaccaaaaccccccggggctggttaaaaccccggaacaaaccggaaagaaaccgaattttaataaaaccccccggtttgaaaaacaaaaaagggcccccttgggagaaaaaccaaggggcccgggaaaatcccctacccaaaaaaacctttttttttgggggaaaaaaaaaaaaggggaagggggccctccccctaaccggatttggccggaggaaaaaacaaccctggggaccgggaaccagccaaaaaccccgatgggcccggcaaggggaaaaagggcccccggggcatgggccttgaacccgaaaaaaaaaaaaggggaaaaaaacggggggaaccaaaccttgggaaaaaaaaaaagggtcccacccaaaaagggggggggggcgggggccccaaaggtcagccccaccccccaccccacagggaatctccggggggaggcgggggggaccctgggaaaccgcgaaccccccccgggggggggggggggggggcccccccccccagccccccccgccg

SEQ ID NO: 165552 - DNA, 408 bp, Zea mays
  Clone ID: MRT4577_82568C.1
ggggttcaaaggggggctggttggcccgaaccggcccagcctatcgggaaagatccccggggggctccaacaatccccccccaacacagggggggggcccccccccccccaaaatctttcaagaggcccggggcgggggcctcggcccatttcttcaaaattatcattaatttatgagggtcatggaaccctagccccaggaaaaggccgggcccgtttggtttcatccccccggggggagcccccttttgaccatcccatcactgagccaggggatctgggccttgagccccttaacaaccccccccttttgccccccgagggtggggagcccccttaccaactcggcccccacaccggtggcccccctgtccaacttggcccccaactccccgggggtctcctttt

SEQ ID NO: 165553 - DNA, 376 bp, Zea mays
  Clone ID: MRT4577_82569C.1
taggagatgaaagatttatccaactactccataatattaggagataaactgctaagacttatccaactaaactgattacttatctcttgcgcctactttggttgggcctagtcgccttctggtagaccaggccggttataacagggttggcctgagaattcatttttccaatagctggccataactgttcaatgctggacagttttacacgatgtacagtagttataatgcactaaagtacagccacaccacacatgttgtagcagcaccatcgacaactaacttttactttggatgtttggtcatctgtttgaccattgcaatggtttgatcttcaaactagaaatatttacattgggcatgcaggtccgagttg

SEQ ID NO: 165554 - DNA, 297 bp, Zea mays
  Clone ID: MRT4577_8256C.1
ccttgaggtgttcttagatttcgagctaagctgcacgtacgtgcccctctgcgtgtgggcgtacgccatgaacggcacgagcaagaagagcaggggcacgccgctgctgggcaagtacgagctcgggcgtctgctcggccgcggcacgttcgccaaggtctatctcgcgcacacggttaccggcggcgagccggtggcggtgaaggtgatcgacaaggcggaggtgatgggcacggagggcatggcgcctcgcgtgctccaggaggtggaggccatgcgccggcttcgccacccggg

SEQ ID NO: 165555 - DNA, 545 bp, Zea mays
  Clone ID: MRT4577_82570C.1
cattgggtacctcgaggccggccgggaacagcctaatcgcatggccgtggtgccgtagcctttcttcactccgacgaccgtgtcgcgtgcacctcgccaagctccgcatcgaccgcggatatcgcgctgctgccttctaccgctgcctgggccggcgacgaaaggcgaaagcgccggtagcctcctcccggtctcctccgggtgtgagaggagagtcctcggactgccgccgtttgcacacgacgacgaacgccccgcggagtctgccgaggcccccgcagctcgggcattctactgatggtgtcatgctgcgccgtgtcggtggagctggaaatacgcgcaggacaaacggcctcgacggtgcgcatccgtcaggcggatgtggggcggagcagctagcagtacgtgttccgcaccgacgacgccgccccggccatggatcccccctcagcgagggtgtcgagtgcgcgttctcgcccgacgtccgcgtgaggtctgctccaactgctccaacggcaccaggactcacgtcgttgccatccacg

SEQ ID NO: 165556 - DNA, 236 bp, Zea mays
  Clone ID: MRT4577_82571C.1
gtataaagtaacttccatgaaaaggtttatatggtctctggaagatgtaatccacagcaagctgctctttgcaaagttgcaagccaacttaggattagctcctttaatgcctccctttttttgcattctgaaaagttcatgcttgagaggtgttttgctgtgattttttttcttctttttgcacgtagtccaaatttgagttataatccaaacttacccaaacgataccgtcaaca

SEQ ID NO: 165557 - DNA, 374 bp, Zea mays
  Clone ID: MRT4577_82572C.1
gaactcaagcatggggaaaaattcagaatttagacaacatacaattttacattttcattatgtgtcaacaagactgtaccactagactagacaaaagacattgtacattctgttcctaggtgagtaagagtttatccacttttacatgcactttcctgccatgaaaagaaacaaccagaactagtcgcagtcaaccaccaaaaggctagcactgctgctctagcagcacaagtgcagcatgtcaacatgccaacaaaaggctagcagcatccaaaaggctacgactcctatctcccttagaagttctaagttagaacctgtcaacatccaaaaggctaaaagcatgccaccaaaaccaaaaggctagcacatat

SEQ ID NO: 165558 - DNA, 819 bp, Zea mays
  Clone ID: MRT4577_82573C.1
ccggggaaggcgtgtcaaaaagattctcccgcatggtttatcttgtttcaaccttattgaggttgtaacaactgaagaacagttcagggctgaaggcaaaaaacttgcagctcatctagcagagccagatgttgagggaatatacgagacaaaaattccaccagagctcaatgctgttctccaaatcggatgtgtctgcaaagtggacaagtctgcaaaaagacgaagtatacaagatggatgggatctagccgagttgcaaatgaaaacaaccgccgagtgctcatacctggaacagacattttcatttttctatttataccacagcttgagtgaaggaagggctgtatatgtattttacttccccacgtctttccgaatacatgcagtgattgtcaatcctttccgtaacaaagaaatatctccgtcatttcttgaaaagcaatttagagatgcttgccaagcccttggttctgtccctgagaatctgtctttccatgtgggctaccaaacatcaattgatgctggaagcaaatacgcacaaagaatgttacttgagtacaggcaacaacattctggacctgtcgtaggcatcatagagtgccctaagctccaagctataaaggtagctatacgagcacttgatgatttgccatgtgtaaccattcctagcaatgcacgtgacaacaactatcaggctcttggctggcaagcaacagctggccgaacaagtatgcagcgttgtgctgcatcaacccaatggttcaatgaacggatttcactcgctaaatatgcacatgtgccactgggtaattttga

SEQ ID NO: 165559 - DNA, 270 bp, Zea mays
  Clone ID: MRT4577_82574C.1
agcacacccggttagcgtccactaatccgcgaaagcatgactgctccaccacgggtcaccggacatccggcttcctcgccccgtcccccgcacgcaggccgccccttaggctcctttgtcattcgaccttcctcttaagcacagcacaagcagctacaaggttctgacctacaagttccaatgacaatctgcagtagtgaagaaatcattgatgagtttgagttgctaacgcgtgatgctaggcgcgtgcagcaggatacactgagaaag

SEQ ID NO: 165560 - DNA, 355 bp, Zea mays
  Clone ID: MRT4577_82575C.1
gcggcgcattccatcttgatcggctgcatctacctctaagactcgttatccagataaccggttggctttaacaaatggcagacgagacttggaaaaatgagagtatactggagtgctacactcataaataatgcgggtcaccaactccatgttatctgaactttccacaggaattccccctatctatagctgccgatgccgtactcgtggtctatcggacattgagagcgactaggcgtacaagctccactactagtgcatacaccgcgatggcacagtctaatcagagcccgaatcgtacttagcgactaactcttagagctcaggggttgaatctacctgcgcttatggttct

SEQ ID NO: 165561 - DNA, 1033 bp, Zea mays
  unsure (1)..(1033): unsure at all n locations
  Clone ID: MRT4577_82576C.1
tgattctgataagaacagaacaatgcccggaaaacttcctaaccgggcttttgataagcctccaggagctgagcaaaagcgcaaagaaaccattttctacttttcactctacacctaagaagaaaatgcagggtaatgtgtttaccttcaatgagaaacgcgcacctaaaacggtggatcaggacaaaatgaatcaaactactgagtcgcctggtagtgagtctcctggttctgcagaagaaagagaaaacagtaaacaaccatctcattcacccctttctccaactgaagatgaagggactcaagggagtaaaagttccgaacaaagctttgcaaaaggatataaatctcaaaaatggattccagatatcaagggcacagataaatctccccttgagtatgttggcaggaaaacaaaactaaaagaggatagaatgaacaaaagatacttatcttcacctactccttttgccacttctggaacacaagaaactatagtttctgacaaagatcaagaacaatgcccagaaaactacctaactagggcttttgatcaattgatagtggttctgggaaggtttcaaactaagatcaagtctgaaacaagcaagaaaagttctgagattcttgcagctactagagagactatatgtcagcaccttgagggggttgaggcgcagatgcaggctgacgtggacaaattggtcaatgcaggcaggtctaaaaggaaacgcctagaatctacatttgaagatcaacaagaaaagttaagaattcttcatgagaagttcaaggaggaggtcaacaagcagcttctgaattgcaggagttctcttgaggattttgaatcctaccatgcagaacttaagggagtagctgacaagcaaaaatcatcccacaagaagctcctagcaaatgccgagaaaacagtaggcgctcagctcaacgatgcagaaaccaaaatcgcagaggtccagaagagagcacgggagaggatgaatggcctgnaatacttgctcaaggagctgatcac

SEQ ID NO: 165562 - DNA, 2046 bp, Zea mays
  Clone ID: MRT4577_82577C.1
gatcattacaaacgagctccctacaaagtatacagactaaaaaaaatagaaaaggaattccgcataaacccctcccagccaaaaaaaaccacccccgccgcggccgccgagcgagcggtaagcagccgccgcaccacgagagcgggatggcgtcggctccggagccggagaacgggagggaactctacgcgctgctccacctctcgccggacgcctccagcgaggaagtccgcagggcgtaccgccagtttgcgcaaatctaccaccccgataaataccaggacccgcagatgaaggatgtagcaactgaaaacttccaacgaatatgtgaagcttatgagatactatcagatgagaacaaaagacaggtgtatgacatctatggtatggaaggtttaaattctggcctggaacttggtcccaagctaactaaaccagaagaaatcaaggaacagttagaacgactgcggcggcgcaaggaggaagaaaaacttttcaagcatgctctacccaatggctcaatcattgctaatttctcagtgccacaatatttaaatgacgggagcatcatgagaggaatggcgatgcttagtcaagttgagttgccagtgtccaagcaaaatactgtcgttgttggtgggaatttgattgtaaatggctcagctggatctggagcagcaaccactgtgctgcgacaccagttgtctcctgtttcctctattgagtttatggccacagctggactacgttctgttattggtgggcagatgtttcgtcaaatttcaccacattctacagcaacttctggacttgctgtttctttgagagatgggtctatcaacttgtcaaatgcctggactcgccaattgtctgacaatactgttggaaatatacagctagtccttggcgatgaatcaagtatttctgttggatggcaaaagaaggatgaaaaacgtactgcaactggagaagtaaagtttggaactaatttttttggcgcatctgctcattatacacatcgcttctcctccaaatctcatgcacgcatcgctggtagagttggaagcacaatccttgattttgaaattggaggagggaggaaaatatcagaatttagtactgtaaggatgatgtataacataggaattcagggcgtatcttggaagtttgagttacatcgtgctggtcaaaagttaatcatcccagtcttgctttcaactgatttaaatccattatttgttaccagtgcatttgctattccttcaacactgtattttctacttcagacatatgttgtaaagccttactaccttaagcgagaaaagcagaaaacactagaaaagatggaaggcttatctacacagctaactgaagccagaaaggcagctgaaaaagctcaaaaattactggaacctgtctccaaccgtaagaagaatagacagctagagaacaacggattggtgataacaaaggctctatatggcagtcgccaaaaaatcaaaatgagcagtgaattgaatgatatacacaatgacatggcttcacaagtatttgatgtgaccctcccactgaacttcctcgttactgaggctggccagctcaagcttcatgacgggataaagaagtctggaatcatgggtttctacgatccttgtcctggagacccgaagctattacttgtcgagtatacgtttcatggtcataaatacaaggtcatggtggatgactatgaggcgctgttgataccacaagatatccatcaattttgaacggttcctgatgtaaaagccacatcaaaacgattttgggtcatcagctccctttcctcacattttttgttccttttgtgttgagctatctctgttttcggtcattccttaatgcgcctcgtatttgtatacacatgtcggtttgtgccacctcgaggtcatacacaccaacagcaggtaataaagctgtagccagtagttttccagaaaaaaaaaaaaaaaaaaaaaaaaaaaaaaaaaaaaaaaaaaaaaaaaaaaaaaaaaaaaaaaaaaaaaa

SEQ ID NO: 165563 - DNA, 492 bp, Zea mays
  Clone ID: MRT4577_82578C.1
ctaccccctagccgccactttgtttttctccctgtcttcttctcccacacggcagcagcccacaccttcttcctccctgcgcccagccttccccaagctctagcgtgcagggcagcagcgccccttctgctccatggccgagctcccttggagcagacgctcaccagcccaggcgtgggctccattttttccagggccgccgaactccatgtccatggcgtggagcagcagctcccattcctcggcgacatcctcctcgccgtcgtccatggcgcccctgctccttcttcctcgcaccgcagcagccgagctcgccctagcctccatttttccagtcggcctttccccctgcgagcagtttttcccattgtcttcatcctccagccgccatggacgcccaagccagtagcgccttgagctcgcccctgcttctctctctctaccaagcgccccctgcaatcttccccaagttgccttcctcctctccccaac

SEQ ID NO: 165564 - DNA, 364 bp, Zea mays
  Clone ID: MRT4577_82579C.1
gcagctaaagcactgcaatgcatgcatcactgacagctctgatccatacagaacatggccatctggcaggagctccggtttcaggccgcatccaggaaagccgataaaaccgtgtcccgacgcccaagtgacaaggttgcgtcagggaggccttgacaagctgtctcggcaagcttacagatcgatgtagcaaagaaccaagaacaggctagagaacaaggcagaaaattggtgggttgctgatggtttctgttcgattcgtgttttacatgtaacatgttactgcatcaagcacgagctcatggtaatccagagcctttttcagaattcagacgagcatctgcaactcatacatgatgccgct

SEQ ID NO: 165565 - DNA, 317 bp, Zea mays
  Clone ID: MRT4577_8257C.1
ccatcttatacccacgcctaacttccgctgcggtactattcctttgttggggcctccccctaaaagcagagggggctacacccacttaacaaccccaatcttcaatcccatttggcccccccgaaggcaaaggcacgacagtcccacgcaccccgaacaaaacctacaacaccaaacactacgagctcctacgcctgcccaaatcaacttaaccacacgaactcaaaacatcctacctgaaggctgctataaagaaccaccccgacaagagcgataacccatagaagctcaaggagctcacacaagcctatcatgcc

SEQ ID NO: 165566 - DNA, 140 bp, Zea mays
  Clone ID: MRT4577_82580C.1
gccggccgggctgtggtcatatggcaagtataatccatgggtgggatgactatcgcctcctgagacgactccacagcgtcagggcaaggattggcgactcactctctgaccactccagtgagctagacggcgtcttcacg

SEQ ID NO: 165567 - DNA, 1898 bp, Zea mays
  Clone ID: MRT4577_82581C.1
caaggccgcctccggtcttcccacttccacacgagaaggaaacgaccacctcctttcctgtgtcccgaatcgggagtagtagtagtagtgcatccaatcgacacacacacaaaaaaaaaggttagttagccatggcgccgccaacagaggactgcggctggctgctgtacctttccctggccgccaaatgcggcgaccctcagcgcctgctcggcttcgccgcggtcttcgtcgcggcctgcgtagtcacgtcgctcctgcactgggcgtccccgggcggccccgcctgggggtggtactggtggaccaggcgggccgggctgggcatcgtccgtgccgccatcccgggaccccggggcctgccggtggtcggcagcatgggcctgatgaccggcctggcgcaccgcaagctctcggcggcggccgagagacaggccagcaggcgccgcctcatggcgttctcgcttggcgagacccgggtggtggtcaccgccgaccccgacgtcgcgcgggagctgctcgccagcgccgccttcgccgaccgccccgtcaaggagtccgcgtacgggctcctgttccaccgcgccatcggcttcgccccgcacggcgcctactggcgcgcgctccggcgcgtcgcgtccgcgcacctcttctcgccgcgccagatcgcggcctccgcggcgcagcgcgcggccatcgcgcgccagatggtggacgccacgacgaccgccgcggcccacgcccccgtcgtcgtggcgcgccggttcctgaagcgcgcgtcgctgcacaacgtcatgtggtcggtgttcggccgcaggtacgacctgatggcggacagccgggaggccgaggagctcaaggccctggtagacgaaggctacgacctgcttgggcagctcaactggtccgaccacctcccgtggctcgcccgcttcgacctgcagaagacccgggccaggtgctgcgcgctcgtcccgcgggtgaaccgcttcgttggcaacatcatcggcgagcaccgtgcccgcctgggccgcggcggcgacaccgccgtcatggacttcacggacgtcctgctctccctccagggcgacgacaagctctccgacgccgacatgatcgccgttctgtgggagatgatcttccgaggcacggacacggtggcagtcctgatcgagtgggtgctggcccgtctggtgctgcaccaggacgtgcagagcaaggtccaggaggagctggaccgggtggtcgggctgggccaggccgtgacggagtcggacacggcctcgctgccctacctccaggcggtcatcaaggaagtgctacgcctgcacccgccaggcccactgctctcctgggcgcgcctcgccacctcagacgtgtacgtaagcgggtaccttgtgcccgcgggcaccaccgccatggtgaacatgtgggccataacccatgaccccagcctgtggcctgagccgatggagttcaggcccgagaggttcatgggccctgccgcagaggacgtcccgataatgggttcggatctccggctcgcgcctttcgggtccggcaggcggagctgccccggcaagtcactcgcggtggctaccgtcggattctgggtcgccaccctgctgtacgagttcaaatggctgccgccgtccgacgagccacgcggcggcggcgtcgacctatccgaagtgctgaggctgtcgtgtgagatggctgcaccgctggaggcgagggtggtgccacgtcacgcggtgtgctgagggggctgagacacgtggcctgcaggggtggggatcagaggaggaaagctcgaccgatcgtcttctagcttctactactacgtactccctccgtctcaggatataaggcgtaaccactttttattcttgtcccac

SEQ ID NO: 165568 - DNA, 3394 bp, Zea mays
  Clone ID: MRT4577_82582C.1
atctgaaaccggtggcaatgcgtggcataaaatcacatgcaatggttctggctgcatcgaatgaggaccacacgaaggtatagtaatcttcaaatacagtaaactctttacacgcaataaccactttaagcttaagccctcaattggaaaccatcaatttaagacagtatcagttattttgatttctgactacatttgctctctcccttatctgtaaggttgagttggtggaacctccagagtctgctgctgtgggggagcgtgttacctttgctgggtacgcgggtgagcccgaggcttccctcagtggcaagagcaagacgtgggagaagcttgccgccgagttgcacagcaacggtgagctggtggcgtgctacagagatgtgcccttcactacctcggctggagtcgagacggagtgacccactagcagtctcgtacaacgaactatcctgttagccagccctaaacccttctgtcccgatggcgtcgtcgtcgtcgccgccgccgccgaagctgccgattcccggccgccgcaacatactcatcactagcgcacttccgtacgtcaataatgtcccgcacctagggaacatcatcggctgtgtgctcagcgcagacgtgttcgcgcggtactgccggctccggggttacaacgctatctacatatgcgggacggacgagtatggcaccgccaccgagacgaaggccatggaggagaagtgcacgcccaaggagatctgcgataagtaccatgctatccacaatgaagtttacaagtggtttaacataaaatttgacaagtttggacggacctcttctcctgagcagacagaagtctgccatgcaattttccataaattgatggaaaacaattggctcacagaaaatactatgcagcagctttactgcgatacatgccaaaaatttttagctgataggcttgttgaaggaacatgcccgaacaaagtctgcaacgcatcagcaagaggagatcagtgtgaaacatgcagcaccttgttgaatccaactgaacttattgacccaaagtgcaaggtttgtaagtacactccacgtattcgtgacacggatcacttatttttggagcttcctctattgagagacaagctggtaaactacatcaatgaaacttttgatactggtttgtggagtcaaaatgctattcaagcaacaaatgcatggctgaaggaagggctaaagccacgctgcatcaccagagatcttaaatggggtgttcctgtcccccatgagaagtataaagacaaggtgttctatgtttggtttgatgcacctatcggctacgtgtctattacggcatcctatacacctgagtgggagaagtggtggaagaatcctgataatgtagaattgtttcagtttatgggcaaagataatgtgccgtttcacacgatcatgttcccttcaacgctactcggaactggggaaaagtggacaatgatgaaaacgataagtgttactgaatatttgaattatgaagcaggcaaattttccaagagtaaaggtattggagtctttggtaatgatgcaaaggatacaaatattcctcctgaagtatggcgatactatttgcttatgaatcgccctgaggcatcagatacactctttacttgggctgatttgcaagccaaattgaacagcgagttgctgaacaacttgggaaacttcattaatcgtgtgctaagttttgttgcaaaaccagctggagctggatatggttctgttgtacccgatgcacctaatgcgggcgcgcacacattgacaaaaacacttgcagaaaaaaccagtaaatgggttgaacaatatctcgacgcaatggaaaaggttaaactgaaacaaggactcaagagtgcaatgggcatttctagtgatggaaatgcatatttgcaagagagccagttttggaaactttacaaggaagatcctgcagcatgtgcaatcgtgatgaaaacttcagttggccttgtttacctgcttgcctgtctgctggagcctttcatgccctctttttctgatgaagtgttacgtcaactaaatttatctccagaagaaaatctgtcattaagtgaagaaaagggagaaattgcgaaggcaaaaactccttggaattttgtaccagcaggtcacagaatagggaaacccgcacctctgttcaaggaattgaaagatgaagacgtagctctccatagagaaaaatatgcagggagtcaagctgagagaagctcaaaagcagcagctgatgctgaagccaacaaagttgctaaccagctcaagggcacaaaattatctgatggaggaacaaaaaaggaaccgaagaaacaatctggtggctcaaaatcgaagacagctgaggctgacattacagttgcaaaattggatattagagtggggcttatcagaaaagcagagaagcatccagatgctgattccctttacgtggaggagattgatgttggagaggacacaccaagaacagtagtcagtggccttgttaaattcatacctcttgaagaaatgcagagccggaaagtttgcgtgctctgcaatctgaaaccggtggcaatgcgtggcataaaatcacatgcaatggttctggctgcatcgaatgaggaccacacgaaggttgagttggtggaacctccagagtctgctgctgtgggggagcgtgttacctttgctgggtacgcgggtgagcccgaggcttccctcagtggcaagagcaagacgtgggagaagctggccgccgagttgcacagcaacggtgagctggtggcgtgctacagagatgtgcccttcactacctcggctggagtctgcagggtgaagacaatagcgaacggagagattcgctagtaccaccacatcaccgaactgcagccagcggagccagtctgtgtctggtttcgctgaaagcgattgttcctgattttcatcttcgaaaattttggtatttccatttgttcaaataccgcaaagcaaccatgatttagaaaaatacagagagtgccctttccgcatcctcttttttatcagttagtacttggctcctgttgtctcactcggaggctccatgcttcttgctgtatctgtatttccttagaagtgattctttacctgctcttatttatagttccatatgaaaggaacgaagtgtatcagaacatcactttatatataggagggcctgtctgtcactgccccctgtcaatgcgaagtgctaaattttagcaccatgaacctaaacaagcctaaagccttttatgtttgaaaagtcgtgtacaagacaaactctccgtgaagagactccaaaaaataccgatattaattggggttatacatgccctaagcccgggtc

SEQ ID NO: 165569 - DNA, 1333 bp, Zea mays
  Clone ID: MRT4577_82583C.1
gggttgaacaatatctggacgcaatggaaaaggttaaactgaaacatggactgaagagtgcaatggtcatttctagtgatggaaatgcttatctgcaggtaaatctcgatgtttctgtttagtttttccctgtagactataatgacttttagttatctcttgttatcaaatcaatgtatgagagtcagtactggaaactttacatggaagatcctgcagcatgtgctatcgtgatgaaaacttcagttggccttgtctacctgcttgcctgtctgctatcacctttcatgccctccttttctgatgaagtattacgtcaattaaatttatctccagaagaaaatttgtcattaagtgaagaaaagggagaaattgcaaaggcaaaatctccttgggattttgtaccagcagggcacagaatagggaagcctgcacctctgttcaaggaattgaaagatgaagacgtagctctccatagagaaaaatatgcagggagtcaagctgagagaagctcaaaagcagcagctgatgctgaagccaacaaagttgctaatcagctcaagggcacaaaattatctgatagaggaacaaaaaaggaaccaaagaaacaatctggtggttcaaaatcgaagacagctgatgctgatattacggttgcaaaattggatattagagtgggccttatcaggaaagcagagaagcatccagatgctgattccctttacgtggaggagattgatgttggagaggacacaccaagaacagtggtcagtggcctcgtcaaattcatacctctcgaagaaatgcagaaccggaaagtttgcgtactctgcaatctgaaacctgtggcaatgcgtggtataaaatcacatgcaatggttttggctgcatcgaatgaggaccacacgaaggttgagttggtggagccacccgaatctgctgccgtgggcgagcgtgttacctttgctgggtactcgggggagcctgaggcttccctcagtggcaagagcaagacgtgggagaagctggccgccgagctgcacagtaacggtgagctcgtggcgtgctacaaagatgtgcccttcacaacctcggctggaatctgcaaggtcaagacaatagcaaacggagagattcgctaggcacatctccgaactgcagccagctgacccaatctgggaagtgctaaactttagcatcatgaacctaaacaagcctaaagccttttatgtttgaaaagtcgtgtacaagacaaactctccgtgaagagatgctttttttttacttactctactagagactcctaaaaaataccgatattaattggggttat

SEQ ID NO: 165570 - DNA, 452 bp, Zea mays
  Clone ID: MRT4577_82584C.1
ccgggcgggaacgaaactattcaagctatcgatctcttgagcgatagagagccatcgccgacatggatccagagacaatcatgacgcagaaagcggcatcaccgccagtcggggtcttagaggtagacctgcacgctaggttgcgtgccgctgataccagaggccaagaagtagagagtctgcacgccccgccccctatgagaagaaggtgcacgagcactcctgctggacgattggagaggacccgaggggcatggacctgatgttgcgcacatgagaactgcgagctctcactgtgatccaatctgcagctgtacagccggatccacagcataagaaacctggctctaccggaagggcatcacccccccgcagatgaaggcgtgcccagagtcctccaacaaggactagaggcaccccgcccgctgaggtaggcaaagtctgcaacacca

SEQ ID NO: 165571 - DNA, 190 bp, Zea mays
  Clone ID: MRT4577_82585C.1
aaaacccgcccgcccacacctatcaaaaattatctttttactttcatcacttttatactttcacacctacatcaatccccccgccctttttttttaatatcaacccccattcctttatataatttccaaacactccctactacttacctaactaccaacctcactttctatcatcaatttttaaaccact

SEQ ID NO: 165572 - DNA, 204 bp, Zea mays
  Clone ID: MRT4577_82586C.1
actctgctcgcctgaaaaagttgagcatcaacatctccaaggtcttgtttgaagatgtcgactagcaaccatgtatatattagagctccaattccagtgtatctcttgactcttgtgcatgcaccgtgaaggtgtcatgtgatgatgttgtgcctagcttttctctttacgatatgtaatcagtttaaaaaaaaaaagaatgaa

SEQ ID NO: 165573 - DNA, 429 bp, Zea mays
  Clone ID: MRT4577_82587C.1
acaaaggggaccccacgggtttaaaccttaaaccagccaaccccccccgggaaaaaaaaaaaataacgaaaaaacggcccaaccaaaattttaaaagggggggaaaaaccattttggttagttcacccccaaccaaggttagggggaaacacacaaagggtccatcacccgaaaaactaaaccgggggaactggggccccccaagggtgggggggccccatcgggcgggggggggggtcctttggagccccctgggggggggggctttccccatttgaacgcgggggccccggggtctgaggccaaaaaacttgggtttttgccgggggggggatctggggctaaaaaaccgggttcggtttccaaaaaaacgggttgaaaaacccgaaaaggggttaaactttttttttaagggcccccccaaggggg

SEQ ID NO: 165574 - DNA, 624 bp, Zea mays
  unsure (1)..(624): unsure at all n locations
  Clone ID: MRT4577_82588C.1
ctgcggactgaggattgtataccagtctaactcngaactaccaaaccgaccgagccgcgaacttcacccctgccttctctcccttctccgtccaggccctagtgcccgcgaatctcgtgcagcaagtgagcgccgccgccagactacgccaagtgtccagttcctcgtcggaactcctaccagaaggagtgaagattcaacctgaagtggtgactgaagaggaatctactccagtggctgctgatcaagtggaggatccatctaactggggtttaatagagggatcgagtacctcttcactgcaataagacgagcaagccactgaggatctaggtgttcagcaggtagtggagctcgctgaaggcaagtagtgcccttgaccacttttattaccaattaatgttctctgtaataactatggcatgattaggcttaattttgatgggacccaataggtcaccctagtctgctttatcttgtatcttgatcaccactgaactttttaggtagtcttgctattgctatatatggttttgggtattgagataannnnnnnnnnnnnnnnnnnnnnnnnnnnnnnnnnnnnnnnnnnnnnnnnnnnnnnnnnnnnnnnnnnnnnnngng

SEQ ID NO: 165575 - DNA, 412 bp, Zea mays
  Clone ID: MRT4577_82589C.1
atcctccgtctgatgaaggtcccgcacaatcgcggccagcattgatgttagtatgcgtaccagatgcagcatcgctgtccaccgcacgtaatgaggcgcgcaggctccctctgtgcccctacgggttctggatgcttcgaccgcttccagtcgtaactctgctgcgatctccagatgagccaccccgccggccgagccgacatctacgacgacgctcttcgaccgccactcgtggctcctcggcgtgttccgggacacctgtttctttttttgagcacacgggctcttggccggtgataactcctctttccccgcaaactccgtgtgattgcatcctcttctgcctcgaaaatgctgtgcccaaactaccctatctgctgtctgctctagtcatggaagtataagatgtgtg

SEQ ID NO: 165576 - DNA, 310 bp, Zea mays
  Clone ID: MRT4577_8258C.1
cgagagagggtgagagcgcgggctagcgacacgatactggtactggccgagcaagaacatcggtcgggtcgtccatagtctcagcagccaagcgaaaatgactgcccgacgcatgtataccgagaaggaccggtaacaagcatgcacgagagcaggtaacgcaaactaccgggggaggtgcggcagtccatggtacggccgtggacaagtgctctatctcggtccggtatatcaagaacgccatacctacctactggttgaagcgctccgcgattacggctttgacacacgtgggctacgacctgaccct

SEQ ID NO: 165577 - DNA, 1248 bp, Zea mays
  Clone ID: MRT4577_82590C.1
gtcccgctgctcggccgccgaccgagccgcgcgcttccgggactgcgtccgcagcctcgaggccgagaaggccaagatggaggtcttccgccgggagctccccatcagcgtccacctcgtcgccgacgtgatcgactggctcaaggaggagctcgggcaggaccgccgccgcccgtcggacctcttcgcgccaccagcgccgccgccgccggcaaaggacggagccgtcttggcggacgcggacgcggacgccaacgacaagcgcagctggatgagctccgtgcagctctggagctgcggtagccacgacgacagcaccgccaacaccaacggcgccgccgccgccgtgcagtcgccacgccgaagcagatcagggagctgatgaaggtggacgggctcaccaacgacgaggtcaagagccacctgcagaaatacaggctgcacacgcggcgcgcgtcgtcggacggcggcgaccagcacgcgggcgggctgtggtcgtcggcgccggatcagcagtacacgacgtcgcagcacagcacgtcgcagtcgcagtcgcagtccgggtcgccgcaggggccgctgcagctggcggtgtcgagcagggccatgtcggccaccgccggggacagctgcgacgccggcgacgaggcccagggcggccggtcggagagctacggctgggagatgccgcagcacgggacgaaggcgtcgtcgtcttgatgatccttgtccttggacgggatcacaattcacaacagtatagaagacggtgcggcgtggggcatggtactgaggacaactgcggaagaggcggcatttttttgtacaggcgttgagatgatttcatttttcccccttcctttttttctggtagagggaggaggatgtgatggtgaagatgaactgatctggtgttgttgatcgagagtgaggcatatgagatgagatgttattttttacatcccattgtacaatctggaggctggatcgcgttgttttaacggggatggatcggttttcgcatcaaaaaaacaaagaaaaggattgccgctgtcgatctagaacgtggtgatatgcgtctgcggtgtctgctgttcttgccagctcgtgtgctttgatccgtcgtggattcccgccacagttgtgtattgcccgtgtggttgtcgtgtggctcttaaacatagtcagacgtggcggccgatgtactagtgtgcttgtcgagtgcgggcgttgttccggctccggtac

SEQ ID NO: 165578 - DNA, 450 bp, Zea mays
  Clone ID: MRT4577_82591C.1
gtacgccatgatcagcctgcacgagcagctcgcatgcaggaactttttactcacgaccgttgtgctttgacctctcgtccatcgcattgctcggctctcttgggtgtaaaaatcacaggatcaatgcttggttgcttggtgcttgaaacgctgactactaatcaactgcgtgttctcctctctctcctgtgaatagatcctgtcagtgaggcagggcatacagtacattatccccatgggcccctcctcgaggcccacccgacgaagggacaaagagacacaatgcctgtgcgctggcctcttggtcgctagactacgtcagctcggtcactgcggtttgctgacgctgctatccggctgcggctgcagctccacagcatcattctctctatggattgcaactgcagcacctaacacagttgcaacagtgtccgcttgcagccaggcgaa

SEQ ID NO: 165579 - DNA, 388 bp, Zea mays
  Clone ID: MRT4577_82592C.1
ggacctttgggctgatttatgtgcttgtttatgtgcttgcgtaaaacttattccccacgttcgtaactacgatcttcggcggcgtgtccgactctgtaatcgcatcatcgggaaactgcacaactcctaccggttaacacaccaatctttaggcggtttaatgcgcgacactatagtccgcaatatccgtcgttactgacgaagaggtcgacacctcgacacactccaatcgtttcggcggaagctctcacctgactccagtgacccacgaccgtacgcttcggacaaagtttaaagccgggatagcgcgtcccggcgccgccgtcagctaagtagtaaccacttccgtaagcggtgagaaaggaacgtgtcacgtaacgttaaacgt

SEQ ID NO: 165580 - DNA, 227 bp, Zea mays
  unsure (1)..(227): unsure at all n locations
  Clone ID: MRT4577_82593C.1
tagcgcttctctagatacaccaacaggaccggagaacaaggggggggggnnaaaaaaaaactgtagaaacaccgcaccgcgcgcagcttaaactgcagaaagagaaatcccggaagcctacaccacagaactgtactcctagacacggggacgactacaatccagggaacaccgccgctgagcgaaatcaaccaaaaccgggaccggtaaaattattcggggaccaa

SEQ ID NO: 165581 - DNA, 672 bp, Zea mays
  Clone ID: MRT4577_82594C.1
ttcttttcttctcagggataaaattgcgcaaccaatatcattccaacacaaatcaagttgccatccaaagtcactccatcacagtaataacataagactacaacaccaaaacctatattgaacctgacttcacataccacacatgcaactaacgtggttgaattttactaaacaaaagttggagcttggcatccatggaagcttgcctcttcttcatctctgcttccatctcaacttgcctcttcttcatttcctcttgctccttgatccgtgactcttctgcttcatgcatttgctttgacaatacttctagttcctcccgttgggtgttgacaacagatcgaagagcactatttgctctcttctctacttcaagttgtgcttcgatatttcttacactagaccttggataagcactttgtatccccacattttgaaggaacaaatttttctttgtattttgagcaagtacatcagcaacaacttcagtcaccgacatttcttgttcaccttctgttggtgtagaccacttgttttctatttcagttataacttgttgaacagaagatgaatagcatttctttatcttgctgtagtgacactccttaaataaatccagggcatcaggttcttgatcaaaggatttatctcccaaattttctactgaaccat

SEQ ID NO: 165582 - DNA, 211 bp, Zea mays
  Clone ID: MRT4577_82595C.1
gtaatcgggggcgaaacttttattttttatataatcccccaaaacacggtgcttatttacaaaccccgggctttattggtttttttaaaaaagcattaactaacgggtgctacgggactacaaactttgtgggataaacacgtgccctccttgagtcccttcaacggtttttaggacggggcgggggcccccttggacctggggggggggg

SEQ ID NO: 165583 - DNA, 829 bp, Zea mays
  Clone ID: MRT4577_82596C.1
cggacgcgtgggataggaaattggaagaaggtccatggagggaagccgcagtgttttgcatagattgcccaccttcacgctgagagaagatatcgggcgcgcaataatgattagtgagcaagtcctgtatggagcctgggtgcagcctctgcgagtcaatttatttatttgttctcaggcgcaggccacatgtggtggtgaagtctgaattccttcgagttagcatttgtgaagcgtgtttggttctgcgggaaagtttgtgcgagcctgtttgtacccgtgttatcctgtaattttcagatcaatgttcttgcaggctctggagactttcaggccacacaatcctcctgccagttcacgcatggtatcgaggcgcagatggcgatggtgacaagcataattgtgcaaagatggcaacacggataggtatatagcgagcggtggtgtttcacgtaggcagtaggcacggcagtttcacaccagtagtcagtagatatttgttcttgtctcagatgagccacatctgaacgggagcgttgaaatcggtgcactaatccacgggagttggcaaccctcagcctctggatttgaagttccggttgtcattcaacggtgcctgccccctggtgggataaaaaggccgatgatgtttggttcaaaaaatgtaacgcaaatggtaatggtaatggtttcggctcgattactggcggtaacaaatttgaataggctggtatcaaattttagtgtggtatctgattacggttcccctccaacaaacatgatttaacgttatccgttaaaaaaaaaaaaaaaaagggcggacgctcgc

SEQ ID NO: 165584 - DNA, 379 bp, Zea mays
  Clone ID: MRT4577_82597C.1
gcggctctgcccagtgctgcgttgtctaccataacactacctgtggcatatggtgatgaaaccagtgtatgactgatacatagttgttgttttttgttctgtccaatctgttatttatattaaattatgcactgaatcattccatgtacgcacagtgcaaatcctgccctgtttatagtctttcacaaattttgtatttttgtccagccaatgcgtatattgtgactttcattcatgttttcaagcttgtttttcgttcagtgaagctaatttcagtctgtaagctaaatgtcgctttgcatgatttccattccaatgaactcttgtctgaatacgattatttgttccgtgaagtttgagattccatgtttctttttta

SEQ ID NO: 165585 - DNA, 365 bp, Zea mays
  Clone ID: MRT4577_82598C.1
taaacaacaacattgagattatcaagttgcactgatccattttcctttgattccacctcataatgtgtgctagagattcgttccctcccaggtgtccacatcatgccccacgtactactagacgggttaagggtcaggccttaatgagaacacttatttacattcaccgcttttcgctcactggctgttttctattggttgaacctgtgccgcctgctatatttatgaatctaccaaacttcccatacatgtagtttgactatttgggcgctctttcacttgctcgctatatgactgcatgcgctcgctacttattttgtgccaagcgttatcagttcacttaaaggcggtaatgcgggtataca

SEQ ID NO: 165586 - DNA, 420 bp, Zea mays
  Clone ID: MRT4577_82599C.1
ctacggcaatcttatgctgggtgaccgggagaattactacggcattgggaaacacacatattgtgcctatgccattgatacacttggcagaacccaaccttatgtccagtccaaacgagataatcccgaactttttcacttgaactacactttagtatggcaatcaaacatcccttggagcatctacgagaatctttataaattgcactatctaaattaccatttaaagagtcatttacattaacaccgtgttctatatcttgtccatgtgcatcattatttctatgtaatgtatgtactacaacgagccattcacgtgcagaactctttggctaacgatactccgtctctacatgactagtctattcacattactatttaaataacttgtttgaagctatttttataccaacatctata

SEQ ID NO: 165587 - DNA, 309 bp, Zea mays
  Clone ID: MRT4577_8259C.1
cttttcttccggccaagttccaccgatcccaaatctacgacttgagcaaaaaccacagctatggcacgactcatatgctggggcaacggtcgttctgatgaccaaacggatggtcccgccttggaccgcagaaagacatgatcggatgtgcatggtgtcactgggacaacatgccgctctatggatatcgctggatcctatttgaagaggacataccatacgtcttatgtaatctaccccgcactgacgattgccttccatggaagctctgccggtacaagaacgccatcgacgcgagggataggaact

SEQ ID NO: 165588 - DNA, 400 bp, Zea mays
  Clone ID: MRT4577_825C.1
cacccgtacggaaactggaagcattgattgctgctgctaacatcatatatatctttcacattttacatacccctcctggtgaaaatgccctctttgatgtcctccttatcactcctatatttactgtataataaatttaaaactatggtccggcttccgcaggggctggctcagagactggaccatctctatttcaattaatattttacccaaacttatatccagaattggcacttgccctgcagttgtctatgtaagaagagcggtcaaggcaacaggctattgcaaataaagctgcttaagatacttttaataccgaacataacaatgtcccaagctcaaacagtgattctgttatggctgaatgagaacctgcctcaaatgccgctgctgttgacaa

SEQ ID NO: 165589 - DNA, 1555 bp, Zea mays
  unsure (1)..(1555): unsure at all n locations
  Clone ID: MRT4577_82600C.1
ngaccaacactaacatagtgtttattccagatggcaggaagagcgcgccgtggacagaatgagtgcattcctccaccaccaccgccgcctcctaccatgcaagaactgatggctcagcagaatgagattctgcgacagttggctcaacgtcagccaccacctcagcactatggtggtggtgatcaccatcagcgtcccccagcagcggccacttatcaggagttcctcagcactcagccgcctttgttcactcgggcagaggatccacttgatgctgatgtgtggcttagggtagtggaatccaaattcccactgcttactggagtttgttcagatgtggctaaggtctgtttcgccacccagcagcttcgcggacccgcgcgaacatggtggatccactttctcgctatgcagccagttgatcacgcagtggaatggggagaattcaaggcagcattcagaggacatcacataccggcaggcatcatggaccgcaagctcaatgagtttctggcacttactcaggggaatcgtactgtgttgcattacactcaggccttcaatgacctgtgtcagtacgtaggctatcttgctgacacagatgagaagaagagggataggttcaggagggcctcagtactaagctccgcgactgtctcaatacagtcagggccaatagctataatgagttagtcaacatggccatttctcaggaagactgcatcacagcctgccaggcagtccgccacacgtccgcccctatggaaggaccttcagctcagcctcagcgtttcaggattgtgtccgacactcagggtaggggacctcagcagtaaggccggtgggtgatccgactacaacagcagcagcaggcacccaaccgctctcagcccccagttcagaaggaacaacacctagccacaacagcagcagtatcgtcagaccaatgacaacagatgtttcacttgtggcagcactggacactacgccaagaattgccccaagaaccagcagaggcaggggcagaattccaatcagaaccaaggcaagaggcagaaagtacaagtgaggcaaggcagactgaacttcaccaccctagctaatagcaatgtctttggcttcatcaccatccgctaagattcagatcatccaccaagcttcggttcactgctcttcggctttgtcatccagtacataacaaagcgttataaggtaaattcaagtttcaaggaaaaggtaagcaaatgtatgagtttattaccggtttgaggtgacttcgagcttcgtcactagccaatcttcgtccaccctttgcccaaatttgagttatgaatctgttcccaatgcttcgggccaggctaaggatggcattcaagtccgctggtgataagctgaagttcggcctgtttacaatattcccgtgcatgcaaccagccttcataaaagcaacagctgtgccacgagaagctagcagagcacagaaatcaccatgcccagctatgacttcatcaagagcatcaacttcgcctttaatatgatcgaagatgcctggcag

SEQ ID NO: 165590 - DNA, 204 bp, Zea mays
  Clone ID: MRT4577_82601C.1
gaaccccccctttaccggcccataaaccccggggggtgggggggttacccccagggtaaccgttaaatttgcaagccccctagcccccgttcctttcgtttttttcccttcttttttccccactttcgccggttttccccgaaaagtttaaaatggggggctcccttaagggttccaattaagggtttaacggcccctcaaccc

SEQ ID NO: 165591 - DNA, 169 bp, Zea mays
  Clone ID: MRT4577_82602C.1
gctgtgctgaccacctcccctgttacgcgggcgacacggaaactacatcgggtctcacggggcggcctgtgacatgcaccggccgcctgtagcgtcacggctgaggactatacatttggagctcatatctcggaagaaagaggagcggtgaggtccagccccccgttgc

SEQ ID NO: 165592 - DNA, 341 bp, Zea mays
  Clone ID: MRT4577_82603C.1
cacggagttcgccatcaccggcttcatcatcaccaatatgacggccatcttcaccgatgaagacctcaagaactccaagttcgtccaggaacacaagaagcgctgtccaaccgggtggagtcatcccaatcgcctgtctgtgaaatatttgccccctatttttcttggcttttctttatctaaatgccggcaccctattgtaattatggaataagaggccaccggagtgatcccacatcttccggcctctgatttttattcactttgctgtcatattcctgcatcatacgaatatgtgccctttttttttgttgatggggggtttgatccattgccggggg

SEQ ID NO: 165593 - DNA, 331 bp, Zea mays
  Clone ID: MRT4577_82604C.1
tggactcctgcaggtgccggtccggccgtgccgggatgccccacgcgtcccacgcacgccttttgtacacaccatcgagcttggcagaaaatgcttgtgccagtcgagatctttatgaccatggtgtgggggtgtgctttgtcgcctaggacatgactgttcacaaggtggacatgggcaagcttactagggtcgagggggacttcaaggcaggtatacacaaccggaacccactcattcctgctaggtttggcgatggccatcttggatggcgcttggagtggagcgcagtctggaccagggttaccagtggttgcagagatgaacaagc

SEQ ID NO: 165594 - DNA, 426 bp, Zea mays
  Clone ID: MRT4577_82605C.1
attcattgtttaacaaattttacattttcaaatgacatgtttggaacatagaaggcatgactcctgtaggacaattccaccaacatacttgccaataccggtgttgacacgattttatcgccgcgggaatcccctgatctataccatcttgcgtaatttacagcctccaatgctatgggacatgcaaaaaacacgaacactggagtgcgctggaggagctagcgcaaactcaagttcaattctcctctttcgagtgcttgaccacccacccaacgacagaatcaatgttggtagagatcttgcaagatgtcatgaaacatgccactttttgttcagcgactgcccttaggcccattacttctgagaaggggtgctagaagaaagcttaaagcccgcccttttattgtcaatgactaccaacggaat

SEQ ID NO: 165595 - DNA, 502 bp, Zea mays
  unsure (1)..(502): unsure at all n locations
  Clone ID: MRT4577_82606C.1
catgtcgcggtggctgcagatcgggacgccggccagcgcacggccgcagcccatcgttggttttcaggacaaggcgcgggacgcagatgagctgtggcgtcggtggctggaccggtgcgcgcagctgcactcccacggccggccccggcggttacgtgctccgagtggaacggcgcgagtgttatcggcagcatgcatgcgacgctgccggtcaggccatcggcgccggctagaggcacggtggtggacaccgacctcgncctggnggacgccggngncttcnatgacnncnnnaccgnnntcnncatcnncttggnacncggacgaaaaggcgctcgctaaacggctcacggaggcggtgagatggcaaccggaggctgcggctgcggtggctgatacgatcgtgaaggccaggttcggcggaggaaagcggcgacgagtatggccaaaggccgacacgtgtctcctcttcgccggtgccaacatgatcggtaagaggagg

SEQ ID NO: 165596 - DNA, 210 bp, Zea mays
  Clone ID: MRT4577_82607C.1
cgaccacgcgtcgttgaaacactacgcttgtatgtttgtaataaacacataagcatggcggactaagtcatgcgaaaaaaaaaaaaaaaaaaaaaaaaaaaaaaaaaaaaaaaaatataaaaggggcgcgttaaggtccaacttcaaccaaatggggggcctttttttataagtactaaattaattcatggcgtgttttaaagtgaactg

SEQ ID NO: 165597 - DNA, 468 bp, Zea mays
  Clone ID: MRT4577_82608C.1
gttacttgtgccgtgttagctcgttggccatcggtatgcgcttgcctatgatcgataggatgaagaggtgcgcgaggcgtagagtgttatgtcctgccagtccctcaccttgtgcacgtagggcatgaacacgtacaggtagctcatgatgaacagactttttgacggcagcgtctgatacacggggaaagtggcggttatttgttactccaatatctccttgactatggcatactatggtggaccagtatacttccggctgcacctggctctttatggggaactcatgcagtacttttattcacaccctgttgaggacacccatctgttgcctggtgatctgctggtgcttgaaccaataaaaccgatctcctgtctatgatctccagccaccttgaagcctaggacgtggtcggtggtgtgctccaccagtttgaccatacgcagaacgacggctcggatggcttg

SEQ ID NO: 165598 - DNA, 405 bp, Zea mays
  unsure (1)..(405): unsure at all n locations
  Clone ID: MRT4577_82609C.1
cacgcgnccgnccacgcgnccggcacggcgnttttcgcttttgccaagaagggcgaggaggagaggcngcggaaggcgggcancaccgacacgcaccncccaagggnnaagngcaagnacgacnccaaagncaccnaccacccagaaaaggggngcggccccaacnaccnggcgcagcnggncaagnacgacganggcgacggngacancgnggcagnggacgncaaggagaagggcncngacacgnacgagccccnaaagcacaccnggggcgccaccnggaggaaggacagcgacaaaccgcnnaagggaccccncaccgnccgccncactaccgagggaggcaccaagnccgncnacgacgacgncancccngccaacnggaaggccaacaccgncnacacc

SEQ ID NO: 165599 - DNA, 372 bp, Zea mays
  Clone ID: MRT4577_8260C.1
aaaaaacacataccttaataatatttgttgttgggtgggcttctaacttatttaataatctagaggggggtaaacaaacaagggggaaaagtttattttcatcaaataatagaccggatgaaaatggcccctgtttaagcataaataacagataaatttttggggcactaggcagcaacaggaagcaggccgttttgtttaaaaagtggttcaagcaaaggcttccgtccttggaatgaaacgaacaccttaagcggggactttccaccttcaagcgcaagaacagtgtttttgaatcgtctgccaatttcctagattgccttctcatcattcaaaccagccttttaaaaagctgagaatgcatcaactgac

SEQ ID NO: 165600 - DNA, 587 bp, Zea mays
  Clone ID: MRT4577_82610C.1
gcgccctcttctcttcctcggcgacctcaagacagccgccagccgcgccacgcccagcccggacacctcggaggtacgatccaccgatatcacgattgacgtctcccgcggcctccgggcacgcgtgttctgccccacggcgatcgctgacgatgctccagccccgctccccgtctttgtctacttccatggcggcgggttcatgctcttctccgcgtcgttcggcccctatgacaccttctgccgccgtctctgccggaagctccgggccgtcgtcgtgtccgtgaactaccgcctcgcccccgagcatcgtttcccggcagcatacgacgacggcgtcgccacactccgctacctggacgagaccccgaccccactgctggccgacatcgtaccggcccctgtcgacctcgctagctgcttcctgatcggcgatagctcggggggcaacatggttcaccacgtcgcccagcgttgggcgtccatgtcgtcggcgacgtcgttacagccttcactgcgcatccgccgcctccgcctgggcggtgccgtcctcatacaaccgttctttcggggggaggaccccacgg

SEQ ID NO: 165601 - DNA, 333 bp, Zea mays
  Clone ID: MRT4577_82611C.1
aaagctggcatcgcccgctgtaccgacccggccttaattgctggaccgacgcacgcgttttgttttggtgagcgtatgtcccagttcaagtcgggccttatttttgcgcacacgtgggaagaacaccgggggacgaccacttctgaatgtggtaggaagtctagccataccacctcaagatcatgctggcctggcggcaaggcatgagcgagaagctataagaactgctagaaccacaatgggaagaacactagtgtgaggcagccaaagagtggactcatgaacagctgtcgggccacagggggggatgaggaacctgcaaaaactgaaaca

SEQ ID NO: 165602 - DNA, 376 bp, Zea mays
  unsure (1)..(376): unsure at all n locations
  Clone ID: MRT4577_82612C.1
cttctgcgtcctatccttgcgggaaatnctggtcaaagcgccagggggtaaaggggtacaatgggaagaaatcgccgtttttccagcacataaatatgggtctttttggcttaggggcgacgatccaatgtgacagacttttgactttaaggggtcaaataccaacccggtcgtattactgggggagtggccagggatttttttatgcggaataagggatactgggctaaaatttcttttcattggacatttaaagcggagccttttgaacccccactccatctgccaaggccggggggggcttttaaatgttggcaaccgggagtgcctgagcctgcgcatgcgcctccaccgacaggattgtctagcttgaacc

SEQ ID NO: 165603 - DNA, 331 bp, Zea mays
  Clone ID: MRT4577_82613C.1
tctcgcatctggcttcgcaccgccggccacagctagtccttttcgccttgctgaagcggcgcgagcctctttctgcgaagctcccagaaatctaaaaggaccctgggccatcggccactaccagctgttttttgactgggtcagtcatgctcttcttcacacaacagaaggggctcgcattgatagagctccaatacgttgtgaaaacatcccttgggaactccatagctactgaaggctttaatgaagatatcaggcttactgtacgatacaaaaagagaaaggttaccaaagggaatgccgccatccaattctgcatctattggaggcc

SEQ ID NO: 165604 - DNA, 527 bp, Zea mays
  Clone ID: MRT4577_82614C.1
aacggccgccctttttttttttttttttttttttttttgtcccacggatggtggattcaaaatcggcgaggaacaaatgacagttgaatttcttgagcaaagcatatgatttcgccatcgcgatgatctttacacgtactcccttaaagccttagatagtgcctttaatgccaaacgtttaagaggagtagcacgaagatattgcttaactaatctgaaaacgagtatgtccaatggaatttgcctttgttcatctcgtaaccaagggtgagtcagtgcttggacagcagtcattcttttacggtaatccttgttcagaaatctcttcacaaaatccttagcttcagccgatactgaaggccatggtgaatcgtcaaagttgggatcagcccttaatacagaccgaaagatcccagattctgtccttgcccaaaatggccgactgccacagagcaaaatgtatgttatgacacctatactccaaatgtttgcttccatactgtacgatctgggtggaacctttgggg

SEQ ID NO: 165605 - DNA, 2325 bp, Zea mays
  Clone ID: MRT4577_82615C.1
ctctttctctttctcccctgcttccccttccattcccgacggacgacgcaacaacccgcctgccctgccctgcctcacgctcgcacccgcggcggcgcggagggccggaacctaaaccctaaccctagcggcccgcccgcgatggggcagtgctacgggaaggcaggcggcgcgtcgtcgcggcgggcggaccacgacgaccacgcccacgcggtcgcgccgccgtccccgctgccggccaacggcgcgccgccgccgcagcccgccacgcccgggcgccgcaagtccggatcggccacgccggtgcaccaccaggcggcgacgaccgcctggcccagcccgtaccccgccggcggggccagcccgctccccgcgggcgtgtcgccgtcgcctgccaggtccacgccccgcaggttcttcaagcggcccttcccgccgccctcgcccgccaagcacatcaaggccactctcgccaagcgcctcggcgggggcaagcccaaggagggcaccataccggaggagggcggcgccggcgtcgccgccgactccgccgaggccgagcgcccgttggacaagacgttcggcttcgccaacaacttcggggccaagtacgacctcgggaaggaggtcgggaggggacactttggccacacctgctccgccctggtcaagaagggcgagtacaagggccatgccgtcgccgtcaagatcatctccaaagctaagatgacgacagccatttccattgaagatgttcgtagggaagtcaagattttgaaagctctatcagggcacaataatctcgtcaaattctatgatgcatgtgaggacgccctcaatgtctacattgtcatggaattatgtgaaggtggagagttgctagatagaattttggctaggtactttttccaacacagtatattcatctatagtagccgagtagcagtacctcttgttaatgcttaccaaggatgcaaacttgaactattgaagaggcgggagatatacagaagaagatgccaaagctatcgttgtacagattttgagtgtagtgtccttctgtcatcttcagggagtagttcatcgtgatttgaagccagagaattttcttttcgcaacaagagatgaaagtgctcctatgaagttaattgactttggtctgtctgattttattagaccagatgaaaggctcaatgatattgttggaagcgcatattatgtcgctccagaggttctacacagatcgtacagtatggaagcagacatttggagtataggtgtcataacatacattctgctctgtggcagtcggccattttgggcaaggacagaatctgggatctttcggtctgtattaagggctgatcccaactttgacgattcaccatggccttcagtatcggctgaagctaaggattttgtgaagagatttctgaacaaggattaccgtaaaagaatgactgctgtccaagcactgactcacccttggttacgagatgaacaaaggcaaattccattggacatactcgttttcagattagttaagcaatatcttcgtgctactcctcttaaacgtttggcattaaaggcactatctaaggctttaagggaggatgaactgttgtatcttagattgcagtttaagctgctcgagcccagagacgggctcgtatcgctcgacaactttcggacggctctgacgagatacgtaactgatgctatgagagaatcaagggttcttgagtttttgcacgcgttggacccgcttgcgtacagaaagatggacttggaagaattctgtgcggcagcaatcagcccgtaccagctggaggctttggaaagctgggaagaaatcgctggaacggcttttcagcacttcgaacaggagggcaaccgagttatatctgtggaggagttggcgcaggaactaagcctcgccccgactcactactccatcgtgcaagactggatcagaaagtccgacggcaagcttaactttcttgggttcaccaaatttttgcacggtgtcacgatacggggctcaaacacgagacgacactaaaatggacgcgaactgtgtattcgcttctaatttaaagcctctctctcgtcgattatatatagatggccctgattggtgttttgtgatgtcgcgcggctagctgttgttgtcatagctttttgtagagtacgtgtgaagatcatcgtgatggcgaaatcatatggtttgctcaaaaaatcaagtgtcatttgttcctcgccgattttgaatccatcatccgtgggacaaagaccttttgtcaacgtggcgctaaagttgacatc

SEQ ID NO: 165606 - DNA, 2526 bp, Zea mays
  Clone ID: MRT4577_82616C.1
cgcgcccccctggcccctgcttcttctccttcccctttcattcccaacgaggcaacgacccgccctgccccgcctcgcgatccccacccgcggcggcgcggagggccggaacccaaaccctaaccctagcggcccgggcgccgcctccggtctcgcccgcccgccgcgccgggccgcgatggggcagtgctacgggaaggcgcgcggcgcgtcctcgcgggcggaccacgacgccgacccctcgggggcggggtcggtcgcgccgccatccccgctgccggccaacggcgcgccgctgcccgccacgcccaggcgccacaagtccggatccaccacgccggtgcaccaccaccaggcggcgacgcccggcgccgccgcctggcctagcccgtacccggccggcggcgccagcccgctccccgcgggcgtgtcgccgtcgccggcccggtccacgccccggaggttcttcaagcggcccttcccgccgccctcgcccgccaagcacatcaaggccacgctcgccaagcgcctcggcgggggcaagcccaaggagggcaccataccggaggagggcggcgcgggggccggggccggggccggcgccggcgccggcgcggccgttggtgccgccgattccgccgaggccgaccgcccgttggacaaaacgttcggcttcgccaagaactttggggccaagtacgatctcgggaaggaggtcgggaggggccactttggccacacctgctccgccgtcgtcaagaagggcgagcacaagggccataccgtcgccgtcaagatcatctccaaagctaagatgacaacggccatttccattgaagatgttcgtagggaggtcaagattttgaaagccctatcagggcacgataatctcgtcagattctatgatgcatgtgaggacgccctcaatgtctacattgtcatggaattatgtgaaggtggagagttgctagacagaattttagcaagaggtgggagatatacagaagaagatgccaaagcgatcattgtacagattttgagcgtagtggccttctgtcatcttcagggagtagtgcatcgtgatttgaagccagagaattttctcttcacaacaagagatgaaagcgctcctatgaagttgattgactttggtctgtcagattttattagaccagatgaaaggctcaatgatattgttggaagtgcttattatgttgctccagaggttctacacagatcatacagtatggaagcagacatttggagtataggtgttataacatacattctgctctgtggcagtcggccattctgggcaaggacagaatctgggatcttccggtccgtattgagggctgatcccaattttgacgattcaccatggccttcagtatcggctgaggctaaggattttgtgaagagatttctgaacaaagattaccgcaaaagaatgactgctgtccaagcactgactcacccttggttacgagatgaacaaaggcaaattccattggacatactcattttcagattagttaagcagtatctccgtgctactcctcttaaacgtttggcattaaaggcactatctaaggctttaagcgaggatgaacttttgtatcttaggttgcagtttaagctgcttgaacccagagatgggttcgtgtcactcgacaactttcggacggctctgacaagatactcaactgacgccatgagagaatcaagggttcttgagtttcagcatgcgttggaaccacttgcgtacagaaagatggactttgaagaattctgtgctgcagcaatcagcccgtaccagctggaagctttggaaaggtgggaagaaattgctggaacagcttttcagcacttcgaacaagagggcaaccgagttatatcagttgaggagttagcacaggaactaaatctcgcgccgacacattactccattgtgcaagactggatcagaaaatcggacggcaagcttaactttcttgggttcaccaaatttttgcacggtgtcacgatacggggttcaaatacaagacgacactaaacagatgcaaactgtattcgcttctaatttgaagcctctcatcgattatatggccctgattgctgttacctcctgcctggcctgccctgccccctgagtctggtcaatgaccatccttgtttgtgatgcccctcccgctgttgccgtcgtagcttttgtagagtacatgtaaagatccttgtaatggcgaaatcatatggtttgctcaagaaatatatagtgtcatttgttctttttttttggctcgctaattttggacctttatccgtgggcagtcttttgttgacgttggcgctgaagttgataccgtcgcaggaacctgtaaggatgtaactttgtatgcacatacttgtatattattggcgtaaatttagttgtacactatcaacttataactgggttacaaagaaatgccagatatgtttgggatgaaaaaaaaaaaaaaaggatcccgagctccagaattcgtc

SEQ ID NO: 165607 - DNA, 515 bp, Zea mays
  unsure (1)..(515): unsure at all n locations
  Clone ID: MRT4577_82617C.1
ccggaattcccgggtcgacccacgcgtccgccctggccttggtgatccatgacaactttggcattgtggaagggctcatgaccacagtccatgccatcactgccacccagaagactgtggatggcccctctggaaagctgcggcgtgatggccgtggggctgcccagaacatcatccctgcatccactggtgctgccaaggctgtgggcaaggtcgtcccagagctgaacgggaagctcactggcatggccttccgtgttcctacccccaatgtgtccgtcgtggatctgacgtgccgcctggagaaacctgccaagtatgatgacatcaagaaggtggtgaagcaggcatctgagggcccactgaacggcatnctgggctacactgaggaccagggtgtgtcctgcgacttcagcagcaactcccactcttccaccttcgatgccggagctggcatcgctctcaacgacaaccgtgtcaagctcatttcctggcgtgacaatgaatacggctac

SEQ ID NO: 165608 - DNA, 838 bp, Zea mays
  Clone ID: MRT4577_82618C.1
cattggccgccccgtgcgggaaaagacacacaccacagcactaaagtctattcatctctggctccccaaattcagctggagagcactttttcccatcatggataagaactacggtgaactctacaacatcctcggatggggtgaggagtacttcgcggtgaacacggaggggcacctcagcgtgaagcctttcggccgctggacggagcccgggcaggagatcgacgtgcactcggtcatcgtggaagctctagcgacccaacccaacgacagcaccagcaaatctcagttccccatgatccttcgcttccccgacgtgctcaagaaccgtatcgagacgctccataacgcattcaacagcgccatggagtccaccgggtacacgtccaggtaccaaggcgtgttcccgatcaaggtgaaccagaacaagcacgtcgtgcaggacatggttaggttcggccagcaatggaactatgggctcgaggctggctccaagccagaactgctcatcgccatgagctgcctccccgtcaccgaagccgagcccaagccgtacttgatctgcaacggctacaaggacgcggactacatcgcgctcgcgctctcggcgcgggccatgggcctgaaccccatcatcgtgctcgagatggaggaggagcttgccatcgtcctcgaccagtacaggaagctgcagcagaagctgccagacgacgatgccgtgcgcaagaagttcgagccgatcatcggcatccgcgccaagcttctcaccaagctaccaggccacttcggttcgacggccggcaagcacggcaagttcgggatgctcgccgaccagatc

SEQ ID NO: 165609 - DNA, 161 bp, Zea mays
  Clone ID: MRT4577_82619C.1
gggaacttgcttttggattcttatcgaaagtgaatccctctaacacttcagttagtgttttatgataaaatctttgacacaacaagtgttaaaatcttagtcactaggcaagaatggaaagagcttctttacctgcttgagaggggagtcaaacagagtct

SEQ ID NO: 165610 - DNA, 546 bp, Zea mays
  Clone ID: MRT4577_8261C.1
tcagataccatagacgtttgttttaaatctcaaaaaaaaaaaaaaaaaaggccctatagccctctagcgccctttttcgcctcccttttcagagggttattagcgcgctcggggcataattgcgcacttgtgtgtcccctgtgaaaaagtgttccccgcgcaatgtcgcacaacatatgacaacgcgacaacatatagtaaaccgtgtggtgccccatgagagcgcgatctcccactgagtgagctgagctctctgtccgctgttgccctgagagaccgctgtcgcgccttgaatccttgagtcccaccccccgcgctgaaaggggcaacgcgcgtagagagctcttttgctttttcgggcactgtctcgctgcgcgctcactggctcgttgggcgagcgcgatctgctcactctaagagggtgatacgcctatacacacggtctgcgggtatcgcccgaaacatcatatgagcccaaagcccccatatggccacaagccgcgcaaaaggcccgcatccgtcgagattccatatggtctgcgcccc

SEQ ID NO: 165611 - DNA, 259 bp, Zea mays
  Clone ID: MRT4577_82620C.1
ccatagcaaagaaacacactccaggggagcgcctacttcatataatcaacaaaacaaaccattccatttgtgcataatcgtcataatcaaacacatattctttaccaactgctcaactccaggcctatatcactccacacaaataaataccgattactttttagagcatatagggcaaacaagatgcaaaataaccgaagctgtcataaagacagcgccctctgcagactataccttcatctagtccacccaccagata

SEQ ID NO: 165612 - DNA, 348 bp, Zea mays
  Clone ID: MRT4577_82621C.1
tttgtgggggggtttttttgattattgggtttgttttctttcttttttcgggcttcattagtggtgtttgggttccataccccagaaagccgagttgcagggcagggggaaaaaaaatggccgaagtttgttcacccgggccaccccggggggggcccgcaacaaaaaaaaacctacgggaccaggtctaggccgggccccaaaagtttaatccccagggacgggggccaaaaacaaatatcatgtttttggggcaggaaaaccccgtcaccgggtgatttaaatcttccaaagcggattcccggggggccaaaattatttttcaaccccacgggggacccgcttttt

SEQ ID NO: 165613 - DNA, 392 bp, Zea mays
  Clone ID: MRT4577_82622C.1
attcggctcgaggctggcaggagctaggctgtatcaaaggcgccaaatggaagacaaaggtgtgtgttgctgaggacggggaccgccgatgtagcattgaggaacgcccaggagcgattggggggaagcctgtattctgcatcaaacacgctggaggaacaaggggcaggacataggccgtgacccagactgctgagagccatcctggggcgtgcatgtaacatgtggggaatcgccgtggccagaccctaaactggcataaggccatccatggaaggaccatcttctgctcggcccacggtgcaggcactaggtgcatgcccgctgcttgttccataggtgcatgatgcactgcttcctactgcactgggcatgccgctggcaacaggagc

SEQ ID NO: 165614 - DNA, 336 bp, Zea mays
  Clone ID: MRT4577_82623C.1
tttttataaggctcatccaaaggaaatttcttataaaggggggaaaaaaacacatcccagggacaagattttttaagggtcgataaccgggagattgtcctaaagcaaaacacctttttaggaaactgcctaaacaaaaaccctttattaggactgtttggacacaaaccgacccggggggggggccaaaatttggcgggatgatataaagcttattgttttttggagacaccaacggtttttccacccctgccaatagttttggggtgctggccacggacccgggggccccaatagggacccaaaccacgggggttcctgatttttttgagcctt

SEQ ID NO: 165615 - DNA, 264 bp, Zea mays
  Clone ID: MRT4577_82624C.1
gccagcatggaacccctgaagtccccagaactaagctattggaacgacttgttattccatggcatccaaagtccaaatgttagtttgctaagctccataatgctgtggcatcgtattgcgaaaacattgattgggagaacattagtacatgaatacttgatcttcataggtcagctttcatgcatgtgcacacatggaaaatacatagtcttagggctagcttatttatgcggttatgtaccacgatgatgttgaatcattagt

SEQ ID NO: 165616 - DNA, 631 bp, Zea mays
  Clone ID: MRT4577_82625C.1
ccgggaagggtttccctgacctctcgcgcacccgtcgccgcttcctctctgtcttgcgcacccgccgccgcttcctctctgtcttgcgcagccgccgtcgcctcctctccctcgcgcagtcagcagaccctcccttcgcgcgccatcagcagagccagatccctgcgccgctgaccggcccctgcccctcgcgcgccgtcagcagatccctacgccgctgaccggccgatgacaggtctgtatgatttcatatctagcttgcatcggcgtacaaggttgatgctgacaggtgacaggttgccttgttattgatgctgagattgctgcccttcacttccttagtgcacagggaggcaatggatggagctctgccacaataaaaacaagatgttcaaaagaacgttattgttgtgttaacgttttgggcataccaactactattttttctgttatgagtctgtcaaacatatgttaaatttgtcgctcatttcttatgagctatttctgtggtcaaagaaagttgtttatttaagtggcatgaatcaaaaaatcttagcagacttctgtttgattttgttgatttttaaaagaaagttgcttcgaaaaaaaaaaaaaaaaaagcggccgcccc

SEQ ID NO: 165617 - DNA, 456 bp, Zea mays
  Clone ID: MRT4577_82626C.1
gaagtcctaagtctttttacagataacggacgcgatcgcccacgcggccgtccacgcgtgaggggcttactagttgatgatattatggggtacaaaatctatactcatgaattacgctctggatatgctgcaaggattgataattttaggagctatgataccgtgagcaaagatgtaattcaaaggtggacatatcctatggtgcctgatgtagtatccagtcgtgattccttggagagtagacttcataggcagggaatatacaaggcatcaaatgtaacaatggcatcttcttctacaaatctaagcatatttctgtgacgctagtgtgactagattagcaggtcactgcaatggaagtaattcagttattgatcatggctacataattgcgaaagatgaacatattaaatgctcatgtatatagcacaatgatatattaggctatgcatgcaa

SEQ ID NO: 165618 - DNA, 1211 bp, Zea mays
  Clone ID: MRT4577_82628C.1
gccggccggggatgacaagtcacatgcgcatgcaaaccaaccacatcacctccctctcctctccacgagagggatgagatgagaacatgatcatcccatgaccccctcctccgccaccgctcgccgccggacctcccagaggaggcgtccccgcaatgccgcctctgcctccgccagggccctcgccgccggcctctggaggctgcgccacgccgagcggatgatggcggccggggcctcgccgccgcccgccgcccaaacgaaaccgcaaaagctcatgggacggagccggacgaggccaagccaccacctctgccgttgccgatgtactagcagcagcactaggaatggcatcctagacaagatcgacgcgtgcttggacggctcctcgtccatggagaaggccaccaaatgggatgccaaccactcgcatctgaggggaagaagtgcacggggactccgattggacaacatcttcttcgcctcgccatcagcaatgtcttcccctctgctgctgctcatggaggcggagctggagaaggcgcgaggcgaagccagggagctggaggaggagcggcgccttatgaccaagcgcctggaccgcttcctgcggaggctggccgaggagaaggcggcgtggaagtcccgggtccgggacaaggcccgccacgccgtggccgccctccaggacgagctcggcgcagagcggaggcaccggaggcagctggagcaggccaacgccaggcttctgcgcgacctggcggaggcgcgggcggcggccaagcagcaggcgcagagctacgagatggagcgcaaggcgcgggagctgatggaggacgcctgctccgagctcacgcgggaggtggaggaggaccaggccgaggtggagctgctccgcggggagtgcctgcgcatgcgggaggagatggaggaggagcgccgcatgctgcagatggccgaggtctggcgggaggagcgcgtgcagatgaagctgtccgacgccaagctcgcgctcgagaacaagtacacgcacctcaaccgcctgcaggcggagatggaggccttcctccgcaacaagggcgacgagtcagcctcccactccgccgtgctgcgggaggcgcgcctcataagcgacgccgctgcagccacaagctcggaccacttccgccgcaaggaaagcgaaagcccggccggcctcgaggtacccaatg

SEQ ID NO: 165619 - DNA, 2774 bp, Zea mays
  Clone ID: MRT4577_82629C.1
catcggcgagcctgcagtcagacttaccaccaagtggacgcagcagctttaaccccccaaagcctcgacgccgcgagcacagctccgccgccaccgcccccttctcatccgcggtctcctccgcctgctgcatctctatcgatctagcgggactggctccttcccgtgctgggtccttcgtcaatcgtcagcgcgcaagatcggcacttgtgtacatctgagcagtttccggtgccctaattcaggcgcgggcgttgttgggttttcgataattttgggggttcacctgaaccctcatgacccaggtgaagcccgcccctgggggaaggatgctgaccgtgctgcgggtgcacctcccgtcggagatcccgatcgtcggctgtgagatcacgccgtatgtgctcctgcggcgccccgacggaggcgtcttcaccgacgacgtgtctgagaccgcgcccgtggatgggtacttcatgcgctacaagtggtaccgcatacaaagtgatcgtagagctgctatctgcagtgtacacccaacagaacaagcaacacttcagtgcatagggtgtctgaagtcaaaaatacctgttgctaagagctaccattgttcttctaagtgcttctccgatgcttggcaacaccacaaggttttgcatgaccgtgctataagtgctttaaatgaaaacggaaccgaagatgatgagttgtttggcagatttggtagcggcagttcgagctcaggggttattagtgctgcgttgtctggttcaacatcaaacctttcactgagctcaggtgttaataatggacctacacctgtgtatccaacaggcactgagaagagttctggtgaaacttggtttgaagtgggatggtcacgaacatatacggcaactactgatgatattggacatgtgctaagatttgaatgtatagttgtggatgtggaaacacgggggactgtgagagctcctacttcagtcatgacatcccgtgtaatcccagcaccgaccccgacaccacgccgcttgatccctgttaatgcagctgatgcaatggtccacttcgatttagatagccggacttcttcttttgggacatttactgtgctgtcctacaatattcttgctgatacatatgcaacaagtgatacatacagctattgtccaacttgggcacttacatgggcttatagaaggcaaaatttgttgcgtgaaattattggttaccatgctgatattatctgccttcaggaggtacaaagtaatcactttgaagattttttttcaccggagcttgataaacatgggtaccaacctctatataagaaaaggacgacagaggtgtacagcggaactcctcaagcaattgatggttgcgctactttctttcgtcgggacagattttcgcatgtcaaaaaatatgaggtcgagttcaataaggctgcacagtctttaactgatgcaattattcctgccgctcaaaaaaagttagctctaaatcgtttggttaaggataatattgcgctaattgcagttttagaagctaaatttagtaaccatggaactgaaaaccctagtaaaaggcaacttctctgtgtggctaatacacatataaatatccaccatgaccttaaagatgtgaagctatggcagattcataccctcctaaaagggttggaaaaaatagctgttagtgcagacattccaatgttggtctgtggagattttaattcaactcctggaagtacgtcacatgggcttcttgcaaggggcaaagttgatcatttgcatccagatctagcaatagatcctcttggaattttgcgtccactaagcaagctgacacaccagcttcctctggtcagtgcatactcatcattcgtgagtatggctggtgttggctatgatttggatcaccagcgaaggaggatggaccctgggacaaatgagccattgttcacaaattgcacaagggattttactggtaccctagattacatattttacacagcggattcattgactgtagagtcattattggagctgttggatgaggatagcttgagaaaagacacagctcttccttctcctgaatggtcatcggatcatatagcgctcctagcagaattccggtgcaagcttagagttagacgatgatactttaggaggagctgtaggggagggattctcgacaatcgcatgagatgatgagaatgtaccctggcgaaggcaggaacgagaagcctaagggaaagaggcttgttatgttcctcacccttttacatttccgcctcgatgttctctagtggcactagttggaatgcgacttcctacagaagatatattatcaatgcaaagagaaatgatttaatagattcgtgtgccgtttttagttttccatcctcacattgtcgcccccccttccccttcatcctcttcaatgtgagttcactgtccacatttttgttccctaccatgaatgtgctctagttcttacaaactaaaaatggccccttccatagtgtatgtatgtctcttgagcagggatcagctttggcgtagtttactgtgttgaagatgcttagttgaaaagtgatgccgggtaatctatgatggatattgaacgaatacctggtgactagagagagcttcacattggggaagctttactgaatgaaaactgtgaattttgatgtatctcttgcagtggtttctgaagcacccatctcaatctattgttatatatatattttttattcctgaacttgctat

SEQ ID NO: 165620 - DNA, 135 bp, Zea mays
  Clone ID: MRT4577_8262C.1
gaggatcagaaagggattcttgaggggtgtttggcaagattcttgacggcatcattatgggttttggatgaaagccagatggtcaacgcagtggatgtgatggagcggaaaagcgttggacatcgacatcgggag

SEQ ID NO: 165621 - DNA, 429 bp, Zea mays
  Clone ID: MRT4577_82630C.1
ggggaaaccaacttttttttatttttcccattttacaaaaaacaaagggaaaaaatccaagattaaaaccgcaaaaggggttaatgggggaaaaatatatccacaaaaaaaatccaaatagcaaaaaaagcttatttacaaaaaggaaacacatgtaaaaataaaggggggtgggggttttcatattaaaaattaaaaaaaaagctccaaggggggccattgtttaaaggaatattgaagggggaaaaaacacttatttagggacaaatataccaaaagggccagcattagggcaaaaaattcaaaaaacctttttaaagctagttaaaaaaaagtaaaaaactggtcccaaaaggcaaaattttggccctaaaaaggtcattcctacaaatttaaagtattctaaaattttaactattgaaaagaaaa

SEQ ID NO: 165622 - DNA, 344 bp, Zea mays
  Clone ID: MRT4577_82631C.1
ctcagacgaacacacctgattttccacatttcttgaacctatttattcctatcgcatctggaggggcagttcctgctacatacatgggatacaaccgatacagttccctcaccttcaatgtctactccagagcacccaacatagccaaaaacctccacattgcgaattgatgaaacgcccacaccagtacctgccactgataatacgtccacttaacagccagaccacgctcggataatctcatccgagagtaaggcacatatctactaagaccaccgtacatctgccgctgatacaggcgctcaattagctcatcgagcatcctgcggacccaataccgttca

SEQ ID NO: 165623 - DNA, 415 bp, Zea mays
  unsure (1)..(415): unsure at all n locations
  Clone ID: MRT4577_82632C.1
gaggaggggagcgcggggcaccgcaccaaagaacccctgcgccggccgcgccggcgccctcgacaagctcgacggcggcgccgacgcccagcccggggaccagcaaagcggcggcgcgacggcggacaaggacgcggggaacgcgacaagggacgccgacggggggggggggcacgccggcaaggcggcggagcgggacaccccgggcgacaggccgaggcgcgccgcgctcaggaactagccgccggacgcgacggccgccgccaagaactgctacgcggacccggcggcgacgcacgccaggcaccngggccgcacgacgcaccactacggcgggcncgacggcggggggggcgccgacggggaccgaccaaaacacagacgggacgcgggggagcgccggcggacacggggg

SEQ ID NO: 165624 - DNA, 340 bp, Zea mays
  Clone ID: MRT4577_82633C.1
ccgttcttttttttttttttgttggttttatggtatttttttgatttttacaacggtacaggtgaaacaccaaataaggggatgaaggaaggggttcgcacaactcgcacacgaacccgggggggaaaaaagaaaacattaacagtccaggtgccaaatgggagcccaacaaaggggtgaacaaatatccagcccgcgcaccccgggaaagaggggccccccgaaggcccggggggggaacagaccccatcagggaaaaataccaccggggggggcaaaaagggaccccgacgttcaaacagggggggccaatggtaccgccaaaattctatgaaggggg

SEQ ID NO: 165625 - DNA, 358 bp, Zea mays
  unsure (1)..(358): unsure at all n locations
  Clone ID: MRT4577_82634C.1
cttgttccctgtttctgcacgcgctcagttcccatggcagccgcacccttcctctgctcggctgcttgcagtgacctctccaccgccctagatttctctatctccctcacggcgccctccctggcgctcgccctgggtgctatcgtctagctcgaacccgcccccagccgcgcctctctttgtcaagcttcctgacgcacgattttctctgccctagcccagcatttttctcctggtggtcgagctccctcaagcttcttagttcgtccgcccgcgaacgcccatggcgcgatcgcctctctgtgcacacgccgtcgccctgatttnctgctccctggctccaactcaagttcgcatg

SEQ ID NO: 165626 - DNA, 607 bp, Zea mays
  Clone ID: MRT4577_82635C.1
gagaaaaataaatagaatgggaagatccgcgttgtagagccacgctcaaggatggaagtattacagccaaataagcaatggcaaagtggcaaaccatttccgaggatggaagctacctgcaggatggaaactagatgtgaccgcgacgtgtctgacaagaataggatgcctgccactttggcactgtaataagctgtacactatccatgtacaatagtactatacttatctccaacaacggcacaatgcaagacacctgcgacgttgtaaagggttcaggaccattttaactcttttggtcatttttctcttttggtcatcaacgattggaccaaatcctttctccaacctaaaattaactctgctttagcataggatgtgtgtgtgaatgtttagaatgccctcaaacataggatgtgtgtgtgaatgtttagaatgccctcaaatgtttgatgtgtcgagtaatattcctatcccaagatagatattgctttcccgctttattaaaacagacttgttacatgtctgtcatatatgtagctacaatacaataacagactcatctagcttccgtaatttaagggaattagctgtgtacaacagtatt

SEQ ID NO: 165627 - DNA, 307 bp, Zea mays
  Clone ID: MRT4577_82636C.1
aggggtcaaacccacttaaactcttcttggctcaaaaatcaaatggcaccacgtcctcctgccggaaacataaaaacagccggcaacccttgtggttgcagccccaacttccaaccaaaggttctactactagtgatggccgtcggagctcgttgctgccaataatacacatttccattccatacctctgaaacgccacacacgccctcgcaaccgtattcacttcactgcgaccactcgtgaaaaagactattcgttctggtggatccaccatattctgaagcaatcagagttcattcagaccaaa

SEQ ID NO: 165628 - DNA, 473 bp, Zea mays
  Clone ID: MRT4577_82637C.1
ggccgggataccttttcacctgcgcccctacattttcttctctatctgatcctccgactcctgctgctccgtccgacaccgcgatccccatgccagagtcaacacggcacctctccggatcaacaagctactgtgatgaaggacacaccaacccgcggcaatgtgtatgcgaccaaaaaagccaataacacggatgcgaaaaccgtacctgcaaagttgagcaggctgcaaccccacggacgggcactcctgaacacgacaaacgtgaatcagccttctaccaaatagtgactgtaaaacaggaagaagatactatacactcatgacagaactgtgtacattccatatgtgcaacgtactagaaatcgtgcggctggcattcctgaagatgtgcgtgggaaacttactcacgtcatcagtgctcacaatagaagagcatagactccatgctgatgagactcttgtggcgcaga

SEQ ID NO: 165629 - DNA, 605 bp, Zea mays
  Clone ID: MRT4577_82638C.1
tcaaacaaaacgggtaaccccatgtaacagcaaacccttaataaaagctgctcttttatatcataatgaataggattaacacccaacatttgcgtggggatcttaccacctaaaataaagcacttggccttcctgcactaggccaccctttaacgctattcaaccacccggatgctttgaatgaggtgacgacccgcatgacctacatgtggactttaaggcaacaaacgccctattctctcccgatgccgcccagtttggccccacccaacggaaagcacttataaaggactcctatagcggtgcacccatattgtgcatgcccttagcgcacgagtaaatgggttggcccattccctattgtcagagaaaccgccgggagctcttacatactgcattgaggtttccctcttgtgaacacgaatgaagactttgatcctgaggtgccattgcactggcccataacactgctcctgaccaatctttaggcccgaccggacaactgaaagagctatcgggtgttgtagaaacccttgggaccatcctattaccccccatcacaggggaccgtccctcggtgaaaccatacctaatgacgagcaaga

SEQ ID NO: 165630 - DNA, 317 bp, Zea mays
  Clone ID: MRT4577_82639C.1
ggggccccccaaaactgaaacccttttgtttttttttaacaaagcccaaaaaaacttaaacttgggaattcgttacagggcgggggttttttatttaaaacacaaaaagacaaccgtgtccaaaaccaggttggttccagcttccaggggccccgttcaaattttttttcagcttaaacaagcagcaaatttggtctgggaccaaaggcctttgggaccacccttgatggggggggaaaaatttttctttttactagcccactggggcttgaacatgtgggggatcagggcaacaacccggttttttttcccggacc

SEQ ID NO: 165631 - DNA, 384 bp, Zea mays
  Clone ID: MRT4577_8263C.1
agatcgaaaatacttaagctgtagaatacaccaattagcgtagccaacgcccggtatacagcggactattcaaaagccgaacctaaagatagactttgtatgatttgtacactacacatgctaaacagtctcagcttgcctcgcttgtggtcacgggtatagcataactacagaccattgacgaagacggtgtcgaaattcaaacaagcaatcgtgcactaaaatagaactagttatcagtcttgtgggggtatacccccggcacttgcttgataagctttacccgcatatgataggcatcgttcccgcgaagcatgtggtgcacccatgtgaccttcggctttatagacaccatttccaaagcccccctaaaaactccactta

SEQ ID NO: 165632 - DNA, 397 bp, Zea mays
  Clone ID: MRT4577_82640C.1
attcggctcgagaacccctacatcttttttagataggctatctcagacacatcctgagagtgagacacaatcttctatggtgttatgaccctggacctgtatggtcatgctgcgactatatggcctgcaggggagatcggcactggttccatacgagtgctgacatgaccatggagtgcaatagtgcgcgagaacgcggataggctaacgacacatgcgacttgcgggaggacacaggacaactcacagactggtggtgaactcagctggaacaaccttatgcatgatactgctaacggccttaaccctttaaggactatgctcaaggctataacagtctggaatggtacaacatgaacgcttagactatccactgaaccctgggtgatgatcttgc

SEQ ID NO: 165633 - DNA, 352 bp, Zea mays
  Clone ID: MRT4577_82641C.1
tcgcgatctagaacctttttttttttttttttttttttttttttttttttttttttttttttttttttttttttttttttggggggccggtgcctcacacaaccagggtttttttttggctatttattggcaaagggaaacatgctttgcatttgtaatataagtaggagccacacaggcgcccttcccggccactaacagggcccacccccccataaatttttccctaaaaattgctcatgcggctaactaatttattcatgcgcctacaaactaataaaccttcttaatttttttaagttcaaaatgacccggccaatggtccaacccattacaaaacttggcggttttt

SEQ ID NO: 165634 - DNA, 405 bp, Zea mays
  Clone ID: MRT4577_82642C.1
gggaaggaatcaattccccagttaaaacttacgttaggtccgcagcagcattacagtaacattttaaacccccgatggagggcaaccgttataacccaaccccacaatgggcacaaccccacaatgggccggggggtcagggagccaccttatttcccttctcctgggactcctcctccttttccgccggcgggtcctgggactggtgggactcggccaccagggcggtcatggtggtttcgggctcggggaactccattttggccatgccctccccggggtaccagggcaggaagggcttgggccggaacatgggcgggaactggttgttgacccgccggaacattttctggatcgagggggagttgccgacaaacggggaccccattgccaggcccggggggg

SEQ ID NO: 165635 - DNA, 341 bp, Zea mays
  Clone ID: MRT4577_82643C.1
aactgatactcatgaccgccttgtgtggccaactgccgaaaatgcagcaaaggaacagcgggctgaagtacaccatggctttaatatgtctcagatacgatcaactgacctgctggatgaaccgactgtgcggatcaataccatacctgatccgcccgagcgacaatcataaaaatcaatccccagaagacagggtactggtagttgaaacggtcgctgctgctacacacatacaaagtgaagtaatgctggtatcatcttaagagagatcgatttttaataatgagccgcttaataccaacatggaaagctcaaacactataggatcttgccttaactga

SEQ ID NO: 165636 - DNA, 408 bp, Zea mays
  Clone ID: MRT4577_82644C.1
cgcatgcgtaggctgacgcttggatccacgcgacggggatccagcccagcggctaatctcaagtgggttactgcaccagccccactaatcgtcggcgataacagcgatggccccatgagcgaacgtcaacacccagggtgctggcaccacaacggaggctaaagcagcctggaagacccctgcgcctgcagactctacctctacctcaagattcaagacctgccaaccgtgggcaacggacagacccaaagactttactaatcccgacacttggatcgagactgtgtcagctgcacccgcctcagcagcgactgacaaagctgcccgtcgcaaggcatctaggagctcagttgcatacgcagcgccagctgctaatacagctgtcatgcacccaccactcaacagcgt

SEQ ID NO: 165637 - DNA, 624 bp, Zea mays
  unsure (1)..(624): unsure at all n locations
  Clone ID: MRT4577_82645C.1
gccggccgggccgggaaggcgggcaaaccgctgcccacgcttgacgactccgccgcacaggacagcagccgaacacaggtgaggtgaggtgactagcgcggcagcctggcgcatatttcaatctcagcaacagaacccacatcgatttgcaacttcagtcaccaccaccacctccaccaaccccaccccggtcagtgtgcgcgtgctgctgcctccccgatccacatcgaaacccaagccaagatgcggcgtccgtcgaggggttcaactgctccgccaaccgcacgtatccgtgccaggcgtacgcgctctaccgcgcgngcttcgcgggcgtaccgctcgacctcgtagccatcggcgacctcttcgccgccagccgcttcatggtcgcgcacgccaacaacctctccaccgccgcggccccggccaccgggcagccgctgctcgtgccgctccagtgcggctgcccctctggatcccctaactcctacgcgccgatgcagtaccagatcgcgtcgggcgacacctactggattatctccaccaccaagctgcagaatctcacgcagtaccaggccgtagagcgcgtcaaccccacgctggtgcccaccaacctcgacgtcg

SEQ ID NO: 165638 - DNA, 715 bp, Zea mays
  Clone ID: MRT4577_82646C.1
ccggcccgggaaaaaaaaaaaaaaaaaaaaaaaaaaaaaaaaaaaaaaaaaaagaacaaccccagatcttcatctgagggtagtacatggttcctactaatctgagctccaactaataccaacatctcccacctcggccgaaaaaacatgtcttccgacggagaaaaggtccccaagagggccgaaagccctgttgccgactctgaaaatgatggcggcaacactgatggtcttcatcgccgactcaacaaccgacaggttcagctcctctccatcggaggcactgtcggtaccggtctcttcatcggtatcgggtgccggtttggccaagagtggccccggaagtctcctcgtctgcacagctctctacgccatggtcctcggtctcaccaacaactctatcgctgaaatgaacacttatatgcctggtttccggtggtttcatccgtctcgctggccactgggtcgacgacgctctcggtttcatggtcggctggaacttcttcctctacgaggcccttctaatccctttcgaaatcgtcgctttgaaacctggttgtctcattctggagtgataacgttacgcaagctggtccaaccgctggcttcatcatcgctggcattattgcttacggtgtgctgaacttactcgctgttggtgtctttggtgaagctgaattctggctggccctcggcaaagccttgctcatcttta

SEQ ID NO: 165639 - DNA, 2577 bp, Zea mays
  Clone ID: MRT4577_82647C.1
gccggcctggcctgggacgaaggatggacgcaggcgggcaaaccgctgcccacgcttgacgactccgccgcacaggacagcagccgaacacaggtgaggtgaggtgactagcgcggcagcctggcgcatatttcaatctcagcaacaggccccacagcgatttgcaacttcagtcaccaccaccacctccaccaaccccaccccggtcagtgtgcgcgtgctgctgcctccccgatccacatcgaaacccaagccaagatgcggccgccggcgctcaggctgagcgcgctgctgctgttcctgtacgcgttccccgtcccagcgcggtcccagaacgcgaccacgaccgcgccggcgtccgtcgaggggttcaactgctccgccaaccgcacgtatccgtgccaggcgtacgcgctctaccgcgccggcttcgcgggcgtaccgctcgacctcgcagccatcggcgacctcttcgccgccagccgcttcatggtcgcgcacgccaacaacctctccaccgccgcggccccggccaccgggcagccgctgctcgtgccgctccagtgcggctgcccctctggatcccctaactcctacgcgccgatgcagtaccagatcgcgtcgggcgacacctactggattatctccaccaccaagctgcagaatctcacgcagtaccaggccgtagagcgcgtcaaccccacgctggtgcccaccaacctcgacgtcggcaccatggtcacgtttcccatcttctgccagtgcccggccgccgccgacaacgccaccgcgctcgtcacctacgtcatgcagcccggggacacctactcgaccatcgccgccgccttctccgtcgacgcccagtcgctcgtctccctcaacgggcccgagccgaggacgcagcagttcgccgagatactcgtgccgctccgccgccaggtgccgggttggctgcccccaatcgtgctccgaaacaacgcctccgcgacgccagcggccccgccgccctccgcttctcccaacgcgaccgtcgtgagaaacgaccggaacggggtcgtcgccgggcttgccgtcgggctgggcgtcgtcggcgcgctctggctgctgcagatgctgctgctggcctgcttgtgcagacggctcagggcgaagggacgaggaggtgacgcagtgctaagcggcgacggcgtcgagggcggcgtgttcgctaagggctcgtccgccgctgctgccggcggcggggagaggttcctggtcagcgacatgtctgagtggctggacaagtacagggtgttcacggtggaggagctggagcgcggcaccggggggttcgacgacgcgcacctcgtcaacggcagcgtgtacaaggccaacatcgacggcctggtgttcgccgtgaagaagatgaagtgggacgcctgcgaagagctcaagatcctgcaaaaggttaaccacagcaacctggtgaagctggaggggttctgcatcgactcggcgacgggcgactgctacctggtgtacgaatacgtggagaacggatcgcttgacctgtggctgctggaccgcgaccacgcgcggcgcctgaactggcgcgcgcgcctccacatcgcgctggacctcgcccacggcctgcagtacatccacgagcacacctggccgcgcgtggtgcacaaggacatgaagagcagcaacgtcctcctggacgcccgcatgcgcgccaagatcgccaacttcggcctcgccaagacgggccacaacgccatcaccacgcacatcgtgggcacccaggggtacatcgcccccgagtacctcgccgacggcctcgtcaccaccaagatcgacgtgttcgcctacggggtcgtcctgctggagctggtgtccgggcgcgaggccgcggacgagagcggggagccgctgtgggcggacgccgaggacagggtgttccgggaccgcgacgagaggctggaggcccgcgtcgcggcgtggatggacccggcgctcgcggagcagacgtgcccgctgggaagcgtggcgaccgtggtgagcgtggcgagggcgtgcctgcacaaggacccgtccaagcgacccagcatggtggacgtagcctacacgctgtccaaggcggacgagcacttcgccgactactccggtgagagcgtgtcggttgacggcagcggcgagatcgctgctcggtgaaccatcatccttcgtttcgtcgtgtactcggtcctagtcagtagtaatatggtttttagccatcagttcgcgttgtaaatgttaaaaaaaggtctagcgagcggaggatgagtcagcactcagcagtgagtatatatagtagtattgaataataacaccggcattccgcgagcctgtgactgtgagtgtgaggtgcatgaaatgaaataccgacaacgaggtgcctgaaaaaaaaaaaaaaaaaaaactcgagatgggggtcggtaaccagcctgatcgctgacgagtgccatccagatgaccactcaagcctttcattgagccgtcatccctttcttatgtacttcgactagtcagctagtgtaacatggggatgaaaat

SEQ ID NO: 165640 - DNA, 3582 bp, Zea mays
  Clone ID: MRT4577_82648C.1
atggtgcaaatcgtggagcatcgcgctgagatttcaacgaatttcctggtggaggaagaagctgtttcttccacgccacaggttcccaaccgcgcagtgccgagcactgctgctgtgcacgctgcacggcagcatacaactgcgcagacatcccggactccatcgagggcggttccgggagcattgtcagcagccagggagttgctgcgtcaccctctaagctccacggcctcaccgggggccatgaagcagtggcgagacgacgtcgaccgactgctcggcatggcacattctaccttgactaggtcgaggccacgaaacatgaatgtttcacacacgcaattcttactcgtacacacaaccgcaataatgggtgatagacgtgattggatgtatgaaggtttcaagaagggtgggtgtcacacaagtgaatggtttgccaagacgcagatgtttctggaccatgcagctgctttgtcacaaatagataatattaggtgtccatgcaataaatgtagaaatatgacgatccacaccaagaggcaggtcacactacacctgtgctcgcatggttttgtgccaggctataaggtctggtatctccacggggagtcacgccttgaacgagcagcagaagtagaagttgatgacggtgaagatgatattcataggatggaccagatgcttgaggatctgcagcctgaactggcaccagatcatcatgattcacctacaccggaggttcagaagttcttcgacctacttaaagcgtcagaagagcctcttcacgggcacactgacgtgaccgaacatggcagagaacagaaatgcttaaaatgtgggaagtcgaggtacgtggagcttgtaaatgaagatggggagaaggtgatgacaaaggttgcacataaacagcttcggtacatgcctctcactcctagagtgaaacgtttgtttctctcgaggaagaccgctatgaacatgaggtggcataaagattgtacggacagacaagatgggttaatgttgcacccgtcagatggtgatgcatggaaggctcttgataaatttgatccatattttgccagcaatgcaagaaacgttcgtatcggcttggcaactgatggtttcacgccgttcaatttgaccgctgcgtcgtattcatgttggcctgtcattgccataccatacaaccttccacctactctttgcatgaaatatgagtttatgttcctatgtcttgttatacctgggcctgagcatcctggcgtacgcctcaatgtgatgcttcaaccactgattgaagagttaaagaagctatggcaaggtgtggaagcctatgactgcttgaagaagcagaaattcaatcttcgtgttgcatatctgttctcggttcatgattttatggcgtatggtattttctctggatggagcgtgcatggtagattgacgtgtccttattgtgctaaagatacagattgttttcgtcttagtgctggtggcaagatatgttactttgattgccatagatgttttctacccttcaatcaccccttcagaaggcagagaaaggaatttaggaagggcaccatcgtcacgaagggaccgcccaagcgacgtagtgggatagaaattacagaagagcatatgaaacttgtcctagacgagagtgggaaaaggaattgggaggacctgtcctttgacggcaagggacaccacactcaggttaaccttacgttgggttctctttgccgccttcactaccctggtatagtgaaggtgtcaaacggtgataccgaggatgaggtgctcgtcagtacctgggacgagtacaagtttaaaaaggaacaaaaccacaccgacagacagggacttgtgcgtaatgacttttggcttcgatatcggttgcctgacggagaggattacatggggcacgctgaacgtgtcttccaaaacaatgcaaagaagctggtgaaggatgccatatactatgcgagaattcaggctacaaacctgtattttcaaaagcatcaggaagaagcaggccccttgaataaaaaggaagggtcctcaaagatatatttgactgaggatcaatatcgtgaggtgatggttccatggatggtgcccgtgcctgatgcgtactatgcttggtgtcgatattgggcttccgaaggcttccagaaagcgtcagcgcatcacagacaatgtcgaggaaccaatcctaaccacaagtttggcggtgacgacatgatacgaaaagctaaaagaatggcggcatatggggaggagatggttcgtcgccatggccctgacttcgactggcgccatgaatcggtggatccctcggtggtgtacgcaagtggtggtggcaaagcgcatggacactcatgctctcgtcgaccgaacgagcaggagttagagattatgaggatgtgtgaagagatgagacaacaacgcgaatttatggaggcttgcaatgcacataaccaagcgatgtatcaattaatgcagcaacatggcatgacaacaaattttccaccaccaccacaatggagccaatttgcaaacacaccagttccatcaccacagttcaacacccctccgacacatatacctgcacctggagatagggttatgcccgaagcgggtggtagtgggtctgatcctgcagcagggactggatttgttgactcgctcttcgcattccctcctcctggtggtggtggtggcggcggtcaaagctctaaccacccaagtggtggtgtacgtcacatcaccacaatcacagcagcaggtggaaacaccgctgtgatggcgacatattttcatgtcgccttgtctagacctgcccggacttggctcatgaacctcgcccctgggtcaatctactcctgggaagagctctacgcgcggttcgttgcgaacttcgccagcgcttaccagcagcacggtgtggaggcccacctccacgcggtaaggcaggagcccggggagactctcccgacgttcatctcccgcttcaccaagggtgtacgtgatgagaaaatgttggagaagttggccacgcatgacgtggagaccgtccccacacttttcgctctggccgacaaatgcgccagagtcgccgagggccgtgcatggcactcggccccacaaaccggggctgcccagtcgggtggctcgggtgccgtccctcgggacggtaggaagaaaaagaagaaggaccgcgactaccagaagtcgcggtccaccactctagttgttgcagccgcgaccgggggtcggggcgaccgcaacaaacgcccacggctgcagaggggtaacagcggctcatgccctgtgcaccccaacggtcgcaatagcgccgcggagtgctgcgatatcattgacctcgcgaaacgtgtcagcgagcggcgtgagcagtcttccaaggacggctccccacctcgtcgccgatctggcaaagaaaaggtcgacgacggtgaggtggccacggctgaacgggaccttgggtatgagtcacccgagggggacctgaaggatgtctttgccggagactcccactctggtggcgacaactag

SEQ ID NO: 165641 - DNA, 2178 bp, Zea mays
  Clone ID: MRT4577_82649C.1
atgggtgatagacgtgattggatgtatgaaggtttcaagaagggtgggtgtcacactagtgaatggtttgccaagtcgcagatgtttctggaccatgcagctgctttgtcacaaatagataatattagatgtccatgcaataaatgtagaaatatgacgagccacaccaagaggcaggtcacactacacctgtgttcgcatggtttcgtgccaggctataaggtctggtatctccatggtgaagatgttgaacgagcaacagaagtagaagttgatgacggtgaagatgatgttgataggatggaccaaatgcttgaggatctgcagcctgaactggcaccagatcatcatgattcacctacaccagaggttcagaagttcttcgacctactcaaagcgtcagaagagcctcttcacgggcacactgacgtgaccgtactggaattcgtgacccggctgatgtcaatcaagtccaagtttgcattctcaattaattgttacaaggagcttgtggatttgattagcgaggttcttcctacgggtcacaagatgcccaaagacatgtaccagtccaagaaattgcttgaaggtcttggtatggagtatgagaagattgatgtttgccaagacaactgtatgcttttttggaaggaacatggcagagaacagaaatgcttaaaatgtgggaagtcgaggtacgtggagcttgtaaatgaagatggggagaaggtggtgacaaaggttgcacataaacagcttcggtacatgcctctcactcctagagtgaaacgtttgtttctctcgaggaagaccgctatgcacatgaggtggcataaagattgtacggacagacaagatgggttaatggtgcacccgttagatggtgatgcatggaaggctcttgacaactttgatccagattttgccagcgatgcaagaaacgttcgtatcggcttggcaactgatggtttcacgctgttcaatatgaccgctgcgtcgtattcatgttggcctgtcattgccataccgtacaaccttccacctgctctttgcatgaaatatgagtttatgttcctatgtcttgttatacctgggcctgagcatcctggcgtatgcctcaatgtgatgcttcaaccactgattgaagagttaaagaagctatggcaaggtgtggaagcctatgattgcttcaagaagcagaaattcaatcttcgtgttgcatatctgttctcggttcatgattttatggcgtatgaagaagcaggccccttgagtaaaaaggaagggtcctcaaagatatatttgactgaggatcaatatcgtgaggtgatggttccatggatgacgcccgtgcctgatgcgtactatgcttggtgccgatattgggcttctgaaggcttccagaaagcgtcagcgcatcacagacaatgtcgaggaaccaatcctaaccacaagtttggcggtgatgacatgatacgaaaagctaaaagaatggaagctacaagtggccaaaagcctagtgacattgaggtctaccaggagggccacaaaggaccagacccgaacaaccctgaccagctctgcagccagacaaccacggatcgcttggcggcatatggggaggagatggttcgtcgccatggccctgacttcgactggcgtcatgaaccggtggatccctcggtggtgtacgcaagtggtggtggcaaagcgcatggacgatacacactcttcgacggattcattgactcgtcgtcggtgagatatcagaggacaggttcgtcttcccgtagctcatgctctcgtcgaccgaacgagcaggagttagagattatgaggatgcgtgaagagatgagacaacaacgcgaatttatggaggcttgcaatgcccataaccaagccatgtatcaattaatgcagcaacagggcatggcaacaaattttccaccgccaccacaatggagccaatttgcaaacataccagttccaccaccacagttcaacacccctctgccacatatacctgcacctggagatagggttacgactgaagcgggtggtagtgggtctgatccagcagggactggatttgttgactcgctcttcgcattccctcctcctggtggtggtggcggcagcggccaaagctctaaccacccaagtggtggttatctctaa

SEQ ID NO: 165642 - DNA, 179 bp, Zea mays
  Clone ID: MRT4577_8264C.1
cggaaggaacgggtggacccacgcatgcgtgcgaccatacgcctgatgactgggagcgtttcgtacgccaacacgtgcttctgttttaggacgaacattccttttggctgcgatgttctcatgaatttagtacagaatagcgagagaacattaacttagcgcggtgggaatttgacacc

SEQ ID NO: 165643 - DNA, 294 bp, Zea mays
  Clone ID: MRT4577_82650C.1
gcccaataagctaggactaccgaagggcagcaagatggccatcgttcgtgagatgatctacggcgttgaccgctacagatactggcgtgtcaacattgctctggttaatggcattatgcaggagatcaccatgtggagcacgtgatggatctaatcgcaactgtatcgatacaattatgatgttggttaaacatactaaacccacaaggctatgtgtgactatgatcaactttttatgaacaggtatgtgacctttattattgtcttgacttgtggtggcaccaatatgcgtct

SEQ ID NO: 165644 - DNA, 2031 bp, Zea mays
  Clone ID: MRT4577_82651C.1
atgtttggggaggaaatgaatttgaatgatgacttacgtcagttatctattggaagcgtaactgccaaaagctatggacgttacgacatcaatggatatcgctttcgttcatgcattttcgaattaagtcatcctatggccgccactcaaaatagtggagtcgttactagggcaaccgacatggaaggacacgaagcctgctattacgggaaaatcaaaaatataattgagattacatttgctggaaataagcctttagcgctagttttctttgagtgtaaatggtatgacccgaagtattataggaccgaatttgggatgacacagatccaacctgaaaaattgcttcaaggacacgacacgtatatccttgcccatcaagaagaccaagtttatttctcgacatatccatgcaaaaagttgtctaaatggaggattgtgtacaatgtaaatccccgcgaatgtctatacactcctggtgaggacgaatatcaaattggtcaccttgagcaggttgatgagaagtcagtgaaggggctgttcaagggcctgggcctttttcaaggcagttcttcgagcagcagcagacgtcgagagctattgagcgcggtacatggagatgaggatgagcagcacactgaggagcagcacattgaggaggagcagcacaatgaggctgagcagcacaatgaggaggtggagcacaatgaggaggtgaagcacgtgacatgggaccaggccgcacagcatcaccagccatgggaccagtgggaccaccagagagagcaacaacaggcgtgggaccagtggggccaacagggcgaaccggctaacaacccgatggatgatggctcgggaggctcttcagcgacacgcacacgtcgctcaagaaaaagccactcagtaaagccttgtcacgcgatagagcgagaggctgataggactttaatcatgccacatggagatcggaattgggaggacctgttctttgacggcaagggacacgacactcaggttaaccttacgttgggttctctttaccaccttcactaccctggtatagtgaaggtgtcaaacggtgataccgaggatgaggtgctcgtcagtacctgggacaagtacaagtttaaaaaggaacgaaaccacaccgatagacagggacttgtgcgtaatgacttttggcttcgatatcggttgcctgacggagaggattatatggggcacgctgaacgtgtcttccaaaacaatgcaaagaagctgcatccggaagaagcaggccccttgaataaaaaggaagggtcctcaaagatatatttgactgaggatcaatatcgtaaggtgatggttccatggatggcgcccgtgcctgatgcgtactatgcttggtgtcgatattgggcttccaaaggcttccagaaagcgtcagcgcatcacagacaatgtcgaggaaccaatcctaaccacaagtttggcggtgacgacatgatacgaaaagctaaaagaatggaagctacgagtggccaaaagcctagtgacattgaggtctaccaggagggccacaaaggaccagacccgaacaaccctgaccagctctgcagccagacagccacagatcgcttggcggcatatggggaggagatggttcgtcgccatggccctgacttcgactggcgccatgaaccggtggatccctcggtggtatacacactcttcgacagattcattgactcgtcgtcggtgagatctcagaggacgggttcgccttcccgtacctcatgctctcatcgatcgaacgaacaggagttggagattatgagtatgcgtgaagagatgagacaacaacgcgaatttatggaggcttgcaatgcacataaccaagcgatgtatcaagttacgcccgaaccgggtggtagtgggtctgatcccgcagcagggactggatttgttgactcactcttcgcgttccctcctcctgatggtggtggcggcagcggtcaaagctctaaccacccaaatggtggttatctctaa

SEQ ID NO: 165645 - DNA, 4050 bp, Zea mays
  Clone ID: MRT4577_82652C.1
atgggtgatagacatgattggatgtatgaaggtttcaagaagggctataaggtctggtatctccacggtgaagatgttgaacgagcaacagaagtagaagttgatgatggtgaagatgatgttgataggatggaccagatgcttgaggatctgcagcctgaactagcaccagatcatcatgattcacctacaccggaggttcagaagttcttcgacctactcaaagcgtcagaagagcctcttcacgggcacactgacgtgaccgtactcgaattcgtgacccggctgatgtcaatcaagtccaactttgcattctcaattaattgttacaaggagcttgtggatttgattagcgaggttcttcctacgggtcacaagatgcccaaagacatgtaccagtccaagaaattgcttgaaggtcttggtatggagtatgagaagattgatgtttgccaagacatatgtatgcttttttggaaggaacatggcagagaacagaaatgcttaaaatgtgggaagtcgaggtacgtggagcttgtaaatgaagatgggcagaaggtggtgacaaaggttgcacataaacagcttcggtacatgcctctcactcctagagtgaaacatttgtttctctcgaggaagaccgctatgcacatgaggtggcataaagattgtacggacagacaagatgggttaatggtgcacccgtcagatggtgatgcatggaaggcttttgacaaatttgatccagattttgccagcgatgcaagaaacgttcgtatcagcttggcaactgatggttttacgtcgttcaatatgaccgctgcgtcgtattcatgttggcctgtcattgccataccgtacaaccttccacctgctctttgcatgaaatatgagtttatgttcctatgtcttgttatacctgggcctgagcatcctggcgtacgcctcaatgtgatgcttcaaccactgattgaagagttaaagaagctatggcaaggtgtggaagcctatgactgcttcaagaagcagaaattcaatcttcgtgttgcatatctattctcggttcatgattttatggcgtatggtattttctctggatggagcgtgcatggtagattgacgtgtccttattgtgctaaagatacagatggttttcgtcttagtgctggtggcaagatatgttactttgattgccatagatgttttctacccttcaatcaccccttcagaaggcagagaaaggaatttaggaagggcaccattgtcacgaaaccgcccaagcaacgtagtgggatagaaattacagaagagcatatgaaacttgtcctagacgagagtgggaaaaggtatcaaggttttggtgaggagcataactggactcacatatgtggcttgcgggagcttccttatgctaagtcattgattttgatgcacaacatcgacgtcatgcataaagagagtaacttttgtcaagccctcataaatacatgcatggatttccctgataaaacgaaagacaatgacaaggcacgcatggacttagcagtgatatgtgatcgtccaacccaagtgcttagagaaaacggaggcaaaccaaaagctgactattgtctgaaatctaagcaacggaaagaagtgatgaagtggatgaaggatattaaattccccgatggttatgccgctggttttagaagatctgtgaacttgaagacaatgaagatgaatggactgaagagccatgacttccacataattatggagaggctcatgcctgtaatgtttcgtgggtacatttccgaagctgtgtggaaaacgttagctgaacatctctttgtacatcttccatatgaggctaaggtcggtggtcctgttcagtacaggtggatgtttcatatagaaagagcattaaagaagcttagagcaatggtgggcaataaggcaagagttgaaggatgtattgctgaacaatttaaactaaaggaggtagcacacttcacaagttgttactttgcagaagaacataatgtatttgctcgaaagaaaatgtaccatgatgatgaacgagagatgcctccgtgtagtgatctttcaatttttcagacaaacgacaaagccgttggtccacccaaggcatatcaccttagtatggaagaacagaagtctgctttactgtacatgttcacgaatatgcctgaggtggagaaatacttggtcgagttcgatgaacaaaacatgaggtgtctcggtaggccaacagcgagagacatagacaaattgcgacgcgatggtatgcatgggcgacctaatttcattatgtggcttcggggccgttttggggaggaaatgaatttgaatgatgacttacgtcagttatctattggaagcgtaactgccaaaagttatggacgttacgacgttagtggatatcgctttcgttcaagcattttcgaatcaagtcatcctatggccgccactcaaaatagtggagtcgttactagggcaaccgacatggaaggacacgaagcctgctattacgggaaaatcaaaaatataatcgagattacatttgctggaaataagcctttagcgctagttttttttgagtgtaaatggatgccgccaaaatcaaagaagtcagtgaaggggctattcaagggcctgggcctttttcagggcagttcttcgagcagcagcagacatcgagagctgttgagcgcggtacatggagatgaggatgagcagcacactgaggagcagcacattgaggaggaggagcacaatgaggctgagcagcacaatgaggaggtggagcacgtgacatgggaccaggccacacagcatcaccagccatgggaccagtgggaccaccagagagagcagcaacaggcgtgggaccagaattgggaggacctgtcctttgacgacaagggacaccacactcaggttaaccttacgttgggttctctttgccgccttcactaccctggtatagtgaaggtgtcaaacggtgataccgaggatgaggtgctcgtcagtacctgggacgagtacaagtttaaaaaggaacgaaaccacaccgatagacaggaacttgtgcgtaatgacttttggcttcgatatcggttgcctgacggagaggattacatggggcacgctgaacgtgtcttccaaaacaatgcaaagaagctggtgaaggatgtcatatactatgcgagaattcaggctacaaacctgtattttcaaaagcatccggaagaagcaggccccttgaataaaaaggaagggtcctcaaagatatatttgactgaggatcaatatcgtgaggtgatggttccatggatggcgcccgtgcctgatgcgtactatgcttggtgtcgatattgggcttccgaaggcttccagaaagcgtcagcgcatcacagacaatgtcgaggaaccaatcctaatcataagtttggcggtgacgacatgatacgaaaagctaaaagaatggaagctacgagtggccaaaagcctagtgatattgaggtctaccaggagggccacaaaggaccagacccgaacaaccctgaccagctctgcagccagacagccacggatcgactggcggcatatggggaggagatggttcgtcgccatggccctgacttcgattggcgccatgaaccggtggatccctcggtggtgtacgcaagtggtggtggcaaagcgcatggacgatacgcactcttcgacggattcattgactcgtcgtcggtgagatctcagaggacatgttcatcttcccgtagctcatgctctcgtcgaccgaacgagcaggagttggagattatgaggatgcgtgaggagatgagacaacaacgagaatttatggaggcatgcaatgcacataaccaagcgatgtatcaagttacgcccgaagctggtggtagtgggtctgatcccgtagcagggactggatttgttgactcgctcttcacgttccctcctcctggtggtggtggcggcagcggtcaaagctctaaccacccaagtggtggttatccctaa

SEQ ID NO: 165646 - DNA, 285 bp, Zea mays
  Clone ID: MRT4577_82653C.1
ataatattgctaaaatatcagctttaaaatatgaaagtgctagattctgttattttcttcttattttggatgaagtaccccaacctgtttacatttagcgataaaattatttttctatgatataatttgtaaatgtaaattattccgatctgacatatctgcattataataataggagaatagaagaactggtagccacagtggtgaaattggaaagagaatttcttcctgaaacctttgtcttaaaaatactcagctttcaatgtatcaaagatacaattaaat

SEQ ID NO: 165647 - DNA, 1212 bp, Zea mays
  Clone ID: MRT4577_82654C.1
atggatgatggctcaggaggctcttcagtgacacgcacacgtcgctcaagaaaaagccactcagtaaagcctcgtcacacgatagagcgagaggctgataggatcttaatcatgccacatggagatcggaattgggaggacatgtcctttgacgacaagggataccacactcaggttaaccttacgttgggttctctttaccgccttcactaccctggtatagtgaaggtgtcaaacggtgataccgaggatgagcttcgatatcggtttcctgacagagaggattacatggggcacactgaacgtgtgttccaaaacaatgcaaagaagctggtgaaggatgccatatactatgcgagaattcaggctacaaacctgtattttcaaaatcatccaaaagcaggccccttgaataaaaaggaagggtcctcaaagatatatttgactgaggatcaatatcgtgaggtgatggttccatggatggcgcccatgcctgatgcgtactatgcttggtatcgatattgggcttccgaaggcttccagaaagcgaagctacaagtggccaaaagcctagtgacattgaggtctaccaggagggccacaaaggaccagaccctaacaaccctgaccaactctgcagccagacaaccacggatcggctggcgacatatggggaggcgatggttcgtcgccatggccctgacttcgactggcggcatgaaccggtggatccctcggtggtgtacgcaagtggtggtggcaaagcgcatggatggtttcgtggtcgtccggggaggtggcgaccgcggtggtgtccggaatacgtcaccggatttcgagttccgctgtgcgctgtgggtggcttgttcacctctgcgaatcccgcaatgctcagctctaaccatcctctttggtaagccttacacttcacgtgagctcccacctttgttaatgcagcaacagggcatgacaacaaatattccaccgccaccacaatggagccagtttgcaaacacaccagctccgccaccacagttcaacacccctccgacacatatacctgcacctggagatagggttacgcccgaagcgggtggtagtgggtctgatcccacagcagggactggatttgttgactccctcttcgcgttccctcctcctggtggcggcagcggtcaaagctctaaccacccaagtggtggttatctctaa

SEQ ID NO: 165648 - DNA, 3738 bp, Zea mays
  Clone ID: MRT4577_82655C.1
atgggtgatagacgtgattggatgtatgaaggtttcaagaagggtgggtgtcacacaagtgaatggtttgccaagacacaaatgtttctggaccatgcagtcgctttgtcacaaatagataatattaggtgtccatgcaataaatgtagaaatatgacgagccacaccaagaggcaggtcacactacacctatgctcgtatggtttcgtaccaggctataaggtctggtatctccacggtgaagatgttgaacgagcaacagaagtagaagttgatgacggtgaagatgatgttgataggatggaccagatgcttgaggatctgcagcctgaactggcaccagatcatcatgattcacctacaccggaggttcagaagttcttcgacctactcaaagcgtcagaagagcctcttcacgggcacactgacgtgaccgtactcgaattcgtgacccggctgatgtcaatcaagtccaagtttgcattctcaattaattgttacaaggagcttgtggatttgattagcgaggttcttcctacgggtcacaagatgcccaaagacatgtaccagtccaagaaattgcttgaaggtcttggtatggagtatgagaagattgatgtttgccaagacaattgtatgcttttttggaaggaacatgacaaagaacagaaatgcttaaaatgtgggaagtcgaggtacgtggagcttgtaaatgaagatggggagaaggtggtgacaaagattgcacataaacagcttcggtacatgcctctcactcctagagtgaaacatttgtttctctcgaggaagaccgctatgcacatgaggtggcataaagattgtacggacagacaagatggtttaatggtgcacccgtcagatggtgatgcatggaaggctcttgacaaatttgatccagattttgccagggatgcaagaaacgttcgtatcggcttggcaactgatggtttcaccccattcaatatgacaactgcgtcgtattcatgttggcctgtcattgccataccgtacaaccttccacctgctctttgcatgaaatatgagtttatggtcttgttatacctgggcctgagcatcctggcaaggcagagaaaggaatttaggaagggcaccattgtcacgaagggaccgcccaagcgacgtagtgggatagaaattacagaagagcatatgaaacttgtcctagacgagagtgggaaaaggtatcaaggttttggtgaggagcataactggactcacatatgtggcttgtgggagcttccttatgctaagtcattgattttgatgcacaacatcgacgtcatgcatcaagagagtaacttttgccaagccctcataaatacatgcatggatttccctgataaaacgaaagacaatgacaaggcacgcatggacttagcagtgatatgtgatcgtccaacccaagtgcttagagaaaacagaggcaaaccaaaagctgactattgtctgaaatctaagcaacggaaagaagtgatgaagtggatgaaggatattacattccccgatggttatgccgctggttttagaagatctgtgaacttgaagacaatgaagatgaatggactgaagagccatgacttccacataattatggagaggctcatgcctgtaatgtttcgtgggtacatttccgaagctatgtggaaaacgttagctgaagttagctatttctacagacagttgtgtgctaaagaaatcagaagagatgtgatggaacagctggagaaagaggcaccgatgcttttgtgcaaattggaaaaaatatttccaccgggtttcttcaatcctatgcagcatctctttatacatcttccatatgaggctaaggtcggtggtcctattcagtataggtggatgtttcatatagaaagagcattaaagaagcttagagcaatggtgggcaataaggcaagagttgaaggatgtattgcggaacaatttaaactaaaggaggtagcacacttcacaagttgttactttgcagaagaacataatgtatttgctcgaaagaaaagcgtaactgccaaaagctatggacgttacgacgtcaatggatatcgctttcgttcaagcattttcgaatcaagtcatcctatggccgccactcaaaatagtggagtcgttactagggcaaccgacatggaaggacacgaagcctactattacgggaaaatcaaaaatataatcgagattacatttgctggaaataagcctttagtgctagttttctttgagtgtagatggtatgacccgaagtattataggaccgaatttgggatgacacagatccaacctgaaaaattgcttcaaggacacgacacgcatatccttgcccatcaagcagaccaagtttatttctcgacatatccatgcaaaaagttatctaaatggagggttgtgtacaatgtaaatccccgtgaacgcctatacactcctggtgaggacgaatatcaaattggtcaccttgagccggttgatgaggatgccgccaaaatcaaagaagtcagtgaagggctgttcaagggcctgggcctttttcagggcagttcttcgagcagcagcagacgtcgagagctgttgagcgcggtacatggagatgaggatgagcagcacactaaggagcagcacattgaggaggagcagcacaatgaggctgagcagcacaatgaggaggtggagcacaatgaggaggtggagcacgtgacatgggaccaggccgcacagcatcaccagccatgggaccagaattgggaggacctgtcctttgacggcaagggacaccacactcaggttaaccttacgttgggttctctttgtcgccttcactaccctggtatagtgaaggtgtcaaacggtgataccgaggatgaggtgctcgtcagtacctgggacgagtacaagtttaaaaaggaacgaaaccacaccgacagacagggacttcttcgatatcggttgcctgacggagaggattacatggggcacgctgaacgtgtcttacaaaacaatgcaaagaagctggtgatggttccatggatggcgcctgtgcttgatgcgtactatgcttggtgtcgatattgggcttccgaaggcttccagaaagcgtcagcgcatcacagacaatgtcgaggaaccaatcctaaccacaagtttggcggtgacgacatgatacgaaaagctaaaagaatggaagctacgagtggccaaaagactagtgacattgaggtctaccaggagggccacaaaggaccagacccgaacaaccctgaccacctctgcagccagacagccacggatcgactggcggcatatggggagaagatggttcgtcgccatggccctgacttcgactggcgccatgaaccggtggaatccctcggtggtgtacgcaagtggtggtggcaaagcgcatggacgaggacgggttcgtcttcccgtagctcatgctctcgtcgaccgaacgagcaggagttggagattatgaggatgcgtgaggagatgagacaacaacgagaatttatggaggcatgcaatgcacataaccaagcgatgtatcaagttacgcccgaagcgggtggtagtggttctgatcccgtagcagggactggatttgttgactcgctcttcgcgttccctcctcctggtggtggtggcggcagcggtcaaagctctaaccacccaagtggtggttatccctaa

SEQ ID NO: 165649 - DNA, 614 bp, Zea mays
  Clone ID: MRT4577_82656C.1
gggtacacgcgctctccctcgagttttttttttttttttttttttttttttttttttttttttttttttttttttttttttttttttttttggagaaacaaaggaaaggaacccagttggggcatccctatccaaaagggaactaaactacccccccgttcgccttggcaaccgttttgcataaggggggggggaacccaatcgaccaaacaaaaaagggccaccccccccctctataaaaattaacgggaaacccccccccccccgggggggccaaaacaaaaaaaagcagcaaacagcaaggcaaggaaatggcagccaaacaaccacttttcgcccaaagttagttgggcctgggaggggaaccattttccccggcccttttttaaaaaggggccgccgaaatctcgcaggaccacgggactacaaacaacttttggggccacgagcaacacagcacagccacccccccaggaaaactttttggccgggacccaaaatggggacgggggggcgcccttcagaaaaccaagttcctgggggggaaaaaagttccgaaggggacttctggtgggccattccggggatacccccggcccaagcaattagcaaaa

SEQ ID NO: 165650 - DNA, 192 bp, Zea mays
  Clone ID: MRT4577_82657C.1
agggaatgtcggcctgcgagggaggattagcccgccgtctgtgtctctagaacggcgcggcggtctgagaagcatgttttatactgggagtctgtctactccccggtagaatgggtacttccggtaccgcggatgaatacccgattaggcccaaacttactcccggtctttagttttgttaccctcgtggag

SEQ ID NO: 165651 - DNA, 3486 bp, Zea mays
  Clone ID: MRT4577_82658C.1
atgacgctcatcatcaagagcttccgccaaatcctcaagcaaaggagggggaaagattacaagtcccgctccaagaaagtttgctacaaatatggtaagcccggtcattttattgctaaatgtccattgtctagtgatagtgacaggggcgacgacaagaggaaggaaaagaagagatactacaagaagaagggcggcgatgcccactttaactacttatctatagatgtatgtgtgacgtttagaaacatgaatgtctcacacacgcaattcttattcgtacacacagccgcaataatgggtgatagacgtgattggatgtatgaaggtttcaagaagggctataaggtctggtatctccacggggagtcacgccttgaacgagtagcagaagtagaagttgatgacggtgaagatgatgttgataggatggaccagatgcttgaggatctgcagcctgaactggcaccagatcatcatgattcacctacaccggaggttcagaagttcttcgacctacttaaagcgtcagaagagcctcttcacgggcacactaactccaagtttgcattctcaattaattgttacaaggagctcgtggatttgattagcgaggttcttcctacgggtcacaagatgcccaaagacatgtaccagtccaagaaattgcttgaaggtcttggtatggagtatgagaagattgatgtttgccaagacaactgtatgcttttttggaaggaacatggcagagaacagaaatgcttaaaatgtgggaagtcgaggtacgtggagcttgtaaatgaagatggggagaaggtggtgacaaaggttgcacataaacagcttcggtacatgcctctcactcctagagtgaaacatttgtttctctcgaggaagaccgctatgcacatgaggtggcataaagattgtacgaacagacaagatgggttaatggtgcacccgtcagatggtgatgcatggaaggctcttaacaaatttgatccagattttgccagcgatgcaagaaacgttcgtatcagcttggcaactgatggtttcatgtcgttcaatatgaccgctgcgtcgtattcatgttggcctgtcattgccataccgtacaaccttccatctgctctttgcatgaaatatgagtttatgttcctatgtcttgttatacctgggcctgagcatcctggcgtacgcctcaatgtgatgcttcaaccactgattgaagagttaaagaagctatggcaaggtgtggaagcctatgattgcttcaagaagcagaaattcaatcttcgtgttgcatatctgttctcggttcatgattttatggcatatggtattttctctggatggagcgtgcatggtagattgacgtgtccttattgtgctaaagatacatattgttttcgtcttagtgctggtggcaagatatgttactttgattgccatagatgttttctacccttcaatcaccccttcagaaggcagagaaaggaatttaggaagggcaccatcgtcacgaagggaccgcccaagcgacgtagtgggatagaaattacagaagagcatatgaaacttgtcctagacgagagtgggaaaaggtatcaaggttttggtgaggagcataactggactcacatatgtggcttgtgggagcttccttatgctaagtcattgattttgatgcacaacatcgacgtcatgcatcaagagagtaacttttgccaagacctcataaatacatgcatggatttccctgataaaacgaaagacaatgacaaggcacgcatggacttagcagtgatatgtgatcgtccaacccaagtgcttagagaaaacggaggcaaaccaaaagctgactattgtctgaaatctaagcaacggaaagaagtgatgaagtggatgaaggatattaatttccccgatggttatgccgctggttttagaagatctgtgaacttgaagacaatgaagatgaatggattgaagagccatgacttccacataattatggagaggctcatgcctgtaatgtttcgtgggtacatttccgaagctgtgtggaaaacattagctgaagttagctatttctacagacagttatgtgctaaaggaatcagaagagatgtgatggaacaactggaggaagaggcaccagtgcttttgtgcaaattggaaaaaatatttccaccgggtttcttcaatcctatgcagcatctctttatacatcttccatatgaggctaaggtcggtggtcctgttcagtataggtggatgtttcatatagaaagagctttaaaaaagcttagagcaatgatgggcaataaggcaagagttgaaggatgtattgcggaacaatttaaacttaaggaggtagcacacttcacaagttgttactttgcagaagaacataatgtatttgctcgaaagaaaaggtaccatgatgatgaacgagagatgcctccttgtagtgatctttcgatttttcagacaaacggcaaagccgttggtccacccaaggcatatcacctcagtatggaagaacggaagtctgctttactgtacatgttcacgaatatgcctgaggtggagaaatactttgtcgagtttgatgaacaaaacatgaggtgtctcggtaggccaacagcgagagacatagacaaattgcgacgcgatggtatgcatgggcgacctaatttcattatgtggctttgggaccgtgtgatggttccatggatggcgcccgtgcctgatgcgtactatgcttggtgtcgatattgggcttccgaaggcttccagaaagtgttagcgcatcacagacaatgtcgaggaaccaatcctaaccacaagtttggcggtgacgacatgatacgaaaagctaaaagaatggaagctactagtggccaaaagcctagtgacattgaggtctaccaggagggccacaaaggaccagacccgaacaaccctgaccagctctgcagccagacagccacggatcgcttggcggcatatggggaggagatggttcgtcgccatggccctgacttcgactggcgccatgaaccggtggatcccttggtggtatacacactcttcgacggattcattgactcgtcgtcggatttggagattatgaggatgcgtgaagagatgagacaacaacacgaatttatggaggcttgcaatgcacataaccaagcgatgtatcaattaatgcagcaacagggcatggcaacaaattttccaccgccaccacaatggagccaatttgctaacacactagttccaccaccacagttcaacacccctccgacacatatacctgcacctggagatagggttacgcctgaagcgggtggtagtgggtctgatccagcagtagggactggatttgttgactcgctcttcgcgttccctcctcctggtggtggtggcgacagcggtcaaagctctaaccacccaagtggtggttatctctaa

SEQ ID NO: 165652 - DNA, 626 bp, Zea mays
  Clone ID: MRT4577_82659C.1
tactgctactacaaaaaagcccctgtgtatttttacggtacgcaaactggcacctagtgaagtttgcactcacgaggatacacactccagcctgtatatgatattggcaacgtcactagggctggctagatgaccataggcttctgctccaactactctgccctggccgttgcgtgcccttagactctggacaccaaaccatgcttgtcagtgcaagccagaagctgcacgctgtcatgttggcagaccatactataaccaggccccggtgatgggagttccctatcaaccactatgacctgaggatgtggagtccaacgacagggatacaactaccatggcatgtttatagtcaggtagcacaatgcataactgccaacggggcggaggtgtgtctgcatctatgtgtttgctgatgccataaacctgctagcactacccagtcacatatacattcgtgccttttagcaatggccaggcacaatccaacctacacggaacttatcggtcgaattctgacgaatgaatttcatgctggttctagggatgtagctatcggcaccaattggacaaaagtagatgatttcacccagccatacgttgattctggcctcgtcctacttacc

SEQ ID NO: 165653 - DNA, 594 bp, Zea mays
  Clone ID: MRT4577_8265C.1
agctggatccagagatgaatagggagcatcagtcaaaggtaaatcgcaagaaaatgaatgagttgcagaagagcgcacatcataagagggcaacgcatgagaggatgatggtgtaccaaaagaattgatgacccggcgggtgtagacaagtgacaccagagggttcatagcgtagtcaggggctaaagcagcaggctccaaagaaaacactatagaaggcactacaaaggaaggcaccgaatgagagatgaacatgtcagaaggagctaaggctactatcgtgggcgcaccaagcgtgaggcaggtccaatagtaacacgggcatctagaaaatatagaaaagagatgggatcaaccaaggatgttgataaagcatcgaaagaaggacaagaataaaaagaatgagcctcatcaaagacaacatcccaagagaccctcatccaacgagcaatcagatcccaacaatgatatcccttgtgctcagcactataccctagaaaaacacactcagcagactgagcagtcaacttagtatgctcatgaggtaagagcagcatatagcaaacacaagcaaagagacgaagacatgagtag

SEQ ID NO: 165654 - DNA, 2424 bp, Zea mays
  Clone ID: MRT4577_82660C.1
atgggtgatagacttgattggatgtatgaaggtttcaagaagggtgggtgtcacactagtgaatggtttgccaagacgcaaatgtttctggaccatgcagctactttgtcacaaatagataatattaggtgtccatgcaataaatgtagaaatatgatgaaccacaccaagaggcaggtcacactacacctgtgctcacatggtttcgtgccaggctataaggtctcgtatctccatggtgaagatgttgaacgagcaacagaagtagaagttgatgatggtgaagatgatgttgataggatggaccagatgcttgaggatctgcagcctgaactggcactagatcatcatgattcacctacaccggaggagcttgtggatttgattagcgaggttcttcctacgggtcacaagatgcccaaagacatgtaccagtccaagaaattgcttgaaggtcttggtatggagtatgagaagattgatgtttgccaagacaaatgtatgcttttttggaaggaacatggaagagaacagaaatgcttaaaatgtgggaagtcaaggtacgtggagcttgtaaatgaagatggggagaaggtggtgacaaaggttgcacataaacagcttcggtacatgcctctcacttctagagtgaaatgtttgtttctctcgaggaagaccgctatgcacatgaggtggcataaagattgtacggacagacaagatgggttaatgatgcacccgtcagatggtgatgcatggaaggctcttgacaaatttgatccagattttgccagcgatgcaagaaacgttcgtatcggcttggcaactgatggtttcacgccgttcaatatggtcgctgcgtcgtattcatgttggcctgtcattgccataccgtacaaccttccacctgctctttgcatgaaatatgagtttatgttcctatgtcttgttatacctgggcctgagcatcctgccgtacgcctcaatgtgatgcttcaaccactggttgaagagttaaagaaactatggcaaggtgtggaagcctatgactgcttcaagaagcagaaattcaatcttcgtgttgcatatctgttctcggttcatgattttatggcgatacctccaaaatcaaagaagtcagtgaaggggctgttcaagggcctgggcctttttcaggccagttcttcgagcagcagcagacgtcgagatctgttgagcgcggtacatggagatgaggatgagcagcacactgaggagcaacacattgaggaggaggagcacaatgaggctgagcagcacaatgaggaggtggagcacatgacatgggaccaggccacacagcatcaccagccatgggaccagtgggaccaccagagagagcagcaacaggcgtgggaccagtggggacaacagggtgaaccgactgacaacccgatggatgatggctcgggaggctcttcagcgacatgcacacgtcgctcaagaaaaagccactcagaggacctgtcctttgacgacaagggacaccacactcaggttaacattacgttgggttctctttgtcgccttcactaccctggtatagtgaaggtgtcaaacggtgataccgaggatgaggtgctcgtcagtacctgggacgagtacaagtttaaaaaggaacgaaaccacaccgacagacagggacttgtgcgtaatgacttttggcttcgatatcgtttgcctgacggagaggattacatggggcacactgaacgtgtcttccaaaacaatgcaaagaagctggtgatggttccatggatggcgcctgtgcctgatgcgtactatgcttggtgtcgatattgggcttccgaaggcttccagaaagcgtcagcgtatcacagacaatgtcgaggaaccaatcctaaccacaagtttggcggtgatgacatgatacgaaaagctaaaagaatggaagctacgagtggccaaaagcctagtgacattgaggtctaccaggagggccacaaaggaccagacccgaacaaccctgaccagctctgcagccagacagccacggacctgctggagttggagattatgaggatgcgtgaagagacgagacaacaacgtgaatttatggaggctttcaatgcacataaccaagcgatgtatcaattaatgcagcaacagggtatgacaacaaattttccaccgccgccacaatggagccagtttgcaaacacaccagctccaccaccacagttcaacacccctccgacacatatacctgcacctggagatagggttacgcccgaagcgggtggtagtgggtctgatcctgcagcagggactggatttgttgactccctcttcgcgttccctcctcctagtggtggtggcggcagcggtcaaagctctaaccacccaagtggtggttatctctaa

SEQ ID NO: 165655 - DNA, 4452 bp, Zea mays
  Clone ID: MRT4577_82661C.1
atgggtgatagacgtgattggatgtatgaaggtttcaagaagggtgggtgtcacacaagtgaatggtttgccaagacgcagatgtttctggaccatacagctgctttgtcacaaatagataatattaggtgtccatgcaataaatgtagaaatatgacgagccacaccaagaggcaggtcacactacacctgtgctcgcatggtttcgtgccaggctataaggtctggtatctccacggtgaagatgctgaacgagcagcagaagtagaagttgatgacggtgaagatgatgttgataggatggaccagatgcttgaggatctgcagcctgaactggcaccagatcatcatgattcacctacaccggaggttcagaagttcttcgacctactcaaagcattagaagagcctcttcacgggcacactgacgtgaccgtcctcgaattcgtgacccgactgatgtcaatcaagtccaaatttgcattttcaattaattgttacaaggagcttgtggatttgattagcgaggttcttcctacgggtcacaagatgcccaaagacatgtaccagtccaaaaaattgcttgaaggtcttggtatggagtatgagaagattgatgtttgccaagacaactgtatgcttttttggaaggaacatggcagagaacaaaaatgcttaaaatgggggaagtcgaggtatgtggagcttgtaaatgaagatggggagaaggtggtgacaaaggttgcacataaacagcttcggtacatgcctctcactcctagagtgaaacgtttgtttctctcgaggaagaccgctatgcacatgaggtggcataaagattgtacgaatagacaagatgggttaatggtgcaccggtcagatggtgatgcatggaaggctcttgacaaatttgatccagattttgccagcgatgcaagaaacgttcgtatcggcttggcaactgatggtttcacgccgttcaatatgaccgctgcgtcgtattcatgttggcctatcattgccataccgtacaaccttccacctgctctttgcatgaaatatgagtttatgttcctatgtcttattatacctgggcctgagcatcctggcgtacgcctcaatgtgatgcttcaaccactgattgaagagttaaagaagctatggaaaggtgtggaagcctatgactgcttcaagaagcagaaattcaatcttcgtgttgcatatctgttctcggttcatgattttatggcgtatggtattttctctggatggagtgtgcatggtagattgacgtgtccttattgtgctaaagatacaaattgttttcgtcttagtgttggtggcaagatatgttactttgattgccatagatgttttctacccttcaatcaccccttcagaaggcagagaaaggaatttaggaagggcaccatcgtcacgaagggaccgcccaagcgacgtagtgggatagaaattacagaagagcatatgaaacttgtcctagacgagagtgggaaaaggtatcaaggttttggtgaggagcataactggactcacatatgtggcttgtgggagcttccttatgctaagtcattgattttgatgcacaacatcgacgtcatgcatcaagagagtaacttttgccaagccctcataaatacatgcacggatttccctgataaaacgaaagacaatgacaaggcacacatggacttagcagtgatatgtgatcgtccaacccaagtgcttagagaaaacggaggcaaaccaaaagctgactattgtctgaaatctaagcaacggaaagaagtgatgaagaggatgaaggatattaaattccccgatggttatgccgctggttttagaagatctgtgaacttgaagacaatgaagatgaatggactgaagagccatgactttcacataattatggagaggctcatgcctataatgtttcgtgggtacatttccgaagctgtgtggaaaacgttagctgaagttagctatttctacagacagttgtgtgctaaagaaatcagaagagatgtgatggaacagctggagaaagaggcaccggtgcttttgtgcaaattggaaaaactatttccaccgggtttcttcaatcctatgcagcatctctttatacatcttccatatgaggctaaggtcggtggtcctgttcagtataggtggatgtttcatatagaaagagcattaaagaagcttcgagcaatggtgggcaataaggcaagagttgaaggatgtattgcggaacaatttaaactaaaggaggtagcacacttcacaagttgttactttgcggaagaacataatgtatttgctcgaaagaaaaggtaccatgatgatgaacgagagatgcctccgtgtagtgatctttcgatttttcagacaaacggcaaagccgttggtccacctaaggcatatcacctcagtatggaagaacggaagtctgctttactgtacatgttcacgaatatgcctgaggtggagaaatactttgtcgagtttgatgaacaaaacatgaggtgtctcggtaggccaacagcgagagacatagacaaattgcgacgcgatggtatgcatgggcgacctaatttcattatgtggcttcggaaccgttttggggaggaaatgaatttgaatgatgacttacgtcagttatctattggaagcgtaactgccaaaagctatggatgttacgacgtcaatggatatcgctttcgttcaagcattttcgaatcaagtcatcctatggccgccactcaaaatagtggagtcgttactagggcaaccgacatggaaggacacgaagcctgctattacgggaaaatcaaaaatataatcgagattacatttgctggaaataatcctttagcgctagttttctttgagtgtaaatggatgccgccaaaatcaaagaagtcagtgaaggggctgttcaagggcctgggcctttttcagggcagttcttcgagcagcagtagacgtcgagagctgttgagcgcggtacatggagatgaggatgagcagcacactgaggagcagcacattgaggaggagcagcacaatgaggaggtggagcacaatgaggaggtggagcacaatgaggagagagagcagcaacaggcgtgggaccagtggggccaacagggcaaaccggctgacaacccgatggatgatggctcgggaggctcttcagcgacacgcacacgttgctcaagaaaaagccactcagtaaagcctcgtcacacgatagagcgagaggctgataggactttaatcatgccacatggagatcggaattgggaggacctgtcctttgacggcaagggacaccacactcaggttaaccttacgttgggttctctttgccgccttcactaccctggtatagtgaaggtgtcaaacggtgataccgaggatgagcttcgatatcggttgcctgacggagaggattacatggggcacgctgaacgtgtcttccaaaacaatgcaaagaagctggtgaaggatgccatatactatgcgagaattcaggctacaaacctgtattttcaaaagcatccagaagaagcaggccccttgactaaaaaggaagggtcctcaaagatatattttactgaggatcaatatcgtgaggtgatggttccatggatggcgcccgtgcctgatgcgtactattcttggtgtcgatattgggcttccgaaggcttccagaaagcgtcagcgcatcacagacaatgtcgaggaaccaatcctaaccacaagtttggcggtgacgatatgatacgaaaagctaaaagaatggaagttacgagtggccaaaatcctagtgacattgaggtctaccaggagggccacaaaggaccagacccgaacaaccctgaccagctctgcagccagacagccacagatcgcttggcggcatatggggaggagatggttcgtcgccatggccctgacttcgactggcgccatgaaccggtggatccctcggtggtgtacgcaagtggtggtggcaaagcgcatggacgatacgcactcttcgacggattcattgactcgtcgtcggagttggagattatgaggatgcgtgaagagatgatacaacaacgcgaatttatggaggcttgcaatgcacataaccaagcgatgtatcaattaatgcagcaacagggcatggcaacaaattttccaccgccaccacaatggagccaatttgcaaacacaccagttccaccaccacagttcaacacccctccgacacatatacctgcacctggagatagggttacacctaaagcgggtggtagtgggtctgatccagcagtagggactggatttgttgactcgttcttcgcgttccctcctcctggtggtggtggcggcagcggtcaaagctctaaccacccaagtggtggttatctctaa

SEQ ID NO: 165656 - DNA, 2022 bp, Zea mays
  Clone ID: MRT4577_82662C.1
atgccgttcggcctcaaaaacgctggagcgacttatcagagagccattcaaacatgcttagccgatcactggggcaagcgtgtggaggcttacgtagatgatgtggtgatcaaaacagagaattcggaaaacttcatcgaagatttacagctggttttcaatagcctgagaagatatagatggaagctcaatcctgaaaaatgcgttttcggggtaccagtagaaaagttgctcgggtttatcgtcagccaccggggaattgaggctaatccagataagattgaagctatcatgaagatggaagctcctcgatcgcaaaagaaggttcagcgacttactggatgtatggcagctctgagcagattcatatccaggctaggagaaaaaggtttgccattttacaagttactcaagaaggtggatgagtttcaatggacttcagaagcacaagaagctctagacacactgaagaaattcttgacaacaccaccgctgcgtcactactttgacgaccacaaagtcatagtagtcactggttttccaataggggacattcttcacaacaaggaagccattggccgaatagccaagtgggcttgcgagctaggatcccacgacatcgagttccgacctcgcactgccatcaaaactcaagcactggttgatttcgtatcagagtggacagaacagcaagtaccagataatccagaaactgcagaagtatggcgaatgtattttgatggctcgctgaagcggcagggagcaggagcagggattcttttcatcgcacctgggggcgaacacctcaagtacgctctccagttgctattcccggcctctaacaatgtagctgagcatgaagctttgatacacggattgaacatcgccatatcactgggcgtcaagagattgatggtcccacccggagtcttcgtgcaagaaattctgcagccgagtatttcaatggatcaagcagaagagtgcaacatcatagatcaacccgagtcagactctgatgactggagaaagccgatcattaagtatataaagaatgaagaagaaccagacgacaagaactcggcagagcgcattgccaggcagtcggctcactatacactcattggggagatattgtatagaaggggcgcatcaggcatcctcatgaagtgcgttctcccgtccactgggaagcaacttctggaagaggtccatgcagggcaatgtgggatacatgcagcatccagaacgctagtcgggaaggttttcaggtcaggattctattggccgacggcgaagaacgatgcagccgagttagttcagagatgcgaagcttgccaatacttgtcaaagcaacagcacatgccagcacagcaactacagaccataccagtaacctggcctttcgcatgctggggactggatatgattggacctttcaagaaagctcaagggggatatactcatgtattggtggcgattgacaaattcactaaatggatagaattcaagcccattgcttctttaacctctgctaaggccgtggaattcatacaagacataatattcaaattcgggataccaaacagtatcatcactgacttaggatccaacttcaccagttcagaattctttgacttctacgagcaaaagagcattcagatcaaatacgcatctgtagcacatccaagagccaacgggcaggttgagcgagccaacggaatgatattggaggcactcaggaaaagggtcttcgataagaatgaaaaattcgcaggaaagtggataagagaattgccttatgttgtttggagcctaagaacccaacctagccgatccctgcatggaaacactccttttttcatggtctatggatcggaggcagtactacctgctgatctcaagtttggggcgccaaggttgatcttcgaaagcatagcagaagctgaggccaccaggctggaggacattgacgtacttgaggaagaacgactgaatgcggtaatccaatcaacacggtactag

SEQ ID NO: 165657 - DNA, 570 bp, Zea mays
  Clone ID: MRT4577_82663C.1
cgtgggttaaaaaaaaaaaggggggggggggggggggaaaaaaaaaaaaaaaaaaaagaggagaaaaaaaaaaaaaaaaaaaaaaaaaaaaaaaaaaaaggggggctctttttaaaagggtcccaggttttcttactgcgtgcatgctaagtttttaatttttttttatagggcaacctaatttggttggggggggggggggttttacaacttcatgcctgtgaaaaaccttggggttaccaaatttaatggctttgcagaacttccctttttggccagctggcttattaagaaaaagggcttaaccgtttggctttccaaacagttgcccattctttattggtaattgggactcgccttgtagtggaattttaagtgcggtgggtgttgtggttacgcttagtttgatttttttatttgccagggccttaagtttccttctttaattttttttgcttttttttttttgaaggtttggctgtttttccccgtaaggttttaaatggggggttactttttagggtgtgggattaattgtttttggggattttggttcttaaaaaatttttt

SEQ ID NO: 165658 - DNA, 4196 bp, Zea mays
  Clone ID: MRT4577_82664C.1
atggccgtcactttcaacagcaagatcaccatgcgtctcggatccgtattctgctttgggacaatctcatccgtagcggatgaagagggaactctacaccgtatcgtggatccgccagaaaagaagtctcctccaacgaaccccgaaaatgccggagaggcgcaacatccagctctccggaaaaagatcgtcttcggaaagccggagtccaagagttcgctaacccggaagactccactgtctacttccccgacaaaagaatggacgcggatcgcgaggaagaaggagaccagggaaaagcaagtcgttctttccgttcctccggcctcaaaggagaacggaaagaaagtcgccacgacagcagcgccattctaccccgacgtcctcttcatcgggagagtggagtcgcccgccgtttccgacgacgaaccgaccgcacccggagaagaaccgcctcaacgagagtctcgccgacggaggaatcggcgcaggaacgttcgacgacatcacgcggccggagaacgagatccggagcagcctgtctcgcgagacgaggtctcggagataggagaaaccccggaagaacgcgtcttcagagaacgaaggaactcccggcgacgtgatcgccggcgggctcaggaacaagccgagcaagatgcaaggcaacgccgggagaatccgctcttcgggcacaacctgaatcccgacttcgcccgagctatgaacacgccaagcgaagtcggaggggtactagctcggatagctgacggacttcctcggactcccgacgccgagggataccgacgcctgttcactcaggcggccaaccatcttctaccgctcgctcacccgccgaacgatctacgacacgccatcaacagtcgccgagacgcgcgaagctctatcaatgcttcgcgcgaacggcggcatgaaaacgaaattcgccgtcgggaggagtatgaccgggatcatggcttcccgactcaaagccaggccaccaggactgagtcagcaacagcttcaactggtggtaccacccggggacggtcgaggaaccacaatcacaactcccctccccgggacagacaccgtccccgacgacaggaggacacgtgcggagtgtccgctcttactccgcgccttagggccatccaatggcctcccaacttcaaggtatccaatgtcgacaaatatgaacctaagcaggatccagggggttggctagccgtctacaccaccgctgctcgggctgccggagcatctgaggacgttatgatcgcgtatctgcccattgtccttgggcaagatgcgctacagtggctacgacatctaccccgacactgcatcgacgactggggagacttcagtcgacgtttcaccgccaacttccagtccctctccgacaagccagcgcaaccgtgggacctcaaatccatcaagcgccggggggagagactctccggtcgtacctcaaaagccatactacagaaggcaccgactacttctgaggagctgttccgggaagccgacctctacatcaccgccgacgagcgagctcaggacctcatcggaggagcaaagcctgtgccggcagcaccacgacgcgacgcgaaccagccacccgacaaacgctgggagaagaggcctcgcgaagaagtacacgccgccggaccacctgcctctcgcgcccgaggaggacctcgtggaggcgagcgcacgctggacgacatcctcgacgcccagtgcccataccacaaggacatgcgccacactcttcgcaactgccgggacttcaagcactccgtggggcatggccgacccttccaacctctacctcctcctccgccgaggggaggaccggatgaaccacgacaacctcatcagccggaggagggaggaggaggagctttcccacgcgtcgacagggaggtcaacgtcatcttcggcggacatgggtcgcaggagaacaaaagacaacaaaagctcaacgaccgccagatactggtggcgaccaccggtcctcccgccccgtaccggtggtcagaacacccgatcactttcactcgggaggatcaatggctcaacttcgaccatccgggcaaatacccgctcctcgtcgatccggtgatccgagagagccgggtgaagaaggtgctagtggacggggggagcagcatcaacgtcaccttcccccggacactccaaggcttgggggctcacctcaaagagctccacaagtcggacactcccttcttcggcatcgtgccgacggagggggaatacccgctgggccacatctacatgccggtcaccttcggaactccggagaactacagaaccgagttcctgaggtttgaagtggcaaatttcaactgcgggtacaacgccatcatcggaaggcccggattggccaaattcatggccattccgcactatacatacatgatactgaagatgccaggaccgcgagggatcataactagagccattcaaacatgcttagccgatcactggggcaagcgtgtggaagcttacgtagatgatgtggtaatcaaaacagagaattcggaaaacttcatcgaagatttacagctggttttcaacagcctgagaagatataggtggaagcttaatcctgaaaaatgtgtttttggggtaccagcaggaaagttgctcgggtttatcgtcagccaccggggaattgaggctaatccagataagattgaggctatcatgaagatggaagctcctcggtcacaaaagaaggttcagcgacttactggatgtatggcggctctgagcagatttatatccaggctgggagaaaaaggtttgccattttacaagctactcaagaaggtggataagtttcaatggacttcagaagcacaagaagctctagatgcactaaagaaattcttgacgacaacaccagtactgaaaccaccccggcgagctacatcgactcaaccggctgaagatttgctactgtacatctcttgcacgactcacgtggtaagcaccgcgttggtagtcgagcgagtagaagaaggacatgcctatccagtacaacatcccgtctacttcatcagtgaagttctaggcccctcgaagaaaaagtatcctcaagttcagaagttattatacgcagtacttctaactgcccgcaagttgcgtcactactttgacgaccacaaagtcatagtagtcactggttttccaataggggatattcttcacaacaaggaagccattggtcgaatagccaagtgggcttgcgagctgggatctcacgacatcgagttccgacctcgcactgccatcaaaactcaagcactggttgatttcgtatcagaatggacagaacagcaagtaccagataatccagaaactgcagaagtatggcgaatgtattttgatggctcgctgaagctgcagggagcaggagcagggattctcttcaccgcacctggaggcgaacacctcaagtacaccctccaattgctattcccggcctctaacaatgcagccaagtatgaagctttgatacacggattgaacatcgccatatcactgggcatcaagagattgatggtatacggagattctctggtagtcgtcagccagataaacaaggagtgggactgttcaagcgattcaataggaaagtactgcgctgccgtccgaaagctggaagataaatttgagggtctggaatttcatcatatagaaagagatcggaacacggcagccgatgtactgtccaagctcggatccggtcgaactcaggtcccacccggggtcttcgtgcaggaaattcttcagccgagtatctcaatggatcaaacagaagagtgcaacatcatagatcaacccgagtcagactctgatgactggagacggccgattattaagtatataaagaatgaagaagaaccagatgacaagaactcggcagagcgcattgccaggcagtcagctcactatacactcattggggagatattgtacagaaggggcgtgtcaggcatcctcatgaagtgcgttctcccgtccaccgggaagcaactcctagaggaggtccatgcagggcaatgtggaatacatgcagcatccagaacactagtcggaaaggttttcagatcaggattctattggccgaccgcgaagaacgatgcagccgagttagtccagag

SEQ ID NO: 165659 - DNA, 578 bp, Zea mays
  unsure (1)..(578): unsure at all n locations
  Clone ID: MRT4577_82665C.1
tacacaaagcgagnatcttgcttgctgggcagaggtgaagagggggggcctatggctacctagctatctatctgctagcggctcgtgctactattcttgctctcgcccgatgattgctacttgcaacgcatcttatttgacttaattagcttgcttgcttgcttatgttttctcctgtgggggggtggtcttttctcatcaggactgtatatgttttctctggtatatgtgtgtgtatacatctctctctctctctctctctctctctctctctctctcttttgctgtgtgtctgtgttcctcgttgatcgatgatcatgcgtgtcgtctgggctggtcgacgatgagctatagctgggtagtatcagtagctagtagctatccccatgcatggatcatatcactgctggccggccggccggtggtcgctgagcactaactacgtgcctcttgtagccatgtcaggaaagatntatctggtcggccgatcgagctcctctcctccgaagcactgaaactccagcggctgccctgcctgacagccactccgcacgacaaaataaaaaagcgcgggcgat

SEQ ID NO: 165660 - DNA, 320 bp, Zea mays
  Clone ID: MRT4577_82666C.1
cttgcccggccccaacctgcgactagaacggcccaaaaaaaggccagggcccaaaatgcccgggcggaccggcccttgaaaaaggccccgcacgacagaacaaaccaacaccgccatcaaagaaaaccggacccccagtacaccctgccaggcccaaggggagctagccccccaaaaaagaccaaacccccggccagaacccgcccaagccccccccaacgacaccccccaaaagaaaacatggcgggaagccccccccacgcccagctgcccgaaccccggcggcccccccggggaacccccccgccccaaaaagcccc

SEQ ID NO: 165661 - DNA, 2337 bp, Zea mays
  Clone ID: MRT4577_82667C.1
atgtcgttcggcctcaaaaacgctggagcgacttatcagagagccattcaaacatgcttagccgatcactggggtaagcgtgtggaggcctacgtagatgatgtggtaatcaaaacagaaaactcggagaacttcatcgaagacttacagctagttttcaacagtctgagacggtatagatggaagcttaatcccaaaaaatgtgttttcggggtacctgcaggaaagttactcgggtttattgttagctaccggggaattgaggctaatccggataagattgaagctatcatgaagatggaagcacctcgatcacaaaagaaggttcagcgacttaatggatgtatggcagctctgagcagatttatatccaggctgggggaaaaagggttaccattttacaagctactcaagaaggtagataagtttcagtggacttcagaggcacaggaagctctagatgcactgaagaaattcttgacaacaccaccagtactgaagccaccacgacgagctacgtcaactcaaccagctgaagatctgctactgtatatctcttgcacgactcacgtggtaagcaccacgttggtagtcgagcgagcagaagaaggacatgcctacccagtgcaacatcctgtttacttcatcagtgaagttctgggcccctcaaagaaaaagtatcctcaagttcagaagctattatatgcagtacttctaactgcccgcaagctatgtcactactttgatgaccacaaagtcatagtagtcactggttttctgataggggatattcttcacaacaaggaggccattggccaaatagccaagtgggcttcactggttgatttcgtatctgagtggactgaacagcaagtaccagataatccagaaactgcagaagtatggcgattgtattttgacggctcgctgaagctgcagggagcaggagcagggattctcttcaccgcacctggaggcgagcacctcaaatatgccctccagttgctgtttccggcctccaacaatgcagccgagtatgaagctttgatccacggattgaacatcgccatagcattgggcatcaagagactgatggtatacggagactctctggtagtcattagccagataaacaaagagtgggattgttcaagtgactcaatgggaaaatactgcaccgccgtccggaagctggaagttaaatttgagggcctggaatttcatcacgtagaaagagatcggaacacagcagccgatgtattgtccaagctaggatccagtcgaactcaggtcccacctggaatctttgtgcaagaaatactacagccgagcatctcagtggatcaagcagaagagtgcaacattatagatcaacctgagtcagactctgatgactggagaaggccaattatcaagtacataaagaatgaagaaaaaccagatgacaagaactcagccgagcgcattgccagacagtcggctcactatacactcattggggagacattgtacagaaggggtgcatcgggcgtcctcatgaagtgcattccctcatctgctgggaagcaacttctggaggaggtccatgctgggcaatgtggaatacatgcagcctccagaacactagttgggaaggtcttcaggtcaggattctattggccaacagcaaagaatgatgcagcagagttagttcagagttcagagttcttcgacttctgcgagcaaaagagcattcagatcaagtatgcatctgtagcacacccaagagccaacgagcaggttgagcgagctaacgggatgatactagaggcactcaggaaaaaggttttcgataagaatgaaaaattcacaggaaagtggataagggagttgccctatgtcgtttggagcctaagaacccaacctagccgagctctgcatggaaatactcctttcttcatggtctatggttcggaggcagtgctgcccgccgatctcaagttcggggcgccaaggttgattttcaacaacatagcagaagtcgaggccactaggctggaggacattgatgtacttgaagaagaatggctgaatgcggtaatccaatcagcacggtaccaacagactctaaggcgctatcacgacaaggctgtgcgacagcgatccttctcaataggagatctcgtcctccgccgaattctaacgggggagggacggcacaagttatcgcccttatgggaaggacccttcatagtagcagaagtcactcggcccggatcatatcgcctcactcagatggatggcacagaagtcgggaactcctggaacatagaacacctcaggaagttttatccatag

SEQ ID NO: 165662 - DNA, 2850 bp, Zea mays
  Clone ID: MRT4577_82668C.1
atgccgtttggcctcaaaaacgctagagcgacttatcagagagctattcaaacatgcttagccgatcactggggcaagcgtgtggaagcctacgtagatgatgtggtaatcaaaactgagaactcggaaaacttcattgaggacttacagctggttttcaacagtctacggcggtaccgatggaagcttaatcccgaaaaatgtgtttttggggtaccagcaggaaagttactcggatttattgtcagccaccggggaattgaggctaatcctgataagatcgaagctatcatgaaaatggaagcaccccgatcaccgaagaaggttcagcgacttactggatgtatggcagctctgagcagattcatatccaggctgggagaaaaaggtttaccattttacaagctactcaagaaagtggataagtttcaatggactccggaagcacaagaagctctagatgcactgaagaaattcttgacgacaccaccagtacttaagccgcctagacgagccacgtcaactcaaccagctgaagatctgctgctgtatatctcttgcacgactcacgtgctacgtcactactttgacgaccacaaagtcatagtagttactggttttccaataggggatattcttcacaacaaggaagccattggccgaatagccaagtgggcctgtgagctgggatctcatgacatcgaatttcgacctcgcactgccatcaaaactcaagcattggttgacttcgtatcagagtggactgaacagcaagtaccagataacccagagattgcagaaggagcaggagcaggaattctcttcaccgcacctggaggcgagcacctcaagtatgccctccagttgctgtttccagcctccaacaatgcagccgagtatgaagctctgatccatggattgaacatcgccatatcattaggcatcaagagactgatggtgtacgaagactctctggtagtcataagtcagataaacaaagaatgggattgttcaaacgattcaatgggaaagtactgcactgccgtccgaaaactggaagataaatttgagggtctggaatttcatcatgtagaaagagatcggaacacggcagctgatgtattgtccaagctaggatccagtcgaactcaggtcccacctggagtctttgtgcaagaaatactacagccgagcatctcaatagatcaagcagaagagtgtaatatcgtgaatcaaccaaagtcagactctgatgactggagaaggccaatcatcaggtacataaagaatgaagaggagccagatgacaaaaatgcagccgagcgtatcgccagacagtcggctcactacacactcattggggagacattatacagaaggggtgcatcaggcgtcctcatgaagtgcattctctcatctactgggaagcgacttctagatgaggtccatgccgggcaatgtggaatacacgcaacatccaagacactagtcgggaagaaagctcaaggaggatacactcatgtactggtagcaatcgacaaattcaccaaatggatagagttcaaacccattgcttctttaacctcggctaaggccgtggaattcatacaagacataatattcagattcgggataccaaacagcatcataactgacctaggatccaacttcacaagtttagaattcttcgatttctgcgagcaaaaaagcattcagatcaagtatgcttctgtagcacacccaagagccaatgggatgatactggaggcactcaggaaaaaggtcttcgataagaatgaaaagttcgcaggaaagtggataagggagttgccctacgtcgtttggagcctaagaacccaacctagccgagctctgcatggaaacactcctttcttcatggtctatgggtcggaggcagtgttacccgccgatctcaagttcggggcgccaaggttgatcttcgaaagtatagcagaagccgaagctactaggatggaggacatcgatatactcgaggaagaacggctgaatgcagtaatccaatcagcacggtaccagcagactctaaggcgctatcatgacaaggccgtgcgacaacgatccttctcagtaggagatctcgtcctccaccgaattctaacgggggagggacgacacaagttatcgcccttatgggaaggacccttcatagtagcagaagtcactcggccaggatcatatagtttcactcagatggacaacacagcaattgggaactcctggaatatagaacacctcaggaaatgaaatccctagtggtgccaaaataggtgaacacgttggaggctttgcgcttatttcagtttatttccaatataaatttatcttatcccctgttgagcatgagcatgcatgagatattctagcgagaaaaacgttgacacaaaaggctttttacaagaaaagttgaaagaagctggttatgcatacttctttgatgtttgtctgtatgcatggttaataaaagttaaaaagcacaaatcgtgcatttaagatgttaaataatatacgatagctttaaggatcttcagcacttgttagagtgatacttaccttatgtcttaagcagagaatagtactagcaacctggaagtagtatgcattggcagttcaagaaaatgataagttttgccatggagattatatataaactaagttcaatggctgtaatagtatttgtaatgatagaactgtcagtttgtactggatggccattattgatgaaggggacttgcaaaagtgcaaattaccaaaggttttattaggtgtttgaaaaaaaaaaaaaaaaaaaaaaaaaactcgagggggggg

SEQ ID NO: 165663 - DNA, 120 bp, Zea mays
  Clone ID: MRT4577_82669C.1
tcctcattgctggatagtcaaccaggtgttcgcccttttcgatgacaagctgcaccgcgctctgcatgcaacggtcgaaagacaacgtcttttcaactagagatgctgccgctaacttct

SEQ ID NO: 165664 - DNA, 206 bp, Zea mays
  Clone ID: MRT4577_8266C.1
ggtcttcgaccttttcctatcactccagagcgcagaagaaccgatcgacccatgaggctgctgctcgttgccctcgctctcatggatctcgctgagagcgccacctccacgcatacgagcggcggatgcggctgcaaacaaccgacgtcggcttctctaccggcggcggagactatgacctgtacggccgaattgacacgtccgat

SEQ ID NO: 165665 - DNA, 1974 bp, Zea mays
  Clone ID: MRT4577_82670C.1
aggtcggcagcatcattagaaaacgaggtctcgccgtgcccggccgggagatctagggttctctcgtgctctgttctcatcttctgctcgctggtgtcccctctctctcacccatggcttcggcggcggcggcaactcaggtggggacttacttcctgcggaactactacaacctgctgcaacaaacccccgatgtcgtccaccagttctacagcgaagccagcaccatggtccgcgtcgacgacctcaccggcacgaccgcggctgccaacaacatgatggacatacactcgctcatcatgtctttgaacttcacccaaattgagatcaagactgccaattttgtgaactcatggggcgatggggtgctagttatggtctctggtctagtgcagaccaaggagtacagccaccaaaggaaatttatccagatgttcttccttgcccctcaagagaagggttactttgtcctcaacgattactttcacttcgttgaccaagaacatgtgcagcctgcgccagtgattgctcaggaagactacgagagcaatttggcacccaacacagttgttgagaccgctcctgagtacgttcacgaggaagaagctcaacaaatagcacctgaagtacatgatgtggtcgaaaactatacttattctgagccacaacagcaagtagtgtcggacaactggggagaggagcctcttcctgaagaaccgccttctttctcaaatgaaatggcagtcgctcctgaggagccagtgcaagctccacctgtgccacttcctcacgtggatgagcctgtttgtgaaccagtaaagaagacttatgcttccatcctaaaaaccgcaaaggctcctgcattcccagtagcccagcaagtacctgtgagtaagccttctcaccctacaacagagtcaaaccaaacccagcattcagttatggcttcatcaatgggaaccgagaaaccgaggtctgatgtttttggtgagggtgcttcccatgatgacgaagagagcaaatctgtgtatgtcggcaacgtgccatcatctgtaagtgaggctgatcttgaaaatgagttcaagaaatttggccggcttattcctgacggtgttgctatcagaagccgaaaggagactggtggctattatgctttcgtggaattcgaggaactcagcggtgtacacaatgcgttaaaggcttcaccaattgaaataaatgggcggcagatatatgttgaggagaggaagccaaatagcggaataagaggtggaaggaggggaggacgtggccgtttcagtggtggaggccggggatattcgagaggtggaggcgacgagtacaatagtaaccgtgggaggtcaaacggttacggtcgtgctcctcaccaagagaggggcatacttgggagccacactccaaggaactgattcagtcgagcagcaaacataaggttttgatccgtgtcgtcaaagcgagagagagagatcctaaacaatccgcctatcagctactaggccgcgtttgggttttggggcttgttttgtcgatgaatgtgtgtgcgcgcgtcatcgacctatgtgacacttaaaacttttgctagtctgacgctatctctttacattaagatcggctgttctattaaccttgctgctattgttgctcgtgcattgccggcggtggtattgtgttttgcaaaaaaaaaaaaaaaaaaaaaaaaaaaaaaaaaaaaaaaatggaagttcaaatatttggctgatgaatcatcctctaacttagaagttgcacctattttagtctttttaatgttgattgactgagtatatgtgaagtatttaattccaattcatatggactatcctatcttgcataagttgctacatcttcatacgaaacttatctctcttttgtaaaagggcgcgcgttagagagatccacaaccatagtgacacggtggcactatcgagcgtcata

SEQ ID NO: 165666 - DNA, 2802 bp, Zea mays
  Clone ID: MRT4577_82671C.1
atggccgtcaccttccacagcaagattaccatgcgtcccggatccacattctgcttcgggacgatctcatccgtggcggacggagagggagttctacgccgcctcgcggatctaccggaacagaagtctcctccaacaaactccgaaaatgctggaaaaacgctacctccggctcttcggaacaagatcgtctccggggaggctggagctagaagctcgctgacccggaagactccgctgtctacttccccgacgaaagaatggacacagatcatgagaaggaaggagatcaaggagaggccggtcgatcttcccgttcctccgacctcaaaggagaacggaaagaaagtcgccgcggcagcaataccgctctaccccgacgtcctcttcatcgggagagcagagtcgcccgccgtctccgacgatgaaccgaccgcgcctggagaagaaccacctcagcgagaatcccgccgacgaaggaatcgacgcaggaatgttcgacgacatcacgcagctggagaacgggatccggagcagcctgtctcgcgagacgaggtctcagagataggagaaactccggaagaacgcgtcttcagggaacgaaggaactcccgacgacgagatcgccgtcggactcaggagcaagccgagcaagatgcaaggcaacgacgcgagaatccgctcttcgggcgcaacctgaaccccgacttcgcccgagctatgaatacgccgagcgaggtcggaggcgttctggcccggatagctgacggacttcctcggacccccgatgccgagggataccgacgcctgttcactcaggcagccaaccatcttctaccacaagcccccgaccaagaagtcgagcgagtggaagaagggcatgcctacccggtacaacatcccgtctatttcatcagtgaggttctaggcccatcgaagaaaaagtatcctcaagttcagaagctattatatgcagtacttctaactgcccgcaagctgcgccactacttcgacgaccacaaagtcatagtagttactggttttccaataggggacattcttcacaacaaggaagccattggccgaatagccaagtgggcttgcgagttggggtcccatgatatcgagttccgacctcgcactgccatcaaaactcaagcactggtcgacttcgtatcagagtggacagaacagcaagtgccggataatccagaaaccgcagaagtatggcgaatgtattttgatggctcgctgaagctgcagggagcaggagcaggaattctcttcactgcacctggaggcgaacacctcaagtacgctctccaattgctattcccggcctctaacaacgcagccgagtatgaagctttgatacacggactaaacatcgccatatcgctgggtgtcaagagactgatggtgtacggggattctctggtagtcatcagtcagataaacaaggaatgggattgttcaagtgattcaatgggaagatactgcgccgccgtccgaaagctagaagataaattcgaaggcctggagttccatcatatagaaagagatcggaacacggcggctgatgtactgtccaagctcggatccggtcggactcaagtcccgcccggggtcttcatgcaagaaatcaatcagccgagcatctcgacggatcaaatagaagagtgcaacatcatagaccaacccgagtcagactctgatgactggaggcaaccgattattaagtatataaagaatgaagaagagccagatgacaagaactcggcagagcgcattgccagacaatcagctcactatacactcattggggaggtattataccggaggggcgcgtcaggcgtcctcatgaagtgcgttctcccgtccaccgggaaacaacttctggaggaagtccatgcagggcagtgcggagtacatgcagcatccagaacattagtcgggaaggttttcaggtcaggattctattggccgacggcaaagaatgatgcagccgagctagttcagagatgcgaagcttgccagtacctgtcaaaacaacagcacatgccagcacagcagctacaaaccataccagtaacttggccttttgcatgctggggattggatatgattggaccttttaagaaagctcaaggaggatacacccatgtattggtggcaattgacaagttcactaaatggatagagtttcagcccattgcctccttaacctctgctaaagccgtggaattcatacaaaacataatattcagatttgggataccgaacagcatcatcactgacttgggatccaacttcaccagaaaatggataagagaattgccttatgttgtttggagcttgagaactcaacctagccgggccctgcatggaaacactcctttctttatggtctatgggtcggaggcagtgctacctgctgatctcaagtttggggcgccaagattgatcttcgaaagcatagcagaagccgaagccactaggctggaggatatcgacgtactcgaggaagagcgactgaatgcggtgattcaatcagcacgataccagcagactctaaggcgctaccacgacaaagctgtgcggcaacgtttcttttcgatgggagacctcgtcctccgccgaattctaacgggggagggacggcacaagttatcacccttatgggagggacctttcatagtagcagaagtcactcgtcccggatcatatcgcctcacccaaatggatggtacagaagtcgggaactcctggaacatagagcacctccgaaagttttacccatag

SEQ ID NO: 165667 - DNA, 2571 bp, Zea mays
  Clone ID: MRT4577_82672C.1
atgtcgttcggcctcaaaaacgctggagcgacttatcagagagctattcaaacatgcttagccgatcactggggcaagcgtgtggaggcttacgtagacgacgtggtgattaaaacggagaatccggaaaacttcattgaagatttacagctggttttcaacagcctgagaagatatagatggaagctcaatcctgagaaatgcgtcttcggggtaccagcaggaaagttactcggatttattgtcagccaccggggaattgaagctaatccagataagattgaagctatcatgaagatggaagctcctcgatcgcaaaagaaggttcagcgactcactggatgtatggcagccctgagcagattcatatccaggctaggagaaaaaggtctgccattttataaactgctgaagaaggtggataagtttcaatggacttcagaggcacaagaagctctagacgcactgaagaaattcctgacaacaccgccagtattgaaaccgccccggcgagctacgccgactcagccggctgaagatctgctgttatatatctcttgcacgactcacgtggtgagcactgcgttggtagtcgagcgagtggaagaagggcatgcctacccggtacaacatcctgtctacttcatcagtgaggttctaggcccatcaaagaaaaagtatcctcaagttcagaaactattatatgcagtacttctaactgcccgcaagctgcgccactactttgacgatcacaaagtcacagtagttaccgcactggtcgacttcgtatcagagtggacagaacagcaagtgccggataatccagaaaccgcagaagtatggcgaatgtattttgatggctcgctgaagctgcagggagcaggagcaggaattctcttcactgcacctggaggcgaacacctcaagtatgctctccaattgctattcccggcctctaacaacgcagccgagtatgaagctttgatacacggattaaacatcgctatatcactgggtgtcaagagactgatggtgtacggagattctctgatagtcatcagtcagataaacaaggaatgggattgttcaagtgattcaatgggaagatactgcgccgccgtccgaaagctagaagataaattcgaaggtctggagtttcatcatatagaaagagatcggaacacggcggctgatgtactgtccaagcttggatccggtcgggctcaagtcccgcccggggtcttcgtgcaagaaattctccagccaagcatctcgacggatcaaatagaagagtgcattatcatagatcaacccgagtcagactctgatgactggaggcaatcgattattaaatatataaagaatgaagaagagccagacgacaagaactcggcagagcgcattgccagacaatcagctcactatacactcattggggaggtattatacaggagaggcgcgtcaggcgtcctcatgaagtgtgttctcccgtccaccgggaagcaacttctggaggaagtccatgcagggcagtgtggagtacacgcagcatccagaacattagtcgggaaggttttcaggtcaggattctattggccgacggcgaagaatgacgcagccgagttagttcagagatgtgaagcttgccaatacctgtcaaagcaacagcacatgccagcacagcagctacaaaccataccagtaacttggcctttcgcatgctggggattggatataattggacccttcaagaaagctcaaggaggatacacccatgtattggtggcaattgacaaattcactaaatggatagagttccagcccattgcctctttaacctctgctaaagccgtggaattcatacaaagcataatattcagatttgggataccaaacagtatcatcactgacttgggatccaacttcaccagttcagaattctttgacttctgcgagcaaaaaagcattcagatcaagtatgcatctgtagcccatccaagagccaacgggcaggttgagcgagccaacggaatgatattggaggcacttagaaaaagggtctttgataaaaatgaaaaattcgcaggaaaatggataagagaattgccttatgttgtttggagcttgagaacccaacctagccgggccctgcatggaaacactcctttcttcatggtctatgggtcggaagcagtgctacctgctgatctcaagtttggggcgccaagattgatcttcgaaagcatagcagaagccgaagccactaggctggaggatattgacgtacttgaggaagaacgattgaatgcagtgattcaatcagcacgataccagcagactctaaggcgctaccacgacaaagctgtgcggcaacgtttcttttcgatgggagacctcgtcctccgccgaattctaacgggggagggacggcacaagttatcaccattatgggaaggacctttcatagtagcagaagtcactcgtcccggatcatatcgcctcacccaaatggatggcacggaagttgggaactcctggaacatagagcacctccgaaagttctacccctag

SEQ ID NO: 165668 - DNA, 4068 bp, Zea mays
  Clone ID: MRT4577_82673C.1
atggaccgaggttggatgtacaatgtgccaagaccacatccgtcgtacattcgaaatttgagaagctttattgaagcggccaacaagcacgcgaatttgcgaaagagcaaggagatattatgtccgtgcatcgattgtgataataagatagcttggagagatataggagtaatccaatcacatctgctaaaaagagggtttaaaaacaattacacgatatggtcagaacatggtgagttggatccgtgtgaagtgtctggtaatgacgagagagttgtcggaattttagatcttaaagttgatggtaaagtggataatgtggatgctaatcaagattttgaagaatttgattgtgaagagatgttgcgccatatggaaccagaaatgttaagttctgtgggatcgcagaaagggctatctaaaatggagggactggaaagtgcctcaaaagaacctttatatgatgaatcaaagggttgtgacaaagagtttactacactgcgtacagttctagaacttctgaagttgaaggctagcgccggatggtctgatactagcttcacagatcttttgaattatctgtctcaattactaccaaaacccaacaaactaccaacaagcacttataaagcgaagaagcttatatctcccatagctctggtttgcaatgtcagtcgatacaagaagagctacaatcaagactgtgtaaaaaaattcccgaagaaaaataaaaacaagaaatccactattggacctgaaagtgacgatgacacttttgatgacgtggatgggaaaaagaagtcaaagaacccagctttggtgatgtggtatcttccagtaattgatcgcttaaaacgtttgttctcaaatcctagggaggctgagcttatgcgttggcatgctgaaaatcgcaagcagaataacaaacagattcgacaccctgctgatgcatcacaatggaaaaattttgatcttatgtatcctgagtttgccaaagaaaccagaaatgtaagatttgctttgggtacagacggaatgaatccatttggtgaaaaaagaagtgtacatagcacctggcccgtgactttaacgatgtacaaccttccatcatggttgtgtcacaaaagaaagtatattatgttgactattcttattcaaggtccgaaatcagctggtgttgatattgatgtgttcctagaacctcttatggaagatatgacaaagctctggaatgaaggagttagaatatgggatgagtattgccgtgagtatttcaacttaagagcaattatatttgtgctgtctttcttggattgctattccgggtatcatcagattagtttggcaaaagaggacgaggaaaaaacggcgttcatcaccccgtttggtgctttctgttatacctccatgccgttcggcctcaaaaacgctggagcgacttatcagagggccattcaaacatgcctagccgatcactggggcaagcgtgtggaggcttacgttgatgacgcggtgatcaaaactgagaatccagaaaacttcatcgaagatttacagctggttttcaacagcctgagaagatatagatggaagctcaatcctgaaaaatgcgttttcggggtaccagcaggaaagttgctcgggtttatcgtcagccaccggggaatcgaggctaatccagataagattgaagctatcatgaagatggaagctcctcggtcacaaaagaaggttcagcgactcacaggatgtatggcagctctaagcagatttatatccagactgggggagaaaggcttgccgttttacaaactgcttaagaaggtggataagtttcaatggacttcagaagcgcaagaagctctagatgcacttaagaaattcctgacaacaccaccagtattgaaaccgccccggcgagctacgccgactcaaccggctgaagatctgctgttgtatatctcttgcacgactcacgtggtaagcactgcgttggtagtcgagcgagtggaagaagggcatgcctacccggtacaacatcctgtttacttcatcagtgaagttctaggtccctcgaagaaaaaatatcctcaggttcagaagctattatatgcagtacttctaactgcccgcaagctgcgtcactactttgatgaccacaaaggcatagtaatcactggttttccaataggagatattcttcacaacaaggaagccattggccgaatagccaagtgggcatgcgagttgggatcccatgatatcgagttccgaccccgcacaaccgttaaaactcaagcactgcaaacaccggataatccagaaaccgcagaagtatggcgaatgtattttgatggctcgctgaaactgcaaggagcaggagcaggaattctcttcactgcacctggaggcgagcacctcaagtatgctctccagctgctattcccggcctctaacaacgcagccgagtatgaagccttgatacacggattaaacatcgccatatcactgggcgtcaagagattgatggtatatggagactctctggtagtcattagccagataaacaaagaatgggattgttcaagtgattcaatgggaaaatattgcgctgccgttcgaaagttggaagataagttcgagggtctggaatttcatcatgtggaaagggatcgtaacacagcagctgatacactatccaagctcggatccggtcgaactcaggtcccacccggagttttcgtgcaggaaattacacggccgagtatctcaatagaccaaacagaagagtgcaacatcgtagatcaacccgagtcagactctgatgactggaggaggccgatcattaagtatataaagaatgaagaagagccagatgacaaaaactcggcagagcgcattgccagacaatcagctcactacacactcattggggagatattatacagaaggggtgcatcaggggttctcatgaaatgtattctcccatccactgggaagcaacttctggaggaagtccatgcagggcaatgtggaatacatgcagcctccagaacactagtcgggaaggtcttcaggtcagggttctattggccgacagcgaagaacgacgcagccgagttagttcagagatgcgaagcttgtcaatacctgtcgaagcaacagcgcatgccagcacagcagctacagaccataccaataacttggcctttcgcatgctggggattggatatgattggacctttcaagaaagctcaaggaggttatacccacgtattggtggcaattgacaaattcactaaatggatagagttcaagcccattgcttctttaacctctgctaaggccgtggaattcatacaggatataatattcagattcgggataccaaacaacatcatcactgacttaggatccaacttcaccagctcagaattctttgacttctgcgagcaaaagagcattcagatcaaatacgcatctgtggcgcatccaagagccaacgggcaggttgaacgagccaacggaatgatattggaggcactcaggaaaagggtcttcgataaaaatgaaaaattcgcaggaaagtggataagagaactaccttatgtcgtttggagcctgagaacccaacctagccgagccctgcatggaaacactcctttcttcatggtctatgggtcggaggcagtgatacctgctgacctcaagtttggggcaccaagattgatcttcgaaagcatagcggaagctgaggccaccaggctggaggatattgatatacttgaggaagaacgactgaatgcagtaatccaatcagcacggtaccagcagactctaaggcgctatcacgataaggctgtgcggcaaaggtccttttcagtaggagacctcgtcctccgccgaattctaacgggggagggacggcacaagctatcacccttatgggaaggacccttcatagtagcagaggtcactcggcccggatcgtatcgcctcacccagacggatggtacagaagtcgggaactcttggaacatagagcacctcagaaagttttacccctag

SEQ ID NO: 165669 - DNA, 660 bp, Zea mays
  Clone ID: MRT4577_82674C.1
cttttctgatcttgtttgatgaatctgtattgaggttgattgattattttctaccatgtccctttgtttattttgccctaattgatatggggacatggggtgtaggcatgtagctcttagtagtcaccacatgctactaacttgtacccagatcagataaattctttcagtaaattgatttataaatctctctgcgctactctgttggttttgtttcatgcacaggctggaggatgctggttatgctgttggtgcaagggtgcttgaactactctgtcacagggagaaggtttgataccagtttgtttgtttggttatacaatggtttttgtaaaatactggaacaatttttatgctccatttttgcaaataatattttgtagtcatatttccttttacaaagtagttttgcttggataattctttctagctcgaaatctgatataatgttatatgagcattcgagcactgtacatttagcataaacatagttataaattttcttggactaattgaataataacaactgtagggtcactgcatcatctctttgttttcattgaattctagaggataaaaggttcatggttcatctggtataacatgtgcaatgatttcaagtactccagtttttttaaagaaaactaatatccatgttat

SEQ ID NO: 165670 - DNA, 929 bp, Zea mays
  Clone ID: MRT4577_82675C.1
ccggccgagcgggagcctcttgttgtacttattagctctctctcagctaacctccctaggaataataagctgcaaaaggcacaaaggcgacgccgataccgaagcaaataccatagcgttgatgtaaagtggcgccagaggagagagagagaaaaaaaaggaagcgagcgagccgagaaacatggacgaggaagaggtccatatcgcagttgggaagaactcaaggaaggagaaaaccaacatactgtgggccgccgccaatttccccagggccaccatcgttcttgtccatgttcactggccctccaagtggatgcctttcatgggtggcaaagtgctatacaagttcgctgatgagaaggagaaggagatgcatagaggcagagaaatgaaagtaatggtcaatatgttatcacagtacaaaaaaatgtgcgggacgagaaaggttagtgcacattaccttacacatgatgacactgttgccggtgttgtgaacctcataaagaagctcaaaattaaaagaatcgtcatcggttcaaggaacatgtcaaggcaagttgtggttcgccagtgctgtcaggtttggctggtactcaacggcaaacacatctccaccagcaatgatcacctggaatatagtgaaaatataggatatggaaggggggagctcaggtattttggcatctatacatgagctaggtgaggaatctgacggctacgtgacaccacgaagtgatcttgtagacgaaaccatggatgaggagtcggctgaaatgaatgattctgatcaattagtaacggaagatgaaacattgactgaacaaggcacagaggaatcagtcacttctgaacacatgggaaactttttttcagagaatgctgatcagtctgatgagatacagaatttcaggaacatagctgacaggctg

SEQ ID NO: 165671 - DNA, 2583 bp, Zea mays
  Clone ID: MRT4577_82676C.1
atgccgttcggcctcaaaaacgctggagcgacttatcagagagctattcaaacatgcttagccgatcactggggcaagcgtgtggaggcttacgtagacgacgtggtgattaaaacggagaatccggaaaacttcatcgaagacttacagctggttttcaacagcctgagaagatatagatggaagctcaatcctgagaaatgcgtcttcggggtaccagcaggaaagttactcggatttattgtcagccaccggggaattgaagctaatccagataagattgaagctatcatgaagatggaagctcctcgatcgcaaaagaaggttcagcgactcactggatgtatggcagccctgagcagattcatatccaggctgggagaaaaaggtctgccattctataaactgctgaagaaggtggataagtttcaatggactttagaggcacaagaagctctagacgcactgaagaaattcctgacaacaccgccagtattgaaaccgccccggcgagctacgccgactcagccggctgaagatctgctgttatatatctcttgcacgactcacgtggtaagcactgcgttggtagtcgagcgagtggaagaagggcatgcctacccggtacaacatcctgtctacttcatcagtgaggttctaggcccatcgaagaaaaagtatcctcaagttcagaagctattatatgcagtacttctgactgcccgcaagctgcgccactactttgacgaccacaaagtcatagtagttactggttttccaataggggacattcttcacaacaaggaagccattggccgaatagccaagtgggcttgcgagttgggatcccatgatatcgagttccgacctcgcactgccatcaaaactcaagcactggtcgatttcgtatcagagtggacagaacagcaagtgccggataatccagaaaccgcagaagtatggcgaatgtattttgatggctcgctgaagctgcagggagcaggagcaggaattctcttcactgcacctggaggcgaacacctcaagtatgctctccaattgctattcccggcctctaacaacgcagccgagtatgaagctttgatacacggactaaacatcgctatatcactgggtgtcaagagactgatggtgtacggagattctctggtagtcatcaaaagagatcggaacacggcggctgatgtactgtccaagcttggatccggtcggactcaagtcccgcccggggtctttgtgcaagaaattctccagccgagcatctcgacggatcaaatagaagagtgcattatcatagatcaacccgagtcagactctgatgactggaggcaaccgattattaagtatataaagaatgaagaagagccagatgacaagaactcggcagagcgcattgccagacaatcagctcactatacactcattggggaggtattatacaggaggggcgcgtcaggcgtcctcatgaagtgcgttctcccgtccaccgggaagcaacttctggaggaaatccatgcagggcagtgtggagtacacgcagcatccagaacattagtcgggaaggttttcaggtcaggattctattggccgacggcgaagaatgacgcagccgagttagttcagagatgcgaagcttgccaatacctgtcaaagcaacaacacatgccagcacagcagctacaaaccataccagtaacttggcctttcgcatgctggggattggatatgattggacctttcaagaaagctcaaggaggatacacccatgtattggtggcaattgacaaattcactaaatggatagagttccagcccattgcctctttaacctctgctaaagccgtggaattcatacaaagcataatattcagatttgggataccaaacagtatcatcactgacttgggatccaacttcaccagttcagaattctttgacttctgcgagcaaaaaagcattcagatcaagtatgcatctgtagcccatccaagagccaacgggcaggttgagcgagccaacggaatgatattggaggcacttagaaaaagggtctttgataaaaatgaaaaattcgcaggaaaatggataagagaattgccttatgttgtttggagcttgagaacccaacctagccgggccctgcatggaaacactcctttcttcatggtctatgggtcggaggcagtgctacctgctgatctcaagtttggggcgccaagattgatcttcgaaagcatagcagaagccgaagccactaggctggaggatattgacgtacttgaggaagaacgactgaacgcagtgattcaatcagcacgataccagcagactctaaggcgctaccacgacaaagctgtacggcaacgtttcttttcgatgggagacctcgtcctccgccgaattctaacgggggagggacggcacaagttatcacccttatgggaaggacctttcatagtagcagaagtcactcgtcccggatcatatcgcctcacccaaatggatggcacggaagttgggaactcctggaacatagagcacctccgaaagttttacccctag

SEQ ID NO: 165672 - DNA, 349 bp, Zea mays
  Clone ID: MRT4577_82677C.1
ggtaggggtttttttgttgggggggggggttaggccccccaattgaaaataaattgggtgaccaaattaggggcaacgcttctttggaaaaaagtgtaacatgccaactttccttctttacggtgcaatccaatcccatagaaccagtggtttttacagacccaaagatgcacgtcttcaggtcgacaatataaccagtttccacatcttgttcaatacgaacacatgttggctgccaaactttttccacagattcgagtaactctgacagggtttttccctcaccttatctaaccgtctaaatcatatagagtgcgtcccttgcgtttgatgggtttcttcgactttt

SEQ ID NO: 165673 - DNA, 2118 bp, Zea mays
  Clone ID: MRT4577_82678C.1
atgccgttcggcctcaaaaacgctggagcgacttatcagagagccattcaaacatgcttagccgatcactggggcaagcgtgtggaggcctacgtagatgatgtggtaatcaaaacggagaactcggaaaacttcatcgaagacttacagctggttttcaacagtctgaggcggtatcgatggaagcttaatcctgagaaatgtgtttttggggtaccagcaggaaagttactcgggtttattgtcagccaccggggaattgaggctaatccggataagattgaggctatcatgaagatggaagcacctcgatcacaaaagaaggttcagcgacttactggatgtatggcagctctgagcagatttatatccaggctgggagaaaaaggtttgccattttacaagctactcaagaaagtggataagtttcagtggacttcagaggcacaggaagctctagatgcactgaaaagattcttgacaacaccgccagtactgaagccgccacgacgagccacatcaactcaaccagctgaagatctgctgctgtacatctcttgcacgactcacgtgtggactgagcagcaagtaccagataacccagagactgcagaagtatggcgaatgtattttgatggctcgctgaagctgcagggagtaggagcaggaattctcttcaccgcacctggaggcgagcacctcaaatatgccctccagttgctatttccggcttccaacaatgcagccgagtatgaagctctgatccatggattgaacatcgccatatcattgggcatcaagagactgatggtgtacggagactctctggtagtcattaaccagataaacaaggagtgggattgttcaagcgattcaatgggaaagtactgcactgccgcccgaaagctggaagataaattcgaagagtcagactctgatgactggagaaggccaatcatcaggtatataaagaatgaagaggaaccagatgacaaaaatgcagccgagcgcattgccagacagtcggctcactacacactcattggggagacattgtacagaaggggtgcatcaggcgtcctcatgaagtgcattctctcatctactgggaagcgacttctggaggaggtccatgctgggcaatgtggaatacatgcagcgtccaggacactagtcgggaatgtcttcaggtcaggattctattggccaacagcgaagagtgatgcagctgagttagttcagaggtgcgaagcttgccaatacttgtcaaaacaacaacatctaccagcacagcaactgcagaccataccagtgacttggcccttcgcgtgctggggactggatatgattggacctttcaagaaagctcaaggaggatacacccatgtactggtagcaatcgacaaattcactaaatggatagagttcaaacccattgcttctttaacctcagctaaggccgtggaattcatacaagacataatattcagattcaggataccaagcagcatcataactgacctaggatccaacttcacaagttcagagttcttcaacttctgcgagcaaaaaagcattcagatcaagtatgcttctgtagcacatccaagagccaacgggcaggttgagcgagccaacgggatgataccggaggcactcaagaaaaaggtcttcgataagaatgaaaagttcacaggaaagtggataagggaattgccctatgtcgtctggagcctaagaacccagcctagccgagctctgcatggaaacactcctttcttcatggtctatgggtcagaggcagtattaccagccgacctcaagttcggagcgccaaggttgatcttcgaaagcatagcagaagtcgaagccaccaggctagaggacattgatgtactcgaggaagaacggctgaatgcagtaatccaatcaacacgataccagcagactctaaggcgctatcatgacaaggccgtgcggcagcgatccttctcagtaggagatctcgtcctccgtcgaattctaacgggggagggacggcacaagttatcacccttatgggaaggacccttcgtagtagcagaagtcactcggccaggatcatatcgtctcacttag

SEQ ID NO: 165674 - DNA, 311 bp, Zea mays
  Clone ID: MRT4577_82679C.1
gggagcaactggctagttactatatattatctgtataggtaatctactgagagtgcagctgccatccatagatggtgcgtttaaatcagattctagccctgagcccctcaagtgacccagatagctctaagaatcgaatatacacagatatcctctcttgtgcccacaagagtgcacattctaaacacaggagagacacacatgatatgatacacaaacgaattgctcgcggtccacacacatactatgactggcctcagtcaattgatcccctcacagctgcttgttgtccagctgcacaggcatcgacc

SEQ ID NO: 165675 - DNA, 361 bp, Zea mays
  Clone ID: MRT4577_8267C.1
gaattaccggctcaccatcaattcacgtgaatctaaaccacaaaaaagaagctttatgaacataaccaattaccaatgacactagctgatactagtagtattacgcatgcatgcagtagctatgtgtgtcgtcgtagtcgtagtatagctgccagtgtccggacgcggacggatcaatggcagattagcagctagccagctgggattgagatggatggatggatggatggaggtcgaggcacgccacgcgcagggcctagttcctgttgaccatggcgaggatggtgcagatgctctcggagctcaacaccgacatcgacgcctacgtcttcatcgactccaactacaacctaatcagctt

SEQ ID NO: 165676 - DNA, 426 bp, Zea mays
  unsure (1)..(426): unsure at all n locations
  Clone ID: MRT4577_82680C.1
agaacgaggcacaagcttttttttttcttttttttctttttttttttgcacaagagagcaagagctaaatggaaacacactggtttatgaaagaagaacaactaataaggggtgttctacagataatcaaaaataaaaagagcacccccccccaaccataaaccttatatgtatataaaaaaagtaaaaaatagaagaggggggccggaactagattagattagctatcaaaatcctgataatagttaaaaccgtgaattaggacactgggccgaaataaaacttctctgcagaggccccccnnaaaaagaaataannaacgacacccccccgcgggcggggggcgccccttgcgttaattcttgcacacgggggcgctttcttgtgggggccgcgggccccccctcggggggtggggtgtacaaa

SEQ ID NO: 165677 - DNA, 340 bp, Zea mays
  Clone ID: MRT4577_82681C.1
aaaaagggtttccccccgtaaaaaaaaattttgtgtgggaaataacaggccctcttttaaaaaagggccacctatgaaccccgcaggcgatcttttaatccccccaaaatgggggaaggaaactaccgaggtgggaatatgggggcccctgggttatcttaacaatggggggggggtttcccccccacttaaatgggggggggaatccggaggaccaggcccgtactaggccttgtttttttggcacaaggggataaggggggccccgccaccggttctttttgagcgcgggggttgccaaaacctgggcccaaaggcccgcagcggggctttgggttgg

SEQ ID NO: 165678 - DNA, 392 bp, Zea mays
  Clone ID: MRT4577_82682C.1
gcaaggggccgacaaggacattttacttggaaaaagaaaaatatctctttacaacagcatctaagggtggcccctcctagaaggggggcaaaacatcccccatggacaaaaaaacaggaacaaaaaatcctatcaaaaaaaaaagcgggggcccccaataacttttttaactttaactaaataacgaaccctttttttatggagaaccctccaaaaatccacaggaaaataaacttgcccgacccaacaaatgcaaaaatccctttgtttcccaggggggaatttcccaacccctatgggcaatatctcttctggaagaaaaacttcaaaaagggaaacccaaacagggtctcaaaaagcacggggaacgccaccaccacggccgaacacag

SEQ ID NO: 165679 - DNA, 429 bp, Zea mays
  Clone ID: MRT4577_82683C.1
tttttgccaactcgaaactagcgcacttgcaatctgggtaagcattaagacggagacctggaggcatcgactgtgaagagcaaggctctcgtggcgaacctagctatgcagggccttatggactatgtgacacggacgaacgacctgaactgccgaataaacacctctagtgcagcgagtgcaccatctgcatcaacggtgtaggacccactacgacctacacatcaagtgcgccgacagctgaatgaactgcttcacaatctgcagcgacaacgacgcatccaaagacatacaccaccactctcctacatgaactctgcttcttctacaaccactaaagttatatacagctgcacatacaatgtatcctatcatgcttcaccgttcacgacgcttgctgcaaggcggcagacaccaacacactagcta

SEQ ID NO: 165680 - DNA, 858 bp, Zea mays
  Clone ID: MRT4577_82684C.1
atgcgccacaccctccagaactgcacagacttcaagcattccgtggggaacgaccgacacttccaacctctgcctcctcccccaccacgaggaggacctggagaacctcgacagccccaacagcagcaggaggggggaggtggagccttccctcgtgtcgacagagaagtcaacatcattttcggtggacatgggtcgcaagaaagcaaaaggcaacaaaagctcaacgaccgtcagatattgatagcaaccactggtcctcccgccccatatcgatggtccgaacacccgatcaccttcacccggtacctgctcctcgtcgatccggtgatccgagagagcagggtaaagaaggtattagtggacgggggaagcagcatcaacgttaccttcccccggacgcttcaaggcttgggggttcccctcaaagagctccatgagtcggacactcctttcttcggcatcgtgccgactgaagaagaatatccactgggacatatctacatgccggtcaccttcggaactccagaaaactacagaactgagttcctgaggttcgaggtggcaaacttcgattgcggttacaacgccatcatcgacaggccagggttggcaaagttcatggccattccacactatacgtccatgatattgaaaatgccagaaccacaaggaatcataactgtgcgcgctgacttccaaggcgccgcagaatgtttccgagtggccattcaggcagctctcaccaccaaaccatcagcgacttcttctgcgcaggcgatctcaaagcctgaggaagacctcgcggtacccgcgaatgaagctcaagccgtgacctctatacggccgactgaataa

SEQ ID NO: 165681 - DNA, 410 bp, Zea mays
  Clone ID: MRT4577_82685C.1
atataaaacattaatggggttattaaaaacgaacgacaacaacataagaagagttacatttaatacacaaacagttatcaaagacaagtttacataatcagttcaacacagaagatactaagtctcacatcatagagctattacacacagacctatagtttatatttacatcacacaaatggataacgccctttagactcacaggtaacacttttaagactcttaactatgcgtgcattagaggtgaggatgtcataaagctcaagatatgttacttcatcaagtccctcaaccaattgtaaatcgaccagaacatttgaggaagagggtagttacggaccgtcatatttcaatgcagatgtaagcatgtcagacttatcacaccacatacaattaatagattcatctaa

SEQ ID NO: 165682 - DNA, 197 bp, Zea mays
  Clone ID: MRT4577_82686C.1
tacgagtttcagaaatataatcaagaatctggtggtgaggtgcatattacttagcctaggatacaggtgatagttcgtcaaagtttgaaggccatgattaattggccccgcatgaggatcatcaatgagaccctaatcctgatactattcggatcaatagctacaagatacgtgtaattaaagtcattgatcatgga

SEQ ID NO: 165683 - DNA, 292 bp, Zea mays
  Clone ID: MRT4577_82687C.1
agctcactattcggcaccgccctttccctttctccttttatatttttaaaccgacacgcccaaatccgggaaaggccttttacaaattttctcaatgccatcttctacataaataaccgaacagtatcttaccaacatgaacagtctgtgcttgtcttcctcagtactctaacaacttttttgacatccaatctccatgcaccgaatgtcccatggaaaaaaacggtctttctctttaccaaaaataaacacttttgttatacctgatgatcacattaaatcgcttgaaaat

SEQ ID NO: 165684 - DNA, 2136 bp, Zea mays
  Clone ID: MRT4577_82688C.1
ttttggttttttaacaatgcttcgcgtgtttgtattcaatatatgccatttcaaaatggggaagcgctacatttttttctcacaaatcgatcatctcccttgtgatagaacacttgcagaggatacaacgatgctgttagtcatatacgggtgggacgacgtgatgtacgaatcaaacccgtcgttctgtatcagtgacatgatgctgtagctcgtgtagttcggtgacaggtcaggaacggcctggtcggagtccaagtactgcacgaccctacgcatgctgggcctcacgttaggcaacgggtgcgcgcacatcaggcccagcttcagcaccagcgtcgcttcctccgcctcgtacttccccacgagccgtggatccaccacgtccaggaccgagccatcgcggtggtgctcgatcacccagtccaccagcacgacctgccggtcgcggtcgatgggcctccgtccgcaggcggcctccaggaggaacacgccgaaggagaagacgtcggtagagggcgtcgccttccccgtgcgcacgagctccggcgcgaggtaccccatggtcccgaccacgtgtgtcgtctgcggatcggtgccatggtcgtacagccttgccaggccgaagtcgcctagccggccgttcatctcgtggtcgagcagcacgttgctcgccttcacgtcccggtggatgacgacctgctcccagtcctcgtgcaggtacaggaggctcgccgcgacgcctttgatgatccggtacctctcgtgccacgagagcgccggcacgtgttggtcgtacaggtacttgtcgaggctcccgttcgccatgtagtcgtacaccaggatcagctcgcctctgcgcctgcagtagcctagcagctgcacgaggttccggtgccgaatgcggccgatgctcaccacctccgcgacaaactccctgacgccttgcctcgagccatgcgacaccttcttgacggcgatctccagggcgggtgatgctgggagcactcccttgtatactctcccgaatcctccgacgccgagcaagttcacggcgtcgaacccgttggtggcgtggaacaggtccttgtacgagaaccggtgcgggccgaactcgtcctcccagtcttcccgcacctcggcgaaccggcgccgcctccacatggcgaaggagatggctgcgagcgctgcggccacgaccagcgcggtggcgagcggcagcaggacatccagcaccttggaccgaggcttgggacccacgcgtggcaggacgggtagcttggacatgtcgagcggcggggccggcccgtccaagccgaagctccacccgagcacgtagtggtgcgtggccacgacccccgtcgccgaggagaagccgacgtacatcggtccgccccgcccgacgatcgtggagaggtcgacggccgtggagaccagaggcctgctgggctttggcacccgcaccggagcgagcgtcacgtcgagccgcccggcctggccgtcgtagtcgatccacacctgcatcggcttccggctgttcagctgcagctcccgtatggcgccgccggccgcgtcgtcgtagtagccggccggcatggcctgttccgacacgaggctgttgacgtcgacgccgacgtggttgctgtcgatgtcgctcagctccgggttcaggatggtgtccagctcgaccgccaggacggggtcgctcgccgtgccgttgatggcgccgaggatgcccaggtactgcccggccttggccgcggagaagctggtggtcggggcgaccacgaaggcgaggccgtggtcgctgagcccctcgtacgcggacacgatggcgaagacgaagcacgtcgagaacgaccgcgcccgcgcccgcgccgtcgccgccgcggcggaggaggacgcgttgaggaagtggacgggggcagggcggaacgcgtgcgctttcgcctggaatgtggcgttggtcagcgcgaggaggccaccgggcgtcacggcggcgagcccgtttagcgcgaggtccgacgcggcgaaaccttggtaaataaactggtggccgacgtcggcagacgacgaggggacactcacatggatcagaaggagcaggacgactaaggataggagcttagcagacat

SEQ ID NO: 165685 - DNA, 347 bp, Zea mays
  Clone ID: MRT4577_82689C.1
cccacgcgtccgcccacgcgtccgctcacgtttgcgattactctcttggacaactggccagggtcgtctttcacaatggacggttacatatatatccatacatcttataacaaacttcaatataaaagtcacatagatttaataattaggaaaaagaagtcataacactataagatcactggcttacattttgcccctttaaactaatcacaacttctgattacttctgcggattctagaatactacttgttaacgtcgactaattcgttcacagccaccacaaactaaagatatagagctataataatgataagcacaaacattaccctccaatattaatgctgat

SEQ ID NO: 165686 - DNA, 244 bp, Zea mays
  Clone ID: MRT4577_8268C.1
attcggctcgaggcgggacggcattttttctattcagccgcagccgttcttgaatgggaggttacaaaggaggccaacgtgggaatagcacgcatttaacagatgaaggagcgtctcgaaacgataagaaatctcatcacaagtgatagacccgtgaaatacacgggaagggtccagtggccttaaaaaccaccatttgtatggcacgcatagagaaacaattttgcagaatctactagagtta

SEQ ID NO: 165687 - DNA, 818 bp, Zea mays
  unsure (1)..(818): unsure at all n locations
  Clone ID: MRT4577_82690C.1
ctcgaggccggccggggctgacaaacactcaccctctcccctcggaacgaaccgaccaccatgaagctcaacatcgccaacccagccaccggtcaacaaaaaagtatcgagatcgatgacgagcgcaggacccgaatcttctacgaaaaacggatgggtcaggatgttgaggctgatgccctcggagatgagttcaagggctacactttccggatctccggaggcaatgacaagcagggtttccctatgaagcaaggtgtcctgacacccaagcgagttcgcctgttgctcggcgagggtcactcttgcttccgcgcccgtcgtgttggtgagcgcaagcgtaaatctgcccgcggttgcatcgtcgcctccgacattgccgccttgtccctcatcgtcatcaagcaaggcgagaacgacatccccggattgaccgacaccgtccttcctcgtcgtctcggccccaagcgagccactaaaattagacgattcttcaacctgaccaaggaagatgatgtccgcaagtttgtcgtgcgtcgtgaagtcaagagtgccaagaacccagacgccaagccttacaccaaggcccccaagattcaacgattggtcaccccgatccgtcttcaacgccgaagacatctccgatcattgaaccgtcgccgcaacgaagcgcagaaggcacaactcgccgagtancaggaggttgtcgccaagcgtcaagccgagcgcaaagctaagttggccgcggtcaagtcgcgaaaacacgccgccgctgctgctcagcattaatgcttcgaaatgcncatgcagccgtctca

SEQ ID NO: 165688 - DNA, 864 bp, Zea mays
  Clone ID: MRT4577_82691C.1
tcttttacgccagaggaagagagaaaaccccaagtcctcctcgcctcttccgcctttcctcttcccccttcctagtatagacaatcatcaatctgtgagattggcgagcgaatcacgcatacaactgtaggatggagcggggaatgaatgcctcccctgattgcagttaatccttcccattccagtccgttcctcgtccactggagtccgttgaagtacaggctgcagtaggacagggagcaaccgccaccatagctgttcgccatttcttccatcaacaccaacatgagcagcaacaaggaaagggccaagaaggcattgaacgccatgaagctgcttggtttctctaagaagcaggccaccccagtactcaaggaactcctcaacatcttcaacaacaactgggagcccattgaggatgagtgctatcgtgccctcgctgatgccatcctcgataggcaagacaacaaacaaacccctccctcccaacagggcaaccaagcagcacatgcgcactcggagcacgatcggcaacaatatgtttctgctattcacgatgacagaggcgaagatataatgaaacgcccctggtgaagaggcccaggatgggcacggctaatttcagggcagagttgcagccatttgagtctggaccacagcaacccactgtttcaacccaaggtgctctgtctgtttcgccacaaaacagtcgtggagtaactaggtccttgactgtagtgctgcaagatgctgggtgtgaatatactttagctgtcgatgattctttcatcgtgaaagaacccaaaccagaaccacaaattgatatagcagaaatcaacattggtgaccatttaactgaaccac

SEQ ID NO: 165689 - DNA, 564 bp, Zea mays
  Clone ID: MRT4577_82692C.1
atgaagcaacctgaacaaatcaatgacggcggcgtccgtgcaaccggagttggaggcattcccgcggtcatcaacggtgccggcgcggctatcgaccaggaggctgtcgtggtgagggtcgcacctgccggcgctgccaggggcacaaaccaagagaagccggagccagagttggaactggtagagaaagagccctgccaaagggggcctaaatgggtcgtgtttcaatatagcctgctagttagggatggacaaaaaaatatctccaaaaatgttccatataaccgccgggcaatgcaagtgcaaccaccctcccccgcttatcggtcctctctagcaaaatcgggggatcctatacccccgtatgctcgtagcaaaatcgacttcccgtatgctcctggcaaaatcgacttcgtatgggttgtcataggatcaaactcacgctgggcattcggagtgaatggaacggagcgtgactgtgcgagcgggctaggaatgaagcggctccgtccggttgattttttggagcgggattgttccggatctgaggagaatattccctaa

SEQ ID NO: 165690 - DNA, 374 bp, Zea mays
  Clone ID: MRT4577_82693C.1
taaacagaatggagtttaaccaagctcacatgccctgatacaacttgctgcagcccacttccaccatcagttttgaaaagcctcctgggagatgattgctataagcgatgggaatcattcgcgttacagaagctcttagatacaatgcctgatctggtatattgtccgaggtgtaatgctgcctgcttggaggatgacaatgatgctcaatgcccagagtgttttttcaccttctgctctttgtgcaaagaacgcaggcatgtggggaaggattgcgttactccagaagaaaagattaggattctgagggaaaaacaccagaaatattccctcccagaaaaacaattgttgaaagaacagagggaaatagatga

SEQ ID NO: 165691 - DNA, 853 bp, Zea mays
  Clone ID: MRT4577_82694C.1
ctcgaggccggccgggaaaggtctggagagacctcgactcttccacccccacagtctctcctgtcctgtccaagtaataaagcaccgaaaccggccgccgacgaccaagacctgcaaccgatggaaggcattcagcagctgccagcggacgtcctcgtgtcggtgatctcccgcgccgccgcggggccgagggatgcctgcatcgccgccacggtgtcgccggcgttccgcgccgcggccgactccgacaccgtgtggtcacgcttcctcccggctgacctcgccccgctcgtctacccgacgcctccgccaagatccaagaaggagctcttccttcgcctctctgaaacccatgccctcgttgaagatggcctcatgagctatatgattgcggccagggctatggctattatctgggtcgacacgccggactactggcgctggatagtgcgcgaagactcaaggttctcgacatgcgctgaactgttagcggtttgttggctggacatctccggttgcatgccatgcaggatgctgtcaggtgacacgcgctatgcagcctacctggtattcaagatggccgatgactgctttggcctggattctcctcttcaggaggcatcggtcagcgtcggagaggggggcacatcaacggcccactggatcagactacagagctaccacgtcggcgacgaagagaacggcgtaaccgaagaaggagctccacctaggctcccacatgagaggcctgatggctggatggaggtggagctaggagactggtacaaccatggaggcgacgacgacctagtggttcgtgccagtgtgaaggaggccaggtttggaggcaact

SEQ ID NO: 165692 - DNA, 471 bp, Zea mays
  Clone ID: MRT4577_82695C.1
ggcattcagcagctgccagcggacgtcctcgtgtcggtgatctcccgcgccgccgcggggccgagggatgcctgcatcgccgccacggtgtcgccggcgttccgcgccgcggccgactccgacaccgtgtggtcacgcttgctcccggctgacctcgccccgctcgtctacccgacgcctccgccaagatccaagaaggagctcttccttcgcctctctgaaacccatgccctcgttgaagatggcctcatgagcgcgtggctggacagggagaccggcgccaagtcctatatgattgcggccagggctatggctattatctgggtcgacacgccggactactggcgctggatagtgcgcgaagactcaaggatgctgtcaggtgacacgcgctatgcagcctacctggtattcaagatggccgatgactgctttggcctggattctcctcttcaggaggcatcggtcagc

SEQ ID NO: 165693 - DNA, 186 bp, Zea mays
  unsure (1)..(186): unsure at all n locations
  Clone ID: MRT4577_82696C.1
tnnattatggtttaaaattgggatgacccaaaaaaaacggggggggtgactcacgtgaaaagggaaaataaaataccagtgatatcagagctaatgactcatgggaaaagggaaaaatcagacttgaggtctagtcccaggttatcactctgacgggggggtgtttttactaggaaggcgcgactc

SEQ ID NO: 165694 - DNA, 1130 bp, Zea mays
  Clone ID: MRT4577_82697C.1
attcaagtggtcttctcccaccaaccacccaccaagtctctcctgaaaaggcctggtgagagcaaaactcttccacccaccaagtctctgctgtcctgtccaagtaataaagcaccgaaaccggccgccgacgaccaagacctgcaaccgatggaaggcattcagcagctgccagcggacgtcctcgtgtcggtgatctcccgcgccgccgcggggccgagggatacctgcatcgccgccacggtgtcgccggcgttccgcgccgcggccgactccgacaccgtgtggtcacgcttcctcccggctgacctcgccccgctcgtctacccgacgcctccgccaagatccaagaaggagctcttccttcgcctctctgaaacccatgccctcgttgaagatggcctcatgagcgcgtggctggacagggagaccggcgccaagtcctatatgattgcggccagggctatggctattatctgggtcgacacgccggactactggcgctggatcgtgcgcgaagactcaaggttctcgacatgcgctgaactgttagcggtttgttggctggacatctccggttgcatgccatgcaggatgctgtcaggtgacacgcgctatgcagcctacctggtattcaagatggccgatgactgctttggcctggattctcctcttcaggaggcatcggtcagcgtcggagaggggggcacatcaacggcccactggatcagactacagagctaccacgtcggcgacgaagagaacggcgtaaccgaggaaggagctccacctaggctcccacatgagaggcctgatggctggatggaggtggagctaggagactggtacaaccatggaggcgacgacgacctagtggttcgtgccagtgtgaaggaggccaggtttggaggcaactggaagaaagggcttattgttcagggccttgagattagacctaagaactgattgagggctggttgatcataaaattatatgtatatgtctcagtttggagtgcattcatgttggagctattatgtaataatacgcctgcaggctgcagccgttcctgatgcagggatttttttttaaaaaaaaaaacaaagaaaaaaaaaaaaaaaaaagcggcc

SEQ ID NO: 165695 - DNA, 612 bp, Zea mays
  Clone ID: MRT4577_82698C.1
ccggccgggaaagaaaaaggaaaaaacacataaggggttggagaggaacgggcagggacagaaggttcaagccctagcgcaggaatggcaggttggtgcgaggaggcagtgacgttgctgcagcacctcgtggtggcggagatagtcgtcgacgtgctactctgtgtggtgtcgatctgggccactatcatgatcggcctcgtcgtcgactagtcctggcacccgcgctgaacggggctgctcttccttgacctccacacccgccttcgcttcatctgggtgtcgcccggcctcgagacccggagtctctggttcgtctgctctgtcatgcccaggctcctctcctccgcattcttccactttagaggcaagcaactggacaaggcctctcctgatgacgatgtcgttgtaatccagggcaacagaggttgctccgatgacaggtgagtgtcttagtggttgaatctattttacattatggcgatgggcggcattgatcggggagcacatgtaagtgttgtcaagtgtctctcttggagaccatttgtctttcaatttggatttatattgaattatattgtggagaaaaaaaaaaaaaaaaaaggggcggcc

SEQ ID NO: 165696 - DNA, 416 bp, Zea mays
  Clone ID: MRT4577_82699C.1
ccatcctgccgtcgtcatcagcagcttctgcttgctctggggggaaggagagagagagagagcgagagagagatctagtagagaggctagtaggtggtcctcgaacgaagatgttggcggcgttcagcgggcaggtggtgcaggtgccggcgcagctggtggcgtaggccacccgcacgccgccgcccaagacgaaggcgtacgcagctgatggggcgcttcctggccgcgtccgagccggacgagcccgtgcacgtccgtcaccaccgccaccatcgcctactcccacgccacacctaccgctcctccgccccaggtcgttcgcgggcaaagacgaggtgttctgtctgcccgagggccatctacttcaaccccatgtactaacacgtgagggcgatctgtgagggacgcgccgc

SEQ ID NO: 165697 - DNA, 237 bp, Zea mays
  Clone ID: MRT4577_8269C.1
gtctcacggacaggagccagtcgcattggaccaactcggcatgattgaactctgctgcttatgtgcaacacaactactattcacacaactagctgctagctacctccaggaatttcttgcatacaaccaactggcaacataagaactctgactagttatttgacaccatctatcagctaccaccattcaaacagctaacctgatgcgagccctgatgccttctctgacacaacaaca

SEQ ID NO: 165698 - DNA, 107 bp, Zea mays
  unsure (1)..(107): unsure at all n locations
  Clone ID: MRT4577_826C.1
gattctattgatgagcatcctcgacaatttggaagcatgcggaatgagaagagcagatccagtcggacacaggattttgntcctacgcgagacgtgggcgaggggaa

SEQ ID NO: 165699 - DNA, 751 bp, Zea mays
  unsure (1)..(751): unsure at all n locations
  Clone ID: MRT4577_82700C.1
aattcggcacgaggcttcgaggtcggcctccgctacaacgccaccgtctccggggtcatcagccccggccagatcgccgacatctccggcgtcgccgcgcaggacctcttcatgtggttccccgtccacgacatcaaggtcgacatcccctcctccggcgtcatctacttcaacgtcggcgtcgtcaagaagcacctcccgctcgccgtcttcgacgcgccgccggcctgcacgcccgacccgctcctgcaggtcatttctcatcctagcctcactctctcgatggcacgagctctaattcatcgatcttgggaccagtgacctccttgacatcattcaatcctcaatgatcttgaatgttggcacaacctttatacccagtttctttactgaaagctgcaagtagcatgcgcgggagcttttcagcatgtcatattccacggggcagagagtcgtgaatacacaagaaacagggaaatattcccaactgagggcttgattagagggggatttaagagattgaattcttttctatttaattttgaatagcaagagatttaatccgctccaatctccttcaatctactcctaatcgaacaaggattaagggcttgttcgctttcctctcaatccatgtgaattggttggaattgagtgggtttaaatttcaaacaagtcaaaatcttttggacttgttcgttntgtacttaaaccatgtgggatcttttggacttgttcgttttgtacttaa

SEQ ID NO: 165700 - DNA, 395 bp, Zea mays
  Clone ID: MRT4577_82702C.1
ttgttcgcgagccgcccttttttttttttttgggcactgagattaaatgactttacttggtcaccaatccacgcccttatgagtttgtgtacgggcaattgatgtaatcatggtcctacggagtggacagagtttacaagtcatcacaaaaacgatgctccaagtgaggaaacagccctcaaacttgaaccaaccacaaacaggagactcaagtctgttgccttttccggatgcagcagtcctttttttccccatagcgagggtctagccgtctccgtctagaacaggagactcaaagcatatttcttcggactcaaggcagccaagccaacttcataggaggcaagcccgagccctcgattcggtcaaacgtgttgcacacagccatacaggca

SEQ ID NO: 165701 - DNA, 404 bp, Zea mays
  Clone ID: MRT4577_82703C.1
cgggaacctcgtgttcgttcggagcgcagcacacacacaaccagatctcccccaaatccacccgtcggcacctccgcttcaagatgcagatctttgtgaaaaccctgaccggcaagactatcaccctcgaggtggagtcgtctgacaccattgacaacgttaaggccaagatccaggacaaggagggcattcccccagaccagcagcggcttatttttggtgggaaacagcttgaggattggcgcacgcttgctgactacaacattcaaaaggggagagcccttccacttggggctccgcttaaggggaggattgcaaattttgggaaaaaccttgccgggcagaattataaccttggaggtggggtcttggaccaccttggacactggaagggccaaaatcca

SEQ ID NO: 165702 - DNA, 746 bp, Zea mays
  Clone ID: MRT4577_82705C.1
cattgggtacctcgaggccggccgggaacctcttgttgttcggagcgcacacacacactaccagatctgccccaaatccacccgtcggcacctccgcttcaagatagcagatctttgcgaaaaccctgactggcaagactatcaccctcgaagcaggagtcgtctgacaccattgacaacgttaaggccaagatccaggacaaggagggcatccccccagaccagcagcggctcatctttgctggcaaacagcttgaggacgggcgcacgcttgctgactacaacatccagaaggagagcaccctccaccttgtgctccgcctcaggggaggcatgcagatccttgtgattaccctgaccggcaagaccatctccctcgtagtggagtcccctgacaccactgacaacgtcaaggccaagacccaggacaaggagggcatccctccagaccagcagaggctcatctccgctgggaagctgctcgaggacgggcgctcgcttgccgaccacaacatcctgaaggagagcaccctccactcggtgctgggccccaagggaggcacgcagatccccgcgaagaccctgaccggcaagaccatctccctcgaggtggagtcttctgactccatcctctacgtctaggcctagacccaggacatggagggcattcccccagaccagcagcgactcatcttcgccggatagcatcttgaggacgggcgcacgctcgccgacctctacatcca

SEQ ID NO: 165703 - DNA, 237 bp, Zea mays
  Clone ID: MRT4577_82706C.1
acggatgcgcaaaaccattgatttccgcaagggtgccgtgttgcactaagtctctcaaacaaagcatgccataaatgccgaccaatcgcagataatcactgacgcgtgtcgggagcatcgggaagttggaaaatggccttcaatactggaaacacacgcaacgtatgtcccctgactccatgaagcacaccataatggctttacaaagactagcggggtgggctcatggggcccggc

SEQ ID NO: 165704 - DNA, 2105 bp, Zea mays
  unsure (1)..(2105): unsure at all n locations
  Clone ID: MRT4577_82707C.1
gccggccgggtttcgcggcgccgccttcctccgaggctcctaccccttccctgcccgttgcagctgcattggttttggttctcttcaagctagccaccgcaaagcgcgcagcaaagctggcctcactcatacagctcaggtcctcccaagctcctccctatatctctcctcccatcccccaaaccctaatccccggcgtaacagtctgtctctctctctctccccacctccccctcactctctccctctctctctctgaagcgcgcagctttcaaagcgttcggagagatggcagaggagacgcagccagaggccgccgccgccgcagccgaggccgaggtggtcgtgaccgagccggcgccggcggaggcggaggtgcctgcggcagcagaagccgaatccgtgaccgaaacggagaagaaagccgatgaggcggcggtcaccgccgatgacgcgggaaaggggaccggctcgttcaaggaggagagcaacctggtagaggacttgcccgacccggagaagaaggtgctcgacgagttcaagcacctgatcgctgccgctctcgccgccggtgagttcaacctgcctcccccgccgccgccgccgaaggccaaggaggaacccaaggccgaggagacgaagacggaagaatccaagaccgaggatccggccaaagaagagcctaaggcggagtctgcggcggaggagcccaaggccgaggtggctgcgaatgccccggctgaggaggtcaagacggaggtgccgccggtcgaggaggccaaggctgagacagtggctgaggaagccaagccagccgagcccgagccgcaggagaagaccgtcgtggtcgctgatgaggagcctaccaccaagacggtggaagcaatcgaggaaagcgtcgtgtccgcggacgaggaggcggccgcgcctgagcccgtgctgatctggggcgtgccgctgtcgacgacgagcgcacggacactgctcaaatgatgggaactccgggtgctgagttgggaagtgagctatggcgccgagttcacccccgacgcggagggtgggtacaccgtcattgtacagaagacaaggaaggtgcctgctaacgaggaaccgatcatgaagggaagcttcaaggcaggcgagcctggcaaacttgtgctaactgtgaacaaccctgcatccaagaagaagacgctcctttacagatcgaaggtgaagagcaccagcgagtgagtgtgaggtcacgccgctagctgcctgggccctacagttaaaacgatctacagcatgatagaagagagaaggaaccttttggtttggttcgttaatttactgggttttttttttgggttcgcattctacattttgtttggttgaaaccaaagtgagcttgtttttgtgacagtagatgggagaagtataatggcattgtgtgatggatggttgttgatgagggcagggaggacgaaaatgtgggggaatgaaaggttggagaatgtctgttcctctgtaaaaannnnnnaaaaaaaaaaaaaaaaaaaaaaaaaaaaaaaaccctcgtgttcgttcggagcgcacacacacacaaccagatctcccccaaatccacccgtcggcacctccgcttcaagatgcagatctttgtgaaaaccctgaccggcaagactatcaccctcgagggggagtcgtctgacaccattgacaacgttaaggccaagatccaggacagggagggcttcccccaaaaccagaaggggttaattttttgttggaaaacagttggaggacggccgcacgcttggctgactccaacatcaaaaagggagagcaccctcaacttggggctccgcttaaggggaggattgcaaattttgggaaaacccttgcccggaagaactataaccttgaagggggagcctttggccacattggccaacgtaaaggccaaaatcaagaccagggagggattccttcaaaacaagaaggggttaattttggttggaaagaacttggaggacggcgcacccttggcggattacaacatccagaaggagagcaccctccacttggtgctgcgcctcaggggaggcatgcagatctttgtg

SEQ ID NO: 165705 - DNA, 626 bp, Zea mays
  Clone ID: MRT4577_82708C.1
ctcgaggccggccgggctaaaccttactcactagcagttcggcactgcggctgcggggatgcggcggccggcggcagcggcactacggagccctcagccagcaccaggttgcggcaacggcaacaaccagcaagtggccagacctccagtcaggaaccaccgattgtgatttgtgaagaactgtgaattgattaactgaagatgtcaaatagtggaggcaagggatgtcgttcccgtgctagatcaatgccacccgagaagcaactaggtatttcaagtttcttgcctgaacctccaccgccgcctccttctacgaaaggtagtaccaacggtcagccctgcatggatgatgatgaacaagatgctgaaagtgatcccgacgtcatgaatgattatggtgagctttgaccgtgagtcagcgactagtcatggtgcttaatgcttgacaacatgtttggaactttagataaatatgttgctgtgtccgtgtgcggatgtgcctgtttctgtgtgttgtgtgtaatgaaccttgaacttttttggaacattggggcaagaaaaggtgccagccgcatggagcacccttctgtgtggctgtgtataaaaaaaaaaaaaaaaaagcggcc

SEQ ID NO: 165706 - DNA, 198 bp, Zea mays
  Clone ID: MRT4577_82709C.1
gtgccgtggtaatcgggcctttcataacggaaccaagttacgacacttgcgaagtattgagagcagacaatatgaggcaaagaacaaggtaagaaacaacttcattcaaaaaagttaatatgagaggggacaaaacttttaggcgtagaaaaatacatacttgccttagattcaatcgcttatggaaaagctatagat

SEQ ID NO: 165707 - DNA, 223 bp, Zea mays
  Clone ID: MRT4577_8270C.1
ataatgctgatgcacatatcccactcttcattttttttaacgaataacatgcactcaatcggcgttgcattcatgacttggttaactttgactggctggctccatacaggatccaaagctcacattcacggctatgcaacaacatatcgcttttatagcactccacagatgaagtgaattgaccaagactggcaaaagaatggctgaaaaaacactggattct

SEQ ID NO: 165708 - DNA, 219 bp, Zea mays
  Clone ID: MRT4577_82710C.1
cccggtcgacccacctccgccaccgtaccaacgctggctgatcttgttccatcatcaaataatggatgagtgctattacatatgtggcatcactcaaagcatgacttccatgttgaactatctttcaccttagcaaacctaatatactaatcgacattagaatcctctaaatacttataactatagcctcatttacttattccactgaaacacaacata

SEQ ID NO: 165709 - DNA, 1180 bp, Zea mays
  Clone ID: MRT4577_82711C.1
cattgggtacctcgaggccggcctggtgggcacggccactggccttgccaagtcagccatcgcccgcgccgagccaaaggcccgggagctctacacccgctacgagcctgtggcagagcggcgtgccgccgaggcctgggtggccctgaaccgtctccctctggtgccctcggtcaccagggccgtcctccccactgccgcacagctctctgccaggtacaattcggcggtgcgtgatggtgccaagcgcgggaacgccgtggccacctatctcccgctggtgcccactgagcggctcgcccgcgtgttcaggtaccccgtggctgacgttgctgcagcaccagagatgcagcccattccttcccagtagaagatgaaatggaatgtgaactgcataaaccaatatcaagaagtattactgtgttttgtctttgaacctcgtgttgttcggagcgcacacacacacaaccagatctcccccaaatccacccgtcggcacctccgcttcaagatgcagatctttgtgaaaaccctgactggcaagactatcaccctcgaggtggagtcgtctgacaccattgacaacgttaaggccaagatccaggacaaggagggcatccccccagaccagcagcggctcatctttgctggcaaacagcttgaggacgggcgcacgcttgctgactacaacatccagaaggagagcaccctccaccttgtgctccgtctcaggggaggcatgcagatctttgtgaaaaccctgaccggcaagactatcaccctcgaggtggagtcctctgacaccattgacaacgtcaaggccaagatccaggacaaggagggcatccctccagaacagcagcggctcatctttgctgggaagcagctttgagacgggcgcacgcttgccgactacaacatccagaaggagagcaccctccacttgatgctgcgcctcaggggaggcatgcagatgttcgtgaagaccctgaccgtgaaaactatcaccctcgaggtggaagcttcacacaccatctacaacctcaaggccaagatccaggatcaagagggcattcccccagaccagaagatgggtcatctttgctggaaagcagcttgaaggaaggccgtacgcctggccgactacaacatccagaacgagaggaccctcaacttggtg

SEQ ID NO: 165710 - DNA, 419 bp, Zea mays
  Clone ID: MRT4577_82712C.1
gcgagtacaagctttattattttttttttttttgtttttatttataattttttttttgaataatttaaatgaaaataaaaaaatactttatttttttttaatttttaatattaaaatttttatatataaaatacttttatatttttggggggggggggggcctataatttttaaatatatttcacccttgttaaaattgttcacccatcactatatcaacgtaagctacaattacacactgcttgaagacaggaatagctttagtgtattgataatggcccaattaaagtaaatcattttaatatcagtgcgggcgggggatttaaaaaacctgttctaccttattgattaatgaaacgaccaaatccaagttatagaccaattttgtattaatcattcttatagttgtttgctgagtg

SEQ ID NO: 165711 - DNA, 344 bp, Zea mays
  Clone ID: MRT4577_82713C.1
ggcacgagggtgccaaatgatggttgcctaaactacatcgaggagaatgatgaggtgttgattgctgggtttggtcgtaagggccatgctgtgggagatatccctggtgtcagattacaaggttgtgaaggtatctggtgtgtcgctgctcgcgctcttcaaggagaagaaggagaagccaaggtcttagatcactttcgatagtgaggttcaaggttgtgaagtttagcgacagagctgttaattctgagatgtactttttgttaacattgctatcgagactcgagagttttgttcccattttgaagtattaatattgcatcggcaaaaaaaaaaaaaaaaaa

SEQ ID NO: 165712 - DNA, 761 bp, Zea mays
  Clone ID: MRT4577_82714C.1
gacaaagttgttgtcgcatagaatagtgctcaaggttcattacacacagccacacagaagggtgctccatgcggctggcaccttttcttgccccaatgttccaaaaaagttcaaggttcattacacacaacacacagaaacaggcacatccgcacatggacacagcaacatatttatctaaagttccaaacatgttgtcaagcattaagcaccatgactagtcgctgactcacggtcaaagctcaccataatcattcatgacgtcgggatcactttcagcatcttgttcctcatcatccatgcagggctgaccgttggtactacctttcgtagaaggaggcggcggtggaggttcaggcaagaaacttgaaatacctagttgcttctcgggtggcattgatctagcacgggaacgacatcccttgcctccactatttgacatcttcagttaatcaattcacagttcttcacaaatcacaatcggtggttcctgactggaggtctattgagcattccatgtaactgtctaactgagcactgagcagtgtactaaactaataactacacctggcttggggcgacgacggcgtggcgctgaacgcctgaacccgtgaatcgctggccacttgctggttgttgccgttgccgcaacctggtgctggctgagggctccgtagtgccgctgccgccggccgccgcatccccgcagccgcagtgccgaactgcctcgtgtagcccggccggcctcgaggtacccaatg

SEQ ID NO: 165713 - DNA, 907 bp, Zea mays
  Clone ID: MRT4577_82715C.1
gatacacccgccagcacgaatcgtgacgcagatcaagcaaaccctaactgcccaccctactatatatattttttttcttgcccctcctcgatcccgccgccgacgccgacgccgcagccgcagccttagccttgccttcgaactcgaagcccgttgcatccggctaccgcagcgtcgccgaccgtcacagccggtctcctccctccgctaccatggggaagacacgcggaatgggagctgggcgcaagctcaagacccaccgcaggaaccagaggtgggctgacaaagcatacaagaaaagccacttgggcaatgagtggaagaaaccttttgctggatcatctcacgccaagggcatcgttctggagaagattggtattgaggccaagcagccgaactctgccatccgtaagtgtgcccgtgttcagctggtgaagaatgggaaaaagattgctgcctttgtgccaaatgatggttgcctaaactacatcgaggagaatgatgaggtgttgattgctgggtttggtcgtaagggccatgctgtgggagatatccctggtgtcaggttcaaggttgtgaaggtatctggtgtgtcgctgctcgcgctcttcaaggagaagaaagagaagccaaggtcttagatcactgtcgatagtctagaatggagtaaactgacaggctctactatggagtaaactgccaaggttttagatcactttcgatagtgaggttcaaggttgtgaagtttagcgacagagctgttaattctgagctgtactttttgttaacattgctatcgagactcgagagttttgttcccattttgaagtattaatattgcatcggcatgtgccgattcttactgagatgtatgttttgatatttgccacgttgtttgcgttgcctc

SEQ ID NO: 165714 - DNA, 885 bp, Zea mays
  Clone ID: MRT4577_82716C.1
gtctacgctactataaaatgtttttctcgcctctcctcgctcccgtagccgccgccggcctccaactctaaccccgtcgcttccggctcccgcagcgtcgccgaccttcacagcgccggttccttcctctgccaccatggggaagacacgtggtatgggagctgggcgcaagctcaagacccaccgcaggaaccagaggtgggctgacaaagcatacaagaagagccacttgggcaatgagtggaaaaaaccttttgctggatcatctcacgccaagggcatcgttctggagaagattggtattgaggccaagcagccaaattcggccatccgtaagtgtgcccgtgttcagctggtcaagaatggaaagaagattgctgcctttgtgccgaatgatggttgcctaaactacatcgaggagaatgatgaggtgttgattgctggatttggtcgtaactcgtaagggtcatgctgtgggagacattcctggtgtcaggttcaaggttgttaaggtgtctggtgtgtcgctgcttgcactcttcaaggagaagaaggagaagccaaggtcttagatcacttttcggtagtcaagaatggtgtaaactgcccaaggctcaactgccagctgttgaggcagatccggtcgacagggtccagatctagcccccgagcaccggagccgaccgcctgggccacgggccagcgaccccagccgccgtcccctgcacttgcgcgggcaccagccggcgccgccacagccgcagtagccatccagacaactctacgcagccgcacgagggatgtcttgccggcctgctgcggagcgcgccaccaacgcgaagaagagagcctcgccgccaccctccctgccggccagacggccat

SEQ ID NO: 165715 - DNA, 359 bp, Zea mays
  Clone ID: MRT4577_82717C.1
aatcgctcgagttctgctgctagcctcctgcgccggcggcggatctagactccgtttctccgtggtgccctgaagcacgatgcatctcctcatggacttaggactgatctacccggcgccaaaactgaaaaatttccacgacaacgactggagactccttctccccacaaactccttcttcatggatgccatatgtcaactacgctacctgataaacactgttttcaaccactcccacactggtggagcgcgtcctgaatgccacactgtcctcggccaacctatgagttcaactgcaaggctcactgatcactgctctttactcaaggaggtagactagaacatatgaaggcttcaag

SEQ ID NO: 165716 - DNA, 593 bp, Zea mays
  Clone ID: MRT4577_82718C.1
ctcaccttcgtaccgaaagaaataataaaagaaaataaacattattttataaccatttaatgatttgcattgtctttcttgtttgctgttctgatcttttgagtaatttgaaacccgaaaatggataaggtctgaaaattagctatacagaaatgctaaatgtgaaaaagggcttagctacaactagtcctattacctacaaaataaacgccttggagctttgaagaagtgtcttattcagaagtttcatcagctttaaactccataagcttcctattcaagtgtggagagcaacgggttcttgagttagtagtcatcgaggacaaaacgatactcggcttcttcttcttcttatgtgtaagatcatctacataaaactctctaattcatgaatttcctgcagttgggggatttacatagacacggcaccttgaattcatcaggttcatctggatcaaacaagtaatcgtatctgcaaaaacacacacagccatgtcatattcagtgaatcaaagggtgatacttaaattatgttcaagagagtgatgtgtatacgttaacttctcgcaggaagctacagtgttcttggcaat

SEQ ID NO: 165717 - DNA, 831 bp, Zea mays
  Clone ID: MRT4577_82719C.1
aagccgcagcactcatcgtgacgcagatcaagcaaaccctaactgccaacgctactataaaatgtttttctcgcctctcctcgctcccgtagccgccgccggcctccaactctaaccccgttgcttccggctcccgcagcgtcgccgaccttcacagccggttccttcctccgccaccatggggaagacacgtggtatgggagctgggcgcaagctcaagacccaccgcaggaaccagaggtgggctgacaaagcatacaagaagagccacttgggcaatgagtggaaaaaaccttttgctggatcatctcacgccaagggcatcgttctggagaagattggtattgaggccaagcagccaaattcggccatccgtaagtgtgcccgtgttcagctggtgaagaatggaaagaagattgctgcctttgtgccgaatgatggttgcctaaactacatcgaggagaatgatgaggtgttgattgctggatttggtcgtaagggtcatgctgtgggagacattcctggtgtcaggttcaaggttgttaaggtgtctggtgtgtcgctgcttgcactcttcaaggagaagaaggagaagccaaggtcttagatcactttcggtagtcaagaatggtgtaaactgcccaaggctctattgtcaaagttaaagttctgctagcaacagagctgttaaatctgagctgtacctttttgttaacattgttacagtattacagagttctgtttccatttcgaagatattaatattgcatcggcatgtgcactgttgcttgttttgccttttttcataaaaaaaaaaaaaaaaaagcggcc

SEQ ID NO: 165718 - DNA, 1461 bp, Zea mays
  Clone ID: MRT4577_8271C.1
gccggccggtactcggaacataaatgcatgcaactatactagatgaacaagaagaaagtctctttacgtactagctagctgcatggtggatttgcgagctagcaatgcgatcgtcacctgtctccgatccgcctgtcctgtgttattggttagttacgcgcgcgctcatcaattaacggtcaccaaccgcgcgcttcttctctccctgtgggctgcctgcctgtctgcctctttacgcctgtgttatatagctggctctgcttcacgatcgagatctcgaccggccgccacgacactgcattcagcgtgcgaccgaagctagctagcagctcttcttgctttgcattaattattgcgagatgacgatgtccattgttgctgccgtgctgctgttgctgctcgtccatgtccatccacgggcggcagcggcgcaaccttcgccgggctacttcccgagctccacggtgaggcccatggccttctcggatggatacgacaacctgtgggggccgcagcaccagacgctgtcgcaggacaggatggcgctcacgctcttgatggaccgcacctcaggcagcgggttcaagtccaagcgctcgtaccggaacggctacttcggcgtctccatcaaggtgcagccgggctacaccgccggcgtcaacaccgccttctacctgtccaacaacgagctgtaccctgggaggcacgacgagatcgacatggagctgctgggcaccgtgccgggggagccctacacgctgcagaccaacgtgtacgtgcggggcacccggcgacggcgcgcgccctcgtgggcgggagatgcgcttccacctctggttcgacccggccgccgacttccaccactacgccatcctctggaaccccgaccagatcgtcttcctcgtcgacgacgtccccatcaggcgctacgccgccgccagtgcgccgttcttccccgaccgccagatgtgggcgtacggctccatctgggacgcctccgactgggccaccgacggaggccgctacagggccgactacagctaccagcccttcctggcaggattccgggggttcaggaccgccggatgcgaggccgccgcgcccgcccagtgccgtcccgtgccggcgtcccccgccggcgccggacttagcgtgcagcagcgggacgccatgcgctgggcgcagcagacctccatggtctactactactgccaggattacaccaaggatcgctccttgtacccagagtgctcgctcgctagctagcctagctagcactaccactaccagagcatgcatggaggaggcgtgcgagtgaagaagcgccgccctacgtacgtaccgttctaaaattgtatgtacaattaagtctccatccacatccatatatacaacatatgtaatgtataattaagtccattattaatttaatcactgaaaaaaaaaaaaaaaaaagcggcc

SEQ ID NO: 165719 - DNA, 476 bp, Zea mays
  Clone ID: MRT4577_82720C.1
caggccggccgggccggggatctctctctagattacccggcggcggaagcgtaagcgcaaaacgaagcaagcggccgccatggtgaagggacgcacgggacagcgcgtcaggctctacgtccggggcaccatccttggatacaagaggtccaagtcgaaccagtacgagaccacgtctctcgtgcagatcgagggggtgaacaccaaggaggatgtcgcgtggtacgctggcaagcgcatggcgtacatctacaaggccaagaccaagagcaatgagacccgctacaggtgcatctggggcaaggtcacccgtccgcacggaaactcgggcgtcgtccgtgccaagttcaagtttacctcccgcctgagtccatggggcgcaagattgttcaagtgctgaacctgtggaagttgtgccaaaatttgttgtcgaacggatgaactattgtcgtaatgttatgccagcagcagatctt

SEQ ID NO: 165720 - DNA, 891 bp, Zea mays
  Clone ID: MRT4577_82721C.1
cgaccgactctcggcaacggatatctcggctctcgcatcgatgaagaacgtagcaaaatgcgatacctggtgtgaattgcagaatcccgcgaaccatcgagtttttgaacgcaagttgcgcccgaagccttctggcggagggcacgtctgcctgggcgtcacgccctagcattacccggcggcggaagcgtaagcgcaaaacgaagcaagcggccgccatggtgaagggacgcacgggacagcgcgtcaggctctacgtccggggcaccatccttggatacaagaggtccaagtcgaaccagtacgagaccacgtctctcgtgcagatcgagggggtgaacaccaaggaggatgtcgcgtggtacgctggcaagcgcatggcgtacatctacaaggccaagaccaagagcaatgagacccgctacaggtgcatctggggcaaggtcacccgtccgcacggaaactcgggcgtcgtccgtgccaagttcaagtccaacctcccgcctgagtccatggggcgcaaggtcagagtgttcatgtacccgagcagcatctaaggttttgttggagtaaagatggactagaaatggccatgtgtttatttctcacttttctctgaacttaaaatgccttgtgttggtaacttagattgttcaagtgctgaacctgtggaagttgtgccaaaatttgttgtcgaacggatgaactattgtcgtaatgttatgccagcagcagatcttaatttgccccgttacatcgatgtctgattgcagtatcttcaaattgaaaggagttccgtttggtatgaatgtgtaatgttctacgctgctctgggatgcttctttcaatatcatttctgcaaaaaaaaaaaaaaaaaggcccctagggccc

SEQ ID NO: 165721 - DNA, 312 bp, Zea mays
  Clone ID: MRT4577_82722C.1
tcggccacgaagcgtggctctatgatcactccaaaaagtcacgcccccaaaggccctatagctcaacagacacaccaaaacactctaacccacaccggcatacaacaaggcccttaccatcctgaaagggacaagcatcctcgaatgagacaccgcctaaaaatccgggtctcactcttagatccactgcactttaacaagtgcaagggctcttgaatgaatcacgagttgataaaaccatattgtctgtgcggaacttattacgcccgcaggcactaacttgttgaacgccctggggtccaagatcgaacc

SEQ ID NO: 165722 - DNA, 333 bp, Zea mays
  unsure (1)..(333): unsure at all n locations
  Clone ID: MRT4577_82723C.1
ccgggnncgcccagcgtccggcaggccccaaccccataggccaaggaatgcggatgtntcgcgacaacaaaaagggggggtcctccggtaggagaaggcgagtcgtaccaggatgnagatgactctgagaacnttgatgaatttgatagtgatatcatgttctccatgaatgggccaccaatctctttggcaagcaattctcgtcctcaagccacatcggctcctggggcaagagagaaggtgatcgcggaactctttaaaggggtttntgcgcagctgcgagctagggggaaatgcagggtagacattatgcctgatcatgcaaaagtgcag

SEQ ID NO: 165723 - DNA, 322 bp, Zea mays
  Clone ID: MRT4577_82724C.1
gtcagccgttcatccaaccgaaccgatatttgccttacatccacaccatgatccctattgtcaacgttactacgcatctcaagccggtcacatccagcttcagcccagaagaccactgtcttccaacatataccgaatacatacacctccatatacagtggtgataactacaactttaccatatacagcacatacacagtgataccaatgacacatctacattacataaacaaccaaatcatccatcttcttacattatacaattcaacttacctcataatagccaccaaaattagttactaaaactactgcaacatgctta

SEQ ID NO: 165724 - DNA, 212 bp, Zea mays
  Clone ID: MRT4577_82725C.1
tgcagcagtatggcttgaatccttatgaagtttgatgtgtcctctgtgttgtacccaaaactcttctgcagcagtatggcttgaatccttatgaagtttgatgtttgaacttcataaggattcaagccatactgctgcagaagagttttgggtacaacacagaggacacaacactcttctgcagcagtatggcttgaatccttatgaagttt

SEQ ID NO: 165725 - DNA, 620 bp, Zea mays
  Clone ID: MRT4577_82726C.1
aaaaaaaaaaggacccccatttcttttttaaaaaaaaaacgggacacccccccccccaattttttgttcccaagcccaaacacttaaaaaaaaccccaaaaaaaactttaaaacaggggggtttcctaataggagaacaaaaccacaataaaccccccggggaaaaaacaaacaaaaccttcacaattttttaagggaagttggaaacattttttttactacaaaaaaattttttttcaaccgaaaacttgggaacttcctaaaaacggcccttttatttttttcctggaacaaccctttggaacaaaaagcttttatcctcatttaaaggccccggcccgggttttttttgggcccggggttttcctaaaggcaaaaaaggaggaaccaccgggaattacttgccaaagtaaacggccccctttttgttggaaagaaattttgcccccaaaggggagggcaatccccggggcctggccccttattcaaagggaccccctggcctggccgccatgttgttttcaaagggggaggtaaacaaaagggtcctcgcaaaaacattttttgaataagggttaccaaaaaggaaaccactttccccatccaggggaaaggggggg

SEQ ID NO: 165726 - DNA, 1767 bp, Zea mays
  Clone ID: MRT4577_82727C.1
aattcggcacgaggattccagccacccgactcctatcggttaccggcgacctcaccggcggctaaaaggatttgacttgcggctcgcccgctgcgcgtcttcggccgtgctccccaccccaatctccgggttgactactaccagagactaactcgaatcgtcgatgagcgctcaatcgatcccgtgacggaggggctcggttgctccgaagctccgttctacgtcatgctcgccgccgccgccatggcggtgaccgtccctcgggcggcttctcattgttttccagcaaatacggccaggaaatgtaggacttgctggagctgtcgcgcggcaagagtcgaggctgggcactcccgattggaggtgagaaaagtcacctatcgacctcctggaactgaacagaacttgttgaatgaaattaacctctctcttcaggaaaaaagttttggtttgatatttggacggagtgggagtggaaagacaacccttttgcagctaatggctggtctatcagaacctacctctgggtctatttgcattcagaagtatgatgatactgggaatcctattggcttgcctgaactgctaacttctcaacgagttggaattgtatttcagtttcctgagaggtatttcttagcggatactgtacttgaagaagttacttttggatggcctaggcaaaaggcagacctcctattaaaagaacagctcgctttaaatcttcaaaatgcttttaactcggttggtctgacaaccatctcattagatgaaaatccgcaagctctaagtggtggatttaagaggcgacttgctttggcaattcaactggttcaaattcctgatctgttgctgcttgatgagccacttgctggtctagattggaaggctcgagctgatgttgtgaatctcctaaaggacctgaagaaacatcatactatactggttgtaagtcacgatctaagggaactatatccactagtggatcgctcatggcgaatggaaatggggggaagtttgaaggaggaagctttgcctgtctaaacatgtgcttgtcagtatagctgtcagacagcatgtacatattggtcatccaaatctagtcacatcaactacttttacaaacttagattatgtcggctgggaaatttcttcaagatacaatggagtcagagatggttgtgaacagtcatttggtaatgtgtggtaacttccgagcacgaaaaaatgctagaaaaaatcagcagagatcgtgaatgttagcacggagctttgactactgctggaacggggaacagtctgacgcagacattgtcgagctaccatgaacgttgaacattccattgaagtttaggttcaggaatcaggatccagcgatagctccttgttgcaaacatgaggattgcacaaggcctgtacactttgaaaggtggggggtcaagtttcaaaatggtgcggatgatggtttggaaatggtttcctttgttgaagtttcccactggagagattcagagaacatcatttacttgcactgtcgatagtctgcatcgttcacaatttgttgtttcttacaaactcatttgtctggattctggaagaatatgttgcgcacatgagtagattctcgtttcctccaaagatctttgacctgctgttatcaccacttctggcgtgcgaggagcaatctcagtcatgcagttatgtatatgaatgtgcacctctgttcgaagcggtgagcaaattctctcccccttttgtgtccagtag

SEQ ID NO: 165727 - DNA, 575 bp, Zea mays
  Clone ID: MRT4577_82728C.1
gacgccgaacgagcacagcgcgccgatcccgttcaccttcagcttccccacgctgaacaccacgcactgcggcgcacgcgccgccttgtcgtccttctccttcatgacatcttccgcctcgtcctcctgctccacctgagcagcaaacttgccgccgtcgtcggcggtggccttggcgtcagcagggctctggaacggctccttcgcttcctcggcgccctcggatgaggctatcgtcggatcgccgccggcagcgctaggcgcgacggaggaggacttcttggcctcgtcgtccggcacgacgccgatgtccttgcactcgtcgtcgtgcgcgtcaacgacgtcgtcccctcctggcggaggcagcaggtcgtgctcctctgcttcttcttgatcgtcaaggttattcttgctgccgcggtggctcacggaggaggagcttgtgtggtctggcagcaggagtcacacacctcctcctcctcctagtcctagtcctgtcgcaagcaagcagctagccggccggtgcaacaacgaacgctgcgggatctcgtatctacagcaccggaggctgtggg

SEQ ID NO: 165728 - DNA, 1187 bp, Zea mays
  unsure (1)..(1187): unsure at all n locations
  Clone ID: MRT4577_82729C.1
gcggcagtgtatactagctacacccatctgttccccagggttccgtcagaatccatcgtanaatccaccgaaggatatgttggccctcgcggacgcgcctcctcccgcccccatcacggacgacatggcctggttcagcctcgacgtctgctgcaccacctgatggatcctccctccggccccctgagccgccagctggcccccctcctcccccggcgcctgccccccggcgggccgccggcccccctcgtggacaaccccgaagtcggcggccgcgacgccgaacgagcacagcgcgccgatcccgttcaccttcagcttccccacgctgaacaccacgcactgcggcgcacgcgccgccttgtcgtcgtcgtcgttttccttgccggcatcttcctgctcctcctccccctcctcctcctcctgctcctgagcagcaaacttgccgccgtcgtcggcggtggccttggcgtcatcagggctctggaacggctccttcgcgccctcggaggaggccatcgtcggatcgccgccggcagcgctaggcgcgacggaggaggacttcttggcctcgtcgtccggcacgacgccgatgtccttgcactcgtcgtcgtgcgcgtcaacgacgtcgtcccctcctggcgcaggcagcagcaggtcgagctcctctgcttcttcttgatcgtcaagggtattattgttgctgccgtggtggtggcgcacggaggatgagctcctgtggtctggcagcaggacctcccagtcccagtcccacgcatcctgctggcccgcgtccatggagtcacacacctcctcctcggctagctcctcctagtcctgtcgcaagctagcagcaagccggtgcaagtgcaacaaacgaacgctgcgggatctcgtatctacagcacaggacgcagccaggcagcgaggcttacaagcatcaacagctgagttccaacaagcatcagcctgattgtacgctgctgtccttggggttgggcttcctcttccttcactgcagggaaaccggaaaccaggcgcccgctcctcccggctcgagccgacctcgacaatgcgctatatacgagcgcagccacacgcgacacgagcaccaaacggcttggagttggagctcgcttctttgcagcgaaggaggagagacggcagagagagaaaaagaagagagc

SEQ ID NO: 165729 - DNA, 945 bp, Zea mays
  Clone ID: MRT4577_8272C.1
atggagaacttgagtcaaatgaccctgaccattgtgattggaaaaattgtggtcgatgatcttctctttaacactgaaggaaaatgcaaagaaagaaaggatgcttctcatgcggggagaagggccacttcagggacaactgtccaaacatgtccgaacccacaaaggggaggagcaaagccaaggcgcttacaagtgtcaaaacttgagataactcttcaaacgaagatgaacctccaaggacacgcaaccaccaatcctcatcacgcccatcacggtcattgcacaagtgccttatggcaagaggtaacaactaaaattgagcaactagagtctgatgttccatcctcagctaccgatgatggccttattaaaaataatgaaaaacttaaggctaagttagctagctctcaagaagcaattgaaaacttgctagagaaaatggaaattcttagcatacacaataatgaactaactactaagctagaaaagatcgatagcaccttagaagtatttttagttgaaatacctaaaattattgaaaaagatgcttctacttcttgctttgatttaattgatgattctaacccctgcaaccaagttcttgttgagaatgttgttatagaaacatgttcgaacgaggtttcaaaggaaaatgagcaattaaggcaagaagtggctcgccttggcaaggccttgtatggcaagaaaggcaaagccaaacaaatccaaactcctcagggtaacaccactgcaggagtgaacaagcctgtggagggaggaactgtgatttgtaggatatgccacaaggaagggcacaagttttatcaatgcaaggcgaagaccggggataagcaaaagcaaaagctcaagaaaaagtcaaacaacaaaatctccaacacctacatcaacaaggtggataaaaggctgctacaccatatttga

SEQ ID NO: 165730 - DNA, 333 bp, Zea mays
  Clone ID: MRT4577_82730C.1
cactttctgaaggtctatctaggtccttgtctgtcttttcaatatatgctgagcacgctgactggcttcagatatgggctgatgttgagctttgttcatcacaggataagctgaaatctgaaatggaagatgagacaagttggtcatgtagtggtcagcatgaccaacatggtcacatggaaaattcaacgaaatttattctatctaccagagaagactaccaagcttcttccgtgtgcgaattcggtatcaaaactggtttgtcaatggttgaaagaagccgggttctggcaaacaggggaatgcaaatcccgtattacagatccttttcgg

SEQ ID NO: 165731 - DNA, 1045 bp, Zea mays
  Clone ID: MRT4577_82731C.1
gccgcgacgccgaacgagcacagcgcgccgatcccgttcaccttcagcttccccacgctgaacaccacgcactgcggcgcacgcgccgccttgtcgtcgtcgtcgtcgttttccttgccgccatcttcctcctcctgctcctcctgagcagcaaccttgccgccgtcgtcggcggtggccttggcgtcatcagggctctggaacgcctccttcgcttcctcggcgccctcggaggaggccatcgtcggatcgccggcggcagcgctaggcgcgacggaggaggacttcttggcctcgtcgtccggcacgacgccgatgtccttgcactcgtcgtcctgcgcgtcaacgacgtcgtcccctcctggcggaggcagcaggtcgtgctcctctgcttcttcttgatcgtcaaggttattattcttgctgccgtggtggtggcgcacggaggaggagctcctgtggtctggcagcaggacctcccagtcccagtcccacgcatcctgctggctcgcgtccatggagtcacacacctcctagtcctagtcctgtcgcaagcaagcagctagctagccggtgcaagtgcaacaaacgaacgctgcgggatctcgtatctacagcacaggacgcagccaggcagcgaggcttacaagcatcagcagctggtttccaacaagcatcagccagcctgattgtaattgtatcgctgcggtcgtccttggggttgggcttcctcttccttcagtggaggggaaccagaaggcgccgtcccagtcctccgggccatcctcgagggcccgcgtccatggagtcacacacctcctcctcggctagctcctcctagtcctgtcgcaagctagcagcaagccggtgcaagtgcaacaaacgaacgctgcgggatctggtatctacagcacagaacgcagccaggcagcgaggcttacaagcatcaacagatgagttccccccaccatcagcctgattgtacgctgctgtaaaaaggaaagggcttcctcttccttcacgcagggaaacggaaacagcgggg

SEQ ID NO: 165732 - DNA, 368 bp, Zea mays
  Clone ID: MRT4577_82732C.1
gaaataatgatagatgtaatccatttatttagatcgaggatacatatataatatagacacacatacaaagagagtacgtacaataccggtagagaaatggtagctacaggtagaggtccagccgtccaggtacatgcatgcatacgcgaaatatacggcgtcatgcatgccacaatatgccttaaatcatctcggcaatgatgcatggctggatactagagacacacaataccgtagtacagtacgccagcagcctgcgtagtacaacactaacttgcgcgcggcggcggctccgtgccgagggtgtggacgtactggataggctcagggacccacttgcactcgttgatgaacgtgtcccacgtgta

SEQ ID NO: 165733 - DNA, 555 bp, Zea mays
  unsure (1)..(555): unsure at all n locations
  Clone ID: MRT4577_82733C.1
gacgccngacgagcacagcgcgccgatcccgttcaccttcagcttccccacgcctgacaccacgcactgcggcgcacgcgccgccttgtcgtccttctccttcatgacatcttccgcctcgtcctcctgctccacctgagcagcaaacttgccgccgtcgtcggcggtggccttggcgtcagcagggctctggaacggctccttcgcttcctcggcgccctcggatgaggctatcgtcggatcgccgccggcagcgctaggcgcgacggaggaggacttcttggcctcgtcgtccggcacgacgccgatgtccttgcactcgtcgtcgtgcgcgtcaacgacgtcgtcccctcctggcggaggcagcaggtcgtgctcctctgcttcttcttgatcgtcaaggttattcttgctgccgcggtggctcacggaggaggagcttgtgtggtctggcagcaggacctcccagtcccagtcccacgcatcctgctgcctcgcgtccatggagtcacacacctnctcctnctcctagtcctagtcctgtcgcaagcaagc

SEQ ID NO: 165734 - DNA, 237 bp, Zea mays
  Clone ID: MRT4577_82734C.1
gacctgccgatggaaaatcgagcagccccctttctttgacatatcaacgatgggggggggctggctatgtatcagcaaaaacaattctatatgcatggttggagtcggcaaaaattcatatatgctgagtaggagacagcaacttggtgggatcaagataacataacaacgaaaggaaataaaaaaatctaatattcaaataaatacataaactatagtcctgggcggccgttttag

SEQ ID NO: 165735 - DNA, 697 bp, Zea mays
  unsure (1)..(697): unsure at all n locations
  Clone ID: MRT4577_82735C.1
ggccgcttttttttttttttttttgtttcgaatgtattgattcgatggtacgctacataagcgtccgcgcataagcggtcctgtctacccaattcctcccactacatcgcatacagctaacaaatatacaagaagatgtaggcaaagaataacgccgaaagactcgctgaagcctcttggccagctatgacacgaacaaaggaaatcatcaagtcgtagaagacaatctaagaaggaaaactgccctgttggcaaagagaggagacgccgtgtctaccaagtgttcctgattttaggaacgagggaccgttcggtcaaggcaaggagatcccgagtcccttactgctcgactgggagccccaagcgctgagcttaccctcttccttgatgaagaggtcgcatcagtcaactgcaccataccgtataccacgcttgctcatgagtcgaggtgcgatgtcatggccgcgatcctctgcatagcaggctccatagcggcacacatcttctcgaggcgctcacccagggtttgctcggtagcctcgtcacgaacgatgaggtcgaagtggccggagaacttctcggggtgggaaagaagttcgnggngctcgacaggggcagcggcagatggggcagggccagaacgggaaagctccgattcggagncatcaacctcctcctcagcctcgacgggagcagc

SEQ ID NO: 165736 - DNA, 267 bp, Zea mays
  Clone ID: MRT4577_82736C.1
ccggccgggatagattgtccttaagtcaattgtcaacatgaagggcatgaatgtaattttacacaggctatgctctgtgcctatgaatagatgaacagtaccaccgtactgttcacgctgacttgtattcactcgtgcgtcacactttgacttttaccttctgtcaagccgaaggtacaaatataattcgatattgttcacgttcattcatgatgatataattaagatatattaataatatctaaaaaaaaaaaaaaaaaagcggcc

SEQ ID NO: 165737 - DNA, 265 bp, Zea mays
  Clone ID: MRT4577_82737C.1
gaacaagggggagcccccatttttatttttgttaaaacaaaaatacaaagtgtttcaaatagtttccacacccccaacccaaaataccaggaaaaacccctataaaaaagcgttgacaaatcaatccgtttggaaaacaaaaaaaaaaagggccccttaccaggaaaaatgccacccgtggaagtttaaaaattttaattttaaaaaattccaaaaccatatgaaaataataatagggaactaaaaaaaatcatgtttttttaaa

SEQ ID NO: 165738 - DNA, 1421 bp, Zea mays
  Clone ID: MRT4577_82738C.1
ctcagtgctaaccagaactttgaccactacgctcaaccctacaacacgagccgtatcctcaaccctgattataccgttaacctcacagcctataaggagtactcccctatcctgttgggccctgctttttccctgtcgtatggcatgggctttgccggcctgatctcaacacttacccatattgccttgttctatggcccagacgtctggcgtcggtctgttgactctcgatctgaagagcccgatattcatttgaagcttatgcgcaaatataaagaggctcccgaatggtggtttctcgccgtgtttctggtttcgttcggattcggtttggcggcatgtttgggctggcaaacgcatcttcccgcgtgggcgtacatcctgtgtattatcatcggtctcttcttctttattcctgttggcatggttcaagccatcaccaatcagcaaactggtctcaacatcatcaccgagatgattttcggttacatgcttcccggccgccccgtggctatgatgctgttcaagtcttggggttacatgatgactttcaatggcctacagtacgtatctgacatgaaagtcggacactacatgaagattcctcctcgtagcatgtttggcgctcaggcctttgccgtgatttggctctctattgtgcagattgcttcgtacaatttcttgcgaggcaacatcgagggtatctgtactccacatcaagcacagggtcttacatgccctaacgctcggactttctataacgccagtgtcatttggggtgtcattggccctaagttggtgtttggtgctggtcaattatactcctggaccaactacttctggctgattggcttcctgtgcccctttatccagtggctccttgcccgtcgttaccctcgctccccactccgatatgttgtcttccctgccttgtttggagctgcaggaatgattcccccggcgacaacctggtaccttgcccagtggtgtatcatcggccttgtcttcaattggtggatccgaaggcgttggctcggttggtggactcaatacaactatgtcttgtctggcgccctcgatatcggcactgccctctgcactgtcgttatcggtctgggtctgggtctgggcaatgcggaattcccagactggtggggtaactcagttgtagctaataacctagattataatggtgctgctgtcttgaaggttgcgccaacctcgggtcctggcattggaccttcgacttggtaaagaaggggatgaggtgggtgtgctatcgcatacagtaggatgtgagaggtcgaggggaatatgaaggaaaactatgtcatgatgtaatgaaatgtcttttggttgatgtattatttatcgcatatctttttgatgtgctgtctctaaatataccctatctcttcatg

SEQ ID NO: 165739 - DNA, 861 bp, Zea mays
  Clone ID: MRT4577_82739C.1
cccacccgtgcgcggacgcgtgggtccacatcaacatcgacacttctaatgacattaccgtgaaggatgtgaacatcacggggccggcggacgtcgagaacacggacggcgtccatgtcggcgggtcctccaatgtacgcatcaccaactcgaccattggcaccggcgacgactgcgtctccatcggccccgggagcgacggtgtcatggtgaacaacatcacctgtggccccgggcagggcatcagtgtgggctgcctaggccgctacaaggatgagaaggacgtgagcgacgtgacggtgcgggattgcgtgcttaggaacaccaccaacggcgtgcgcatcaagtcgtacgaggatgccgagtctgtgctcacggcgtcccatctcaccttcgagaacatcaggatggaggaggtggccaaccccatcatcatcgaccagtacttctgcccccagaaggtctgccccggcaagcgaagcaactcctcgcatgtctccatcaaggacgtcaccttccgcaacatctccggcacgtcgtccacgcccgaagccgtcagcctgctctgctccgagacgcagccgtgcagcggcgtctcgctcatcgatgtcaacgtcgagtacgccggcaagaacaacaagaccatggctgtgtgcagcaacgccaagggaaccgccaagggaagcctccaggccctggattgcctcgtctgatcgatgaccttgcatttgcatgcattcttcttccgtttcacttttccatattctattgcgttccagctaagcatcttgtttcttgcagaatatatatatatatctctactacttattaaggaaaaaaaaaaaaaaaaaaagcggcccc

SEQ ID NO: 165740 - DNA, 860 bp, Zea mays
  Clone ID: MRT4577_8273C.1
tctcctgcttctcgagccgcacacctcatctcatctcatctcatcatcgtcttccccccattgccattccctccttgcgagtagcaccggcagcagcaatggccagcctcgccgacctcgtcaacctcgacctcagcgactgcaccgacaagatcatcgtcgagtacctctggattggaggatccggtatcgacatcaggagcaaagcaaggacggtgaacggccccatcacggacgcgagccagctgcccaagtggaactacgacggctccagcaccggccaggctcccggagaggacagcgaagtcatcctctacccccaggccattttcaaggacccgttcaggaggggcgacaacctccttgttatgtgtgactgctacacaccacaaggtgtgccaatccccaccaacaagaggcacaatgccgccaagatcttcaacacccccaaggttgcagctgaggagacatggtatggaattgagcaggagtacactctcctccagaaggacgtgaactggcctcttggctggcccattggtggctaccctggtcctcagggaccatactactgcgccgccggcgccgacaaggcgttcgggcgtgacatcgtggacgcccactacaaggcgtgcctctacgccgggatcaacatcagcggcatcaacggggaggtcatgcccggccagtgggagttccaagtcgggccgtccgtcgggatcgccgcctcagaccagctgtgggtggcgcgctacatcctcgagaggatcacggaagtttgccgggggtggtgctgtccctggacccgaagccgatccccggcgactgggacggcgccggcgcgcacacaactacagcac

SEQ ID NO: 165741 - DNA, 786 bp, Zea mays
  unsure (1)..(786): unsure at all n locations
  Clone ID: MRT4577_82740C.1
ctctctccctctcgctccgagcgagaggtctgtgtcactgtcgccgccgctcgctctgtgtcactagcccttcttccctccggagctctctcctcttgctccgacccaacaacaggtgagaacagtttgcgctagtagggtttcgccgttccgtttctaagggaaacaagttggagctcaagacgccgcaaagcccaagatgttcggtttctctcgtcgccggatgaagctgggaaggttgaagggtcatctgcatgatcctttccatggccctcggagtcctgcccatcccaccaagcggtccagtcacctcactggagaagaaccagtggttacgtcagtgagtggccgtcctgacgaccttgcttggtgttgctcctctgatacttttgacctcaatggccgtgcatttgaaagctcagagaactgggcagtattgtcaacggacggggataaaccgagtcctcgttttgatcatgcagcagccatggtagggagcaaaatgattgtcttcggtggagattccggtaatcatttgctggatgatacaaagatattaagcttagacaagcttacatgggattctgtggcttctaaggttcgtgtatcaccaggtggacatcgtgtgcagtttcgaccatgcaaaggacattgcctggttccaggnggcaagactgtcattcttgtcggagggaaaagcgagccatcttctgaccggatatcagtatggacattcaatacgggaaaccgagatctggtcgcatatggaaagcgagggcgacattc

SEQ ID NO: 165742 - DNA, 734 bp, Zea mays
  Clone ID: MRT4577_82741C.1
ccggccgggccgggtgttttcgtcatctggtcgctgggattttcggtctccgatcggttggttcccagtagactcgttcccttgaagcaacatcacctgttgtatcctgagttcgttctcaacttgtgccctcggatttttccggcgccgtagggcacgcggcgactcttacatacattataaacgcagactccatcatcttccttggtaccgcacgcgcggtgctcagagccccagcgccgaccacccttctgcctccttgctctgcgcgacacctgctcctccccttggtgcccagcgaccttccatggccagctgccagaccgtgctccactccatcgctggccggtcgcgtgcccctgtcctcttcctctctgctcgctacgcgcactggatggaggagcagagcaggcaggcgacggagctgcgggcggcgctgcaggcgcacgcgccggacgtccagctgcgggtcctcgtcgacgccgcgctggcgcactacggcgcactgttccaggccaaggcgagggcagcccggttcgacgcttcttcgtgctgtccggcgtgtgcctgaaccgggccggctccgtgcctgcttttcctggcgggccgggccgtgccgcccggcgggcgtatccggcagcccaagcacggcctggtctaccgggcccgggctggcacgggcacgaaaccagacggggcgtgccgtggttgggcccggtcaaaaaaccgggcct

SEQ ID NO: 165743 - DNA, 165 bp, Zea mays
  Clone ID: MRT4577_82742C.1
cataaaacacttgcatagcacaaataataggagcgtctcttgcacccggctcttggaaggatcgattatgccgttcgctgaatgattgatactggctgaccggctacaccaatcaagatgcttttgcttgttgcctacgcagcgccctaccctgcttcctaagga

SEQ ID NO: 165744 - DNA, 262 bp, Zea mays
  Clone ID: MRT4577_82743C.1
aaaacccataaaacataaaaaacttccaacaaactaatctaaatcccctacgggatggtatatatattattcgagatgactaactcacttttaatatatcattgctcttatctttttcatacaatacattctgctctttttttttgacaatccaccttttccaccctttttctctcaatttaaacttttcttttattttccaccaaaataaaattctattcccctgtattaaaaaaccaattatttaaaaaacctctccttt

SEQ ID NO: 165745 - DNA, 1692 bp, Zea mays
  unsure (1)..(1692): unsure at all n locations
  Clone ID: MRT4577_82744C.1
gccgtcccattgggtacctcgaggccggccgggggagaagtcgggagcacgacccactggagccagcaaacaacaacgagtccctttcgcctcttgcccgttgcccctcggtttcgtcgccgctacccggcgatctccgcgacagcgacccggtgccgccgccgcagatctcgccgagaagacaggtatcggtgccgccgccagatcaactggacctgtaaaacgagggcctgcgctacctgtggagttcccgaggcgctgttctgccaggattcggcatctttggttgcccacatggccacttccacatctcagcatgcgctttcatccatcaaattgctgtccacaggctgcttgcatcccgataagagaaattgccgcgtgctttctgtttcagtagggcgtcgctgccccagtgcccgcaatttgggtctactttgtgcttcaaactctcaatcttcagtgattgagccggtccagctaccgaggagccctaaaagtggcgtagctccaaagaaatcaggtgaaagtgcactcattctgatacggcatggagaatcgttgtggaacgagaagaacctgttcactggatgtgtcgatgttcccctgacccctaagggcgttgacgaggcaattgaggcggggaaaaggatatgcaatatcccagtcgatgtaatatacacttcgtcgctgattcgggctcagatgaccgctatgcttgccatgatgcagcatcgccgaaagaaggttccaatcattttgcacaacgagagtgaacaagctcacatgtggagtcagatatacagtgaagagacaaagaagcagtccattcctgtcataacagcttggcaattgaatgaacggatgtatggtgagcttcaaggccttaacaaacaagaaaccgccgatcgatttggtaaagaacaagttcatgaatggcgtcgcagttatgatattcctcccccaaatggcgagagccttgagatgtgtgcagagagagcagttgcttatttcaaagaccaaattatacctaaacttgtggatggaaagcatgtaatgatcgcggcccatgggaattcacttcgttcgatcataatgcatttggacaagctgacttctcaagaggttatcagccttgagttgtctactggcattcctatgctgtatatatttaaggaaggtaaattcatcaggcgaggaagccccgctggaccttctgaagcaggtgtctatgcttataccaagaatttggctcagtacagacagaagcttgatggcatagttcagtagccatctgcaggcttttcgtttgctactcatccgtcgaacatgcatttggtcccagaaaacaaggggccaagctcctaccgtttcatcgacattcaactgccaagcagtccattcctgtcacaagtttgtagcggctcatttatctcttcagtaacctcccaccacgtggtagtaaaatatacggagtagatgctaattttaggtggtgagctgtagatacaaatggggatatactggatggcagttgtgttatctttccgctttccccattcacttagatctgagatgtttgtaatggtgcagtaataaacacttgtagtgaactgcatggaacgagacgatgttatcgaatgcttgttccccgtctacaaaaaaaaaaaaaaaaaactcgannnncttcta

SEQ ID NO: 165746 - DNA, 472 bp, Zea mays
  Clone ID: MRT4577_82745C.1
gagctgaaacaagcggaattattataaacccgacgtacattatgtttacaaaacatacattatgttgaaataataccattgtagacattaataaccaaaacaacagacagcgctaacataacttaaaaagaggcctaactgtcctaagtgacgtcttagaagatacaatctctatgatccagcacatctcccttacaaacgtaaaggtacttctgctcccaagtgctcataggagagctaaactttatgccaaaaaaggctgactcatacacatccagcttggtatcagcaccggatggcatggacgccaaacgatgactgaccttatacagagataccctatatgaaagcagtgcgcaagcctatcggacaaggagacgtacacataaaacgggaaatcatctttgacagcctgagcaacagtcgacgatgagcccgacctggttgaacgaccacactgagtcaaaacaga

SEQ ID NO: 165747 - DNA, 209 bp, Zea mays
  Clone ID: MRT4577_82746C.1
agaggaaaagaagaccaatttttgggggggggggggaactcccatttcaacaggtgtgtaccaaggataaaatagaagtgtttaaatttattgggggcccaaaaaccttaaaaaatggggaaactttaacatattttagaattttttaccgggaaataaaattaaacgggttttgtgggaaagggagattaatatcacagctggaataa

SEQ ID NO: 165748 - DNA, 703 bp, Zea mays
  Clone ID: MRT4577_82747C.1
ccggccgggacatagatactaatcaagtgtgagttatcacataccgacactcgtttaccacttttctttcagttggatttacttccaaagctcatcatgacctctctcgtgccttctaggccctttgttctgctgttattcctcgtttgtgtggcggcacttctctctaggcaaccatatttcgaccgctcgcacgcccatcgcattacttatgcagatattagagcgactcaaatactcccaaggctcaacttctcaagatcacaccacgaattctacgcctcagaagctgctcgatctttatgcgacgcacacggttactccgtcttcaagcccaggtcggatgctctcgacggtcgtcgcaagatatacgacctcttcatggtcaacaccgagctggactttctcgaaatccgactaaagactttgtataattatatcgattattttgtcatcgtcgaggcacccctcacattccagggaggccccaagaatcttactattcacgataactggaagcgcttcgaagcatatcatgacaagatgatataccaccaactccaatacccaaaagggttcaagcctttgcgtcactgggatcgagaggacttgcaacgaacgccatgttcgagcaagtcttcccaaaacttaccggcgaacaaacccctgcccggggggacgtcatttctggtcgccgatgtcg

SEQ ID NO: 165749 - DNA, 257 bp, Zea mays
  unsure (1)..(257): unsure at all n locations
  Clone ID: MRT4577_82748C.1
ggtatagcatggggtttccatacaaaattagatgccaatcagaagangctggacaagggagaggactaacgaggaggccgggcctcacaaaggagacaacacccgagaagcaaaaaaaaggaaaagaccgcccgcccaaacggcacaaacaaagacacggacggcggcagcaacaagccgacgcacaagacgccctcaacgccaacgacgcgggcgacgccgaacaacgcgacgaccgcaaacaccaccgcggacgc

SEQ ID NO: 165750 - DNA, 487 bp, Zea mays
  Clone ID: MRT4577_82749C.1
ctgtaacaatcacatctccatgaggtgggagcctacaagctgtggacaccatcagtctcatcatccacctcaacaagctccccaccgaccacctaacttgtttcccggagacactgttgctcggcccccacgagccacatcatatctcctggttaacatcggcctcaacataacagagtagcagaacagacatttcataattaacaaacaacaaccaaaccactgacggtgaccggaccacgaaggcaaatacaagccacaacaacggggaggacactgtacataccggaagcgcagttcatccacaagaggataggacttcatacaaaaaatctttgaaaacacagaagacgtcttctgattcgtctagtccacaagcatcgtgaaccaaataaacatgacaaacataatactacaatatgcctatcaaagtaaaaacaaacatattaaaaactaagacgcactccatgaacagcatccacaacat

SEQ ID NO: 165751 - DNA, 498 bp, Zea mays
  Clone ID: MRT4577_8274C.1
ctggtacgcctgcagggatccgggcccgagaatcccggggtgagcccacgcgcgcgttcgtacttcgataaaaaaggagacgataccggggattgttaccgaacgcaacctcaaatctacccatgccggctcgagccagccccgcggaggaaaagcatctgcaaagaaaggccaccacgccccctgggagcagcaccgccacgagaagggggaccgggaaaggcccgggacgagggcagaggagagagctgcgccctttatttcgcaacaggcacgaggagtctgggctggcgccatgtgacgctacgccaagaaggcgccgggccgctccgacccggggtcgatcaggtcgagggcggctggggatccatccaaatgggaatgaagaaatcctgaggacactggggatggtgggccatctggtagggatcacagaaggagagatgtgaggtgaaaggggcgttatccaactcattccgcttcgggggcacaactcat

SEQ ID NO: 165752 - DNA, 707 bp, Zea mays
  Clone ID: MRT4577_82750C.1
ctcgaggccggccgggagactgtccgaaaaatgatcaccgaggctccgtatatggaccgcaccatcgtcagacgttctgcggacgatcgagcccatgaccaaccaacagtagatgctttctgctcgcccagcatctcctctctgcccagatcctggtgttcctccccgagaaggacatgcgccactacgacgagctgctcgaagtcgcctagctggaaagcgcgacttctccctcctacaagtacgatgccgacaaggagccgatcgtcgctggctccgacctcatcgcgttccacgacctcatgctgaaccctaactataagtgcgaccacttggatcgctcggactgcatcttcaacctgggttactccgagccctcctacatgccactgccacaacgtgatcaacgacctctccgtcttgctcggtgcggaagatggcttctccatcaccgatcttgggacagatgccactgtcccgacggagagcggcccgccgagattcgagacacacgtcatatcgtccggaatccacctacaactactgctgcacactgtatgcggtctacatgttccacaagaccctggaggattccatggatgaagaccatctccaactgttgctccacgcgatgtacatggatgacattgacatactcatggctgctgaaaaaactcggctgtatcacaccgctcaccataccccga

SEQ ID NO: 165753 - DNA, 667 bp, Zea mays
  unsure (1)..(667): unsure at all n locations
  Clone ID: MRT4577_82751C.1
cggccgggnaaaaaaaaaaaaaaaaaaaaaaaaaaaaaaaaaaaaaaaaaaaaaaaaaaaaaaaaaaaaaaaaaaaaaaaactcccccggccgtcctgttcgccggtttttggttggcccttgcatccgcccagggggtgtgacctaagggaatcgattcgttcatccaagggaaggcaaccagactccaggatggagttaaaagccggggttttaaccggggaaatgttagccatcgtggggctttccacaccagaagccccgaaaaagccaaaaagccctcccgctccgggatcccaagtcgtcctggcgccggcgccagcgcccgaaccgggggggccgaaccacgtggacctcggggacctcctaaggggggccgggccgttccacacgttcttggactacctgaaaaaaaccggggtaatcgaaaccttccaaagccaggcaaacgacacgaagcggggcggaataaccgttttcgtgcccaaggatctcggggttcgcggcgctgaagcaaaccacgttcgccaacctaacccagaaccagttaaggtcgttgttgttgtgccacgcgctgccaaagtactactcgttggccgagttcaaccggttgagcgcgcttcggcccggtggccaccctcgccggtttcgaagtacacgctgaacc

SEQ ID NO: 165754 - DNA, 391 bp, Zea mays
  Clone ID: MRT4577_82752C.1
gagggagtggagggcccttcctttccacgggtgggccaagggaaaaaaaaaaaacggccgttcccctcctgggcgtgggggaggggggggccctccttcctgaagagagaaccggtcggtgaacgaattaatgggccaaaagggggaagaagggctgcatcggtgcttgctagtgccgcgggccaaggccgggccgcattttctttctttggccaaaacattgggggggcgagggtgaacagatccaaaaccgagatgccgcccggcaacagagacaccaggagattatacgagcgcggcggataggatcgtgagaaaaaaaaaaggcacaggaacctatccgggaccagagaaggagaaaaacaccgcggtgggggcgaccatgatctgg

SEQ ID NO: 165755 - DNA, 772 bp, Zea mays
  Clone ID: MRT4577_82753C.1
ccggccgggtgtaacctcattgtttctttttttgttggaagttctgaaagtgtgggtgattgctggtttaaaattgttggaaaacccatagaagaataagaagtgctctgcatctcccctggtcttaaattccatcccaacttgagcatcaaagttttcgcgagcacttgatgtttcaactgcccttccatctacatttggtgcacaatcagatcatttggagttttcgagatggatgatttcgtacctcagcgtatgcacttgaacatccatccacttcaaaattcttggtggctggggttttcgtgcattttttattacctggtttgacacatatgggaacgacatttgtgtgcacatctgactgcttggtgattgtgttgttccactctgagtcaaagaggttccagccatctatatttttgtttatgcattcataaaaatcacaaaagtcagttttcaaacatgtgaatagattatctttctcaactgtgatttctagaattgagatatagctacctgactacttccaattatttgcaatatatactgttgaaaattgttgatttcatcttgcgagaatatgttattttctctgacagtcttggtagtgtcataagggagcaagctgaagagatgatgaagtactagatttgtgtctgagtagcaaaattccagaagtgtttggcatcatgtaggcaactactgttatgtgagtacataaaatttgtgtgtggtttttttgtgcaaaaaaaaaaaaaaaaaagcggcc

SEQ ID NO: 165756 - DNA, 727 bp, Zea mays
  Clone ID: MRT4577_82754C.1
gaactcccagatccacgcggtcttattacctgacctgcctgtctcgccgatcgcgagtacacgacgccgcgcccgcggaatccatcttctccatctccaactgtgctactgtaggagctgctgcaatcggggagagaaacgcgaccagtttgccggcaccaacacggcctgctgccacatctccggcatcttcttccggctgcagcaagcaactggacgatgatggcttccaggcagtcagagaacaatgcacaagaagaaacatcaccattgacgactcctaacgccaacatagccaggatcatcccttcgctgcccctcgagaccaggtggccaccgttccctctccgacggtacgccaatttttggctgcctgaggtaacattgaaggaaggcgtccccggcgttcattcctgcttcgagccgagacccaccgacgtgttcctcgcaagcttccccaagtctggcaccacctggctcaaggccctcgccttcgcgacgctgaagcgttccacgcatccgccgttcgacgacgaccatccgctgcgccattgcaaccctcatgactgtgtcaggttcctcgaacttggtttcaaccagcagaaggatgagctcgaggcgctcccgtccccgcgtgtgctggccacgcacctcccctactccctgctgcccggcagattcaccggggacggagaacactccgggtgccgcatcgtgtacgtctgcc

SEQ ID NO: 165757 - DNA, 1487 bp, Zea mays
  Clone ID: MRT4577_82755C.1
cctcgaggccggccggggtgacagtcaactcggctgattccctctgatgcccaaatctctctgggattgggatctccagttgcccgatccccttccatgacacgcgaaatgcacgccatcctcgctgggattccgcagtccctccggcccgcggtgctgatcgcctcgacgtgcgcgctgctcctcctcgccaccgcgctactccttccgcgcgctcctccggcggcgccggcggcggcgctgaccactgtcaccgacgcggacgccgtccgcttggacgctagcgtcacccgaaggaacggcaacgaggtgctgtggcagctaccgcccccgtcgtccccactgcgagccgcgttgttcgcggcgcccgggtgcaccatccgcgccaccgacttcttcgacgcctccccgggctgcccgcgctgcacggggcttcccgaggagcgccgtttcacccgcgccgcgctcagccgcgggtacgccgtcctcgccgtctccagccgcgccaagtgctggtccctcgacgacgccggcggcggggaggacggcagcgagctcgcccccgtcagctcctcagccatctcagtccgcaaatatggccctacctcatgctcctccacagtattccaatgttccatcacatatacctatagttcatagtcagccacagcaacctttgcaaagtcctgcaatatataatcaacagttgcaaccacctttgccccaattgtcaaggccgccttttcctcatcagatgcattcacaagtaccaaattcatttgggttgactcatgcaaatgctccgcagcacatgttacaacaaccaatgtttcatccggttgcgaatcctcaaactaatttcctccctggccaaccaccattgcctagccagccaccaccacagcagctgtaccaggctagttcacactacaatacacaaaatacgactccaatgcaagttgataggggcgctccctgggggcgggcccctgatgctcccactcctggctctcatttccctggacaattacccgggttgcccggacaaatgacccaaggaattggtggtatccaggcaggccaagcaccactgacacctgagatggaaaagatgctagtccaacaagtcctgggcatgtccgctgagcagattaacatgttgcctccagaacaacggcaacaggttcttcaactacgagacatgctacggcaatgatagatcgtcagttgactgggtggagaagtttcagttcactgcagcagggatcccgagtgtgggtgcctgttcgttttagccttttgtatcacctgattgacatcccgactagtctgcagcctaccttggatatgcgattgtagaatggtagtcgttgtcgtcatttatagaaatgcttgggcaatatgttttccgaaggactcacaaatgaactgcatgttttggtccagttcagccgcttcaatttcaagtcgtgttaaacatttaccat

SEQ ID NO: 165758 - DNA, 759 bp, Zea mays
  unsure (1)..(759): unsure at all n locations
  Clone ID: MRT4577_82756C.1
gatctacccgacaacctcaccagatccacgcggtcttattacctgacctgcctgtctcgccgatcgcgagtacacgacgccgcgcccgcggaatccatcttctccatctccaactgcgctactgtaggagctgttgcaatcggggagagaaacgcgaccagtttgccggcaccaacacggcctgctgccacatctccggcatcttcttccgtcagggttggggactgaaaactgtcgctgttagttggggttggggactctttcaggctgcagcaagcaactggacgatggtggcttccaggcagtcagagaacaatgcacaagaagaaacatcaccattgacgactcctaacgccaacatagccaggatcatcccttcgctgcccctcgagaccaggtggccaccgttccctctccgacggtacgccaatttttggctgcctgaggtaacattgaaggaaggcgtccccggcgttcattcctgcttcgagccgagacccgccgacgtgttcctcgcaagcttccccaagtctggcaccacctggctcaaggccctcgccttcgcgacgctgaagcgttccacgcatccgccgttcgacgacgaccatccgctgcgccattgcaaccctcatgactgtgtcaggttcctcgaacttggtttcaaccagcagaaggatgagctcgaggcgctccccgtccccgcgtgtggtggncacgcacctcccctactccctggtgcccggcagcatcaccggggga

SEQ ID NO: 165759 - DNA, 517 bp, Zea mays
  Clone ID: MRT4577_82757C.1
tggacgcgtggcggacgcgtgggggaaatttgaatgatgaagtaccggatagtgaagattgtcaccacgtcaatagaaatttagttgatgagtttcgtaaaccaaggcaagacaatgtgcaaggagacgggacaagcgatgatgaagatgaaactatatggcaatatgttagtgatgatgaaagtccaactatccttgtcgagcctgatgatgatgatctttttgcttggtaaagactagaaagttgatggtggaagcgttggtgacctatatggatcttggccatgaaaatggtgacccacatggatattgagtcactatgataggatggtggcaattagtttgtgctaggatattaaattttattctagattttgggatgtcctaggtcttttagctcggacaaagtctatgcttgtgtaaaatatttttatctttctctatattcctatagacgaagaaattataatatgtcagaactataatatgaatgagcaccaattcattgattttattc

SEQ ID NO: 165760 - DNA, 740 bp, Zea mays
  Clone ID: MRT4577_82758C.1
ttttcgaatgggtgtctcgccgatcgcgatacacgacgccgcgcccgcggaatccatcttctccatctccaactgtgctactgtaggagctgctgcaatcggggagagaaacgcgaccagtttgccggcaccaacacggcctgctgccacatctccggcatcttcttccgttgttctttcaggtgcgccaaataacccctcctcttttctgactgctagtcagggttggggactgaaaactgtcgctgttagttggggttggggactctttcaggctgcagcaagcaactggacgatgatggcttccaggcagtcagagaacaatgcacaagaagaaacatcaccattgacgactcctaacgccaacatagccaggatcatcccttcgctgcccctcgagaccaggtggccaccgttccctctccgacggtacgccaatttttggctgcctgaggtaacattgaaggaaggcgtccccggcgttcattcctgcttcgagccgagacccaccgacgtgttcctcgcaagcttccccaagtctggcaccacctggctcaaggccctcgccttcgcgacgctgaagcgttccacgcatccgccgttcgacgacgaccatccgctgcgccattgcaaccctcatgactgtgtcaggttcctcgaacttgatttcaaccagcagaaagatgagctcgaggcgctcccgtccccccaagtgctggccacgacctccctactccctg

SEQ ID NO: 165761 - DNA, 857 bp, Zea mays
  Clone ID: MRT4577_82759C.1
ccccccttggctcgcatcgggcacctccactcccactccaccggccccacctccgcgaggggcgacccgagaacaccaccacgcccgccatgtggcgccgcctccaaaccctagccccctcgctccgccgcgccgccgcatcgtcgtccccggcctccgcccgcgccgtgcccttgtccacggtgccggtggccgcgttccggcgcacttcgaccctcctctcctctcccggcgacaagccggcgcccagcaaggtcgaggatgtcatgccgatcgccacggggctggagcgcgaggagctcgaggcggagctccaggggaagaagcggtttgacatggatcctgccgtcggccccttcggtactaagccgtgattgaatcctactataacaagagaatagttggctgccctggtgccgaaggagaggatgaacacgatgtcgtctggttttggttggaaaaggataaaccgcatgagtgcctagtctgctcacggtactttgtgctcaaggtcattggtgatgggggtgatccagatggccacgatgacgaggatgatcatcactgaggccttgtgtcgataatgataataagaactttgtgaaacatggttttgtcctatctttgcagcatcagactgccctatagagtattgtaattgataagtgtttgaccatgaaccaggtcgggtggtgttttacacctacgaattttgttcagatcttttcgaccatacggttgcttctgtttggaatatagatttttttttctggagtgcaacatcaaataaaggatgagtgcatcggtttcactcaaaaaaaaaaaaaaaaaaaaagggcggccgccaccgcggtgga

SEQ ID NO: 165762 - DNA, 294 bp, Zea mays
  Clone ID: MRT4577_8275C.1
agtacgatatcagcgcattatcgggatggttcacaaaatggtagacaccgttgtatttctcgccgtgggctcactggcggttctgggcggctacgatgttatagatatcctggacgacatccgcatctgatccagatatcagaatctcctgcaagacaggatcgtagcgggagaggcaactgatctacggtcggctacgcaactgctcgtacgcgatcaagttgacaaaccgctggtttcacctgtaggcgataaagtcctgcctgccctggagaaacatgtcattctcattta

SEQ ID NO: 165763 - DNA, 197 bp, Zea mays
  Clone ID: MRT4577_82760C.1
agttgagataatgaggcattttttcgtgttccatgcaactgaggcggaggactgaccattatgtagcatacaaggccagaacttccaacccagaggcagactcgtgggtgcgctaaaatcgcagtcgggtttccctttgtggagtgggtttgtggcctccacatgagatgcggggatcttagagagagcacgcgaaa

SEQ ID NO: 165764 - DNA, 217 bp, Zea mays
  Clone ID: MRT4577_82762C.1
ccggccctagacatgtaaaaaaaaaaaaaaaaagtgccccctttgagtaaccattacagtccctgggtactgtcttggtttagttagggggcgcatagcaatggccatctgatgaccactcaggccttttgagggggcgcctcatctgtcataccaagaattgcccccaagcggccctagacattagaagaaaaaaaaaaaaaaaaaatttgcggcc

SEQ ID NO: 165765 - DNA, 400 bp, Zea mays
  unsure (1)..(400): unsure at all n locations
  Clone ID: MRT4577_82763C.1
gagactcatcatctaaaagctcagtaggaaagctgacatattcaggcgtaacatagtggaacacgtgcaataatgcactccgatgattctcaatgtgtttagctcctgcatccataaagcaaaagcaaaaaaaaaatgcttgaatacgactgacatctgccggttgagtagcctgagttggaagtcatcttcagcttctttgggttgggtgtaaagactagcatgcatgacatcaatgctaataatgtatgcgctatgacttatttagtgacgataattgtttcgaatgtgtatgctactaggaaagaaggtaatgtaggcatactaattntggaaaatctgagataccgtaacaattgcttagcacctaaactaaaaagcgataccagatgtatatatg

SEQ ID NO: 165766 - DNA, 262 bp, Zea mays
  Clone ID: MRT4577_82764C.1
gaaagccaagatgaccatgccaatgcctgtaatatacaatttataagtcttctaatgataactggttggagccacacagcctatggcgataaagaaactaacctattgcagattttagtattctgtaaaataatttatttcatggggatttgacatcttgatctccttgtgagctgtttcgttgttaaactattaattcctaaagagtgaaacaacactatagacctgactcagatcaaaagatggagtacctatatctaca

SEQ ID NO: 165767 - DNA, 604 bp, Zea mays
  unsure (1)..(604): unsure at all n locations
  Clone ID: MRT4577_82765C.1
ngaccaattccactcctatgatgaaatctgttagtgcgtagttcagcgcttagtctatcttccatctctccctttcatgtttgcagtattagcctataaaaggaaagcttatttatttgtttcattgtttgtttgtatcgagctgtcatcatttttggtagacaattaattgttatgcagaactagctgctagattgatgtacaacgatgtgtctgtggagaaaggccagtgggtggggtgggattaacgatcttggagtgaaaactttttttttttgaaaaaatggcaggagctctgcctttcagttaagatagggaagatgttatgtacatgcttagaattaaaaagaagcacgctcccaacaggtaaccgggcagcactaaagtgcaaaagaaatcaaggaaaaactctacggttctactcatcccaagttaaggctctttgccgttgttcgatgtcttctttcactctagaggcaacttgcactgtcgttttgaaaacgccgttgaagattcttctgttccgttctttccagatgttccaaatagtgtaaatcactaccccattgaatctacctttacatcgttttcatatagtgtgggc

SEQ ID NO: 165768 - DNA, 192 bp, Zea mays
  Clone ID: MRT4577_82766C.1
ggaatttgagattcagatgtgtaccttggattgctgtcattttgtcctgcagattggctgaatcagacactcaagttcgcggggaatctgagaacttgatctttgccatcttgctcctgatgtcccgccttagttgactgtactgtcgactgagcgcctttcatagttatatctttggtacactaaatagac

SEQ ID NO: 165769 - DNA, 363 bp, Zea mays
  Clone ID: MRT4577_82767C.1
ggccaaaaaaaaaaacttggttacccccaaaagttttttttttaaaaaaccaaacaggcgaggggggggggccccttttcaaacgaccctggcttttttttattttttttttttttttggctcacacggaaaaaacaaaaacatgggcgacggggtacaaaaatgctaccaagcaaaagcaaaggtaccgccacacccggggagattttatttaggagtacaaaaaagtagacaaggggccatctatcaacacgcgtgggatgaaagaatttattaagaacaccatggtggagccggcccgcggcaacaggcgaaaggttggacaaacaaccaaggggcctacgacggccgggggtaaggatt

SEQ ID NO: 165770 - DNA, 277 bp, Zea mays
  Clone ID: MRT4577_82768C.1
atcaaactacatgctaaccgacccatcttttcctcacaaaatcctacccgccacggggggagttctttatgtagatatagaaccaacctcactacactcacagaccacatgaacaccctatcctactataaaatacacgcttcatacagtgtatagggcacaccactcaccattggctgacctcaccattggacagaaaaaatagccaatcctttttttcatccaaaatgaaactgatctgatctcgatgccaaaaaataacatttacttagctctt

SEQ ID NO: 165771 - DNA, 559 bp, Zea mays
  Clone ID: MRT4577_82769C.1
gggaaaaaaaagggccctaaaaaggcttcccaaccaattttttggggaaaaaaaaattggccgccgctttacataaacccccgggtttttttttttgggggggggggaaaaaaaggacccccgttggtttggaacgggcctggtttcccccctcccccccccgttttttggggggggttggaaaacccagggccctgaacccggggggggggggggggaaccctttcccccttggggggggccaaaaaaacttttagcccaagctccggggggaacccctttcccttgggccggggggaagccccccctccctttgggggaaccggcaccgtttgggggccaaaaactgccaattgacctaatttggtccctcccggcccccccccgggggattttttcccccaggggggaaaccccgcttggttttccggaatcacccccaaaatttggggggttgggttccccaacctttgaacccttgggtggaaaaattgggggataccccggcccaaccgaaggggggctttaaactggggaaactgtcccagggattaaaaac

SEQ ID NO: 165772 - DNA, 198 bp, Zea mays
  Clone ID: MRT4577_8276C.1
ggggttatatatacattaaaagggaaaagcaaaccaagagaaaatcttgcgacacacatctatacaaactatggaacaaacacttacccactagattccaataatgtaaaaccagacgaaattccccaacttaaaatcttgacacccccccattacaacattgggaaagaaatatagtttctcaacacactctcaaaa

SEQ ID NO: 165773 - DNA, 305 bp, Zea mays
  Clone ID: MRT4577_82770C.1
cccgggccctccgatcctcgtggtcgtcgcatccacccgtaccctcctccgcgacctcgccgtcgccgcagccttggccatgtcgatcttcgcgtctaatgggtccgccgtggtggcgatggtggggaagaactgttgcccgatcgccagcgaccggcggttgggcctgccgcttcagaccatcttcacgggctttcagggggtgttcatggtcctcgacacgctttccatcggtctctgtgggcttggcgctgtcggccatgcgctgttgcttcggttggtggtggggccccagctgtatctag

SEQ ID NO: 165774 - DNA, 903 bp, Zea mays
  unsure (1)..(903): unsure at all n locations
  Clone ID: MRT4577_82771C.1
gggtaatctcgctaagcaaagcacacacgtgataaaatcccctctaccaaattgcaagcaacttcatattctacgcgaggtttctggtcgcggagatcaacgtccacctaccgcggcggcggcgcaacaaggatgacgtgcggtaactgccgcggggagctggacctggatcggaggtcgtgaagagcatggcgagtggggcggttgaggctgctggccctgctggggctgtcgaagctggaggtggaggccatccgggtcgagggggagtgcgcgttcccggagctgcggcgccttcagacgagggggttccctcggctgaagaggattcagatgcgcccggcgcgcgggcagcagggcaccgtgcggatcgagtgcgacaagcactggtggaacgcgctacagtgggcgggcgaggacgtcaaggcctgcttcgtccccgtgctctgagtctccgactcacttcacttgagcacttgcagtaggaagacggagctgcaatttttggcgacagctgatattcgacgaccactggagctgcaatttaccgtgaaaatagaaatcccttgccaaactagccatcagtgatgggaaaacctgcgtgctggatgaggaaactttttattagttctcatgagtaccttgtaccgaccaattgtgtggcctaatccagtaagtcatctttgtaaaatcatactaactcttattgtaactggatttggtttcgaattaattcattttaaaatgctcgtgtgaaggtatgaatataatattggctgtcagaaacattctctttttggagcacagtttttttaactgtccccccattggcctgtaatgtgctcttgtaactttacagagcnnnnnnnnnnnnnnnnnnnnnnnnnnnnnnnnnnnnnnnnn

SEQ ID NO: 165775 - DNA, 377 bp, Zea mays
  Clone ID: MRT4577_82772C.1
gtacacaacggcagtgcctcattcatcatgcaaaaatcactcccgttattaaaaatccgtgtggcagctgcatgccggggcttggtggcatcgtgcctgctggggacagagcaggagctccacagccctgcctggtcaaagttgtggccacgggacaggggccccaagtcccagcctacctcttacacaggggccagctgcggggtggggcgggaagtgaggttcagctccagggacttagtgcctcagtttctccacctgcaaaatggagacgctaatgatgcctcccatagggcggggtgagggtgtatgagattcttcagggagaggttcaaagggtgctggtggccatgtcgtaagtactgagaatgcctggc

SEQ ID NO: 165776 - DNA, 303 bp, Zea mays
  Clone ID: MRT4577_82773C.1
cgctcatgcggtcgctccgcatcacgcccgtgcacggccaggccggcgcgctcggcgccgccgcctcggtcgccatcctcagcgtctgcctcaccgtgtacggcgtcgcctccttcaacgagggggacccgtccacggcgccctcgctcacgctcaccggcaggaagaaggagggcgacaagctgcaggcctccgactgctgggccaagttcaccgggggattcgtctgctgcggcatctccggcgtgctctgggcgtactttctcctctacgtgctcgacgtcccctacttcttcaagtagg

SEQ ID NO: 165777 - DNA, 374 bp, Zea mays
  Clone ID: MRT4577_82774C.1
aacataaacaagagtttcatatttgcaaaaatcacccctaacagccctaaaggggcaagccagctgaggcatgtagcggacaacagcgcaaaatgcttctgacaaagcgtagcatggaagaaccagtgccacagccctgttgatagatgaacataacattctgaagggggaaaacacacatcaggcaaacactctagattgccaacgggaaactcatgcggggcatgacacactggctttttcacagcaagaattttggcaggggaatccaaactcgaaccggagggggataaaagcttggggcgtgggccaaactcatccccatgaagggagccacatcagcagccttaatggtggaacgggcataggtcaac

SEQ ID NO: 165778 - DNA, 345 bp, Zea mays
  Clone ID: MRT4577_82775C.1
ttggaacctttgggctgatttatgtgcttggcttgaggttgtgctttgtgagaaggcttaccctcttactcttaagcggatggacggtaaataggagaagtttatcgcttgtatagaacttgacgaacaaagtctcggcgttacagcggtacagcttccgtcatagacgacccgaagcgccgccgtaagcccttggaatacgtcacccagtcggtccgaccccacagctaacgtcgaacaacaaacatcccccatgataaccgctcccactgccgtcaaccgtatctgtttcattcgaactagctacgcgaataccacggaacgtcctagccccgcataaatcaa

SEQ ID NO: 165779 - DNA, 370 bp, Zea mays
  Clone ID: MRT4577_82776C.1
actcaggctgtttcctgagtacctctccgtaaggatctgtttgttgagagaccacccgggataatagtacaaccatgagggtagaatgggacaccattagctgattaattagatgaacttgggggtgtagttggatttgccagagggccatcaatgggggctagggcatagtgctcgctctgctaaggttgggtgccgaggttcatttgatttggttttgttagtcacccaccttagggaggagtgctgtgtttgtacgactggtgaaaccaaacgagcaactatgcactaggggaatctttgtaaaggctacatagtgtatccctggtggttcacctcggtagtgaagatcgggtcctgcaaacgcaag

SEQ ID NO: 165780 - DNA, 180 bp, Zea mays
  unsure (1)..(180): unsure at all n locations
  Clone ID: MRT4577_82777C.1
atcacacctgagattaccttttcgctgctattgtttacgatccataacagcaaacnncccagggggactctccagggaccgcccgcttctccagccgcatgnttaaccgagtttanattcttctcctcctccgccgtcgtaactatcctaatggctctcttcaccatggtcaccgccatc

SEQ ID NO: 165781 - DNA, 701 bp, Zea mays
  Clone ID: MRT4577_82778C.1
cattgggtacctcgaggccggccggggtcacagtcggccggccggcccgggacaaaccctaatccccacctgaccccgcagcctcattccacctaggcgcatcggcgacggcggcggcacgccctggtccatctaccgacctcgcctacctgcggtcctcgtcgttcacaggcggcgcgccctcgtccaggtccagtcgtcctcgttcacgaaggcggcctcgtccagcctactgttccttctgctacaaattcatagtcactgatggggaaagcaaagcgtgcctcgatcttcatcaggctggtttctgcagccggcactggattcttctacgtgaagcgcaagaatcctcgtcgcatcaccgagaagcttgagtttagaaagtatgatccccgtgtgaacaagcatgttctgtttaccgaagcgaagatgaagtgagatcttgtttctccacaatgcagaactggaataagttgtcaaccttttgcaaccagaaacctctatgccgttattagacaaatgattaacgatcctatgtgtttttcttgctccaatgagctgcaagcaaaaaaaaaaaaaaaaaagcggcccctttttctttcacgccgccatgttttgtgaaacgatgccatattttcctctgagccggcggcgaaccgtcgagatgctcaactaaaaaccaaacgaagctgttgactcag

SEQ ID NO: 165782 - DNA, 562 bp, Zea mays
  Clone ID: MRT4577_82779C.1
ggccgcttttttttttttttttttctttttttttttttttttttttttttttttttttttttttttttttttttttttttttaacgggcctatatatttattacaaaaaaatacgttaaaccaataaacaaaaccccgggaacccatgcgaagaaggcttttgttttcctaacaggacaactttagttaagttgaaaccaaaatgccatttttttgttcgccaaaaacctcgcccgaacaaggacagttttagtttaagctggaagtttgaaacagcacgccatcaccttgggaaaaacctcgtccaaacaaaaacaggaagggtatgggagggggaaacccccttttactcctgggggctgacagaaaacagaagctaccttatggggggataatgggaacctctggctcaaaaaaaaaagccacccccctcgggggcccccgaaatgaaggtatcacattgggggggggggggcaaataaaataaactacttacgcaggtatgggattatccccgagcttaattgcgggcaagagtttttttttatttggggggcgggac

SEQ ID NO: 165783 - DNA, 559 bp, Zea mays
  unsure (1)..(559): unsure at all n locations
  Clone ID: MRT4577_8277C.1
gggtaccctcgggctcgccggggcctgcgtcctctcacccccggtgccttcgagctttgactctacgcccatcttccaaagcctttgcttctttcttatctggggatctcctctgatcatggttcgatggagggaccagcgatacggctcaggcgcacgccagaaggcacatgagcaggagctccaaggccgggctgcaggtcccagtgggaaggatcgccaggatcctcaaggtcggcagggacgcctagaggctcaccgccgtggcccccgtctacctgactggcgcgctcaagtatattgctgctgaggtgctaccacttgccggcaacacggcttgagacatcaagaagacgccgatgaaggcacacgccacatccaggtggacgttacggacgacgaggaggtctcccgcttgctccgtactgggaccatctccagtggtggtgtcctgcccaacatgacacaacctggtggtgaacctgactgacgaggagggcagcgacaaggctgctgatggcgatgatgactanaccgaccacacctagtctttgatgcg

SEQ ID NO: 165784 - DNA, 550 bp, Zea mays
  unsure (1)..(550): unsure at all n locations
  Clone ID: MRT4577_82780C.1
ttttttttnnnnnnnnnnnnnnnnnnnnncgtttttttttccttctcctgagcaagaatccaacaaacaagtagtgccacgcatcagaagaagatttatatgatcgatcgactagctagtgctagctagcagtagatcgatcgatcgatcgatcgacgcatggaggcttatgcatgatggaggtagctagctttttttaatttgtgcactacggatgatgagcgagtaggagtagggcgtgcgtgggttgtttggtccggggtgcgcgcgaagccctgcgcgtggaggcgcgcggagacggcctcccagagcgccttgttgcgcttggtggtgaggaaggagtgatcgaggtcggcgcgcacggcgaggaaggcggccgtctcggcgtgggaccactgcgggaggcgctcccgctcgaggctcgcgctggaggcggcggagacggagggcacctgcgggggcgggggcggcatgggaaagtgcggcggccacggggagaggagcgggtggtagggattggataaggagctgttgaggtggtggaagggat

SEQ ID NO: 165785 - DNA, 817 bp, Zea mays
  Clone ID: MRT4577_82781C.1
cctcgaggccggccgggccgggacttccggccagccgcacaggcacaaacccaatccccacctgaccccgcagcctcattccacctaggcgcatcggcgacgacggcgttgcgccctggtccatctaccgaactcgcctacccgcggtcctcgtcgttcacaggcggcgcgccctcgtccaggtccagtcgtcctcgttcacgaaggcggcctcgtccagcctactgttccttctgctacaaattcatagtcactgatggggaaggcaaagcgtgcctcgatcttcatcaggctggtttctgcagccggcactggattcttctacgtgaagcgcaagaatcctcgtcgcatcaccgagaagcttgagtttagaaagtatgatccccgtgtgaacaagcatgttctgtttaccgaagcgaagatgaagtgagatcttgtttctccacaatgcagaactgtaataagttgtcaaccttttgcgaccagaaacctttatgccgttattagacagatgattaacgatcctatgtgtttttcctgctccaatgagctgcaagcagcagatggctagtgttttgtcattttgtgtgggaaactacaaatgaaatctggactcccatctttttctttcaaaaaaaaaaaaaaaaaaaagagaacaaaaagaaaaaaaaaaaaaaaaaaaggcagcaggagcacagtcagccacactaagggggggagtgaggctccgagcacgagctagctggggcggacgagggcgcctgggctgaacagcaggaacaccccgaggaggggggccgcgcgggtggttgtaggg

SEQ ID NO: 165786 - DNA, 242 bp, Zea mays
  Clone ID: MRT4577_82782C.1
ttcccgttcttcccactctctctccactcgtatctacactcctacagttacgattccttataccatttatcatcacacaatctggattagcttttcttccattacgattatactcattttcatgacttcatttcttgcatcttccaatccaatttcaagatgctataactctcttaacatcacttctcatattctataatcatttatctcgagtcaacaattaagaactgcaatagttttta

SEQ ID NO: 165787 - DNA, 448 bp, Zea mays
  Clone ID: MRT4577_82783C.1
ggacaagaaatgacacaatttttatacccctttttaattttttgtttacaagcatgccaatttttccccattttttgacggcacattaagcgtttttttaaggggtaaaatttaattagggcaaaaaaaaaaacatttttcaaaaaacgttcaaggtttaaaattaaattttatttttcccaaaaaattccggggcaatgtgaggatcaacttattttacctgcagggtcaaaatactccctccattttcaaatattaatcgtcccctagttcatgtttgaactaaaacccgaccaataaaaaaaaacggggggagttctttacagcaaaaacaccaaaattagtttttttttttaaagcccttaaccttttttcttaaaaaaaatttgatgggttctgggtccccaacgccaaatataaagctttcaacgacgattcaattggcccc

SEQ ID NO: 165788 - DNA, 276 bp, Zea mays
  Clone ID: MRT4577_82784C.1
ggccgggccgggataccctgctcctatctggagtctgacagtcctgtcctttcaccctcggacagtcgatgcgccagtgagtacatttcagggaggtgatctacaccacaaatcctcgagtacatgtccaagtaccagggaccggagatcacgaatgcggactgatcacggctaggcgatgatgctgatccacgctgaagagacgaacttcacggccgaggattcacggtggaatctgactaagaagtccagccaccgtgcgcgctgcatggccct

SEQ ID NO: 165789 - DNA, 146 bp, Zea mays
  Clone ID: MRT4577_82785C.1
gtgacagcatctcctgcctgctccgaggcgccacccatctcttcctcgccccagcaggcggttcccgagagccttggcactttcaccaccagggtacatagaccgcatctgctgtgctctgggcttcctcggactccattttgtgg

SEQ ID NO: 165790 - DNA, 406 bp, Zea mays
  Clone ID: MRT4577_82786C.1
aacgcacaggtgcagcttactattactggctgtagtgtaccatataatacccagggacaagacaacagtacataacatagctagcaaactggctgaagaccaaatacgccgtctcagcgcagaaccaccataaataggagcttacacaacatagccaacatgcaaatgattttaaaactgaccagatgcataggcaggaattctggaggcggtctacacaagtgtgcacacgtgcactgcaatgcccaacaacaagattgtaacagcaaacatggaagagaacaggcgcggagggcaaggcatcagttacgcatgtacgagttaccgtggtttacaatcttactgatacccaaccgtgaggaaccccccctagatcttgtggagcttgtctgccttaaccaccgga

SEQ ID NO: 165791 - DNA, 370 bp, Zea mays
  Clone ID: MRT4577_82787C.1
gattacttctatcctctaggaaccaggcccaccgctggctgccaataggttgattgtcgcttactactcttaggcaagctccactagtgcgacccatattacaggcacttgcaccaatcagccattgggttccatgaaccctgcatgcaatactgatgatgcacacgtgcttgcagcttgatggcctgttcacgcctgatgctgcacaactgacgccttaccggttagagatgccagcgatgatgccacagatgatgactcctaacatgatgtaccatagatatgccgatcatgatgtgccatagtcttgcccacatgatgtcacaactgatgatgcccactgtcactggactccgctcgcaatcatgct

SEQ ID NO: 165792 - DNA, 346 bp, Zea mays
  Clone ID: MRT4577_82788C.1
ggggggcaaaaagggcccaaaaaaggagaacacctttttattttttttgtacacaaattgggtttttccaaaactaaaaaatgaatcccccttttttgcagtaaaaggcctaaaccccactttattataaaccttttaaagggggtttcccaccctggcccctttggaatactgccttatttggggggctccaaaacgtaagggggggggagaaaaacacaatttgggcgtttcccaaccgaaagagcccgttgggggttatttttgagagaaatgctaagcccccccaaaaagggcctaaaagccccccttaaaaaaaagggggcccccctttttcccatttttt

SEQ ID NO: 165793 - DNA, 391 bp, Zea mays
  Clone ID: MRT4577_82789C.1
gtggccctttcagcatgaatcgatgaatgtacattgcttatcagttcacatgctgatttggcgtccaatgttgttcttggctgcaaatagattatgtagcatatctcctgagatagtacttcttcaacaacttgcactatcgattgagtacatgccctttctatagtcagattgcaaagaaatggcttgactctcaggtgagttctcttttctttggtgtgtgtgtgtgtgttgaatgactatcagtatttaggcgtagaagttgatcttgctggtgtccatagcgcgtaaggacatacattctcactgctacatgtagatataaatatcacagtagaatgaactgaaagatttttgttgaaattttaagaaccaatagttaatcttttgg

SEQ ID NO: 165794 - DNA, 519 bp, Zea mays
  Clone ID: MRT4577_8278C.1
ctcgaggaaccatttatacacttgtcaaataagataacaaaggaagagatgccactctactactctacagtatacatcttttgctctgactgatatcatgagtatacatacatcttgtgctctgatatactccctcattcttgaattcctcaagaccttgtcttgatgttcttgaaagtgttttaacagctacttcttgtccatcctcaagcttacccttgtatacaggcccaaagccgccttcaccaagcttgttctcagctgagaaaccctccgtggctgctgctattgtctcgaaatcatatactggcagttccaggtcgtccccattatcctttccttcactgccatccttattgtgtgaaccagctgcccatatggatgatcctgattttcttgcttttgttttatttgctctccaaatgtaaaaccctgtgattgctagaagaacggccagggcagcagttatgctgacagcaattgcaaccacaatactgaccttctttgacttgccttttg

SEQ ID NO: 165795 - DNA, 436 bp, Zea mays
  unsure (1)..(436): unsure at all n locations
  Clone ID: MRT4577_82790C.1
acgaccacgcatacggtcttgatgttcattaagaacaaacattgagcccactatgcaaaccaaacnnncagtcgaatgctagaggacgcctgtatagctgtatcgcttgctaaagtatagatccacctggccttgagcattatattaagaacaagatcttatgacacaggtcgagaaaaccctgaaaccaatgccccacccatacatagaggctccgtagcccatgtaagaaacaaccgtgaccgtaccgaaccttaaacatacgctttggcgtgggacagacgtggggatttttctaaccacagcctgaaattagctttcacggggactcgaactcaagacctgaggagtgctaatcaaacttctgctttcaaaccaaggccagtgttaaccttgcttgatgctatagtgcaagaccatactttacaagatactc

SEQ ID NO: 165796 - DNA, 190 bp, Zea mays
  Clone ID: MRT4577_82791C.1
cccacacctgcggccaatcttaacaagattcatttgcaaacacacttaacgaaacccgggcgggctacactaacaggagggcgagccatatattatactcacctaccactttcttacccttttaaatcaccacaaatttctttaatataacacacttttcacttgatccaagaaccatcattccacattt

SEQ ID NO: 165797 - DNA, 845 bp, Zea mays
  unsure (1)..(845): unsure at all n locations
  Clone ID: MRT4577_82792C.1
ggataaanaagagggcgatggagggaaagagatgctgcaaaggtgtatgagtgccggttttgctccctcaagttcggcaagtctcaagcgcttggcggccatatgaaccgccatcgacaagagagggagactgaaaccctcaaccgtgcccggcaactcgtcttcggcaacgagagcctcgccgccatcggggcgcaagcgcagatgacgatgactttcagggatgtaaatatggctggcgctgccccaccgaccgtattgggaggaaacttccggggaggcgccagcgccaccggtggcagcagcgtcggcgacccgtgtctcccgttccggccggtgcatccggggctatcgtcgcagccttcgtaccattacctctacacggcgccatccacactgcacccgatgagctacccgccggcgacgtacccgggccctcctcgtcagcctgcggtcggcgactatgtcatcggtcacgcagtctccgccggtggcggtgacgcactgatgcagtcgacgcaccgcagcagcttctcttgcttcggagctccactcaccgctccgccggcagcagcggcggcgggggctgctgctgctgctatgaacgtgcaggccgacaagcttaactgcaactgcagcttcggctgcggtggccccagcagaaataataacgtgaatgcgtccacttgagcagatgcggcccgcacgctgtggttaatgcatgcaattaagtcagtgtaaagagccaagaaattaaattagatgatgcgtgttttcgccattaaagacagaagtgttctgaggatctacttctatatgaatgcctgcaatggatccctgaatct

SEQ ID NO: 165798 - DNA, 1104 bp, Zea mays
  Clone ID: MRT4577_82793C.1
tctcgtccggcgcgcgccctggctcctccctgtggccgccgcctcctacttcctctccctcagccgcgacccactctctcctcttccctctctctgcaccgacttctgcggcagcggcggcgacgccatgggcccggtgggcttggccgccgtcctgtgctacggggacaccgtgacgcagctccacatcgtgggcgccgcgggcgcgggcgcaccgcctctgcccaggaacttctccatcggggtcgtggtcacaacgctgtccaggctccccgacctcaaggtgctcacgctgtccgggctcgagctctgggcccgctgccgggcaagctcggtcgcctcgcgtcgctggagatcgtcaacatgagcggcaactatctcttcggcgaggtcctgcggggcgtgtcgcgcctcgccggtctccagacactggtcctcgatgacaacatgctgggcggtgaggtgccgacctggatcggcgcccagccgtcgctggccgtcctgagcctgcggaacaacacgttccagggcgtcgtgccggagtccctgggaagcgccccctcgctgcggtcgctcgttctcgcgtccaacaacctgtccgggaacctgccggacatgagccagcaggccaacctccaggtgctcgacgtcggcggcaactcgctcgagccggcgttccccaagctcgggaggaaggtggtcaccgtggtcctggctaggaaccggttcgtcgccttcctccagaacccgcagctcgtgcaggagttcaggcccgacaaacagtacaacatccacatgctccaggagcgatatcagatcggtcctgaccagattgaagctctgtatcagtgtgccaaatttcagtttgagtgtggtaactactcaggagcagctagagtgatgtagttgtgggcttttgaacaatagctggagtaatatgaaacattagtgatgtagttgtgggcttttgaactgcttcaagctggagtgatgtcgttgtggtgcttttgtgactgatcatctctggagcttttgtgaatgatctagctagctatctataaatgatctagttgtgaatgatattataattgtgatgcttttgtg

SEQ ID NO: 165799 - DNA, 1584 bp, Zea mays
  Clone ID: MRT4577_82794C.1
agttagccagccarccagcyakycctccgacatcacaaadaacaccggcagggcaagcvagcatkgacagcaaggaggaacacggagtccgttcttcggttcttcctaccgttcgtctatcatccatccgttgctgtcctgatgcctttaccgcttcaccattgatctgagttctgaagaaggtcgtttccctggccgactccttcgccgctgcttcggcgactgcactctcactgcaagaaggaggaaaccaatccaagatcaggcaaagacaggcctaactccaccgataagcttcttgtgctccattgcatagcagtgtcgttccacacggtgtctctcctctcatcgagaaatcgtctccaacgacgacaatggctacgccgagccacctcctgctcgtcgtcttcacggcgcttcttgcgttgctcccggggacgacgcagctccagccttcgcaggtgtggactctgatcaagatccagcagctcctgaacgcccccccgatgctcagccactggcgccgcagcaccgacttctgcggcggcggcggcggcgccatgggcccggcgggctcggccgccgtcctgtgctacggggacaccgtgacgcagccccacgtcgcgggcgcgggcgcgccgcctctgcccaggaacttctccatcggggccgtggtcacgacgctgtccaggctccccgacctcaaggtgctcacgctgtcccggctcgggcctctggggccccctgccgggcaagctcggccgcctcgcgtcgctggagatcgtcaacatgagcggcaactacctcttcggcgaggtcccgcggggcgtgtcgcgcctcgccggcctccagacgctggtcctcgacgacaacatgctgggcggcgaggtgccggcctggatcggcgccctgccgtcgctggccgtcctgagcctgcggaacaacacgttccagggcgccgtgccggagtccctgggaagcgcccccctcgctgcggtcgctcgtgctcgcgtccaacaacctgtccgggaacctgccggacatgagccagcaggccaacctccaggtgctcgacgtcggcggcaactcgctcgggctggcattccccaagctcgggaggaatgtggtcaccatggtcctggccaggaaccggttcggcggcggcctccccgcggagctgagctccttctacctactggagcggctcgacgtgtcgtggaaccgcttcgtcgggccgttcgcgcccgcgcttctctccctgccgtccatccggtacctgaacatcgccgggaacaggttcaccgggaccctgtccgacaaggcgccgtgcggcgacaacctccggttcgtcgacctgtcgctgaacctcctcatggggagcgtgccgacctgcctgaggtcgccgggcaggaagccggacacggtggtgctcgtgtccaccaactgcctggacgacagcgacggctcgcagcacccgtcgccgttttgccagaaccaggccctggccgtggggatagtgcccggcaaggagaggaagagcgtcgcatgccaggcaggcttcgtggccggcgttgtggtggcgat

SEQ ID NO: 165800 - DNA, 655 bp, Zea mays
  Clone ID: MRT4577_82795C.1
atacacaccagaagctttcatcatactagcctgtcgcttgagttagttgcagacttactccgctcatctctgatcgactcagctccggaactccgcgatcttttgtagcctcaacatctggctccaaggggctccggatcgcttgaaccttgcccacgcgatgcattcggcacacaactgcggctcaacgacgactcccacgcacgcctcagcgtacaaccagaacatggagaaccaggtgctcccagcgttcgggacgtgacaatgcagattcagtacatgccgggtaaccctctcatgagaacatggactcccaacccctagaccggcacgatcgcgactgcaagaacatgactccctaactggcagctggatgcggcgtcggcatccaaacgcggatgctgcacgacgaactgtactccaccacaaggtgtggttacgcccgcgtcaaggacagtccacaaacaacctgctgccgcgtgatgcagcgcgaacgatgatatccccaaccactactgatgctcgctcctacatcttcaagggtgacaaggtgtaactcgtaggcaatctcgacgtgtacaactaaaccattggactgtgatgaacttcatttaccttacacttcgattggagatacagatattgtgtacggata

SEQ ID NO: 165801 - DNA, 459 bp, Zea mays
  Clone ID: MRT4577_82796C.1
agtccatatcaccaaaggaggccttattcaaagatttcgtacacacatatacatcgtgttgcgttgcgcttaaacaagtgcatatgcagtaaacatgcgccggatccatgatcagcatatggaattctggatcgggccatgtccaacaaactctttaaccccgagatctgaacgcacaactcaccgcttgtactaattcaacgtagtagacacatataggctgaaaaaaacatcatatatcaccaacagaggcgcgaagtgcatgcgaacacacacgtatgcatgcgacatgtctcttgggctgggacggtggcatggcatgtgctgcggactgcggtcggatcagcttacgaatatcaccgacgggtcgcagcaacacttgtctatgaggcagcagcagcacagagcggtgagacatccttcaaggaagctcggctcccttctcggcggtggaggagc

SEQ ID NO: 165802 - DNA, 683 bp, Zea mays
  Clone ID: MRT4577_82797C.1
gctgccacctcgtcttacgctccagggtcaagaagcttcctcaacttgcggttgcgcccaatctctcgtgcgcaagcagcagcgagggaagccatggtcaggaagctcgcgctggcctccctcttcttcttcaacgccagcagcgagggaagccagcgcctttcctccacgtcgtccacgtccgccgcctccttcagctcggcggtgtcgtggcagtggccgtcttgcacgcaggcgaggacgcgctccttccgcggcgacaccagcccggagatcgtgtccatgcgccacgacaccagcagcagcaagcgagaggagcaggaggaggggccgtacaattacaacaacaactacaagacgagcatgaacccggcctacgtccacgacgactgctcggccgccgacgctgattgctactcctccatcgggctctcagccgcgacccagagccttaccctttccaacgaggacgaggcgatcatccacggcctccgctcctccactacccggcggatcctgttcgagcccgagtccacgagctccatcatgaagaagacgaaaaagaaggcggcggcgttcgacggtgccacggcgctgtccatcgagtccgctgacccgtacggcgacttccggcggtccatggaggagatggttctgagccacggcgccgacgactgggtctg

SEQ ID NO: 165803 - DNA, 247 bp, Zea mays
  Clone ID: MRT4577_82798C.1
cggtgagggtctgctaccctgtgtcagagcctaccttcaccacctatatccagaacgggagcttcttcagatacaggccagcagtgaccggaaagttacttaacccgctaggactgccttcagttggaacacgctggcttctgtgattaggtgaagcgatgctggaagactttatgcacagcctagttatcaaggggatgatctgccgacatgtttgagacccccctaacctctaactctcattgct

SEQ ID NO: 165804 - DNA, 846 bp, Zea mays
  Clone ID: MRT4577_82799C.1
acgggtataacgggaggacgacatcacacagccatcgccggccggaagctctcagctctgagcagaaggaggcgggtcgtcacaccacacggtcacacccgtcagcatgagcgaccgcaggtacgggtactcgtacccgccgccccaggggtactacaacaacggaccgccggtgatggcgccgccgccgtaccagtacgcagctcctccaccgccgaggagggagccgagcttccttgaaggatggtaagcagccacgcgcgcacacgatctactagctagcttggagcacgaaaactagctatgcccggcccattggagagagatagagagagaggggaaaaattagtatttggataaaaactaaaccatcactaataatctgaacagttcgatgtttctcatttcactcttggacacatgaatgcagtctcgccgctctgtgctgctgctgcctcatagacgagtgctgctgcgacccgtcggtcatattcgtgagctgatccggccgcagtccgcagcacatgcatgccaccgtcccagcccaagagacatgtcgcatgcatccgtgtgtcggtgtgtgttcgcatgcacttcgcgcctctgttggtgatagatgatgtttttttcagcctatatgtgtgtacgttgaagtacaagcggtgagttgtgcgttcagatatcggggttagagagtttgttggacatggcccgatccagaattccatatgctgatcatggatccggcgcatgtttactgcatatgcacttgtttaagcgcaacgcaacacgatgtatatgtgtgtacgaaatctttgaataaggcctcctttggttatatggcct

SEQ ID NO: 165805 - DNA, 1730 bp, Zea mays
  Clone ID: MRT4577_8279C.1
ccaagcgtccgccaagcgtccgcccaagcgtcccgcggagcgtgggcggcgcgtgggccctctactggtacgcgcccaaggaccagtgcgacgccttgtccccgtgcgggcccaacggggtgtgcgacaccaacaaggtcccggcctgctcctgcctccccgggttcacgccgcggtccccggcgtcgtgggcgatgcgggacgggcgggacggctgcgtccgggccacgccgctggactgcgccaaccgcaccgacggcttcctggtgctgccgcacgccaaggtgcccgacgcgacgcgggcggtggtggacttcaactccagcctggagcagtgccggcagcggtgcctgaggaactgctcctgcacggcgtacgccagcgccaacctcaccgccgcgccggggcgccgcggctgcgtgatgtggaccggcggcctcgaggacctccgcgtgtacccctccttcggccaggaactctacttccggctcgccgccgcagacctcgcttcaaaaggcaagtcaaagaaggtcagtattgtggttgcaattgctgtcagcataactgctgccctggccgttcttctagcaatcacagggttttacatttggagagcaaataaaacaaaagcaagaaaatcaggatcatccatatgggcagctggttcacacaataaggatggcagtgaaggaaaggataatggggacgacctggaactgccagtatatgatttcgagacaatagcagcagccacggagggtttctcagctgagaacaagcttggtgaaggcggctttgggcctgtatacaagggtaagcttgaggatggacaagaagtagctgttaaaacactttcaagaacatcaagacaaggtcttgaggaattcaagaatgaggttttgttgatagctaaactccagcatcggaatcttgttcgactaattggatgcagcatttctggaccagaaaagatacttatatatgaatacatggaaaacaagagcttggacttctttatgtttgacacgaccaggagcaagctacttgactggcaaacacgatatcgtataatcgagggagtatatcagagcacaaggtgtatgtatcctcactcgctcagtcagagcaaaagaagagatctgtagagtagtagagtggcatctcttcctttgttatctatacaagttatatgtttcctccaggactcgcgatatagaatcatacacagagatctcaagacaagcaacattcttctggataaggatatgactcccaaaatttcagacttcggcatggctagaatgtttggcagtgatgacgcagagatcaatactctcagagtagttggcacatatggttatatggctcccgagtacgcaatggatggggtgttctcggtgaaatcagatgtatttagcttcggcgttatagtgctggaaatcattgctggtaaaaggaaccgaggtgtctacagatactctggccacctcaaccttctagcacatgcctggagcttattgaatgaggggaatggcttagatttagtcgacgagaatctgaatggctccttcaactcagatgaagtgctaaaatgcctcaaagtggggcttctttgcgtgcaagagaacccagacgaccgtcccctgatgtctcaggtgctgatgatgctggccagcactgacactgcctcgttgccgactcccaaacagccaggcttcgctgcaagagct

SEQ ID NO: 165806 - DNA, 473 bp, Zea mays
  Clone ID: MRT4577_827C.1
ctgtggtcctttctttttttttttttggcccggaaaacaaccggggggggccggggggccccccccaccccccggggggggggggggggagcccggccccaccaaaagggggaaccccccccggggcccggggggggtcggggtggggcaaccccgacctgtgttgggcccaagaacccggctcccggcccgggctttgggcccggggcccattttggacccaagggacggccccccaacccccccttgggggggggaaccacaaccaaagtgtgggctccggccccaagagactgggcgggggccttccacccccccaaagggagaatccctcgggtcccggggggtcccgtccccttggacggggggcttgggaaaaaggggagggaacccccccccttacccccccccagggcccctcctgggggggggggaacaaaccccacacccttgggggcacggggggggggccc

SEQ ID NO: 165807 - DNA, 775 bp, Zea mays
  Clone ID: MRT4577_82800C.1
gggtacctcgaggccggccgggggcgcggtcgtgtactgacaggctacgggataacgggaggacgacatcacacagccatcgccggccggaagctctcagctctgagcagaaggaggcgggtcgtcacacggtcacacccgtcagcatgagcgaccgcaggtacgggtactcgtacccgccgccccaggggtactacaacaacggaccgccggtgatggcgccgccgccgtaccagtacgcagctcctccaccgccgaggagggagccgagcttccttgaaggatgtctcgccgctctgtgctgctgctgcctcatagacgagtgctgctgcgacccgtcggtcatattcgtgagctgatccggccgcagtccgcagcacatgccaccgtcccagcccaagagacatgtcgcatgcacttcgcgcctctgttggtgatagatgatgtttttttcagcctatatgtgtctacgttgaagtacaagcggtgagttgtgcgttcacatctcggggttagagagtttgttggacatggcccgatccagaattccagatgctgatcatgggtccggcgcatgtttacgggttacggcatatgcacttgtttaagcgcaacgcaacacgatgtatatgtgtgtgtacgagatcgttcaataacgaaggcagcagacactaatagcatgtttagtttgagtaatgagatagttcatcattatctcatttctcactttcttatttggtttgtggattggaatggattgatccatcgtcattcc

SEQ ID NO: 165808 - DNA, 609 bp, Zea mays
  Clone ID: MRT4577_82801C.1
ggaatcatgaagcacgacagcagctaatataacaccaattatcttcttcatcctatctgggttcattaatcgtcctcataattaattgatactactaatccacgtataacaacaacagcagctccggctgcttctgttcatcttcacatcttctacgagccgccgttcgcggcctcttctcctgttgctcctgttggggtactcatctcgtttcactagccaacacgaaaacgaaaaatggcataaacacaatacgactcaattacagacgggcacaaggtcgtctgacgcctcagaagcgcgcgttctcgaagccgtgcaggtcgctgacccggttcatggacttgcgcatgacggccaccttggccagctgctccgcagcgcgccacgccgatgtcggcgtcagcgcctccccgcgcggggtccccacgggcgtcgtcgtgtccccgtctcccctcctcctgccgctcctcgacgtcggcgtcactacctcctgatgctggctgttggcgcgccgccaccgcatgtcgctcagctccgtgtccaggctccacaccagctcctgctgctgcgtgcgtcggcggcgactgcagcaccagcgcccgcgcc

SEQ ID NO: 165809 - DNA, 750 bp, Zea mays
  Clone ID: MRT4577_82802C.1
cattggtaccctcgagcccggccgggacgggattacgggaggacgacatcacacagccatcgccggccggaagctctcagctctgagcagaaggaggcgggtcgtcacacggtcacacacccgtcagcatgagcgaccgcaggtacgggtactcgtacccgccgccccaggggtactacaacaacggaccaccggtgatggcgccgccgccgtaccagtacgcagctcctccaccgccgaggagggagccgagcttccttgaaggatgtctcgccgctctgtgctgctgctgcctcatagacgagtgctgctgcgacccgtcggtgatattcgtgagctgatccggccgcagtccgcagcacatgccatgccaccgtcccagcccaagagacatgtcgcatgcatacgtgtgtgttcgcatgcacttcgcgcctctgttggtgatatatgatgtttttttcagcctatatgtgtctactacgttgaattagtacaagcggtgagttgtgcgttcagatctcggggttagagagtttgttggacatggcccgatccagaattccatatgctgatcatggatccggcgcatgtttactgcatatgcacttgtttaagcgcaacgcgacaggatgtatatgtgtgtgtacgaaatcgttgaataacgaaggcaacagacactaatagtaagtttggtttggatgaatgagataatccattaccctctcaaaaaaaaaaaaaaaaaggccccta

SEQ ID NO: 165810 - DNA, 178 bp, Zea mays
  Clone ID: MRT4577_82803C.1
atcataatcacagtattggatgtatgctttgcactagaaaataaaattaattatgctggagtggtgatttagtggtcaaaggggcaattgagttttagggtacgcaagaacgtgctatatatatagaattctagatgcataacggaatggattagcgaaaaagtcaaagcggcttaga

SEQ ID NO: 165811 - DNA, 317 bp, Zea mays
  Clone ID: MRT4577_82804C.1
ggaggcctaaaaacacaccacttttttggccttgagacatgggtatttccaagagtttgggattccaaaattaccgaatactgcccaaattgtgaggaattgttttttttagtgcgccaaaacaaaatatccttcaacaaataaacgttaagctttgttcttaccaccccctaatcttttgaactgtaactcgcccgattggggtgccccatacccccttttttttttacgggaacctgaaaatggagggggggcccccccccccatatgaggtaattcaaagttgcccttttgtccaccttcttccaaaatattaa

SEQ ID NO: 165812 - DNA, 358 bp, Zea mays
  Clone ID: MRT4577_82805C.1
gtcactgatcagagctgtatgctttgcgtggacatcctaatggcgcccgctccatgtggacacacactgcagatggtgttacacttacacatgggcaagagcgagggcaacaagaacatgaacgaactgctcggcgataagggcgcgaacctgccggatatcgccagcatcaggctgtcggagccgacctggttcattgtgtctactgaggcgtgccaacattaccagtaggccggtcgcgccctcccgccctcgctctggtctgaagtcctaaaccgcctgcgatggcttaaatattacataacctcctccctccgccacccgcgttgcccgctcctgctatccaaccgctctggca

SEQ ID NO: 165813 - DNA, 428 bp, Zea mays
  Clone ID: MRT4577_82806C.1
aataaaccatcacaataataataataataataataataataataataacgcatttttgccgagggagatacatatttttgacgcccccccacaaacagaaaatcccaaatgattattgaatcgagaacagtgacacaatcacttttgaaatgggactgacactgactaaactctgggggcaccactccgatccagaaacaatgagcgggcatgcggccaaacgggcgttacacaaaggggggctgggggtctgccccccaaacgatgtctttgagccccggccggagatctttgatctaaaaagagcgggactccagggaatcttcaccggtcttttttacctaaaaaaataaaaccgacagggccacgcaaaaaatttcgggccccacgggtagaacagaccttgggggccccaagctctgggccct

SEQ ID NO: 165814 - DNA, 292 bp, Zea mays
  Clone ID: MRT4577_82807C.1
attgggtacctcgaggccggccgcgaaggctatgttccggaacctccggacctacgtgtacagcggcagattctcaagccgtctaccacgaggatcgaccgagaaagaacagcttggaaaagatctcgcaaaagattggacatgctgtgattagaaaggagcatcaatacattggttttgactgaaatggtccgcggcttgatcgctaactctcaagtacttgctctctgatacgaaatgtctacaattaactatccgtttgagaagagagcctctgagaccccgcttacga

SEQ ID NO: 165815 - DNA, 196 bp, Zea mays
  Clone ID: MRT4577_82808C.1
tccgccccgcgtccgccccgcgtccgccccgcgtccgccgaattgacaggcgcccttgggtacatagcagtgagactggactttgtgcagtttcatcagtagcgtcataccttgtgaatacaattggccaaaataagaggaagtgtaaactaaagttcatgctttagggggggggggggggggggggggggggcgg

SEQ ID NO: 165816 - DNA, 428 bp, Zea mays
  Clone ID: MRT4577_82809C.1
aagggggcaccaaacgtgggcccagagacatggataaacactgattaaatcgaggtcggaaaaagaagcgacggtctcaaacacccccggaaagggggcaacccccttacttttatttgagggcggggggggaaccaaatttttgttggctacgacgaagagggcaaaacgcggggggtctggcttcccatttatttccgcgggggaaaacgcccccctcccctatttatgtgggggccccgggagcccaagagggaacacgggccccggtattggagcaggggggaagaaacaccggaagccgccatggaacccgggggtggtcccacccccccgtgcggccgggtaagcagcaccgccggctgcactgggaaccgggaaacccgcccccgcgggccagcattggacccccaactttttttcctttt

SEQ ID NO: 165817 - DNA, 220 bp, Zea mays
  Clone ID: MRT4577_8280C.1
cccacgcgttcggctagccgtacgatggttgacaccggtgacgtcgccgccgccgccgaggcctaggtgcgaccggcgggcagcagcagcacccagccgctggcggtgcgcgtgacgatcgtgacgggcgcgtctcggggcatcggctcggccatcgtcacgcacctgttctgcctcggctcgagcctggtgctgggctacgcggcgcgcgccgactagg

SEQ ID NO: 165818 - DNA, 309 bp, Zea mays
  Clone ID: MRT4577_82810C.1
atacttgattatgttttgttgtaaacacaacatagaagccgattgataattaagttatgagacaggaaacaatgcatatatcctgggggttaaggaaaaatgaaacaggaccatgcaaaacaatcatagatgcaactaccaaacgatttacctaagacataggtccacaacaccacatattgctacctgctagtacaaccgagccaaattacgggacgaaagggggacaagcgttaaatataaaaaaccggatccgggattatggtaccatgaaaaggtacaaccggtacacatcaagcaaccaaggaa

SEQ ID NO: 165819 - DNA, 505 bp, Zea mays
  Clone ID: MRT4577_82811C.1
ggcttggaacctttgggctgatttatgtgcttgtggatgtgcgggtggatgtgcgggtccggaagtgagggaggagagcggagggagagggaggagtgaggtattggcgagcctgggaggtggtgcggggtccgtatgttggtttcatttttagtctatctattatgtctccgctcgattaatctctctctctctccactcttccttaagacctttttacccccccgccgccgctttttttacctccgtcaggactaccttccgactccctgtctgtcttagcatgttcgccccttagtcttggagactttactctggttattcttcgtggctcgtaagtcttaagaggttagaccttagtatagacccgaggctaacccgtttgtcgagtctgaactaacttgtctggtaataagcgctacccgcctttttgacttttgggtcctgacctgactgaacttgattcaaccgcaccgtgcgcgcgcgcgcccaattcctctctgtc

SEQ ID NO: 165820 - DNA, 177 bp, Zea mays
  Clone ID: MRT4577_82812C.1
attatcacataagaaaatgacgtgggtatttaaaacttacacacaaggcgttacaacaacagtttcaccagagattgaaacaacgattcgttattattggtaccacgtggggggggtccttaaaaggtccatgcatcagatggacacctacgctgtcggcatcttcttcctcttttg

SEQ ID NO: 165821 - DNA, 635 bp, Zea mays
  Clone ID: MRT4577_82813C.1
tggaaattaaccgagtagaatcaaacgtcaggctcaagaaattacataaaccagaatcatatcaacgatacacagtttttggggttaccaatatgatattttccagttccaactatgcccagtatgcagtacatcacaactgagaaactagccagtgacaacatttggaagtagtcaactcaagagcagctatgcagaacctatattttcaatagcgaaatgtcaagcagcgctttccataaactatatacctctcctgattcactcagaactgtactcacatttacagtcaacacaagacgagacaagattctagggaatgcctagcaagtataccctgaatgacaaagaacaactgattggctcaggagaacaatagaattggtcatggaatatgtcatcgccttgagcttcacaaattgaaggggtcagtaacagaaagatcggatgctctctcaaagtaccaggcgctgtcaccctcacgggcaactgccaacagagtagggaaatcgctggctcgtttcaccgtggtcagagacttcaacttggcaagcatctcatccactgaggcttgatctccattggccaatacaaccacaagcttcagcagcgattctgccctctctaggacgaac

SEQ ID NO: 165822 - DNA, 732 bp, Zea mays
  Clone ID: MRT4577_82814C.1
aaatttgacatcttttttttttggaatttatttgagatctttcaaacatctccaatatttgtttagaaattaatgcacttacaggtacgacttcctgaaaaaatcctagtgaaattcacaggtccaaatccatgctatggtgtcgctcagatcatatgccaatggctgcaggtacaaggtttacgtggaggggaacgcgtggtcggtgagcgagaagtacatcctggcgtgcgactcgccggtgctgttcgtgacgacgctcttccaggaaggacatcctgtgtccagggggctcgtcgccggcaatcactactggcccccatcaaccgggagcacatgtgcaagtccatcaacttcgccgttggctggggcaacgagcacccagtgcaggcgcaactcatcggcgagcagggcagccggtttgtgagggaggagctgagcatggactacgtctacgactacatgatgcacctgctcaccgagtacgccggactgctccggtacaagcccgccgtgccggagaaggccgtggagatatgcacggagtccgtggcctgccctgcccagagcctgcaccgggactgcatgatggattccatggagagtcacgttgcaggcttcgacctatgcacactgccaccgccgttcaccgacgaggaggccaaggcaatagccgacagggaagcggaggtcttgaggaaggtagagaagatggaggactaggcggcaagc

SEQ ID NO: 165823 - DNA, 432 bp, Zea mays
  unsure (1)..(432): unsure at all n locations
  Clone ID: MRT4577_82815C.1
aaaaacaggccggagccaagcatccaantgcttaaccctattttatccaacattcttacgaacccnacatacaagatgaattagccgcttttctacaacaaccttcacccctattacagcagctacctatggagcattaaatcgcacataacatcaaggcacaccaactacaacatcatgtgctaggaaaccttgctgtctactctcagcaacaccagccacttccattcaaccaactacctgcattgaactctgctgcttatttgcaacaacaactaccattcaatcagctagcttctgcctacccccagcaattactttcattcaaccaatcttcagcattgaactctgctgcttatttacaacaacaccagctaccatcatttatccagctatctaatgtgagccctgtttccttttttacacaacaac

SEQ ID NO: 165824 - DNA, 477 bp, Zea mays
  Clone ID: MRT4577_82816C.1
ggtgacgtaaccgggggtgctcattcgatcgcgagagaccaactcactagcagcttgtgacccttgctacaacagggcatgctacactagggggactatgcagatatgagacaacaccatggaatcaaagacctgcttgcaacttccaaacctctgctctgcggaggctgtggcatatgaggcggtggattggatacatgcattaggctactctgtggcgatcgaaatatgcatgagcatccatggcggggccggaagcgacgacgaagaagaagtaatcatccacaccaaccccggaatttatagacatcgacgaacatgcttcgtagcactgcgaccgccggagctacacgtgctgtggcttaccattaccttgctgaaccgcacgaccggatgcccacacgcaatgtgctccacctggtgtaggctgtacactggactgacatctccgtggcaaaacgatccaatgtgacagtc

SEQ ID NO: 165825 - DNA, 401 bp, Zea mays
  Clone ID: MRT4577_82817C.1
gcatgaaaggcgccatcttcacattcgccaattggtgacaaacataggcgggcaggctttatatacaccctgtttcagtacattccacgcacagaacttgctacacgggggttggggtaactaacaagcgagacaccctattccaattttgtacagactggaccacaaccttacccataacaaattattacatctaaaatgagagaaagaactaccctttaccatcccatcaggtggtgtatctcggtccaaaggcaaaaagggtcgcccataaaggcatggccaatcacctcctagctgcaggacacgacggccaattaccccgccctaatctatcccaggaggtgttcttattcccaggcggcgtggccgacgtaaaacctcaggccctgggccctgat

SEQ ID NO: 165826 - DNA, 630 bp, Zea mays
  Clone ID: MRT4577_82818C.1
ggccgcttttttttttttttttttcagaaaaaaaaatagtggtcgtgttttctggaggtgcaggtatatcagcagtgcctggtatacaatgaatgcagtttttgttgtatatggttgattcatctctcccctcgctgctctggtgtgagacctcctttgccacaggtagggcagctcttgagcccgaacccctggcagtcaaagcacttccatctctcgaagatgttgccgttcttcttgttcttgccggtgcccttgcaccctgggcattctactgccccctttcctttgcatgtcttgcaggccgcagcgaccgtgaccctgcccctgcgggctccatggccggacgccgtcgtcctccagccccggcgatccccagcggcactagtgagtctggtcaatgccactgctgcacctgtcctgcacctcaagccggtgaccaagctgctgctgctggtggccatggcaacctgcatcaaaaggtaggtaggtagctcctcctctgatgatgatgatggagaagaagcaccagtgcaacgaaggaatgaagaaagaaagaaagaaagcggcttgggggaggttttgctttgcgttgtagccacacaatcaaattggttttctcccggccgg

SEQ ID NO: 165827 - DNA, 264 bp, Zea mays
  Clone ID: MRT4577_82819C.1
tttctagatcgcaagcggccgcccttcatgatggagctctaatcgcttgtgaaagaggaggcgatcacaaccttttttaacagaaacacgttgtgctgcaacaaacacacgaccacccactattgtctcaggtgctgcttatcccaaatcactacaaatctccactggcgggcatgttctcggacacgctgcacaacccctagggtccatccgctggtttgctctgcgccaggggctcagtacccgaacctgaagagctccatc

SEQ ID NO: 165828 - DNA, 518 bp, Zea mays
  Clone ID: MRT4577_8281C.1
ggtccggccggaattccttgtcgcccacgcgtcggtaacgagagaaggcgtcttcgtactcgcggccttttggctaaacctttttccttctcccaatccctcgcggccgccgctcatcccgtacgacgacacctgagggagtgcattttatccacatcggcaggccggatccagtcggaaacgcgtgctgggagctgactgccttgagcatggcattcaggctgacggcagatgcccggtgacagaccatgggaggtgatgatgctttaaaccttcttcagtgagactgggctgggaagcacggccccggctgttttgtgaccttgacccactgctcgtgaggtgggactggacctaccgcgctttccccctgagcagtattatgggaggggagcaccacaacttgccgggtacttcaccatggaaggagatgtgacttgcctgatcgcataggagctgccacactgcctggctcagggcttcccgcttaagctgtgtgaggacggcttggctggtcc

SEQ ID NO: 165829 - DNA, 779 bp, Zea mays
  Clone ID: MRT4577_82820C.1
gtctcgcgtactgagcactggtgcttcttctccatcatcatcatcatcatcagaggaggaacgaaagcaaagcctctccagccgctttctttctttctttctcccttccttccttcgttgcactggtgcttcttctccatcatcatcatcagaggaggagctacctacctaccttttgatgcaggttgccatggccaccaccaccagcagcagcttggtcaccggcttgaggtgcaggacaggtgcagcagtggcattgatcagacccactagtgccgctggggatcgccggggctggaggacgacggcgtccggccgtggagcccgcaggggcaaggtcacggtcgctgcggcctgcaagacatgcaaaggaaagggggcagtagaatgcccagggtgcaagggcaccggcaagaacaagaagaacggcaacatcttcgagagatggaagtgctttgactgccaggggttcgggctcaagagctgccctacctgtggcaaaggaggtctcacacccgagcagcgaggggagagatgaatcaaccatatacaacgaaaactgcattcactgtataccaggcactgctgatatacctgcacctccagaaacaccaccactatattttttctttctcatgcatgtctgtgcattcgcgtggccttgcccagaaatcaaacactgagtaccatcagacaggcagattggactggtgaaatgctatagttggacatctactaaaaaaaaaaaaaaaagcctgcaaaaaaaaaaaaaagcggcc

SEQ ID NO: 165830 - DNA, 167 bp, Zea mays
  Clone ID: MRT4577_82821C.1
ggggggcgctcctaaaactagggggccccccgcgcagaagtaattcgcaggaggtaagccaggcggcctgatatctctggctttctagaagggcggctactgctcgggctgccgagcactgacgggccctgtgccaacctcatggccagcaaataggtccgatacag

SEQ ID NO: 165831 - DNA, 303 bp, Zea mays
  Clone ID: MRT4577_82822C.1
cttccccggaaggtttgcccatggcccaatctggacctgttttcccttcggaaaaagaaattctaaaagggtttaatttggaaaaaaagggattcttgcccttttttggttggttttggggcctggcccaaaaaaaaggaaaagaatacccccaagggaaccaaccctgtttttggcccgggcccgcccacggggatggaaatttacctttcacatgggggggggccaaggggaaaacctcgggctaagcccagacataaaagggtttgacttggggagggtttaggcaaatggccgggggtt

SEQ ID NO: 165832 - DNA, 528 bp, Zea mays
  Clone ID: MRT4577_82823C.1
gggggaaaaaaaaaacccttttacccccccttgggcttggggggggtttttgcccccattaaaaaaccccggggccctttttttcccctgggggaaaccaacttttactttttttatgggaagaaaacctttacccccccttaagaatttaaaaaaccccccaaacccttccaaaggttgggcccttggtgtggggattttggaaacaaaaataaaaattttttaatttgggggggccccctttttgggggccccccaatttttttttttttttttgggggggggggggggggtttaacccttttataaaaaaaatgggcctttttgtgacggccaacccttttataaatggtatcgcctttcggccaagggagatgtttccctaaaagggaaaaaaggggttcccccccttaaatttaaaaaaaggggggaatgtttaatttttgaaaccccttgcaagggtgggggcctttccaaaataaattttcaaaactggaatttgggcgccaaaattttccctcctttttg

SEQ ID NO: 165833 - DNA, 375 bp, Zea mays
  Clone ID: MRT4577_82824C.1
acgcggggaaaaaaaaaaaggaaaaaaaaaaaaaaaaaaaaaaaaaaaaaaaaaaaaaaaaaaaaaaaaaaaaaaaaaaaaaaaaaaaaaaaaaaagggttaaaaaaaaaaaaaaaaaaaaaaaaaaaggtttaaaaaaaaaaggcaaaaaaaaaaaaaaaaaaaaaaggtccttgggccggaccccctttagggggaatttttggaattttccttcaccttgggggccgttggggcttccttttaggggccccatttccccttttggggggtggttttacatttccttggccgggtttttacaccggggggtttggaaaaaccttggggttccccactttattggctttgcggaatttccctttttccccggtt

SEQ ID NO: 165834 - DNA, 634 bp, Zea mays
  Clone ID: MRT4577_82825C.1
cttctctcaggccaccgcccgcaccgtctcgcggcggcggcgccgcagcagctggcggccaccgcgtcgttccactccacgcctcccctgcagcggaagcgcaagacccagtggcagcacaggttcaatttttatgcaaaacgcaggagaaatagagacacaaaaagaacaatgatacggaatatgtctgagtatgcggagcagctcttcaatagttggcgtgatgaagatgagaaaaaaagatgcatctagtggaccttcatggtttagaggacaccgttgggtcagagattcgaggaataatggtttccgttcacatgagttttattacgatactgtcaaaagcagggggggatttgagttttgcacaagcgatgatgatgatgaaccagagactgtttttcgcaatgcttttcgtgggaaccagcacacatattattggtcttttgaatctgatgattttccaagaaggaattcaagacgttctcattcagaaagttctggacactggagttatgaaacagacgacgagggcgaaatatccacccagacagaggtatctgtggcgtgtaaggctcttggattgagtacttctggcccactaaaactcgaagatgttaaaagcgcataccgg

SEQ ID NO: 165835 - DNA, 488 bp, Zea mays
  Clone ID: MRT4577_82826C.1
tcgcttacgcgtggggtcggagacccctcgccgccagagaagcggctgcacgcagcacgcctgcactgcacatcctctgccctgctgcttgcttctctcctcccctgttcttcgccgacagagaactcccctggttcttccccgacagataagtacctaacttgctatttcctatttttttatcacttgtattgatgcccaattgcatccaatcagcagatctgcaaggacaaaaggtatgtctactggtccttccctattttttatctataaatgtatatattatataagttggcaaaacgcctagaaaaacgcctagcatcgcctaggcaagcctaggctggactagtctctaggctaagggtcatcgcctagattccgcctagcgcctagcaaaactttggtccttggtacccaattcaggccttgttcggttaatcccattacccatggattagatgagattggaaaaatctaagaagaagttt

SEQ ID NO: 165836 - DNA, 231 bp, Zea mays
  Clone ID: MRT4577_82827C.1
catggcacaaacgacccaacggggtggggttttttttgcaatacaacaaacaaaaaatttacgggtatcatccaaacataaagtccgttaatttggaccatggaaaccaagggcacgacccaacagagcaactacccacaagtgaatgacaagcttttacaccacacctcctgtgaaaataaaggcgtgtaacaaaccgaaagaccataccaaaaaaaaaaaaaactattt

SEQ ID NO: 165837 - DNA, 231 bp, Zea mays
  Clone ID: MRT4577_82828C.1
catggccgccataaacatctctttcaaagtctttatcttctggttccgatcgcgcacatgatatgatatcaagggggctggggctaatcatgaactctttgatgcatatgacgattgcatgaggatgcatccacgatcttcattcatggccttctttgaggtggttaaatggattaagtgttacctgctaagatgtttaaatgtatgctatccattctttgctgttaatat

SEQ ID NO: 165838 - DNA, 439 bp, Zea mays
  unsure (1)..(439): unsure at all n locations
  Clone ID: MRT4577_82829C.1
ggggggcgctgctggccggggccgccggcgccggcgcgcagcagggcgngnggagcaacancacccggcccaagnnccagagcangcngagccaccgcggcgacagcgggngccagggcgccnncnacaccnacgacgccnncancgaggccgccagcaggggggggggcnncggcaccaccggcgacgagcagacgcgcaggcgggagcncgccgccnncnncggccagacgncccacgaaaccaccggnggangggcgacggcnccgganggaccgnnngccnggggagaccgccgggngaaggaacagaaacagacggacccacccnacnanggacgaggacccanacagcnaacgganaagaacaacgacaggcacgccgggcaagcgcngaaccngaaccnggngggcgacccggacccgggggcgagagaccc

SEQ ID NO: 165839 - DNA, 338 bp, Zea mays
  Clone ID: MRT4577_8282C.1
ccaaaacagaccaggatattttagccagtcgggggagaattgatttgaacaaggacgcattgtactattacacgagctgagcacgtaaaaagcgctacaccatcggccacaggctcggaggaaaagggggcactgtacaatttgcctttggtggcaagagctaaccggaattttaacacgctacaggctactgcacggaccggaaaacgcaaagcgattggccggggtgaatacacaaggctaatggggaaagcaagataaagtatcccgggcatactactattggtaatacacctttttttccttatttttagaatggctacgcgtacacggaaggc

SEQ ID NO: 165840 - DNA, 134 bp, Zea mays
  Clone ID: MRT4577_82830C.1
ctcacgcgtccgggcgccgagtcggtcatcatcatgctgcaaagtatcggcacggggagcgcgctgatcctcggggctctagtcgtggcattgctcgtggagatgaaacgtctgagagctgcaacggacgcctg

SEQ ID NO: 165841 - DNA, 624 bp, Zea mays
  Clone ID: MRT4577_82831C.1
gccggccgggtcgggacagtgtcatgtatagtaaccggttcaacactttcacgctcagcttgagcaatggctagcctccaccatggcgatctcctccacggcgatggccgtcacccccatcaaggtggattccttcggcgaggggcgcatcaccatgcgcaagaccgtggccaaggccaaggcggcggcgtccggcagaccctggtacaggccccgaccgcgtcaagtacctgggacccttctcagcggaggccccgagctacctcaccggcgagttccccaccgactactgttgagacaccgtcgggctgtccgtcgaccccgaaacattcgccaataaccgcgagactggaagagatccactcccgatgggccatgctcggcgagctactctgcgtcttccccgatctgctctcccgcaacggacttaagttcggtgatgccctctgattcaaggacgtttcccaaatcttcatcgagggaggcctgcactaccaccgtaaccccagcctgattcacgtacatagcatcctcgacatctgtgcactgccatgtcgagctcatgtatgccgtcgaggcataccgcattgccggcggaccgctcggctaggtcatcgacccgct

SEQ ID NO: 165842 - DNA, 604 bp, Zea mays
  Clone ID: MRT4577_82832C.1
attgaaccgagcacctcttggtgaaggaggatgagatcagacatagatgacgagtattttgacaaatcgttcagttgggagaatagggacataacctttcagttggatggctcttttgatgataccaacaggggctttgtacgtagccacttaggatccaataatacgagattaaagagacattgaaaatgatgaaagggaagggagtaaggcgttgggccctgatggtatcccaattaaggtatggtaatatatcggggacatagctacagtatggctagccaagttgttcaatgacttcaatcatatcttcctgttgaacaaaatgtccgacgagtggagatctacaagaataagggagatattcaaagctatactaattaatgaggaattatgttgatgaagcatagtataaaggtatgagagagagagttatcgagcattgtctgagaggaataacgagtagctttttgaaccaatttggtttcatgcctagaaggtcaaccatggaagccattttcttaataagacaagtgatggagcagtatatggaacaaaataatgatctacacatggtttttattgacttggagaaggcttatga

SEQ ID NO: 165843 - DNA, 250 bp, Zea mays
  unsure (1)..(250): unsure at all n locations
  Clone ID: MRT4577_82833C.1
gacgcacgcgtccggncgaggccgccgcccataccgcctcctctttcccgcctccggtgcccaaggccaggccgacagtttttaaaaaggaatggcgccccactctaaccaacccactgtccttcataagctaggtggccagttccaccagatctccatcttcttttaatgtgcaccgacccgtaacatctgctcctactttctcaccttattaaaagagatttgccatcttcaactacattacccaaaa

SEQ ID NO: 165844 - DNA, 292 bp, Zea mays
  Clone ID: MRT4577_82834C.1
acgcgaaaaaaaaaaaaaaaaaaaaaaaaaaaaaaaaaaaaaaaaaaaaaaaaaacgaaaaagaaaataaaaaaaaaaggaagaaaaacaaaaaagctacaaaaatcaaataaaaaaaaaaaagggggggccgcccaaaaggttcaaacctaaattacccttgcatggaacgtcatagcccttcaaaagggccaccaaattcaaattaaagggccttcttttaaaaacttcagaactggaaaaaccctggctttacccaatttaacccccttgaaaaaaaaccccctttccc

SEQ ID NO: 165845 - DNA, 872 bp, Zea mays
  Clone ID: MRT4577_82835C.1
acaccaccgtagcacacaccagtacaccacacactcgcctttccgatcccatccctctctagccaccttcctccgctcgccgtgcttctgcttcctccgccaccaccgccggcatggctgcgcgctgcccctacttcgccgtcgaggagtcctcccgcggcatccgctcgggggagtccccggccgcggcgctccgccggatcctcgcgacgcctggtgcgcaccaggcgccctgctgctacgacgcgctcggcgcgcgcctcgtcgagcgcgcggggtttccgatcgggttcatgggcggtttctgtgtttctgccgcgcgacttggcttgcctgatgttggcctcatttcctatggagaaatggtagatcaagggcgtctcatcaatgaagctgtttcaatcccagtgattggtgatggagacaatggttacggaaactctatgaatatcaagagaaccataaaaggatatctatcaatggctggttttggggaattaatgcgtgaggatcaggatgctctagttgcgataaaagacggcggtgtacctccacctagcgtcctgccatcttttcaggagatcaaggatacattgggtttcaaccgctattataaagaagagaaacaataccaagtggacaagtgaaggaagcagctgaagtctgatcctgtggattcagtcggatcgtggccatggcttaatttccaccggacatgctgggcttccaccggacatgatgcagaccaatcgtatttatgttgagttgtaatcgaacgctgcgtagcgcagtatcccgaagaacatatatatggggtcttctcttccgtttctgctctgctgtggaatcacagtttcgggattattgaaacc

SEQ ID NO: 165846 - DNA, 784 bp, Zea mays
  Clone ID: MRT4577_82836C.1
gcccccacaccgtctcctccacaacacgctcctcaccttgcgccgactcttgccaggcattcctccgcgaaaaacgcatccgctccaaggggagttgatcgagaagcgttggtggacatgggtcagatccagtactccgagaagtacttcgacgacacctacgagtacaggcacgtcgtcctcccgcccgaggtcgccaagctcctccccaagaaccgcctcctgtccgaggtaaacgcctgcagttccacctgcatttctgttgattgcgttcttgccatgttggtttggttatctgatgcctggatgattttttttttttggtggggggatttttccccttctcttctctgcagaacgagtggcgcgcgatcggagtgcagcagagccgcgggtgggtgcactacgcgatccaccgcccggagccgcacatcatgctcttccgccgcccgatcaactaccagcagcagcaggaggcggctgccgcgcagatgctggccaagtgagcccccggtggctagggcgacgaccaggaacatttagaaccctaaccccctttccatctctaaaagggcgtcgctgttctgttgatcaattcctctatgctgttagttggaaacttcgggtgtagttggtcgatttgctggtgtgtgccttgtgttcgtggaaattcctgtgaaggaactgtcatgtgttagtctgttaccgtgcccattttcttaatactatgtgttgactgtgatcaaaaaaaaaaaagaaaaaaaaaaaaaaaaaaaggccccta

SEQ ID NO: 165847 - DNA, 2809 bp, Zea mays
  Clone ID: MRT4577_82837C.1
ctcggcctaggcccggcccgcctcggatggcgccgctgccgcttgctccgcagccgtagctttctccccaccagaacgccacccctcgctccgtcccgttgctgctgtcgctcggcccactcgatctccttggcactcacgctacccgccttggcgccgtgcgcctgcgtcaccttgccgccctacatccccgccggcagaacaaagagagtcggagctaggtgtcctccgcgcacactcggtcccctcccgcgcggccgggcggcccgggccagtcagtcgccctccattaacgtggccgccaagtcagtcacactcacaccaccgtagcacacaccagtacaccacacactcgcctttccgatcccatccctctccagccaccttcctccgctcgccgtgcttctgcttcctccgccaccaccgccggcatggctgcgcgctgcccctacttcgccgtcgaggagtcctcccgcggcatccgctcgggggagtccccggccgcggcgctccgccggatcctcgcgacgcctggtgcgcaccaggcgccctgctgctacgacgcgctcggcgcgcgcctcgtcgagcgcgcggggtttccgatcgggttcatgggcggtttctgtgtttctgccgcgcgacttggcttgcctgatgttggcctcatttcctatggagaaatggtagatcaagggcgtctcatcaatgaagctgtttcaatcccagtgattggtgatggagacaatggttacggaaactctatgaatatcaagagaaccataaaaggatatatcaatgctggttttgctggaattatgcttgaggatcaggtggcacctaaagcatgtggacatactgaaggaaggaaagtcatatcaagggaggaagctgtcatgcacataaaagctgctgtagatgctaggaaagagagtggctctgacattgttattgtagcaaggacagattctcgccaagctatttctcatgatgaagcattatggagggtgaaagcatttgctgatgctggagcagatgttctatttattgatgcccttgcttcagtagaagagatgaaagcattttgtgcggttgcaccagaagttccaaagatggcaaacatgttagaaggtggtggtaaaactcccatattgagccctgctgaacttgaggaaattggtttcaggcttgtagtatatcctttatccttagttggggtatcaatgcgtgcaatgcaggatgctctagttgcgataaaagacggcggtgtacctccacctagcgtcctgccatcttttcaggagatcaaggatacattgggtttcaaccgctattataaagaagagaaacaataccaagtggacaagtgaaggaagcagctgaagtctgatcctgtggattcagtcggatcgtggccatggcttaatttccaccggacatgctgggcttccaccggacatgatgcagaccaatcgtatttatgttgagttgtaatcgaacgctgcgtagcgcagtatcccgaagaacatatatatggggtcttctcttccgtttctgctctgctgtggtttcaataatcccgaaattgtgattccagtttaatataacaggccagcttgatggggctttcgttaaaaaaaaaaaaaaaaaaaaagagaaaaaaaaaaaaaaaaaaaagagaacggccgccacaccgtctcctcacaacacgctcctcacctcgcggcgactcttgccagggcactcctccgcgaaagccgcatccgctccaaggggagttgatcgagaagcgttggtggacatgggtcagatccagtactccgagaagtacttcgacgacacctacgagtacaggcacgtcgtcctcccgcccgaggtcgccaagctcctccccaagaaccgcctcctgtccgagaacgagtggcgcgcgatcggagtgcagcagagccgcgggtgggtgcactacgcgatccaccgcccggagccgcacatcatgctgttccgccgcccgatcaactaccagcagcagcaggaggcggctgccgcgcagatgctggccaagtgagcccccggtggccagggcggcgaccaggaacgtttaaaaccctaaccccctttccatctctaaaaggggcgtcgctgttctgttgatcaattcctctatgctgttagttggaaacttcgggtgtagttggtggatttgctggtgtgtgccttgtgttcgtggaaattcctgtgaaggaactgccatgtgttaggctgttaccatgcccattttcttaatactatgtgttgactgtgatcaagatggcactcatgcagggatgatatttaatctgtttgatgtgaacaaaaaaaaaaaaaaaaaaaaaaaaaagggcggccgtcgcgatctagaactagctagcaaaggggggaaaaaatggctccgcttctcgctgctgccatgactccacctagcgtcctgccatcttttcaggagatcaaggatacattgggtttcaaccgccattataaagaagagaaacaataccaagtggacaagtgaaggaagcagctgaagtctgatcctgtggattcagccggatcgtggccatggcttaatttccaccggacatgctgggcttccaccggacatgatgcagaccaatcgtatttatgttgagttgtaatcgaacgctgcgtagcgcagtatcctgaagaacacatatatggggtcttctcttccgtttctgctctgctgtggtttcaataatcccgaaattgtgattccagtttaatataacagaccagcttgatggggctttcatac

SEQ ID NO: 165848 - DNA, 144 bp, Zea mays
  Clone ID: MRT4577_82838C.1
gactgcttgaatggagccgcatcaacttgtacaatggcgctccaatcaagcagtcgtacctcactcactatggagtggacatcggtaggaagtcgaacgagcctgttgctacgaaggatgcgacttagggacaatcgggggagg

SEQ ID NO: 165849 - DNA, 372 bp, Zea mays
  Clone ID: MRT4577_82839C.1
cgcatcgtcatcaatcgagcagaggcgagggatagagatgacggagggcacggctaggggcggcgacatcctcatcgccatcatcctcccgcctctcggcgtcttcctcaagttcggctgcaaggtcgaattctggctctgcctcctgctcaccttcctcgtctatctccccgggatcatctacgccatatacgttatcaccaaggactacccagctagcgccgacataccgcgacaaggtgagagagctagccgatcacacagcgtacgtaatggagactaacgtactgctgagatcactataattagccctgtcgatcaatgctactggatggagactgaatctcagctgtgctgtgattctgctatata

SEQ ID NO: 165850 - DNA, 312 bp, Zea mays
  Clone ID: MRT4577_8283C.1
ggcgaaaaaactaccatttgcattgagaagattaggttctataaatggttccttgactagggggcagttttggaaaccacgggccctggttgggggggcttttacatacataacatccgggccttttttcctcgtttcctttgggcaccgaaatttttgttgacggggattcgggagaaaaaaaaaactggcggggagggaatttgttctgatttaaacccatttggggagcaacgacatgagccccccccccaggaacagggggactttccccgccccctggagcttggagttggtttgcaaccccgggtt

SEQ ID NO: 165851 - DNA, 271 bp, Zea mays
  Clone ID: MRT4577_82840C.1
tgttttttttttgatcgtgagtgagataaactgtacatactgggatacagcttatgtcgattatgacagacaaagaggggctcgtttccaaagttggtgggatttctgaaccagaagaactgtgacaacattttgggccggtcccaaagcgcgttaaacaccccaatgaagttccaggggctgccactgaacccttttacgctggcgatgccgtcatattgctcaaaatagatggcggagatcaaaacactcacaaggcagaaatccatcc

SEQ ID NO: 165852 - DNA, 948 bp, Zea mays
  Clone ID: MRT4577_82841C.1
ctgtctgaatgcaaatattctctgcgcgattatcaaaagctgaaagctggattcctctttaactccccattgtccttcagaaaacatgctacctgcagatacaagttctacgatggcgccgatcttcaggaagggacaacattgcgaggatactgacattgccttggaacaactgaaagaaatcatgatgtcaaaggcgatagattacttccgacaatacactgaagcgacagtctaccaaatactttggaaggctatacatggcactgcgtacattcattttgaaaagccagccatggaggctccaggtgcacggagaagttttaggggagctaggaaaagaaaactagtccaaccaatggaccaggatgtgcagcatcggacgcgtatgatctctcacttgctcgacttatgggctccacatgctcccgttaggctacgaggcttgatcttggactggattcagaaagaaaaggaaagccagttagcagcaccagtgcaccactgttgcacctgacgttctgaatcaattaacctggagagataacaggaacacatcaaaggttggcttactactcacaaaagggagcaaatctgtcagaaaaataaaagggcggatatacagggaccagggtgatagaaatttgggtcaaaagctatgtttccagtgaagaggatcaaacccataccatgaaggtcttgagttacatatcaatagtttgtgttctgttggtcacaaaaataggaagtactactatcaacctacattagaacttatgaaagtgtaacacatcacttgttctcagtttgagttatgcatatatgaccagctgatcatgtgatgggaataaaaaaagtgaaacatatttgtaactatatgtttttttttgggggagctttgagatggtggttatgccatgttttactcgaatttaaaaaaaaaaaaaa

SEQ ID NO: 165853 - DNA, 355 bp, Zea mays
  Clone ID: MRT4577_82842C.1
gaacataataggatcagcaaaaacatctgagataataggatcggtactaaagtaatcaagacaagaagtttctcatccgagtaacagcaatagacaacaagccttctaactggaatgatatcaatgaaatgtattctagatctgggaaacattgttttccttaaacatctaggaaaacgataaattttctttttctagtttgtttgagactcagagacttaatggcagatctgggatcggaatcctctcataaattttcagctgtagtggaagcatctcggatgtatctttcattttctattgacttttttcaacatggagaagcggaagtgtttcctcccaagctgtttacatg

SEQ ID NO: 165854 - DNA, 288 bp, Zea mays
  Clone ID: MRT4577_82843C.1
agataaaacccaatcaatatattgattgtttgtgggaaacacatgcggtcttgagggcaccattgttgactacatctcatatgtaatctaaaagatggcaccttcaaagaagggttgctgcaaggaagggttcatcaaagagaactggctgtatggcagcaattggtgctgctggatgaagttagcacaccaatgggataggcactgctagtggattaaagaactgttgtcgctgttgccggtacacaataaattgccacacaccctgttggttgaatggaatcaact

SEQ ID NO: 165855 - DNA, 379 bp, Zea mays
  unsure (1)..(379): unsure at all n locations
  Clone ID: MRT4577_82844C.1
cggatccaacaggcccccttttattattaaatcaccagaagacgtaaatttttttaatacaacccccctttttgttgcccggttgcctgacacacgattaacaaatttccgtacataagcatccatggatggatggatgccttgaaacacgtttaattcgaaaaaaagttaacgggggagggaatatataaacgaacgtacgtacgtngtcggccggcgcatgctgggggaaaaacgaaggggtttaattaacgtacagaagggcctaaagcagcagcgggagaaaatatgatgtagcagcgaccataattatagttacaggagcaagcaggagtgaggcaggaaatgtatttgaatgttcccccgggaagaaaagggg

SEQ ID NO: 165856 - DNA, 289 bp, Zea mays
  Clone ID: MRT4577_82845C.1
tttcttttttttgttttttttcttttgttttttgtttgggggcaaaaacaactttgatgaaagattaaacaatggcggctgccgagaactcttctggggtaaactcacataccttacccgcaagttagaaggttgggtcatttaattgggccagacttttcaaatgccgcattggtaacctcaatagaaaacccaaaaagaggggtttcccttaagagggcccggtggatccgggagcggagccacctctgtagccaccttttttgattgaacccgacttcattttctg

SEQ ID NO: 165857 - DNA, 168 bp, Zea mays
  unsure (1)..(168): unsure at all n locations
  Clone ID: MRT4577_82846C.1
cgnaaacctccctcgnaaaccttgtctggccactgccttcccgcacgctagggagggggagnaatgggcgccgnggnaggacgccgctgcacgccgcgagcgtctccgcgccctccgtgccgccaaggacctcctctccacccccngaggcgccccaaccccttccac

SEQ ID NO: 165858 - DNA, 257 bp, Zea mays
  Clone ID: MRT4577_82847C.1
gcgacgcgtgcgatcggaggctctgacatcatactggtagccaggctggttctgatatgtgttacagtgtcagtggttatttcacgccggattgtggttcatttgctgaacactgagaggggagcgtacgaaccgatgcactacctcatgagagatgaagataatcacatacttaaggagaagcactacgaggctgtacgtcaggtttaaaaacaagtccatgaaggtaaccagacagttgtggtgcttggcacaca

SEQ ID NO: 165859 - DNA, 438 bp, Zea mays
  Clone ID: MRT4577_82848C.1
acttcagctcctccagatctcgatgcggcgcatagctcgccggcgacgcgccagcgtcggcttcggccggcggcggctcagtcccgtccgaagcagacctggcgcagctctccaccgccatctcggcgggggaggacctgggcccgtttgtccggcgtgcgttcgcctgcgggcggccggagccgcttctatcctcgctccgcgccgtcgcgcgggaccgcgagtccgagatcgaggagctctggcacgcgcactaccacgacttcatccgctgcgtacaggacctccgctcactccatcgccgatggcaatgaacttatttccacctgctgaagcacccacaactggggcttgcctctccatcaatcgatctgtctctcacaggaagccccctcctacgggggatgtcttgcctcaaaagaccaaacaggtcccgcc

SEQ ID NO: 165860 - DNA, 269 bp, Zea mays
  Clone ID: MRT4577_82849C.1
gcaacacacacggactgattcgaatgatgtaagagatcacaaaggttttcctaaaggggcatcaatgctgtgcgggacatacatcgcaggtggtcggtacctgtggcctgtgctggaagtcatgaaaagatgcctggaagcacacacggtctatgagtcacggctgatgattacatctccaccgggagcatgagaggcgttccttgttttgtggattccaactacgatgacccactagcgcggattgatgtgacacattgttcgtgctg

SEQ ID NO: 165861 - DNA, 276 bp, Zea mays
  Clone ID: MRT4577_8284C.1
cggacgcgtggaccggtgccaggccttgccttattgcggtggtgcttagtccctcttggacacgtatcgacacaagccagcgcacgcgcggacatgaatgatggcggtgccatgaggccatcgactatgttctacgagcaataggcagacgtatgtacatatccaacagtgtgctcaggagtgctcgctctgtgccagatagctctgacgctacatcgtcatgtgctgatgtcacacgccgttatgaagagagtagtgcacggagcagccgatgag

SEQ ID NO: 165862 - DNA, 312 bp, Zea mays
  Clone ID: MRT4577_82850C.1
agaccaaacggggcggggttttttaatgtcttgacccccccaaaaatgggacaaaaagaaaaccacatgaataatgcgcgcggcaagataagtcaaggaaaacacggggggggttcggggtttacccaaaaagaagaagcaaagggtcttccgggcagaattgggggcctgccaggcaaaacacattgctttgggtcttaacgccggtgtaaaacaatggggggggggcggatcttcccaaagagcttcttaacgggggggggttggttcaccgtcccctctagccctggaggaagcagtttttttgggagc

SEQ ID NO: 165863 - DNA, 275 bp, Zea mays
  Clone ID: MRT4577_82851C.1
ggttactttctaagcacagctgtgttaggactaacccattcacagcctggtcaccaatgttctatcagcatcacagaatactgtctcatggtgtctagcttgatgaacttggttaggatactctctctgttactcagctttgtcatctgtaacatggggactaatacaaggactaagaccttctattagccattatccttcttgccatctaccccatgttaaagccaggctgatttgttcttggatcttaagtgtgacaaagcctgcgggaagga

SEQ ID NO: 165864 - DNA, 1766 bp, Zea mays
  Clone ID: MRT4577_82852C.1
ctttctcattctgcggctctgctactgctagggcgctaggcataataagagcgcgcgccagcctcgtcagtccctagtcgcaacgcaacactggtggaactccaatactcacacggcatggcggcgaagcactaccagcagcaccacttcctgatcgtcacgtacccggcgcaggggcacatcaccccggcgcgtcacctcgcgcgccgcctcggcagcgcgtgccccggggcacgcgtcaccatctgcgccccgctctcggcgttccggaagatgttcccgggcgctgccggtgtgactgtgacggaggaggagtgtggcgacggcgatgcgaaggtcaagtacgtggcctactcggacggctacgacggtgggttcgacatcgccgtagacagctacgcgcggtacatggagcaggcaaggatggcggggtcgcgctcgctggccggggtcctccgccgcctccgcgacgacgggcgccccgtcacgtgcgccgtgtacacgctgctcctgccgtgggtggcgggcgtggcgcgggaccacggcgtggcggcgacggccgtgttctggatccagccggccaccgcgctcgccgcgtactaccactacttccgcgggcaccgggacgccgtcgtggccgccgcggcgtccggggacccgtgcgccgaggtggggctcccgggcctcccgccgctccgcgtccgcgacctgccgtcgttcctcgccgtcacctccgacgacgacccgttcgcgttcgtgctcccggagttcggcgagctcgtcgacgcgctcgaacgagacgacggctcctcggagcccccgacgtacgtgctcgccaacacctgcgacgccatggagcccgacgcgctcgcgtcgctgaggccacacgtggacgtcttcgccgtcgggcccgtgctctcgttcctgcacgaagcggatgacggcaggcgcgccccgtctcctcctcgtgacgtctttgaccatgacaagtgcgggtacctcggctggctggacaccaagccggccaattcggtggtgtacatctccttcggcagctcgtcggttatgtgcaaggaccaggtcgcggagatcaccgacgccatggcgcaggtgaagaggccgttcctcttggtcctgaggaaggacaaccgcaagggccacgacgacgacgcggcggcggcggccgatgcggacagcgccggcgggatggtgctggagtggtgcgaccaggcgcgcgtgctgtcgcacccggcggtcgcatgcttcgtgacgcattgcgggtggaactcgaccctggagagcgcggcgtgcggcgtgccgaccgtcgcggttccgcggtactcggaccagggcacggccgcgtggctcgtggcggagcggatgggcaccggcgtccgcgcggcggcgcgcgcggacggcgtcgtggaggcccaggagctgaggcggtgcgtggaggccgcggcgtcgggggcggtggcggcgcgcgccgcggcgtggaagcggaatgcgtgggctgccgtggccgacggcgggagctcgcaccggaacctgacggagttcctgagacagatcggccacggtcgcggcgactaaaccagagacgtcgtattgtattgtatcacctcgacctcgttgtggtggcgttgcagccagcttgcatttctagcgaaaccatgcatacagttgattgcaatttgagcgaggacgcaatccatgtctggtttctgaagtctggcaacgtattcccttcggctcgacgtccatct

SEQ ID NO: 165865 - DNA, 474 bp, Zea mays
  unsure (1)..(474): unsure at all n locations
  Clone ID: MRT4577_82853C.1
gcctacttagccagcgacacgcgatgggagactacgatcgcgtccttgcttcgcttacatgagggaccagcgcgccagggtgtatatataagccctgaaccacctcctcatccatcaaatcgaaccatcgcgacgacccaattggagagcaccttcggtgaggatcagagagggagaaagggagaaggatagccgtcgtcgacatcattcgcctccgccaccatccagaatccccaatgtgactgaaggcgttctgtcaggtgtatggctgcgtgctcggggaagcagtggtagtgtgcggacccgaaaatccatggcaattcgtcgccggtgacgggagcgccactgcggaacgcacttctcgatgggcggaggacgacgcgatgtaatcctcggtaagagcacccatatcgatttcgccttagcacctgcatcatttatcacctagttgactntgggaatcgggcaccacag

SEQ ID NO: 165866 - DNA, 358 bp, Zea mays
  Clone ID: MRT4577_82854C.1
gttttgctgctctcggaccccgatctccgaaggccgcagcatcatgcgaggccgcgctaccgtgtgaccgagatggcactgccgaatgaggggaccgttgattaccccggcttcaagctccatgtcctcggcgatggtggaactgggaaaactacatttgtgaagaggcatctcactggagagtttgagaagaaatatgaaccaaccattggtgtgggagttgatccgctggagttcacgactaactggggtgagatgacgtcctactgctcgaataccgcagggcaaaagaaggctaccggcctcagggcgggatactatatccatggacagactgcgatcatgatgtttgacatga

SEQ ID NO: 165867 - DNA, 470 bp, Zea mays
  Clone ID: MRT4577_82855C.1
tttttttttttttatttccacagaggaagaatgtttgagctatgtattgtattcgtatgccccttaacttcttatgtatgtattgaaacaagaacaatagttgagactgaattgaaagagggagaggtatagctctttggccaaaaaatgtaatagtctgtatgtacggccccatggatagcagaagaaaggaaaaaggggagaaattggagaggagaaagatgatgaacaaccaagcaagagtaactagtgatatgatagtaaattcaaagaccaaataaatcgatctgcttaataactactagcgtgcagacgaactagctagcttcgtgtatcgttgccatgtatgtaacttttggtgtagtcccaagccttagctctagatccaattcatgtcgttgatccagaagaagaggggaactagagctagggcttgttagggttgtcgtgtgcggtacctttgtctcatg

SEQ ID NO: 165868 - DNA, 142 bp, Zea mays
  Clone ID: MRT4577_82856C.1
tccaataaactttaaacacaaatcccctgatagtcataataagaggtaaatattacaagcaaactcaagtgttcccaccaaccactacttatctcaaaataaccccttcacctctcttaaaaaagatcttgcaaaaaacatt

SEQ ID NO: 165869 - DNA, 621 bp, Zea mays
  Clone ID: MRT4577_82857C.1
ccggccggagaacatttacccctgctgctaggcccgcctgccttttctctctatccactgaatctatctctactatatccactgcattgacatcacacctcccctccagtatacgattgacgacctcaacaacctcgaggaggaggatacggtctagaacatcagatattgcatacgcaaaccctggacaccatactgcgtggatctgatacgacacccgatcaccgcggtgcacatggtgcgccctcgtctgccctcgccacattcacatccacattgtggcggtctgcaaaaagttgggccttagaattggaccatacaggcctcttggacagagcaatatttttgattgcaagagtgattgaaataacgatggaatcgctgattcttgtctgcactggcatcaccacggtcttgctgcatgaattaggactaggaacaactgaagttatgtgcaactggaagatctgcatgatcaacgccactgtgcgcctggtcaggtacctttagcatgttgtctgcattgctgagatgtcgtgtgtccgatcccacggacaagccaaatccctgatcttaattgcaacattgactccgtgcatgacaaactgacagacgacaatg

SEQ ID NO: 165870 - DNA, 1024 bp, Zea mays
  Clone ID: MRT4577_82858C.1
gcgggggcgcgacggctcgtaccagctcttcctcgagtacgcgcccggcgggtcgctggccgacgtggccgcggcccggagcggcgggcggctcgaggagcgcgccgtcgcggcgtacgcggccgacgtggccgcggggctcgcgtacgtccacgccgccggcctcgtgcacggcgacgtcaagccgcggaacgtggtcgtcggcgccgacggccgcgccaagctcgccgacttcgggtgcgcgaggagggccgcggacgacgacgccgcgctgccgatcggcggcacgccggcgttcatggcgccggaggtggcgcgcgcggaggcgcagggcccgcctgccgacgtctgggcgctgggctgcaccgtcctcgcgatggccaccggccgcgcgccgtgggccgccgccgccggcgacgtgcttgccgcggtgcgcctcatcgggtacacggacgccgtccccgaggtgccccagtggctgtccgccgaggccaaggacttcctgggccggtgcctggcgcggcgccccggcgaccggtccacggcggcgcagctgctcgagcacccgttcgtcgcctccaagagcacgctggacctggacggcgccaagggcacgtgggtgtcgccaaagagcacgctggacgcggcattctgggagtccgagagcgacagcgacagcgacgacgaccaccgccaccaccacgacgtcgacgtcgacgcggtgtcggcacagagcaccgccgacaggatcggcgcgttggcctgccctgcttcggcgctgccggactggtgggactccgacgagggctggatcgacgtgctctccgcaccagccgaagcatcgtccgacgcgacggtggacgagggcccttgcgtcggcgacggcggtgccggaacagaggaagaagagagggcagaccaggccgccgagcccctcgacacggacgccgacggcgcccacaatgcaggagaagctgacgctagcccgcctgatcgcgagtggcctctccgtgtgagttcaccc

SEQ ID NO: 165871 - DNA, 426 bp, Zea mays
  Clone ID: MRT4577_82859C.1
aaaccaccggaacaaggggaaaaaaacaaaagggggggggggaaaaaaaaaaacgacaaaaaatccggcaccccaaggaggcgacttccaaagggcagcgggcacattgcattgaaagggactaagccaccgcagaaaaactaaaaaaaacaaaccacactccaacaaacacaagaaccccgggggccaaagctccaaggaggcccaataaccaaagctgccttcttggagggggggccccctggaagccgcgggacctgggcacaagcgaaatgccgaaggcagcaatcaccggaaccttgggttctgggaggggggggccccccggaagctggggggctccggggcacgcaaattggcgaagggctttggctgggggggccccccctgctcctcgggggccgaccccggaccgggcccacgggc

SEQ ID NO: 165872 - DNA, 334 bp, Zea mays
  Clone ID: MRT4577_8285C.1
aaaccaagctagaaaacctctggtactccaacaagccattaccatgttcatacataatagcggcaatcactcataaatgtaaagaaagaggcactatcgatgtaacgggttaaacctcacatagatcccaaaacactgaatattgtaaagcaggggtgctaacacaagccccgacggaaagatagaaagcttggaccttcccttggccaaactcttggtacggcggaacctctgttccttcagcctatggacaagaagcttctggtactcagcaacctgagacttcttcttaggtatcctcttcttcttgacagggattctagcacgctttctc

SEQ ID NO: 165873 - DNA, 1577 bp, Zea mays
  unsure (1)..(1577): unsure at all n locations
  Clone ID: MRT4577_82860C.1
ttgggtaccccttcgaggggccggccaaaaaaaaaaaaaaaaaaaaaaaaaaaaaaccctccgctccggagtgcagagaccacacaagacaagagggagagagccgagaaaggaaaacgaaaaaaaaaacggcctttccttccccggccgggaaccaagaaagtgagagcgcgcagcgagcccctgccggcgactcggcagtccgcactgaggagtgaggacgattcgttcagcttgctcccaacaaattcgttggaggacaggggaggggcggggtcgtccgccgctggttctgtagtcagccaggtatcagcgtttgaggctaaaaaatggagcactgtacagcttttatatgtacttcagcacagtggcctcactcaataacgaccactcgacgagtggcataccatagatctgcaaattcaagtttctcagcaccccaaaggagaaggcggtcaacactctatgtcatgaatgccgcatcaaccagtgctccaatttcacctcaaaacataacccaacttccacggacgaacagcacagttatcaaaagtatatccagcgacaaacccagcagtgcaatggagcaacttgatattgaacgtggtgtctgtattccgttccgaaagtacactcctgaaatggtcaggaaagaagtattggattcaagaggttccatactgtcccttgcgagccggggagtggagataatttggaaacttggattttactggtcatctcttgtgtatgactttttggttggacaggatgaagaaattgttccatatcgtgcccggcagctccgtaatcttttatgtgatctgggcccatctttcataaaagcaggacaggttctagccaacaggcctgacattattcgagaggattatatgaatgaactttgcatcttgcaagatgatgtccctccattccctaaccaggtggctttttccataatcgaggaggagcttggccagcctatagagagattgttcagcaaaatttcatcagagacaatagcagctgctagtttgggccaagtttaccgagccacacttagagaaactggcgaggatgtcgctattaaggttcagagaccagggattgaaccaataatataccgagatctattcttgttccgcactttggcttcatttttgaatgggattagtcttcagaaactagggtgcaatgcggagcttattgttgatgaatttggcgaaaaacttttggaagaacttgattacactcttgaagctacaaatattgaggacttcctagaaaattttaaggatgatccaactgtcaagatacctcaagtgtataagcagctttcaggttcccgtgttcaggtgatggagtggatagatggaattagatgtacggacccacaggctataaaagaagctggaatcgatatggaaggttttctcacggttggagtgagtgctgctttgcgtcagttactttgatttggtcttttccatggagatccacatcctggaaatatttttgcaatgcgtgatgggcgtattgcttatgtcgacttcgngaatgtggccgttcttagccagcaa

SEQ ID NO: 165874 - DNA, 386 bp, Zea mays
  Clone ID: MRT4577_82861C.1
gagcttccattctttgcgtccaggtgaggcttgggaagaatggagttgaggaagtgcttgggttgggcgagctgtcggactttgagaaagaagggttggagaagctcaagagcgagctcaagtcttcaattgagaagggtatcaagtttgcaaatgagaactagacaaggccattttgcagattatagcaccaattgagacctgtagttaccggatgttctgatttcattctacccttttctgccccttttgtgagggagtggaaggatctaagctctcgtacaataaaaaacctggtggcttttattgccaggcaacatatagcttgcgacatagagatgtcaagttttgaactgaaccagttgtttatgagctttctgcctttt

SEQ ID NO: 165875 - DNA, 536 bp, Zea mays
  Clone ID: MRT4577_82862C.1
tcgtgtctgcaagacgaaactagctgtggagtgcataattgcagccctaaaggctgttggatcattcatagaatatgtcaatgatggaggtgacattgtaaaaatgtttcgggattttgttcccagtatcttgaatatatcaagacagtgtcttgctaatggagaagaagatgttgcttccattgcgtttgaaatttttgacgaactaattgaatctcctgcaccacttcttggagactctgtgaggtcaattgtgcaattctcgctggaagtttctgcaaaccaggatttggaaataaatataaggcaacaggctatccagataatttcatggctggtaaaatttaaagcatctttcttgaaaaagcacaagctggttgtacctatcctgcaagttatgtgcccattgcttacggaaacagctaatgaagatgaagattctgatctagcagcagatcgttctgctgcccgaggtcattgatacaatggctatcaacttaccaaggcacgttcttgcaccagttcttgagtttgct

SEQ ID NO: 165876 - DNA, 794 bp, Zea mays
  unsure (1)..(794): unsure at all n locations
  Clone ID: MRT4577_82863C.1
cggccgggnaaaaaaaaaaaaaaaaaaaaaaaaactcagtctcaggttgcagacctcccgacgccggccgtgccgcttccgtcctcgctttcctgtcaccgtcgccgccgactgccacaacctctttcccatccctctcgtccccatcctctgccgccgcccccatcctcgccgcggctcggctggtgcggagcggacggacggagatccgccgacctcgggctccgctgcgtcatcgctacgccggctgaaggagtgaagatgatagacatggtgtctgctgttgaagagcttagtgggttaagctctaaagaacttaatgagatgctgaaggagtcagacaactttgttttgcagtccaaggcagaaggcggaggtccaaagcagacacttgtggacatggaaaaactcgtgtcctcgcttcctcttcatctcattgctgtatgtttggagcttcggcaaggccccgatttgacatatgtgcttcgtggcatgcgctttttgcatagtttgtctgacctagcatcccgccatactagactggagcaggttcttcttgatgatgtcaaattatctgaacaagtcatggatctgatattcttcttactttctattcttgctgaacagaagaaggtttcaatgggttaaaccaaaatgtttttattgattcatgtgtgctctgctttgaattgtcatctgatactaattctggtacagctgttgttttaattaggagaatatgttggcgcttctccgcttgtgcatgcgtcacttgtagcagctagtcttcatct

SEQ ID NO: 165877 - DNA, 571 bp, Zea mays
  Clone ID: MRT4577_82864C.1
aatgcccttaacgtctctattgctctcacatataaccttgtctccatgatacttgccaacttctaatcgtgctgccactgcgatgatcgcgcgccacgccgacagcctgacttctcctcgccgacaagaggcgcctccatgcaccctctgtgagtacgaccctaactatgaggccaaatctcccgctagagagacctttctacgaccctctccgggaggagcgcatctgacgatagaccctatactacacagaaacaatcttgccagcagtgttagctggcctactacagcctgaccttcatgacgatcctcgcaaggaatggataatgcaatcagtggatgctcctgctagatgtgatgagacctctactgactaatcatgaggggtacatctataggatgtccatcagaaaactgagattcagtgaagtgcatcgtctacatttggaccattatcactattcccttagaacttatccggcatgatagtgctacacctgtagttcatcaacatgctcgttatgacatatgatctcagtcttcatgaacgttctttagaaagagctacact

SEQ ID NO: 165878 - DNA, 330 bp, Zea mays
  Clone ID: MRT4577_82865C.1
ttttttttttttttttttttttttttgtggttggttttttttttttttttttttttttttttttttttttttttttttttttttttttaaggccccaaaagctattgggttttttagaaatttttgggacaggtttattacgcattcaaaataaatgggttggcccacaaaaaaaatggggtttggaaccttttaattggggctgggggggggaacatattgtattacaaaggggggacatgaaaaaacatgggcccttttgtttttactttggggcgctaaatataaaaaatacttggacacatgagttgggtcattgccccttttatt

SEQ ID NO: 165879 - DNA, 301 bp, Zea mays
  Clone ID: MRT4577_82866C.1
gggcgattgggttcctcgaggccggccgggagacctggatcctaccatctaccagcgtactcagcgagcgagaggagcacacatgcagctatgtatgataatgagtagcgccgaagaagatggaggactccatgatctcctcgtcagctctggcggtggcgtctctagatctgtcgcatctcgttcgtcgagtgtacaactgcgactgctgttgctcgatgaatatgaatgcgacaatgaaatgcaatccattcggccaagataatccttgtttccgaaaaaaaaaaaaaaaaaagcggcc

SEQ ID NO: 165880 - DNA, 292 bp, Zea mays
  Clone ID: MRT4577_82867C.1
gggatgaaaaaagactttctaaaatctcattggttacatgaaatacatacatttcatccagggttttctaacagcacttacatgagtgaacaacagattttgagactgctttaaatcagtctacatcacttaaaacaagatttatcgttcaaaaactgtttatctgtcctaacaaaaatgatgggttaaaaggtcgatcgactgttacatcaccttttcagtcaagttttggctttcctaaacagaaaacccttttatctccccacctttttcttattaataaacccttttt

SEQ ID NO: 165881 - DNA, 266 bp, Zea mays
  Clone ID: MRT4577_82868C.1
aattataaaaaaacaatattgattattagttggattatataatctagatacctagattataataatccataagcagatcaacatttgcttatataatctataagctagattatataattatctaaggcggtgtttgtttaaaattataatctatttagattatataatctaacaaattataaactaagtgtgaatataaaattggctagaatgtataatgaacaaataaggcctaagaagataacccattacatgtgcgaacagga

SEQ ID NO: 165882 - DNA, 2606 bp, Zea mays
  Clone ID: MRT4577_82869C.1
ccacgcgtccggtgatcgatatgatatattcagatgtctatctggagatagatgggtataataaacaacgtctttcttacatttacggcattctttcagcatgtcattcatatctgaagaggaccaatgagatagaattgagatacccagtgcatgtgcatacccataagcttgaaccatttcagtactataaggtacttgaggaagagtgcaagaaagtctgcttcattgatggcttgaactttaaaaacattgctggactggataatctgaactttgagcatttcaatgacgaagtatgcaagaatatccatgcctccaccgtcactgctatagccgatatggtacagtctcttgtgagtatgtatgttgatgtactggccaagggactcatatcacaacaaggtgtttacaagcactatgttctggggttgctggcatcacttgaaggccgcagtgaagcacaatcgaacaacacagattatgaaaagttgcaggcttccctatgcgaatttgagttgaactatgatagttgcagggagtacatccaagctcttccagccacagatatttcatatattgtaagaaggtattgcaccctttgctttccatctaacttagcacgaagccatccacaggaaccttcatggaggaaacctcttgccacgctactagaattttggtctaaagttgttgatgacataccgggggattcaattgatgcttgctcatatggaagaacagactacttaaattcaaataggttatctctgtgcatgagagctttcaggcagctattaataattgatgagatagcactgcaccaaggttgggatgccatttccatgtatgtaaaagattgccttagaaatggaaagatgatggaaacaccatgcttttgtcgagctatgattctatcaggctgcagttttgaatctgtagttgaagtatactttggaggacaaggacagttagggagtgagaatgcagatccaagcaattatttggacctcttagaactttataatgctgctacagaaaagtgtttgtcggatttgagtgaggaatcttgcgaatatcgaatattgcttcataatttgctgtcatctttgagccggtcaacgggaaaacatgctggtgctctagaaatggtcagatctggtgtttgggggaagttaatccgctattcggaagacatgcagctagagagccaattacgagtctatgcactacagctgatgcaatgtatcacaggaagaaaccttaaatctcttccaaatgaaatggtgtgtcaggttgagccatgggaatcatggtatgagcatggagcgggtgctgccatagctgatgagagtatcaactcctctagcagcatcacagggactcttgtcgcacttagatctactcagatggtcgctgcagttctgcctgacgctaatatcactccagaaaacctagcaactcttgactctgcagtatcttgttttttaaaattgtcagaacgtgcttctggtgtgagcgttgctgtttttgaagcagtgctagaagagtgggagcaattgttctcccccaaagaagagcatgttgcacctcatgaatcaccaaaagaaacaagtgactggagtgatggatgggatgatggctgggaggcgctaccggaagagttggagagtccaaagaataaacaagagggtgtgttgttatctgtgcatcccctccacagttgctggatggagattatcagaaaacgtgttgaacttggtgagctgcacaaggtacttgaacttctagaccgagcatctttgaaacacagcgtgttcctagaggaagaagaagcacacagcttggttgaacttgtatctgctctggactgcttcatggcccttaaaactgtgttgctactcccatatgaatctctgagactgcagtgcctgcagatggtggaggtgaaaatgagggaaggaatcgtgtccacctcatcaaatgctgatgatcaggagctccttgccttggttctttcctctggaactatgcagaagatcatcacagaagaggcatactctaaatttttctcttacatatgccatcttgtcgggcaccttgcaaggtcattccagactgatctcctcgtacaatggaacgaagcaacatctaagatcaacagatctttactgttcgctagagttctgtttccatgttttgtatctgaactggtcctcggagggcagtatcttctggctgggttcgtcatctcgagatggatgcacacacatccatctctgggcctgatggatatcaccgagaccagtgtgcgatgcttccttcaaggccaggttgcccaacttgatgaggtgggagggagcgatgctgctctcactgacggtgaagtttgtgtaaggcacacaatctccaccctacagccgaaacttgtttctcttctgcagtctgcattagctctttcgaacaaagagttgtaggcaaagtcctgtgtagttaacttttacactcttgctgtactaccggtgtacctgtaacataaaatgtttttttagataatggtaaaagtgaatggtggaagatttcatattgttatcccaaaagcggcc

SEQ ID NO: 165883 - DNA, 152 bp, Zea mays
  unsure (1)..(152): unsure at all n locations
  Clone ID: MRT4577_8286C.1
cgctaactcatattcaccaacgtcgacaaggtccacgccgtgagagtccttgataggctggtcctggatgactgcttcgatgggatcatctgctnctagaccctgaatcctccgtgcccgcctcagggagaccgggatgccgagatcttcga

SEQ ID NO: 165884 - DNA, 2118 bp, Zea mays
  Clone ID: MRT4577_82870C.1
ggccggccgggcccttctcctgcagccatcagaaaagggggcaaaaaggcccccgaattctcctcgcccgggcacaacctcgctccagagtccaggccagaccagcaggccgcctttccgctcgagcacccacgcaatcatcaccgccgtcttcctctcgctcttctcttccccttccattcctcggcaccacgtcctcgggaacgccgcatgccctccgcacaaggcgccgcctgttcccggtgaccgcggggccgagatcggcgcgccatggccgcgcccggaggcctggaccaggactgtgcacaggacgccgccattaagctcttcggccgcagcatcccggttctccactcctccgtcttcgccgccaccgccgcggccgaatccgaggttagcaccaaattagcaaatgatgttagaagcaaagatggcatgccatgccttccaaacatgtctttgattgtcaaaacaaatcccttcccttccaagagcaatatgaagaatggtttacaggcaatcagcagtcagcatgggaaaatggaagctgattccaactctgaggaagctaagaatagtttacaagctatcatcagtcagcctgggaaaagatacgattccaagtctgaggaagctaagactgaatctggtggatctggccaagagaaggtactcaagaagccagataagattctgccttgccctcgctgcaatagtatggaaacaaagttctgctacttcaacaattacaacgtgaaccagcccaggcatttctgccgaaactgcaagaggtactggactgccggggggactatgagaaatgtccctgtaggttctggtagacgcagaaataaggatccatctcatcaccatcatttcaccaaggtgtgtgattataccatagctactaatggagatgtttctgatgcaactcagcgccagtccgttgcagccaagctatgtctccttcaaggttcagggaaacaaaatgaaacagcgtgcaagtctgtatctccagtcagtaatattaaagagcagaacaatgctgaccttatttccttggtctctggtgataataaggaagagaaatcatgtgcatcctctgcagtggtatctggttcctccgaaaattggatgccagaaaatacagttaaaaaggaggaggataatacttcagcgtatggtaatggtgtgaaattacctgatcacaaaatgcagtctcaccatgctggacccgtttcggtgttctccagaaatcctgctgcagtcatggcgactaatcagtgctcagaagatggtattcatacgccgggaaatggtacggtcagtcctctttcactgccaccactacccatggtaccaaccccaggaatttgtgcacctgctgttccattccctttccctctcgtgccagccttcgtgagctgcattcctggctggccaagtggactatggggtgcaccatggcctggaagtagtgcccctacattactatctcttcctccaaacggtttagctggaagcaactctggggtgttaggaaagcatacaagggtagctaatttgcaggaagaacagaaggcagaaaagaagttttgggtccctaaagctctccgaattgacaacccagaagaggcagcaaagagttcgatctgggcctctcttggtatcaagcctgatgacagaatcatattcaagtctttccagtccaaggatctgaaaaatagtgcgactaagatgccagaatccctgcaggccaatccagcagcgttttcccgctctcagacatttcaggagagggcctgatacaaaaataaagtgtcctcaaaacaaaggataccagaggatggtcaatgttcctatttaagctttttcttgagttgatctgtcgctaagcgcagcagtttggcaatcaactcaggcctggccaagatttacattttttttctttctagcgatagctaggttggtgtgaagattctgactgctcaaggagcgcttatgtaaatacagtaggcctgtgaattgatgttgaatgttgatagtcttttaccctggcaccggttaatgttttaaaaaaaaaaaaaaaaaaaaaaaaaaaaaaaaaaaaaaaaacaa

SEQ ID NO: 165885 - DNA, 561 bp, Zea mays
  Clone ID: MRT4577_82871C.1
tttgttgggggggggggtttttttttttttttttttttttttttttttttttttttttttttttttttttggggcggcccaccggctggaagctgaccattttattccggggggggtcatcagatcatcacattattacattacagggggttaggggggggagaagaaaaaacaataagcttattatatattattattaggggaaaaaccgggggggggggaagcttaaatattaactgctgctgaagtagggggtcattttgggggagtacctatcccaaaacatgaggccaccggagttgggcgccttttgggcgaactgcaacacgttgtaataaagggccttttggaacaagtaggggtccttgtccgccttgggggaagccacaacgcccacaaaaacccgggtgggcgggtaccccgcggcccacttttcccacccctcccgggcggaccaagggcacttgagggcgccctacaagcggacctggacccgggaaacaagccccgtggggagcgccccctgcgcccccgggtccgggtacccccaccgcaccgggg

SEQ ID NO: 165886 - DNA, 429 bp, Zea mays
  unsure (1)..(429): unsure at all n locations
  Clone ID: MRT4577_82872C.1
ggccgcttttttttttttttttttggggggggcgggctgtatttgtttttgnntntgtggggggggggnctgttcgggttgttgtgagtgcgtgtgcttgcnntgtgcggggcttgcgtgtgctccttgtcggacgagcgtngggcgggttggttggttgtggnttgcacgtgcttgcttggggggggggaggccnnttnttnaaagcatgtcatgcgccggcctatcctgacgatatatgcagatgtgttgcggacgtggttgatttattgagtgcggatataggtgggtgatctgactttggcacagggggcccgctccatatttttgacgtggggagcgtgggctcagtgggctttggtctttcttggggggttgtcggtcttgagacaacgggtgtgggctttgtgggaaatgggatgtgggtac

SEQ ID NO: 165887 - DNA, 297 bp, Zea mays
  Clone ID: MRT4577_82873C.1
cggacgcgtgggcggacgcgtttgaaaaataaaaaaaaaaaaaaaaaaaaaaggaaaaaagaaaaattaaaaaaaaaaaaaaaaaaaaaaaaaaaaaaaaaaaaaaaaagaaaaaaattttataagttccaagtttacttactctttcttgcaacgtcatattttttttatagtgttacctaaatttattttattgcccgattttttaaaacgtcctgatttgaaaaaccttggagtttccaaacttaatggctttatagtacatattcgtttggtaacatggcatattatctaaaa

SEQ ID NO: 165888 - DNA, 364 bp, Zea mays
  Clone ID: MRT4577_82874C.1
atattgtacggaaacatccttttgatacatgaggccgggcggatccattcccgaagaaacacaaaccgcacattttacacttcctcataaaaggcacgtaccggggggtgtcgtttgtacaagcataaacactgacgataaaccagtcacatgggtaggcccggcatgggggcctacatggtggactttatatgggaacgcataaaccaggcattggggtacatgagtggttacacgcaccaagttctgttaaaaagccagaaaaggtgtgtatagcacaaaataaaaaattcttgcgggcggttgatttcctcaatgggggggagcgcacgccgtgggggggggccatttgggtgaacatctg

SEQ ID NO: 165889 - DNA, 485 bp, Zea mays
  Clone ID: MRT4577_82875C.1
ttgtttttttttttttttttttttttttttttttttttttggacaaaaatgttacaatctcaaataactctcaaatagccacaactttttcgggggccccgaaacagttttcagcgaaaattaattgccgctccctaggtttaaagggaaaacagcccgtgggggggggggttttatttgggcagttttacaaacaggcctttttaaagaatgagtccccctcgtcacaaaaaaatgggggggttcaaaaatgaatttgggcaagccccctaacgcaaagacaacaccaattttcccgatcccgagctttttaagcagttcctgttttaacatgcatgcctttttgtaaccggtgctaattttcgaaaaaggggaattctgatccgggggagttagctttttgtttgacagggtatttagcctgactgttcaatcaaaatgagaattcaacatccttcgggacaaacatagctcacacagatcaa

SEQ ID NO: 165890 - DNA, 183 bp, Zea mays
  unsure (1)..(183): unsure at all n locations
  Clone ID: MRT4577_82876C.1
cgcatattttccacattgtaccatggaccgatgcatcattagaagctggttgttttcnnncnncctccctccaccacccaatgtgtaccgcgtggagcccattgacttccgggagctcgtgcataggctctctttctcctgtactcccaacatctccttcgctccttggccgacgcaccggaa

SEQ ID NO: 165891 - DNA, 624 bp, Zea mays
  Clone ID: MRT4577_82877C.1
cctcgaggccggccggggttatatttcgaaccattaccgcctacagatctgctggggcgtcctacttctcgaatgtgagtgatggggagagacatcgacacctcggccttgatagctgagagaggaccgttgatgaccttcatatgcacctcttctacttcaacttctgctacgtcctcggctacgttatcatgcatactcttccaacgcgctggcaagacgacgttagaggagctcgccgagaagaggagggactgtgcgcagacagaggtcgctatccacgatggtgaccaggactaccggaatccgaacatgatcatgctcatggtcatccacatgatcgagtacccacacacgcttccgacatatggagcgtctccaacttattgatgacggaggtttcgccaagaattgcatccggtatctatgactcatggtgctgctcgaccagcggcaggaggtactcatgctagctaccaactctctacagcaagatcgttacacactcaaaccagatgcattgctggacttgcactcatgtgcccttggcaatatatgttctcggtgacatggtgacgcgatcttgctcctgaattggagcggctgtaacatcatactgaccct

SEQ ID NO: 165892 - DNA, 2859 bp, Zea mays
  Clone ID: MRT4577_82878C.1
ctggtggctgcaacttgattcagtgacatatattagattttttcccataaggaatggcatatatataatagctataatgctggcatgctgcattggttacatgcaggtagcagagttgcttgcgtgcgaaggccgcttggtctggagttaagcgcgtgttgtaatggaggggcgtgggaaccctccgcacaccaccactgatgctgtgatcaagaagccaaggagcgtcgcatccaggaagccaaggtccacggagcagctcacgtatgagtacaatggcatttgcccgccatcttggagcgctccccatgacgatgacactggcgttggagctggtggacatcggaggaaagagctacacctaaatagccctgaaatgaagggctccatggctcataggagcgacgtgcccaggaagataaggagggatgatagatctggaggcgaccatgatggccatggtcggagcagcaaagcaaaggatgctgccaagcatggaagtgaaaatgttcttgccctagagtgcacagcaagaaacaatggatcccctgataacccacagttggtccccagagatgactctatgccttgtgaaaataggtcgagaaaagtaaagctcaaagttgttagtcgaaccctacatgccaaaaatggccaggatgctggtggcagtggtattcctgccacgttggatggctctattcatcagtacaagcaaaaggattctggtggccacacaaacaaagagacccatggtaatcgtgttgaaggaaaacatggcaacgggcatgaaatttttccatcttctgaccttgttcgcaagagcaaaaggattcccaagaagaaaacacttgacggagattctgatgatgaagatggtgaattacgctatctggaaaaactcaaaggggctaaagttgcaccagatcctgtgaacactagccataaaggttatgattttggtgatgatgctctcaagaaaaagaagctatccaagctttctagaaacaagagcaccccatatgaagtggacgacgacttcagaatgtctcgatctggcagggatggtaggaagaagttgaatttaggggatgacaatgagtttatagaagaggaggaatctgagatggatgaaaagaatgggctaaaggaacctgattcacctcaaggtgtgaagattgaaacccctggtcttacaacaagacagcgagcccttcaaggcaggggtggcaatggtgaaagctttattgagtttcctgatggattaccagcagcttcatcaagaaagcaaaaggagaagctctcagatatggagatacaagccaaaaaggcagaagctgcgctgaggcgcaagatgcaagttgagaaggcagagaaagaacagcaggctgaagcgatgaggaagatactgggaatagattctgagaagaaaaaagaagagaagaagctgaaagaacgagaagagagggaaaaacaggcaagattggaagaatacaggaaaaactgcgtccagactgtcatgggcccaactgggactgtgattacattccctgagagcatggggcttccgagtatatttaactccaaacctgtcagctatccgcctccgagggagaagtgtgcaggcccatcgtgcacaaacccgtacaagtaccgccactccaagactctggtccctctctgcagccttgcttgctataaggccgtcgaggaccgtcctcctgcccaggggagtgaaggtggtggtggccagggaagcgatgctgggcagggaactgatgccgcccaggagagtgctgggaagcaagcatgatgaatctagctgcctgacgcgattcaaccgtgaccgtcagttggctggagaagtgtaatgtcgacatggccaggtcgctggtgtgttgttttcttggtctctcctctggtagtgtgtcgtctaacaaccaatcaacctgacaaaagataggtgtgtgactgccggtttccttctgcccgtcgtgaaccaagccgggcttcgttatggtggattggatggatcgagtttaaaacctatggtgtggtcggttcgatgtatgagactactctagtcgagaaatatgaagggaaactaggtcgtgggagtccttttcgggctctgggcgtcatgggagaattacgcgtcgcccagcagcagccagcagcccgcgcacccccacccgcgcgctcctccccttccccgacctcacccgcgtcatccacccggcacccccctcccctccacctcgtcacgctcacgccgcacgggcccggcccaaataccctcgcactcgcgcccccacctctcgccacaaaccctaacctgacctccccaccggctcgacgccgccgtcgccggtccgtcttcgtcgtcggcccactctgtgcgaggtagcagagttgcttgcgtgcgaaggccgcttggtctggagttaagcgcgtgttgtaatggaggggcgtgggaaccctccgcacaccaccactgatgctgtgatcaagaagccaaggagcgtcgcatccaggaagccaaggtccacggagcagctcacgtatgagtacgatggcatttgcccgccatcttggagcgctccccatgacgatgacactggcgttggagctggtggacatcggaggaaagagctacacctaaatagccctgaaatgaagggctccatggctcataggagcgacgtgcccaggaagataaggagggatgatagatctggaggcgaccatgatggccatagtcggagcagcaaagcaaaggatgctgccaagcatggaagtgaaaatgttcttgccctagagtgcacagcaagaaacaatggatccccctgataacccaca

SEQ ID NO: 165893 - DNA, 572 bp, Zea mays
  Clone ID: MRT4577_82879C.1
gctccgcagtcttcgtgcgcagcttggctctcttgcctgcttcttgcccagcctgccgtctagctagtttcattcatctatcagacaggtcccgctgctgctccggccgctcggaatggcctcgccgtcgacagaagccccacctctcccgaccctccgagcacgtcatcgcccacgatgacgacgacgaccacttcatcgcagaagaggaggaggatgaggagtgggacgacatgagcaagcgcatgtcgcgcctgtccatggaaggttccgaggcgggcgacgccgacgacgaggacgacggcggagaagatgagggggaggaggacgacgacgagttcgacgacgtgcggtcggacgtgaacgccgccgccacgtaccgcgcgtggcctccgcgcgacgagccgcagcaggccccgtcggcggcgtcgctcccgggcacgccggaccgcggcgcgcaggcgccgtggtggcccgggccgagcgccaaggtgtacgcgagcgagacggaggcgcggaggccgcccggcgcggacggcccgcgctgcaggcggaagcggcagcagatggcg

SEQ ID NO: 165894 - DNA, 592 bp, Zea mays
  Clone ID: MRT4577_8287C.1
cgttctcttcctcttcgcgctggcgctcacgcccacctacgtcttcaccgagcgcctgctgctcctcctcggccagacgccggagctgtcccgcctcgccggcgagatgagcgtgtggctcatcccgcagcacttcgccatggccatgctgctcccgctcacccgcttcctgcagagccagctcaagaactgggtcaccgccgccaccgccggggtcaccctcgcgctgcacgtcctcgtcacctacctcctcgtcacccgcttccagctcggctacgccggcgtggtcgtcgccgccgacgtcgcctggtggctcgtcgtgctggggcagttcttctacgtcgtctgcggcggctgcccgctctcctggaggggcttctccgtcgaggccttcgccgacttctgggacttcatcaagctctccaccgcatccgacgtcatgctctgcatggagaactggtactacagggtgcttgtgttgctcacggggtacctgcccaacgctgagatcgccgtggacgccctctccatatgcttgacgatcaacggctgggagatgatgatcccgctagggttcctggcagacactggt

SEQ ID NO: 165895 - DNA, 113 bp, Zea mays
  Clone ID: MRT4577_82880C.1
ctcggcggcaccgcagctgcctgcgcaggcaggggaacggagcacaggaggcgtgggcggaggagccacgtccgcgcagacgcaggggaacgtggttgtatccaacgtaggca

SEQ ID NO: 165896 - DNA, 290 bp, Zea mays
  Clone ID: MRT4577_82881C.1
tcggccgggtgcgtgatccagagaggcttcaaggcgaactcaagataaaagcattggattcaccataccttgaaattataactgacttttttttggaaaaagggggtggcgaagaaatgaagtttcagttgatctactatggacgaggtttaagttactgatggtctgtaactgtaacagtctctcatcatgttttgtctctagaaccaaacaaaagacatttcgttttaaaaaaataaaaaaaaaaaaaaaaaaaaaaaaagcttgtacctgcccgggcggccgctcga

SEQ ID NO: 165897 - DNA, 236 bp, Zea mays
  unsure (1)..(236): unsure at all n locations
  Clone ID: MRT4577_82882C.1
angnttttgatttttgatttttgaagggngcgagcagaggaacacaagtggaaaaaccttccggttgtaaaaggggcagggtacaaccggaattacaattcagcatgaaccagccccagggcccgggaggattgtgtaaagggaacgagcgtgcgccaagaggaaaaacccgaaagaggggaacctagcgggggcgcccaacttttaaaaatccggcaaaaaaaaaaagtgttttc

SEQ ID NO: 165898 - DNA, 414 bp, Zea mays
  Clone ID: MRT4577_82883C.1
agtgaatgaatggtacgttagggacattccattcatgttagggaatgaatgctacacgatgcctacggagacgcgctaccgatgtacaaacaaggtaggtattgtttgtgaggggggaggatccatccaattgagcttcgcggtggaagaacggccggcggtcatggatatcaggcgaccacttattcgatcaaggagccgcgcagctgcgtcgacatgttaccgccgccttggtacgactccaccttgaagtcgacccagctgcccagaggaccactcatatacctgtacactatgtcgtccaccatccactcttcagcgacctgtgggctggccatatgtcggtggatccgttctgccgacaagctctgcaagaccggcgtttgcgtggaccacaggccgaatccaccggtg

SEQ ID NO: 165899 - DNA, 352 bp, Zea mays
  Clone ID: MRT4577_82884C.1
gtccctatcgtgtgtcgtccaaaggcatcaccccccacgtctctcccataccatccgggtgtagatttcaaatccgcgtcatacctcatgtctgggtctcctgcttcgccgacagttgcctccttcagtcgagatccgacgctggtgagaccactgaccatggaggccatggaggatctatcacagctcgacgagtcgatgcgccaggcgttgtcacttactagctacgacgacccctccgacgacgccgcgccgcgtcatcacaccagctttctcaacgccgtcgacctctacaacgtctgcactgacaagtccgccgtgctgaacagcctcatctgccacccgttcttgt

SEQ ID NO: 165900 - DNA, 321 bp, Zea mays
  Clone ID: MRT4577_82885C.1
actgacccgcctttaagtcaagaatcacaagttggacaaccggggcttttgttggccgcccgcccggaccaaggttggggggttggggccccaagggcccgggccattggttaagcccgcccggccgacccgccggggcgggccgcctaaaacttcctttccaaacggccggtttgctgaatcctttgcggacaatttaaaacgcgtcggggcattgtaggtggcaaaggggcctttgctgcccacgtctatggtgatccagcccgtggtggtacggtttcgttttaaaaaaaaaaaaaaaaaaaaaaagggtggcctttt

SEQ ID NO: 165901 - DNA, 707 bp, Zea mays
  Clone ID: MRT4577_82886C.1
atgcctccgagaggaagaagacgccgccgtacttatcgcagcacaccagtagaaagcccacgactccacaagatgaagtatcgttcgcgaagacggctgacagaggaagatcatcaccctcgaggccaagagccgccgacaccatccaccatgacaacgtccaagatacaacacaaggaaggaatcccgccgtagcaaagacggtgatctttgccgtatatcaggtgtaatatgcccgcaaccttgcggagtattacataccttacgacgatacgcttcacctcacgcttacgctcacagcgggcatcatcgacgcctcactgcaagcgctctgtctgatgtataagcactacaacatgatctgccgaatatgctatgcacgactgcaccctagcattgcctactgccgcaagaacaagtgtgcgcacaggaaccatctgatgcctctgaataacatgaataactgaagagatgatcctattcagatacctgctacaagtgctgtcgctgtattgctgtgatcatgggtgaacacgagtgtgtttacccaacatatcgagacgtctgttatgttgtaccttggtgacgatgacaccatactatataacaatcgcttctctgcatattggagacttggccactgctcacccggtaagtgtcatatctacggaagtatcgtgagtgggcaaccggaacagtgacctgct

SEQ ID NO: 165902 - DNA, 264 bp, Zea mays
  unsure (1)..(264): unsure at all n locations
  Clone ID: MRT4577_82887C.1
gctgcctgtacgctgcagcggtgagcctgctttttttttttggtacatcgccgcccccagcttatttctttttctctctcgtggcgacgccggggcggccgtcgctgccgcctacggtgcccaggtcttcctgccccccccttcgccggcgccgagcacgagaagaattgtagttgcatcctaagcatggactgtggggggggggaggttnataaccanaattaatttactataactcaaatattcattcctcaaaatacccca

SEQ ID NO: 165903 - DNA, 441 bp, Zea mays
  unsure (1)..(441): unsure at all n locations
  Clone ID: MRT4577_82888C.1
aagcacaanaggggaccaacaagggcagccaaaaannnngccaccggaggcaccnnggacanacggcaagggcngcaacggcgaccanaaacccacaangcacacaagcaccaaaagcnacccnacnacccccgaaccacacaccagcggagacaacggaaggagaaaaccgaagacnacaacccaaaaggaaccaacaggcaancgcagcnggcaacaaaccagaaacaccgcggaaccaccaacaaacaacagcccaaacacagcagagaccaaaggagcagggagaggcacaaaacaagagggcacaacaaccacaacaacaggagcaagcaaaccaggcngccaacacagagcaacaacagagggnggcaaacaaccaacaagcngcaaggaacacngacagaagaaagcaacaacaacaacaaccaagcagacagg

SEQ ID NO: 165904 - DNA, 1595 bp, Zea mays
  Clone ID: MRT4577_82889C.1
ggcgattgggttcctcgaggccggccggcagaccagtcaacgtcacctccggcagctggctaacggcgtgaccttccccctcaccgccctcctcgtgcagtctccgtcacccgcgacgtcacagctgcggcagacgccgtcccacataaaaccggcctcgccgccggccggcccttcccattcccctcccctgtcgtcgtctcccctcacccgaagccccgattcgaaaccggcggcgttcgatttggggatttcggcgtctcgctccccggaatttcttggatctgagtctgtccgccgtcttcgatttgcggctgcagtgagcctgcgagttttccggctctgatttggtcggggtcttcgatttcggggatggcgtcgtctccggtgtcctactggtgctacagctgcagccgcttcgtgagggtatctccgtccaccgtcgtctgcccggagtgcgatggcggcttcctggagcagtttacgcagccgccgccgcgcggcggcggcgggagcggccggcgcgggacgatgaacccggtcatcgtgctccgcggcggatcgctttccgggttcgagctctactacgacgacggcgcgggcgaagggctgcggccgctgcccggtgacgtccagcacctcctcatggggtccggtttccaccgcctgctcgaccagttctcgcggctggaggcggcggctccgcgtccgccggcgtcaaaggctgcggtggagtccatgccgtcggtgacggtggccggaggtggtgctcactgtgccgtgtgccaggaggcctttgagcccggcgccgccggccgggagatgccgtgcaagcacgtctaccaccaggactgcatccttccctggctctcgctccgcaactcctgccccgtctgccgccaagagcttccggccgcagccaccccagatgcggaggcggatgctggcctcaccatatggcgacttccacgcggtggattcgccgtagggaggttcgccggagggcctagagagcagctcccggtcgtctacactgagctggacggcggcttcagtaacggagttgggccgaggcgggtgacgtggccagagggagatggccaagtggatggcggtgaaggtcggattcgccgcctacttaggaatctatttggctgttttggtcatggcagctggccagctagttcatcgcagtcccgtagtggctgagcacagttttccttggtaacaagttttcaattgatagcactgaagaactagggctagtgtaagaatggaacccagattataatttcttggggcttttgatgtaaatgaaggcctagcattcccccttcctttgtctcatctaagaattattaagagatgtctatgagcaaacatcttggagcgagctttgcaaccaaattaggccaaacacaagtgcaagccttcaagaaaggaatagcaatgagtgttttggggaaataaatctttttcaatattttaggtagagagaacaattgttgtatttgcaaacccactgttcgtgtacatactggattggttgaacatgaattcccattctgctatgtgctatatcttatattgacatt

SEQ ID NO: 165905 - DNA, 300 bp, Zea mays
  Clone ID: MRT4577_8288C.1
acgaaatactcagatgttatattacatagcgtgtttaacctcatgacgtgcaccacaatctagtggccgctgtccgtatgcctagtgataagcaccgccacaacctagacgctaaggtgatagacagcacaatggacagcagtgtatgctacatctacgtgcagagctacctatattgccaatgcgttgtctgacggtgaacagctctttacctatactacatatgagctagtcatgcttacacaggttaccagagactgcatgccatgtactattggagagatacgtcaattttagggt

SEQ ID NO: 165906 - DNA, 1461 bp, Zea mays
  Clone ID: MRT4577_82890C.1
attgggccggagctcgccggccccctcccgtcccgtcccgtcccctcccctcccctcccctccgctcccgtcgtctaccctcactcgaaactccgaatcgaaaccggcggagttcaatttggggatttcggcacctcgttccccgaaattttctggatctgagtctgtcggccgttctcgatttgcgtctggagtgagcctgcgagttttcaggctcgatttggtcggggcctcgggggtcccggtcttcgatttcggggatggactcgtctccggtgtcctattggtgctacagctgcagccgcttcgtgagggtatctccgtcaactgtcgtctgcccggagtgtgatggcggcttcctagagcagtttacgcagccgccgccccgcggcggcggtgggagcggccggcgcgggacgatgaacccggtcatcgtgctccgcggcggatcgctttcagggttcgagctctactacgacgacggcgcgggcgaagggctgcggccgctgcccggtgacgtccagcacctcctcatggggtccggtttccaccgcctgctcgaccagttctcgcggttggaggccgcggctccgcgtccaccggcgtcgaaggctgcggtggagtccatgccatcggtgacggtggccggaggtggtgctcactgtgccgtgtgccaggaggcctgccggcctggccgggccggacgggagatgccgtgcaagcacgtttaccaccaggactgcatccttccctggctctcactccgcaactcctgccccgtctgccgccaagagcttccggctgcagccaccccagatgcggaggcggatgctgggctcaccatatggcgacttcctcgcggtggatttgccgtggggaggttcgccggcgggcctagagagcagctcccggtcgtctacactgagctggatggtggcttcagtaacggggttgggccgaggcgggtgacatggccagagggagatggccaagtggatggtggtgaaggtcggattcgccgcctacttagaaatctatttggttgttttggtcatggcagccgaccagcaagttcgtcgcagtcccgtagtggctgagcacagttttccttgtaccattttttcaattgatagcactgaagaactagggctagtgtaagaatgaaacccagattataatttcttggggcttttgatgtaaatgaaggcctattgtctcattaagaattattaagagatggctatgagcaaacatcaaaaaaaaaaaaaaaaaaccaaatttggtcaaacataagtgcaagccttcaagaaaggaatatcaatgaatgttttggggaaacaaatccttggcaataatgtaggtagaaagaacaattggtgtatttgcatccctacaccctactgtttgtgtacatactgaattggttgaacatgaatttccattctgttatatcttatattg

SEQ ID NO: 165907 - DNA, 226 bp, Zea mays
  unsure (1)..(226): unsure at all n locations
  Clone ID: MRT4577_82891C.1
atcacttcttcagactggctgcctgactcgcgtctcacacgctgggcntctatgtaccgtatcatttatccgtaccgccatggtgaggtagttcggatcttacagtggcatcgccacccccgccgaaagacaagcagctcggccacttcccaggctcgtgataagaagcaagacaaagaccccatcccccgggaccacgaaaaacccctgcttgaaaggaagcccc

SEQ ID NO: 165908 - DNA, 532 bp, Zea mays
  Clone ID: MRT4577_82892C.1
aaactaaaataaaaaaaccctttgggcagggcccccattttttttcccgggggggtaaaactgggaaagggggacccaaaccccaaggaggggccccccattaaaaattaaaaaatccaaaaaccttggaaaaagcgaagggggccccaaagggttcccccaacggccgggaatttcaacccaagggcgggaacccccgggaagggaatttttttttggtttccaaccaaaaaaaatttcggggggtttggaaaaatttaaaggccgggcccaaagtgggcaaaaaggccacccttttgaaaccccctaggggggggccccctgaaaaggacccgcggccaaaaccccgggggggtttttaccgaaagaaaaaaaggggccgaaactccccccaccccaacaaggtcccgggttttccccggggggtttcccccggctttgccaagtgggaacagaaggacccgggtttaacccaaacacaggcgggccggaaaaaaccgagggggccaagaagggggggcaggcaacaatt

SEQ ID NO: 165909 - DNA, 294 bp, Zea mays
  Clone ID: MRT4577_82893C.1
ggtggaacagcaccggaaattaacaatctagtgaaacggaaaaagggggccatttaatccatatacaaagtaccaagatcagataaatttattacagagaagaccctgaacaatctgatggtctaccctgtattgcacgagttcatacaggcaccagtttgtgtaccgctccaggatttggacatttatgcattagcataccccaattcggagaggttgacgtgggcctctctggagacatcaaagaatgccccgtaatatgcagcatatttctccacatgagggcggaagaca

SEQ ID NO: 165910 - DNA, 328 bp, Zea mays
  Clone ID: MRT4577_82894C.1
acgatggccctagctctccctcgcattcgctttactcttgctcggtcagagacatccggtggcaccgttagaccgtcctgacgatcctcagctatctagctatggcccagactgttgagctcaacgatgctacgatctgtaacgtctttatgcgagctatcaaacctgtccatgacgagatgagacgcttcatcttctacatacgtatacatcatgaaccagatggctaccgtgaatgtcattgatactccttacgtcctactgttgacttgattcaagactggttaaaatacttccttctctaaggttgacgtcgatacaagtgaat

SEQ ID NO: 165911 - DNA, 624 bp, Zea mays
  Clone ID: MRT4577_82895C.1
ccccccccccccccccccccccccccccccccccccccccccccccccccccccccctctttttttctcttttttccttttttcttttttttttttttttttttttttttttttaaaaagggccggggggccaaacttttattgttcacaaaagcccccccggggggggggggggaaaaacccccccaaaccccccaagggggttttttgttgggttttcccccaaggaaggggaacatggggcccccccaatttttttttttccaaaaaattttcccaaggttctcggggggtttttcaggaaaaaaccccggccaaaaacccagttaaaaattggggtaaccatggggattggggaaactccaacccccaaggcccttgggggaggggttcccaaccataaaataaccccccccattttactttccttggaaacccctcccaggaggtaaaaagggggttcctttccttccccgggtggtgaaactaaagggggggtttttttttcaaaaatcaaccctaaatttttcccccttcggggccaaaaccaaaaaaactttttcttttgcctaaacctggccaaaaaattttggtttcccttttttttaaaacccaagggtcccc

SEQ ID NO: 165912 - DNA, 273 bp, Zea mays
  Clone ID: MRT4577_82896C.1
tcgcacccggtttcacgtgcctttccccaactattcttgcgggtctcgccagccagtgtaaggggtgggtcccggcgtgcttattccccccccccggccaatatcgagcaaggagggaaagcccagccgctgaatgcgcccaagggcgacaagaaagagttccaacagaccgatcttgcatatctgcggaagaagaaagaccagggaaaagcactgaaagaactcaagggccaggcacaaaatggcgcgattggaggctcgggtcttaagaaa

SEQ ID NO: 165913 - DNA, 642 bp, Zea mays
  Clone ID: MRT4577_82897C.1
ggccgctttttttttttttttttttttataactgtgctcctgcgtacatttatctgatatcaaaatgcccccaaaacttgtcaagtgtcacagaaaacgccctttaaaaatattctcaatgggacctatataaaccccagggccgcttataacatcttttatacaaatgggacctacacataaagaatggggaccacacaccacaacctgagggcccgctgataacacaagaatacaaatcttgtttcacaaaacctctgagatgccccaaacctatctgttttaatggggatcaaaacccctattacctgagagtctgcgctatcatacacattttgcctcccaatatctttgatggccaccccctatctgtttgaaggtcacacgacttataacactatttcgcctatgctttagctgagttactcgaaactttactgagaacacactctgagttataacataaactgggtcacaaactattatattttgtatccacatgaaagcccccgcgtgtgactcttgtgtaaagcaccatatcgcggctgtgggtgctgtgaccctgaatacaccttgtgggtggggggctgcctccgtatgggcctctcactgtgtacgaactatatgagagtggctgccact

SEQ ID NO: 165914 - DNA, 768 bp, Zea mays
  unsure (1)..(768): unsure at all n locations
  Clone ID: MRT4577_82898C.1
aattcggcacgaggttttcattgtgatttccaacgctacatttttccttttttcaaataaggctcatgtgctgcttcgaaaatcagttctaagaaggcaaccagggacaacaaacctgataagggaagaaacatgttctggataaatattggcctttgtttcaagactccaaggtaagccattgaatgtaagtactcaatgtttcttttcttgtccagccaagtagccaagtagttgttgtgtctgttagattagtagcccatatgtatctaaaaagattccaaaggacacataaaaaattgtttgcaataatatagatgtgtgctttagtgcccatagacactgacctgctgccaaatttctagccaagatataactttctgagcactacttaatttatctaaaatgcacgatcgtatatgaagtcaaaataaagtgtgatgcacaaacgaatgtatcccatgagctctacgtttcttttcctatgcaatattattgacatcatttataaaaagctacattttgtgtcagttagcgaacatagaatcctattgacagcttctataataagaaaaatcaataaaagaaatgcttggaaaaatggaatataatttacactcattaaattgtagtaatttccttaccttgatataggtgtttggaaattcttccttcaaatcattcangcccttttgccaccacgtctctgtcaagtagatggttgtattagcagaaaagccaacactcctcacgagagccaaaacctta

SEQ ID NO: 165915 - DNA, 532 bp, Zea mays
  Clone ID: MRT4577_82899C.1
atcgcgcaaatacaaaagctctttatttatagacacaatttcacataatgagctcaacattgcaagacacatggagttatgctgtggagtgtggactccctaacaaacacagacacacatttctgctcttgaatcctcttcgtacctgcaagaaattgcaagaagttctggaacacaaacaaagttgtcttgagtatccatctcttgactgctcttttcgtacttgcaaacaaggtgcaagaagttctagaaggcaaacaaagttgtcttgagaatccatttgtcaacaaacagtttgcctactgaaaccatcttcattccttttttttgaaagtcgacgggggaaagactccccaccagatttcattgccttgttcttttgccccatggggcgtaacagattgagtacataaccggttaaactggaatgaaaggaacatagggtagggggagtttttgagcataatgtaatttacctagaactcgataacaccattaaccaggcatctcacatgcctgcctctttgagcct

SEQ ID NO: 165916 - DNA, 405 bp, Zea mays
  Clone ID: MRT4577_8289C.1
ccgacgtttacacaccgcaaagagagaggggcaccggggccactaggcagccccccccaacaacgaacgcaacgacaaacggaggcccctcccacataaggaactaagcggacagccccagaggagccggcaaacgactgtgaaaaaaaaaggctaaaaccaggaaacgacaactatccactttcaacagcaggcgcaaacaaatagcatttgggtattgagcaaggagccggaagcagcaatggccaggctgccacaacgaaaaaagactatgggagctcaatgtcattaccatcagggcagggaacgaccggtcctatcgaaaaaggggcaaaatggcgcgacggggactggatgagcaacaactggaacaaccacaaccacgcaaatcgagccgaaagcaac

SEQ ID NO: 165917 - DNA, 812 bp, Zea mays
  Clone ID: MRT4577_828C.1
ccatgctaatgggggatcgctccgataccacactgtgacagccctcccaagttatcaggcccacatgcaccaactcttgccattaacggcctcagatggttgtgcacgtgtaccgggtaacttaacaaggctatcacgagttcaacaacttgaactcattatcccaaggatctcccacattcatgcatattacagtaatcacactcgatacacacacacttcggagatagagcggaagactttacaaaatatattttacatttccaaagctcaagttttacaacataagaagaattgtaattattacaagtcctgatagtacccaaagtgcataacttattaaaatagttggaagggtgaagcctttccataagatatatacataaacattctaagcttcaaggcctccacatgaagtaactaaccaaaagataagggaataaaacttctccttattacaggaggagatctgagatcttctatcacgataggcagttagatggagtccaccactggatcaatagcactggagtaggttccatcttcacaaggaccaattcttgttcttggtgttcacagagcagaccaaccccagatcacgcacgcaaccggccccagataaggtctgccacggcgagaccgttcccagcggcgttcaccggcggcaccgcggcgttcccgacgagacactgatggccggggagagtaaacaccgacgtgaacatgaaccacaacactcacacgatgcactctcgctagaactcaagaacgggaagagacttttccggccggcctcgagggtcccaatcgcc

SEQ ID NO: 165918 - DNA, 1056 bp, Zea mays
  Clone ID: MRT4577_82900C.1
ctgacagcgattccgtatggtatgaaattggcaggtggcatgcgccgctgctgctagtgctgaccctgacagcgattccgtatgctacaaaattggcaggtggcatgcgcatgccttcgtggttcgacatccacgacgcgcccattacttcaagatccgtgaggggtgaggaggatgtgctgagagctgtccagatcgtgcacaccatgatcgacagggaaatcgcgtccgggacaggcccggaggacgtgttcgtgtttgggctcagccaaggaggtgccctgagcatagcaagcgtgctgctctaccctaagactctgggcggctgcgcagtcttcagtggcttcctccccttcgactcctcctcctcctcctccttcgctgccagagtgacagacgaagcaaagaagacgccagttctgtggatccacgggggcgccgactcgctgatcccggtccaggaaggctggaagggcgagacggggtcaagttcctgcggggactcggcatggcatgcgagttcaaggaatacgacaggctcggccacactctggcgccgtacgaactggagcactgcgagcggtgggcgtcggagaccgttctgggagtgggagaggacgaacacggacgaagacaaggcccggggaagaagaagaagaagggtggcccgtccggggacggggacggggacggggagcaagagcaagtcgttgttctgcggggtcttcaatctcttctccagatagccgccgccgccgccgcttgttcttgttcctactgctctgacaaaccttcttgtgatttctttatttgccttttgttagaagttcttattttcatgtgtaaattttgtaccatttccgtgggttagaaaccacgtttttccaaactcagtcctatggcttactgagaactttcgtgatcttgaatggctgatcagaggagggtagcctgatagaaccaatgtcctatggtgtcaaactgttgttatgtagactacacatccaaattaaataaaggaaaatgaagaacagtttccttcaaaaaaaagccagt

SEQ ID NO: 165919 - DNA, 113 bp, Zea mays
  unsure (1)..(113): unsure at all n locations
  Clone ID: MRT4577_82901C.1
ngcacgcattcacccncacccctcctaccgatttatgttcaactcgatgcgtacgcccaagggcaccgttaccctttctgatcacatccacatcactattaagaacattcttc

SEQ ID NO: 165920 - DNA, 873 bp, Zea mays
  Clone ID: MRT4577_82902C.1
tttttggggggtttttgaatgggtacctcgcggccggccgggccgggatctggtatcagccaccgcccaccccaacttcgccgaaatacaatcgccgaacacacacaaaaaaaaccctagaccgccgagcccagtccagcagtgtctctccaccgctgccgcgccacctcgagctccacttgcacttgcatcgcgggatggagcacgatgcgcacgccgaggccccaccacacgccgtcccgccaccggaggtcgccaccgtcgatgattgggctcgcgacgacgcggagcccatgtccgttgaatctggcgttgccgctgcggagctaactgcggcagattcgggcgctgatgccccgctcgcgcccgcgccctcggccgcggtcgcggcagaaggtgtcaaggaaattcaatcatctctgcaatccttggagcttaaaacaaatgttgctactcaagaaggtgctcatgtggttgaagacgatgtagatgaaacaaaaagacacttgaacgtggttttcatcggccatgttgatgctggaaaatcaactactggaggacaaatattgtttttgagtggtcaagttgatgataggaccatccagaagtatgagaaggaagcaaaggataaaagtcgggaaagctggtacatggcttacatcatggacacaaatgaggaagaaagggttaagggaaagactgttgaagttggtagagcccactttgagacagaacacacaagattcactatcttggatgcaccgggtcacaaaagttatgttccaaatatgatcagtggtgcatctcaagctgacattggtgttctggtcatatctgctcggaaaagggattcgaacaggttatgaaagagga

SEQ ID NO: 165921 - DNA, 519 bp, Zea mays
  Clone ID: MRT4577_82903C.1
actcggcatggcctgcgagcgcaagaatacgacaggctcggccacactctggcgctgtacgaactggagcactgcgagcggtgggcgtcggtgaccgttctgggagtgggagagggcgaacacggacgacgacaaggtccggggaagaagaagatgggtggctgtccggggatggggagcaagagcaagtcgttgttctgcggggccttcaatctcttctccagatagccggcgccgccgcttgtttttgttcctactgccgtgacaaaccttcttgtgatttctttatttgcctttttgctagaagttcttattttcatgtgtaaattttgtaccattgccgtgggttagaaaatcacatttttccaaactcagtcctatggcttactgagaagtttcgtgatcttgaatggctgatcagaggagggtagcctgatagaaccaatgtcctatggtgtcaaactgttgttatgtacattacacatccaaataaaggaaaatgaagaacagtttccttct

SEQ ID NO: 165922 - DNA, 1378 bp, Zea mays
  unsure (1)..(1378): unsure at all n locations
  Clone ID: MRT4577_82904C.1
tatcaacgacgatccacgagtagccctgaacacttactcatggacaaagatggctagcctcctcttggtcgactcgccagcaggtgtgggctactcgtacgctgatcatgaagatgactacaccacagatgacacaagcagggtagcggacctgtatgactttctgtcaaagtggttcgctgaatacgcagaatttctgtcgaatcctttctacgtagctggatgctcgtacagtggagtgatagtacctgtacttgcacacgaaattataaagagaaatgaagaatctggtggggtcaagatcaacttcaagggatattcattatgtaatcccgctattgatgttgacatagagaacaatgcacatgctccatatgcatttcgaatgggtttgatttcagatgaattgtttcagagtttagttactacatgtaatggaaagtattggaataactccaatccatcatgccaagagaacatggagcaattttatactcaaatcaaaggtattaacatggagcatattctatgtccgccgtgtcgatacaagatggggataaccaatcaattcattgaatatgattctggtcaaatgtttgagagcctttcgaaaacctccaagcatggtttagaatgcaatgatcaagagttggcccttgagaaactctttgatacaagatcaggtagagaaaaattgcatgccaacaaggttgaagtatcaggaccatggaagaggtgccccaggcgtgttctgtacacgagggatattctaacattgatagagtatcacttgaacataacatccaaaggatatagagtgtttatttacagtggagaccattccttgcttgttccttttacttcaactttggagtggctaaagaaactaaactacaaggaaatcgagaaatggcacccttggtacttggagaatcagattgctgggtactcaattaggtacgagaacaatatattgtttgcgacaataaagggggctggccatgttccatcggactatctgccatttgaagtatttgctgcctatcaaaggtggatagacggggctgcttctctctgatagcgcttgtcgtactcttgtgctgcaaaatctttgcataataattaataaatccgaatagagtaccgaggccaactgggagatcacctctgttgttgacattgaaaaccaatgtaagagtggttaatggctactccttctattctagattattacaagtcatttcaacttccttcgagaggtttaagtatctcaaatttgactaaaactacagagaaaactataaagatttaggacatcggatatatgtgctatgaaaatttaattaattagtaannggatagttcttaacaatcggtt

SEQ ID NO: 165923 - DNA, 312 bp, Zea mays
  Clone ID: MRT4577_82905C.1
ccgggaaactgggatggtcaaaaccagtcctctacctctgtgataatccgtcttcaaggtgaggtaatttccttgaaggatgcacagcggcgtcttgaagaggaggtatctcggcatgttgagggtaaaaaagtgcctcagcatgagctttcacacctcaaagatagccaaggtgacattgacaggaagcagctttcggtcaaggggccaattccaggagtggatttccatgtaggatcagtccaatcagttgctccagaagttaggggttgaaatgttggacctaaaggggcccttaaaaatcctggatgt

SEQ ID NO: 165924 - DNA, 501 bp, Zea mays
  Clone ID: MRT4577_82906C.1
ttccaattttggattaacatacttctttttactctatttatctatcatcacaaagtgcacacaaaattgagcttcaacatgatgcacattccattttttatcatttgttttggttaatcattcttaagtataggtgtcctcttgttgtgatgaatacatggcatacaaaaaaaataagaagaccactatatattccttgtatacaattttgggtattacagtacgacaacagggggtgttggactctagcagggggagcatttggccagggagaaatgggcgagctcctggcagggggtgagctcggccacggcaagagcagggaagggggcgcgcgtccgggtgtaggagagttggggaggggcgctcggtagagagaggagcagccatggatggagctcggatggggggaggaagaagacctgctcaccggcctggggaagaagggcatcgccgagcaggaccagggggacgatgaccgactgtggggaaggaccctgc

SEQ ID NO: 165925 - DNA, 434 bp, Zea mays
  Clone ID: MRT4577_82907C.1
atggaaacaaatttttgattggggtgaatctgtaaattcgatgaacccagtatggaccgacatctgcatagtacggaatagagtgtccgtagctccagggaaccgtaaatcccaagggctgcctcactaccgcaggaacacacaacagctatgatcatactcaggggtcaacacgcgcaaacacgttgttaaacgagggaatgcgttgctgtagatatcctaggccatgggtcagaacgctcctcggcgccaggaccagcgattggactacctgtcttgtagccctcgagccacccagctagtccagtctgaactttctgggacacgcaagacacccttgttgagggggcccggcttgtgatggcggacaaggacatcgggaataacttgcttgcggtgggcgaatcttgccatggatggcggctgccttgacc

SEQ ID NO: 165926 - DNA, 379 bp, Zea mays
  Clone ID: MRT4577_82908C.1
ggctcttagaacacgaaacgtgaaggagacagaggaggaggaggaggatcaatctgccccgttcttggctgcgaggcgatctttgtgccacccaccagagcgcgaggggcttcattcacctgatcctcgcttcttcttcttccgtcccactggttcgcgttgattgcatttggaggagggggcagtcaagatgaggcttcggctcctggcctgctgctacaatgatccggagatgcggatcgatccggacaccgtctaccccatccgccccgactgccgcgacgacgcccccaagacgcgcttcaagccccggggagtccacccaacaatcaaaggagaagtttgggaatttttgctgggctgctatgaccctaaaagc

SEQ ID NO: 165927 - DNA, 511 bp, Zea mays
  Clone ID: MRT4577_82909C.1
ctcccccccccccccccccccccccccccccccccccccccccccccccccccccctctttaaaaaaaaaacatacgggaccctaaaaatacaaaaatttacttgtttaagttgcatcccgcttcaaagtttagaaaaacggcctaggggccccatttaaggcttcgacaaagtcccaaggtcccaacaacggcctaggggctcaacatcgacaatttttttacgaaaaaaacaatccaacattttgtttgttcactttgcccccaaaggcaaaaaaccacttgtttccttacgggcgggaaaaggtttccctccaaaatggggtttttttaaccatcaccaacccccatttgggaaagtttgggggggccctttttgtagccataaaaaaaggccttttcatccacagaatttttttcaacaagggggggaaaaacagggtccttcaacagggcttttgtcatttgggagctgaaaaaggccctttttatcacccaaaaaagttctttga

SEQ ID NO: 165928 - DNA, 237 bp, Zea mays
  Clone ID: MRT4577_8290C.1
cgctcaaccactctgggatgggtgtcctagtatctggagctgtgattcagggggtccgggcacacggcttggcttcctaggctaaatcctgtaggtcctattgcatgaatcaaaggatggctgataccagacgatgggccctatgggtgtgctaataacgctcccgagctgaagctgtgtacatggctaggtcccagtcgaggctacctcttgggggccgggccactaaactttttt

SEQ ID NO: 165929 - DNA, 1839 bp, Zea mays
  Clone ID: MRT4577_82910C.1
ggttggcaagagaggagggccggcgtcggcgtgcctagtttgatttttaaccatagctagccagcatggcgcggagcgggggcatattagcactgctgctcgtgcgttcacgtcttagaacacgaaacgtgaaggagacagaggaggaggaggaggatcaatctgccccgttcttggctgcgaggcgatctttgtgccacccaccagagcgcgaggggcttcattcacctgatcctcgcttcttcttcttccgtcccactggttcgcgttgattgcatttggaggagggggcagtcaagatgaggcttcggctcctggcctgctgctacaatgatccggagatgcggatcgatccggacaccgtctaccccatccgccccgactgccgcgacgacgcccccaagacgcgcttcaagccccggcctggcctgacccttagtccaaagagatggaagcttctccacaacgaggaaggctgcgtggacatagctggaatgatcaagagagtgcaacgtgggggagtccacccaacaatcaaaggagaagtttgggaatttttgctgggctgctatgaccctaaaagcactaccgaacagtgcaaccaattgcgacagcagcgaaggttagagtacgagcaactgaaagctaagtgccgagaaatggacacagctgttggtagtggaagggtaatcactatgcctgtagtaacagaagatggtcaacctatcgaaaaccctaacggaggggcatcaggttctgagcagaaaaatagtggggcaccactcccgaaagaagttattgattggaagcttaccctacaccagattggtctcgatgttaaccgtactgatcgtttgcttgtttattatgagagacaagagaacttggcaaggttgtgggacattcttgcagtgtattcatggattgataaagacatagggtattgtcagggaatgagtgatctttgttcaccaatatcaatcattctggaaaatgaagcagatgctttttggtgctttgagcgtctaatgcgcagggtgcgaggaaatttcaaaagtacttctacttccattggagttcgagctcaactaactaccttgtctaccataatgaaatctgttgacccaaagctgcatgaacatttagaaaatcttgatggaggggaatacttatttgccttccgaatgctgatggttcttttccgtagggaattctcatttgttgatacgatgtacctttgggaactcatgtggtctatggagtacaatcctaatctcttttcaatgttggagagtgacactggcacatccagcgcaagcacaaaggatgaaagtgttctaggacagtgtggaaagtttgagcggaaaaaattgcaagcagctaagaaagatgaccagatccctctatctgtctttgttgttgctagtgttcttgaggctagaaacaagaagttattgggtgaggcaaaaggtctagacgatgttgtcaagattttaaatgaaatcactggtagtctggatgcaaaaaaggcatgcagagaagcattgcagattcacgagaaatatcttaaaacggtaaaagcatcataaggacatgtacagcttcacttggatgggctatttatttattttttggactagagaagatataccacagaacttttgttatcctttgtttgtgtattgtgtaattctgacacatttgtaacattgcatttacacaaccaaaagaaaggacgaggatttcattcaaaaataaaaaaaaaagaaggggaaaaaggatgctgatcttgtaaagacgcgagacaaaatgtttataccataataacgtcatcatgat

SEQ ID NO: 165930 - DNA, 423 bp, Zea mays
  Clone ID: MRT4577_82911C.1
ccctcgttgaggctgctcaataagaagaagcaccatggctgatggatggcgggccaatctcttctctccggccggtagttggtgggccggcccgtgcagtcggccgtctgtaggtcgtcaggaaggaaggcgccctttctgggagggccagctccagccctccagccaagcaaggtgccggacaggcaggtgtggttcgcgtgcaagcagtccctctgctacctggatggcacgctgcccggcgactatggcttcgacccgctgggcctgtcagacccggagggcaccggtggcttaatctagcccaagtggctgtgctatggcgaggagatcaacgggcgctacaccatgctgggcgcggtgggcgccatcggcccgggacatcttgtgcgtgatgggggataatgcacaccaagcaccggc

SEQ ID NO: 165931 - DNA, 931 bp, Zea mays
  unsure (1)..(931): unsure at all n locations
  Clone ID: MRT4577_82912C.1
aattcggcacgagggagttttctgccttttcttctccccttctctgttttccttcaccgcgccaccgggggcgaatcgcggacgccgctcacctcccccatctcctccccaccacgtcgggaacccatcgtcaccaccaccgcctccggccgcggctcccatcctcgcgtggcgccgtggccgtcgcgatccactgcgagcttctctcgtccggtcttccgagtctcggctacctgcttctacgtcgaatcctcgggccctgctgtcgccaccgccgaatcctgctgcactcgccgcagccggggaacgcggacggcctgcgggagcttggcgcctcctccttcgcgttgcgtcgtcacgaggtggagaggaaaatggcaaactggaattcgatgctgtagagtagattgtcctttacctactctaagggcaaaaccaacacatgacaggaagagctatgttgtcgttttcttcccacgaacaaaaacttattcttgggtagacatgctacttgttcttccaatagaggaatgtcctttgccacttgtaaatggaactcatcgtaaatggagaaagctggtgaaggatttgaacattcctcgacgattgaacatgcaaaatcttgccgtttttatgataaatttaattgatgagcttcatatcgaggctgtagttgatgatgctcggaaggctacaacatggaaggaatttgctctggaagcgtcttgctgtagagattacactgatcttgggaagatgctcctcaaatttcaaaatgtaaatccgagaactttgtttcatgtggatatttcggggagcgtcacgccaactttttaaagcaaatataatggtccgttttgctacttagcagggcttaccgggtggagttntttacttacttttttctttttatccctgaatgctattatgc

SEQ ID NO: 165932 - DNA, 280 bp, Zea mays
  Clone ID: MRT4577_82913C.1
cgctcttcgtgctggacactgaaagcgggatcttgctgtacagattcaacatgaaggacccccacagctcgaggaccctgccgtggggtacactggcctagtacttctcgatcaacacaggaggtccgctcactgtgcgggcactgtactttgtccactggacatgctacttcgcaacatagcccaagatgtcagggaacgctccggcaaccaatcaagacggcgagttccagcactgattcatggacaggctggactgcatgggggtgctgatcgaggg

SEQ ID NO: 165933 - DNA, 418 bp, Zea mays
  Clone ID: MRT4577_82914C.1
gtcgcgtccagaacccgcaacaaatcggccaccaccgtcctctcccttgctatgccattcctcctctccgccgccagcgccagcaccaccaccaaccctcatcctctctccccgttccctcgcagccagaacaatagccgcgtccaccgcctgcaacttccggcacgccgcctccccagcttccccgcggttgctccgggcgcttcctttgctcccctcccgcagaggctaggcatggcgtcgctggcggcgtcagcggccgccgcggcggaggtgacgcacctcacgcagcgcgacgcggcggagatcgacgagcagctcatgggcccgctcgggttcagcgtcgaccagctcatggaacttgctggattgagcgttgcggcagcccttgcggaggtttacaagttgaatgaacatg

SEQ ID NO: 165934 - DNA, 151 bp, Zea mays
  Clone ID: MRT4577_82915C.1
aggacagaaagagcgcgggcgacccccagagccagcacgaggaccaagagcaaaaagcgcccggccaacgacgacccgcagaacgcgcaagaacaccacgggaaggccgaagcagaaggcgggcacgccggccgccacaggccaccagaaa

SEQ ID NO: 165935 - DNA, 476 bp, Zea mays
  Clone ID: MRT4577_82916C.1
ctaccacaggaaccgatctaagagagagagagagcgcatacacgatcatgaaggtcggcaagaacgaagaggccggcgcgctggcgagcatactagcatgattctgcacctcataggagatccaacgactgccatgcactgtccgctcagacgacacggagccgtgtcggatggctccctcgtcacgacgcccaatgagcaccatgcatgtctgtcactgtgtggtacacggagggagacatgtaaatacaatggctgcctcactccagcttgctcctgaaactatagagatcgcccatgatacatcaaatttactcccgctggatgatgccattccgtgaaagcaccactctatacatggatgtgccattcaactacgacgctgtctctcgtgaaattccgataaaccggtgcctggttgcaggcatccatggatggtttatgtatatgatatgcgtgaaaataattagccgtgg

SEQ ID NO: 165936 - DNA, 271 bp, Zea mays
  unsure (1)..(271): unsure at all n locations
  Clone ID: MRT4577_82917C.1
tttataattaagncgtgctgtcatatctccaccagacagttttgatcgtgttcttcagctccctgcctgagaccagtgtcatatggtagtagtggcaccagggaaagactggagtgattgaagtccactacattgccataccgtgacactgaaatcacattttggtagaaagtatgagcatattaaacgcctgtaaagaaaaagggcaagcgacttggggggcactaacatatgaatgctctgcagaccatgagccacatgatgaggatca

SEQ ID NO: 165937 - DNA, 337 bp, Zea mays
  Clone ID: MRT4577_82918C.1
gccagtcgctgtcctccgagtgaccgggccgctgcatcgagcgctcgtcggaccgagcaggcaagcagctgcgtgttttgcgacgtcccaagtaggcgagcagacagggtcattagaggcgtgcgcgcgactttcggcagagcacctgcatctgtaccacaccgatccgagggtgccatccatggcgactcgagccggacgaccgaccacatgggtacctgctcttctgctcctactggtcttaccgtttctgctgcgaggagttcttatgtcgcgagccgtggacaccgaatgcaggagtctgccgttgtccggcacgcagagccttttgtccaag

SEQ ID NO: 165938 - DNA, 203 bp, Zea mays
  Clone ID: MRT4577_82919C.1
aatggggtatagaaaaaggttcattttatgacattgctaggctagacaaacacgttttgaacatgctctcaaatgagcaggcctccagcttatctgatgctggatagatgtgcagcattggcacgaagcataacctgtctgccttatatgagaacacaaatttgaccacggcctgcggcagcacaattcaagaaaactcttgt

SEQ ID NO: 165939 - DNA, 533 bp, Zea mays
  Clone ID: MRT4577_8291C.1
cagcccaaaaaaaaggataggcttacattatattggctgccccgacgtggtgtgcccggcccagatgaggaacctgggcaaaaaaaaaatttcccatgccaaccccacagcaggggggccgacaccccggccttaggacaaaaagcatggagcgaaaaaaaacaagacggaccgcacgggtagggggggggcggggcccaaagggaaagcacagccaatacaaaggcccgccccccaccaagcagcccccgccccgggggggccccaaccgacccatttgtggcgcgggccgtttgcttgcggggccggggctttctttgacgggacgctggttaacaagacactaccagccgggacagtacctgaagggcagggactgcagggggcgggcctacgtgccgggggacgaggggaagggaaaccccccccagggaaagcaaagccctgccctgggaaggaagggcctcccctgggaagggggaggggacaaagcctactgggggggccccacccttacttgccggccccggagc

SEQ ID NO: 165940 - DNA, 280 bp, Zea mays
  Clone ID: MRT4577_82920C.1
attaaatgcagataccgcacgcagcagggagtgggcatgcctgcgatggttcactgccacgagaaagccggcattagatagagatagtgaagtaacgcttggttcctaccactctgacggctctgagctgatgacacgtgcccttgaaaaccatggaggaggcagcaagtctgatgaatgggcatagccacctgctgcggaaccgtcccacgctagaaccattcccatttattttcgcggaccactgttgctgtgacggtctgccgtgcgcttaaatgcc

SEQ ID NO: 165941 - DNA, 508 bp, Zea mays
  Clone ID: MRT4577_82921C.1
ttaaaacacacacatatatatatagtgctgggttgacaaacctttcgacacccaatctttaatttgggggtgaaatcacaaaatgttttgccatggggcatgggaccaacatgagaacaagaaatgctttggatcagatcaggcgcactggaccagagggaataaaccgtgcgcatgatacgatgagataggatttacagatcctcgcacaatccaagggcgtcgaagggtctaaactgccagcgtatctctaggaggctaccaattaaataatgctaccagtgggtgtcagcagctgccttgatgctggataccatgagcaggcgaactaccgatgataaatgattctcttcacgagcacttgttatacgaggaagtggcggaacctcttgatcaccatgacaatatggtcggtggtaatgagccttgacatagaatgccgaccaccatgggttggcctgcactcttcataatgatgccaacgaatccatttttaccgcttatgaca

SEQ ID NO: 165942 - DNA, 159 bp, Zea mays
  Clone ID: MRT4577_82922C.1
gccgatcaattatctcatctactccagattttacaactcgacaccattaacgcgctgaagattgcctttgctctcctggcgctcgctcccagctccatctccaatacaagctactgctgtggctgtcaaacaccaccacatcatttaccgtctccgttc

SEQ ID NO: 165943 - DNA, 179 bp, Zea mays
  Clone ID: MRT4577_82923C.1
gcgggaaacgactcggagcgcctggatgcagtcgaggcagaggcagcgtcgtgggtcggcgcgctcgaatccgtgacggtgatcagcgaccttcgaatcgtggcgtcccttcgtcgaggccgcaatagacgacatcaagtattccgtcgagaaattgtgtgacgacttgtccaaattgg

SEQ ID NO: 165944 - DNA, 127 bp, Zea mays
  Clone ID: MRT4577_82924C.1
gaccacgcgtacgaaccattcactttctctactacactacaccttcgccctccatggacaccttaatcatctcggtccccggttcactctcaccctactcgtcacccaactcccatcctttcccctc

SEQ ID NO: 165945 - DNA, 204 bp, Zea mays
  Clone ID: MRT4577_82925C.1
gtggcagcccaagtggggcgtcgcagccctgtacggcccaccggtaagtacctcgccctttcggcagccccagctactaccggcagttcccggcactcggtgggacaccgcgctgtcgccgaccccaaccttcgcaagaaccggagctgaggtgatccactccgtgggcatgctgggcgctcggtgcgtttcccgactgtctcc

SEQ ID NO: 165946 - DNA, 344 bp, Zea mays
  unsure (1)..(344): unsure at all n locations
  Clone ID: MRT4577_82926C.1
ccatgtgctgggattaccccttacaaggtcgaggaacgagtacatatcctagattcaaaaaaaaaaaaaaaaaaaaaaaaaaaaaaaaaaaaaaaaaaaaaaaaaaaaaaaaaaaaaaaaaaaaaaaaaaaaaaaaaaaaaaaaaaaaaaaaaaaaaaaaaaaaaaaaaaaaaaaaaaaaaaaaaaaaaaaagggggggggggggcntttaaaccccctaagaggaaaattttggaaaattaaacaaaaatgcggggggttcgaacaatctttaaaagggccaaaatccccttaaaagaagccttttaaaaaataaacggcaggcgtttaaaaaaatcctactt

SEQ ID NO: 165947 - DNA, 279 bp, Zea mays
  Clone ID: MRT4577_82927C.1
gccgggcaaataagagtgtttttcaatcctatctagctacaggccattttttccatttctagatctagacccctttacagtatttccagggaggaaaactaaagggtctaaaagaggccgaaggggggtttgttcaattgatgcgctgagagtgtctgactgttctcccccatggactattgtcaaatttttctcaagaggtatttctccgaccactgagctaaaatgcgtctctctattgagaagtgtggggcatttggtcaagcggaattttcagcc

SEQ ID NO: 165948 - DNA, 227 bp, Zea mays
  Clone ID: MRT4577_82928C.1
cgtccgcggacacgtggggcgcctgctggaccatctggcgcagatctatgccgccggcgggctggtggccggcgcccgcgtcgccccgcccgccggcgtccaaggccgccgtccatgccatgcccattgtctcggtcgccgccactgtcggcgcagtgcgccgtctgcacggaggccttccagctgggcgtcctaggccagcgaaatgccctgcgcacacatctaat

SEQ ID NO: 165949 - DNA, 152 bp, Zea mays
  Clone ID: MRT4577_82929C.1
cggcgcatcctcccatacctaagcattcacttcggggcgtttctttttcaccacactactgaccacgggccaattgcgccatctaatgggggggtgcttcaaccacccggtctccccgagcttttcgttcacgctcgcatattaaactgaca

SEQ ID NO: 165950 - DNA, 353 bp, Zea mays
  unsure (1)..(353): unsure at all n locations
  Clone ID: MRT4577_8292C.1
gccttattgttgttgttttttgggtttatagggggttgggggttaacgggggtgtgggttacatttnatgttccataaaaaaaattaaattttaattacattacgggttcaacaaaaggaataatgcttttggaccaggcaaatattcgcatcatatattacttgggcacacgacaactggaagggtgattaacaaaacgagatattttaaggttccacgagggaactaacaatgatgtacagggcctgtcagatagattattttttttttgggagaggcgttttcaccaggcatatagattattttttgttgggagaagacttttttaccttttggttaagtggggtccttt

SEQ ID NO: 165951 - DNA, 324 bp, Zea mays
  Clone ID: MRT4577_82930C.1
gggcaaaggccaaactggccaaatattaaattcggggggggttaaaaccaaacattgaacagaggccagctaccagttttcatatttccccctctgaataggggccattggccgaagtcccggcctgagaggggaacttgccggaaaattaccttacggccccaatgggagctaggacagataggccccttggccaaacccgggggaaccccccttccctggggcctggccgggggccgggacccggccgaaccctggggcctggtaagcaaatctccgaatcccaactcttgcacgggccctgggggggcctcggttcccccc

SEQ ID NO: 165952 - DNA, 363 bp, Zea mays
  Clone ID: MRT4577_82931C.1
acgcgtgcgttagcgcaaaaaacgactctagatctagaccttacattcaagggaatacataaaggccgggggggctaaaagttatatgtttctaattaaataactcattaagccgctgactggtgggatgctgaaataaaaagcccatatgggaggatacaaagaggccgtattgcttatagatctgcatatgaattcaaagctcacactgacaaaaacggggtcccacttgatgctcatgaaaaattctccaaacctaaacaggttgaaaaaccagtcatagatccctctaagaaagacctggggctggctcttaacggcaaccaaaagattgtcctggaagcattggaagctataagtgaa

SEQ ID NO: 165953 - DNA, 278 bp, Zea mays
  Clone ID: MRT4577_82932C.1
acattatatagcccttaatatatttttaccaggttctaagattaatgagagctcccctcaagaagcagtagcaggccacagcaggtgagtgaagccagaggtgaagcttgcattttcaggacatttgatattcagtttgggtcaaacttgatttttttggcattgttacaagatatgagcaagggtttcagcataatggttggcctatctttgaactgcaggcacctccatgttcaaagatgtttattgctttattttgatgttatttgtctggtttg

SEQ ID NO: 165954 - DNA, 755 bp, Zea mays
  Clone ID: MRT4577_82933C.1
cctcgaggccggccgggaacatctttcctgccgtaacttcctcacgccggtggtctccattcatctcctgatggttgctgtactgagacaacacccctccgccaccttcatcgtcaaaatgctccacattctccctgcccctctcccgcccgtcccctccggaaaagacagagtgccacagcacatgcttcactgtggcaattagacttgcatgcgtggaagatgaactcatggagatactgaactcactggaacaatcatcacgctgaatcaaagacaacacctactttgacgcgtggaaagaactcaccacaactacctgtaccagggaacattccaagaccatcccatgcggtgtccaaagggctgccacaactatgccagtcacaattaacttacggtcaacgaatctggtgcaatgagagctgcttgaaaacttgctgcccgaggtactgatattactgcgactcgacgtcagccatccatttactacaattcgaaattgacgaagcctcccacaagaagatgattgcacgtgagacttatccctctccacttgagcatatcatggactcactaaaagcatatgcacataagtcaatgacgtgcgtgtgccatggcctactcgacttctttcagctgcactacggcaacaacatatataacgatgtcaatgtcatcctgaatggacaccatgtcggtatctacaaaacatttgactgcgtacaacatcatgactctatcaaacattttct

SEQ ID NO: 165955 - DNA, 245 bp, Zea mays
  Clone ID: MRT4577_82934C.1
cggccgcccttttttttttttttttattaaacaaaagcgaactcactatctgaccaaatagcaaccatgatgcatcaagcgcaacttaaatatataccaaaattatgcacaaaacaagcacaacgggagaaaattacgcaagaaaagggttccactctgcgcgcggagctcaagacagacatgctaaaacgtcaccatccactaatgcctagctgacatgaggaacctactccacctggatctaa

SEQ ID NO: 165956 - DNA, 491 bp, Zea mays
  unsure (1)..(491): unsure at all n locations
  Clone ID: MRT4577_82935C.1
ccggccgggataaacgcttcgtttctatttatgatctcttccttgtttcgcaggtcttcctccggcgtgtcggaggtcttcccgagcacgacattggtgtccgccaggcagcccttcatgacgagccactgggcgcgactcgggcatgccgagcaccatgtatgagggcgagcaccagaaagcatctggtagttgacaacgaagcccatgaggaatgtgcctgcgaagaagattaccaccacgaagacgatgatgtagcggcgcccgatctagtcggacgttcgcccagccgcgaaggagccgatgagcgactacactatgaggatgcccatgaggatgttcctccaataatctaaagatgaaatactgaattatacataaattataaatgtgcgtgtgtcttatacaatgtggcgtgtgtttatgtcctataagagaaaataatgtatacaaataattnttgttgtaaaaaaaaaaaaaaaaaagcggcc

SEQ ID NO: 165957 - DNA, 1235 bp, Zea mays
  Clone ID: MRT4577_82936C.1
gcgtattatccaatgaagatatcaatgatctggttatcatagtatttccactccttcacatgaactcaatgctccgataaaagagagatgtccccattattttattttacaggcggatggatagttgtttcacattatttcttttgcttaataccaacgcttacttttttcacacggatctgctatgcacggatgttgtagaacagagggagcaaaaaattttttatcaagattctcatgtaatgatcttttcgtttcagttgttgggagatatgctgctggatagatcaaatgctgcagtcatgatgcgctatgttagctccaaagacaaccttatgattttgatgaatctcttaagggattcgagtaaaaatattcaaattgaagcatttcacgtgttcaagctgtttgctgcgaataaaaacaaaccgcctgaggtcgtgaacatactggtcaccaatagaagcaagctacttcggttttttgctggattcaagattgacaaagaggatgaacagtttgaagcagacaaggagcaagtcataaaagaaatatcggcactttgagtatgcttgaggttgtaattagtttttgtgatgaattttcttttgctaagaaagtgcatgtgaaataataaacttctgtgtaatattctgttggaccaagaggaacaatgttactcattgactctagtacttggatactgccagcaaatgtgataattttaatagattttgtggttatccatgcccttattttatgggcgtgttccactgatacaaaatattgaaggatttagagacaaaaaaaaaaaaaaaaaaaaaaaaaaaaaaaaaaaaaaaaaaaaaaaaaaaaaaaaaaaaaaaaaaaaaaaaaaaaaaaaaaaaaaaaaaaaaaaaaaaaaaaaaaaaaaaaaaaaaaaaaaaaaaaaaaaaaaaaagggggggcccctttttaaaggaaccaaatttttatttcccgggggctggaaaagaaaaaacttttttttttgggggccccctaaattaaatttaatgggcccggtttttaaaacaggcggggcggggaaaaacccgggggttccccaatttaattccctttgaaaaaaacccctttttcccagtttgggttattagaaaaaggcccccaccaattcccctttcaaaaattttgcccccctttaatgggaaatggaaccccccctttttggggtcattaaagcggggggggttggg

SEQ ID NO: 165958 - DNA, 362 bp, Zea mays
  Clone ID: MRT4577_82937C.1
cgggcgtcgactcactcattcgatcacgcattctcacacacttgctttaccctatttcaactctagctcaaatgaccagcacttgtctagacttgagaccatcatgaaatgcaaggtatctgaagcgaaactgttactaaactggccgatgatgccagctatgaggtacacagctaccatcaaatcttacttaccaagacccacaaactatatgacgagtacgccacgaatgtggcaaatctgctctttcatgaaactgatgagaaaaggacgtacaaagttgaagagctgtagacgctcgataactcgcactacgactaccacaagattaagctgcggatgcaaaccgaaatgcagggctt

SEQ ID NO: 165959 - DNA, 1914 bp, Zea mays
  Clone ID: MRT4577_82938C.1
gatgaaaattgcagcccacaagctgaatatgaactgcaggattccaaaaggagtaggtattcatctaatgatctgaggtcacatgtggctctccacaaaagaacatctggtggaaccaagaatcgaagaacaagtgtatcccttgccaggattaagaaattcgggagcaaatcagtatgctattctggcagtgacaaagacaatgctgtgctagcccatgaagtgaatgctaggagatacagtggaagactcagctcaaattctccatgctgtgtttgtgggatctcagacctggagccttgcaatcgattaatagagtgcagcaagtgctatatcaaagtgcaccaagcctgctatggtgtactaaaagttcctaggggtcaatggttttgcagaccgtgcaagaataataccatggatacagtctgtgtgctgtgtggttatggaggtggagctatgacaagggcactgaaaaccaagaatattttgaaaagtttgctccaaggtttgatgaatttagaaaggtcagaatattatgttgattccttaggaaatgcaagcagtgagtgtacaagcttgcaaaatccagtagacagtgcacatggggataacattatgaatgcgaagaacatcaccagcaattcctggacctctggaaaatactattcgagtttacttggaccacaaccaatgcagtgggttcacatggtctgtgggctgtggacacctggcacaaaatgcccaaatgacaccacaatgagcgcttttgatgtttcaggtgcttcacctgccaagagaaatactgcatgttcaatatgtgacagaactgggggctcatttgtcaagtgccgagctgtaaattgtttggtattctttcatgcttggtgtgcacatcagaggggtttgctgcaaagtgagcctgaaggcgagcacaatgaaaatattggcttttatgggcgatgcgtgtctcacgccattgttttttctagtcacgttaatcctaagaaagaatactttagaaacaacaattggacatgtgcacgtacagagggttttaaaggccgaaagggagaaggcttttctgatagtagccataaaaaatatgaagagtacagtggcgagttcggtgtttcccaagaacagataaatgcttggttacgcataaatggttcaaagccctgcggacgaggacagaaggagtacatccattacaagcagttaaaagggtggaagcatttggttgtttacaaatctggcatacatggacttggtctctacacatcagtctttattccacgcggctctatggttgtagaatatgtgggtgaaattgttgggcaacgggttgctgacagaagagagatcgaataccagtccgggaaacggcaacaatataagagtgcatgttatttctttaagattgacagggagcatattattgatgccacccgcaaaggtgggattgcaagattcgtcaatcattcatgccagccaaactgcgttgcgaaaataatctcagtcaggaatgagaagaaggtaatgttctttgcagaacggcacataaacccaggggaggaaattacgtacgattaccacttcaaccgggaagatgaaggccagaggatcctttgcttttgtagatcaagatactgcaggcggtacctcaattagtttccggtgggcgtaacatgtctatatataacttatatatctatatgtatatcttatatatttacaaattacaattgcgattcatgcctgctgtatatgtaggaacttgcatctagaactgcctgtttatcttttgtgaagtcaaatgagttatcagctgttcatgtgcccgaaaaaaaaataaagtcacgtgcccttttttttttttttgggctttttttctcctaaatcttaatccattct

SEQ ID NO: 165960 - DNA, 309 bp, Zea mays
  unsure (1)..(309): unsure at all n locations
  Clone ID: MRT4577_82939C.1
atttattttcaagacagcaattctcctgtaatagaacatttaaattttttacatgatcatacaataataatcttatgtataattacattagtagtttcaatctcactatataatgcattaacaaactcacactttaatcgattttttttcagaaaatcaagaaattgaatatttctgaacatctctaccattactaattttaatatttttagcactaccatctataaaaattttatatatgacagaagaatatacaaatcctccctcacagtanaaacaataggacatcatgatactgatctatggtat

SEQ ID NO: 165961 - DNA, 382 bp, Zea mays
  Clone ID: MRT4577_8293C.1
cgcgggaattgcccacgataggaaataatattttgaagggtttaaagcttggactttctaaaaatttgaagagatttttgttctagggaaaaaagggtaaatcaacttggggtaaattggcggggcaaaattatccctgcccttggttataaaggggtgtgaaatacaggctacacggcctacctttaacaaaaaagagttcacccgttatttacacattaggtaaaaaaaaagcccataatggaaaacccagtggaggtctttatgaacgtcccgccatgaaattacatttcccggccctattttgatgtctttgcctgacaagcaaggggcttgaggactcacgtgaaaggaattggggggttcacttttcaaggaaaaa

SEQ ID NO: 165962 - DNA, 1377 bp, Zea mays
  Clone ID: MRT4577_82940C.1
agtacatccattacaagcagttaaaagggtggaagcatttggttgtttacaaatctggcatacatggacttggtctctacacatcagtctttattccacgcggctctatggtaattcaactgataatggaatttagtaaaaagtcaagttactgccaccaagtttggcatatgtttagataaccctgaaaactagcctttcatttggtttagtcccttcaactattccggttattccaatttacccgttaacaacattttttacttttgtttgtccacattcaagttgattttttaatttcaaaatttgtgaggtgatagtcgacaccataatttatgatatatatatataaaatattttttataattattttgaccagttaggacatttaataataaattaactctagaatacaaaattgcataaaatataattatgaaacaattataatatattttaaaaaataaatcatgacatctattaccacttcacaaaatccgaaatttaaactcaacttttccttggagaaacaaaaagacaaatcttgttaaggggcaaattggccaattgaaatggttgaggtagtaaatcagaccaaatgttagtttaggaagttatccggactttggccaaaattcaagggaataatttcaacattttctagcaaataaaaccattctcaggttttgcataaaaatgtttcaggttgtagaatatgtgggtgaaattgttgggcaacgggttgctgacagaagagagatcgaataccagtccgggaaacggcaacaatataagagtgcatgttatttctttaagattgacagggagcatattattgatgccacccgcaaaggtgggattgcaagattcgtcaatcattcatgccaggtaataacttgtgcttgaagccttgaacattctttagataccccttggaacaagagggatgagacttcttttgagattctagtgtgcttattattctaatgtacggttttatattcattcaattcgttcattcttggttgaatcagccaaactgcgttgcgaaaataatctcagtcaggaatgagaagaaggtaatgttctttgcagaacggcacataaacccaggggaggaaattacgtacgattaccacttcaaccgggaagatgaaggccagaggatcctttgcttttgtagatcaagatactgcaggcggtacctcaattagtttccggtgggcgtaacatgtctatatataacttatatatctatatgtatatcttatatatttacaaattacaattgcgattcatgcctgctgtatatgtaggaacttgcatctagaactgcctgtttatcttttgtgaagtcaaatgagttatcagctgttc

SEQ ID NO: 165963 - DNA, 158 bp, Zea mays
  unsure (1)..(158): unsure at all n locations
  Clone ID: MRT4577_82941C.1
aagaatttgattatgacctgaacagcttcgcttttctggtgatctcttgatggagtaggagctggatagaacagcactgagctttcccacagtttttcctaccttggctgcatagcanatgttgttaagattgttgctgctgtcacttncacctctac

SEQ ID NO: 165964 - DNA, 235 bp, Zea mays
  Clone ID: MRT4577_82942C.1
ggcatggaaaggtgcgttgtcttgtaaacagacatggttacaagagcatacatgtgcagaactaatcaacatcgttttgcgattgtagttctgaagaactaatcagagttgtcgtgcataaatgaaaacggctgtcttctgtctaactgggtatgagcagacaagcatatggcatattagcatgcctacgaacaaatgaatatacttatagtttactgagaggagatgcgtactg

SEQ ID NO: 165965 - DNA, 523 bp, Zea mays
  Clone ID: MRT4577_82943C.1
ctctttgaaccttagacctataggccttttccctctggcctacctcccctgcttaaacctgtcccgctcattccataccgtcctccggcacctctgctgccagcgcgaagacatggtgaggaagggcgttgggccgcacatcggcctcgacctcgtcccgacctactactgcggctgcgagcggactgccatccggctggatcatcgccgacgaccagagtcccgtccacaccctttgcggagcttcaccgctccgacgcctcttagagatgactgcactacaagcacgtctgacccataacaccggcctgatgccaccgtctattgacggaggacagcgatgcctgtgagcatattgatattaagctgtggaccttcaaggaagttgatggcccggcgacaagcccctgatagccgtccacacaggggggaggagaaacagtctgcacctcgatagatctcctctatgggtcgtcatcagatgcgtgagatcgctgtagcttaccttgacagctcgatcaag

SEQ ID NO: 165966 - DNA, 569 bp, Zea mays
  Clone ID: MRT4577_82944C.1
ggggaatcggttttaaaacacagcaagggactacagggacaccaaggggggggtgggcctaacagcaccaacaagagccacacgcagacccagaagacaaaagggcgcgaagggcaccccgacgggggagcagggccgcctcaacacagggcacgagctagcggcgagggctgggggccgccacagcgactgcgggacgcagagcaggccctcggagccctgggggaagggcagccgcaccggccactggacggactgggccaggcccggcagctgagggatcggggccgcggggacccccacgagcaggggccccgaggccccaggacacgggcgacctcggggaaaactgcagccagagggaacccggccgagcaggaaacgagggccgcggcagaaaggcaacggcccgggaaggggcgaaagactcgcacccggcagggagcaggcaaacaaacccccgccccggaagaaggaagggggccaagcggggcccgggggaaaaccgaaaccggcaacccgaaagagggccaaggaacccccaaagaccccgaggagggagggccccc

SEQ ID NO: 165967 - DNA, 323 bp, Zea mays
  Clone ID: MRT4577_82945C.1
agctgagggggtggatcgggtggtgggagcggtgggggtggatgtgatggaagaagatctggtggaggcagcagaattggtagaagcaccagcagcctttgttgaagaggctgaggatctaaagcatggaacgtgcccacctctctcttcagcgaggcctcgcttgacgatacacaatgaaactgccaatgcaaagcaccatggtgagctgcatcagaaagtggtacagtgcccacacgcgtgatctacctggtcctcgatgccgatgcaccccctagctaccttacaggcgagtttccgggcgactaccgatgatacaccca

SEQ ID NO: 165968 - DNA, 510 bp, Zea mays
  unsure (1)..(510): unsure at all n locations
  Clone ID: MRT4577_82946C.1
gtcaggtttgaaggaagcacactcgacttccgtgttacttcctggagggaaaatcacttcccttggggtgccttggcaagtcctgggccgtggcccttgcctgaaacctaatggagttcctgggccttttcttgcgggcgaataactccccttctcgtcttcaacacctcacgcccgccggtgaatcgcccggtgaccacgggagcattacagcatcgccgagctccttccccggcgcccgttcaacgtcccgtcgagcggtcggtgccgcccgcgccgagtgcgcccctgttcctgtttaggtcgagcgcccaagctccgccacgcccccgcctctgcctcgctcttgttcgtgcgctgaggtgcgcccctgctccctgtttagccgagtgttggatcctgggcggcgagctntctggcgcggtcaccgtggtggagcgagcgccgncagagaaaaaccccaggcccatttgactctagtctncggtctctctctccactctactacag

SEQ ID NO: 165969 - DNA, 323 bp, Zea mays
  Clone ID: MRT4577_82947C.1
ggtggctgcttgctgcgagtgtctctagggtgatacgcgggtcagaaaggccctggtccgcgccagagcccagcgcgcctcggcgccatgcctcggaaaattgaggaaatcaaggacttcctgctcacagcccgacgaaaggatgccaaatctgtcaagatcaagaaaaataaggacgtcgtgaagtttaaagttcgatgcagcagatacctttacaccctggtcatcactgacaaagagaaggtcagagaaactgaagcagtccctgccccccggtttggcagtgaaggaactgaaatgaaccagacacactgattggaact

SEQ ID NO: 165970 - DNA, 251 bp, Zea mays
  unsure (1)..(251): unsure at all n locations
  Clone ID: MRT4577_82948C.1
cggccgctcgaggcgccggnncggctcttgcagacagacgcgccgtcttctgtctgcccattcatcctgctaggcacatcagggcttccagaattgattcgcgttcggtgggtcttagctagaggtaaaatttggaattggaggcatacgggatctgattccgctgctgcagtcaggatactcgactagtgcctcgtccggtaaacttgtcgagtacgtagatcttcttgttcgtcacccaaaaaaaacca

SEQ ID NO: 165971 - DNA, 369 bp, Zea mays
  Clone ID: MRT4577_82949C.1
actaaaataaaggtctatattataccataatttacaagtttttatcgcaagggggtttttcaaacaacggcagatttactcgttgtcctcgaggatcatggcagctcccttgtacccaatgaggtacgcacgggcttgggtgttgccggacgtgatctcgcgttggatggagttgacaatgacacggaggcgttggaggccgtgaacgcggaggcagtggtcaacgacggcagtggggccagaggcggattccatcttggcagattcagccatgtggtttccagagttggtgttgggggcacaccaagcggaaccaatgatgtagttggacaaggggcattcgtcccacgctgagggtccagaggtgac

SEQ ID NO: 165972 - DNA, 626 bp, Zea mays
  unsure (1)..(626): unsure at all n locations
  Clone ID: MRT4577_8294C.1
tagcagtaaatgtcataactatataatagttctatatcatcataagatattacaaataagtaatgatctaaaatgttcattctagttattaataaaaatcaatatacatattgaagaatggttatgatttttaactggcggtcataatgtgctacaaaactgagaaaaaaatcctaaaaatcaaaatgtttaaatgagaaaaaggtaaaaacttttatgcttagaagattctattctggtatgccaagagggtgcacaggaggaagtatatagagcatttggagtccttaagactcactttcatattctcgctagcttaggtcgttcttttcaccactatgtgtgtggtgtgattatgtgtgtatgtatcattctgtataacatgattattaaggatgagtgaaggatcatatgatatgctcggctacaagatagtcgagtcctctgttgcaacactaaccatcacctccaaagcattgatggactttgtagccatccttcaacatgaggcttaattatgctagtctagtgcatggtcagctctaagataatttaatggagcatatctgagatctacactatagaaatagattttatnnttatgaattatgcattttaaataatac

SEQ ID NO: 165973 - DNA, 278 bp, Zea mays
  Clone ID: MRT4577_82950C.1
tttttttttttttgttttttttttttttttttgttttgttttttttttttttttttttttttttttttttttttttttttgggcttgggccttccttggtttttatgttcgaaattttttccggcggtttcaaacttcccaacccatccatgtccaaattccaatccgggtaaaggctagacgtttttgccccatttgggttctgggtttaaccccaaaaacttggggattccccggttggcaagataataaagactgtgcccctgtgcagggggaac

SEQ ID NO: 165974 - DNA, 231 bp, Zea mays
  Clone ID: MRT4577_82951C.1
cctactgctactctgggtcactctacaacaccaaatgagcgacccatccatgcatcccatcctgcattagggggatgcatcatccttataccctattctatcataattattaactcatcattctatcatacatttttatatatttggcttattacttttacttttattttcctcgcttcttcagtttatacattgattttgattggtgttatcgtgatattctttttttta

SEQ ID NO: 165975 - DNA, 246 bp, Zea mays
  Clone ID: MRT4577_82952C.1
tgctcaaaaactctctactacgctcctttctttccccatacttttcaatacctgtgaacaccgactgctataacccatgtattcaatgctacatgacccaacatgcaatatcaactagcatcttacctttatcatccttgatcatacaacaaccgtcaaccctattacagcatttaccttatgcgcatttgctggcacaaaatatattcgtacaacaactacaacatcttgcgctctgaaaccttg

SEQ ID NO: 165976 - DNA, 279 bp, Zea mays
  Clone ID: MRT4577_82953C.1
gggccacctggccctgcaggatatagaggccaccctggagctccggggccttcggggagccctggcttgcctggagtgcctggctccatgggagacatggtgaattatgatgaactcaagaggttcatcagacaagagatcattaaaatggttgatgagagaatggcttactacaccttcaggatgcagatccccatggagatggcggcagctccgggacgaccagggcctccagtgaaggatggtgctccgggcagtccaggtgctccagggtcacct

SEQ ID NO: 165977 - DNA, 599 bp, Zea mays
  Clone ID: MRT4577_82954C.1
ccaaacccagcttgatcctctacaacggccgcccttctctttttccttttttttttttttctccttttttttccatctcctttttttttgtatttattttttttaccttaatacttcttcctacctcttcctttcttttcactttacactcatatacctcccatcaaaaaaaaaaaaacaaaccattttcacacctcaacttaaaaacaccacccaccatttcccccataatacatccccctccaaaaccctaacaccccccctcttctaaacattataactaaaccactctccctttaaataaaaacacattctccccacacaacaaaatactattcacaaccctttccaaaaaccccccctttcaaaaaaaactcccccagcaaaaaaaaaataacccctcccttcacaaataggtcttccatctcattgtccaccccccccatcttttcttaaaacaaaaaaccaccccacaccaattccttttctcccttaaaattatttttaaaaccaccaattcccaacacccccctaacaaaccttttaacctttccccccccaaattataataaacttttcttaaaacaaattctcccccc

SEQ ID NO: 165978 - DNA, 300 bp, Zea mays
  Clone ID: MRT4577_82955C.1
tttgtccagaatctcgcccttaacgtaaaaaaaaaacaaaaaaacaaaactttaatattttaaaataaaaaaaaaataaaaataaataaaaaaaaaaaaaaatttttttctactttataaaaaaactatttatttatatttctgataatcccccttaaactacacacattctgatgggcgatatgacggaccctatatgcctcatattaaagcggcgggttttaccattacccacattttaaaacattacattggcaaaacccttacaccctctcctttaaaaaacctcccttgctttct

SEQ ID NO: 165979 - DNA, 728 bp, Zea mays
  Clone ID: MRT4577_82956C.1
cccgggctctcccccaatccctcccaccaccaccagattcgcctcgcctcctcgacgcccctccctcacccttgatgccacgcccccctcccatggcgccacgcccgcgcccctccccacccgcccgagccgcgacgctgaccctcctcctcccgctcctcctcctcgcctctccgtccctcccctccgccgccgctgccccctcgccgccgacggtgcccgccacgcagcggcaggccgcgtccgcgtccgacgccccgtcccctcctccccctccggcgcagcagcacccacggaggcaccgccaccggcactggaagcaccggccgccgcccccgcacccgccgccgccgcccaggcggcgtcggctcaacttcggggagtcggctcgggatcgccttcgccggcgtggctatcgcaatgcaggtcgtcctcggcgccttcctcgcgctgcgcgcgtggcagctgcggcggctcgacaaggccgaggtgtcctcctccacgcccctcacctgaccaccgtctccccgcccgaagctcgtcgagtgcatcagtcaggtccgcggtttatttgtgatctgatctgatgctgctgtaaacgaatccatggtgtagtagctgcacgtgtacgggttcggcaccattctttccgttctgatgtactaccctgtacaatctgcttatgctccgtgcaggctctagttgagaggcttgtgtgtgttatgaga

SEQ ID NO: 165980 - DNA, 270 bp, Zea mays
  Clone ID: MRT4577_82957C.1
ctcacaggtgccatggtcctcctcgcccttcctctcatcatccctgcctggtccagttgctcagatggccctgaccctgcatatgatgacccacataagccactcctgatcagtcagatggagtccaatgccaggatgcaaaagccaaaggagaaccagatgcaggtcaagggccgcctggcgacgctcggtgaagaacacagtgcaaagaaactcattcggtgtgtggacttctggctctactacacagcctacttctgtggagccact

SEQ ID NO: 165981 - DNA, 434 bp, Zea mays
  Clone ID: MRT4577_82958C.1
catccaaatgggttagttttcaaaaatccaatttgacaagggacagaaatttaagcattcccggggtcaatacaagagaaaactcacatggggggggggggggtatcactacccgaacatgtaaaactccagcatctcttcttccaaaagaagaaactttcccactgtggtcaggccgcgaagggggggaccaaaaacaacatctagtagcttctacatagggccagcaaccatcttttgatcatcacttacaaggggggccacacccaagcacaaaggtttcctgcgagatgcataacccccacgtgcttcctccacctcaaaaagcggacttattgcaaagattacagccatgaattttggtgggtcaaaaactttttttcctctggcaaaaaaataccaagttggctgcttgacaccgatatcaagcaggg

SEQ ID NO: 165982 - DNA, 1383 bp, Zea mays
  Clone ID: MRT4577_82959C.1
ggctgcattggtaccctcgaggccggccgggaaaaattcgccacggtccccgtctctcccctagtcccctccgacctcttctaaaaatcctggtggctggctctcgttgtcctcaagcagtcaagctcctcctcctcctcccccccagtccctcccaggctcccaccccgccttgctcgcagcctccccaaaaccctagccctagccctagccctagccctagctctcccacacccgcactgggagatggacggcggcggcacgcaccgcacgccggaagacgtgttccgggatttccgcgcgcggcgggctggtatgatcaaagcgctcaccaccgacgtggagaagttctaccagcagtgtgacccagagaaagagaatctgtgtttgtatggtcttcccaatgaaacatgggaagtgaacttgcctgcagaggaggttcctcctgaacttccagagccagctctgggaattaattttgctcgtgacgggatggatgaaaaagattggctgtcactagtcgcggtgcacagtgatgcttggttgctggctgtggccttttacttcggtgcaagatttggttttgacaaagaatccaggaagcgcctttttgtcatgattaataacctccctacaatatatgaagttgtcacgggaactgccaagaagcaaaccaaggagaaaactcccaaaagcagcagcaagagcaataaagctggcccaaaaccgccacgccagccagaacccaactcaaggggttcgaagatgccacctccgaaggatgaggatgacagcggaggcgaggaagaggaggaagaggaagatcacgaaaacacgctgtgtggttcttgtggtgacaactacggacaggatgagttctggatatgctgtgatgcgtgcgagacttggttccatggcaagtgtgtcaagatcactcctgccaaggccgaacacatcaagcactacaagtgtccgaactgcagcggtagtggcaagagagcccgagcatgatgatgctggatatatccatctctcatgcctgacttgatgtaaaacacccacatggggaccgaatgcccgatggttgttgctttcagtgtaggaccagctgtagggtcttgatgtgctgtttgctgtagtatgtcaaagacgttctagatctattgttagtaactagcaactaattgtagtagcctgtatttcttcaatcttctccccagggcgcctgtgctgaactcaaactgttttagatctaagttgtgcattatgtatcactcatgttagtttgttaaaaaatgtgttagcattcgtatgaaacgccaaccatgtttacaaattaattaacttcaagtctattttgctcgcaaaaaaaacccccccccc

SEQ ID NO: 165983 - DNA, 402 bp, Zea mays
  unsure (1)..(402): unsure at all n locations
  Clone ID: MRT4577_8295C.1
gtacagtttaattccattgcaaaattatttttcattttccatcatcagccgagggcctggtagaatgtgcatccagtaaacgcagagcacctttcacccgccctgttctccagtttctttmtgtcacgggatatagtacattgggttagggagcttgaaagagcgagngctcatggaagatcccagcaggtggctccattggtcgccggagttgcctaggatcctgtaaccctcctgttccatttcgtccctcttctctgatttgtagactgthgctgttttctdgcggtcacctgctgccctgagtatgagcttctvccagtcatggaacccctgcttgttgaggttctccaccgtgactcctcggtgcgcctdgcttctgcccgtgagcaggaaggtctc

SEQ ID NO: 165984 - DNA, 212 bp, Zea mays
  Clone ID: MRT4577_82960C.1
gagatggatcggccccgccaaccgacagccaggggggttttttttaatagcgggggtctttcaaccaacgctgccggcaaacctctgcttgacatgaatgacacgctcaaagagttttctttactgtcatgaaccgaagatgcaacggccaaagatctaacacaaagcatcgacaacggtgcaccttacgatgattccaataaagctcttaa

SEQ ID NO: 165985 - DNA, 779 bp, Zea mays
  Clone ID: MRT4577_82961C.1
ccggccgggacgccacaactccgaggttccagcgcaaccaccaacctcgctttcttgatctcaatacaactttcgtatcgctgccatgaagtacgcatatgctcttctagcccttgcggctgcagtctctgctgcccccgcccctgtaccagaggcagctcctgaggcccagcctgatgctgcaccagcagctccgggctatgggaaatatgccgactacggcaagtaccctcctcctgcgggcggttacggaaagtacgcagactacggaaagtacggagcaaaggacaagcgagaggcagaggccagccctgacggctatggcaagtacgccaattacggcaaatacccaccgcccaagggtggctatggaaaatacgcagactacggcaagtacggagcaaaggacaagagggaggccgaggccagccctgacggctacggaaagtacgccaattacggcgattaccctcctcccaagggtggctatggaaagtacgccaactatggcaaatacggagccaaggacaagcgtgaggccgaacctgaggccgagcccgaggccaaccctgacggctacggcaaatacgccgactacggcaagtaccctcctcccaagggtggctacggaagctatggcacatacaagcgcgaagccgcccccgaagcagagcccgaagccaaccccgatggctacggcaagtacgccgactacggcaagtaccctcctcctgccggcggctacggcaagtacgcaaactacgggcagtacggtgcca

SEQ ID NO: 165986 - DNA, 360 bp, Zea mays
  Clone ID: MRT4577_82962C.1
gaaagttatgagtcagttgcaagaactgataccaacgggcctcatcctacacaatacgggcgtacattatccgtctggactaaggataacattacagaaccgaacaggatgactagggcaaacgcgcccaatggctgagaatctccagttgcgatgtgaatggccgtagccaatcacactacatgccgaccgacgcacacggcatcaccaatgaccgtactcatcgtccaaccagcaggcgactggaacgtcatagaccgcgacatcatcactgctcacggcaccgccatagacgtcaactacactgtcaccaacttacccagcgatagcaccttcactgacgacgcgggactgggcctc

SEQ ID NO: 165987 - DNA, 230 bp, Zea mays
  Clone ID: MRT4577_82963C.1
gcgggaattcggcatagagctgggttcgcgagggaactatgctttgccgtcgttggacctcaggcatttggtgggtgttattggggttgacagtgttctgccacgcacgacgatgatgatttgaatggttgagatccatcaagaaacactccttcgctgcatcttcctatcctgtgaatataacatcttgaagaccaccttccctttcaactttcagtataaaagttgcc

SEQ ID NO: 165988 - DNA, 366 bp, Zea mays
  Clone ID: MRT4577_82964C.1
ataacagattattgataagaaataggtgaaagaagcgtaaaatctacaggtataatagaatacgtcaaaatgatgatagattgaataaagattagacttttgaaaatagtgacagaaatagaggccaaaagtacctataaaaataaagtgaaaagagagaatacacttacctaatcatctatgctaagataaatataaaaggtgaataagaaagaaactatcacagagtgctattttgagcttagaaaaagtcacatagaattgatattgaaaacgctaaaaagtcgacactaataaaattacaaaaagaagaaaaaaaaaataaaaaaaaatgaaaaaagtaaaacaaataaaaggtgtaaacaa

SEQ ID NO: 165989 - DNA, 1079 bp, Zea mays
  Clone ID: MRT4577_82966C.1
tatacattgcagagctcagctcgagttgggcttctgaagagggagactacagacactagagatggcagcgagctttctatattgagtgatgatgagacagcacgtcgatcacttcctgagactggggaatcccatgcttttaggaatacggaagaaagggacttctcctacgtgtttgatatgcttgctgctctgggcatccacgcggccaacgaggatgacctccttgacaactgctacttactggagtgctctgcaggccttgatttatacgatgacctcgaacagaagtacgacagcctcattttatggcctgtgcatgagaggaagctcttgtttgatatcacgaatgctgttcttggggacatgatcacctccgtgatgaacggctgctcgaagggactgatggcgaggtgctcgcctggatggaatcgggaagagtttgctgagctcgtgtggcaaagggtggtgcagctccggcaagagatagagttcaaccaggaagccctgctgttgagcgtagagtgggctggctctgaagatggcgccagtctggtcgggcgcgatatcgggaatatgttgcaagatgatctcgtacaggaaattatagctgactttctgggggcaactaaatccgccaagctccgtggctagaattgccagtgtttgcatccgaggccattgcaagcatatgcatatggattggtcgctggtgaactctagtggacgatgagccttcgatgaattgcttaaggaggggactgtaattcaaggaattcacctcatggctactgaagacatgagctaagatggcttaggtgatggtggggcatcaaacaagcagtgtcgaagtttgacctagttgtgtcatgctcgtcagctcatcaccattggccccgaactcagcaatagcgtacaactggatgatttcccccctctgaactttgaaaatattttttttcattaggttatcataatgctggaatatagatgcacaattttggtgtaaaataatctctggcggattttagtttgtttatcatgggatgcaataaggacagtgtcagttgagacatctt

SEQ ID NO: 165990 - DNA, 462 bp, Zea mays
  Clone ID: MRT4577_82967C.1
tgcagggcccgcgcaactgcactcgacgtgaacccatatccaggaccagcgttgcctaatcctagaaaatgcacagatgaacagacctggaagatcaatcgctagcggaggagctacatccatttcatgctcatgctgatgggcatctgaaactagacggggcagaatctgaagtggtcccacaagggaccacaagagtgtgttctgtatgcaaatgtatgtgaaaggctgactagatacaatctatcaactcttatcaaaggcatcaaaacgccgcgaggatgggattataatctgacctaatctctacctgtccatacgagtcttattactcactactagctgatatggtgctttacatgctgtacatatttgcacatgacatgtaccatgaaatattagatcatggtaaaaccttcaacttttttgtgacaattatagtccatcgaatctgacaaacac

SEQ ID NO: 165991 - DNA, 342 bp, Zea mays
  unsure (1)..(342): unsure at all n locations
  Clone ID: MRT4577_82968C.1
ctttcttttgaggagngcatgcagcggggtagagcgaacaggaggnncangacgcgcgacgacgggccggcgnggagcacgaggcaggcgccgccgggcccgcnccagcncagggnggnggngacgggcgggnacgacggcaagngggngngggccgaccgcgaggngcngccggggggggggggcnccnncnangncnacnacacagaacaaacaaaacacnnacnncncccaaaaaggcngcnncccnngccacacgcacnaangggaggaggagngacggcaccagcagagcagaggcngcaacggaacccgcngaggacnggagcccgcgggcngcgg

SEQ ID NO: 165992 - DNA, 381 bp, Zea mays
  Clone ID: MRT4577_82969C.1
cccaccgcctccgccgccgacaacagggtggtggagtgtagttccggaaagggttggggagagtagtagtgatccgcaatgtcgacggaggaggctgttgtggctgaggtcccggtgaccgaggtgccagcggaggtcccggcggcccatgtggcctaggcgcccaaggcgaagaaggcgcggcaggagaataaggctcctaaggagaagaagcttttcgcggataataagccggcggcgcaccctacctactctgagatgattgtacaggcgatcgctgttttcaaggagaggaatgggtctagctccgtagccataatcaagtacttctaggggaagcatggcggcaagctcttccaccaacttacccaagcatgttac

SEQ ID NO: 165993 - DNA, 639 bp, Zea mays
  unsure (1)..(639): unsure at all n locations
  Clone ID: MRT4577_8296C.1
cacattcttggcagttgttcaagttattgagcgctgatctaagtgccatctgaacagctgaagtgacatcgaagcttgtaatgttatcctctgagcagtatatgcatattgcatccaatgagtttcccaccttcatacagatattttccccctgaataactatcaggaacttcatatgactaagatattgatctcaagcaagtctgcagctaatatttcatcaagtttgtccaggtgtatgtcatgcatttcaacttatgtgacattgatctctctttctgattcttctactagaaatttggtctacaatgccatcagtgtaaaattgtgggatctaaagtgccaagtgaaaactttatctttactgtgactgtaaactttggttggagtttccacctggggagttaacatcatgctgatgagccactttggcgtattgtagcctctagatcacttaaaccatatgaatcagctatgtgaagatctgaggatattaggatatcacctatgngagatgatataactgaatatcaatccaaattgactttcttgtgttcatgtncttagtgatgcagggcattttcacatgggaaacttcagttgctgactcaatgataatctgtcaaagacactgtctac

SEQ ID NO: 165994 - DNA, 267 bp, Zea mays
  Clone ID: MRT4577_82970C.1
gcttcttttttgcctcatctgtccgtccacgctttcgcccacgtgtccagtccaagcaggggctcactgcgccgtggggctatttgacccaccggcggcgatggcggcccagccttcgtgggcaagcctgaagaagaagggcccgatgcccaaaggagggcacgctatgtaccacccgcaagatgacggacacatggggggacatacagagtgcataaggacctgatgaacccaacggtgcggagtaatagggccaggcaccaaagc

SEQ ID NO: 165995 - DNA, 757 bp, Zea mays
  Clone ID: MRT4577_82971C.1
ccggccggagtcccagccgccaccgtgcgtctgtgcaagtggccttcggcggtgcgcagagcagagctggtgacgtggcccgtggtgcgcgtttccctgcagcctcgaggtctgcacgccgccggcctccctctcagcgccacgcgccgccggcctccgttgctcactaccggacttcgcacacgcccggtggcggccgaccatcctcggaggtgcagttacgcgcgccgtaggaaggtttttcttccatcatttgtgtgttcgttcaactgagccgccatgcgccagccacggtccgggccggggaagaggcggggccgcggtccgcgcatccctgcggcgacgcttcagaagcagaaaacggcgttggcgaacgtcgaccagatcaccggcgccaagattccgaagagcttcgtattctcccgcggtaaactcccctccacgcttcgccatcttcagcaggacctccgcaaggtcatgctcccctacactgctctcaatctcaaggagaagaaacgaaataacctcaaggattttgtcaatgttgccggcccgatggatagaggagtactcacttgcggcggacattgcaaactctcagaagcgcccaaggtgcccaccagggatattcaaaaactcaccactggttgtacttggtgggttgacaggtctcggcaaccctttcaggagtttggtcgaatacttccaacatatgttcccttccgttgacccaaccactgtcaagctggcaacatgc

SEQ ID NO: 165996 - DNA, 350 bp, Zea mays
  Clone ID: MRT4577_82972C.1
ctctgtcaacagtgtcaagaaacttgtgctccataaaaagtatacaacagggtgctgcaatcttaattggtcggtgcccagccaatttcatgcagatgctaacccaacgtgcgacaactttcatgcatcacctttcgttattcattgccaactaaaagcttttggtagaacgtcaattccaagaggggttaacactgaagcgtcactgctggcgacatggtttctgctgactgctggcgacacgattccttggggggaattggagtccacgtcggatacacgagggcgcagttgcccacaggctgcttctgctaacgttttctagtagctcacagcacttaacgccaact

SEQ ID NO: 165997 - DNA, 2067 bp, Zea mays
  Clone ID: MRT4577_82973C.1
ccggtctcggaattcccgggtcggacccacgcgtccgcggacgcgtggggcaaaatttatatttagattagacatgaaaaaatattagaaataccaaagtaggatcatgtcagtgtatgagctagaaactacgaagtaatcacatggctaactatgtacacttgagcatacctttacgggccagaaaactaagtggaaagactaggcattggacttcagatagtggattttatgttttagagaaataagtaaagatcttttgacttgagtcagcaagtgtctcatgtttcacctgaaatgctctctggctgtgcatgtcctaaaaactattaatgattttaacttttacctttcaatttttcatttactagtttgctgtccacagattattttggtccaggttgttacttttatagattcaataactgttatccaaatattatgacctgatgtgttttctgaaaaagacctcgagcaggccggacactacagaccccgcccccaacctcggtcttttccagtcccagccgccaccgtgcgtctgtgcaagtggccttcggcggtgcgcagagcagagctggtgccgtggcccgtggtggtggcccgtggtgcgcgcttccctgcagcctcgaggtctgcacgccgccggcctccctcgtagcaccacgcgccgccggcctccctcgctcactaccggacttcgcacacgccggcgcggcggcggccgaccatcctcggaggtgcagttacgcgcgccgtaggaaggtttttcttccatcatttgtgtgttcgttcaactgagccgccatgcgccagccacggtccgggccggggaagaggcggggccgcggtccgcgcatccctgcggcgacgcttcagaagcagaaaacggcgttggcgaacgtcgaccagatcaccggcgccaagattccgaagagcttcgtattctcccgcggtaaactcccctccacgcttcgccatcttcagcaggacctccgcaaggtcatgctcccctacactgctctcaatctcaaggagaagaaacgaaataacctcaaggattttgtcaatgttgccggcccgatgggtgtgacacatttcttaatcctctcaaaccctcaaagcctgccacatttgcgctttgccaaatcaccgcagggcccaacattcacatttcagatagaggagtactcacttgcggcggacattgcaaactctcagaagcgcccaaggtgcccaccagggatattcaaaaactcaccactggttgtacttggtgggttgacaggtctcggcaaccctttcaggagtttggtcgaatacttccaacatatgttcccttccgttgacccaaccactgtcaagctggcaacatgccaaaggattctgttgttaaaacatgataaagagaaggatgttattgaattccggcattactccatcaagctccagcctgttggggtcagtcgcaggattagaaagctcatgcaaaacaatcaagtgcctgatctaggagaatttgaagatgttagtgagtttgtgaaaaaagctgggtatggatcagaaagtgaagcagacgatgaagcagcaatggtaagcttgccaagtgacattgacaaattaaaccgggcatccagaaaaagcgctgtcagactccaggagattggaccaaggatgactatgcgcctagttaaagttgaagctgggctatgttcaggagatgtcttatacccatggcctgtggaaaaggaagtggtgggaaagaaaggaacagaaactggggaagtagaagggcaagaagacgattctgaggccacagatgagtccgaggatgagatggtgtaggatttcagatgttttggacaggcagacgcaggtgttttgacagtcctggatgtttcatgctgaaaccaacgggccctgtgcccaataacgtggtgcattcatgccaattttgtcactgaaggtgcattgcattcgttgtaacgaagtgtaacattgttttgccgatggttacctcttttgtgttatgacaagtttggaggatagtttttggttcgcagtcta

SEQ ID NO: 165998 - DNA, 442 bp, Zea mays
  Clone ID: MRT4577_82974C.1
gacgtcgtggggcacgagcctgcctgctacctcaccttgaacgcgcagccgccgcctgcgccacgcgtgaagaagcagccgcctgcgctccccccgaatcaccgcccggagctccgcgacttcggcggcgtcacgcagcctcagacacgggagcgcttcagcgtcgtcgtcgtcgtcgttgcggccgttctacaacttcatgccgctgccggttggtccagttcgctgtgagaggcccctgagcgagatcaaggccgacgtctccgacggcgtcgacctggaactgaagctgtaagggagcgcatataactggaaccctcactccctctgttgtatgttccttcctgcagcgggaacagcgctcgtcgtcgtccagaagaagactgtggcggcgtgtttggttttgtaacctgaaacaccgccatgtgcatcagaatctgcg

SEQ ID NO: 165999 - DNA, 810 bp, Zea mays
  unsure (1)..(810): unsure at all n locations
  Clone ID: MRT4577_82976C.1
aattcggcacgagggtttccagaggcttggtcatattgtaatattcacaaagttgtcctcagtcgggtttggcatttcctacaaaatggatgttatgggtccaaacaagtttcatatcctcttctagttcagtttttggactctatgccacctaaagcagtcatgggacaacaatttgtttttgattttttgcataatctttgggctggaaggaaccagaggcagttatcagctgctgatagtttggctttctgtggtgcctttaaacagagttttttgtggcttctaaaaaatgcatcaagatattctactggagattcttcagatgatatacccatcaagcttataactgatgtacttgccaaaatagtttggcgtgactaccttttattgtctggagacacaattggtggcggtgttctcttatctcgtaaaacttcagggttagctgcgaacatgcactacccaacatactatcttcaggatttgaagaaatgcatcattgaaatactggatgtgattgcagatacagaaaatcatttacttaatatttcttgtcagtcgctgttaagtgactgtttggacataattcaacaaggagagaagctntccaagtttcagaatcatgtagaacaacttgtgtcgttctttctatctttggatcaaattgttgtatgcaaaggtgaattatggccactggaaaggttagcanaaccattggttgagcaatctttgccagctattaagntcatggacactccatgccttgntaaactcttttcagtttggttgaatatttgggcccacccc

SEQ ID NO: 166000 - DNA, 119 bp, Zea mays
  Clone ID: MRT4577_82977C.1
ataaatattctcaaaccctatctcacgatctcgatgtgcgaacactcgcgtcttctgcagtcatgaccgtcggcggtgcacctgctattcggatcgtgaatagagctgtctagacaacg

SEQ ID NO: 166001 - DNA, 238 bp, Zea mays
  Clone ID: MRT4577_82978C.1
ccctggtgttcctggctgagctcgtagctggcatttcagggtttgtgtttcgtcatgagatcaaggacaccttcctgaggacttacacggacgctatgcagacttacaatggcaatgatgagaggagccgggcagtggaccatgtgcagcgcagcctgagctgctgtggtgtgcagaactacaccaactggagcaccagcccctacttcctggagcatggcatcccccccagctgctg

SEQ ID NO: 166002 - DNA, 274 bp, Zea mays
  Clone ID: MRT4577_82979C.1
agtccagtaagcaacatagcaagtggaatccagtatcaacaacagatcaatgatggcgaccaagatattatccctccttatgatccttgctctttctgcatgtgttgctaacgctacaactttcccattatgctcactagctcctatagcttcccttcttcccccatagcttccatcaatgatagcttcagtatgtgtagacccagctcttcagcgctataggctccaacaagcaatcgcagcaatcaacatacctgtatcaccctgttgtttc

SEQ ID NO: 166003 - DNA, 262 bp, Zea mays
  Clone ID: MRT4577_8297C.1
ttctggctagatttccagcaagggccgacgccacaaagacctgaaagccaagatctcgaacttaggactcggtaggcgtctgatccgctaggcgacctatgtgagcaccctagtggtaagaacataaaggtacttggatcctgaatacgcgatcagaggcccagtgacaaactaatccgagagctatagatagggaggttttctatgatagatagtaacagacagatgcaataccaaacacgagaatacctatagaggacca

SEQ ID NO: 166004 - DNA, 294 bp, Zea mays
  Clone ID: MRT4577_82980C.1
cccacgcgtacggaccagcttaaggcgtaaggtgctggggtggagcgacatgggagatttttgagaatgatcaaattgtgaaacttatatttgatgcctctttgcaccaagtttgccatttggatcattggaccgcttgatgcagtactgtatggctcgtcttgggcttgccagcttgatggaaagtcccccccttatgctgtaaaaaactggtggccttaccgatgaacacaattcccgtgatgatgccacagactgattacgctctaatatgatgtcaccattgttgatgcc

SEQ ID NO: 166005 - DNA, 1598 bp, Zea mays
  Clone ID: MRT4577_82981C.1
ggaacccccgagttcggccgggatacgggtttttgcaacatttatccgaagacatgccaatctttttgtaggccaacatttttcaccatacaacatagcaagtctaattgtcgtcctatgaaacttgcttttataaaataaacaactatagtttttcctccatatcttaaaatttgtgtcttcaatattggtttagcgtgttggtatccaatggttattattatcaatgatgattaaaaatttaaaattaccagtggctagatgcttgtgttttatgtgagaacttctagtatatatccttttttagtgcgtctcatgaggattgatgtggatgctttatagcgagactgtttgtgtttccttggtgattacttactgttgtgtgtctatttgaatacgttgttctagtttgtaatgtgccttcctacggtttgttacagttccaacagcatggaaaaagtctacgccatcagcagtcctagtaagaaaagaaaatcacagtatgagctgagtgatccaaagttgctaccacttaaatgcaagtttcgcaaacggttatattgccaggatgatgagtctgcaaccacagaaagtttaggatatgatggtattttcatgaacaagacctctgggacggacatggtcagcatacctgaagaattggactcttgtgagaacactataagcctgttttgtgggtgcattgaagttgactcaaaaaatggaattcaggaacaatctttgagaaaaatgtttgagatccggacatctgcatccagtagctcgagcaacaatttttcatcagaggcttttagttcttcccatagcagcggcacgagagacactgacagctgggctatggacgatatagagcgtcatcatccatatgtgatgctgaaaccgcataatgacgaccttgaaaggatattcaacgtgcttgaacagtatgatgacctaatggaggacgaactaatggctggcgatgtttttggttctgctgctcaggtcatggatgaaaagctttactcgaatagcgttgacgattttcagattttgccaacaggtcagactggctatcacggtgagaagaagctaaccatcgatcaagaatttgagcagtattttgcgaacctcatgctgtaggatcgagtggataattttgtgacagaaatggcgttgcgacatccaaacatggtttgcttgctgagcaaagtggcgaaccttggctaccattggagctatcgttctatggtgctgtttggtaacataaatggtaatgataataattcacacctgagtaccaacgacccgagtaccaacggtaacaagtttaaataggtcgatattagttcttagtgtggtatctgattacgattggatttaaacaaacataatttaatgtttatcggttacttattacattacaaatatgtgaaccaaacggcacatatttgtacaccgagtcctatcacttaatgtatatacgtgtgaaatgtgtatcttttccagcttgtccatcaaatgttggcatcatgatgtatgttaacgtgtgcagataagaacatgtctatgcaatatagtaatagtgcattccttct

SEQ ID NO: 166006 - DNA, 338 bp, Zea mays
  Clone ID: MRT4577_82982C.1
accacacgtccgcatgatctcacagggcggcctgcagacaatctatgagaagtacacctgaagactctactcccagaggctgatgaccctgaccggagagtaccgcttctggaagtacgtgaacatcctgcagatgtctatacccgcggctacatacagatgttgtacgccctgaagtaccgtagcctggcaaggcaggttcctctgggcttggattaatacggtgaaagaaggagaagaacaagaagaagcccaggccggacaaccatagcctgcatttagatctgcttaaccacaattcgcattgttagtcgtgtattggagctatatgcacttgg

SEQ ID NO: 166007 - DNA, 958 bp, Zea mays
  unsure (1)..(958): unsure at all n locations
  Clone ID: MRT4577_82983C.1
gttcnagaacaacacaccctcctcgtcctccaatccaatcaacctggtagactcgcttcgcttctcccccagccgtcggacggagctcctcgcagtcgcagcagccgccgatcagcctgcgctcgggctcagcgctggaaggtgttggaagagaatagcctgaaggttcacagtaaccttcatctgtcggtagatgtatcgggctaagagggctgcattgtcaccgaaggtgaagcgccgcgtcggcaagtacgagctcgggcgcaccattggggaagggaccttcgccaaggtccggtttgcgaagaacaccgaaaacggggaacctgttgctatcaaaatccttgacaaggagaaggttaagaggcacagattggttgagcaggtcagtatccgtccactattcctttctgagaccatgcactggctagcttcttgttatatccattttccgtcagtaccatgatgcatggatcaaacttttagttaactacaaacattgaggttaaaagcctttatgctcccctgtcgaagccgtgttgtgtgactttcgatttcgaaaacggtaaggagttcagtttgccatgcagccaatcatgtcctcgttcctaacagtcactagctggaccatgtgatttcctttcgtcaaaaatcaaaattcactgccgtcacttacatctttctatcaaaaggaacgaggtggagaatgaattttcttccttggatgctgccgtgacagcatgggagcataggaagatgtaacttcaattaagaaacgatacgtcgatactatacctgcatatttgcatgccatcgagatatatccacatggtggtcttccagttcaagtcatactaccaactcagtatgttcgttctcctggtgccttgtgctgtttccagttgcagtctgaactttgtgcaaattgaacacttcagtgggatgactgtttccaccg

SEQ ID NO: 166008 - DNA, 367 bp, Zea mays
  Clone ID: MRT4577_82984C.1
cttattcgcagcgtcttagatccatcttcagatgaattccttgctcgcgctctggctgggagtgacggcatcatcccagtcccctcccgcctctggccagtttgatcacgcccccggctacggtgcaccgcacaccggccggtgaccctacatcacttgctaatctttcttgagggcacatggccgcttcttttgcaaatgtcaacgccgatgcagggctgaaaaagcttgatgagtaccttctcactcgcgagctacatgaatggctacgaagcttccaacgatgacctggctgactactcttcatttatggatgatccgtcatccaagtatatcaatgcagcaagggggattaatcacattgatg

SEQ ID NO: 166009 - DNA, 261 bp, Zea mays
  unsure (1)..(261): unsure at all n locations
  Clone ID: MRT4577_82985C.1
gcagggacgcgggcccgggacggaatgtcccgggctcgaaacccacgcgtcccccgcccacgtcgtccgcgtgacgtcgttggnngcctcgatacccgcagtcnatgtgcgtcacgattgcatccgtggaatggggcatacgctttcaaggggtcccatngccactgnnttcctccnnngtcgccgattgacctggcgacccagggctgcgcccaaagctnattccaagggggtggnnggcacgaaccgaannngcgctca

SEQ ID NO: 166010 - DNA, 231 bp, Zea mays
  Clone ID: MRT4577_82986C.1
gggtggctaatctgggtaagagcgcacgcgcaatattgcgtaccgtattgttacaagggggggcttatgagaaggaaacgttcgtgttgcgtacatatggtggtccgacccacataatagagggcggtttactggcccaaacaatcgtaactagttgaccataccccctagtctgacgactaatcgttattagtctgcgactaggacgactaatctctatctattctctct

SEQ ID NO: 166011 - DNA, 260 bp, Zea mays
  Clone ID: MRT4577_82987C.1
agctaggagagttagggttcaaactcacatgggcgggcatactgaacatatatctaaactatcaaagccacatgatcttttctaactcatcatcacgataagaccaccaactgataccattaactacagatacattgagtctaccagctcacctcacacaactagtagcagcgttcaatcataccagtccagccctactacttccgcgcgcttgactactctggatacataaagggtgtaaacgtaatattctagacctt

SEQ ID NO: 166012 - DNA, 513 bp, Zea mays
  Clone ID: MRT4577_82988C.1
cggccgcgtcgaccgcttacctttcgggtttttaattttttttaatttagttttcactaaacaccgaccgtaaaaaatggccgctggaaagaaacagaaaaaagctttggaaagcatcaacaccaagttagctcttgtcatgaagtcaggaaaatgtgtcttgggcctgaagcaatcgttgaaaacactaagacaaggaaaatctaagctggtcatcattgcaaacaacacatctccattaagagtatcggagattgagtactacgcaatgttgtctaagactgatgttttccaatactcaggcaacaacattgaattaggtaccgcatgtggtaaatacttcagggttgctactttgtcaatcaccgacccaggtgattcagatatcatcaaaactatacctactgaccaagccaaccaataattgctatgtgtaatattttgatttaataaatattttttcccaaaaaaaaagtcgacgcggccgcaaaaaaaaaaaaaaaaaaaaaaaaa

SEQ ID NO: 166013 - DNA, 487 bp, Zea mays
  Clone ID: MRT4577_82989C.1
ttccaatacacagtacactcactccttcccagctgaggacggcacaggggcacagagcgtctacaacgacacaggcgccacacatgcttatcccagctctccgccgccgagccccggttccacggcctccggggatacgccgcgcccagcgccgcggtggtgactctgccgtccgtgagggcgaccatgaagaggccgtcgtcgcaaggtatcagctgcgactacatcggctccgccaccaaactgatcatgatgacgacgacgacactgatgttgttcgcggaatggttcactctggcgccgtcggtaaatcgcatggcgatttctctgttgaatctgtaggcgcgcgactacgaactggagacctatgaccacgccgagatcacccactacgacatgatatactgggggtccgccagtcacatcgtcggcgtcgagataaagcacttactccggtatatcgttgtcatccatctcagcaacactt

SEQ ID NO: 166014 - DNA, 213 bp, Zea mays
  unsure (1)..(213): unsure at all n locations
  Clone ID: MRT4577_8298C.1
ccgtccgaaggcttctcgaagcctccgaaaccctttccgcgatctntnntcttccgccccgcttcaatctnnntctttggcgcaaggaactcacgttttcgctttcttcgggttcttctcttttcgactttcggcccccgaataaagaatgnngcgtcggcttggcgccgcctccttcgnnncgccgatctccaaggcgccgnngcgtcgtct

SEQ ID NO: 166015 - DNA, 418 bp, Zea mays
  unsure (1)..(418): unsure at all n locations
  Clone ID: MRT4577_82990C.1
cccacgcgtccgcggacgcgtgggcttggataacaaattatgttttatggttcctcagtttagagatgaatctgtgttatttgatgtgctaggtataaccattgaacctcgtttgccttcaagttgaataaaaacagggttgtcggaggtattttgtagttttgtccagaaatgcaatgtgttttcttgcccaaaggctgtatgtttacggcttacctagtggtgcttgtatctagcgaaatgataatatgatatgacagccttcgaatatcttctgtgctaatgatggaattgcaaaggatctaccatttattttcttcctcagatgttgcttatgtcctacaaagcccatgaaaaaccattgagctaatcttggagattntggctcaatggacagatttgagaagtgaatgggtga

SEQ ID NO: 166016 - DNA, 608 bp, Zea mays
  Clone ID: MRT4577_82991C.1
cctccgtcggccgtcgcgatgatccgagttctactgcccctggttctgctgttggcgctggctggagcgtatgcacagcccggatgcggcgagtatattggcgacagtcgtcgcgtgggcatgtgaggtacacaggataggacgtacagaatgaggacgtacgcgcatccaggcacatagtctaggcccgcggtctacgacgtggaggaggtagctcagggcgccgtatcgagtgttgtggagcaggggtaggagcgttactgaggatgatgcgtggcacggaagagaacacggcggtccttttttatgcaggatggtgcgctttctagaacagaagcagatcagtcttgggtgatctggacggaatgatttcacagggataaggactaggccgcggaagagtccagcggcatgagagccatggtgtcaaggaaccatgtacgagcactgcgttccataataatatgtttggaacggacacgtgatctggggtcttggaggggaagatatggactacgtggacaggatttaaaatgatgttgcaggtgaagaggcacgggcatacataggtggacggaagtgggagcgcactgtaaagccagacggct

SEQ ID NO: 166017 - DNA, 1166 bp, Zea mays
  Clone ID: MRT4577_82992C.1
gacccagcgtccgcccaacgtccgggccgccgtgcagccggcgtcgcgcgtgcatcacaacgagattcagagcccgagcccgagccccagccccagaccaacgacgagaaaggacaatctgcggcggacctacccgaagtcggaggcagggcaaaaggcccgatcccccctccccgccggttgccgcgctcgtgccacggtgcgctagccccgtcgacgccggcggacagcgtgcactatgggttgctcctcctccgtgccagctagaaatactggagggctgaacactatcagcaacgatagctctccagacgccagttcaaaggacttgcgtgctaagttggtattgctgggagactcaggtgttgggaaaagttgcattgttcttcgttttgttcgtggtcagtttgatcctacttccaaggtaactgttggcgcatcttttttatcacaaacattggcattggaggattcaacaatagtgaagtttgaaatttgggatactgctgggcaagagaggtatgctgccttggcgccactttactacagaggagctgctgctgcaattgttgtctatgatataacaagtccggaatcatttagcaaagcacagtattgggtaaaggaacttcagaagcatggtagtcctggtattgtaatggttttggttggtaataaggctgatctacatgataatcgaagtgtatcctcgcaggatgcgcaggactacgcagagaagaacaatatgtttttcattgagacgtcggccaagacagctgataatataaaccaactgtttgaggaaattgcaaagaggttgcctaggccaacggcatcgtgacagaacacttgtgtgtattgcttgtaccatgtaatgcatgccagtccatatacacgggtactgtatggactacggaagacctctcatgtaaagatatttcccccattctgtcatagttgtggatgacaattggtattgagaatatcctctgatgtcgcaaattggtcttctgatgaccaagtgtttttcttttcttttacctcgttctaggcattctaagggcctgaagcatctggtttttaaagaactggtttataaaagttagtgtggttccaaataaatcggcttatatttcagtttatagaaattggatttccagtttctt

SEQ ID NO: 166018 - DNA, 378 bp, Zea mays
  Clone ID: MRT4577_82993C.1
ttcttttggccggccacaaccaaccccctgggggctttccctagcgcaagggggctctcttctccatgggcgctggccaagatcaccccatggcgcttggctccctggaacacagcagcacgccagcgcatggccttcccatggctgcgagctccttctcccggcgagcggctgcagcagggggtcgtctcctccatggcgcggacgaactacctccctgcaggcaagcagcagccccctcagctccttctatggcgcccagtctgcatgcacgaccgagatccatcagttcctatgttccccatggccgagctcgccccatggacctggctccttggttcttctttcacgtacgcgccctctccaacctgcagcacg

SEQ ID NO: 166019 - DNA, 378 bp, Zea mays
  Clone ID: MRT4577_82994C.1
aaaggaagttgaaagcgggcgcttttttgccttgggcgcatcacaccagactgggtgggggcaaaactttgccacacgggggaacagagcgcccgatcgatcgggccgggggggacgacgaccacaacattataacgactacaacgctgttagtacttgaaactcctactgctactaccggttagttaaaaacacggaggcccccgcggggggaccaggacggccgccgttaataaggcgctggccttgttgacctttttgccggcaccgaaagcgggggcgcgggctggtttgggcttgggctgggcgggcgccggggccactttccttgttcgtttggcgcgcaccttacgtgcctcctttaacggcgccgaggaa

SEQ ID NO: 166020 - DNA, 509 bp, Zea mays
  Clone ID: MRT4577_82995C.1
cagaagtaccaaaatacccctcatgtttggttgcatgctggtctcctgccagacctgggcagaactcgtgcacgcctccttccctccctcccccccccccccccaatcagttccaacttcttcagaaaaaaagaacgatcatggtggatgctggagatgaggatggggcaaaggggccgtcgggcaccggcacccaggaacccgtggggtcctcttgcggctgactcagtgctcgcccgcgtccggccagcccacgctgcacatcgcgaacaggccacaaggcggcattgcctgctggctcccgaaatggtatcgtgccacccaggtcagttgttgccatggccgccgtttgtcatggtgtctccacagcagctcctgctgctatggggttatttattttgctaggcacagctcgtcatcaccaggggcattgaagaggctgccaatccatacaccccatgatgtccggggcctgagaagaaccaagccagtagcagcaagggtatgtt

SEQ ID NO: 166021 - DNA, 241 bp, Zea mays
  Clone ID: MRT4577_82996C.1
ccgggaattataacccaccggctccgccgccgacagagagcaccatactgtagctcccggggggggtggggacaccattagcgatccggcttgtcgacggacgaacgtctttgcgccttacggcccggctaccgacatgccgagcatcgtcccgtcgtgccatatgaccgagacgcccaagacgaagaaggcgcccatacagaagcaaggctcctaaggagaagaagcgtttccccgcgaa

SEQ ID NO: 166022 - DNA, 354 bp, Zea mays
  Clone ID: MRT4577_82997C.1
caaaagtcgaccaaccattctcattgtcaagcctaccactccaacatgggaataaagcgcacaaccacgtacacgtcgtgtttcgagtcccgacttccgagcgttatagtttgaaatcaccagggacggtcgatgctagttactagtagtagtagtagatagtatatgtttttcccctctccgccacaggcctcgcatgccagattcctccgtgtctcgctcgctacctgagccaccaccgctggaccatggagatgggtgtctggaggaacggtgcgtagcggtcgatgtacgggttgacggtccgcccgatcttggcccacgcgctctggtggtagctggatgtcacgggcg

SEQ ID NO: 166023 - DNA, 475 bp, Zea mays
  Clone ID: MRT4577_82998C.1
tcatcaaacccggactctgtgcgccctatctccatcgcatcgccgtcggaatggctttctcccgtcttctgcaccagtttctccgctcctgatatctaaattccctctgctcttcttctaattaaggtactcatggcgagacaaatgatatgcgatcggatcaggcgccaccactaaggtcgcctccagctagctccaatcgatagggctgcctacttccccgctgggcaaggatctgcctctcgtcctctacggcagaagacatgccgagagagcggaacaggagcccatggctacctctctcgcgagctcgaggatctaggtgctgaggctcttgagctgggccacaatgcggaactagatgacaataagacccgtgtcggacgcgctccacatccagctgcccacaccgcacacgatcgaacagtctctcccagcttgcgtgaggcacgtgtgaccatcaggtagaagctga

SEQ ID NO: 166024 - DNA, 679 bp, Zea mays
  Clone ID: MRT4577_82999C.1
gaatcaagaggacggcaggcactcactccccatccatccccctctcccctcccctcccctccagccgggaaaggaaggaggcccctcgccggccgcgcggatccccggagagatctcaggtctaccttttacaagattccctatttatcgtgagaatgaagcgcatgagtagaatgcccacaaggaaggcccattcatggtggtgggacagtcatattagtcccaaaaacaacaaatggctagctgataatctagaagagatggataagcaagttaaagagatgctgaagctcattgaggatgaaggagattcttttgcaaagaaggctgagatgtattaccaaaggcgtcctttgcttgtcacccatgttgaaaatttctaccgcatgtatcgtgctcttgctgagcgttatgacaatgtgactggggaactacgaaaaaacatgccatcatctctcaaatcacagggctcaggtatatctgaatctgactccgaggcacagtctactcccgcatctcctgagtctgaaaagaagacctcaaaagagaagggtaaaaagggaagtgatggatcgtcatcatcttcttcttctgattctgattccgaggttgatgaagcgaaccaagagaatggcaatgggattactcatgcactgaatgaacgagttattgagctaga

SEQ ID NO: 166025 - DNA, 363 bp, Zea mays
  Clone ID: MRT4577_8299C.1
atcccaaaaacctaaatcctctcacgcactccctccgccgccgcccgcacgccgccgaccgcccgccatctccaccacgccgtcacctgtctccttcatcctcctgcacccccactgcttaggcgccgaacactagtaaccctgcgctggagttcagggagaggccaaggcgcggtggtggacgccgccatccccctcagatccggggctgagagagggagggagggagggagggagggagaggtgggtcacctgcgagagagagcactcgcgccctcgctcgtcagtcgtcacccaggggccgccaccaccgccaccacgccatgggcttcctccgatctgcgctcgccggttcgtttgaag

SEQ ID NO: 166026 - DNA, 774 bp, Zea mays
  Clone ID: MRT4577_829C.1
ggccgcaaattttttttttttttttttctttttttttttacaaaatatattttacatttccaaagctcaagttttacaacataagaagaattgtaattattacaagtcctgatagtacccaaagcataacttattaaaatagttggaagggtgaagcctttccataagatatatacataaacattctaagcttcaaggcctccacatgaagtaactaaccaaaagataagggaataaaacttctccttattacaggaggagatctgagatcttctatcacgataggcagttagatggagtccaccactggatcaatagcactggagtaggttccatcttcacaaggaccaattcttgttcttggtgttccagccagcccaactccaggcaaaaccggcccactcagacagcgcttacagccctaggctccagcaccgcgcgcgcccgcgcttcctctgcgcgtgtcggcggcttccaacttcgatggtgttaagccggaatgacgatgcagtagagttcccaaccatggtggagcaggcacttgcgactcaccacagagcagaccaaccccagatcacgcacgcaaccggccccagacaaggtctgccacggcgagaccgttcccagcggcgttcaccggcggcaccgcggcgttcccgacgagacactgatggccggggagagtaaacaccgacgtgaacatgaaccacaacactcacacgattccaatcccatctaatccacatggcccggccggcctcgaggtacccaatg

SEQ ID NO: 166027 - DNA, 442 bp, Zea mays
  Clone ID: MRT4577_82C.1
tgctttcatgctggagcattctgctttgaagttctgcaattagagtacacttattttgagcattattgtcatgatgctttattttacccagtccctgaaacttttggcaacacaggacttgatgtaaaccagctttagaagaacatttgagatactacagcttctatttccaaaagtttgaatctgtctacacacaaagtgaagattacagtggtgatgattcagaggatgtaaatatacaaaatgggctggtttcactgacacacgatcatatggccctggtttggtgctatgggttctcttttgagttgagtccctatgaagggatccgtcattccgttggacaagaagataatctttaatgaagtcttgggagatctccctaatgtgttgcctcattttccatgaaaaacaggtgtatatatgagaggatcgcggtcaa

SEQ ID NO: 166028 - DNA, 325 bp, Zea mays
  Clone ID: MRT4577_83000C.1
cccacgcgtccgcccacgcgtccgcgacggagacatggacacattgccaggccgccctaaaaccctcccacgatcatgtcgctcgccagactcagccacccggccgtcgccgccgccgggagcggaaaatcgcttttcccggcgggcccgactgtgcaatccgtagatttccccaatgcacggctccctgtcaccgccgtcgtctccgccgctactgcggctgttcacgctgaggatagggtttcgtcgctgacgcatgtctccggcgtgctacgcgtcgcatttggcgacgagggaaagggcatgctcgtcgacgtgctcgccc

SEQ ID NO: 166029 - DNA, 145 bp, Zea mays
  unsure (1)..(145): unsure at all n locations
  Clone ID: MRT4577_83001C.1
tcgctttctattgctgaacaccctatcttaccagagaggatgacgaaacgcgcggtgtgctaattaaaggtctcattgnaaggcctccttctcgctgttttttatacagtatgtgttatcgattcgtatctctttttttaaccaa

SEQ ID NO: 166030 - DNA, 648 bp, Zea mays
  unsure (1)..(648): unsure at all n locations
  Clone ID: MRT4577_83002C.1
ggtaccctcgggttggccgggnacacacagtctcccacgctcaccgacgccacatcttgtgcgcgcgcaatggcactcgtgtccgcctcctcgtcctcaccaccgccgtcgcggcgctccccaggaatgggcagcagcgggcgtcgttgnngnncnnngncnccctccnnagcgaggttgtcgngctcgtcgccgtcnncgncccctttctcnccncggncttcntgacctgggggggggngtncnacnccgtttctcggccctggnngcncngcgncttcncncttcggggctccnngacccttctcttcggtgncnngccggtcgccgtctttggcttcngganccctgaggaantcccgtggggtgaggctggcgctgagtatgtcgtggagtccaccggcgtctttcctgncnaggacaaggctgctgcncatctcaagggtggtgccnngaaggttgttgtctctgccccnggcnnggtgcncccatgtttgntgttggtgtcnttgngggcnngcgcccctggggtggtgnctttgtttgcnntgcttnctgctccgccnactggcttgctccccttgctgnngtccttggtggcgncttctgggttgctgtggggtcggtgggcgctgttgttgccctggc

SEQ ID NO: 166031 - DNA, 1966 bp, Zea mays
  Clone ID: MRT4577_83003C.1
cgcacgcccccccggattctcatgactctggggctgcagggcggacaagtccagcacgggcggctgggcgtcggcggcgctcgccgttgggatcgagctgtgcgagcgcctctccaccatgggcatcgccgtcaacctggtcacgtacctcactgccaccatgcacctgcctagcgccgcagctgccaacgtggtcaccgacttcatgggcacctctttcctcctctgcctacttggtggattccttgccgactccttcctcggacgatacctcaccatcgccatcttcgccgccgtccaagccagcggcacggggctcctcgcagtgtctacagaggtgagccagctgaggccgccgccgtgcggtcccggcgcggctgagccgtgcgagcaggccacggggctccagatgggcgtgctgtacgtgtgcctctacctcatcgcgctcggcactggcgggctcaagtccagcgtctcgggcttcggcaccgaccagttcgacgagcgcgacgcacgcgagcgcgccgccatgggccttttcttcgaccgcttcttcttcttcgtcaccttcggcacgctcctcgccgtcaccgtcctcgtctacgtccaggaccacgtcggccggagctgtgcctatggcatctgcgccggcgccatgctcgtcgcggtcgccgtcttcctatcaggcaccaggcggtaccgctacaagcgcagctccgggagccccatcgtgcacatcctccaggtcctagttgccgccacccgaaaacggaacatcgtcatgcagccactcaccgccgccgcgctctacgaggaccaccctgagcacgcgcgtatcccccacaccgcccagttcccgtgcctggacggggcggcggtgatggctggcgacgacgacaacgaggtgggccacgacgggcggccgacgatgaacccgtggaagctgcgctccgtgtcccgcgtggaggaggtcaagatggtagcccggctgatgccggtgtgggcgacgaccatcctgttctggaccatgtacgcgcagatgatcaccttctccgtggagcaggcgacgaccatggaccggcgcatggccgggttcgagatcccagccgcctcgcttaccgtcttcttcgttggcgctatcatgctcactctcgccttctacgaccgcgtctttgtcccgctctgccggagcctcatgaccggccggcaggggctgactaacctggagaagatcggcatcggcctggtcctctccaccttcggcatggctgctgcggccatatccgagaagaagcgcctcgccgtcgctgccacaagtgtcgccgcagggcatgggtcgctgcccatcagcgtgttcatgctgacgccgcagttcctgctggtgggctccggcgaggctttcatctacacggggcagctggacttcttcatcatgcggtcgcccaagagcataaagaccatgagcacgggcctcttcctcaccacgctctcgctcggcttcttcctcagcagtgcgctcgtctcgctcgtcaagagctgcacgcggtggctcggcgacaccatcaaccacagccgcctcgactacttctactggctgctggccgtgctcggcgttgtcaatctcgtcgcctacatcgtctgtgccatgtgggccgcagcaccggccagcagtcaggcggagcagccgcagcacgcgatggccgcggacgagaaatgctagcaagatctatcaactaccgatcgacctcagctgctgtgctgcacccatcgcttaataactatcagaggcacacctatacgcttaccaatttagaggattttatagttctgatgcgtggatgcagtgacgacatgatatccctacatactaaaacaagttctcctctggttattgaaaaagatgaaaaaaagttaatatgtatttttcttgtctaatcaaaaaaaaaaaaaaagggcggccgccacc

SEQ ID NO: 166032 - DNA, 612 bp, Zea mays
  Clone ID: MRT4577_83004C.1
attgtaagcctatcttctttatttatctttcctttttcatacatgattacaagtataccttcagaatacctgaagaatatttgaaagtacaaggtttcggagctttggatgcggagcgatccgaggtcagctgattacgtgaatagtttcgtccccttgcacgtgggcaatgtgcccatatttataggggcaacgtagtgtacaactccgtatgaaattacaactataacctcaaaccttatacatgtgaactataaaatctgctaagggtaccgctgtctttttctcttgaagatgtggtgcgcacatcgatcgatccttccttcgtttcctcgttacttgcttcaaatgttgcaatatgcttcgtctatgcattaatgtcgaagcttttattttccttctcctttcacacaaaaggttactgtgactaaagtcgacttgttattcctgaaatagaccaccaaacaattaagatttgttagttttaagaacactcggcagaggcgcacttccaataactggcgacattttagagaaggttggttgccactacaggacatatatggattattgttttgactatgaaactgatgaggattactagtcttttac

SEQ ID NO: 166033 - DNA, 783 bp, Zea mays
  Clone ID: MRT4577_83005C.1
ccacgcgtctgttctagacatggtggggaaccgcacgcggaactgttgcttgggatgctgaggcagggacctcacgtatctgcgggcgtggtcgctccggaggaacccgaggctggtgtcgtcaggaaacaggggctctctggtgaccatctcgccgaagatgcagcccacggaccacatgtcgatggcctgggtgtactcggagcagttgagcaggagctcaggcgccctgtaccaccgcgtgacgacgtactccatcatgaagtcggtctccgtcgtggtcctcgccagcccgaagtccccgatcttcaggtcgcacttggcgttcagcagcatgttgctcggcctcaggtccctgtgcaggacgttcgccgagtgcacgtacttgagcccgcggagcagctggtacacgaagtactggcagtggtcgtcggttagttgctggtttgaccgtaggaggtggtgaaggtcagtgtccatcagctcgtagacgatgtagacgtcgttgaagttctccctcctgggcgggcgtatgatgtcctttattgaaatgacattttcatgattcatgtgcctaagcagcttgatttctcggagagtgcgcttggcgtcgatctggttgtcaaacgcgttgccgatcttcttgatggcgacctcctcgcgagtccgcgcgttcacagcagcacagatgatgccgcaggcgccacggccgacggggcggatgggcgggacgtacttggcggagacctccaggaggtttccgtacacgttgtactgcacgta

SEQ ID NO: 166034 - DNA, 1294 bp, Zea mays
  Clone ID: MRT4577_83006C.1
aattcggcacgaggttgcagttgctccacatgttccaggatagtgaaattttattcactggttgcctgataaagtgtggaattactataaattttcagcataaattgttttacttattaacgttcgtttttgcctaaaataatgcataagtatatgagatgataaaagggtaatcatgaagcattctgtggtccggtggcccttaagttgcaattctattccagcacaaagtgacaatgatatgatgacttttggtctggtattattaattctggacagtaattcagtagctgtggtaacggcaaaatacctcagggttaagctggcatgcaggttattacacttggtttccattgctgtgtgattgtgtttgccttagctttgacacttaaatattacgtaggttactgttttcattttatgtagcctggaggaccattttctgctggcagccaggtttggctgagttttatggatgctaagatatggttcccctcaagtgacagcattgtattgtggggaacggtgccaattgctggaacaaattcgggtaaggtgaacgtggtgagctgctgtctgtagtgtgtggacaactgcagtagtaccatggttcacaggcagtgacaaggttctgactacatttgttacgcatacaactgaagggaggtagatacaacctaacaagatgcagataagctgccagctttctccactagaaattattgatcaagcttcttgtttcacaaatgtccaatatttttgacgttacggtgtcgctattgacaagccacgagatgtggtgatgatgatgtcacttgtacactcatcttgctgcagttgcttcatgccttttgtccccatggagatggagctgatagacatgccatcctagtttactcgtgtgtacacagggaactattcagcggactgggtcagggttgaacttgagagactccctccagatgagctccttgatatcttcttcggtgagcgatggctgctcgaagtcgaagctgaaaggcgctgggcagacgggttcgtcgtttatctcatgaagggatgccaggtatgggtggcatagagcctcatcaacatatatatcagactgaaaagggcagaatttcaaacgatgatggctactttgggaacctcaaatccccttggggttagaggggattgaggtggaaatgaactaatttcctctccaatccccttcaaccccgaaggggatttgagtttccaaactagcgctgaaaggtctttctttcctggctggatgagggcaattgagcta

SEQ ID NO: 166035 - DNA, 3380 bp, Zea mays
  Clone ID: MRT4577_83007C.1
cgagcacatttgataaggaggagggtgcaaaatatttgcctctccctactaagctagttttgcagaagaagaaggcgaaggaggggaggtctggggatgaaattgagcattttccagtaccttcccttattactgtgaacaaaacaggtcatgttggtaccatggagcgcggagaatcttctggcatgcatgtgaattcaaagccacggagacctcatgttgatgatgatcttgatgagcattcaaagcgttctagggtagaagatattgaccaatatagtggagaagaatattctgagtgatgaactgtaaatcataattatcttgcaccaacgaattttatcagtacatgtgaagccttaaaaggtttcaagcaataggcacaagtggtttcatggtgcatggtcatgcagtgaaagaaaatgtctgacaacaagaggacattggggcttggccaatttgttgatctctgtagtgataatagaaagcgtcacattgttctaaagaagttgtcttcaaagtcttggatgatgcgtatattgcagttgctccacatgttccaggatagtgaaattttattcatggttgcctgataaagtgtggaattatataaattttcagcataaattgttttattattaacgttcgtttttgcctaaaataatgcataagtatatgagatgataaaagggtaatcatgaagcattctgtggtccggtggcccttaagttgcaattctattccagcacaaagtgacaatgatatgatgacttttggtctggtattattaattctggacagtaattcagtagctgtggtaacggcaaaatacctcagggttaagctggcatgcaggttattacacttggtttccattgctgtgtgattgtgtttgccttagctttgacacttaaatattacgtaggttactgttttcattttatgtagcctggaggaccattttctgctggcagccaggtttggctgagttttatggatgctaagatatggttcccctcaagtgacagcattgtattgtggtatgtctgacatcttgtacactaatgccatcagcaatcattttgggcttcatgtctgatgttagttgttgacatcataactcatggaatgttgcaaaggaatgatgctgtagctgtagctgtaatgtgaacggactgtaattcacaaatttcttgatttgttttacataggatgtccatatgctctttaatagacctttaccagttgtttactacaggttctttcaatccctgcattatacagtcttttgtgatacatgttacatcctgtgtagttcttcaactccttatgatttatagaatatttcaattttagattcttaaaatactgtttgctttatctatactcttgtggatttgttttacagtcatccgattagttttgtaaacattcatgtttttctaattaccaggtagcatgtccttgagtaacttattaagcagttcaatttgtctgctgatagttatggtatagtcaaagttggcaggctgccaacaacataactccaatttccattctttttagtcctggctgatctatactgcatgtacttctatttccattctggatttagcatctggaatataggattgtttcaatgcaacagtctcgctagtgcttattgacctttcagttgctctacatgtttctgattgggatcatcccagctgggaagagagtccgaatcatatctctagatctgtgtctgcttgtcccgtcaatttgtgattacctgttcaattcatgtgtctattaaagcttgatgccagtgcccttaaaacaaacgtgttgctacgcatgttgttggtgctattaaaaaatagttttggtgtgtgacctagcttgttgtcatgcgcctgtggtttgaagaacgttatgctgttgtatgggcaatgtttgcgtaatgcccaggggaacggtgccaattgctggaacaaattcgggtaaggtgacgtggtgagctgctgtctgtagtgtgtggacaactgcagtagtaccatggttcacaggcagtgacaagcttcttaagcatacaaacgaaggaagatagacacaacctaacaaggcgctgccagttttctccactacaaattattgaccagacttggacgttagggtgtcgcaccattgacaagccatgcgaatgagatgaaggtgatgatgatgaggggtggtcacttgtacagtcatcctgctatatatgcctttcgccccccatggagctagctgatagacatgccgtcctagtttgctcgtgtgtacacagctgggagggagctattatatttagtggatcgggtcagggttgaacttgagagactccttccagatgagctcctttatagcttcttcggtgagcgatggctgctcgaagtcgaagctgaaaggcgccggacagatgggctcgtcgtttacctcgtgaagggacgccaggtatgggtggcacagagcctcatcaactgcgatatgattccacggaaggaaaagcaacaacaagatcgatttaccagtaatcctcttgctgggatcgaacacgagcatcctctcaagcaagtccatggcgccgctagacatggtggggaaccgcacgcggaactgttgcttgggatgctgaggcagggacctcacgtatctgcgggcgtggtcgctccggaggaacccgaggctggtgtcgtcaggaaacaggggctctctggtgaccatctcgccgaagatgcagcccacggaccacatgtcgatggcctgggtgtactcggagcagttgagcaggagctcaggcgccctgtaccaccgcgtgacgacgtactccatcatgaagtcggtctccgtcgtggtcctcgccagcccgaagtccccgatcttcaggtcgcacttggcgttcagcagcatgttgctcggcctcaggtccctgtgcaggacgttcgccgagtgcacgtacttgagcccgcggagcagctggtacacgaagtactgcaccggccggtcgtcgtaaaagaagaaagaaaaaaaaagggttaggaacagagaacagaggacggcacagcaacagcgttggatttggatcgacgacctggcagtggtcgtcggttagttgctggtttgaccgtaggaggtggtgaaggtcagtgtccatcagctcgtagacgatgtagacgtcgttgaagttctccctcctgggcgggcgtatgatgtcctttattgaaatgacctgcagggaaaaagaatttgttgctctgttacatatatgcacggatgtattatgtatatagctaatgaactatacatacatgtatatatagctaataaatacatacaatgacaaaaaaaagtcctgtagc

SEQ ID NO: 166036 - DNA, 1134 bp, Zea mays
  Clone ID: MRT4577_83008C.1
ctccactcaaaattattgaccagacttgaacgttagggtgtcgcaccattgacaagccatgcgaatgagatgaaggtgatgatgatgaggggtggtcacttgtacagtcatcctgctatatatgcctttcgccccccatggagctagctgatagacatgccgtcctagtttgctcgtgtgtacacagctgggagggagctattatatttagtggatcgggtcagggttgaacttgagagactccttccagatgagctcctttatagcttcttcggtgagcgatggctgctcgaagtcgaagctgaaaggcgccggacagatgggctcgtcgtttacctcgtgaagggacgccaggtatgggtggcacagagcctcatcaacagtaatcctcttgctgggatcgaacacgagcatcctctcaagcaagtccatggcgccgctagacatggtggggaaccgcacgcgggaactgttgcttgggatgctgaggcagggacctcacgtatctgcgggcgtggtcgctccggaggaacccgaggctggtgtcgtcaggtgagcctaccagctcggttatcagcctcagctggtggacataatccttgccaggaaacaggggctctctggtgaccatctcgccgaagatgcagcccacggaccacatgtcgatggcctgggtgtactcggagcagttgagcaggagctcaggcgccctgtaccaccgcgtgacgacgtactccatcatgaagtcggtctccgtcgtggtcctcgccagcccgaagtccccgatcttcaggtcgcacttggcgttcagcagcatgttgctcggcctcaggtccctgtgcaggacgttcgccgagtgcacgtacttgagcccgcggagcagctggtacacgaagtactgcaccggccggtcgtcgtaaaagaagaaagaaaaaaaaaagggttaggaacagagaacagaggacggcacagcaacagcgttggatttggatcgacgacctggcagtggtcgtcggttagttgctggtttgaccgtaggaggtggtgaaggtcagtgtccatcagctcgtagacgatgtagacgtcgttgaagttctccctcctgggcgggcgtgaggatcctttcccggccgg

SEQ ID NO: 166037 - DNA, 213 bp, Zea mays
  Clone ID: MRT4577_83009C.1
cccgggggtgtagagcacacctggcgagcgtcgagagtgtagagtgggcggttgtggtggctcggcggctttcggtgctgggagtgtatcgtcggtggggttcggtttgcgcgtgggaggatttggtagccggctggtttgtggacttggagtgctacgtcggtggctgtcgtctttgagtgtcacgaggctgttggagaaggggtgtacgtc

SEQ ID NO: 166038 - DNA, 419 bp, Zea mays
  Clone ID: MRT4577_8300C.1
acgccgaatctcacgcgaccacccacgcatacccggattcgagggtacccatatcgagaacaggcaagcgatcgcaacagcgatgaaccgctgtctcctcctactcgcctgcatcgccaagacgacccaaccaacttatcgcggataccatgccaccggcgtgaagagaatcatacgacatggacatgaagagccatactacatgcatacccaacacatgtataacctgcacttcatgaagcctacggcgatcaatgtgacacctatcctagctgggagcggatagcactagtgtcggagaacctgaatatacagccatattgcaacactaagacgactgtctcaggctgacatgattcctatcgctgtctgcatatgcctacttattttcagacacattcttttgaaagaaaaagctt

SEQ ID NO: 166039 - DNA, 681 bp, Zea mays
  Clone ID: MRT4577_83010C.1
atatcacccatataaaaatctattgaaaattggtataacaatctcgtttacataaaaaaaaaaggcaagaagcaataaaacattacatttggggttcatacatgggatacaaaaaccagcaagccccaaggaaagcttttttataatcaatcaatcactctatgaagtaagtctttttgaaagattctttggggttaccaaatgctttttttatttcacagttaagctcaatctccattagtcggggattttccttggaccggctcattaacaaaccaagattcagattatcaccttcctcaacatttataggattcgacataatgaaaacctgttgtccccagtgcgtgcagggctgctcacttggagctggggtcaactcgatttcttgctgggcggggtctttttttctccccgagaactgaacatcgaaccatccaccaaaaccacatagccttgtatgctccatattgataactgacgttacatttgatctgacttcctcgatttcactgacagatgctgtcaaacaatccatctccttgacaattgtgggagtgcctatgatttgttgtggattcaagtcattccacatagcaggctgtatgaaatacttttcttgctcttcacaaaaggttttgttaaaactcccatatcaaccccatataactttttgatctc

SEQ ID NO: 166040 - DNA, 308 bp, Zea mays
  Clone ID: MRT4577_83011C.1
cgcttctgcttttctttatgtcgtcgaccgcgatgtcttgggacgggtatggcgggtagatctaccctggagctggaggcggtgttccagcagcctgagacgaccccctgtaggtgccggcgggggagatggagctgccgagcaacgctggcgacagcgaactcctgcccctggaggagcacaaggagcgcgtgttgcggcacctacaccgccgatccaagcgcccgctggaggagttcgtggccgttgtggcgaacgtcgcggagcagctggtgagcgtgtatctagacctgggcgccgagtggcgc

SEQ ID NO: 166041 - DNA, 207 bp, Zea mays
  Clone ID: MRT4577_83012C.1
ttcatactttatgacaaaaaaaacaaaaaaaattaaaataaaaaaaaaaaaaaaaaaggaaaagttaaaattaaaacggtgtaacggttccccattatacaacctcaaccatgcgaccttatactcgctctatagttcctatctaccatctctatgttaagcctcaacccttcaagctgccctacttcaaatacccttaactccccc

SEQ ID NO: 166042 - DNA, 471 bp, Zea mays
  Clone ID: MRT4577_83013C.1
aaatcatgtaatattcatttctcttcaaaaagtttttttttgcacgaacatccaagctgcttgctattccaaagactgcaactctatgtctcaagaaaactacagacaaaggaactttctcattgtctagccagtatggtacacaccaatataactcaacttaggccacaacatatgaactcatgagcaatccacatggacccaagaaccctagcaccaagatctctagttctcggtcagtagatggaaaggagttagaggaggaggagaacctgagtatggatgagaagcaaacaccatagggatagcgtcggtcagtcaattgccattcccctcgtggacgctggccagccggtgtcaatgccaccgctggatctcgtgtagccgaatctcctagatgatgtacacgacgaattgtcggatgatgtacgcgacgaatcgttggcgccacaacaacgccacagtgcctcc

SEQ ID NO: 166043 - DNA, 420 bp, Zea mays
  Clone ID: MRT4577_83014C.1
atggccttgttagttcatcccgagtgtgcccagactgagtgggtgctcgacatgttgtgtcgcctgtttagatgggatgcgccagcgttcggtggaaggatttgtgccggcgccatcctctccggcaaacttaccgctagagagttcgtgctctttgtcttcaacctccccagcgggttggtgctgccgatcttgcctttttctgctagaggtgcacggcctcgtgggggcgacgctcttccaccggtgcttagcttcaaggatgttcatcagccttgcggtggtggagagcgagctagactgcggctccgtcttccacatgagctggagaccagcctcttcctccagcattcggaggaaaggatgatcaccagccttgtgaaggttggaggtgaacttcggctacacggcaccggctag

SEQ ID NO: 166044 - DNA, 394 bp, Zea mays
  Clone ID: MRT4577_83015C.1
cccacgcgtccgcccacgcgtccgaatttaaaaaaaaaaaaaaaaaaaaaaaaggggggcattaaaatacaaaaaagacaaaaaactacataaaacaataaacactcctaaattaatcacttccacattaacaatcataatatctttataaaaattacacccacctctactttaacggcggggccgttttcaatggtgatcccttttaacacccctccttttccccattttaaccttctttttggctcccccaatttacatcccatccccgttttttaatactccccgaccttgaaaacccctctgtcccccacaatttttggtgttcaaagaaaaccccctttttcacagtgttttaaatgctaaaggccccccccttttcccccttcccacc

SEQ ID NO: 166045 - DNA, 3184 bp, Zea mays
  Clone ID: MRT4577_83016C.1
ccggccgggttctccttccctctctgctatgctatgctatgcttaccccgttctctctctcctccctttctttctcatctactactactagactactagtaactccgcttcgcttcttccgaagcggcgcgggcggaagcgagggcagctcacaccaccgtgccgcgcgcgcgcgctctccacccaccacctaattccgccgccgagctcgccgacgcggccacccgcgatcgggcatttggacccgtccccgctcgccgcccgcacggcggctcgttgcgggaaagtttctcgaggccgtctgtgaccccgctccctcggccgcgagatcccgcccagccgcggtcgcagaatggcgcagagcaactgggaagcggataagatgctcgacgtgtatatctatgactacctgctgaagaggaacctgcagacgacggccaaggctttcatgaccgagggaaaggttgctgctgatccagttgcaattgatgctcctggagggtttctctttgagtggtggtctgtcttttgggatatattcatcgcaaggacaaatgaaaagcattctgaagttgcagcggcatatctagaggcacagcaaataaaagcaagagagcaccagcagcagatgcagatgcagcaattgcaacttatgcatcaaagacatgctcaacttcagcgaactaacgcgaatcatccttcacttaatggtccaataaatgctttaaattctgagggcattttggggccatcaacagctagtgtcttagctgccaagatgtatgaagagcgattgaagcacccacattcaatggagtctgagggatcacaacttattgaagctagtagaatggctcttctcaagtcagcaacaaaccatgcagggcaattagttccagggactcctggaaatgtgtctacaactctgcagcaaatccaggcacggaatcagcaaacgattgatattaagagtgaaggtaacatgggagtaccccagagatctttacccatggatccatcatctttatatggtcaaggattaatgcaacctaaacctggattgagcggtgcaggactgaaccaaggtgtaagcggtttaccactgaagggctggccattaactggaattgaccagttaaggccgaatttgggtgctcaaatgcagaagccatttctttcaacacagtcacagttccaacttatgtccccacagcagcaacaacaatacttagcacaggcccaagcacaagggaaccttggaaactcaactaattatggggatattgatccccgcagacttacagcattgaccaggggtagtttgaatggtaaagatagtcagcctgcaggaacggatggttgtattagttcccctatgcaatccagttcacccaaagtcagaccagaccaagagtatctcatgaagatgcagcagacatcttcccagcaaccccaggaacagctcagcagcagcagcagaaccaacagcagcaacagagccaacaacaaatgcaacagaacaatagaaaaagaaagcagcctacttcttcaggaccagcaaatagtaccggtacaggaaacactgtgggtcctgcaaactccccaccatctacaccatccacacatactcctggggatggacttggaatgggtggtaatatgcgccacgttccaaagaacttaatgatttatggtgcggatggaactgggcttgcctcctcttcaaatcaaatggatgacctggagcagtttggtgatgtgggctctttggatgataatgttgaatccttcttatccaatgatgatggagatcccagggatatttttgctgcactcaaaagaagtcctgcagagcctagcccagccgtttcaaaaggttttactttcagtgaagtcaactgttggcgcacaagcaacagcaaaattgtttgctgccacttctcttcagatggcaagattttggctagtgcaggacatgaaaagaaggctgtactttggaacatggaaaattttcagacacagtatacaccagaagagcatgcccttattatcactgatgtccgtttcaggcctaactctagtcagctggcaacatcttcttttgatagaactattaaattatggaatgctgccgatcctggattctctttgcatacattcactgggcacaacggccaggtcacatcattagattttcatccaaagaaaacagaccttctatgctcttgtgatggcagtggtgaaatccggtactggaatgtgacccagtttgcatgcttgcgtgccataaagggtggtagtgcccaagtccggtttcaacctcatgttggacagtttttagccgcagctgctgaaaacgtggtttccatatttgacattgagacacatgggaaaaaatacactctacagggccataacactgatgtgcagtcagtgtgctgggacaacaatggggaatatattgcatctgtcagtcaggacctagttaaggtttggtcaatgtcaactggggattgcatttatgagcttagttccaatggaaacaagttccattcttgcgtgttccacccgagctattccaatctcttggttattggaggctaccagtctctcgaggtttggaacatggtgaaaaaccagagcctaaccgtacaagctcatgaaggtctaattgcggcgctggcgcagtcaccagtcacagggatgatagcttctgctagccatgacaactctgtcaaggtgtggaaatagcagtaacaacgattatgatgcacctaggtagctttttttccagggcaagtgaaatttctcctgctgaggcataaaataaggaagagtagtaaattagatggttgccggtcgcggttcagctgtccaagagcagtgagtttgttgatgggttgtattgtatttatgctgataggctgtttgtgtagctcagaaacaaaaaagaatacattggctgaaaaggtgtccgcctgttttattttttgtttctgccgtatcatatgtaaccatttaacgttccctgttttttaattggaactcgctgcgattggcatctggcagtaaaaaaaaaaaaaaaaaaaaaaaaaaaaaaaaaaaaaaaaaaaaaaaaaaaaaaaaaaaaaaaaaaaaaaaaaaaaaaaaaaaaaaaaaaaaaaaaaaaaaaaaaaactcgagg

SEQ ID NO: 166046 - DNA, 728 bp, Zea mays
  Clone ID: MRT4577_83017C.1
ggttcttccgagggtcaccggagtaacaagcggccacggatgtcgccgccgccgcctggggaggagccggcgccggcctgcctggaacggttgcacgacgctgtatccgagaacccgcaccgggtcatattcatggagggcgttgagcaggctgaccgggactgccagctcggcatcaaggaggcgatcgagagcggggtcgtgcggaaccgcgctggcgtggaggtcggcgtgggcgatgccatcgtcgtcctgagctgcgagagctttggcagcaccagcaggtctagagcttgctcgccaccgagcaaaaaggtgaaggtagagatggaggaggctgaggagcgcacaggtgaccatgaacacaacggagatggtggttcctcgtcgtctccgtgcatcgatttgaacgtggagatggagagtgaccaggcggacgagggaagtctcgatgatgatgtctgtctgctcacggccgtcgacaggaccctgttcttcagaagacaggggtgacttaactgtgtacattgaaggatccgtatgcgtgtcaaatactcaaatgtgcttcgttttgataagaaccaagattagttgtaagcgcgcaagtagaattttctttagtttatgtttttttatatctaggtttaagagaattggatcgccggtgtatttggggcttcactaaagacaaaatagagctgttgtacatttagatggagattcaatcg

SEQ ID NO: 166047 - DNA, 520 bp, Zea mays
  unsure (1)..(520): unsure at all n locations
  Clone ID: MRT4577_83018C.1
cctcgaggccggccgggagctttcttagaggcgggctggcttctcctccccctccggtgcggggtcgggatcgagaggttctcaggcggtcggcttcccggtagaaagggtcgagatggcggaggcatatgttgagtaccggtgcttccacaggcgggctcggctggtgccacggcacagacgcactcccgtccacaggcgtcctgtcatgcacgcgtacgagcagaggaaccatcatgagtgcaagggctccagcgtctgcagtcaccaggatgcctgtccatgggcgttcgtcgcatagcgtgacctgtgatgactcacctctagaacggatttgtcacttattgccatgacctctggacaaaaatcttcatggatagacagacaggtaccgcccgttccttttcgttacctaccttctccacggaggaatgcatgacacatccatggaatgatgaacaggaggagatcgacgccacatacatcgccgatgagggacgaccacccccgcgngcgtgca

SEQ ID NO: 166048 - DNA, 854 bp, Zea mays
  unsure (1)..(854): unsure at all n locations
  Clone ID: MRT4577_83019C.1
ctcacgcaccttctgttggctcctcctccgtcctcccccaagcgccccctctcggccggtcgaatttccgggagggggatttggagggatttgatatatatcgagagagtagtgtttgtcccccgattcctcatgcgtggcgcccaaaacctagagatccttttttgcgcccgaaaccttcctgggctggtccgattcggtgccgttagaggggatctgtgtacctcgccgccggccggcgctgtcgatctggttgtcttccacggttggtttccagacggggactcctccggcgcggcgctcacccgcatccgccgccgcttttctaccgcccgcggggctgggtccggctctgacggttgagtctggtggcgcaggcggaactgcaccccatggaaatggaatcgagcgaacttacacgctgcttcgcaaccgccgaggcgcgggacaagatctgccgagcgatccagtacgggtccaagttcatcagcaacggcgagccagggcctgcgcagaacgtcgacaagtccaccagcctggcccggaaagtgttccggctctgtaagttcgtcaacgatctgcacgctttgatcagccctcctgccaaggggactccgctcccgctgatcctactcgggaagtccaagaaacgcgatgctgtcgactttcctcttcctggaccagatcgtgtgggcggngaggacaggaatatacaagaacaaggagcgggcggagtttctcgnggaggatagcgttctactgcttcctcggctcaacacctgcacggncatcatcgagctagccgagctgcaacggctggtcacgtcgatgaagtagctggagaaggagctgag

SEQ ID NO: 166049 - DNA, 414 bp, Zea mays
  Clone ID: MRT4577_8301C.1
cggcccactataccgggggcgtcccacgcgtgctatgatgcacccggacacgcaggccaatgaaggggaaagtttcaactgatagtgcggagcctctgtgcctaaggaaaggggggctggattccatagaaggaagagctgccccaactctgaactaaccgaagcagggcgcatagatctacagggcactgttagcaccgagcaaatctgggaactcgagagacgttgcccgcattttaagagatgctttaaagcgagaaaatggcctgcgtgggcctggccggagaatatccctagttgatgcgggatacaggcccaaaccagggtttgtacccgctttcagaggcccaaggcgccacacacaattatcacggcaataatccagctcaaaaagagaaggaaatgctcaaccat

SEQ ID NO: 166050 - DNA, 108 bp, Zea mays
  Clone ID: MRT4577_83020C.1
atttcggcacgaggcctcgtgcgcggagattagggtttccgctcgccgccgatgaaaggcggccgcctgcaccgaccggagccgccgcagacccacctcgccatggcg

SEQ ID NO: 166051 - DNA, 1968 bp, Zea mays
  Clone ID: MRT4577_83021C.1
agacaattaactagcttcttctagctctagctaggctcgtttgctgcaagaaggtaacagcgcaggcatggaggggaaggaggaggacgtccgcctgggcgccaacaagttctcggagcgccagcccatcggcacggcggcgcagggcacggacgacaaggactacaaggagcccccgccggcgccgctcttcgagcccggggagctcaagtcctggtccttctaccgcgccggcatcgccgagttcgtcgccaccttcctcttcctctacatctccatcctcaccgtcatgggcgtctccaagtccacctccaagtgcgccgccggtccttggcgtggtgtcctcgtcctcgtgcccatctctgtcccaatcaaactgattgatccgtcgcccgcagggccacagcagccgcggcgaggtcgtccgtcggattcggaggctcaggtgagtgcctctttggcacgcaccttctgttggctcctcctccgtcctcccccaagcgccccctctcggccggtcgcaaggtctgcggctctgcgcactggtccgattcccggggagggggatttgatatatatcgagagagtagtgtttgttccccccggattcctcatccgtggcgcccaaaacctagagatccttttttgcgcccgaaaccttcctgagctggtccgattcggtgccgttagaggggatctgtgtacctcgccgccggccggcgctgtcgatctggttgtcttccacggttggtttccagacggggactccgccggcgcggcgcggcgcggcgctcacccgcatccgccgccgcttttctaccgcccgcggggctgggtccggctctgacggttgagtctggtggcgcaggcggaactgcaccccatggaaatggaatcgagagaacttacacgctgcttcgcaaccgtattatgcagttattactgaaaagataatacagtacctatggcttctctggacgccgtgcgaggagacctcgccctgctgattctgtacctgaacaaggccgaggcgcgggacaagatctgccgagcgatccagtacgggtccaagttcatcagcaacggcgagccagggcctgcgcagaacgtcgacaagtccaccagcctggcccggaaagtgttccggctctgtaagttcgtcaacgacctgcacgctttgatcagccctcctgccaaggggactccgctcccgctgatcctactcgggaagtccaagaacgcgatgctgtcgactttcctcttcctggaccagatcgtgtgggcggggaggacaggaatatacaagaacaaggagcgggcggagtttctcgggaggatagcgttctactgcttcctcggctccaacacctgcacggccatcatcgagctagccgagctgcaacggctgtccacgtcgatgaagaagctggagaaggagctgaagcaccaagagctgtacaagaacgagcagtaccgcatgaagctgcacaagtcgaacgagcggctgctggcgctcgtcaagtcgagcctggacatcgtggtggccgtggggctcctgcagctggccccgaagaaggtgaccccccgcgtcacgggcgcgtttggcttcgccagctccctcatcgcttgctaccagctgcttccaagcccaccagcaaagcagagcaagtgaggactcccactccaagcactgtttaccaggaaaataatcccccccggataggtttgatttggttgccacatccccttgtatggcagactagactaatatatgtaatcatcatcataataattgataaaccatcccactatggataggtttggtcactccaaacactgttttttttattcatcgctaggagcaactccaaaagtgtgctcacagctgtacaacaaccatcagtaccccatgaagctgcacaagtccaactagcggctgcctgcgctcgtcaagtcgagcctggacat

SEQ ID NO: 166052 - DNA, 280 bp, Zea mays
  Clone ID: MRT4577_83022C.1
gcggggcgagcgaaccgggagcagcccagcttgagaatcggacggtctcaccgaccgaattgataacatgcttacgaggactcccctacggaccggaccgaccgttgcaacccaccttggaatcgggagagccccgtccggggcggggggctgtcgcaccacgaggctgccgtcacgactcgccttgtttgtgaatgcagcccagcttgggcggtcgactccgtcctcggctccgtgccgcgttgtgaccgttggcgatctcgttcctgcccggtcggtc

SEQ ID NO: 166053 - DNA, 494 bp, Zea mays
  Clone ID: MRT4577_83023C.1
attgggttccgggccccccctcgaggcggccgctatttttttttttttttttttttccttgagtcaatttgatttattgttttctcttctgccattaacattctagctactgggtaagttggtctccatccttgggatctcatggttgggaggagaggtctgggttccctcccacaaaactctcaacgatagaatagaagcacagctgcctcagttatctcacggctgctgctgtaaccaacatgagttccatatccactccaatcaaaaccagaaaaatctccacactgctggggactggcctctggaaagtatcctcctccaccaatgcagtggtgctcagtgttacatccggtgaccctcattccagcacacagggcgttggctgctctctcgttattaaataccctgaactgaacaaatccccgagtgaattcccgctggccataggtgagtaataaatgctgttatctgggcgtcgccaaaatcataga

SEQ ID NO: 166054 - DNA, 612 bp, Zea mays
  Clone ID: MRT4577_83024C.1
tgggtacctcgaggccggccgggacgtctccaacctcatctgctcgccccacctgccggtccggcagcagagagcggcggtgcatagagatccatatccggaggacgcgagcgggagcgccaccaccaacgactgcggcaatggcggggacggcgacggtaccggggtcgacgaccgcctccacgccgctgctctaggacgagctcgacatcgtgatcccgacgatccgcaacctcaacttcctaggagatgtggcggaccttcttccagacctaccagctcatcatcgtgcaggacggcgactcgaccaagaccatcaaggcgcccgagggcttcgactacgagctctacaaccgctacgacatcaaccgcatcctcgggtccaaagcctcctgcatctcattctaggactccgtgctgctcgctgctgcggctacatgggctccaagaataagaacatctacaccatcgacgatgactgattagatgcctaggacccatctgattaggatatcaatgctcgtgaccagcacatctggaatctcgtgattccatgcaccccgtgcttctgcaacagcctggactagccctaccgtgaaggagctgagtttg

SEQ ID NO: 166055 - DNA, 565 bp, Zea mays
  Clone ID: MRT4577_83025C.1
cacagcttgtgctagcaaacttgctgcctcatgtcagcaacagcagttgcttccattgaaccaactagcatgcatctgagacctctgccttcttattcgataccaactacgcaacatagaagcacagtactgttccaacaatgggagataacatgtttggcctccttatgctccttggtatttcagcaagtgctgataccgcgaccattttcccacaatgctcacaagctcctatagcttcccttcttcccccgttcctctcaccaacggcggcttccgtatggtgaaaacccaattcgtcaaccctacaggatccaacaggcaatcgcaacaagcaacttacctttatcacacctgttctttgaacaagcgacagccctatctctggcgcattcattggttcaaaccatcagggcagaacagtaacagcaactcctgctaccagtgatcagccaagtagctctggcaatactttccccctactatcagaaacatcaatttcttccattcaaccaactgtctatactgaaacctgctgcttatttgcaaggacaacaagtgctac

SEQ ID NO: 166056 - DNA, 408 bp, Zea mays
  Clone ID: MRT4577_83026C.1
catatcctttcccctacctctcccgcatctcccgtctccgtcgcctcgtctccgctcctcacctcgccagccacgggcatgatccacatcggaaccaacggtttccgaaggatcgcgcaggctcgcgggccagcgtcgccccgcggagcgaggatgcccagctcgtccccgccaacgacccctttatcaccccggaattaatgaccctacatgttcaagtacgaacaccgtgcacggccaatggaagcacagcgacatcaccctcaaggactccaagacgcttctcttcggccagacgccggtcaccgtctttggcatcccgaaccccgcaggagatcccgtgccggcgcggctggccgcacaccatgtcgtggatgtccacccggtgcctccactgccaacggacaa

SEQ ID NO: 166057 - DNA, 470 bp, Zea mays
  Clone ID: MRT4577_83027C.1
cacgccgccgtctcctcccattccctctctcgcacgccgccgtctccacccatcccaaattctccgaatttgtcgcgctagctactagaggaagggcttggacgccgtcgtcgtcctcgcccatcggcgcgtcatccgaaagaaccccgtcggctccgtcgatctgctagacctgtccaaggagagggagagcagcagtcgcgtttggacgcgaggagggggagcagccaaccgcgcccggccggcgagcaccgcgccccgtcgtcgttcaggagcaggacaaacagctggtgacggagctcacatcaacgcccgccgaccacctcggtagttgattcaggtgtcggcgacgagcaagcactccgcttagcctcgccgtccgcgcccaccgacagtcccctggttgttgcagatgagacaaccaaatagatgttgtcatagctaggagaggaggaggtgtctgcgttgct

SEQ ID NO: 166058 - DNA, 390 bp, Zea mays
  Clone ID: MRT4577_83028C.1
gggggtggggggttttttaaatttttttttttttttttttttttttttttttttttgattcggggccggggccgggaggggcgccccggccccgtgagccgggccggccccgaccggggcgccaccctggccatagcgggttcctgggggggaagtgggggggctcacaaatcccccctgccccggacccgttgccgaggggacacaaccccgagctgccaaaggagcgaacgaacaaacaaaaaaggcggggagcccaaaggagggaccccaaacaaaaaacctggcgcgcacgcaccgctcccgaaccggccaacgcgccgggggaggcggctcgctgaatggacccgcccgcggggagtggccgcccccgtgggtctcgcacccgcg

SEQ ID NO: 166059 - DNA, 266 bp, Zea mays
  Clone ID: MRT4577_83029C.1
acacgaaacgacagctggtttgtttttatttattcactcgcagaacacaacacactgggtcggggagctcaccgaacagcacaggggggggggggggaccaccaaacactgaacaggacacgtcccccccagacataccaaagcagagcaaccacaggcccccacacacgaggcggggcgctgaaacccaaaacccgaccccgggacccgaacgcgacgcgaccattcacctcgggtccatgtttttttcaaccggaaatctggat

SEQ ID NO: 166060 - DNA, 444 bp, Zea mays
  unsure (1)..(444): unsure at all n locations
  Clone ID: MRT4577_8302C.1
taaaagttatattcatttaatgattcttatgaagttgtaacactactgtgaattctaatagatggtgttgatatgactgagaatcatttttgagatgtcttcaagaattttggtgtttaatagtttgatcctttgaatgataagtttgatttctttagggattatgtctttttccaaattcctgttcttttatatttattatgatctgttgttgctgttgtgaatgttgtgtacntgncttttgatcgtgtttttggctttgttggtgttgttgtctttgtgggtggtccttttagggacgagcctgttntgttttttatttttaagggggtttctgttttgtcgtgttttttttttttttgtctttttttttttgtcttttttttttttttttggttctgtttttttnttttttttttttgtttttctttttttttttttttt

SEQ ID NO: 166061 - DNA, 399 bp, Zea mays
  Clone ID: MRT4577_83030C.1
ttttatttttgttttttttttttacttcccaggtcactaatccaaaaataaggaatacccatagcctatagtacagccacatagcagtgccaggctactatgcttttacacacatgaatgaacaccagattgcacactagattacagttccaaacccaagttctgtgcatagtccatacttcaagtgacaagtctccaatagacaagtgaacactaagaatttaagattacagttccaacaagggtacataaataagatgacacatggcagtacaccaaatacacgcaacacgctcacaaagtctgaactaacttccttgcaccaatatcacattacgagatcctacatcccttctgaaaggcccgtgaaaactgtccaaaagcttgaaggaaaaccat

SEQ ID NO: 166062 - DNA, 786 bp, Zea mays
  Clone ID: MRT4577_83031C.1
gccggccgggctgtggaattttattttggccatgtcgtcgtcttcgccttccctcctctcatcgcggctactctccccagccatcctcttcacaaagaagccggcttccctgcgctccatttcctctgcgacagcgagacacggggttcgggtggtggtagccgcggcgtcagcggccgcagcgtcaccagtgtccgcggcgcgggtgcgaccgtcggcggcggaggtagcgcggactgtcgtggagcttgccgcgtccgggactctctccatggtgggcccagacggctggcctctcggcgtcggcgcgcacttcgtcgcggattctgccggtgcacccgcgctctgcctgtctgccgctcgggtcgccgcgcccgatgcgccggccagcttccacgtcgagtttcgacagagtggggctaggacaccacagtgcactatgcttggtgccttaactaagcctagtgatgaatctgtgttgaaggatggcatgtgggtagttccatcagactacaccagtgcagaacctgatcctctacgcaattttgctgaacacatcgtggaggaatttaacaacaaaaatgctgaagacgtccgtaggatatacaacatatatgtcgaatcagatttacaggtggcagacgtgaagatgatatgggttgacaggctaggtttcgatctccacgctcattctgcggaaggcgttttggctgttcgggtccctttttcctagggaggtctccgacgagaagggggtgaaatcgtcgttcacatgatgtctctcat

SEQ ID NO: 166063 - DNA, 842 bp, Zea mays
  Clone ID: MRT4577_83032C.1
cctcgaggccggccgggtattttttttatttccaactgttatatgtactctcatttcccaacagtcgtagacatagtgagaaggtagaaattgcacagagttatctgtggagtgtggactgagttcaattgttgctgcctggttagccaccagaaggccctaagcccacctagcacccaatgggcttttcggccccaatttgtcaccatttattgtttacaacaatttctgaaaaatattttcagtcaacatataactatctggtaattatgtctggattactaatggtaagcccatattactttggcactactatactaaaacattaaaatagggattagaattagaagcataggtatgttatatttgtagaacaagcggcaaaaatggatggtcatgatcttcctaatttgcaaatcgaagctttataagtagtatggattactcaaatgttctctttacccttggtgattatgcaagtgaaagtgtctggcgcttattattttctctccaatgcgcttcaataaaatggttccaaactttgccgtctatccttgtacacttagggttgtttggcactaatgattcactaaactatgcagttctgctgccagctgatttattctgtccattcaggatggcatgtgggtagttccatcagactacaccagtgcagaacctgatcctctacgcaattttgctgaaaacatcgtggaggaatttaacaacaaaaatgctgaagacgtccgtaggatatacaacatatatgtcgaatcagatttacaggtggcagacgtgaagatgatatgggttgacaggctaggtttcgatctccacgctca

SEQ ID NO: 166064 - DNA, 1025 bp, Zea mays
  Clone ID: MRT4577_83033C.1
gattgggtacctcgaggccggccgggaaggcctgttaaggtggtacactgagaaccggcatggatttcggagtggcgcaagagggtgctctgcgagcgtatttcctggccgccgcttccgtctacgagccgtgccgagccgcggagcggcttgcgtgggccagagcggcgatacttgccaacgccgtctctacccatctccgtaacagcccctcattcagagaacgcttggaacactccttgcgttgccgccccagtgaagaaacggatggatcatggttcaactcatcaagtggaagtgacgctgttcttgtgaaggcagttctgcggcttaccgactcgttagcgcgagaagcgcagccgattcatggcggtgatccggaggacatcatccacaagctactgagatcagcttgggctgaatgggtcagggagaaggcagatgcagcagacaacgacgtgtgtaataatggatccagtgctgtggaacaagaagggtcgcgcatggttcatgacaagcaaacgtgtctgcttttagctcgaatgatcgagatcagcgctgggcgagctgcaggtgaggctgcgagcgaagatggtgaccgtcggattatccagctcactgggtctatatgtgacagtctcaagcagaagatgctagtttctcaggaccccgagaagaaccaagagatgatgagccatgtcgatgacgaattgaagctgcgtatacgagagttcgttcagtatcttctgagactcggtgagaagaaaaccagcagcagcgagaccaggcagacctttctgagcatcgtgaaaagctgttactacgctgctcactgcccgccgcatgtggtagacaggcatatttccagagttatttttgaacctgtttccgccgcaaaataaggggttttactccatgccgtttgcgagggagagcgatgagaagagctactgtgtaaagggtagtggtagatgtgaatgtgatatggagatgaaagagagagagagaaaatgttgatagtggaa

SEQ ID NO: 166065 - DNA, 1216 bp, Zea mays
  Clone ID: MRT4577_83034C.1
ccactcaatctcatccctcaaaatcccccaccaaatctgaacctccaatttttcggcactgtcgtcgtcttcgccttccctcctctcatcgcggctactctccccagccatcctcttcacaaagaagccggcttccctgcgctccatttcctctgcgacagcgagacacggggttcgggtggtggtagccgcggcgtcagcggccgcagcgacaccagtgtccgtggcgcgggtgcgaccgtcggcggcggaggtagcgcggacggtcgtggagcttgccgcgtccgggactctctccatggtgggcccagacggctggcctctcggcgtcggcgcgcacttcgtcgcggattctgccggtgcacccgcgctctgcctgtctgccgctagggtcgccgcgcccgatgcgccggccagcttccacgtcgagtttcgacagagtggggctagaacaccacagtgcactatgcttggtgccttaactaagcctagtgatgaatctgtgttgaagaagctttctactaggtggcaaaagaaatttggggaagagattgatcaagatcttttgtatttaatatctgttgaccggatcttgcacatggaagatttcaatgagctgatttattctgtccattcaggatggcatgtgggtagttccatcagactacaccagtgcagaacctgatcctctacgcaattttgctgaaaacatcgtggaggaatttaacaacaaaaatgctgaagacgtccgtaggatatacaacatatatgtcgaatcagatttacaggtggcagacgtgaagatgatatgggttgacaggctaggtttcgatctccacgctcattctgcggaaggcgttttggctgttcgggtcccttttcctagggaggtctccgacgagaagggggtgaaatcgtcgttcaacatgatgtctcatcatgcgtgggaggtggagaagagctacgcgagcccagagtttgagaaggtgcagttcttgaagaaggtcagatagcattgcgaattctgtttccgtggtggacgatctttcgttattgagaggagtgatagtttgaagttttgtttcctttatcatgaactgtttgtcttgtatattggtcatatttttttgtgcctaatacattggatgcaattggcatcttgaattatctgctagtaatttatttgagaagggcaatgagttttgaccgtaaggat

SEQ ID NO: 166066 - DNA, 1909 bp, Zea mays
  Clone ID: MRT4577_83035C.1
ggaaccaatacgccatctattcccgtcgctgtcgtccacctgtttttttcgttgatccgcagccgccccttccttctcccatttcggcgtctcgaagccagtagattattcatttctcgatccacaaatccctccacactctccatcccgaaccctgaaatcgaggagcgcgggaggacgccgcaaagcgcgttggctcttagggtttgccggtagggttgggaggctccgatccgggcgcgcaggcatgaggattcgggagctccgagatgggctggaggtggaggacgacgagcgggaggagcagggatcggaggttggcagtggttacggggaggttgtcgcggttgtgcgactgcgggcgaagcgcgctatcgttggtgccggcgcgagggtcctgttctatccgacgcttctctacaacgtgctccgcaaccggttcgatggcgagttccgctggtgggatcgcatcgacaagtatgttttgctaggtgctgttccgttctctagcgatgttctgcgcctgaagcaacttggtgtaagaggagttgttacactcaatgaaccctatgaaactctggttccgacatccttataccaggctcatggaatcaatcatctcaaaattcctacaagagactacctgtttgccccatccctggagcatatttgtcgtgcagtggattttatccattgtaatgaagtgcaaggtggtagcacctatgtccactgtaaggctggaaggggacgaagtcgcactataggaactagtcgcttgatcaagtacagaaatatgactcctgaagtagctttggatcatgcgaggtctgtgaggcctagagtgcttttagcgcccgcacagtggcaggccgttaaaatgttcagcaagctcaacgctagatgcctttccatacagagctcgaacccaacttgctcagcactatctaatgaggaatccagtgaactgtcaagcacgatgagcagcagatgccttcggattcagagctcaaatgaggtctcgataacttgtgaagaatccaatgaagcatcctttggagaccctgaagttgatggctacaccaccactgagtttgacaccgagcattttgttttacctcgttgtcgaagtatgctgtccagaccaacgagccccactgggtgtagtgatgcagtcttcataaccgaagaagatctagagggctatgagacctacgccgatgacgggaaggacgttgtcgaagtgcaagtagtggttcgccacaagcccatcatgaggaaactctcctgcttccttgggtccttgaagcttaccggcaattgcgagccaccacctggccgtttgaccgaggttcgagcctgctaggtggatcagctatggtttccgcatctgtttttcgctctttgtacatcggcagagtgtaattaccggcataagtttgcacagcctgcggaattccctcgggacagaactgtatgttgtggcatgtgggtggcgagataaatttggctatcgggagccgggagacctgtgggttgttgcagggagtgcgagagatctgtgtgcatatctggtatgaatgttttccttgtaataaaaagatgtttccttttgtaataaaaaagatgtactccctccattaatagtatcgcacttttttcccgaccataggcagatatcaagtgatgcaatagccaggccaaaatttgagtacaattgatcgctcccctcccggcaaactacgcaatgatcggagacatgcagcactgcaagcccatggtgatggattggttctcgtgcagaatattgtttagcaagctcagaatcaccatgatgcagtaagagataacgctgctggtgctattgctaggatgataatggtgcagcctcagtcgatttctcttactgcat

SEQ ID NO: 166067 - DNA, 538 bp, Zea mays
  unsure (1)..(538): unsure at all n locations
  Clone ID: MRT4577_83036C.1
ccggccgggattcacattgcatcgtgtcccttcacattctacacctttctctcctaccaaaaaaacacaacctccttcaaatcttcatcatgtctggctactccaacgttggtaaccgtggcgtctacgaggctggcgaccagaggaacgtctctgaggctgagcgcaaggccgaggagtctgacccctacaacgagggcaaggagaactcccacaacaacctcgactctaaggatgagcgatccatcgccaaccgactcgctgctgaggagaagaagtccgagtctggcgacgatactgagactgcccaattaaagaaggaccctaccctgcctgctcgcgctcacggtaacgaaccctccaagggcgccaagattgatgctcagttgcaagctgaggaggaagaggagctgaagcgcaagggcaaggcttaattgtaaaaatacatggatcacggccgcttcattgcaggcaaatgatgcggaagggatgaattaatgaacaatantagaanaaaaaaaaaaaaaaacccgcggac

SEQ ID NO: 166068 - DNA, 229 bp, Zea mays
  Clone ID: MRT4577_83037C.1
aaattatccaacaccggtgtgctattccaccatgggcaacaccaggggactgcaacacagtaagcgccagaccgaccacgagcgtacatctacctcatcacaccatgacgattcctgtaaacacacatttcaagtgaaatacaccatctactaaaatatatatctataagcaaataagctttccatatctgacatgaatcatagacagtttcaactgaaaaactacaac

SEQ ID NO: 166069 - DNA, 759 bp, Zea mays
  Clone ID: MRT4577_83038C.1
tattatatcatccaatccattagattaattaatatgagtagcgagccagcacattattaccaatcaatgcgaaagttcccgaaaacgatgatgctttcgtggatgaggtgtttcgtcgagcaccagacgagcctcacacaaacttcatttcctgcttctatcgaactccactcttaaccaaaccaccacccatgcagaccaacagaccatcgagaccaagcgatgctgaatagtcttcacagcgacgagagcgagtgggacgatggcgaggtccgagcgcgatggaaagatctgcatggccggcgcgatgctgaggaaaactcgaccaggccacggcgagccgatgttgtagcagggaccaatggcgaaccccgtgttgagtacaaggaacgacagcgtcgaggcgaaggttggagacgacagccgggtgaggcgagcccgcggcagctggcatgctcgacgaccacagacacagctggggagggagcaagggcgacgtgtctgctgatgacaaaaagggacgcgaggttgacaacggcacaggaccctaaaacgtccgagcttgaagactgggcgcctactgctgccgatgctacagcgggaaggtgtgagtgcgtggcagagcaggacatgcactaggaagccaaacgctagtgcagggagaagatgaagggaatgaaactcgacaccatggcatgcatgagagataggaagcaaggagagtgcgtgagtgttctagaggcccatctcgtgaagaag

SEQ ID NO: 166070 - DNA, 339 bp, Zea mays
  Clone ID: MRT4577_83039C.1
cctctagagcgggcgcccttagttttttattcccccccttttcttctttttttaaaaaacccggaaacataccgggggtcaggggaagaaaacaatccccgaggatgcccttcacttcgatcgaacactgttgttcttcatcgttgtacaaagtttttcaaagaggacgaggacataggggttgaacaaaaaaaaaaagggcaaagacatgtatcactgatctggagtctaaacaagaggcaacttgttcccgaaagaatcgttcaaaaaaagttctacgagaacaacatgttttactttgttccagcaattttttttttgagcgatttctatgtcttc

SEQ ID NO: 166071 - DNA, 974 bp, Zea mays
  unsure (1)..(974): unsure at all n locations
  Clone ID: MRT4577_8303C.1
caagcatgtctgcttcggccgtacaatactacaatgtatcggttgtccacanaggcaatatttgatgcatgttgccccgttcctcaccaaacttgtcgcatcgtcgacttgtgagtctcttccgtcggcgtcgacgagagctgcgctaggtgatctcgactgcttcctcgtcccccatggcgacgccggtccggccgggcactctctctctctctctctctctctctctctctacctgccccgttcctcaccaaacttgtcgccctcgtcgacttgtgagtctcttccgccggcgtcgacgagagctgcgctaggtgatctcgactgcttcctcgtcccccatggcgacggcgctcaaatcgttcctgaacagccccgtcggccccaagaccacccacttctggggccctgtcgccaactggggcttcgtcatcgcgggtttggttgacatgaacaagcctcctgaaatgatatctggcaatatgacagcagccatgtgtgtgtattctggactctttatgaggtttgcatggatggtacagccccgaaattatttgcttctagcatgccatgcttccaatgaaagcgtccagctctatcagttatctcgctgggctaggtctcaggggtacctggagaagaaagaaccagaggccaaacagtaaagagggtatccaacactgcagtcatttgttcaataaagaaaatatgctgtggaaaacattcattctgttgccaatgcagttttttttgtatgtttgcaaaatatgctgaggaaatttcatgatacctagcgcagttacaagcgtctgcttacttttatgtgcatttgtcaagacacatttgttttttacattgctgccttcctactatttggcactatttattttacctggctcatccgctcatgtgcccaaaatgaaaagtaaaagatcagtcattgcgaagtaaaaaaaaaaaaaaaaagggcccta

SEQ ID NO: 166072 - DNA, 324 bp, Zea mays
  Clone ID: MRT4577_83040C.1
ggccgcttttttttttttttttttcttttttttttttttttttttttctcctgaacagagctggtcgtctcttcctcagccataagaaggctgggctatacacatacatgggtttgggttgcaatgcaaacaagctaagacgagcacaggattactgcagaacagagcaaacccaggaagaggcagccctcctaaatccctgcttaacctaacgattacttctttctgcgcgctactggcaaccaactacagcactagtgtccaacttcaccaccatttgccagatccatggcgaagagatcaccagaaaaaggcgcttctcta

SEQ ID NO: 166073 - DNA, 184 bp, Zea mays
  Clone ID: MRT4577_83041C.1
ttattcttcacaaaggatcgcacagttacatggggtattttatagcatggttccgttatatagtgactcatacatgagtgtgcgctacaaggaaacttgcatatcaactggatgtgcaaacattgcgcctcactcaaaatgtcactggctgaatgtccgtgaaagggcaaacacaacttgatga

SEQ ID NO: 166074 - DNA, 375 bp, Zea mays
  Clone ID: MRT4577_83042C.1
gggcggaaaatgagatagtccaatgaaatagggggtttgttacaattcctgcaaactaagggggggcttctaatctaaggtccatccactacccagggggggggtcctccaaaactttggttttttctggggcttaaggcctttttggggctttcggaggcacatcagggggctcaatagcctcatcgatggcctcaggcacagtttttggggcagccggagctttaatttttttttcagggcttacttcagaaacaggggcgtttggcaaagactcgacgggaagctgggcttttaaggtttcaaactcaaccataaacagttttttcatcctcagccgagagctggtcacccaaaacagcattgatttcattt

SEQ ID NO: 166075 - DNA, 1208 bp, Zea mays
  Clone ID: MRT4577_83043C.1
cattgggtacctcgaggccggccgggctcacactcccatccagccgccaccaggtgcagagtctttcgtcatctcttctccggcgaagaacccccagtcgcccaccagatcacttgttaaactttgttgaggggtgatggcggtttctttcgcaaacctcaacaccgaggcagggcttaaaaagcttgatgagtaccttctcactcgcagctacatcactggctaccaagcttccaaggatgacttggctgtctacacttcgttttcgtctgctccctcgtccaagtatatcaacgtagcaaggtggtttaatcacattgatgcgctcgtgaggctgagcggaattactgcagagggccaaggtgtgaaggttgaatcgtcagcagttccttcagccccaactccagatgttgctgaagcacaggccccagttgctgaggaggacgacgacgatgatgttgacctttttggtgaggagaccgaagatgagaagaaggctgctgaagagcgtgctgcagctgccaaggcttctggcaagaagaaagaatctgggaagtcatcagttttacttgatgtgaagccatgggacgatgagactgacatggccaagctcgaggaagctgttaggagtgtccagatggaagggttgctctggggcgcatccaagcttgtcccagttggatatggtatcaagaagctgcaaatcatgatgaccatcgtcgacgaccttgtctctgtcgacactctcattgaggactatctgtgcgctgagccagttaacgagtacgtacagagttgcgacatagttgccttcaacaagatctaggcgtgactttcgatcagtccttcccctggggtgctggcgatggtggtggctgggcaatgcaccagcctaatttatccatagctatatgtctgctttgtgtggccagtgatattgccgtgagtatttttggatcctattcgagtcgaatgtaccagtaccagagttaatttgctttaattcgaaacaccgttccagttggaattctgttacccgtgttctttgcttgcagttcctctatttcttttttttttttgcatcggatggtggcggttcctttaattttttttgcgttggctgttgtggttctggtcagactgtgttggtctagattctaaaaaaaaaaaaaaaaaaaaaaaaaaaaaaaaaaaaaaaaaaactcgag

SEQ ID NO: 166076 - DNA, 1529 bp, Zea mays
  Clone ID: MRT4577_83044C.1
ttgggtacctcgaggccggccgggaacccctcacactcccatccagccgccaccaggtgcagagtctttcgtcatctcttctccggcgaagaacccccagtcgcccaccagatcacttgttaaactttgttgaggggtgatggcggtttctttcgcaaacctcaacaccgaggcagggcttaaaaagcttgatgagtaccttctcactcgcagctacatcactggctaccaagcttccaaggatgacttggctgtctacacttcgttttcgtctgctccctcgtccaagtatatcaacgtagcaaggtggtttaatcacattgatgcgctcgtgaggctgagcggaattactgcagagggccaaggtgtgaaggttgaatcctcagcagttccttcagccccaactccagatgttgctgaagcacaggtaaactcaaccaatggtttggctgattgtgcagattccttatgatttttggctgaaaattgtcagttgctttacaagctcacatccacatagttattttgtgctgatcgctgacttgaatcattattggtcactgaagttactatcaaccgtatggttcaatatcagaaaaatgaaacttgtacagttgtacactacttgagttgcatagtttagtcactgaaatccattttctaaaaccacaggccccagttgctgaggaggacgacgacgatgatgttgacctttttggtgaggagaccgaagatgagaagaaggctgctgaagagcgtgctgcagctgccaaggcttctggcaagaagaaagaatctgggaagtcatcagttttacttgatgtgaagccatgggacgatgagactgacatggccaagctcgaggaagctgttaggagtgtccagatggaagggctgctctggggcgcatccaagcttgtcccagttggatatggtatcaagaagctgcaaatcatgatgaccatcgtcgacgaccttgtctctgtcgacactctcattgaggactatctgtgcgctgagccagtgaacgagtacgtgcagagctgcgacatagttgccttcaacaagatctaggcgtgacttccgatcagtccttctcctggggtgctggcgatggtggtggctgggcaatgcaccagcctaatttatccatagctatatgtctgctttgtgtggccagtgatattgccgtgagtatttttggatcctattcgagtcgaatgtaccagtaccagagttaatttgctttaattcgaaacaccgttccagttggaattctgttacccgtgttctttgcttgcagtacctctatttcttcttttttttgcatcggctggtggtggttcctttatttttttttgcattggctgttgtggttcaggtcagactgtgttggtctagattcttgtttttgtgtgatcggaaacatgctatcgcgcgtgacagagctgttgggtgacatgtagtctcagattgcagagctgaaaaggcttgcaacctcgtctcgtggcaaaaaaaaaaaaaaaaaa

SEQ ID NO: 166077 - DNA, 527 bp, Zea mays
  unsure (1)..(527): unsure at all n locations
  Clone ID: MRT4577_83045C.1
acccagaancgccagaacacccaaaacaccaaacaaaggacaccancaagacacagaaacgccggaacaggcggccanacganngcaaacggaagaggcagacaaaccaacaaagccggggacgcccacacgccaaaacagcggaaccacaacacccggggagcgccaacccaaaaacagcgcgaaaggaaagaacncgacaanccgangcacgcgcgaggggganacacggaccgggaggncaacccaccagagcgccgagacagccagacccgcgaagaacaccncccaaaggagagcacaagcaaagcaccggagggcggcgcggaancagccagagacgaccacagccgagagcgacgcgacagccgcaagcacaacacaggggacgacncgcncgcaggcccaacaccaacaggacagcaggcaacggagggcaagaccgaaagagaagccagcagcaccccccaagccaggagccacaacacggcgaggaaccgacccaagaccaacgccgggggcccgaa

SEQ ID NO: 166078 - DNA, 625 bp, Zea mays
  unsure (1)..(625): unsure at all n locations
  Clone ID: MRT4577_83046C.1
ccctcgaggccggccgggagaactttacctggaagcctggaggatggaacgggtactagcctgctagggttcgtgtccggcggcggcgactgcagctggaacgtcggcgacgcagctcagtggacgctcccatcgaccattcccaggctgtagtcttgtccttggaggtacacacaaagactggtagacacggacgacctctgccgatgcctgtgccttttatatctaattttagaggagcagactgttcaaccaaagatggctggtggtcgtgtacttgatccattttgtactcgccttgaccctaccatggtagaagcacgggtctgcaccaaagattggatagctggagcaagaaaaggttatatagtagtaccttatatttatttacaatttaattagtcattagttgtgatcaatttgtaatattgtgaacttgtgatctttgtgatcaacctgttatattgtgaacttgtgatctttatgatcaacttgttatactgtgaattgtgaacttgtggtctttgtgaaaaanaaaaaaaaaaaaaaaaaaaaaaaaaaaaaaaaaaaaaaaaaaaaaaaaaaaaaaaaaannnnnnnaaaanncccccccccaaccccgccc

SEQ ID NO: 166079 - DNA, 338 bp, Zea mays
  Clone ID: MRT4577_83047C.1
atcacaaagaccacaaattcacaattcacagtataacaagttgatcacaaagatcacaagttcacaatataacaggttgatcacaaagatcacaagttcacaatattacaaattgatcacaactaatgactaattaaattgtaaataaatataaggtactactatataaccttttcttgctccagctatccaatctttggtgcagaccagtgcttctaccatggtagggtcaaggcgagtacaaaatggatcaagtacacgaccacctgggaatggtcgatgggagcgtccactgagctgcgccgtcggcgttccagctgcagtcgccgccgccggac

SEQ ID NO: 166080 - DNA, 576 bp, Zea mays
  Clone ID: MRT4577_83048C.1
ttggggtaccctcgggccgtccggggtgagacagacagaagaccagaacttaaacctggaagcctggaggatggaacgggtactagcctgctagggttcgtgtccggcggcggcggctgcagctggaacgccggcgacgcagctcagtggacgctcccatcgaccattcccagtgccttttatatctaattttagaggagcagactgttcaaccaaagatggctggtggtcgtgtacttgatccattttgtactcgccttgaccctaccatggtagaagcacgggtctgcaccaaagattggataactggagcaagaaaaggttatatagtagtaccttatatttatttacaatttaattagtcattagttgtgatcaatttgtaatattgtgaacttgtgatctttgtgatcaacctgttatattgtgaacttgtgatctttatgatcaacttgttatactgtgaattgtgaacttgtggtctttgtgatatttgtaaactttgttgcattgtgaacttattatattgagatatttttatatttatatggctaaaaaaaaaaaaaaaaagcggcc

SEQ ID NO: 166081 - DNA, 481 bp, Zea mays
  Clone ID: MRT4577_83049C.1
gccggccggtactcctacagacagaagcccagaacttaaacctggaagcctggaggatggaacgggtactagcttgctagggttcgtgtccggcggtggcggctgcagctggaacgccggcggcgcagctcagtggacgctcccatcgaccattcccagaggagcagactgttcaaccaaagatggctggtggtcgtgtacttgatccattttgtactcgccttgaccctgccatggtagaagcactggtctgcaccaaagattggatagctggagcaagaaaaggttatatagtagtaccttatatttatttacaatttaattagtcattagttgtgatcaatttgtaatattgtgaacttgtgatctttgtgatcaacctgttatattgtgaacttgtgatctttgtgatcaacttgttatactgtgaattgtgaaaaaaaaaaaaaaaaaaggcccctaaaaaaaggcccctagggcc

SEQ ID NO: 166082 - DNA, 301 bp, Zea mays
  Clone ID: MRT4577_8304C.1
ctcaaatacacaggactggtatagactctgtcccggatagaattcgccagcaggcaatatgggtgggtgcaccagctcctaggtaaattcactgtttacttagtccacatgcttgcctatccaacataagagcagggttgaagcttctgtggtcattagtagtaagaagaagaaccatgcaggtgctaatgagaaaatccaatgtgtcatgcccagtccaaatagctcatgttcactggaacgctaatgatagaacattcatcatgcgaacggggtattatcccagaatataagctgcgct

SEQ ID NO: 166083 - DNA, 1187 bp, Zea mays
  unsure (1)..(1187): unsure at all n locations
  Clone ID: MRT4577_83050C.1
agcaaaagatcaatatgtatgtacagcaaccaaatgtaccaacaacaacaatttaaccatgacaccagaccatatgtatatgaaaggttcccccggtacactctttattcatccttgaacacaaaatctagacgccgcctctcaccctcgggtgtaaaaccaatgagccagacatgatctcacaatgccaactaaaaatcacaatatctgagtacagttatgatcatcatattctattagcccatatttccaagaagtcgctccactgcagcatgaacatttccagcggtagcggccaaggctcggatgttctcttgtgtgtcaaagaaacccatttcttggagctgagctaattgtgtggcgtacagttcttctggcggcacattaggagcatttggaacacctaggccaccaccagcaccaagcccgctgaacatgttcatcaaggtgttgaggttgacattgcctgcaccagagcctgattgtgtccgctcctgtccagcttgttgttggccaagttgtgacatcaaagactgctggaatgaaattaatttcttcgccagttaacatctcctgaaacattgcagcaattaatttcattccagcagtctttgatgtcacaacttggccaacaacaagctggacaggagcggacacaatcaggctctggtgcaggcaatgtcaacctcaacaccttgatgnaacatgttcagcgggcttggtgctggtggtggcctaggtgttccaaatgctcctaatgcaccgccagaagaactgtacgccacacaattagctcagctccaagaaatgggtttctttggcacacaagagaacatccgagccttggccgctaccgctggaaatgttcatgctgcagtggagcgacttcttggaaatatgggctaatagaatatgatgatcataactgtactcagatattgtgatttttagttggcattgtgagatcatgtctggctcattggttttacacccgaggtgtacatggacaatgtcgtattctgtacaagagggagagggaatatgtagtgcagaccatgagaactaaacaaactgtatttcgattgctcaagaaaatatatgagatgcatccataactcagagatgtattttgttgcaatagttgggattccttcattttttaaaaaaaatcattatttttttatcat

SEQ ID NO: 166084 - DNA, 395 bp, Zea mays
  Clone ID: MRT4577_83051C.1
tcaggaggccatccgctgggaatgtaggtgcgaacccgctcacctcggttcgtgcggccggcgagctgagccaccggctcgtacctttggttctcaatcacactaacttagttataattccggcacacgagcagatgcgccgcctggtttcttgaattatgacttagaggcattgagtgataatacggctcacgttagcttcgggtgaattactattgaacgcgcgggcattaactaggtgaaactaacctcggttactatcgtactaagccaaattactatcgctattggggggtgaacaaggcaacacttagctgattctggttggcatagttcgggagaaccttccttataggaggaaaaacaatccaacatttggaggcttgtgtttcaca

SEQ ID NO: 166085 - DNA, 322 bp, Zea mays
  Clone ID: MRT4577_83052C.1
ggaaaccgggaacaatcgttctttttctggaacctggccctggcagggcccctttagggggccccctggcatgccacctggtggatgacggacaacacccccctctcaagggtcacccggacgttctggatcccctcctggatgtgctccacgtcccgccagaaatggggggattggaccccccctgcttgggataaaacatcgagcgcaaaaccctggccgaaagggaagaaggcaatccctttgatgcacaagaactttacaagagatgttgcgaggggcccgctctttagccaaccagcggctgaagggaacccatgct

SEQ ID NO: 166086 - DNA, 529 bp, Zea mays
  Clone ID: MRT4577_83053C.1
ttactattattcgtcaccaccctgctacatgtttacttgtatataaatagagggcacacgacaccatcttgtaggctgtagtcttgtccttggaggtacacacaaagactggtagacacggacgacctctgccgatgcctggtgccccaaaagctcgacttgtatataattgcaagttatagattatattgcatacatgtgacatattagtttatatgtatttttcagtgccttttatatctaattttagaggagcagactgttcaaccaaagatggctggtggtcgtgtacttgatccattttgtactcgccttgaccctaccatggtagaagcacgggtctgcaccaaagattggatagctggagcaagaaaaggttatatagtagtaccttatatttatttacaatttaattagtcattagttgtgatcaatttgtaatattgtgaacttgtgatctttgtgatcaacctgttatattgtgaacttgtgatctttatgatcaacttgttatactgtgaattgtgcg

SEQ ID NO: 166087 - DNA, 845 bp, Zea mays
  Clone ID: MRT4577_83054C.1
acaatgcaaataagattgcaaaagatccatatgtacagcaacccaatgtaccaacaacaacaattttaaccatgacaccagaccacatttatatgtaaggttccaccggtacactctttattcatccttaaacacagaatctagatgccgcccctcaatctcaggtctaaaaccaatgaaccagacataatctcacaatgccaactacagatcgcatggatcagaacacagttatgttcgtcatcatattctattggcccatgtttccaagaagtcgctccactgcagcatgaacatttccagcagtggcggccaaggctcggatgttttcctgtgtgtcaaaaaaacccatttcttggagctgagctaattgtgttgcatacagttcttctggtggcacattaggagcatttggaacacctaggccaccaccagcaccaagcccactgaacatgttcatcaaggtgttgaggttcacattgcctgcaccagaggctgattgtgtccgctcctgtccagtttgttgttggccaagttgtgacatcaaagactgctggaatgaaattaattgctgcaatgtttcaggagacgtcaactggcgaataacaaactggacaggagcggacacaatcagcctctggtgcaggcaatgtgaacctcaacaccttgatgaacatgttcagtgggcttggtgctggtggtggcctaggtgttccaaatgctcctaatgtgccaccagaagaactgtatgcaacacaattagctcagctccaagaaatgggtttttttgacacacaggagaacatccgagccttggccgccactgctggaaatgttcatgctgc

SEQ ID NO: 166088 - DNA, 1013 bp, Zea mays
  Clone ID: MRT4577_83055C.1
aattcggcacgaggtggaagcctggaggatggaacgggtactagcttgctagggttcgtgtccggcggcggcgactgcagctggaacgccggcggcgcagctcagtggatgctcccatcgaccattcccaggtttggttctccctcatccggtcctcctccatgtctccatggctgagtcactatcgttctcttctcacgcacgtcatgttgtcaaatccatcactggctttagctcccgtgatctgatcaacagcaaaacgaactcactacacactatgccactatggcatggagtttaattatgagacaatgtaaagactagagcgagtccactaatcacgggtggccaaagaaattcacccgaccaggccttcagagtttagtattttactattattcgtcaccaccctgctacatgattacttgtatataaatagagggcacacgacaccatcctgtaggttgtagtcttgtgatcttgtccttggaggtacacacaaagactggtagacacagacgacctctgccgatggctggtgccccaaaagctcgacttgtatataattgcaagttatagattatattgcatacaggtgacatattagtttatatgtatttttcagtgtttttatatctaattttagaggagcagactgttcaaccaatgatggcaggtggtcgtgtacttgatccattttgtactcgccttgaccctaccatggtagaagcactggtctgcaccaaagattggatagctggagcaagaaaaggttatatagtagtaccttatatttatttacaatttaattagtcattagttgtgatcaatttgtaatattgtgaacttgtgatctttgtgatcaacctgttatattgtgaacttgtgatctttgtgatcaacttgttatactgtgaattgtgaatttgtggtctttgtgatatttgtaaactttgttgtattgtgaacttgttatattgagatattttcatatttatatggttaccgattgt

SEQ ID NO: 166089 - DNA, 281 bp, Zea mays
  Clone ID: MRT4577_83056C.1
ataaaaagggggggggcgacacggacatttttcattattgttttgggggggggggcaatgacctttttaacaatattgtggggggcaacggggggtggctcttgggggggggagggggggttttttttgcattttgtttctggcacggggggggcaggaaataccagcaaagggcggctggggtaagacccgcaccagtcgtttttttgagccggggggtgacatcaatgaccctccttgacgctcagggttttatagaggggcaaaaaaagccagctgca

SEQ ID NO: 166090 - DNA, 263 bp, Zea mays
  Clone ID: MRT4577_83057C.1
aacaagctttttttttttttttttttttttttttttttttttttttttttttttttttttttattaaaaccaaattttttattgacccagcatatattattggccatccaacaaataatggggtggccccccttactgaattgggaccaacaacgacagaaagggagggatcgaggggatgaccaaaataagagaaatcacccaaggggcggaaaggcagaggagaccccaaaggggggggggcggcagcagggaatggggcc

SEQ ID NO: 166091 - DNA, 362 bp, Zea mays
  Clone ID: MRT4577_83058C.1
atttcagaagaatcagtaattgaagggaaattagtggaattgattcgtatctgtcgtgttgatgcaaagattgatgcagctaaacaacaaattgttattcaatcggaacaaccatcaatctatcaacagattattgataagacaaagagtattgcttatagatccacacaacttatccatgtcatcgataagaagattgcacaaaggaacgaagttatcgctgcagctgattaaaaagtacctttgtttcaagtttactcttcttctctctctttctctttctttcatgcacaacgacatctcgcacaccgttggtcgcattgtatacttctagcagcaacacttgtcgtgacacataaagt

SEQ ID NO: 166092 - DNA, 297 bp, Zea mays
  Clone ID: MRT4577_83059C.1
ggaaaaggccgaaaaaaaagggaattttctaattgtttagggaaaagatcccccctcggaatgtttatccttggaaaaaactgcctaaacccctcctttaaaaaaacccctccttttagggccccccgcaaggaaattgctggacaaaaaattgtaatccccccttctttttatttttttttaaaaaaaggcaaaataaactcttaacccaaaaaaaaaaggattattttcattttaccccaaaaggctgctagggctcaaaggaatttcttgcattattttttacaaaagggaaaa

SEQ ID NO: 166093 - DNA, 432 bp, Zea mays
  Clone ID: MRT4577_8305C.1
ccggccgggatgggaagaaaatgatggatggggccattgttgcggtgtcggttcttcgtggtcgtggggtcatgttgggggtgtgatcgggaactacctctaccgaggggtggctcctctcaaggccaagcgactaccactgttcaagatgatcgtcgaggctcctctagtgggcattcggctgagcgctctgcccccagcgacgcggagatcgctcgctagctcatggaggccatggaattttgcaaaggcgcggatggagccggcatcccatatgttttctcgattccaggttgccctccaatgcgtcctgagccaggcttcatggagcttccctcctctccggtgctacgggacgacctcgatcccttgccaaaaagcatggcggagaaggaggtgacttgcacgtgggcggagcagcagcagagggac

SEQ ID NO: 166094 - DNA, 272 bp, Zea mays
  unsure (1)..(272): unsure at all n locations
  Clone ID: MRT4577_83060C.1
gggggggggggggggggtttttaaattttttttttgggttttggagccaggtaccagttgtgagtgttcaatcacaattttaagaacaataaaagcaccagcaacttgactttgctagtttattttaccaggaaagaatctaccaatttttggggttgtaggggggaantccntaaacaaatcttgccctgttagcattgggctgatttgtacctatttgtatcatctctcaagcctaatgctaacagggcaagtcggtagacaaatcttgc

SEQ ID NO: 166095 - DNA, 2663 bp, Zea mays
  Clone ID: MRT4577_83061C.1
caggcctcctgcatgttagagaaaaaaaagcttattgtgcatgcatacagtgtagtacaatgtcatgggcaactctgaccttctcctcttccaaattataagacattttagctttcctaatacattgctttaactatgtatctagacagaatgtatatctaagtgcatagcaaaagttatgcatctagaaaagccaaaatgtgttataatttgtaacagagggagtaaaacacaggaatacacaactgtttgtagttcttttatcatttgttggtgtttttatttacatatataaggaataatgataaaagactaattaccataacatatttgaaacaagtaaattcgttcaaagtttcaaacatcaattatggccattcaaaatttggtttatttcatcataccatatattgattgcataatcacttaattttgttcagttatgacacctgccagtttgtatttggaagagaagtcttggttttggtatatatgtgggagtgggagtctatagcatagcatcaagattaaattgtgttgcagatattgttgattttgtcattttatcaatttgctactgtaataatatatgccaaattgagaattgagtatcagatatgtgtaactatattatatataaacctcaatttatttggagtactgctacacatacaaccatttgctacaactcagggtctaatccttgaaataacctatatggaaaattcattggcacaagctgtgagcaaagtggatgtatgtagaatttctcatttatttcttaacttctttcacttttgctatgtgaatcttttgactttgactgatttcaaaaatgtgatggactggtggtggtgttattttaccatgtctactagtaacaaacattgttattaaaacgtcgcttaaacgtcgtttaagcgtcgtttaagcgttaaaacttgattagcagttggaacgtccgggcgttttaggtaagctgcgtagaacgtccgtttcgagcgtttaagcgtcgcttaagcgtcctaatcgcgttttaggacgttttatgcgtgcttgggacgttctacccattatgggtctttcctgggcctttaggtttttctgtgtatgtgttggacgcacgccaccctcctctctcctctacggctcagccggccgccgccctcctctctcctctacggctcagccggccgccgccctcctccctcctatcctccaacatctccggcgcgtctctcctcagccgcggaggcaaagccggccgccggccgtggaggcacagcagacctgcgccaccgctggccgcctaccccacagcagatctgcactcaagaccagcagccagccagccatcctctgcggctccactctgccagcgcccaagaccagcactagcagccagccatcctccacctccactgctctccatttgatcatttggatcgtctcgttcccggctaacctggatttcatgatcttcaaccaccggggaagagcgctgccgtcagactcagacctgaagctcaagacatagacatgccgttccagaatccagatcttgttccttatttcccttgtaacctggaggaggttccaattttgtgcccgtttgtttaggggggaaagaacttttcctgaattcagatcacaagtagcttatctatgctgtaactcgataatttgtggcgtcttaatttctactatctgtatggaggtgattcaagcttttgttgtagtcaaaaaaaaaaaaaaaaaaaaaaaaactaaaacctaaaccaagctaaacaatgaaaaagggaaaatccactgaacaactcggccctagaaactaatgaaaaccgatacctggctccaaccttggcgggatcatggctatagcctgttcctgagcgaaatttggtctgtggacatgccgctgccgcccgacgactccgaggcgtgcgcgggcgccgcggaccgcgcgcttcgtgcggcgggggcgacgctgccccgccccaccggcggcaataacgggacgtgcgacgtggcgttctgctactgcggggtcaggctgaggcggctgacgtgcggacccccgccggcagccgagggcgggctgtgggcgccggctgacgacgcggcggcgaggaggctggagagggactgcgcgcagccgggcgtccccggctgctccaaatgccttcttgctctgaccatgataaagaacactagtcccggcggtggcgccgccgcggaggcagcgagcaaggagaagcaggccgccgtccggtcgggcgagagtgaccgggactgcgagctcatggggctcatgtggctgctgcagcgcaacgccacgcgctacggagcgacggccacggccgtcatccaggcgctgatggccgtggacgaggcgtccgccgcgggtgtcgcggtggcggcagacgcggggccggccgcggcgtgctcgctgcccgtggacgacatgcccctcccggccgaatacgcgcaggtcggcggggccagcgacgcgcctcgcggcgtctgctgcttcttctgcctgctcgtgctgttctccgttctaagcttccgctccgtgtactcgctgtagcaattttgtggttcaattgaagttcgttatatgctcaaaaaaaaaaaaaaaaggggccgctcgccgatctaga

SEQ ID NO: 166096 - DNA, 239 bp, Zea mays
  Clone ID: MRT4577_83062C.1
gacgagcaagggcaatgcatatgctgtattgtgtgagtccataggtgtacgtcagctccagagcgagagtgcttgcctgatcagcgtagcccaacatggcaatgctatacttgtgatcatgtacaaatatagagtcacagaatacagcaagggcaatgcatatgctcatgttgccattgtcaccaatgatgtgtacaagatcgccgagacgaatcatctgaccaccaaagaactaggtg

SEQ ID NO: 166097 - DNA, 1807 bp, Zea mays
  Clone ID: MRT4577_83063C.1
ccttcctcctcttctcttcctctcgatctcgtttctctccaggctcggacggcacagcgcgcggcggcgtggatcccgtctccctctcctcgatccagccctctgaaccacatgcatgtgatcatgcacgggctggtatggtaaagggcgcgccgtgctgctagactcgtatgggctcttggcagcaaggagagctgcagggagcagccatggatggtgcagcggcggcggcgactggaagcggcggcggccaccgcgtcgtgggctcgaggaacgaggagcacgggaagtacctgtcggagtcgagctgctgcccacggtgcggacacaagctcgacccgaagctggactggctggggctgccggcgggggtcaagttcgacccgacggatcaggagctgattgagcacctgcaggccaaggtctggcctgcctcggcagcggcgccgtcgcaccctctgatcgacgagttcatacccaccattgaaggggaggacggcatatgctacacccatcctgagaggctgccaggtttgacgaaggacggcctgagcaggcacttcttccaccggccatccaaggcttacactaccggcactcgcaagcgccgtaagatccagccgcccgtagccgatgcctcatcatcctccgccctgcccgcgcagcagcagcatcagcagcagcagcggagcgagacgcggtggcacaagaccggcaagacgcggccggtggtcgtcgccgggcggcagcgcgggtgcaagaagatcctggtgctctacacgaacttcggcaagaaccgcaagcccgacaagaccaactgggtgatgcaccagtaccacctcggcgacaaagaggaggagcgcgagggcgagctcgtcgtgtccaagatcttctaccagacgcagccgaggcagtgtggcgtcgcggcggagcctgccgccacagccgcctcctctgacacggtggaggaggctgctgacccgccggcgccggagggcttggtagtgccgccaccaccagatgtagccggtgccttccaaggcgccgctggcattgatgagttcagctttgcgcagttcaggagcagcttcgaggaggtggacgtcggagcatcagttcaggtttcgatgagggacgaggaggaaatgcatgcagcgcatctcaaccttcaccaggatcataatcttcaccgcaatcaatttggcaaccaagagcacaggcgccgcatggctgcaactgctgcagcattccacatcaacacaccagtagagcctatcaccacgatgatcacctcctcgccggtggttcacggttctgccatacttcaacatccagaggcatatggccatggcagctcgacttattgtcatcatcagcaccagatggaggaggatgagcagctacaccaacaacctcaaaattttgatgggcgacggtcgacttctgggctcgaagaggttattatgggatgtagttcgaggaggtccaaaagagcggaagcatctggcccaggtggaaacaaggagagcagaggatggcagtacccatccttctggccatctggcagccaacaggatcatcatgggtagaagagcagcaacacatccctgcctggcactgtatgtgccgcaccacctttgcatgaagccaaccttggagagggcaaccgaaagcagagagacacctgacatcatcattactagctaccatgataagatcatcatataaacctagctacactgtcgtacctaccatatctaggcttacaatactttagcgtgagtgcagtcgcttccaagaagcaaac

SEQ ID NO: 166098 - DNA, 365 bp, Zea mays
  unsure (1)..(365): unsure at all n locations
  Clone ID: MRT4577_83064C.1
ccggctcgggataaatatanttgggcgcatccaagagatccagccatggcagatgtggatccatccattgacgtgcaggtccatccagaggtagaggaggaagacagggaacacatgtccaagtgttgtttggattgacatggatgtttccacttttttgtgttaatttatctttttgtgatgaacgatcgacgtctacgtatgtaccataagtactagtagttccattattgttttgattttttatggcttttgttatctttggcgattattgtgcttttatgaccggtttgtactgaaataactggattccacaaaggagtctggactagcttctgacgaaaaaaaaaaaaaaaaaagcggcc

SEQ ID NO: 166099 - DNA, 274 bp, Zea mays
  Clone ID: MRT4577_83065C.1
cttatcgataccgtcgacctcgagaacacaaacagcgggccgcgtatgcgacgagcacgccgagcaaggctactagaatattgttaaccgcggaggacgaattgtgaagatatcactagcgggcttactaactaagaggggacctatggggaagcggcgtgagattatccggaatggctgctgtaagcagaagaggctgaatggcaattggtcgcaccaatggatgacgtgccaacggatgacagctgcggcaataggctcttaactataccca

SEQ ID NO: 166100 - DNA, 392 bp, Zea mays
  Clone ID: MRT4577_83066C.1
gttgcgaggaactacctgcctggaggagatcgggacgattacgggagggcgcgctatgctgctgctcctgggatcgtggctaggtcgttaatatccgagcctatgacccgctgatgtacgagccgctcgatgaggatttcgagggaagatggatcgtactccaaaacagacgaataccaaggggtgtggaagcatgcctagagtgatgggcatgacgactatggcctgcttgttcgtgacatggcgaggaaatacgcgataatcaaggagcttgacgagccactcaccttaaatgatgggacagtagcactgcagtatgaagtgagacttcacaacggtcttgaatgcggaggagcctacattaagtacatgcgccctcagagatgctggat

SEQ ID NO: 166101 - DNA, 696 bp, Zea mays
  unsure (1)..(696): unsure at all n locations
  Clone ID: MRT4577_83067C.1
tgggtacccctncgaggccggccgtgcttcatccgtcgacttcgatctaggcaccgccgcccgagtgcccagaccccagatcgcgctctatccccctccccacttcttcctcccacaaccaccggcaaacgctgcacgaggtcctattcttccccttcgtgttgctgttttgctcatctccccctcttctctccctgtgccagtgccgctgctcgcgagaggagagccttgagctctaatcgaggcgatgagatgtgtggcggaggggctggttgaggggaaaccagttttggagggtgcgtcaggtgggcggcaggagggataaatctgaacccacctccatggttggggcaagatccagaagaagagccacgtcgctgcggggggcgaggaggggcggtcgaccgtagcgtgggatcccgttcgagatgtccaaggggcagcacatcctcctcgtccgcctccattgttccggtcttccaccccaagaactcctcctcctcctgcctcatgggccgccgcaacccctcctccctatagatccactccgccgcgaacatcgccaccaagtgccgccaccccctgctccccggcaccgccaactaccccttcgccaacaacgtctgcccgccctacgacgtcgngtacgactccaccgtcggtctgctcatcgcgacacccaactcgcgccatctc

SEQ ID NO: 166102 - DNA, 300 bp, Zea mays
  Clone ID: MRT4577_83068C.1
attgagaccaactagcaacataataaagcacaattagtgtaccaacagtggaacgctaaaatatttcgtccttcttatgcctccttggtgctttactgcaagttgcttgataccgacgactcatttctcccacagatgcatcacacagccttactatatgctctctcctttctctcccaccgtatcctcatcacacaactggggttctatcggtgatgaagaacaacaccatattcttacacactcctacaggtataccaacgaggctaatcagcagcgtcgagacatcatctacctatt

SEQ ID NO: 166103 - DNA, 738 bp, Zea mays
  Clone ID: MRT4577_83069C.1
gccggccaggttgggatacaccaacttaacgaaaacctatacatctcgcaacaccagaatctttgtcaatctcaattcctttgtaccaatttacatcatgagcttccttcgccccatgtcgatgctgcgttcggcagctctacggcccgcactttcggcggccccccgtgcccgtgtacaagtccgcttcgcgacctcagattacggttccggtaagggcaacccagctggagagtcaccagagaagcaaggccagaaccccagcgagaacctcgagcatcccggccccgcaccgcccaaggttgcccaaggccagtcttcgtcgtcgccaaacaaggacggcaactcgaaccagaatgagtcccccaagccctcatcagagtcgccagctccttcatcaaacaagtctggcaagcgcgaattctcgacatttgcacgccagatgaaggagagcaaagagccagccgtcaagcagggtcaagacaacaagcccagccccaacgaagtcaaaggcgcatgagaaggtcgacaacgaggaagcagagaaagacaaagtccctgccagcttctggaaaggcgaaggtggacgaagtggatctgaaggcgtacgaggatgagcaagagcttatgcagagcgcgaacaacatgaccctgatgtataattagctagagatgactgtcgagagtctcaggaaatgcattgcatccatcaaaaaaaaaaaaaaaagcaggccccta

SEQ ID NO: 166104 - DNA, 925 bp, Zea mays
  Clone ID: MRT4577_8306C.1
cctggcctgttctagctttgtcatctcaaaacattgactttgcatgaataatgtaagttacccaaaaaaaaaaaaaaaaaaaaaaaaaaaaaaaaaaaaaaaaaaaaaaaaaaaaaaaaaaaaaaaaaggaatccccgcctaccacctgcgcttttcccgttccccggcggcaggatcctctatctctctctctctctctctccctctctacctgccccgttcctcaccagtctcttccgccggcgtcgacgagagctgcgctaggtgatctcgactgcttcctcgccccccatggcgacggcgctcaaatcgttcctgaacagccccgtcggccccaagaccacccacttctggggccctgtcgccaactggggcttcgtcatcgcgggtttggttgacatgaacaagcctcctgaaatgatatctggcaatatgacagcagccatgtgtgtgtattctggactctttatgaggtttgcatggatggtacagccccgaaattatttgcttctggcatgccatgcttccaatgaaagcgtccagctctatcagttatctcgctgggctaggtctcaggggtacctggagaagaaagaaccagaggccaaacagtaaagagggtatccaacactgcagtcatttgttcaataaagaaaatatgctgtggaaaacattcattctgttgccaatgcagttttttttgtatgtttgcaaaatatgctgaggaaatttcatgatacctagcgcagttacaagtgtctgcttacttttatgtgcatttgtcaagacacatttgttttttacattgctgccttcctactatttggcactatttattttacctggctcatccgctcatgtgcccaaaaaaaaaaaaaaaaaaaattcctggttcactgaccacaccattcccagattttatcc

SEQ ID NO: 166105 - DNA, 223 bp, Zea mays
  Clone ID: MRT4577_83070C.1
cacaagggaaaagattctctctctcccgcgcgcgcgggtgagccggggaccctgctacgtactcgccaccctgctggaatagcccgccggtcgtccacgccatggacacccaattgcgcggatgtccctggcatgccgcctggcctcgccgcttcctcaacaggtgccgctgagtagccgtcgtatgccacaccgctgtaagcctatacacacctcaagacca

SEQ ID NO: 166106 - DNA, 803 bp, Zea mays
  unsure (1)..(803): unsure at all n locations
  Clone ID: MRT4577_83071C.1
acttcctggctctgctcccaatccccattcttgctgaaaccctagctgctccagtttgtatcctggatggatctggtgttccggagttgagaatcgagtgctagttacctaggattgcatcatcagcccatcttccggctctcgcggcggcggcggcggcggcgacgacttaccggccagcgccgacgacgcatggctcctaggaagaagctcaagagtgccccgccggtgaccgtgagcaccaccgtccacgacctccccgacagtctcctacagcacgtgctctccttcctcccagcgcagacggctgttcggacgtgcgtgctcgcccggcgctggcgccacctttggaggtccaccacaggcctgcgcatcgtaggccttgatgacgatgaggagaatgtcccggtccaagacctccggaaattcgtggaacatctgctgatgctgcgcgagcgcaccgacctagaaagtgttgagatgaaattctacagttgctctgaaggcgaaatgccctatgtgaacctatggatccgttttgctgtgatttgcaaagttcgggtgctcacccttcatatccctgaggatgattacctccccctagacgacctgcctcttgtgtctctgcacctgaaaacattggacctttatggtctaatcctacaaaagagctttcttgattttgctagctgtccagcattggagaatctgaagatgaatgattgcaaaatcaatggttggaagatatcgtccctttccctaaagcatttgagcatcactagttgcttctgtngaccagatcc

SEQ ID NO: 166107 - DNA, 161 bp, Zea mays
  Clone ID: MRT4577_83072C.1
tttctttagaagaaggctaccgcagcccttacgatgttctcagaaaagagtggacgagctcacctctctaccctttccccctcgaacccgtcaacaacactctgtgaacataccatgtgttgacggccgtggccgcttctttctttcaacaatacatttct

SEQ ID NO: 166108 - DNA, 374 bp, Zea mays
  Clone ID: MRT4577_83073C.1
aaaaaggacaatggggggaaggcttttatttattttgaaataacaattactgacctaagcctccattcagggacaaaggaagctgctcaggggaggggagtcaaaaagctccccaattaaaacattcctccttatttggaaaagcaattcaaattggaaaacaggggacatggcccggtttttaaaaaattggcaattaaaaaaaaatgggagtattgcaacgtttttgtattaaccttccacaagacatgcatttaatggggaactaaacctatataaacaggaggggaattggaaaatatactaaacttgggatttgctgcaagccccaaccaaccattgggagggtttttgcaaaaaataaaattcccttt

SEQ ID NO: 166109 - DNA, 575 bp, Zea mays
  Clone ID: MRT4577_83074C.1
tttttttttttttttttttttttttttttttttttttttttttttttttttttttttttttttttttttttttttttttttttttttttagggaatgaaatttttttaataaaacttaaaaaacatttttaaggggaaaaaaattgtcgttataggacctaaaaaaaaaagtttaaaggattaccctcgggaaccatgggggcaccaagggcacaacacccaattgttcccccaaaacttaaacacccccaataaaaccccaacgcctggggggggggaaaaaccccacccgggccaaaaaaccctcgaaaccccaaaccttttacccccccttaaggggctaattttctgaaaaaaaaccacacccttaaccggaccaaaaatttgttaattaacccaaacatttcccccgttttggccttaacggggggtttgaaaacacccaaaatttatcaacccctcccccaaaccccgggaaaaggggccccccccccttttaaaacccccaaaaaaaccacgaaaaaaggggttcaaaaaaaaaaaaacccgtcaaaaaaaaaaaaagccccgagatc

SEQ ID NO: 166110 - DNA, 178 bp, Zea mays
  Clone ID: MRT4577_83075C.1
gattccgagaagagcagtattacttcaaattcatgtgctggagatgattatagagacatagggtggggagacgagtcgggcagctgtaactgcgaggataaaaccgtctcagaagcattagagtctggtgcaaatgaaagacccttggagaaaaccatggttcctaatgaaagaaagc

SEQ ID NO: 166111 - DNA, 500 bp, Zea mays
  unsure (1)..(500): unsure at all n locations
  Clone ID: MRT4577_83076C.1
aaccattgttgctccatccaattcagcaacctcaaacaccatggagtccattgcgccaatgtggtctcagaaacgacctaatgcttgcaagagccaagaacgtcgtgtcgtgcttgggctgtagcctcggcccatagtgctggtccggcccgacacgattatatttttatttacaaaaaacgtatatacatatatataatttatattaaatattaaaaacatttgaacatgatgttctaccggttacacaggtttacccagtgtctctcgcccttcttcatcagggcatgggttcaaactccacctcctacaccgttttttaacattttacgctgatttaatcaaatgggccgacgggctggcccgatacagttagcaggccggcatgacgtgcctgggccagagttgtggctcgcggatgtctggcccgtgccgggccgccgtttgaccatctataagagcagtaaaaaaaaaaaaaaaaaaaaaaaaanaaaaannag

SEQ ID NO: 166112 - DNA, 1468 bp, Zea mays
  Clone ID: MRT4577_83077C.1
ttcccccctcggaggccgccatgcccgccgacctcctggccgcggccgactgcggtggcatccacgggcatgctctcttcttcgacgccctcgtgcagctcatcccgccgcgcttttatctcccatccggcgacgaggaccgcccgtggcaccagggcctgtccaaggcggcaaaggcggccttgaaggccaagtcccgcgccaacaccaaggccgcccgccgcgcccgcctcaatccctccacgccgcccgcctccaccctcgacctcctgaagaagtccgtcgccggccaggcagcggaggaagaggaggagaagtcagaagaagagagcggggcatctggggatgaggaaagctccgaggatgatattgatgaggaagccggggatcaagaggatgaaatgccgattgcacccgctgcagtggtgtctgaggatcgttccgtgacctatgaggagctgcgagaacgccttcaacgccgcattactgtgcttcgaggcaaccggtgcaccaggcctgagttcttgaataagcccaggaaggagaagggtaagaagtcaaaggcgaagaatgaaaagaagggcaaaggtgagggcatgaagcgtaagcgtgatgatggcaccgaagatgtggatgtcaaggatgggaagaaggtaaagaaggaagctgaggagaagccagatatcatgtacgcaaatgtgtttgttgacccaaaggaagcaaggcgcaggaagaagaggagggttaagaacaagaagaaggcactggagcaggctaaacggttgcaggaggcaaagaaggatcctgagaaggcaagcaaaattgcttgggatgtggccagaagacgtgctgctggtgagaaggtccatgatgaccccaagctgattaaggagagcttgaagaaggaggaaaagcggcagcagaagcatgctgcgcagtggaaggagaggcagaaaactgtagataagcagaggaaggacaagcagaagaaaaggacagagaacatccgggatcgggcacagcagaagaagatgcgcaagattgagaagcgtgagaaaaaacttatgcgccctgggtttgaggggcggaaggatggttatgtcaacgagtaacatctgtgtccaagtttgtctggatgatgaattactatgtcctcgtttagagtttcatttgcccctatgggtagttggtgcttgtaataggttaccagatcatggctgctgaagtgccttaattattgaatgaaccgaacttttgttatatagaaattcaaaagatgattttggagttgctatagtatatggttgtgtttagttttaccaattcatgccttttgctagttctttctaagttctgacgtaagagttcatgaactggaaacgctgaattgtgctgaggtggatgcctgttttgacacgatggataatagtgtttctgagataatgtttgggtatataggtatatagtg

SEQ ID NO: 166113 - DNA, 377 bp, Zea mays
  Clone ID: MRT4577_83078C.1
acgaccactcgtacggctagcgcctgctgcgatttgtctgtgatcatgtcttgcagcgggaacgggcgcaactgaagatgcagctgttactgatgcagctcatacaactgcatgtgacatgtcatatagacctgcctttgatgattatctgacgcacgatgctagctactctggcaaagaatgacagtgaaaggagtacctatacgtgctcatacagcagcctcatggtcttaatgatcctgaccacagtgcacaaattgaagatggagttcagctacaccaacatcatcaaagatctcaagatagatgactgctgcaatgggacattagttcatgacccagaacttggtacaggtcattcagatacatagtgatca

SEQ ID NO: 166114 - DNA, 328 bp, Zea mays
  Clone ID: MRT4577_83079C.1
aaaatggtcttcgtgggtgctccttgttctaatgcaggtctcttgcatgaactgcgactcatcttcacagaatggatgatgcgctaaggacgggcgtccaatagtagccgcgtccgccaagatcatcttcagtgccgttatcattctaatgacttgcagctcagaagctagatctacaaggatgagcatagtcagattactgctggtgctctcaaagccaaggaagaaactgacggtgtccctgcagtggcagtacatcaatagtctcactgtctagtttttgtgttatcgttttcagtgaactcatatttggttcagttatgattgc

SEQ ID NO: 166115 - DNA, 150 bp, Zea mays
  unsure (1)..(150): unsure at all n locations
  Clone ID: MRT4577_8307C.1
agattggcccgggccctgctgatggggccgcctagctcgcgctcctgatctcctacccacaaggtgggattcgatctctcggcgcgccatccaacccatcggttggccttgcctcatacttctgttggaatttgcgtggtggntcctccg

SEQ ID NO: 166116 - DNA, 157 bp, Zea mays
  Clone ID: MRT4577_83080C.1
cttaacgcagcactaacgcgagcagcaccaattaacgcattcatgatgagatcctcgtgtcaataaaaaagaagtgggtaaggatacattcacccaagaatttattacttccaacttctaagctctattgcattgaaccgtgttccttgggcgatag

SEQ ID NO: 166117 - DNA, 239 bp, Zea mays
  Clone ID: MRT4577_83081C.1
cccacgcgtccgcaatacttcgcttttgaaatcatgctacgcttgcagaagggtcagcgtctggatcctcgtactgtttactgaaaacctaaaagatgcacgcaatgccgaacacgatctttccatatgcatgtccattcacgggtctcagatgattattgaaacgccagatttataagtcaccctagagcgcgcatgcatctagttaggagaccgcaaaggacagggcaccattttat

SEQ ID NO: 166118 - DNA, 734 bp, Zea mays
  Clone ID: MRT4577_83082C.1
cggccgctcgagccggcgggcgggattctccctattcgtggccacgacatccccatccacaggcggcggcccggcaatctgctctgcgccgcccctcactcctcctggcgacgccggggccatccaccgcgtgcgctctcctcttcctccccatggccgccttgctccccatcacctacgcccactctggcagcccccaaccctagttctctcacaccccgtagggagaggaggagtgaggcttctgggcgaggaggtgctgctgggcgaggaggcacttgatttgcgttcgccggcgctggatccgcgtgcgccggcgcttgatctgctccgttgtggctccggcgaccttaccctgtggctccgggacaggaaggctaccccgccgacatacaggagacttcaacacgccaatggatgcagccagcctccaactcaccacgcacctgcaccaacttgatgcagggagaggaggagtgaggcttctctcacgggatgacgcccagccatggggcagcagcaacccaaggaggggccaaggaagtgctttcgattgtttcaagactgagcttgataaaacggcataatccactattcctgagatcaaaccatgcaaccttgcaaatattgtactacagcccaaagctattgggactggtgacatcataggtttccatgttatgaagaaaccatcaaggttgacaaaggaacagggcggaggcgtcttctagcct

SEQ ID NO: 166119 - DNA, 378 bp, Zea mays
  Clone ID: MRT4577_83083C.1
cgaaagaagtgtatgacacactcactcgctattctgcatacgctgccttctacgatcggggacaccgtacaccatattgcttgctctcaaagaggaacagttgaaaaactcacacgccttttacatctcatcaccacgtcgatcgtcaaggaccttaactcggcgtcgaaacacacgaaaggcacacacgatcaactcgatgaaatgttcatggtcagctaaatttgtattgaaccagtatattgcgcctgtcatgttccttcgcacatactggatccacgagcatctctctacttttactaacgacctaaccgactacttgatcagacttcaatacgctctgatcagattgaatgtcgttttcataagtcatatgtg

SEQ ID NO: 166120 - DNA, 297 bp, Zea mays
  Clone ID: MRT4577_83084C.1
attcggctcgaggcatccacacagtttttttcccttgccgggccagaaacgtcgccctacaaaccatggggcatatcggcatagggcatgctaggagggatggcggcatgactgaccctggcacttcaccctgccatccggatggacgaccacgcactcgtctgcaaagtggatgccgagaacatgccactgcggggctaggtgtggtctggccatgaccgtcgactttctgagcatacccttgcgcctgaaccaccgactgacctatgatccccagggcctggacgggctggtatt

SEQ ID NO: 166121 - DNA, 679 bp, Zea mays
  Clone ID: MRT4577_83085C.1
ttttttttttttttttggcagggagaagtgtaaattgtaacggctacgaaaaacaagcctgaccatctatttcaaagctaccaaattggaaaactcgaatgatgaactggtcttatttttggcgattttctcccgacccctgacgagtccagaatctttacttcgtacaactcccaaatcgcattcgttccgtaggcttcgcccacatgcgcagacttgctatcttagctgtgactatcattgaactcatcctcggcttttcagattatcggaattgcttcgttatctgatccatgttcagcaagagtcttgccgggatggtctggctcgagcctgttcagtgaaagcaagctcgtctgatgtagtatcgtcagccagatagtgaactcatgcgccgccctcacgcttggcatattcgtcttctatggcctccttgtatttttcttcaggagatcgaggatcctcctgtaggacaccctccttgatgagagcctccgggttaggacggtgggagatcttgtcgttgagctggtcttccagcatgtgtcgcttgagctccttctgatgagcttgcaggccaggggccgcggtcgattcgggcaagatgttcttctctacgagttctgagcgctctgggcgagtctggaggtgtgcctctagcgaattcttgcgggcgacg

SEQ ID NO: 166122 - DNA, 408 bp, Zea mays
  Clone ID: MRT4577_83086C.1
gctctgctccatgctccctggttgcctccgtcctccttgcttgtatccagcgcgagcgcagggtagtcgtccatgtgctcggactgggcaggtagcgacgcacttcgcaatcggaaggctcgacggccgggagcggggcaaggacctacgccgaagcaggactggcaccaggcctggtgaaacgggtagatgggtcatgaagaagcgcgcccctgcaaaggtgtggggcaggtcttctacctagaaagactggttaagcgatgggcatgccaagagcgcctttggtgccataggcatggtgcacgggagagagctgggagatattggtccttcagggcagagcggaggtattccggatggggacctgtctggacacgggcgggttgatatgttaggggatgaggtttg

SEQ ID NO: 166123 - DNA, 746 bp, Zea mays
  unsure (1)..(746): unsure at all n locations
  Clone ID: MRT4577_83087C.1
aggcggtcctttcgtgtccgtccctccggccaacgcgcgcccccgcccgcgccccaagacgaggggggaagaaaaatctcccgtatccgccgggcacctcgcgtgtcggcaagccacagccatcggcgccggcctaataaagtcggccggccggatatagccacccttcccctgcacgcgcgcgccacgccccctatagctttcttcctcctcgccacctcaagctcaaggtctccgcctcggtccggtgcgcggtggccacaggcgtccctccctcttcagcgacaaccctagccgcgtctcgtctccggctccgggtgggtcgaggtccgcgcgtgctcgcgctgggggcacattgatacttgaagtaatattgaaaatggttagtgcgaggtcagtggacaggcagttggatgcgtgcttcagcaacctcatggtgtctagcggcggtggaagggggcaggctgaaactggtggcgctgtgcctatgttgtcaggatggaaggaccttccaatggagctgcttatgcggatcatatcagttgctggagatgatcgaattgtcgttgtcgcatccggtgtttgcactggctggcgcgacgcgttaggatggggggtcactaatctttccctctcatggtgccagcagaacatgaataacttaacaatatcatttgctcancagttcacaaagcttcaggttctcactcttcgccaaaatcaacctcagcttgaagacagtgcag

SEQ ID NO: 166124 - DNA, 272 bp, Zea mays
  unsure (1)..(272): unsure at all n locations
  Clone ID: MRT4577_83088C.1
ccccccgggccccgcaagagggggaacccccaacgacagaaataaacccagcgaggaaaaacccccgaaaaagggacccctagggggnntggccgctctcccgagccaggcccgcccccgcacaagggagcccgggcccggagcagcggcggggccgtcgtcacaccggatgctcaccggaaatgctcggacctgcggagggcaaacccgcgggcgcgcatcacgcgctttagctcggccggaaaccggccctcgaagaaaccctcaaacga

SEQ ID NO: 166125 - DNA, 288 bp, Zea mays
  Clone ID: MRT4577_83089C.1
atgcgttagaagagagctcgccgcgcaatggagagctcgccaccgacatgtcggactagccaatgagagggtgctgcctgacagtgctgaggagatctcccgaagcctccgcgcgacaacgcgacggttgcggtggcccttggcgtgtccaaaaggctggtgggctcgtaagagttcgcgaaactggaataccacatgggccctgtcctggcgtaagtcattacagcgcaccccatgtggtacgggccctgtccttttgtgcagaagtaaactattcgcgcgttcctc

SEQ ID NO: 166126 - DNA, 356 bp, Zea mays
  Clone ID: MRT4577_8308C.1
tgctccctttttcttttttttttttttttttttttatttgttttttttttcatccccctctttctcgggggtaaaccccccatagatcaaaaattctctcaatacatttaaatccaccccaaccaccctctattccttgagtttccaaatttgaccaaaggtgtgcgtgccccaatccccttttcctcacacccccttttccccgagatcaacaaaaaaaatctgcaaatttaacccaaaaaaaaggagaggcccgggacctacaaaaaatttcccccctttcgagcccacaagaaactcggaggagactgcatcatccaaattttaaccataatcttcgggcacactcgggagga

SEQ ID NO: 166127 - DNA, 331 bp, Zea mays
  Clone ID: MRT4577_83090C.1
ggcggcattgcgggtgaaaaactgcatttcaggcaaaaaaaccccttgaatgggggtggtacctcccgcctacgggggggcccctttccaaaaagaagatttaagagagcagaccgaccgctttggaggggtcctccctttcccgggggtagcttccccctacgggcataatttatgcttcgtttcggcgcctgccctgatcatttcggccttatgaggaccgctatccttggctggaggatcccccttggggttactctctcgacccgggggtggggccttttggtcgggtcccgggccttggggaggggtgtattgcggatcggggagg

SEQ ID NO: 166128 - DNA, 1648 bp, Zea mays
  unsure (1)..(1648): unsure at all n locations
  Clone ID: MRT4577_83091C.1
accaacaagcaacatagaaagtggaatccagtagcaacagatagagcaacaatggcgaccaagatattttccctccttatgctccttgctctttctacatgtgttgctaacgcgacaattttccctcaatgctcacaagctcctatagcttcccttcttcccccataccttccatcaattatagcttcaatatgtgagggggggggtcttcaaccatataggcttcaacaagcaatcgcagcaagcaacatacctttatcgcccttgtngaancaacaatgggcgggccgggggaccacaacacaactcgtaggcagcgagcgtctctcctcttcctctcccacgcaccgcgccaaggaagacagcgagagatcgacgctcctcttctctccgtcggtggtgcggttgaccgccctactcgagcgagatctcgctgcagtccctcgagatctggtcacagatctatccgacaagatgtgaagatcgccggccgggccgggacgaacactgggcttgggctacgtttatctttgtggccccgtgttgcgttctcctgttcaccccgcgtcgtcttcgctctcacgatccctcggcagtcggcgacggctgggcgaccgccacttccgccttctcttcctactgagcgtctccaggcacgcttctgaattcggagttgccagcattcgctcgaggtgccggaccagatctcaccatcatgcaggctagcgatagattcaacataaactctcagcttgagcatcttcaagccaaatatgttggtacagggcatgctgatttgtctagatttgaatgggctgtaaacatccagagagacagctatgcctcttatattgggcactatccaatgctagcatattttgccattgctgagaatgaatcgatcggaagagaacgttacaatttcatgcagggatcggatatatactcaattcttgtcaaagaaccctttgtgtatagaacagaatcaacagatctcttggttagaaaatgctgcttccttgtggcctccctcctgagagagatgaagattgaggagctgttgcatagtttcagtgtttccaatgaccatttatgagattgtaacctctatggtactatgtgccatttgtgttaaagctcgtatgcctttgacttgtcttgcatcggtctctatcgtgatacataaacattcggaacttgtatgcattgtaaacgaaatgctggttatgcccctttgtcatgtttttgtgatgcgttctcacaatgtgaaagaaaatttagtcgaaaaaaaaaaaaaaaaaagagattgatggctgcaatctgttcagccgcaatttctgtggcagtttgttcagctgcaagttctgtggcagtttgttcagctgctcacttagtgccgttctttcataggaaaggctttcaatctcaaaatttaaatttgtatcatacggtagaaaggtcatgtaaattggcaatatctagtgttggttacttgttatcaattgctgcgaatcaagagcacgacaacacatttattataccttaaatactttagttttttgaagcattattcttcttggatgtaatgaatcttaggcgaaagttataaagaacaagttctcatcattcacagatattaaaatattat

SEQ ID NO: 166129 - DNA, 230 bp, Zea mays
  Clone ID: MRT4577_83092C.1
gagcatgagaggaaaaaaaaactttattctaccatgactaagcatgtcatcatcaacaccggttaaccacaaaccggggtttttaaaaaagaagttctgaaccctaatccaattcttatttcaaccaacttttcaggggacttggggaggttcttggtctttggccaagaaccaagaaacgaggttggaatggtggaacataaaactaactggtttttttcttttacaac

SEQ ID NO: 166130 - DNA, 1259 bp, Zea mays
  Clone ID: MRT4577_83093C.1
agttaccgttgacgtggcgctcctcctccgacgattcgctccctccctcgagtttcaccactccctcctctcgcggccacgcactcccccgcctccgcaacctctcaccgccggtccccgccctccgaccctccacgcgcaaacagcccgcctccatccaccaggatccccgatgagctaggagaagtgttgatttggatattcgtggagtgtgcaatggtggactttgttcgacggctcgcctctgccctgctcaagtgctgcgaccttgacatacccaatcggccaaagggcctcgaggaccccgaacgcctggctagagaaactgtttttaatgtgaatgaaatcgaggctctgtatgagctgttcaagaagattagcagtgctgtggttgatgatggcttgattaacaaggtttgtaggttctaagctcttagtgtgaagtggcagtgaatgacaactttgtttccatgaagtcattgtgtctgatctctccttggagctttgatgtattatctgcaggatgaattccaattagccttgtttaagaccaacagaaaggatagcatgtttgctgaccgggtatttgacttgtttgacacgaaacacaatggaattctcgagtttgaggaatttgctcgagccctttctgtgttccatccgagtgcaccaatcgatgacaaaattgattttgctttcaaattgtatgatctcaagcaacaaggtttcattgaaaagcaggaggtcaagcaaatggtggtcgcaacacttgctgaatcaggaatgaatctttcagatgatattattgaaggcattattgataaaacatttgaggaagcagatacaaagcacgacggcaaaattgataaggaggaatggcgcagccttgtcttgaggcatccatctctgttaaaaaatatgaccctcccatatctccgggatatcaccacaacatttccaagctttgtgttcaactctcaagtagaggatgcgtgaggtcccagcgtctacggcaccattgaagcccctggggcacagcagatcaggttctgtgggggcacttagttgtttttgtttccttgaaaatgtaaattttatgtggtggcatgtcctcctgtatagtgagtattgctattgtgcacagaattggggcatgaagcgtttcttgtcgctgtttataaaatattcttcaaacatattgctcataaaaaactactcaaagtaagaatcaaattgagtacaaaactactcaaagtaag

SEQ ID NO: 166131 - DNA, 1560 bp, Zea mays
  Clone ID: MRT4577_83094C.1
acggcaccattgatcccccggggccccggccgggccggttcccccccgaggccagccgttgacgtggcgctcctcctccgacgattcgctccctccctcgagtttcaccactccctcctctcgcggccacgcactcccccgcctccgcaacctctcaccgccggtccccgccctccgaccctccacgcgcaaacagcccgcctccatccactaggaggatccccgatgagctaggagaagtgttgatttggatattcgtggagtgtgcaatggtggactttgttcgacggctcgcctctgccctgctcaagtgctgcgaccttgacatacccaatcggccaaagggcctcgaggaccccgaacgcctggctagagaaactgtttttaatgtgaatgaaatcgaggctctgtatgagctgttcaagaagattagcagtgctgtggttgatgatggcttgattaacaaggaagaattccaattagccttgtttaagaccaacagaaaggatagcatgtttgctgaccgggtatttgacttgtttgacacgaaacacaatggaattctcgagtttgaggaatttgctcgagccctttctgtgttccatccgagtgcaccaatcgatttcaaaattgattttgctttcaaattgtatgatctcaagcaacaaggtttcattgaaaagcaggaggtcaagcaaatggtggtcgcaacacttgctgaatcaggaatgaatctttcagatgatattattgaaggcattattgataagacatttgaggaagcagatacaaagcacgatggcaaaattgataaggaggaatggcgcagccttgtcttgaggcatccatctctgttaaaaaatatgaccctcccatatctccgggatatcaccacaacatttccaagctttgtgttcaactctcaagtagaggatgcgtgaggtcccagcgtctacggcaccattgaagcccctggggcacagcagatcaggttctgtgggggcacttagttgtttttgtttccttgaaaatgtaaattttatgtggtggcatgtcctcctgtatagtgagtattgctattgtgcacagaattggggcatgaagcgtttcttgtctgtgtttataaaatattcttcaaacatattgctcataaaaactactcaaagtaagaatcaaattgagtacaaaactactcaaagtaagaaaaaaactaatcaaagtaagaatcaaattagtcaaaaaaaaactaaaactccgtgggcgggtggtgccccaaaaagcaaaaaaaagaatgggtgagaaaagttgatgaaattaggaatgaaattgatttaggatggcaaaccttgcacttgcttatattcttaagtaaataacttctttcgcgccaatatttgttattgcatttgattcgtctgcatgaaccatgttgcttaaattttttctacatgtgttacacttgcttgtacgtgagtgcaattattcaccctctcaagtcatgtcctaatttagcataacgcattattcagtggaaatctatatctctagttaaattgaact

SEQ ID NO: 166132 - DNA, 353 bp, Zea mays
  Clone ID: MRT4577_83095C.1
ttttttttttttttttttttgaattctggaacgataaacatgtgagatcatctcatataacatgccaaaacttgcctaggtgcacaacgatcaaaaaactttttcagttgttggagaaagacgatagccagttgcaataagatcattgatcatagagatcaaactgaccaacttacatgcaagtactctatctaataggaaattaatgtttttaccagcaacaaaaaaatgcgtccccccctccagtaatccgaacatatggatagatgcatttgcaaagaagcattagccatgaagaaaatcgttgccagttcgttataaacattttgaatgccttggtggcttcctcgtgc

SEQ ID NO: 166133 - DNA, 317 bp, Zea mays
  Clone ID: MRT4577_83096C.1
ggggaccactggggggggccagcaattccattccgtaccaaacaacgggccgggtgatctaaccaaccacccaccggaattttacaagaaccgcccgtgcgttgggcataatcaaatcaaatccagcggtattggggaaggcatttgtggtaaccaaatcaagcacaagccggccggattataatctgggagaataatcattttatttccttcctcaggctggggggacaaaccccaaaaaaagaaaaaagccgtttcgactttcccttgggaacacaggaccaaataattttttaaaaccttaacggcgacgacga

SEQ ID NO: 166134 - DNA, 1248 bp, Zea mays
  Clone ID: MRT4577_83097C.1
cattgggtacctcgagctcggccgggccacccgcccgccatggcgccgcaccctctccactcctcgtcgggcgtgtccgacatggacgagatggcggcgactcacgcccacgcccacgcccacgcccgcgcgcgcccaggtcgtcgtcctcccctccgcgcggccctcctcccctccgcgcgcctccatccccgtctcctcctctgcctacgcgcctccacagaccgctgccaccaagctcccattctccgcagcggtgtccgcacccacctccgcctcgggctccatcactgtcgctatcgcctccagcgggttgggccccgagcccagcacgctcaccgagcccgtctgggacaccgtcaagcgcgacctcgtccgtatcgtgagcaacctcaagctcgttgtcttccccaaccccttccgcgaggaccctggcaaggctctgcgcgactgggacctctggggccccttcttcttcatcgtcttactcggactcatcctctcctggtcggccaccgccaagaagtctcaagtgttcgctgttgccttcgctgtattagctgctggtgctatagttctgacactcaatgttctactgctgggtgggaacataatcttcttccaaagcctcagtcttctcggatactgtctgttcccgctggacgtgggggctctgatttgcatgcttaaggacagtgtcatactaaagatggttgtggtgacggtaacattggcatggagctcttgggcagcataccccctcatgagtgctgctgttaacccaaagagaaaggccctggcgctgtatcccgtgttcctcatgtatatctcagttgcctgtctcataattgctatagattaaggcgggcatggtttctacagaactatcagaagaattacaggattttgttttctaggtggatcatcaaaatgcatatcctttttttttggctgcgtatagatctgggttcacattgttattgtagtttttgctggctgcttcaataccttatttcattttgtttaagaaaaaaaaaatcgcagggatttagaatgtagtcaatcaaatgtatgaatgttgtatagccatacagatatcttgctgtttcgcatctatgtggataatctggaatggactgctgaagcctgaataagtgaattactctgttttaccatttcgtttgggtgtgtggactgtagaacagttagttttctcggttctcgttttaagcgaagttgttgagattg

SEQ ID NO: 166135 - DNA, 419 bp, Zea mays
  Clone ID: MRT4577_83098C.1
caattcccagattcgacgcacacgtcactcctaatccaccatacctatgtctaactgctttccaatcaacacatccaggcttgccaacagtacacgtttacctatcaagctgagccaattacactaacccttactactttaactccctaactttcctctccccacacaagctaacaaaatcacctattgctatcttgcattctaacttataaacattcattcataatcctacacacatataacttcacaccactcacttttcaaccaatctctatgaccaattctgtcaatcaacaattcctctcatactaggttcaattactatcgcatacacattcatcaatatcctaaaactaacctttctcactactgtctaaacccatctcacattccctattgatcactgaacaatccaacac

SEQ ID NO: 166136 - DNA, 229 bp, Zea mays
  Clone ID: MRT4577_83099C.1
atgctgactttgctaatgggatagtttatataaaaacttgaccatttggatctttaaagaggaaataacccacacaaactaatttagtcctgcatatttgtttggtattttatcttctctataaataacttatgtcaggatgacttcgatgtagaccagttgtctgcgtcctgcgggcagcactaacctttgttttccgataatcttcagagctgtctaagcaattcca

SEQ ID NO: 166137 - DNA, 409 bp, Zea mays
  Clone ID: MRT4577_8309C.1
atgagagtgtgtgagagagcgcacaattgtctgataatgggcataaggttcctccacctagccctgccactttttattggaggcatgggcgatgaaatccaacagagtgggtggatcagtatgaaaatagcgatgtctgtcgtcgctgcaaattccttttttttttttgggaggggagggggcgagaacaaaaaaaaggttggattcggttgtgcaaagcgctaacctagcactctggatgttttctttacgggaggcccactttacaccgtccattcgtctcgcaggttcgttgtgagaccagattcatggggcagcgaccatccgggccagccgaggcacgacgacgccggggcgtcgctgcccggtgtgccgcggtggccgcggacggtgttcctggtgggggcca

SEQ ID NO: 166138 - DNA, 828 bp, Zea mays
  Clone ID: MRT4577_830C.1
taggggccttttttttttttttttttcgggatctcccacataacaggtatattacagtaatcacatttgatacacacatattggagatagagcggaagacttttacaaagtacactttacataccagaactcaagttttacaaggtagaaagagatgtatttattacaagtcctgatagtacccaaagtgcataacttattacaataattggaagggtgaagcctttccataagagatacacataaacattctaagcttcaaggcctccacatgaagtaactaaccaaaagataagggaataaaacttctcctttgttgcagagaagaggttctagatacttctaacacgatgattagttagatggctccatccacttgatgaacaggcactggagtagactcctcttcagcaaccacttcatcttaaatcttcactctttattttgggagctccagccagcccaactccaggcaaaactggcccactcagatagcgcttacagccctaggctccagcaccacgcgcgcccgcgcttcctctgcgcgtgccggcggcgcccaactctgacggtgttaagccggaacgacgacgcagtagagttcccaaccacggtggagcaggcactagcgactcaccatagagcagaccaaccctagatcacgcacgcaaccggccccaaacaaggtctgccatgtcgagatcattcccagcggcgttcaccggcggcaccgcggcgttcccaatgagacactgatggccggggagagtaaacaccgacgtgaacatgaaccacaacactcacacgatgcactctcgctagaactca

SEQ ID NO: 166139 - DNA, 824 bp, Zea mays
  Clone ID: MRT4577_83100C.1
ccaaactacggctagctgagctctgttccaggaactgctctagaccccggatctcccaggctagtgcacctgagcatctcatcgctgtagagtctcacatgtagggcgactgatggcgctagaactcccacggtcatgtgcgaggaaactaaagccaaggatgacgccaagtcggagagtgaagtttccaaggagatgttctctcgtcaaaactccggagaggccacgtccaaactacgtatacacgaagaagtctcaccggagaactgctctgctcttcagagctccaaggaggctgcacctgacgcatgtggggttgaagactccgtggacgtggagaagggcaagggctctcaccaagactccaaagacgatgtacctgtcagtgagagatgtgaacagtggctccatgtgctgaacaagaacgatgctgagagcatgagtgagaaacataagttggttgagcagatcaggatcctgttgaagaacgacgacgaacttcggaactatgcaggtgctaatggtattactgagccactaatccattttctgaagatggctatccacagaggaggtgtgcaatctcaggaggttgctacaatggctctgttcaatcttgctgtcaacaatgacgggtaactacccaatgctgtttcgtttgcataaatatccccgtgtagcagtaccactatggcggatctgtcagctggagtcattccgctgatggaacagatgatacagaaacatgaaacctgcgaggctgccattcgaatgtacctgaacctcttctgcatccccgaggacaggcgatcattggctcgagc

SEQ ID NO: 166140 - DNA, 381 bp, Zea mays
  Clone ID: MRT4577_83101C.1
ggacgcagcagccgccgccgccgctcacccacgacgacaaccgcagcttccttcggatgctgcgtgacatgaaagagaagtgattagttgtgtaattgtgttgaacatatcgagtagtatcatgcatatgcatgcatgcatgcatcaatctgttgttatatactgcactcaacggtagcgagcagcaaagtcctgacgcatgtcggtgtatatgtcatgcatgcatggtatgtgtggtatgatggactggcatggtggagagcaggctgggcgtggacgcgcccaaggtggaggtgcgcttcgagaggcttaccgtggaggcggacgttcgcgtcggccgtcgcgccgtcccgacgctgctcaacgccgtcatcaacgccg

SEQ ID NO: 166141 - DNA, 341 bp, Zea mays
  Clone ID: MRT4577_83102C.1
atgcgttcggtgttgcttaggacttaacctacaataaagcctgacgggggtaacgaggcacccatcgatccgcagtccatgctgagctgatgcatggggctgctggagccgaggatgaacacagctctaacaactgacacagagcgacccggggggagagcacatatgggccacaacaaacacgagacgaacggagataaacactcatggactagggtaaacaacacgggcacgaacaggataacttggcctcgcgggccccaccgacgaaggacgccaggccccgcgcgagtgggcgtatccaccgccacgggtgccaccgccggagcagcacgcgacca

SEQ ID NO: 166142 - DNA, 161 bp, Zea mays
  Clone ID: MRT4577_83103C.1
ctcagagcagatgcaggagtatgaaccacagctcagcagtgcgtcacaacaggtcgaagctcttgtcaaggctcaactacggatggctaatacgattggaccgcataggttagcattcgataggcttactcagattgataccgcagaagcaatgtatgact

SEQ ID NO: 166143 - DNA, 535 bp, Zea mays
  Clone ID: MRT4577_83104C.1
ggccgcttttttttttttttttttggatgcagtgtacacggcgagaggcgcataatttgaatgacataagcgcatcttacaaacacccaatagtacagaactaaagaaactggcgagatgaatgaagcttaaataaacacacagaaagaagggcaagggaacctgggcataaaattatgatattaaaatagctacgcacatccgaccatccatagaaacgtagcaaagtgtgactctcacaacaaagaaccgaagacggactggagtgcaccaaatctacatccgactaccttgacgccttgaggacccatgggcgcagggcctggaaaaccttgcgacccggatggatggtgacatgacccgcacttattgggcttccgctgttacgcaactgcatcggcgacgtgaccactgggcccgaatagctctagggcttggaccaagttaccttcagagtaaacttgaaggtgttggacaaggcctgaagctttgctgacagcaacctggacgacaccaccttgagtactctgacctc

SEQ ID NO: 166144 - DNA, 356 bp, Zea mays
  unsure (1)..(356): unsure at all n locations
  Clone ID: MRT4577_83105C.1
aaaaagggttagatcgatnnnnannaaaangatcctganggagttgatatgacctgcatataggacccgaccagacttctggatcgctaagtgctgttggtgaggacatgttccattggcaagtgatcatcatggtgccttcggacaagacatttgcaggaggcgtattcttggtgaacatgcacttactagcggattaccctatcaagccatcaaatgtgtgttttcgcaccaaggatgtccacatgaacatcttcatggacggcttgctttgacttgacatatcttaatgaacagtggagtgctgctataactatgtgaaaggttcttctgtcaatctgctcactgctcacgga

SEQ ID NO: 166145 - DNA, 157 bp, Zea mays
  unsure (1)..(157): unsure at all n locations
  Clone ID: MRT4577_83106C.1
tnagnaagtcgtncgcacgcgtacgtaaagctcggatattcggctcgnggatnccctattannatagntaccnntggngcaggnagtgngngantancancnaggnnacaannagnataannangtnctgntatcnaatgtagantanagtcnctnc

SEQ ID NO: 166146 - DNA, 2035 bp, Zea mays
  Clone ID: MRT4577_83107C.1
ccggccgggaactcttgacgcaggtggactctagtcacgcctgacgccaagcgactcgtctcggcctcggcgtgccgcctgcgtgcccggtgcccgtgcggccgtgacgaacgacactgacgagcaaagcaaagccaacggagccgagcgagacgacgagaccgcgattgctagctagctagttcgggcagcgagcggggtgagacggctatggcgtgctgctccgccgtcctgcaccatccgctgggcttctcactcaccccgtgctccgcctcccgagccccaccgcgcatccagcgcgtgggcgtggcaactccctcggtcgcctccgtccgccctctttcccgcgccaggatctcaccgcgctgcacctactccggtggcgccagcgctgcccctggtcctggggagctacccgcggcggcgctccgacgggtccttgagatgccgggtgcgcaccaggcgcccgcctgctacgacgcgctgagcgcacgcctcgtcgagcgcgccgagttcagggcctgcttcacgagcggtttctcaatctctgccgcacggcttggattaccagatgttggtctcatctcgtacggggaaatgattgatcaggggcgtctgatcactgaagcagtttcaatccctgtgatcggtgatgcggataatggttacggaaactgtatgaatgttaagaggacagtgaaaggatttattaatgctggttttgctggaattattcttgaagatcagtctagacaaatgcatgtggacatacagctgggttcttagaagtcttgacaagaataagcaattatgcgcataaaagctgctgttgatgcaggcttcggaatgcttctgttgatacagacaacccccagaatggtcaaatactgcttgattttgaggacgccatgggagataggatccaggtgtctgttgcatgagctgatggtgtatttgctagaatgctcgtgcacagcaaactctggatgcatggacgtttcaagtagcatcagggtacatgcatcttgctattggcgcaaccctatctagtagttgaattagataatttggacatcgattatatcttggcgaactagtatttacaaatgacagacttgttcctattcatcgaggctgggtatggaggatgctcttattgctataaggggtggtcgcatacctcctccaagcagcttgccaacatttgaggagatcaagaatactcttggcttcaaccactattacgaagaagacaaacgatatgcggtgacaccagcccaatcattgtacgggactggctatgataattatacaagtgaaccgaacagtccgggagattccaggtccagggctgaaaaaacacaagaacctgttattgacatattgcctcagctctatgatattggttccagtgacagcagaggaccttcaactggaatgtggtctcgaactcttcgactaaagattacaggaagagatgggatccagaaaattgatgccaggatacctgctgggttcttagaagggatgacaagaattattccaggcttggctggagctaatattatggaaaggcttcggaatgctcctgttgatacagacaacccccagaatggtcaaatactgcttgattttgaggacgccatgggagataggatccaggtgtttattgcatgagctgatggtgtatttgctagaatgctcgtgcacagcaaactctggatgcatggtcgtttcaagtagcatcagggtacatgcatcttgctattggcgcaaccctatctagtagttgaattagataatttggacatcgattatatcttggcgaactagtatttacaaatgacagacttgttcctattcatcgaggctgggtgtacatcgttgggattccattaaaacacagctggggactgcgggataagtttttctccgtagcgttgtttctgtgttgaaaaaaaaccctgaagttgcatgcaaataaagaagtaaactcttgttgagttaaaacaaaaaaaaaaaaaaaaaagcggcc

SEQ ID NO: 166147 - DNA, 1023 bp, Zea mays
  Clone ID: MRT4577_83108C.1
cccggtcgacccagcgtccgccaacgcggccccgcacgacgcggtgaggaggtcccggccacggtgcaggcgtgctcccttgcggcgcgggcaaggccccccgacgacgcgaggcacgaatccggctacccaacccccgatggcgcgaggcgtggccctgggcggcggcacggggcacgcggcttggcgctgccccggcggctggcggccccttgtctccggcagccccacgcagggcgcgacctccatgttcgcgggcgcggcgcgggcagcccgacgcgcagccccctcggcggcggcacggcctctagggcgcggctccacgggagcgcggtcccggcagcccctcggcgtgctgccttgccccggcggcctcggcctaggcggcgcgggggcggctccctgcggtccggggcgcggtggcccagccacagcagcgcgggtcacggctcgcagcgcggcctccccagctgctcgagcgcgcggcgcccccggctgcgcgtgctgtccggcgcgggcacgtcccccggcggcctggactcggccctctacggcgcgcgggcgtggccggtcaggggcgtggcccccacggcgcgcacggcagccctcgcatggccctccacggctcgcggggtggcgcgcggcggcccccggccctggcagcagcgtggacgcggcggccacacacggcgcgggcgcgagtgcccggtccggcggagtcccgcgatcctggccgcatgctggtcgggtgccgcggacaccatcgacgactgtacagcgacacggctgccagtgctgacttccaactgcccggcgccatcccgccgagtctgtcgttgaccgtggaagaagaagaaaaaaaatcctccgtggtggtagacagaacgtacaattttagtgcaggagcagcgcgtgagaggatctccaattccctggcctcgtcttgctgttcgccgatgtcttgctgttcgccgatgaaaaaaccgacgatggtgtcgaaagcatttaccgatactgtttgct

SEQ ID NO: 166148 - DNA, 205 bp, Zea mays
  unsure (1)..(205): unsure at all n locations
  Clone ID: MRT4577_83109C.1
tcgagccggccgggacactcttctcttctaccggccggacggagtcaggcagccgaagcaagaaaancaagcggctttggaagttgggatccatggcgtccacctcgtgcttcctccaccagtccaccgcccgcgtgaccgcgacagagacgagcatctccaattcgcccgtgcaaagccgcaaatgcgtcgcgctgcctttccc

SEQ ID NO: 166149 - DNA, 1463 bp, Zea mays
  Clone ID: MRT4577_8310C.1
agccggccgggacccacgcgattctttctgcagcctagtccgactaccgactaagaccgactcagctccggcgaccctcaaaccgcaccagccatggacgggccgcgttggacggaagaggtggacgacctggtcgacgccggcgacgtcgacggcgccatcgccctccttgagtccgtcgtctccgatttgtcaacctccgctgctccccctgccactgaccttcgcctcgccacggcgctcggcgacctcgcgggcctgcacgcctcccggggagacaccctccgagccgacgagctccgcgcccgcgccatcgcccttcggtcccgcgccacggtccctgggactgggaccctaggggatcaggagctgtcagagaaatgtccatcacaagagtgtgcaacgggttcaaaagactcagaagtctcagctaatactaataaaagcaatgaagatgaggaggatgattgggaggctattgcagatagtggtgcccttgatgacacactagtgcgctctcttgagcaaggagctagagtatcttcttgcagctcccccgaaaaaagtagcaccccatcttcagggcccaaaaggagggggaggggctcatttctttacaataagagtgttttgtacagtgaccagtgtggttcggaaagagagttggataacaaacagtctaaacctcaggttggatcaaaggatcatgtgaatgagccagagaataatgctgttacagctgctacacagtttgggacaaggcatgtccttgttttttatgactttccgccaactacacgcacaacagatctgggaagggattttgagaaagttggggatcacggggttgccattcgctggattaatgatacttctgcacttgctgtttttcggactccatcagctgctaatgaggctcaagcttgcatacctccaagatacaaagtacggtcactgaagccggatgatgatctattgacaaaaatagatggtagagacctagatccgcccaagccaagaccaaagacatctgcaagaacggctcaaaggctaattgctcatgggatgggattgaaacagttcacaaactttgggtctgatgagttgaagaaacaggagggagagaggaaggacagaattgccgctagacaagcaatgcgtgatgaggcttggggttcagattgatggagaacatactatgattgctggtcgcccacatcatgtctgcgagtttgttacattggtgttttagatgcttgtactctttgcatggtcaaatgttgattttgatacagagaaatctgacgcgatgtgtatcgtagtggcgacgtgtacgccaagcatgttgtacgggcagcaagggattaggatgagatttttctgaactgaaaagcaaagcacgcgcagcactaaattgcgaaaaaaaaaaaaaaaaaaaaaaaaaaaaaaaactcgaggaaggg

SEQ ID NO: 166150 - DNA, 557 bp, Zea mays
  Clone ID: MRT4577_83110C.1
aaacccaccggaccttttttaggggtggggttaaaaaacttttaagggcccaatttccataaaaaattttacgggggaaaattttaagcagagttaaaaaaccgccggcctagggggcttcctttttacttccggaaatccccccccccccttaaatttcccccccctttttttttttcaaaaagctcttaaataacccaaacctctttggaaaattaaaaacttggttgaaatgttgttgaaaacccaacccaggcttttataaaatccctcccccgttgaaccaaaagggttttaaattccccaatacccctggcaaatgaaatcccccccaactttttaagggttctcaggggctttaaaagatttggaaaaattttgttttttaaaaaacacaagcaacacaggttccggtaccttttcctttttaaaatttgggggaagctaatcctttgtttaaaaaacagggcccttttttttgttgtccacaaaaaaaaaaaaaccctgggtgttttgaaagaaatgcccccaaaggggcctttttttgtttgggcccc

SEQ ID NO: 166151 - DNA, 1551 bp, Zea mays
  Clone ID: MRT4577_83111C.1
ttgctcgagccggccgggggcttcccttccttccctggaacggcaacgagacgtgggagctgggacgggcaagtagtagaaaccttctctccttccccagccaggacgccatacagaatccgacgcgatccagaagaagccaaggcctcttcagatcctcccgcctccctctgcgaggttcccagaccgagccatcgccggcgctaggctcggggatcttgtcgggtcccgtcccgtcctaccacttcgccggcgctgcgtcgccgtcactcgtcagtcaggactcaggatccccaagatggcttcttcaaacggtgaggctgagcaacaatggatagagaatatcaagtcaggaggaacagttccctgtctagcacctgaaaactgtcctaatggctgggctactcctcccggtgattcatttatggtcagaggcccagaatatcttacaaacaaggtaaaaataccaggtggagagtatcttctgaagcctctcggctttgattggatcaaaggaccagcaaaaatctgtgagatcctgaaagacagtaaccatcgagttagaaaagctatcgatgatgaggtttcacgtagtaaccagccttttgtctgggcattcaacttgcaactgcccaaggataacttcagcgcaatattctactttgtgtcgctggaggctatacctgaaggctcccttatggaccagttcttgaaaggagatgatgccttccgaaactccaggcttaagttaatagcgaacattgtcaaggggccctggattgtccggacggctgttggtgaacaggccatctgtatactggggagagccctctcatgcaagtatgttcaaggatcaaacttcatcgaagtcgatgtggatatcgggtcttctatagttgcaaatgcgatcgttcatttggcatttggctatatcacaacgctaactgtagatttggcctttctcattgagagtcaaaccgagccggagctccctgagagacttattggagcagtaaggttttctgagttaaatccaggatcagctggtttgtttgaaaggcggtctgaagagcatcaggaaagcactcagtctcggcctgtaggattttggcagggtttctctcaactgttgaacaaccaaggcaatacaagggagccatcccctaatttacagaatactaatggaactttgcgcaaagaagaagcaaatgaggatgccaaatgattcagacccctaccattgtttcggggacaatttatcagtagatcacggcgttacaatttaccagatagtcccagggctttgtttctttgccctcacatctgctgtaaaaattataactttggccacagacaaactgcataactttgtacataaactgaatgcttcctaaatatttgttcccttatatagttatatgtgaattgtatgaagctcaaggaaagatgtttcattccacagaatgtgatagttgaaagcatctgcatttcaaaaagataaaaaagtttaggatatcttattccagtaaagacggagaggaatgcatctgg

SEQ ID NO: 166152 - DNA, 396 bp, Zea mays
  Clone ID: MRT4577_83112C.1
gccactccttcacgcgatctgttatggtatgtggtaagatgagcaccaaggtagggggggaacaaatgcttaacctgctgatcaacatctattactacttctcttactacttcctcaacagcatgaagtccagcgtgtgtgacattgcaccaatcgttctgacaatgtccttcacattcgtcggcaactcaacctgcatctaagacatgatccaccacatgatccagcacttcacggacatgttcacgagcatggctatgttgcactgttacacacactagggcatagatgagatgatggttaccatggcatagagtgacatgaacaacctcgtgaacgaccatcagcactaccatgacgccactgacgacgatgatgactacgatgaggaggacg

SEQ ID NO: 166153 - DNA, 367 bp, Zea mays
  unsure (1)..(367): unsure at all n locations
  Clone ID: MRT4577_83113C.1
cccaaccaaaaaacacaagaatttcggggggcctttagtcccgtaacccaaacaaaaacaaagtttccaaaattcacaagtcgagcccatgggaagtaattggaccggcctacggaaatcggggaaaccaaggagtgggaccctgggaaaagcctcggcttctcccctcttttttgggggggggaaggaataanaaggggccttcttgaaattaaggggaccgagcacgggggtcaaaaacggggatcgggttccccagcattttttcgggaaacccagccccgggataaaacaaacagggctctgggcatttcgaccgacccggattttaggggtaatttagtaggggcccaacccaaacgggacc

SEQ ID NO: 166154 - DNA, 288 bp, Zea mays
  unsure (1)..(288): unsure at all n locations
  Clone ID: MRT4577_83114C.1
ttaatanttcacacaagtcgcacattattttattatgggatctttgttaattcattcaactacaaggtcgcacgcatatagattacttgtgaatggaaatttccgagcacttgactgagtccgtgagttatgaaaatgaacttacgattggctacagaatttctatcactgtcgatgaacgcatgcatgctcagaataactaataaggcatttgggtaaatacgacgatctgctaagaatatggttagatctgtgattcttcagaactcataataaagggtaacagaa

SEQ ID NO: 166155 - DNA, 452 bp, Zea mays
  Clone ID: MRT4577_83115C.1
ctcgaggcggccgggccgggagatcaacgatagtcacatgcctatctatactacgcgagagagagagaggaaagctagctatctagcatggagtgcggcagcaagaacgcatcaggcgagcgagctaggagctgtagcttactccagctgaagttaggtccgacgacggcgacggcccgcctcctgtaggcggagacctccaccggggttggcctggacatcatcgcgagggaggttgcgcatccggtgagaggcatcctctgtggtgaaaccggtgacttcctaccaggctatgcggcagccatggggtgacaatgcattggaccaatccgcaagatgcgatatcgggagtagcggtagttggaaatggtgcagcaagaaacgcaaggacgaaacgatgctgtcacactgattgcaagtgaaggtggatgcaacaggtctagcacgaactg

SEQ ID NO: 166156 - DNA, 1417 bp, Zea mays
  Clone ID: MRT4577_83116C.1
ctagctcccttccacaaccgaactctagccgccacaacccaaccctagccgccgcacccatggatcgaactgctcctgtcgtcgccgtggcagcagctgttgatgttgctcgtgctgcggctattgcagctgctgaggctagatgtgcggcattggtggttgagaaggaggcacgagcggcggtggaatctgctagtaatgccgctgataaggttcaacttgccgtccaagctatgaagtatcgaagctttgttgaggataactccaaggatcatgttgatttgaagtatcatgttagcatcaagaactcactgcgatatgccattcaagagatgaggaggcaaacttcactgttacataacatgaataggatgtgttgtagtatcccagaagttgaagggggtaaggttgggaagcttgctgcccatttgaaggatgtttgcaagaacctcgagaagacttgcttcgattgtgaagaagatctggagaataaatctcctagataaaaccttcatcatctcccttcagatgttgaagagaccaccctgacctttctgataagctattgatgctgctcgtgctgcggctgttgcaactgcggaggccagatgtgcggcgttggttgctgagaaggaggcacgtgcggctgttgaatctgccactattgcggccgataaggttcaacttgccgtctctgctgtgaagtatcgaagatttgttgaagatgactccatggtggaatcacaggaacatgttgatttgaagtatcatgttagcatcaagaactcactccgatatgccattcaagagatgaggaggcaatcttcacttctacataacattaataggttgtgttgtagcatcccagaagttgaagggggtaaggttggaaagcttgctagccatttgaaggaagtgtgcaagagtctcgagaagacttcaattgtgtgtgaagaagatctggagaacaaatgtcctggttgggaccttgatcaccccccttcagatgttgaagaccactctaacccttctgatgttgaggaccaagtggatggatatgtgtcagaagatctggagctgtgggaaatggtttttgaagacatgaagtgggaggagaacaaagtggttgtctctttgttcgagcattgtcgtattatgggctacgactacgaccagatttatgatcgtactatttaagtggccaagaccactagtatgtatcttctgtggttctatcttttgtggtcacgagatgaacttgtaacctgtttgtgtcatcagatgaacttgtaaccagttatgaagacttttgtgatgtcaagactatgtacttgaaacatctctctgtgatgtggttgtgtttatgtaagactatctatgtattcaagactatctatgcagttagttgtgttcagtt

SEQ ID NO: 166157 - DNA, 393 bp, Zea mays
  Clone ID: MRT4577_83117C.1
gggcccctcccccccacccattggcagtgaccgcacctctccgccgataggccgcgcaggaggatgtcgcggtgacacagagcttcatctacggcggaccgccgctcaagtgggctctgcgacagtgacacggtggtgccagcgtgctacggctctcttcccggcagaccttctacgcctccgcggcggccgggttccacaaccagaaccgcgagggtgggatcgctctcggagggaacgctgtggctgacgcccacaggaaggccgaggagcatggcatgcttgacggccgtctttgcatcgcctacaaggagccatttccaccatacgagcgggcagccacgaccaaaggctatatctatgctacgaacaagaaaccgactcacctacctg

SEQ ID NO: 166158 - DNA, 490 bp, Zea mays
  Clone ID: MRT4577_83118C.1
tgggacctcgagccggcgggacctccatcaagcctctgcctccacctgctacttcttcaagacttctggcccttctattccatccccacctcctcctcgacgcagccacagtcgtctcgccggacgagctctccgtgaaccacaacgtgcacccgccgtccccgagcccgctcaagaacatcatcgcgctcgcccgcgccgacgacgcgcgactcctcttcctctcatccaaggaggactcttccggcggcgacacctccgctcccgtggcatccggccagactccgccctcatacgtcttccgcgaggcgctcggcacccaggtctagaagctgctcctcgcgctcgaaaccagagccgacgccaccatgggcgcactgcgagccctgagatacgagccccggcgacagccgcttcatcccggacagctcctcctcgtacacctccctcccgtgtgcctccgactggcgcccgctcttccagggccagc

SEQ ID NO: 166159 - DNA, 342 bp, Zea mays
  Clone ID: MRT4577_83119C.1
tattttttatgtgttttggtctttttatttggtaaaggaaaataatcaaaaaataacaaaacatggtacataaaaaaattttcaaggcagaagctacatgatatgaatggaaaaaaaaaacgctgcaggagaattcactacagaagtcacactatcaaacatggatatgaaaaatacaatgaaatgggataaaaacctccatgcaaatgctaccagactacatgagtaaaaaaaatacatatatggttcacaaacaaacacaaactacagacttttaactgtaaagttggacaacctattgtatagcatgtacatcataacaaatcgtaaaccgaatggaca

SEQ ID NO: 166160 - DNA, 385 bp, Zea mays
  unsure (1)..(385): unsure at all n locations
  Clone ID: MRT4577_8311C.1
ataaacgtgtgcaccggtgccgcccgcacccagggaggatgcaccaccatgacaaggccgggggcggcctgccggcggtggccctcgcgcaaccccttgggcctcgcggccgccgtgggggccgccgccacaatctccggcgccacgtcaacccggccgtccccttcgggccgctgctcgccggccgatctgcctcgtccctccctcgtctactggccgcgcagctgctcngcgccgtcgccgcgcgctcgtgctcaggctcgccaccgagggatgcatctngccgagtacccccctgcgggggcgtgagcggattgaacgcgcngtgctngangcngnncatgcgttcgggctcatgtacgcctactttgcgacngtgatggac

SEQ ID NO: 166161 - DNA, 311 bp, Zea mays
  Clone ID: MRT4577_83120C.1
acgtacgaccgtgtccatgttcaacgacatcaacacgcagctggacgtgaaccagacctactacgggaagctgggcgagctccgctgcctgttcgcctacgacgtcgccatctggagtcccgtcaccaggtctttggcaaaggtacggctgccacagcatcagcttgtcgaggactactacctcgggaagcacaggctgagccacgcgcagagcatgatcgggatctcagggctgccacatggcgctcatgggagccctcgacggataccggattgtcgacgggccggttgattaggctattgagccggtg

SEQ ID NO: 166162 - DNA, 785 bp, Zea mays
  unsure (1)..(785): unsure at all n locations
  Clone ID: MRT4577_83121C.1
ggcccgcgggtttttttttttttttttacaatggcaacataggttaaattcgacgcacgatttgaactacaggagtgctgctctacatcctcaacatggtcctgtccaagacgtcgtacatgatcgtgttcgacgacatccgggcgtaccgccacgacgacgacgacgcacagggatgctggtacagcaacctcacgctgctnccnccggcggagggcgagtggggggaccgcctcgcctacggcctgcccaagacgaaacacaggggcgccgtgctggtgacctgccgcaaggaagacgacgccaagaccatggcgcgcacgggcctcgtggtccgcccgcccaagctcgaaggtgatgacgcctggaagctcttcagaagagagtacgaccaggccaaggacgacaagcgcaacaaggacggcggcggcaaagaaggcagcaagggggaggaggaggacctgctcctcaagcagttgcaggagatgaagaaggagatcgtgggcaagtgcctcggcctgccggtggccatcatcgaggcggctaggggcttcgccgacctcgagcccttgccggatgatactagtcccctcaaaccggtgtccagcaaggacatggacaaggacaagcagctgtctcaagcaaataagtaactgaggccctgatgaaggaagatttattgaattcgtgctgtgtaatgcttctgcgttgctttggctctcttctaaaatttaattatgggctataaaattcaaaaaaaattaatctgcccccaccaccccaac

SEQ ID NO: 166163 - DNA, 310 bp, Zea mays
  Clone ID: MRT4577_83122C.1
ggactacatacaagggccgatacgccagggggttactaaggtcatcgcgggtgtaactgcgcagatcatcatcaccttctcagagacaatgtcagaggctttacatagtgacgagggtgagttgtataagcaccctccacttcagaatcaacacctacagacatcggcatgttaccctggatttgaacctgctatagaacttataaaatggccgtgctttatgcgacaaccaaagtgatggctgcactgaatgtggtacaaaatgatcaagcataagacagactgatcaacgaacacaaatctgcaaaca

SEQ ID NO: 166164 - DNA, 910 bp, Zea mays
  Clone ID: MRT4577_83123C.1
gacgccccagcctacatcagtagcatggtctcaacctatgtccagcatatcgacgcgttgtacaagttgggagcacggaggttggggatcctagacgtgccagcgatcggctgtaccccaggctccagagtccccatggccaacggcggatgcaacgacgctgccaactctatggcgcagaacttcaacaaactcctaaggctcgaggtggcgaaagccgtcgcatcctccatgcccggcatgagatactccattgcaagcacctacaattttgtcaccgacttgatggacagccagacgtgtgcgcccagccaaacacgacttactgttcggatcgcgacgactacatgttctgggacatgctacatcctacgcaggcaacaaatgaacgtggggtggtcgccatcttctacggcccgcaggagtacgcggatcccatcaactttgcacagttggccgctgccacagcaaatgatgatggtgatataaatactgctatgaccgcaggcgtctatgccgccatatgataatcactatttatgtcgattggcatgcagctgcgacatgtcactacctgagtgctatatacgtaattcagttggaataatgtacgttgtgtgcatcatcagtctctctatatatatgctggaaataaaatgaggacaagagaccacagtgttagtatataatcagctgcatatgcatgcatgggaagcagttggtgttggagaatgtggcaggcagtatgtttattcgcgtcctatggatgaccttttacttccaaattctgttttcaatcggttttattttatacactatcggaatcagcttttttggtcgagtgtctgaagcacttgataacaaataaagctcggcgaactgtacatcgacagcggcttctttgccaagt

SEQ ID NO: 166165 - DNA, 186 bp, Zea mays
  unsure (1)..(186): unsure at all n locations
  Clone ID: MRT4577_83124C.1
ctctccacggccgggtgggggggttttttcnnccctgtggggcacaggggcgcaaggcttccttgtcccaaatgtccaaaatcttcgttctcgcaccctggtgcgtggggtgacgcttttgcttcctccaagcgcctggttttttgtccttgttccccctattttggtgggggggggggggggtcc

SEQ ID NO: 166166 - DNA, 262 bp, Zea mays
  Clone ID: MRT4577_83125C.1
ggcacgaccagggggatttgctgttccatagcaaggaacataggcaaacaacactgcccctggtgccaaccaccactggtacgaatcgtaagacactagggagcgagagaaaaaaacaccgctttgctgcttttggagatggcaccacgaaactacctcggtagctctagagcatagagctagcctacataacactgggcgtaccgtacaaacgattggaacaaaagggagccccaaatgctgacattagcttcacaagaaa

SEQ ID NO: 166167 - DNA, 616 bp, Zea mays
  Clone ID: MRT4577_83126C.1
ggaagtaaaaggtcatccataggacgcgaataaacatactgcctgccacattctccaacaccaactgcttcccatgcatgcatatgcagctgattatatactaacactggggtctcttgtcctcattttatttccagcatatatatagagagactgatgatgcacacaacgtacattattccaactgaattacgtatatagcactcaggtagtgacatgtcgcagctgcatgccaatcgacataaatagtgattatcatatggcggcataaacgcctgcggtcatagcagtatttatatcaccatcatcatttgctgtggcagcggccaactgtgcaaagttgatgggatccgcgtactcctgcgggccgtagaagatggcgaccaccccacgttcatttgttgcctgcgtaggatgtagcatgtcccaaaacatgtagtcgtcgcgatccgaacagtaagtcgtgtttggctgggcgcacatgaccgcggcgttcagttttcccgatccgcagcatgccctgtcgaccacccggagcccagccactagatggctgtccatcaagtcggtgacaaaattgtagggtgcttgcaatggagtatctcatgccgggcat

SEQ ID NO: 166168 - DNA, 1690 bp, Zea mays
  Clone ID: MRT4577_83127C.1
taccggtcttgaattcgtggccatctcgaggccggccgggggcggggactccaagccaacaacagagctccaactcagaaagcatccgtcccttggcagcagcaacaagctactagctatgtgtgtttagagcgagcgaggggaaaaaaaagaaaacatctaagatatactccatcatcttcgtttgattaacccgcccagtaaagccatgggtactaatgatagagcggtcatttctctagtactcctcgtgtgcatcgctagccgctcgtccttgggtgccgctgaaactgacgttgagcagaagcgctcgtcagtcccgttgatgtttgtgttcggtgattcgctggtcgatgtcggaaacaataacttcctgccgccgcctgcaccccgtgctgcatctccgtacggcatcgacttccctgctggcacccccggcgccgtctcaggacggttcacgaatggctacaaccttgccgatttagtcgcgcgacgtctggggttcaagatgagtccacctgcttacctctcgttgacaccgttatcaaagtttgacctgttcacgtgccgaattggtgccaattacgcgtctggcggatctggcattctcaacaccacgggaaacgggacactcacgctgcagaaacaaatcacgctgttctcgaaaactaaagcaagaatgtcgtggggccgctgcaagctcagctctatggtatcgaggtcgttgttccttatcagcgccggcggcaatgacttctccgccttcagtgaaatgggcatgggcgaacaagacgccccagcctacatcagtagcatggtctcaacctatgtccagcatatcgacgcgttgtacaagttgggagcacggaggttgggggatcctagacgtgccagcgatcggctgtaccccaggctccagagtccccatggccaacggcggatgcaacgacgctgccaactctatggcgcagaacttcaacaaactcctaaggctcgaggtggcgaaagccgtcgcatcctccatgcccggcatgagatactccattgcaagcacctacaattttgtcaccgacttgatggacagccatctagtggctgggctccgggtggtcgacagggcatgctgcggatcgggaaaactgaacgccgcggtcatgtgcgcccagccaaacacgacttactgttcggatcgcgacgactacatgttctgggacatgctacatcctacgcaggcaacaaatgaacgtggggtggtcgccatcttctacggcccgcaggagtacgcggatcccatcaactttgcacagttggccgctgccacagcaaatgatgatgatgatataaatactgctatggccgcaggcgtctatgccgccatatgataaaccctatttatgtcgattggcatgcagctgcgacatgtcactacctgagtactatatacgtaattcagttggaataatgtacgttgtgtgcatcatcagtctctctctatatatgctggaaataaaatgaggacaagcactacaagaaaatgttgaagaagtgtcagttaattaaaaaatgtcggggcccacactcttaatcgaagtaaaagtgtgggttttgttgcaccgacactcctaatttaagagtgtcggggtcccgcagaaaccgacacttttaatttaaaagtgtgagttttttctac

SEQ ID NO: 166169 - DNA, 811 bp, Zea mays
  Clone ID: MRT4577_83128C.1
attgggtacctcgaggccggccggggcttccccagacattattctcacgttcaggatcactttcaccttggacgctagcttcgggactcgatacgaaaaatctaatcgagcctcaacacatcacaatggcgacagctgctgagcacaacaacacccgtgggccaagcatggagaaaaccacgaacggcacatcatctctggaccacgccaacaatgtccccaagcaacgaaccccatatgactatggcggcaaccctctcgcccacatcgcaactaatgccagtggaccccgtctcgcagcgtttggtggagaatttcaacccggatcttatgcaccaccgaaccgcaaattcgctaacccggcacccctcggactttccgccttcgcgctgaccacattcgtcttgtccctcatcaacgtcaacacgcgcaacattcccggacctaacattgttgtcgcgctggcgtttggttatggaggtcttgtgcagcttttggctggcatgtgggaaatggccgtaggcaacaccttcggcgccaccgccctctcctcctacggcggcttctggatctccttcgccatcgtactcatccccggcccagtcaacatcgaaacccaactcgccgccaaatccgaagctgcgttccttaactccttcggcttgttcctcatgggctggttcatcttcactttcatcttgcttctctgcacgctccgatccactgtcgccttcttcttcctggttcttacgctcaccatggcgttcttggtgctgggtattggatacttgcagacgatggcacatcctca

SEQ ID NO: 166170 - DNA, 555 bp, Zea mays
  Clone ID: MRT4577_83129C.1
cccacaacgaggcctaaccctccgcctcagtcctccactaccagatctcttctaccttcccctagagcttagcaagcagagcaaggccaagacatgatgatgatgagcgagggagtgagcgtgccgccgtggggcagccacctgcccgccaggcgttcgagagctacctcagcaagagcatcatgtcatcctcgcccaccagcaccctgctctcctcgccgcccaagtcgcccccgtccgagtcgccgccattgtctcccgacggggccgcctccttccgccgcggctcttggcccggcgtcgggtcgcccgtcaatgacgtcctcgcttcgctccgccagctgcgcctcgccaaggcgcaggcgtccccgtccggcggctggtccggctaccccacctcccctgccgcctacggctcgcccaagggcgccggactctacagcctccccaccacccccatgggcactcagaccagcgcctccagcttcatggccaacctggagccactgaacctccgcttcatcgacgacgaggagccggtccagagggtggagt

SEQ ID NO: 166171 - DNA, 895 bp, Zea mays
  Clone ID: MRT4577_8312C.1
tgccctcgggggtctcccgaccaccgatgagcactctgtcaggcttgaacaggtcctcaatagcagtgccctctgcaaggaactccgggttggaaaggatctggtagttgatgcccttgctgttgtgggtcaagatcttctcaaatagcctcagcggtcttgatcagggacggtggagttcttgacagccatcttctcacacttcgagacattggtgcttgcccgggcaaggcgccccagggccccttggtactacctcaacctgacgggcatatccctgggcgcgaaggcgctgcccatctctcccggcgcattctccctcaagcccgacggcacgggcggcctcatcatcgactccggcacgaccatcacctcgctggccaacgcggcgtaccagcaggtccgcgccgcggtaaagtcccagctggtcacgacgctgccaacggtcgacgggtcggactccacggggctcgacctgtgcttcgcgctgccggccccgacgtcggcgccgccggccgtgctgccgagcatgacgctccacttcgacggcgccgacatggtgctccccgcggacagctacatgatctcggggtccggcgtgtggtgcctggccatgcggaaccagacggacggcgcgatgagcacgttcgggaactaccagcagcagaacatgcacatcctttacgacgtccgggaggagacgctgtcgttcgctccggccaagtgcagcactctttgacgatgcgatagttgtacatatgtatatgtgtgcatatataggattcgtgatttttttgtatacagtggattgttaaccgaacacgctaattaattccattatattattgaaaaataaaaaaaaaaaaaaaaaaaaaaaaaaaactcgagggggggg

SEQ ID NO: 166172 - DNA, 1124 bp, Zea mays
  unsure (1)..(1124): unsure at all n locations
  Clone ID: MRT4577_83130C.1
cggacgcgtgggtccgcattttggactattcctgacagcatttaagtttttattacggttcaacggtcgtccagcgtaatccttttacaaccatggttaggcttctaaagtttttattacggatctcactactctagcatgggaatcgttcttcattacatgcttaggctcgagccatttacatctctgtatctaaattttcaggttgtcattttgctcatagctatcactgtttccttaaaattcgagcacatagctattattttcaaaacattattcatgaatttgtcaatacataatttctcttgttgtatttcaccacagttcaaaataagggatcttatcatattatttacatttatgtctgtctgacacttgtgcaaggtggcaagtttgaccatgcagttcgtttgttccaaagcattgagaaacgctacataaatagcttatcaaatacaagtgacgtcaaagagcaccctcccgtccttttttacgtccgcccacgagtttggcctcttgaaaattcaaattcatatcatctggtgtcaagcaggatggggaacctataggcgatgttgctctccctccatgggcaaagggatcgcctgaagaattcatccacatcaacagagaagcccttgatagtgaatatgtgagctctaatctgcataactggattgacctcatatttggttacaagcagcgtggacaaccagctgttgaggcagcaaacatattttactacgtgacatatgaaggtgcagttgatctgcaaaattggatgacatgttacataaatctgctattgatgatcagatagcaaattttggacagtacaccaatccagattttccggacgaagcatccaagaagagggcctcccatcccaattgctcatccactgtnttttgcaccacagtcgctgacattaacatcaagtgtttgtggtgccgccagccacatgtgtgctgtactatttataagtttgttggagaacactggtgtcttgatgaatggtgggactctttcgtcaggcaagctggggttggcctctcacctgcagtccggtggtaatttcacatattccggtccccggtactttctttggattggttctgtgtttt

SEQ ID NO: 166173 - DNA, 148 bp, Zea mays
  Clone ID: MRT4577_83131C.1
tagacgcttagggtgaagggaagctctatggggtcttgttcataatagtactctcgaatgccggagcttgaatgtggagtaaacgaacggattattcggttgtagagaggggaaataggaggtggagcctaattattagaatttttaa

SEQ ID NO: 166174 - DNA, 378 bp, Zea mays
  Clone ID: MRT4577_83133C.1
ggtgcatccaaaattaatggcacttcatttgcttattggggggtaaagtgtttgaacaacaaatagaaaaacaagctttttagcaggagatggaccttcaactggggcagcccaaccccaaaagcataaacaaggggttaaatgcaaaaaaggaacctgattgttcaggattcaacaaacaagaagccgccttataaaaaaaaggggttggctattttgtttgtcttaacaaagacaaccggaaaaactccaaccatgtaaaatgacaggggaggggggcaacacccttgtcaaacaaaacacccccgaaactttttacacaaaaaaaaagctgcaaatattttcctggagcaactgagaaaattttttttacattaa

SEQ ID NO: 166175 - DNA, 195 bp, Zea mays
  Clone ID: MRT4577_83134C.1
gaatctggtcgtggacagggccgcttaggctgtacgtgcacctgggcatagcaccgcccagagcgtactcagcgtactttctaccagcagtttttaaaccactttcacattataacagaatacagtctagggtataaaataatgcgttacctggctgcatacacggaccgctgatcgtagcctaggtcgttgtcg

SEQ ID NO: 166176 - DNA, 545 bp, Zea mays
  Clone ID: MRT4577_83135C.1
acgaataagctgaaatcattggagaagagaaatgaaacattagatgagcatctgcgagagcttaaatctagaacaactgatatgtctaatgctgtactacaagagaggaatcagttggtcaatgagctgactggactaaccaataccatcggggaggtaatttatggaggtgaaagtatgatgtcaaatttgagaaggatcatgcagaaagttaatgaggaaccttgcaatgacaggcttacctcagaaaaaactaatggtagaagttcttcacctttgatcaggcacaaatcagggcatgtcctagatagaagatcgcctctgaaagagaacaactactagttagtataggtcagatcgtgtactgatattgctgtaacagttgtactcggttttctatgaatctgacatgccgcccctagagctgtgccttttctccttccccagtgccatccgtgttttgttatttaaacacagtggctgtgttagcgaacacttattttatggactgaatttgaataacatagtttcccaagtgttgaatg

SEQ ID NO: 166177 - DNA, 405 bp, Zea mays
  Clone ID: MRT4577_83136C.1
cgcacgcttgggcggtagcaggcgagtagacaacttactgtgctatgctatatatgatgcacacatatgtctcataccttgcatcagtggggatgatgcggtgaagaaagagcgctttgatgacttgcttaagataacatatattctattacatgacttttgatctgaaatgctcccaagagctgtactagataatattgagcacgcgtggatccaatcgggctatgcgcgatgatgttgtaacatttaaccattgtttgttgcacactaggccctcattgtacagcattaccgttggatcattatgaggcacaaacaatttggtgaaatgaactacgataattggcgctaacgaactttgcacaagtgctatatgaaacagccatttattccatttggctgatt

SEQ ID NO: 166178 - DNA, 433 bp, Zea mays
  Clone ID: MRT4577_83137C.1
cggaatttcccggggtttttttttttttttttttttttttttttttttttttttttttttttttttttttatcaaacgattgtttttgtctagtctccagtgtaaataatggtacattgagcatgatctattcgagcagcttattaaggaaacatcatccgatacagaacaaacatcgcaaatcgaccacagtattagcgcaacatcctgcaatacagtacaatacatcacatcactagtcacgcctcattacgctactacactttcttcaagaggtggtactctgatatcgcgaaaccgaacgacgcaacgagcacgtaggcagcagcgtactattatgatacgtactagagctttcaggcgacgtgcagcgcgctaccgagcgctgcgcggaggctgtcgatctcgtcgccgggcaaaaccgccgtgacga

SEQ ID NO: 166179 - DNA, 543 bp, Zea mays
  Clone ID: MRT4577_83138C.1
acaagctttttttttttttttttttttttttttttgtttttttatttttttgtttttttttttttttttttttttttttttttttttttttttttttttttttttttttttttttttcctttaaaacccaaacctttttttgggggcggttttttggggcccccccaacaataaaaatgggtggcggttccctgtgttttcccaaaattaaaagggggggggggggtaaaggaaattccccaaacttttccaaccacacgctggggggaagggcccggaaacccccccacggtttgggcggataccggcccaattgtacccttgccccaaacaccccaaagggggattcccaacccacggggggccgcccttaggggtcccaccccggaccccaacttggggtaaaaaagaaaaaaaggggttccctgggaaaaattttattcccctcaaaatcccaaaaaaaaaagacccgggaccaaaaagggaaaccccgggggcccctattggggggcctacccccacttattggggggggccccacgc

SEQ ID NO: 166180 - DNA, 390 bp, Zea mays
  Clone ID: MRT4577_83139C.1
gcagccgactccatgcccctactctgctgccggcggcgtcccccactgaagagactagatgctgtagtatagccgatggctagctagctagttgagtcatttagcggcgatgattgagtaataatgtgtcacgcattaccatgggtggcagtgtcagtgtgagcaatgacctgaatgaacaattgagatgaaatgaacaaaattaatgagaagctgtatcgacagcactgaactgaggctatacatggctgaacttggatgagacctcgcttgaaatgcgaaatgctccgaggtggatacatattaacatccacccataaataaggggcccctatcttgtgatcatgtgactacggatagaggcagtttacctgctgaacaatttttttt

SEQ ID NO: 166181 - DNA, 474 bp, Zea mays
  Clone ID: MRT4577_8313C.1
gtatgaatctatccttagacaaaacttcaatagccctccgaagaaagagttgcaggtcacaggtaccatagaaacactcagttggtttgtgtagactacgaggctatacgcgcgataggtgcttggcgggcatgaatcagcggaactagacgacaaccatgtctgacgaccaaaacagggaaccaaagtgcgaggaatgaacaagctggctgtctccaactccagagattctttacagtgggtcacagacttacaggaaatcggtcctttgaatcctgatgaataagctgccatcatgacatagacaaaaccactcgttccataggttgttctcacgtagtaagtgtagctggtgaatgcaatgccagcagctgcactgagacctaggatatccaccaatactaccaactcaccagacattccactttcgttaggattcactgactgtgtgatttccagatcactacagctgtg

SEQ ID NO: 166182 - DNA, 388 bp, Zea mays
  Clone ID: MRT4577_83140C.1
ccaccccacgaaacacacggtttaattcccccggcacacaatggaacacacactgctttgagaagcggggggaaaaaaacagcatttcacattaaaacgggccggggggaaaacacactgggaagtccaaaaattgaaaacgtggccaaaaccccacttccccaaaacctgggagaaggttatgctggggggaaacccgtggttggaggaaggggggcctttcccgggcagaagggaatttatcccccaaaaaccaggtttttaaaaacaaggggtttttggaaaaaaattggttaaaaaaaaatttggagagggccggcccccccggggggggggaaagaaaaaaaaaaaaccggttggaagggtttttggggaggcgggggggggg

SEQ ID NO: 166183 - DNA, 251 bp, Zea mays
  Clone ID: MRT4577_83141C.1
ctcgagccggccgggattctcacaccatagctgaaggcccagatcctttgtctcaatgaccgtcaccgataagccagatgcaaaggcatggttaagacataatgacactgccgctgaattacttgcgaaggatgcaaacaacaacgggaaagcggacccagggacttacacaccttgccccgccaaccctatcaagatgcaaacatcttacgaattatagaatgattggtcttaggctgaactcgctgctt

SEQ ID NO: 166184 - DNA, 972 bp, Zea mays
  Clone ID: MRT4577_83142C.1
cacgactctcggcaacggatatctcggctctcgcatcgatgaagaacgtagcaaaatgcgatacctggtgtgaattgcagaatcccgcgaaccatcgagtttttgaacgcaagttgcgcccgaagccttctggcggagggcacgtctgcctgggcgtcacgcatctcattcccaattcctcatctgcttcgcttccccccaaatcgaatcctcatcgctccgtctatatggcgactctaaccatgcagccgatcggtcccacccctgctccggctgcgcagcaagacccgagcaagggagagaatcctcctaccgtggatggtagcgatctgggtgacatcgactcgggctgggttatcctcaagaactcggatgtcgtttccgcggatttggcagccgccgccgtctgtggcggtcagcgtctaggctcttctacgattcctagctgggcacggtgggttctgggaggtgtggtgtacacggtcgtgccgttctacaacagagttaggcatctcgaagacgagaccgtggggttcgtggagaatgctgtggaggttgtggagcatatagctgaagtaacagagaagctagctgcgaatgtggctaagcaacttcctgaagatgggtctctgcagaaagcagcagaggatgttgagcacattgctgaggtggtggatgatgatgcagagaagtttgaagcagtcgctgaaaagatcgacaaggtctgtgatgagattgatgctgctgtggagccagtcatcgaggagcttgaaaaggaacttgatcagagtacaacgtctgagaaaggagttgacacaaagaattgatcaacatcatgttaggggtactcctcattgtatatagcgtctgtactattgtttttcttctctcctctttggaaaaactgcttgtacatatgtatggtgttgtgtatgaactgcacttgcaagatgcaacccaccatgatcatag

SEQ ID NO: 166185 - DNA, 1063 bp, Zea mays
  Clone ID: MRT4577_83143C.1
acgactccttggcgtatgggtacctcgaggccggccgggggcccctccggattctatctcattcccaattcctcatctgcttcgcttccccccaaatcgaatcctcatcgctccgtctatggcgactctaaccatgcagccgatcggtcccacccctgctccggctgcgcagcaagacccaagcaagggagagaatcctcctaccgtggatggtaccgatctgggtgacatcgactcgggctgggttatcctcaagaactcggatgtcgtttccgcggatttggcagccgccgccgtctgtggcggtcagcgtctaggctcttctacgattcctagctgggcacggtgggttctcggaggtgtggtttacacgctcgtgccgttctacaacagagttaggcatctcgaagacgagacggtgggattcgtggagaatgctgtggaggttgtggagcatttagctgaagtaacagagaagctagctgcgaatgtggctaagcaacttcctgaagatgggtctctgcagaaagcagtggaagaggttgaacacattgctgaggtagtggatgatgatgcggagaaggttgaagcagtcactgaaaagatcgacaaggtcagtgatgagattgatgctgctgtggagccggtcatcgcggagcttgaaaaggaactcgatcagagcacaacctcagacgatggagttgacacaaagaattgatcaactgcatgttaggtgtgctcttcattgtacatagcgtgtgtactgttgtttttcttctctctctcctctttggagaaactgcttgtacatatgtatgtatggaccatgaagattattggtactgtatcaagtcactatccataaataaatacacgttggcctgtgaaaaaaaatatactagctcgcagagctgtgaattaaaaaaaaaaaaaaaaaaaaaaaaaaaaaaaaaaaaaaattagtactcttatcaagtcactattattcaaataaatatcattcaattaaaatcaatctaattactttaatatcagggggtggccctttttaagggtccaattt

SEQ ID NO: 166186 - DNA, 436 bp, Zea mays
  Clone ID: MRT4577_83144C.1
ctgaacctgtgatatgtcctgttacaaagatggccatgcagagcaagacactgaggagtaatcttccgttgaagagcacaattgcagagtggattacaaggaatgaagcgacacgggtcaggatcgcacgcaccgcgctctctatggcgaccacagaggctatggtgcttgaggccatacatgagctgaaggtgctggctaggctgaggagaaagaacagggatcagatgcacaagattggcatcaccaagttcctagcacggcttctggaccacaaggatgcacttattcgctgtgactccctcgacctcctctgcttgttggttgaggatgatacaggaaaggaaatcatagcgaaaaccagagccgtctcaaggacaataaagctgctatccagcagtagtactgatgagaggcatgcatctatatctttctt

SEQ ID NO: 166187 - DNA, 459 bp, Zea mays
  Clone ID: MRT4577_83145C.1
aaaccagggcttgggaaaccccccaccccccaaaaaaaaaaacccccccgggggggggccccattacaaaaaaaagctttcccccccccctagcccccccccaaaatgcaacaaccccttccaagggaaaccaaaaaaatgtaaaattgccttcaaacaaaattcccttcccaaaaattctaaaacaacaacccccaataaccctaacccttccccatgttggaaagaaacccactttctcccccccgcatgggcaggacccatccattttcaagcttaccaaaacccccccaaaggcagaaaccccccaaccgggtcaatgttacaggccccattaatcctttgcccctgcccctgcccctacctccaccttttccacctccacctttttctcctccacctccacctccaccttttccttgcccctttttacctttgccattaccccctttacctttg

SEQ ID NO: 166188 - DNA, 356 bp, Zea mays
  Clone ID: MRT4577_83146C.1
aaattttgaaaagtaaatgaagccttccaatgaagatttgattgctggctttgtctgtgctttagttttattaattaattaatctgatgaccacacataaatagtttgtgtagcttttacagtttagtatgctttatttatgtaccagaacttataccgcgtttctgaaacagggtcatattgatcatggaatcttgtttttcttttgaagattcatggtaattcttgtttgcagcactgccgggcaaacaggatcacctggttcaacgtccatgccagggactcccacgtccttgtcgccaaaaagcaccgggagcactggaggattaaatccacctgacgtcgattcgaccgac

SEQ ID NO: 166189 - DNA, 214 bp, Zea mays
  Clone ID: MRT4577_83147C.1
cccacgcgtccgccgcgtcgaccttgtcctagtgcctcgtggaccgcgactcccctgccgcgtccacgctccagttcggctgcggcgccgcctaggcgggcaccgtgacgtcgcctctcgtgcgcacccgcgcacgagcagcttctgctacgtggcgctgtcgggcatctcggtttgcgggcaccgctgtccatcccggcatccggcttcggca

SEQ ID NO: 166190 - DNA, 389 bp, Zea mays
  Clone ID: MRT4577_83148C.1
ttctgctcgtgttcctaatccccgcgtctaccggcctcttccgattaataatgcgctcctcccttgattcctggatatttatgtgtgcgagcatgtgcatccctttccccatctagccatatttctcgggccttcatcacgatctgggcatggcagtggtgccttgagggatgaagctgccatgggcgtgcgcagagaaagccgggggccgccgcatcgaagctgggcgtggaggagagcagtgcccctgcagccgtacgtagtgcccgtggggcgtgccgtcggggttgaccagcaactgattgcagcatgcttgttcgtggtggtggtcgggactccgctcggcgcccaatcaagctggaaacgtgggcagggcatggcgagtacct

SEQ ID NO: 166191 - DNA, 1443 bp, Zea mays
  Clone ID: MRT4577_83149C.1
ccgggctagctccggcacacgaaggtggacgggcgcgggacgcgcatccggatgcctgcaatttggcggctcgggtgttccagatgaccgatattcctccagctccctgagcaggaaaaaaacatctttgtgtggctgcagcacagcgggtctaatcggctatggacgccaccggagatgccggcggaggtcgccgccccaacttccctttgcagcttctggagaagaaggaggaacagccttgctccacgtccccagcagctgctgtgggtgctggggctgctgggtcgggagagatgcagatgaagaaggtggcgccgccgaaacgcacatcgagcaaggaccggcacacgaaggtggacgggcgcgggcggcgcatccggatgccggcaatctgcgcagctcgggtgttccagctgacgagggagctggggcacaggacggacggcgagacaatcgagtggctgctgcagcaggcggagcccgcggtgatcgcggccacgggcaccggcaccatcccggccaacttcacctcgctcaacatttctctccgctcctcgggctcctccttctccatcccagcgcacctccgtgctgccggttcgcccggcccacgcttcagcggcgcgcggggagacccgtgggagcgcgtcgtaggcctcgggttcggcggcgccgagggtcctccatctgctacttcgtctccgctgctgctaagcttccactccggcagcgtcggccttgacgtgtcatcaccgtcgtcgtcgtctgctgccgccaactccgacctgtccaagaaacggcggtgggagcaagaaatgcagcagcagcagcagcagcaataccagcagcagatggccgggtacacgcagagccaaatgccaggaaccgtgtggatggtgccgagcagcaacgctcaggccgcagcagcggctggcggaggcggcagcagcagcaacgagtcgatctggacgttcccgccgcaaccaggaagcggcgacggcggcgcggcgcccgtgtaccgcggcgtgccgagtgggctacatttcatgaatttccccgcgccgatggcgctgatccccggtgggcagcagctcgggctcggccacgaaaatggcggcagcagcagcggaggcgagggccacatgggggtcctcgccgcgctcaacgcgtaccgggcgcatgccgtcacggtggctgcgccggcggcgcagaacggagcggaaggcggctctagtcagcagcagcagcgtggcggcggcgagcgacaagacagcatgagccccagcgacgacgactcgtaggtcttctcggaggcttgtgcatgcactggtccgctaaggcgtccctcctgtttttaatctgcgcttctcttgacttatcgtttgcgttttcttcggtttgcgttattatagccttctctggctccttcacattctatag

SEQ ID NO: 166192 - DNA, 349 bp, Zea mays
  Clone ID: MRT4577_8314C.1
ggcgattgggttctacaagggcgggcgggaccaattttccgaatatctagactgctcggcactacgagacactctgagtgtgaccgcgcagccagtaactaatcctcccgtgctgttgatcacctttgatgtaggttgggagaggccgactaacgatggacattccatgggatgacgatgctgtgcatagtggctgagaccgtggtggtgcaccacgatacggatcacctgtgctggactgctcccacacaggtcgtgacctagcatgggctcatagtgagagacttgctccctgcctcgtcttagatgctgtgaatgtcctacgacgactatgctcatgagtctgtct

SEQ ID NO: 166193 - DNA, 502 bp, Zea mays
  unsure (1)..(502): unsure at all n locations
  Clone ID: MRT4577_83150C.1
aaaccccggttttacccacgcgnctgggcgcagcaccagaagagatcgacgacgtgtgcaccatcaagttccccaagctcgccaagcccgacgagccggacttctccttgcataccgacgacgcgctgtgactgacgactgacgactgaccgactgactcgatcgatctcatctgtgatgtgagtagcgcgcggcgttaattgtgggggcgtcatctccatcgataggtctctctcccatccattccagttccacccgtcttattcaactcttgtcctcatttccttcactcacgaaggtaagagtacaagccatgcatgctgccatatgagatcgatcgatcaatcgaatcgaagcatgagccggccgcttgtagctgtagatagatatgcatgatgatcgatggagtcgccgggaatgaaatcaacgtcgccgcgccgttgtactgtatactacactagtgctgatgtagtgaagttaattgaccttaccgattggttca

SEQ ID NO: 166194 - DNA, 117 bp, Zea mays
  Clone ID: MRT4577_83151C.1
acgaccctcctaagtggatccattccactggtgccggccgaggcatacaggtccagatcaggtacctgctgttagctgtcgaccgtatctatgccaacgcctactctagccgttgta

SEQ ID NO: 166195 - DNA, 1759 bp, Zea mays
  Clone ID: MRT4577_83152C.1
ttatttttatattttttttttttttacagcttcaaaaattgcgaaaaaaggcctcgtaatggccttcgacatctgacattaagcaaggtcaccacgacgatacaaaacaaatcggagttccacaacttactatgatgtacactctatacagagcatgtcgccccaaattacaaactattcaagcctagtagtctaaattacacactatacggcagctcaaagcttcaggaaaaaaaaacgtacagctccaatactgtacgtggcaaaaggaaaaagaaacaccaaagaatcaatacacatgcacaataaagcttaactgttcaaatctctgaatttaagggcatttggctgttggtatggagaaggttgcattcatctttgtggccatggcagacgtcgccaggaactcaacaatgcggatctgtcaagaagcagcaggaggccaaggaacgtagtcgacaaaccaaaggtgtacttggctgtagagcttctgtttctccaaaatagtattgagagcacccacttgcatatcctgatcactgagaaactgctcgcaggcactagcgctttcttcacaatggctctctgctcagcaaccatctcccagcagagccgccgcgccatctccctggccatcaccagctgtgccctctccgcccgcagagcgaagatctccctccgcagggccgccctgtccgcctccagcgcctcgacccttgcatacagcccccccgagttgccgtcccccacgtactgtgcaaccacagacgtagctggcttcgttgtactcgcgcaggtaacatccaccgtatactcgaattccttctccacgggggacgacggctcctccgcgtcgtcggcgtcggcgtcggcatcctcctcgtcctccccgcggtcattgccaacgaccatggctttcacctccatgccactgcccgagtcgcgaacgttccgctccacctgcagcgcggccatgccgatctgctccacgtcttcggcgcccacctcctcgtacgagtacgactcgtcatcgtcgtcgtcggtgaaggagtccgggtcgatgccgtgggactggaggcgggagtggtaggaggcggcgaggtcggagagcgaggcgagctcctcctggacctcgcgctccctgtcctcgcggctctcggcgtagcgcttgaactggcgggcctccatctgcgcggcggccttctcccgctgcaggcgctcgatcatgagcatggcctcgctggccgccgtctccgcggaggcccgctcggcgtcgagctcctgccgcaggccccgcgccgcgtcctccgccgcctccttctccccgcgcagccgcgccgccgccgcctccagctcctctacccgccggatcagcccctccgccgccgcctctcctgcccccggacccgacttgggcgacagctccggcgaccgcgccggcggcctccgcttcagggaccgccgcgacggcgacgggtccgcgaccggatccatggaggcatgaagtaagcggccgggggggtggggggactcgcgtctgccaaatcgcaagccctgatcccgccgctgttgggagcagctaacggctggcgggagcgcggcttcctgctgtgacactgagacgatggcgcggtggctggtggcgtctgttggaagcgacgtgagctcggacgcgtagcggattaggaaaaggtggcagcatcaagtcgagatgtgattgggcattggtgagagtagatggattccatcgcattgcgtt

SEQ ID NO: 166196 - DNA, 3436 bp, Zea mays
  Clone ID: MRT4577_83153C.1
cggacttgatgctgccccttttcctaatccgctgctcagcctagctacgtcgcttccaacagacgccaccagccaccgcgccatcgtctcagtgtcacagcaggaagccgcgctcccgcccgccgtgccgcacgcccgccagccgttagctgctcccaacagcggcgggatcagggcttgcgatttggcagacgcgagtccccccacccccccggccgcttacttcatgcctccatggatccggtcgcggacccgtcgccgtcgcggcggtccctgaagcggaggccgccggcgcggtcgccggagctgtcgcccaagtcgggtccgggggcaggagaggcggcggcggaggggctgatccggcgggtagaggagctggaggcggcggcggcgcggctgcgcggggagaaggaggcggcggaggacgcggcgcggggcctgcggcaggagctcgacgccgagcgggcctccgcggagacggcggccagcgaggccatgctcatgatcgagcgcctgcagcgagagaaggccgccgcgcagatggaggcccgccagttcaagcgctacgccgagggccgcgaggacagggagcgcgaggtccaggaggagctcgcctcgctctccgacctcgccgcctcctaccactcccgcctccagtcccacggcatcgacccggactccttcaccgacgacgacgatgacgagtcgtactcgtacgaggaggtgggcgccgaagacgtggagcagatcggcatggccgcgctgcaggtggagcggaacgttcgcgactcgggcagtggcatggaggtgaaagccatggtcgttggcaatgaccgcggggaggacgaggaggatgccgacgccgacgccgacgacgcggaggagccgtcgtcccccgtggagaaggaattcgagtatacggtggatgttacctgcgcgagtacaacgaagccagctacgtctgtggttgcacagtacgtgggggacggcaactcgggggggctgtatgcaagggtcgaggcgctggaggcggacagggcggccctgcggagggagatcttcgctctgcgggcggagagggcacagctggtgatggccagggagatggcgcggcggctctgctgggagatggttgctgagcagagagccattgtgaagaaagcgctagtgcctgcgagcagtttctcagtgatcaggatatgcaaggtacacatcttgctaaccccattggtcattgtcatcgaactcttttctgtttaaatatcatcgattttgttagttaaaggtcctatttgggcacatttggagtattcagtcacattgcagggattcacctgatagaaaggttttcctgctgtctttggtaaaaatgaaatgttggcaagtcttttctggacaagagaagtaattagatccttacattgcagtgtcctgaaatagccgcatagttcggtgatctcttgctgtggcttggaggaaatagttttttagggtcaggtgaactcaagtgttatacagtatagtggcaactggcaagattacacaaaattagatttttagtttttgtcagcttcagtgatgggggagtggactacatgttccaccttttgatattattgcagtgcttttgtcatttttggttaaatttgtaggctgaacttgcacagtgaagtacttcggtaaaactcaaagtgcttcagaaatcaaaatattgagaggaaaactgatatttaagttttacgtgattttggttcttggaaaagtatgtaagtacttatcatggcagaaatgtgttgctcttttgaattccttggtatatgtacaccggcaagtatgtgagattagcatcttttcaatagttgcattttgatcatcatcctcagttgtacttttctaggtcagatctgttaaagcatcaacattaaatttacaaactttttctttagttgtttcggcgcataagtaactcatcatattattgtaccccctgtctgtgttgtgcaattaagttaagatccatcgctgcagttgatgtttgagttattagacaatgttactcgtaagatttttaatattcttgtaagtatccatatctattggtggtatcgcatttatattttttttcaattgaatttaatacgcgcccacattgatgtttacaaaatgatgcttgagttgtgtgtacggcagtaacggcacgagcaaatatttatgttgctctacctcatatgcttaatgtgtaattcagtaaatatccattaatacagaccataatggaattactagaaacttatattctcatattgtgctatatttatattgatgttttcaatggttattacactttttatagaactttgggtagaggagctcatttgccattgttccctaatatgcagagtaaattgtcgagagccatttgagctaatttttagtcaaccacctgttcgagttagctttttcttcaacatgtcaaggcatgttgcttgcgtagtaccctatgtcccaaaaaataaggcatattttttttgaataagtctttgaagttaaactttgaccattaatttcttttaaaatatgatatcaacaaatgcaaattaagcatcatattaaagtatttttgaatacgaattcaaatatataacatgtatacactaaaatatatgtttttttgctaaattgttggtcaaaatttaaaacgttgacttttctaaaaacatgtgcgtcttattttctgtggagggagtattgagtactgaaaatcgataaaatgacactgcaaatatagtacaatatattgtgttttgtgctatcactgtttcaattatgtcaacgcatgaagttgtatttgatatttcttgtagtataaatttccacgcccacaacattgctatgattcatccttgagaaaactaaatatcttttctgcagtgggtgctctcaatactattttggagaaacagaagctctacagccaagtacacctttggtttgtcgactacgttccttggcctcctgctgcttcttgacagatccgcattgttgagttcctggcgacgtctgccatggccacaaagatgaatgcaaccttctccataccaacagccaaatgcccttaaattcagagatttgaacagttaagcttcattgtgcatgtgtattgattctttggtgtttctttttccttttgccacgtacagtattggagctgtacgtttttttccctgaagctttgagctgccgtatagtgtgtaatttagaccactaggcttgaatagtttgtaatttggggcgacatgctctgtatagagtgtacatcatagtaagttgtggaactccgatttgttttgtatcgtcgtggtgaccttgcttaatgtcaaatgtcgaaggccattacgaggccttttttcgacgtttttgaaaaaaaaacaaacac

SEQ ID NO: 166197 - DNA, 929 bp, Zea mays
  Clone ID: MRT4577_83154C.1
ggtatgcgatcataccagcactaaagcaccggatcccatcagaactccgaagttaagcgtgcttgggcgagagtagtactaggatgggtgacctcctgggaagtccttgtgttgcattcctgataaacaatcagcccaatcaatcaccggcggctccgctcaacgatccctagattacttcgccttcgccaccagaagccaggaacctcgaagcggacagcgagaggagccccgccggtcgatccagaggagatgggctcctgcgagatgacggccacggaggtagcggcgctgctggatctgaagccgcacccggagggcggcttctacgccgagaccttccgcgactcctccgtctccctcagcaccgcccagctcccgccgcagtacaaggtcggtcgtgctgtgagcactgctatctatttcttgcttccttcagggagtgtttcacatctgcatcgtattccttgcgctgaaacctggcatttctacaagggagagcctctcacggtatttgagctacacgacgatggccacattgacctcaccgtaattggtccgcacctagatgctgggcagcgcccccagtacaccgtgccaccaaatgtgtggtttggatctttccctacgttggatgttgagtcgtttgcatccgatggcagccatcttgtgaactctcggaagcgagaccccgagaagcactactcccttgctggctgcacttgtgcccccggctttgagtatgaggattttgaaatggccacttttgatgatgtgaagtctattgccccgaaggcagaacccttccctcaactaccttattccttccaagaagtaagcaggatcagagacgttcatattgcttgctagcagtctatatatcatggcattatccggccttcctgtattggctttggatgccattttct

SEQ ID NO: 166198 - DNA, 420 bp, Zea mays
  Clone ID: MRT4577_83155C.1
gcaaaagcaatcgcgaaagcgagcgcgaggcgagtcgggcggcgaacggggcggatggggcgcgagctgcgcggagtccgcgacgacctattcgagctggggcgccacctgctcgacatcggctgatctctgcacccggttgtcaaaccgggccacaccgactcacctgcacgtacccgcacggaccgccggcgtgcgaaccggtatcggggacagcacggtcggtgacgctgcaccacttcgtgcgctaggagcttggctgtctgatcctgaccagatcagaggctcaagtccctgggcgatgagcgcaatatggtgtggcgcggcatcagccagggcaagctcgtggaccccatgctagagcgcctcaaggagtgggacggcaagccgttgcccatcaacatcgagtcaaagaacgcc

SEQ ID NO: 166199 - DNA, 393 bp, Zea mays
  unsure (1)..(393): unsure at all n locations
  Clone ID: MRT4577_83156C.1
gcctgggtgtgctccctggggggggggggggtgacaaacaaaacantaactggtggtgtcanaaancgatggcngtggcgcagcncagtcgggatttgtttggggtgaaaatctggttcctgctatgattctgcctctggtttctattatgacggaccacctggcgctggtggtgtggggggcctctttcntttgnttttcntccgatcaacagactcaacagtgtgtcccttgtgctggccgcagcttncttaggcggccggggtgacgtccagtgcgaacatgatctcagttggtttttttgggaaaaagttgggatctttgcgcctgctgcgcctctttttcttttcctgtttacatcactccctgatgctgttcaagctgctgccgatg

SEQ ID NO: 166200 - DNA, 231 bp, Zea mays
  unsure (1)..(231): unsure at all n locations
  Clone ID: MRT4577_83157C.1
gtacgtaagctcggaattcggctcgtgcaatgtctctaaaattttctagcagggaacgacacaaactcaacgggcacatcatatgcaaccgacgacgacggcgacgaagctgagcggcccgngcgcaaggggacaacacgacggagcccccccaccaccgggcacgagaccaacccggaggaaatagcggctggagtgtcgtgtgctatcaacaggggctaccactcatgg

SEQ ID NO: 166201 - DNA, 635 bp, Zea mays
  Clone ID: MRT4577_83158C.1
cggccgctcgagccggcgggcgggatcttgtaggaatgggaccatttgtgaagaagatgacattgaacccagagctcctgagttttacttttgccagaaaattgattacctgaaagacaaagtccagccttcatttgttaaagaccgccgggccatgaagagagaatatgaagaatttaaaattaggataaatgccctagtttctaaggcattgaaagtccccgaggaaggttggatcatgcaagatggcacaccatggccaggaaacaataccagggatcatcctggaatgattcaggttttccttggtcacagtggtggccttgatactgagggtaatgagctcccccgtttagtttatgtgtctcgtgaaaagcgtcctggattccagcaccacaagaaggctggtgcaatgaatgcccttgttcgtgtctcagctgtccttactaatggacaatacatgttgaatcttgattgtgatcactacatcaacaacagcaaggctgtccgagaagctatgtgcttcctaatggatccaaacctaggtccgcaagtctgttatgtgcagctcccacaaaggtttgatgggattgataggaatgatcgatatgcaaacaggaatactgtctcttttt

SEQ ID NO: 166202 - DNA, 625 bp, Zea mays
  Clone ID: MRT4577_83159C.1
gtgcggcgctcgaggcggccgggatacgaaaccgagacgtctcgtctcacggtcctcccaaaaagaaaaactgctcggttgcgtgctcctgctccgacgcgccggaatcatgcgcggcatcttaaccgcgctcggttgctccgactggcctcaggcaaagagggctcgcatcctcgcctgctccagaaggatgaagcacagggggcccgactggacggccctctaccagacacgagggcaacttcctggcgcagcagaggctcaccgtcatctccccgttgtccggcgaccagacgctgttcagcgaggaccgcaccgtcgtggcggcggccagtggagagatctacaaccacaagaacgtccggaagaaggtcaccggtacacccaacttcagcacgggcagtgactgcgaggtcatcatccccctgtactacaagtacgaggagaacttcgtggacacgctggacggtgagttcgcagtcgtggtctacgacacccgcgacaggacctacacgacggatcgcgacgccatcggggtcaaaccgctctacatcggctgcggcagcgacagatccggctgcatcgcggccgagaagaacgcgctgaactaggactgcgtgcgctt

SEQ ID NO: 166203 - DNA, 136 bp, Zea mays
  unsure (1)..(136): unsure at all n locations
  Clone ID: MRT4577_8315C.1
atacgacatctatggggcacctggcacgcctgcagaccggtccggatactgggcnaccgagcgtcgctgaaagaaaagatacaactactgaagcacagctgaaaactccctcatcctaaaaaagaacgacaaagag

SEQ ID NO: 166204 - DNA, 661 bp, Zea mays
  unsure (1)..(661): unsure at all n locations
  Clone ID: MRT4577_83160C.1
cccgcccacgcgtccgcgcagaaggtcccttacatctacgagcttcttcctccactccaatcgatcagcttaactagctgaggcagcgagctagctcctgaccactccactccacccgtccgtccgtgcacggcaccaattaattccatggcgctgtggtggtactgctagcccgacgtaccagcaagtcgtccccttgagattcaaggggaggatagctgcggcctaggcgtccttccgtccccagtccggcagtcccgagctgagtgcctgagcccccagtccccactgctgcaggagcaggacaggcactagctgatctgggtgcaactgcaagtaccaccacgcaccacgacggctgcacactgcacatgatcgggtcgcccaaagccgcccgcccgtgagatctgatcctgctgctgcctgttccgcttcaattctgacagcaccctagctgcctgcatgcgcgcgcgcaagctgatgctgatctgatccaccacaaacaacacccattacattttcgtccggattcaggagtgagggatctgatcttattgccatcgatcgataaggtatatcccgctcccccctctggcagctattcagcagaaaaatccaaaaagcagcagctggccgcggccgctctacggtatccnagctt

SEQ ID NO: 166205 - DNA, 316 bp, Zea mays
  Clone ID: MRT4577_83161C.1
ttggcgtggtcggccggctggctggctgcctcttgaagcctggactttctatatgccagtctgtgcctcgcgcgctggagctggatcattagcggaggttgatgcagatcgaagcagatggctgaacccgacgacatgtcgtgggcctgtttcgcgtcttcttccacgactgcttcttcagctggtgcgactcgttggtgctgatcgtgtccacccagttttcagaagtcggagcacgatgcgtggatcaaccattcctttcccggggacgccttttgatgcctggttcgcgccaagcttggcccttgagcttgag

SEQ ID NO: 166206 - DNA, 172 bp, Zea mays
  Clone ID: MRT4577_83162C.1
gagctcactagtcggtggccgccctttttttttttttttttttttttcaaaaaaaattgcagtccgcttagatccgggtaaattatgtcgaacagaactagacactatttgatcgggctaacgggacgttacttgataacagtcgaaaggttgaaacaaaggccccacggat

SEQ ID NO: 166207 - DNA, 320 bp, Zea mays
  Clone ID: MRT4577_83163C.1
tacgtaagctcgtaattcggctcgagggacgttcgcccccattttttctcccccacggccagcggcaacacagggggggttttatgaagcattacggtttttttatccccgccacaccatagctatacatgcatctcacgaaatacctggagactctactaccccattagagggccgggaaacgacgcgagagaaaccgaagcaaggtggaggatgtccatgccagatgcaaagaaaccgctgccagcagaggcaccgaaagacggagaaaatcaacccgctggctagccatcagacacctaagtactaagacatacatc

SEQ ID NO: 166208 - DNA, 222 bp, Zea mays
  Clone ID: MRT4577_83164C.1
gagacgactattcatgaagggaacaacattgaggatgaaatgccccgtaaggacgaacttattgtggagccagaatacgagaacacctacgaggctctgcgcttctcctaaatagatcccaatatacatcaatcttatgactctgatgagcatgatcatgcatgatatatcctatcaagaaagacattgacacataaggctgttgacacgaaaataagaaat

SEQ ID NO: 166209 - DNA, 364 bp, Zea mays
  Clone ID: MRT4577_83165C.1
cgttccctgtttaagtcatgttaggcacaaacccatatggcaacagaccaaaccttcttaaccaaatttatactccaactatatccctaccactttggtatcacacccccaggctgataccataaagagaaaaagttatgatgtcccaaagtagagcaaaaactgctgcacacccaatttcagttaactgaaacagctctacactaagcgtgacagagagttttgcaactcctttttctctaaattatacacagtagcaagccaactctttgtatgaaacttgttctcctttaaatgttcgtttactttgccgcagaaatcctaaccgaaatcgccttggattaattatcaccaagctccaatt

SEQ ID NO: 166210 - DNA, 296 bp, Zea mays
  Clone ID: MRT4577_83166C.1
cagtattaatgtgtaatcatgcttgacttatcacttatcaggattcactatcacattttttttcttgcaaaattatttgcttgattaaggtacaaattggcttttgtttgtttctttaaaaattccctttttgtgagccatatagagcaaatgcaaggtacaattcggctctttccattgatgattagttcttatcagctagatattgttttttaactaatggaggttatagagttttttttgtctttcctatgataatgaagtgctatacaatgactcactgtggcaggtatcat

SEQ ID NO: 166211 - DNA, 959 bp, Zea mays
  Clone ID: MRT4577_83167C.1
ccgaccgtgagcgccgagtacagcgaggctgtggagaaggccaggcgcaagctccgagccctcatcgccgagaagagctgcgccccgctcatgctccgcctcgcgtggcactccgcggggacgttcgacgtgtcgtcgaggaccggcggtccattcggcacgatgaagcatcagtcggaattggctcacggcgctaacgcggggctggacatcgcggtgcggctgctcgagcccatcaaggaggagttcccaatcctctcttacgccgatttctacaaaccctttggtctttgacaactcttacttcaaggaacttctgagtggtgataaggagggccttcttcagctcccaagtgacaaagccctgctgagcgaccctgttttccgccctcttgtcgagaaatatgctgcggatgagaaggctttctttgatgactacaaagaggcccacctcaagctctccgaactggggtttgctgatgcttaaatagaccctatcttggagtgatacattctgctgcctgtatggaatcatgtggtcttttgcatctggagtcaatgtgaacaagcagattgtcgtattgtctttctcgtaataaatttgtcgatgttgagcccttaggctgttgttggtacattggtacttcgtcgatgcttgaattgggaccctttgtccgttttcctagactctgatgctgtatgcaactgaaacaagtaaatctatgatcttaaggctgcagtatgttcttgttactctgcttttatctagtttccattggttgtgcttgtgctgcgtgacaggtcgtgcaacttgagtccgagtcttccatagttccaattttctcttggcggctaatacgcttgctgtgccttgctatgatcggagttgtatattccaatgtctaaaacatacctaggtggtgtatcggattttataagtgatgcaaatgattcttaac

SEQ ID NO: 166212 - DNA, 589 bp, Zea mays
  Clone ID: MRT4577_83168C.1
cccagcgtccgcggacgcgtggggcgtggcactccgcggggacgttcgacgtgtcgtcgaggaccggcggtccattcggcacgatgaagcatcagtcggaattggctcacggcgctaacgcggggctggacatcgcggtgcggctgctcgagcccatcaaggaggagttcccaatcctctcttacgccgatttctaccagctcgcgggagttgtggccgtggaggtcaccggtgggcctgagattcccttccaccccggtagggaggacaagcctcagcccccacctgagggccgccttcctgatgccactaaggatgggcttgagcgatcaggacattgttgccctctctggtggccacaccttgggaaggtgccacaaagagcggtctggtttcgagggggcctggactacaaaccctttggtctttgacaactcttacttcaaggaacttctgagtggtgataaggagggccttcttcagctcccaagtgacaaagccctgctgagcgaccctgttttccgccctcttgtcgagaaatatgctgtggatgagaaggctttctttgatgactacaaagaggcccacc

SEQ ID NO: 166213 - DNA, 401 bp, Zea mays
  Clone ID: MRT4577_83169C.1
cgggcacgatgaagcatcagtcggaattggctcacggcgctaacgcggggctggacatcgcggtgcggctgctcgagcccatcaaggaggagttcccaatcctctcttacgccgatttctaccagcccccacctgagggccgccttcctgatgccactaagggttctgaccacctgaggcaagtttttggcaagcagatgggcttgagcgatcaggacattgttgccctctctggtggccacaccttgggaaggtgccacaaagagcggtctggtttcgagggggcctggactacaaaccctttggtctttgacaactcttacttcaaggaacttctgagtggtgataaggagggccttcttcagctcccaagtgacaaagccctgctgagtgaccctgtc

SEQ ID NO: 166214 - DNA, 157 bp, Zea mays
  Clone ID: MRT4577_8316C.1
cggactcacagacgcgcgtatgtgagcttgaacgtactgcactaccctgccctgccatcataatagcacgtgagtccctggcgagcgagagtcgagggagacgcatggctgctccgaagctcgcgacactggtctggcacgtgctctgcgcataccg

SEQ ID NO: 166215 - DNA, 749 bp, Zea mays
  Clone ID: MRT4577_83170C.1
gccggccgggacccactatggcatcccgggcacccaatggcgacgcggaggcgccactgcttgcggccaccggtgacgcgccgacgacgaccgccatcggcaaggcccttaacagcaccgccgacctcgccaagcacctcccgacgggcgccgtgctcgccttcgaaatgctgtcgccgtccttcaccgcgtacggcacctgcaacgccgcgaaccgcgcgctcacgggctgcctcatcggcgcctgcgcgctctgctgcttcgtcctctgcttcaccgacagctaccgcgacaccgccacgggcgcgctgcggtacggcttcatcacacccagcggccgcctgctctccatcgagggtggcggctccagctccggccccggccccggcgcgccgccgccgcgggacgacaggtacaggctgaccgtgcgcgacgtcatgcacgggctgctgtcgttcgcggtgttcctggccgtggccatggtggaccgcaacgtggtggcgtgcttctaccccgtggagtccgcgtccaccaggcagctgctggcggccgtgcccgtggcggccggcgccgcggagagcttcctattcgccatgttcccgtccacgcgggcgcggggatcggcttccccgcggccgtccgcggcggcgtcctgagtcctgacgaatgaattacgtcgtcgggtcagcgggtccaggtggtcagctgctggcggcgcgcgggctttttgtttgtttggatgattgccc

SEQ ID NO: 166216 - DNA, 1319 bp, Zea mays
  Clone ID: MRT4577_83171C.1
atattgacggccatgatgcaccctacgagaaggttccctttctccttgtccttgtccttgcaagcctccgccctttcggttgtcgcaatataaactgccggggagcgtggcggccatttgcccccagcagatcttgtgaccctccctcagccgcgtcgcgtcgcatcctacgatccaaagctctctctgctcgcaggtcgcagccatggcgaagaactacccgaccgtgagcgccgagtacagcgaggctgtggagaaggccaggcgcaagctccgagccctcatcgccgagaagagctgcgccccgctcatgctccgcctcgcgtggcactccgcggggacgttcgacgtgtcgtcgaggaccggcggtccattcggcacgatgaagcatcagtcggaattggctcacggcgctaacgcggggctggacatcgcggtgcggctgctcgagcccatcaaggaggagttcccaatcctctcttacgccgatttctaccagctcgcgggagttgtggccgtggaggtcaccggtgggcctgagattcccttccaccccggtagggaggacaagcctcagcccccacctgagggccgccttcctgatgccactaagggttctgaccacctgaggcaagtttttggcaagcagatgggcttgagcgatcaggacattgttgccctctctggtggccacaccttgggaaggtgccacaaagagcggtctggtttcgagggggcctggactacaaaccctttggtctttgacaactcttacttcaaggaacttctgagtggtgataaggagggccttcttcagctcccaagtgacaaagccctgctgagcgaccctgttttccgccctcttgtcgagaaatatgctgcggatgagaaggctttctttgatgactacaaagaggcccacctcaagctctccgaactggggtttgctgatgcttaaatagaccctatcttggagtgatacattctgctgcctgtatggaatcatgtggtcttttgcatctggagtcaatgttgtctttctcgtaataaatttgtcgatgttgagcccttaggctgttgttggtacaatggtacttcgtcgatgcttgaatttgggaccctttgttcgttttcctagactctgatgctgtatgcaactgaaacaagtaaatctatgatcttaaggctgcagtatgttcttgttactctgccaaaaaaaaaaaaaaaaaaaaaaaaaaaaaaaaccaaaaaaaaaaaaaaaaaaaaaaaaaagaaaaaaaaaggggggggagggggggggggggggtggcggccgacac

SEQ ID NO: 166217 - DNA, 2808 bp, Zea mays
  Clone ID: MRT4577_83172C.1
gagcggcccgcaccatgcatcctacgagaagcttccctttctcctatcaatcctccggacctccgtcgtcctataaaccaccggggagcgtggcggccattcgacgcaggcacccagacccagcagctattgtggtcgtccctcagccgcgtcgcaccgcatcgcattctacgattcgaagctctctgctcgcaggggaccatggcgaagaactacccaaccgtgagcgccgagtacagcgaggccgtcgagaaggccaggcgcaagctccgcgccctcatcgccgagaagagctgcgcacccctcatgctccgcctcgcgtggcactccgcggggacgttcgacgtgtcgtcgaggaccggcggtcccttcggtaccatgaagtgcccggcggaactggctcacggcgccaacgcggggctggacatcgcggtgcggctgctcgagcccatcaaggaggagttccccaccctctcctatgccgacttctaccagcttgccggagttgtggccgtcgaggtcaccggtgggcctgagatccccttccacccaggcagggaggacaagcctcagccgccacctgagggccgtcttcctgatgccaccaagggttctgaccacctgaggcaagtctttggcaagcagatgggtttgagtgatcaggacattgttgccctctctggtggccacaccttgggaaggtgccacaaagagcggtctggttttgagggggcctggactacgaaccctttggtctttgacaactcttacttcaaggaacttctgagtggcgacaaggagggccttcttcagctcccaagtgacaaagccctgctgagcgaccctgtcttccgccctcttgtggagaaatatgctgcagatgagaaggcattctttgatgactacaaagaggcccacctcaagctctccgaactggggtatgctgatgcttaaatggcccatatcctggagcgggatacaaactgctgcctgtatggactcgtgcgatcttttgcatttggattcagggtgaaccaccagattgtctagtgtcttctctgtaataaatttatctgttcttggtactttgtctatggttgaatcggaacccattttccgtttgcctagattcttaatttctggtgctgtatccaactgaaactagtagatctatgatcttgtggctgcagcatgttcttgtcacttagcttttatctggtctccgttggttcggttcacagattgtgtgctttaaaaggctgtgcttaagtcctgcaattcgagtccaccaagctgtagggtgcaagtcaagattttattagtgatgcaagttgttggtattggtgcattatcgggctaatacgcttgctttgcctttggattttataagtgatgcaaattgctggtttcaacgtgcattaccgggtgggctggttcaaaaaaaaaaaaaaaaaaaaaaagcaggcaccccagcagctcttgcggtcgtccctcagccgcgtcgcaccgcatcgcattctacgattcgaagctctctgctcgcaggggaccatggcgaagaactacccaaccgtgagcgccgagtacagcgaggccgtcgagaaggccaggcgcaagctccgcgccctcatcgccgagaagagctgcgcacccctcatgctccgcctcgcgtggcactccgcggggacgttcgacgtgtcgtcgaggaccggcggtcccttcggtactatgaagtgcccggcggaactggctcacggcgccaacgcggggctggacatcgcggtgcggctgctcgagcccatcaaggaggagttccccaccctctcctatgccgacttctaccagcttgccggagttgtggccgtcgaggtcaccggtgggcctgagatccccttccacccaggcagggaggacaagcctcagccgccacctgagggccgtcttcctgatgccaccaagggttctgaccacctgaggcaagtctttggcaagcagatgggtttgagtgatcaggacatcgttgccctctctggtggccacaccttgggaaggtgccacaaagagcggtctggttttgagggtgcctggactacgaaccctttggtctttgacaactcttacttcaaggaacttctgagtggtgacaaggagggccttcttcagctcccaagtgacaaagccctgctgagcgaccctgtcttccgccctcttgtggagaaatatgctgcagatgagaaggcattctttgatgactacaaagaggcccacctcaagctctccgaactggggtatgctgatgcttaaatggtccatatcctggagcgggacacaaactgctgcctgtatggactcgtgcgattcagggtgaaccatcagattgtctagtgtcttctctgtaataaatttatctgttcttggtactttgtctatggttgaatcggaacccattttccgtttgcctagattcttaatttctggtgctgtatccagctgaaactagtagatctatgatcttgtggctgcagcatgttcttgtcacttaccttttatctggtctccgttggttcggttcacaggttgtgtgctttaaaaggctgtgcttaagtcctgcaattcgagtccaccaaactgtagggtgcaagtcgagattttattagtgatgcaagttgctggtattggtgcattatcgggctaatacgcttgcgttgccttcggattttataagtgatgtaaattgctggtttcaacgtgcattaccgggtgggctggttctataactgatgcaaattcctggttttaacttggtgc

SEQ ID NO: 166218 - DNA, 1857 bp, Zea mays
  Clone ID: MRT4577_83173C.1
caacgtcaaaaggttactttgtctattgctgtcatggttcagcctgtatctggcccagtgtgtctttttggaagtgaattccaaaaggtttgctgggaaatcttagtggcaggatcagaacagggtatggaagctggacaagttggtcttcgattagtgactaagggtgaaaggatgactactgttgctaaagagtggaatattggtgcgtctagtattgcagatggcaggtggcatcttgtaactgtaactttagatgccgacctaggtgaagcaacttccttcattgatggagtttatgatggatatcagaatgggttgccgttgccaacagataacggtatttgggaacctggaactgatatttgggttggtgctaggccacccatggacttagatgcctttggtaggtcagatagcgaaggttctgactcaaagatgcagatcatggatgcttttctatggggaagatgtctcagtgaagatgaggttactgttttacatactgccatgtctcctgctgagtatggattttttgaccttgcacccggcgatgcttggcatggaagttattctgcaagggtggatgactgggaaagcgaagaagcttatgagctttatgatcaaggggatgtcgaatgggacgtttcctaccctccctcagccgcgtcgcgtcgcatcctacgatccaaagctctctctgctcgcagccatggcgaagaactacccgaccgtgagcgccgagtacagcgaggctgtggagaaggccaggcgcaagctccgagccctcatcgccgagaagagctgcgccccgctcatgctccgcctcgcgtggcactccgcggggacgttcgacgtgtcgtcgaggaccggcggtccattcggcacgatgaagcatcagtcggaattggctcacggcgctaacgcggggctggacatcgcggtgcggctgctcgagcccatcaaggaggagttcccaatcctctcttacgccgatttctaccagctcgcgggagttgtggccgtggaggtcaccggtgggcctgagattcccttccaccccggtagggaggacaagcctcagcccccacctgagggccgccttcctgatgccactaagggttctgaccacctgaggcaagtttttggcaagcagatgggcttgagcgatcaggacattgttgccctctctggtggccacaccttgggaaggtgccacaaagagcggtctggtttcgagggggcctggactacaaaccctttggtctttgacaactcttacttcaaggaacttctgagtggtgataaggagggccttcttcagctcccaagtgacaaagccctgctgagcgaccctgttttccgccctcttgtcgagaaatatgctgtggatgagaaggctttctttgatgactacaaagaggcccacctcaagctctccgaactggggtttgctgatgcttaaatagaccctatcttggagtgatacattctgctgcctgtatggaatcatgtggtcttttgcatctggagtcaatgtgaacaagcagattgtcgtattgtctttctcgtaataaatttgtcgatgttgagcccttaggctgttgttggtacattggtacttcgtcgatgcttgaattgggacccttagtccgttttcctagactctgatgctgtatgcaactgaaacaagtaaatctatgatcttaaggctgcagtatgttcttgttactctgtttttatctaaaaaaaaaaaaaaaaaaaaaaaaaaaaaaaaaaaaaaaaaaaaaaaaaaaaaaaaaaaaaaaaaaaaaaaaaaaaaaaaaaaaaaaaaaaaaaggggggggccggttttaa

SEQ ID NO: 166219 - DNA, 1546 bp, Zea mays
  Clone ID: MRT4577_83174C.1
ttgggaccctcgaggccggccgggatctggtcttccaaggtgttcattcgatgtatcattctacgtatctctgtaactcttgtggactgccggtgtcgcgtaatgtatctgaactcttcgtgagtgcgatggaaaaaaaaaaaaaaaaaaaaaaaaaaaaaaaaaaaaaaaaaaaaaaaaaaaaaaaaaaaaaaaaaaaaaagcaggcacccagacccagcagctattgtggtcgtccctcagccgcgtcgcaccgcatcgcattctacgattcgaagctctctctgctcgcagccatggcgaagaattacccaaccgtgagcgccgagtacagcgaggccgtcgagaaggccaggcgcaagctccgcgccctcatcgccgagaagagctgcgcgcccctcatgctccgcctcgcgtggcactccgcggggacgttcgacgtgtcgtcgaggaccggcggtcccttcggtactatgaagtgcccggcggaactggctcacggcgccaacgcggggctggacatcgcggtgcggctgctcgagcccatcaaggaggagttccccaccctctcctatgccgatttctaccagcttgccggagttgtggccgtcgaggtcaccggtgggcctgagatccccttccaccccggcagggaggacaagcctcagccgccacctgagggccgtcttcctgatgccaccaagggttctgaccacctgaggcaagtctttggcaagcagatgggtttgagtgatcaggacattgttgccctctctggtggccacaccttgggaaggtgccacaaagagcggtctggttttgagggggcctggactacgaaccctttggtctttgacaactcttacttcaaggaacttctgagtggcgacaaggagggccttcttcagctcccaagtgacaaagccctgctgagcgaccctgtcttccgccctcttgtggagaaatatgctgcagatgagaaggcattctttgatgactacaaagaggcccacctcaagctctccgaactggggtatgctgatgcttaaatggtccatatcctggagcgggacacaaactgctgcctgtatggactcgtgcgattcagggtgaaccatcagattgtctagtgtcttctttgtaataaatttatctgttcttggtactttgtctatggttgaatcggaacccattttccgtttgcctagattcttaatttctggtgctgtatccagctgaaactagtagatctatgatcttgtggctgcagcatgttcttgtcacttttatctggtctccgttggttcggttcacaggttgtgtgctttaaaaggctgtgcttaagtcctgcaattcgagtccaccaaactgtagggtgcaagtcgagattttattagtgatgcaagttgctggtattggtgcattatcgggctaatacgcttgcgttgccttctgattttataagtgatgtaaattgctggttttaacgtgcattacctggtgggctggttctataaaaaaaaaaaaaaaaaaggcccctagggcc

SEQ ID NO: 166220 - DNA, 1205 bp, Zea mays
  unsure (1)..(1205): unsure at all n locations
  Clone ID: MRT4577_83175C.1
aacaagaacatactgcagccttaagatcatagatttacttgtttcagttgcatacagcatcagagtctaggaaaacggacaaagggtcccaattcaagcatcgacgaagtaccaatgtaccaacaacagcctaagggctcaacatcgacaaatttattacgagaaagacaatacgacaatctgcttgttcacattgactccagatgcaaaagaccacatgattccatcccacgcgtccgcccacgcgtccgcccacgcgtccgcggacgcgtggggccgtggaggtcaccggtgggcctgagattcccttccaccccggtagggaggacaagcctcagcccccacctgagggccgccttcctgatgccactaagggttctgaccacctgaggcaagtttttggcaagcagatgggcttgagcgatcaggacattgttgccctctctggtggccacaccttgggaaggtgccacaaagagcggtctggtttcgagggggcctggactacaaaccctttggtctttgacaactcttacttcaaggaacttctgagtggtgataaggagggccttcttcagctcccaagtgacaaagccctgctgagcgaccctgttttccgccctcttgtcgagaaatatgctgcggatgagaaggctttctttgatgactacaaagaggcccacctcaagctctccgaactggggtttgctgatgcttaaatagaccctatcctggagtgatacattctgctgcctgtatggaatcatgtggtcttttgcatctggagtcaatgtgaacaagcagattgtcgtattgtctttctcgtaataaatttgtcgatgttgagcccttaggctgttgttggtacaatagtacttcgtcgatgcttgaattgtgggaccctttgttcgttttcctagactctgatgctgtatgcaactgaaacgagtaaatctatgatcttaaggctgcaaaaaaaaaaaaaaaaaaaaaaaaaaaaaaaaaaaaaaaaaaaaaaaaaaaaaaaaaaaaaaaaaaaaaaaaaaaaaaaaaaaaaaaaaaaaaaaaaaaaaaaaaaaaaaagggggggganaatttaaagaaaccaagnttagntacgagtgcttgcaaaaaaaaaaaatattggttggggcccctaaaataaaataaattgcccggcgttttaaaaccagggaaatggaaaa

SEQ ID NO: 166221 - DNA, 597 bp, Zea mays
  Clone ID: MRT4577_83177C.1
cacgcgtccggtccacccagtcacccacccaccgcgagcgcgagagcacctagcgagcgaagcaaggctttcgtcgtggagcgagccgtgagcgagagggcgatggaggcggtgggagaggagaagggagcgaccgcggtggaggaggggaagatgatgaaggagcagggagagaaggcagtggcggcatcggaggcagagggtgggaagatggtggaggggcagggagacaaggcagtggcgacctcggaggcggaggatgtgaagattgtggatgggaagggagagaaggcagtggcgacctcggaggcggaggatgtgaagatggtggaggggaagggagagaaggcagtggcgaccacggaggctgagatagggacttcggaaccgaaggatgtggccggcgggaggcttatcaccttgaagagctcggacggcaaggttcatcgcgcgtcggtggcggcggcacagctgtcggtgattctcagcggcatgatagaggaagtcgtcaccgacgacgaagtcgtcatagtccctttagtcgacgggcccaccctggtcacggtgctggagtactgcaccaagcacgccgagttc

SEQ ID NO: 166222 - DNA, 760 bp, Zea mays
  unsure (1)..(760): unsure at all n locations
  Clone ID: MRT4577_83178C.1
cattgggtacctcgaggccggccggaccacgcatacacaagccaataaccatcaaacagctatggtagacaacgcggtggtcgccgtagccgtggttgtgctgctggtcgtcgtctccaagctgaagtcactgctctcctcgaagcccaagctacatcttccacctgggccatggacgctgccggtgatcggcagcctccaccacctcatcggcggtccgttgatccatcgcacgctgcgccgcctctctcagaagcacgggcctctaatgatgctccgtctcggcgaggtgcccatggtgatcgcttcgtcacctgaggctgcagaggagattctgaagacccacgacaccgcgttcgccgaccggttcaccagcgccaccacggccgcgatgacgtatgatcctaccaacatggcgctgtcgccctacggcgagcgctggcgacagctgcgcaagatctgcgtgctggagctgctgagcgccgccagagtgcagtcgttccggcgcatacggcaggaggaggtggcgcgctcgtggcgacgggtggcggcggcagccgccgtgcgttcctccgtggacatgtccgcgngngccaagacgttcgtctacgacaccatccatgaggggagtgcgtcggcagccggagcaggcaccaggacgggtaccttgacgcctcccacatggcggtgcgncagacgtcgnggctatccgtcngcgaccctggttccgtcgtctaggatcatgcagatgctcgccacg

SEQ ID NO: 166223 - DNA, 106 bp, Zea mays
  Clone ID: MRT4577_83179C.1
atattcggccaaggggagagagccagtcctccttttaccaagtcctattatggttagggggccttacggttttgtcgaggcgtgatggaggcgactgatgcggagt

SEQ ID NO: 166224 - DNA, 336 bp, Zea mays
  Clone ID: MRT4577_8317C.1
ctgtcctttgctcattgttgaggttgaatgttggtgattgtttatgttttttattggtgtggctggtgtatacattgtactgtttggttcagatgagggatcgagggcggcgcatgcggctagctcgtgggcggaacagactggtgagattgaggatggatcaggagcttgagccctagaaagctttgcaggcgcatctagttgaagtttctgtagaaagggtgaaggcatctgaaaccatatagtctctataggaaagtagtgactcatgagtagctgaacaagactgatcgtaatatgctggcgaaaaaatgggggtatgaatggagaaagatc

SEQ ID NO: 166225 - DNA, 281 bp, Zea mays
  Clone ID: MRT4577_83180C.1
aatccctccgggcaccccgaaaccgatcgctcgtttgttccctccccgcgcccagagacaagcccggagaccatggcggaccaggtggcgggcgaccaaatcgccgagttcaaggaggccttcagcctcttcgataaggacggagacgggtgcatcacataccaaggaggttggaactgtaatgcattcactgcgacagaaccctatggctgctgaactccaggacatgatcattgatgtggatgccaacgcccatggaacgagcgacttccccaaatttc

SEQ ID NO: 166226 - DNA, 427 bp, Zea mays
  Clone ID: MRT4577_83181C.1
aaaaaacatttgagtacaataaaaatatctaacaagctggttgggtaacccaacattgggccttacacccatgaaggccacaccggttctgaaaaaaggccactaaaacaaaaccgaaaccagggcctacaacaaccgaatttggcatggaaaaaaaaacccagaaaatctactataaaggaactgatgggaccggggctagcgcgcgctccaaaccaggatccgaatattaggggggggaaaaacttccaaatatggtgggggccccccaggacggcagcccttgggccaatctgaaccccctgagcttgcatgctggggagaacacctcctctaaaagaacccttccaaaacacactaagggaaaccagcccccccaaaggcaaaggggggggattctaccccccccaaagacttgcccaaaaac

SEQ ID NO: 166227 - DNA, 640 bp, Zea mays
  unsure (1)..(640): unsure at all n locations
  Clone ID: MRT4577_83182C.1
ttttttttttttttttttttcttttttttttttttaaattaatttttaaaaattaatggtcctttcgtactaaagaattttggtataactccaaagatagaaaccaacctggctcacgccggcctgaactcaaatcatgnaagaatttaatagttgaacaaactacctttatagaaaactgcccctataaggttctcttaattcaacatcgaggtcgcaatctattttatcaataagggctctccaaaataattacgctgttatccctaaggtaacttttctaaatttaagatattagattatttatcactatttgtttttatttgaaagaagttcactatattctccaattgccccaaccaaatatattacctaaatttataattccactattttataaaagtaaatcacatataaggatctatagggccttatcgcctaatagaacaatctaagaattttcacttaaaactcaatttatctaatatttactttaataaaatatttattgggttaacccttcattccattccctaattaagagactaattattatgctacctttgcacaggcaaaaaactggggccctttaattttattactcagggggcagattttactttaaataaatggcttaaag

SEQ ID NO: 166228 - DNA, 824 bp, Zea mays
  Clone ID: MRT4577_83183C.1
gtgcgccgctcgactcgggccggctgggcattggcacacacgcggacacaccacaggcgcgcaagcccaaccgatcgagcagctctagcatggcgagcggcggctactactacgaccagagcgcgggctacggcggctacagctactcggcggcgccgaggacgacgccgtcccacctcctggtgttcctggccaccgtggcgctgctgggcgccacgtcgctctactcgcgctacgagtccgcggtggagagcctggtggaccaggtgcggttcgccgtggtgctgtccccgctgctgctcctgctcgcggtccagtactgggcggccacggccgggtcccggcggccccggggcggcgccctcccgtcgctgctggccggggaccagccctcctggtacgccggcggcggcggatggggccagcgggacggcgcgtcgtcgtcgccgtggggcgtggcgctcgcgctcgccctggtgctgctcctcgtctcctaccagtcgtgcttccgcgacatgtggttcccgctggtcacccgccggtgagctcacctcagtccaggccaggcccttctggcggcatgtatcaccagcttcttgcagtgccgctggacggagatggaggagaatcatcaaacaccagataggatgctgctgttagcaagtggaggcggtgtggcatcgataaacacactcgctgttcgtctacacgggctgcgatcaatatagtagtatagtgtagttattgtaataatagaatactgaatactactaattaaaaaaagggaaaatggcagacaatttttaacaaaaaaaaggccccta

SEQ ID NO: 166229 - DNA, 730 bp, Zea mays
  Clone ID: MRT4577_83184C.1
cacccgtccgcccacgcgtccggagcagctctagcatggcgagcggcggcttttacttctaccagagcgcgggctacggcggggacagggtactcggcggcgccgaggacgacgccgtcccacctcctggtgttcctggccaccgtggcgctgctgggcgccacgtcgctctactcgcgctacgagtccgcggtggagagcctggtggaccaggtgcggttcgccgtggtgctgtccccgctgctgctcctgctcgcggtccagtactgggcggccacggccgggtcccggcggccccggggcggcgccctcccgtcgctgctggccgggaaccagccctcctggtacgccggcggcggcggatggggccagcgggacggcgcgtcgtcgtcgccgtggggcgtggcgctcgcgctcgccctggtttccgcgacatgtggttcccgctggtcacccgccggtgagctcacctcagtccaggccaggcccttctggcggcatgtatcaccagcttcttgcagtgccgctggacggagatggaggagaatcatcaaacaccagataggatgctgctgttagcaagtggaggcggtgtggcatcgataaacacactcgctgttcgtctacacgggctgcgatcaatatagtagtatagtgtagttattgtaataatagaataccccatacccccaattaaaaaaagggaaaatggaaaacaataaatgcaaaa

SEQ ID NO: 166230 - DNA, 395 bp, Zea mays
  Clone ID: MRT4577_83185C.1
attagttctttcttttttttttagtatacttatgtttttcatctaaattccattcattgtagtactacatacatttgtttcagggaagaaaaaaaccgccgcaccgagggagccaacgcggaacaaacgcacacccccccgcggcaatagaaaaaacgttgccacccaggggggaagggctggactcctagcaggggcagcgcggggaacaaaaaaaacagcacgagcccccacttggtggcgagaaaaccgaaccaaagcgggggtgaaacagtgcccaacacggaacaaaaacggcgaggcgggctcccgtacggagaacacccgggcagagcggcacaacacggggacaccgagcggcgacttgaaaataaactttccaaacccggaggcgg

SEQ ID NO: 166231 - DNA, 596 bp, Zea mays
  Clone ID: MRT4577_83186C.1
cagcaaacggataataacttaatttctccacgatggaaagaaaaaaaaaacatgcacaggtgggcacaggaatacacagagttcttgttccggttaacaaaacggcccatctgttagcaccatccctgaagagacgactaataggaacttacagagaacctaggcttgggcatacatgaagacatcccaggatgaccccctttcttacaactggcatgtttctgaccagccactgatgtttaggacctgctattgagctgcatggatgtactgatcacctgttagtagatggcagcctgctcaccagctatgagctgaccgaccgataggatccactgttgttatagccgtgtacaccaagaataccaccatggactactgtactgttatcgattccacgatacaccgcgacgtaatcataaatatcatcactggcactaaccacactgactgtgctgttcttatcattgactcaaccactgttggttttgaggctggaatgtccaacgatggcccgtcccgacatcatgctcttcttgctttaacacttggagcgacagacatgacttcttgctgcaacaagatggatgctacta

SEQ ID NO: 166232 - DNA, 295 bp, Zea mays
  Clone ID: MRT4577_83187C.1
gttcgtgcgctcatacattctacttgaccatggggttggcgatgatggaaatggagctcattggatatgccctcatctactgagtgacgggtagtcctggaggatccagcactctgggggcgacaactggggggataacggattaatagtagagggtgtggacacaacaatccaagaatgggcagcgtacataccatgagctataccggggccagagtgtaaccctcgaaggagacaactctgctgaacgatgataagcgagacatcagttattgtataactataacccctgcta

SEQ ID NO: 166233 - DNA, 612 bp, Zea mays
  Clone ID: MRT4577_83188C.1
ggtgtgagcaaaatccgtacgtcatcgtctccagtggtgccattctccgtggctctgcacacggtcggggactcggcggccttgctggatcatttgtgccgccaaacgggtttacctgctccgcctccgcccagccagcgccgccgccgctgccgctagcgctcccctcaggtaaggaaggaggcaggcgaggatgtcgcaccgtaaattcgagcacccaaggcacggttcccttggcttcctccccaggaagcgatcctcccgccaccgcggaaaggtgaagtccttcccgagggatgacccaaagaagccctgtcacctcaccgccttccttggctacaaggctggaatgacacacattgtgcgtgaggtcgagaagcctggctccaagctccacaagaaggaaacttgtgaggctgtgactatcattgagacccctccccttgtcattgtcggacttgtggcatatgtgaagaccccccgtggcctacgaaccctcaactctgtctgggcccaacaccttagcgaagaagtgcggagaaggttctacaagaactggtgcaagagcaagaagaaggctttctccaagtatgccctcaaatacgacagcga

SEQ ID NO: 166234 - DNA, 283 bp, Zea mays
  Clone ID: MRT4577_83189C.1
cctcatttgctcaaacctccattattacacatttcttcccaccaattactaaaatggccggggagcacccaactctgcaagcgggtgggctccaacaaccaatcccggccaccctcttacaacaaccaatttcctacttgcaacaacaatccttggcacatttaacaatacaacaccatggaactcaccaccaacaccaattcctaccacaactaacccacctagccatggttaaccctcccgtctactttcatcagcactcgcttgtataaaacccacttgc

SEQ ID NO: 166235 - DNA, 1412 bp, Zea mays
  Clone ID: MRT4577_8318C.1
cctcgaggccggccggggtcttcccacatatgagtatatgacatatccccactctagccaagtagccagtcctctctccactctcctctcgcaccaccaaaaaaaccggccccaccgttcgccatgagctccgaagcagaatgcgcagctccagccgccgccgcgccggatggggcgggcggcggcagggtggagatcgacacgtccgcgccgttcgagtccgtgcgggaggccgtcgaccggttcggtggcagcgccgtctggagctccgacctcgtcaggcgcatgttcgcgccctccaagaaacatgaacactctgaccaagctgcagaggccatcaacgccgaggagcaggctgcacagctagagaacgagctggcagttaaagaaagggagactcttgatgtgctcaaggagctggaggcaaccaagaagatcatagcagacctgaaactgaagatacggaaggaagccactgaaacatcccctgaagaggctgctgaccaggtttctgaggcgggagctcaacagcagaaacctgaaaacaccaacattgatgtggtggtggacatggaaggtgtagaggagaaccattcaggttcggttccggtggatctcgagcaggcgaaggcaaacctgaacagagctacatgtgatctggctgcggtgcgggctgcagtcgagctactgcgaaacagcatagcgaaagagaaagtgttgcttgaaagagcccgagagaagctctcctctgatacttcgtcggtttcttctttggaggatgacctggatcagacagcgcaaaagatggaaacgctgaaggatctgcagaggagacgcaaagacccctcagatatttttgtagagatcaagaaaatgaccaccgaggtgcagcagctcaggagcatggcagacgattcgaaatctgaggcaatggtgttggctgcagaaatcgagcaggtaaaggccagcatttgcacggctgaggtcaggtgcattgcagccaggaagatggaagacgccgctagagcagcagaggccctcgcgctggccgagatcaaagcgctagtgagcagcggaagttctttcgaaggagacaccgcttccgatggaggaggggtaactctctcgatggaggagtatttcaagctgtgctcccgagctctggaagctgacgaaagctccaggaggaaagtggagaacgcaatgctgcaggtagacgcagctgacgattcagagtccgagtctgtcaagaggctcgaggatgccagagtggaggtcgaggagtgcaagaaggcgctgcaagaggccctgaggagggtagaggctgcaaaccatgggaagtttgcggtggaagagattcttcgtagatggaaatctgagagcgggcacaagagggcgtctcttgggtggct

SEQ ID NO: 166236 - DNA, 438 bp, Zea mays
  Clone ID: MRT4577_83190C.1
ctgaatgactctaaagcaaccttttatcatttgcattgtaccaaatttgttgaccatgcttgatgtcaggtttcaaagcagccaacatatgaggagagacattgttctaagtaaatcatgtgtgcaataatgaagtttggttccgtaataagatgttttcttattttaagtgcctcgtgtttggttagatttagttatacacacaattatacgtaggatgcactttcaggttgtttgtttggtttgcgcacattgtaagtagctttggttgcttgtaagagaacttgatttcttgccctttaaactggaaggagaaagttatttatagtgtcctgttaaacttatctgaaatgcacactccgagtctccaatagagttcgcgagttcttttctgctatctgttcggacacatacttagtgatcaagaacaattttaaa

SEQ ID NO: 166237 - DNA, 243 bp, Zea mays
  Clone ID: MRT4577_83191C.1
tttgacaaactagctaaaatctctgttttcaaacaacttttggtatataatactacagtttttgagaatactgcattattcttccaaaactgtagtattatataccaaaagttgtttgacaaactagctaaaatctctgttttcaaaactaaaatattacaaatactgcagctcttttgacgtgaacctgaaggagtaccaaatttccctatagtgagacgaattaaaccttggcgtaataat

SEQ ID NO: 166238 - DNA, 380 bp, Zea mays
  Clone ID: MRT4577_83192C.1
tgacgtcgcatgcacgcgtacgtaagctcggaattcggctcgagctcctatcgtgtcgggcatgcagagcacggatggcatcattctcgataggggatgcgccgggcgcccactccctagctacgttagtggacgtcacggggccgcagcgtgctgaagcaccggacattcgatcctttggcgctggggtctgtgcctgtccagacgagcctgcctactggcctactgactgctagaggaggagctccgcagatgcacattgcgacgaaacgtgaggctggctgggactggcgcggcaggatgacgtacactttccataagcactctgagggatacaaacgacagctgaagctggcggtgcactttgtaatctggaacct

SEQ ID NO: 166239 - DNA, 607 bp, Zea mays
  Clone ID: MRT4577_83193C.1
accctccggcctgtccggacctcagttacccgttcccactcccagccgggttgccccgccgcttgcggttgcagctaccagagccgagaccgagagactagagagcctgagctagacacgcagccagcaagcgccgagtcagcgagtccgacgacgccatggacgccgtctcctgcgcgggcgtggcgccgcagagcgcgctcctgtcccacacccactccttcgccgacgcggccatcgcgcgcgcgctgcacttctccctctccgatcacgccgccgcggacccgcccgccacgacgacggcggcgatgctgatgcaaggcgccgtggcagcgacggactgtaccccgacgagcgcagcggcgtcgccgtcctcgttcgcgcggtgccggctgggcccggcgggcgggcacgcggggaagcggcgccggccgcggccgtccaagcgcgcgcccaccacgtacatcagcaccgacgccgccaccttccgcgccatggtgcagcgcgtcaccggcgccgacgaggccgacctgcagccgccgcagcaggacgggctcggcctcggtctactcctgccgcaccttggtgccgagcggtttctccggcg

SEQ ID NO: 166240 - DNA, 1248 bp, Zea mays
  unsure (1)..(1248): unsure at all n locations
  Clone ID: MRT4577_83194C.1
ctgcatatataattgtgtatttttgataataccagtgaacaaaactgctctctaccggaagttacaggctcccaactctgaatggtagagagaaaagaggcctcaaaaagcgtaaacccccaatgttcactctctagtgttacataaggtacaaaactgaacagcattggtacaaaaactgcacaccattgaccacagaaagtctctaagaaatcaatgcttccaagtattcgtcgacatatgcaaggcatggccaatgatcggtccttatcctgaccaatgttgaggcactgcctacctccatcagaaacaggaggtgatacctgggtggtaggaatatcataacacgcatgatacccatctctctcttgcttccatggccatacctctcagcaccacccccaatctcatcgtcttctatgatctgaagctggagatttctgtccggtgagtacggaacaagtgcgtcagcacctacactggcatctgcaacattttcttcncacatgacgttcttaatgattccgtttcctctcaggatggttacaagtgaaactccagaaacactgacaacaaaggaagccagatatctttcaacagatccaatcaaaacctttggagttacctccaaaagtttaacagaccgagttccgttaatggcagctgaccctttccctccactcaaagggaaagtttctcgaccagtgttagtagagctatcacaggcctgccacaaagcttgaaacagatcctggtagtacatagccacaccctctcttggagtatcaggtggtacgctggcctttaaaaacatgtcctcaaagccaactgtaatgggtttaagcggccctgataatacatggcagttctctgtgtttgcttcaactgaaacatcaataagaccaggtgaaggctctcgaggttccagttctatcatcactgaagcacagtaaccggattcttccctgttctgattatctacgggaacgatgtccataccagaacctggaggttcccctagaatgaaaggaatatgacatgatggaattttccctaaactgtgcacttgatgaaaatgtaattgtcactgcataaagggcaggcaactcatcagccccatcagaatctgaaactggcaaatctaacccccacgcattgttaaaggctctgtgtcgaattaaaagtgcactgtatctgtatctgaaaccagatgaggaagattcccggccggcctcgaggtacccaatg

SEQ ID NO: 166241 - DNA, 369 bp, Zea mays
  Clone ID: MRT4577_83195C.1
gtgttaaaattcttttttagctgtgttttttttcttttcttgggggcgaaaaagattacttattcttgttagcccaaactgaatccttgtacattccgccccgttgaaccaacaaatcaaaggatgggacacgactggagttactttttcgtgaaaccgttctttttttgcccactgccaaataagatgattcttctaatacccgcgaccacgtacgaaacgatgcctggcttctacttcccaccacttgggaaccggtttggttttgatgccccacagacgtcccaacaaacattattttcttaccggaacttgcaatcggggggcaccccctacgggaagcccttggaagcgcctcagtattgtttt

SEQ ID NO: 166242 - DNA, 615 bp, Zea mays
  Clone ID: MRT4577_83196C.1
cctcgaggccggccggggacgacacttccctccaattgataccctttcacgcaaacgatcttcacgcccacgtttctcgcaatggcctcgaaagcatttggaaacgggctcaaggagctacgcttcctgttttgccagactagcgagcacagcgctgcgacaaggaacttcctcacccgaagctatcccgccatgaagaaggccaacccgtcgattcctattatgatccgagaagccagcggcaccgagcccacagtctttgcgagattcgatttcggaaaggagaggaagttgccgctcaagggcctcgacgacaaggccatcgagcaacaagtatcagaactggtacagaagggcgcatgaggatgtgattggaaaaaatagcaaagaaggaacgaccaaaagggacgacatcacatacgattgaattcaaaggaagccaccgtaggctattctctgtatattcgccctcgacttaaaccatacaacaaagtcatcaacttgattctcctcccttccttcccttttctttcctaacgaccacataccccatacccctttatataactaccaatccaaaaaaaaaaaaccaaaaaaaaaaaaaaaaaagcggcc

SEQ ID NO: 166243 - DNA, 612 bp, Zea mays
  Clone ID: MRT4577_83197C.1
cattgggtacctcgagccggcgggatagtcttgcatcatttctccggatcgcccctcattcacgagcaacgataatccgcaatgctaatttgttagttacacctctattcgacgactagtcctgtcggattccttcacaaactgtgagactcgataactgcgctactgtggtacctcataacataagaggcgcacccaaagttctgctgaagtgcccattgactcctgtccttccgccgatggtgaagaatacgaaaatctcggatgatacctgatacaggacgactgtcgctactgatgatcgtttcgtctacaggcgcagactcctatctacaagagaatgttttagtcttagcactcagaaaacacatcatgaactctcagtgctgggaccgagacggactgagcaggatgacactaacaatggcgccaggattgtaaccaaggttctcttctagccaactgacataccatctagcttgtggtgccgcaaacatgacggctgatgcgtccgtggtacttgccgatctacaggttcgcgtcgctaacctgagatacctctattgcactgattggattaatgagaacacgtgttatgcgtgcaggtcatga

SEQ ID NO: 166244 - DNA, 381 bp, Zea mays
  Clone ID: MRT4577_83198C.1
ggaaaaagcattggggggcgggggtacacaaaaaaaaatttcagggacaaggaggggaatataggctaaactaagaattggacggggaacgggtgggccaggttaaggggctgggataaacaaaagggggggggccggatcagggaaaaaaaaggcggaaaaggctggggaacgaaaaaaaaagctcttttgggggggtagggggggaaaaaaaaggggttcttggccctgaacaagctgggaaaaacgaattttatctcgggccttaatcggggacagaacatctttcccatgggggggatacccgaaaacggaaaatggcccctgggggaacgatattcctcctaagccaggagtttctctggtcataaaaaaagaaaa

SEQ ID NO: 166245 - DNA, 358 bp, Zea mays
  Clone ID: MRT4577_83199C.1
ttggttttttttttttttttttttttttttttttttttttttttccgcgctaaatcggttcattctttgggctgaattcccaccagttgcagtgtccaaaagggaagagcaggcttttagggccagacctcatggactcaattctcacacccagaatctcagaagagagatgcaaaaaagaacccggggggggggattcatcccttagatccagcagaaaaaggaagaccttaagaaaattcccgcgccgggggaaagaatgctccaaaggggggggggggcttggtttcaaatgggttttatcatttccacagctcctccattggaataccacgctcctaagggacatccttgaact

SEQ ID NO: 166246 - DNA, 317 bp, Zea mays
  Clone ID: MRT4577_8319C.1
cccaaatgctacaaattaacagacaaaacagtcattggatgtagcggatttcatggagactgtattacgctgacaaagatctattgaagcaagactaaagatgtataagcattccaataataaggccatgactacgggggcaattgctgcaatgctgtctacaatcctgtattcaaggcgcttctttccatactatgtttacaacatcatcggtggacttgatgaagaaggaaagggggctgtatacagctttgatccagtagggtcttaccagagagactccttcaaggctggaggctcagcaagtgccatgctac

SEQ ID NO: 166247 - DNA, 1515 bp, Zea mays
  Clone ID: MRT4577_831C.1
ctggggatattgctcgcaagttcataaaagatcaggagctactctccttcatagatgctgagtgttttattgtgagcacagtcaatgccttgcaaacacccatgataaatgcaagcatggtcttgtgcgataggcactttgggggaattaattatccagttggtggcgttggtggtatcgcattatccctggcagatggccttgttgaaaagggcagcgaaatccgttacaaggcgaatgtaaccaatgttgttcttgaaaatggaaaggctgttggggtgaggttgtcaaatgggaaggagttctttgctaaaacggtgatatcaaatgccactagatgggacacatttggaaaactcttgaaagaaaaagaacttccagaagaggagaaaaactttcaaaagaattatgtcaaggcaccatcattcctttcaattcatatgggtgtcaaagcatcagttcttcctgctggtactgactgccaccattttgtacttgaggataattggaataatttggaaaaaccctatggaagcatatttttaagtattcctacagttcttgatccatcattagctcccgaaggacaccatatacttcatatatttactactgcaggcatagaagcctgggagggtatttctaggaaggaatatgaagagaaaaaagagatggtggccaacgagattataagaaggcttgaaaagaagttgtttcctggtcttcaagattcaatagtcctcaaagaggtaggctcaccaaagactcaccggagatttcttgctcgaaatgatggtacatatggaccaatgccgcggggtaaacccaagggcttacttgctatgcctttcaatactacttcaatagatggcctttactgtgttggtgacagctgttttcccggacaaggtgtaatagctgtagcattctcagggatcatgtgcgctcaccgagtcgctgcagatattggactagagcaaaaatctccggctctagatgctggtcttcttgggctactcagatggttgagaacacttgcatagaacgatatcagacagttgaaaatggacttcatttttccccccggaaggctgatgtttcaccagagttaggattctgcacgatctgttatgatgatcttgttatctgtaccatctcagcatcgatttcttgaaactcctaacggaaaaaaaaaggaatacgaatgggtgtacaggtttcagattttgaattatatgattacggtgtcagggccatggcatattggtatgcatataaagactacatcatagagtaaccagatggtgtacatcatctgattaccgcaataagcagagcactacatttgggagcaatgtaaatcatgttacctaggattttgaaagttctgttttgagatacccttcaactttctgaatatgcataagcttcattgttcgtttcttaagccatgatgaaacctagaatgacacatcatctaagaaaatttaaaactatgatgaaatagtttcacat

SEQ ID NO: 166248 - DNA, 107 bp, Zea mays
  Clone ID: MRT4577_83200C.1
gcggacgccagggcgacgccacgcgtgcggaattctcccttatcctgcgccgccctctatatactggggacgactgcgcggctggggacttataacactgatcggag

SEQ ID NO: 166249 - DNA, 461 bp, Zea mays
  Clone ID: MRT4577_83201C.1
gtactccacaaataggtaacttgcatcaaatcagattgtccgtctcttttaattgcgaccttaagatggtggcaacataattttaagtttattgtatctaatgtttgtaacgcgatggaggtaaataagaatcacaaatcaaatttgaaccaatgtcgtagttataaatatgtctacaaacgtctcatatttgttttgccattctgatataatggttcacatgcatgcaattttggtataaatttattctatgataatgtgatataaaatatgtcatctaagaggaagtacattcttcatattttcctcatttccatataaaattcaaatttgtttaaaaaattgaacataaactttatcaaattagttttggtgtaattttgatgtcacactcatgcttatatatacttcaaaattttgcaaatcaattctggagtcaaattgccaaaaaaaaaaaaaaa

SEQ ID NO: 166250 - DNA, 141 bp, Zea mays
  Clone ID: MRT4577_83202C.1
gttcctttgtttttttttatggtcattggtattagcgtgcctaggttcgtttggaataaaatggtgcgcgaggcttttaacgtaaggaactgcaggtcccgaacctaggggacagccggcaggaacaccaacctggtttgc

SEQ ID NO: 166251 - DNA, 194 bp, Zea mays
  Clone ID: MRT4577_83203C.1
cagaggcacagactagactacagagatgaatgacggaacgtcgtctgggggaggggcctgcgctgtattcatttatctgagggggacttttactcaatgctcatataatgctcatactctcccctctcataaaagtcacatctataatgaattcaacttttaatctatatttgtttgcctcgatttttctctca

SEQ ID NO: 166252 - DNA, 681 bp, Zea mays
  Clone ID: MRT4577_83204C.1
cttgaacctcaacatcaacgccgccgttggatagagtaaaattacaaacctcaaccgccacatcagcatctatgtaagctagctagagtttgttatatacacagggaaggtgaggaggaggagggtcaggtgccagcagcagctcaaatccatccgactactagtataaatgaagaatctcaagtcttccctctcctctcctgtcctctcccccaccgcacccgctcttctctaatgtacacttcggtattcaaaatgctattacaccttagggatcaaaattgtgcagcgataacacctatccactccgttacagattccaacctcctggcagcctcagcctcagctcagctgggccacgccccagcctatggagacagagttgggagcaacatccccacatgctgagcgggtgttgctcagtttctcagctactttgtcactcggctaaaagggtaccacgtatggtaaagcaatgacatcagcttggtcaattttcagagcctgagcccacacttggggggcttcatcagcctcagccgctgaactgggcttccttgatttggtgccacctcggtcgaacagccagtcctcaccttcctgcccaggcaattccatcatttgaggtgcttcaggaacgctgtatatctggctaagatcttgcagtcggggtgaggcgac

SEQ ID NO: 166253 - DNA, 237 bp, Zea mays
  Clone ID: MRT4577_83205C.1
gagcgagcgtctctcgcgccgttcacatatgacgcggaccgtgtctgtcgcccgacgtgacccaacatggcaccgacgcagctgcttggacgaccgcggggcaggtgatcgagagccctgacgccgcggccccgcagggcgaccagctgctggcgccccaccagctgacctctctccgccgcaacccctgctgccgcgtagcattatgctgctcttgatctctgctcaccagacaat

SEQ ID NO: 166254 - DNA, 1589 bp, Zea mays
  unsure (1)..(1589): unsure at all n locations
  Clone ID: MRT4577_83206C.1
cagaggaacgcctaggtcatccatcccaagcccgagcttacaatccggagaccgaatggaattgtacggccgcctaaaaacatttctgtctctgctaagaaacctgatgcaggaggcgtttcacctgctattggtaaggaaaaggaacaaggtggaaggttgctgcaagcaaatatttcaactgatcagaaactggttatgtcaaaaccaccagctgtggagaaagctgcagacggaagtgctgaaaggacggagaaggtcagcagagatggggtgcctgatgttgccaagaaagaggacaaaaagagtgaccggcctgagaaaaagaaaaggaaagagaaagataaacacaaagagaggaaaaaggagaaagaggcaaagaaggagaaagagaagcataactacaaggagcatgataagacaagagagaacaatataagttatccggtagatagtcttaacttgaagccctcggcccctcctgtagccccaccagttgatggcggaaaatctgttgtgcccgatgagaacctgaagaagcgaaagaatcatgaaacgaatggttacttacaaaaccatcttgaaatgcggcctacaaagttgccgagaccagccctncccatcaatcttgtggagaatggtacagcatctcatgtagccgcgccactctcttctgtgaagccggccgggaattgaaaaggctgaaaggctgcacaaggaagagaagatgaatggcaaccaacaggctgagcgagctccagtcgatccggtggctgcctatgagaatggcataacttctaggaagtcgcctcaccccgactgcaagtatcttagccagatatacagcgttcctgaagcacctcaaatgatggaattgcctgggcaggaaggtgaggactggctgttcgaccgaggtggcaccaaatcaaggaagcccagttcagcggctgaggctgatgaagccccccaagtgtgggctcaggctctgaaaattgaccaagctgatgtcattgctttaccatacgtggtacccttttaggccatgttcgttcaatccctatggatgagcacaaaacgaacatgaccttagccgagtgacaaagtagctgagaaactgagcaacacccgctcagcatgtggggatgttgctcccaactctgtctccataggctggggcgtggcccagctgagctgaggctgaggctgaggctgccaggaggttggaatctgtaacggagtggataggtgttatcgctgcacaattttgatccctaaggtgtaatagcattttgaataccgaagtgtacattagagaagagcgggtggggtgggagaagacaggagaggagagggaagacttgagattcttcatttatagtagtcggatggatgtgagctgctgctggcacctgaccctcctcctcaccttccctgtgtatataacaaactctagctagcttacatagatgctgatgtggcggttgaggtttgtaattttactctgtccgacggcggcgttgatgttgaggttctgttgtcgtgtcacattgctgagttgttttgtttatcaggctgcttgctgagttttg

SEQ ID NO: 166255 - DNA, 415 bp, Zea mays
  Clone ID: MRT4577_83207C.1
ctcgacccaagcgacgcattcacagcagcatcaaaagcagactcatgtcataacggcggcagcatcaaacatcagcgggggctatcctacctggccgccctgtaagagctgctacagcgaccattattcaaccatgctgacaagctgctataggtttcctatttgcaacagccatatcaacaacggagtctgctgcatgtgaaataccaatagttaaaccctacatgatacaacatgccatcatagatcgcatctgaccattatcagcatcagcaattacacacttataagcagtatgacagcatgaaccttggtagcatctatagacacacacaatcagggcacatctactacaacactttgcgttacgaaagcttgctgttaatctgagaaacaggatgtcattcaatcaaac

SEQ ID NO: 166256 - DNA, 220 bp, Zea mays
  unsure (1)..(220): unsure at all n locations
  Clone ID: MRT4577_83208C.1
ataaatatagctcttcattcacacttcaccttatactaatctctacctctttgaaaaaaaaactgcatcaacaacaatctgcattcaagataaaaagaaacaaaaaactactccaaataatttaaccacgaacgatgtctataacantcacacaattcaanaaacaacaaacaancattctanaaccanaanatncctccccaatctcaannnctnatct

SEQ ID NO: 166257 - DNA, 449 bp, Zea mays
  Clone ID: MRT4577_83209C.1
ttttggaaatgtaactggttatttctggttggccacatacattatccaaaaaactttattattgaattacaactaataagcaatccaaaagagggcaccaccaatgatgtgttgctggtaagaagctgctgggtggggggaagcaagccggacaaagggcaacaattgttgtacttgtaagagggttgcggggctagccgcaaactgctggtaaaaaggcaacaactgttgctgtgtcaagaaggaagcacggcttgctgcaactagctggctaaatgggagtagcatttgctggtgcaaataagcagaggggttcagtgcggccaattggttaaatggaagaagccgctagtgcttacagtaggcaggagctagctggctgaatggtaatacctggtgctgcaaataagcaacacggttcaatgtaaaccgttggctcaatggaagaa

SEQ ID NO: 166258 - DNA, 866 bp, Zea mays
  unsure (1)..(866): unsure at all n locations
  Clone ID: MRT4577_8320C.1
cattgggtacctcgaggccggccgggacgattctcccgctattcacactgtccaatatgtctttcgaaaccacaggtaccattgcctcctttgggggcaagcttctcaagttgaagcacaagtccgagagcacaaacacagacatggagcttaacatgttcctacctccgcaagcactcaagtccggagccaaggtccccgttctgttctacctctctggactcacatgtaccggcaacaactgctcagagaagggcttcttccagcacggcgcagctaagcacggcattgccgtcgtataccccgacacatcaccaagaggtcttcagatcgaaggtgaagatgaagcatacgactttggatctggcgcaggcttttacgtcgatgccaccaaggacccatggtcgaagggctacaagatgtactcttacatcaccaaggagcttcctgaagcgttgttctcatccttcaaagaactcgactcgagcaaagtcagcatcacagggcacagcatgggtggtcacggcgcattgacattgttcctcaagaaccctggcatgtacaagtccgtctccgcattcgcccctatcgccaaccctatcaactgcccgtggggtcagaaggcattcaagggatactttggcgaagaccagcaacaaaagtggaaagagcacgacgcgtcagagctggtaaagcaatggaagggtcctctggaggtgctcatcgacgtgngcaccggagacaacttctacaagcaaggncaactacttccagagaacttcgtcaaggcagctaaggaatctggcaacgacaagggcatttcactacgtatgcagnccgactacgaccacagctactacttcatg

SEQ ID NO: 166259 - DNA, 193 bp, Zea mays
  Clone ID: MRT4577_83210C.1
aacattttgtggccaccggcgacccggcgcctgtattggccatttttcaagcagaagcccttacaaacgcggatggcccacaaaaacacaccaacccaacatcgggagaaatattggcgtccgggagaataggctctgtacgggcgcgggcttttaccaacacaaaaccattttcttcccttagggacccctg

SEQ ID NO: 166260 - DNA, 207 bp, Zea mays
  Clone ID: MRT4577_83211C.1
ctcactcctcaccatttcccaaaccctacccaatcccccggcggccgccgccgcattgccgccaaagttgacccgtccaagggggggggggctttcttccggtgaccggccgggagggtcggcccggcttcttccttggcgccaaaaatcggcccgttcggcttttcccggaaaaaaatcgggaagaccatggccaaggaaacggcc

SEQ ID NO: 166261 - DNA, 246 bp, Zea mays
  Clone ID: MRT4577_83212C.1
tggccctggacctttgggctgtttagtgctggcgattaggttgtgccggattggacggatgagggcatcgtggctagtgtcggatcttcggagtcgtagttggattcgtggttcggcttgtgggtgtatatgccttgggttttaattgggtctattatcggggtgttcgttacttatgatgtggatcctgggggggtggttgcgcctacgggttttgggtactgtcatgagggtctgtgcctggtc

SEQ ID NO: 166262 - DNA, 254 bp, Zea mays
  unsure (1)..(254): unsure at all n locations
  Clone ID: MRT4577_83213C.1
aaaaaacaggacgggctggngaagcngcagttgncttatcaagggaggaaggggcagcncgcgancagcgccgagancnacgaggggacaccggccccccacgncgncgaggagaagaagncggcaggcgacaccccggagaacgagaagacccgcagcaagggccnaagaccnacacncagcgacaacngcnggagcagccgancngaggagaacacggcaccgncaggggngcagccancaaaacngaagcc

SEQ ID NO: 166263 - DNA, 459 bp, Zea mays
  unsure (1)..(459): unsure at all n locations
  Clone ID: MRT4577_83214C.1
gtcactaaaacaccacaccttggggctagcacaatagaagcgcaggtttatttgctgctcttttcctatcaaactttatgtttgtaccgcgtcatagcttaaaaccctttttacctcgtactgaacctctgcaggagggggtgggcctcgaaattgcagaggctgttatcggtgcactgcgaggagagctggctgccacggctgtcaacgccccgatggtccctgccgaggttctatccgagttatctccatacgttgtccttgcggagaagctgggccggctggtggtgcagctggtggccgttggcagcgggatcaaaggcgtcagggtggtctactcgtccgccagagaccctgacgacctggacacgagactcctccgcgccatggtcaccaagggcatcggggagccgatctcgagcgccttcgtcaacatcgncaacgcggactacgtccgcg

SEQ ID NO: 166264 - DNA, 475 bp, Zea mays
  unsure (1)..(475): unsure at all n locations
  Clone ID: MRT4577_83215C.1
ggacgcgnggacggacgcgtgggcggactcattgcaagaatacaatgcccatggccanggccacccaagcgggcgcggtcacgcgccacctgggggccgccaccagcgcgccggaggcgaaaacgcggcagcagagcaccgcagcagcgcagccgacgacgacctcccgcgggccggccccgctccgcgcgtccaccgaggaggcggaggaggcgcctaaggggttcgtggccccgcagctggaccccagcacgccgaccccgatcttcggcggcagcacgggcgggctgctccgcaaggcgcaagaggaggaattctacgtcatcacgtggacgtcccccaaggagcaggtgaacgagaagcccaccggaggcgccgccatcaatgcgggagggccccaacctcttgaagctggcgcgcaaggagcagtgcctggcgcttggaaccaggttgcgctccaagtacaagaacacct

SEQ ID NO: 166265 - DNA, 595 bp, Zea mays
  Clone ID: MRT4577_83216C.1
gccaaggttgccatctctgccccctccgccgtgctgtctccatgcatcgcctgcagtcgcttgcatcgctgccgtctccgtctcctaccccgccatacagacccatgccttcttcctgcctccgcgggccgtcgtcacgccatgaatgcgaaggtctcttcgccatcgagacctccgtcttcaagaaggaaaaggtctccttggctggccatgaggaggtttgatttgcaggcctagccacttcctccaccacctacctcgccatcgcccgcaaaaccctaaatcctgttccctccataggcacagccgccacctcgatccccttctcttccacgcaggctccatgccttttcttcgtctctgcgggccgctgtcgcgtcgtgtctgcgaaggtacctcgtcgtcgatcatcacgatgccaaccccttcgacgagggcagggccaaagacaaccccttctctatgagcacaaaacccttttcacttactccagaaattttgctaccaacctaggctaggtggtttggtagatctagagattttaggcgagtatccgatcaaccgtggctgttggattgtagaatggaggaggcgg

SEQ ID NO: 166266 - DNA, 353 bp, Zea mays
  Clone ID: MRT4577_83217C.1
cggacgcgtgggcagggccaggatttggcggcggcgatggccggcggcgaggccaggaaagggagcggcggcggcggcggccgaggagggagcccatccaacttgtacttccccaatggcttcccataataagtatttgatttcccctcatcaatcaagcaagcaatgcctttcgttttctttttatatatccatccaaaagatgatctttctctacctctttcaattattatatctgttggattggatctttaatttgcattgtgaggatgatggtcgtgtagctagctactacagtactatttaacgagctaggacatatgagccagcaagtaatgcaagaatttcatggt

SEQ ID NO: 166267 - DNA, 334 bp, Zea mays
  Clone ID: MRT4577_83218C.1
gccattcagcatttgggtgaagacggaggtgggttctggacagacctacgctgtcagggagtgcttacttcgcctccacttctgttcctccccgccctggtgctgctccaggtcacatactcgtcctgagccggcttcagtctctccgcgcagaagtctcccggagccatggcctagtactcttatgtgaagtctaccaagcgtgtgctcaagggaaccgaggtgtagagctggggcctgcacgctccggcgggagccgctctcagttctgttcggacgcactccacccccgcgaatccggtggaagccgtgatgcggagagccggcttcgtgg

SEQ ID NO: 166268 - DNA, 141 bp, Zea mays
  Clone ID: MRT4577_83219C.1
gatactcatgcaacttaaaagcatcacccggggggacggtcaaaagagattacatttaccgttcgtttgaatgacaaatccttagccgtgaaaaggctgaagtaaattaaatcaaaagcggtggaggtaaccacccttaaa

SEQ ID NO: 166269 - DNA, 527 bp, Zea mays
  Clone ID: MRT4577_8321C.1
ccggccgggctccactcgcacgctaacgctacaccctcccgattacgtgcacacctccctatcctcatcacgatccgagtcccagtcctccagatgaagtacaggtggtcggccgaagccagccgagtccagagtctcggtgaggaacatcgacgttgagagaggacccgaacatagcccaggaggacttcgaccgcattcttcgtccgcatgaaggagctcaggaagaactacaaggagaagcgccccaatgagaaacaatgctcacacgattgccaaggctgatgacggacatgtgggagatcttgtgtgatgccgacaaggatccctacgtgtcttaggtcgataagatgaaggccgactacactatgaagatggacgccgattgcaacaatgagactgtaggaggacccacattgtatggtgatactgacaagaccaagtacgaggacaacgacgctccacgatgaggtagatgagtgatgtatgacgtgcgaaactctgtgctgcccaagtgcttgcagaca

SEQ ID NO: 166270 - DNA, 521 bp, Zea mays
  Clone ID: MRT4577_83220C.1
tccagtggaagccacatccggcgggcagagagcgcctcactgtgcccgtggatggactgtttggaggcggtcgttgtgactgtgttagcgcaggctgtggcagccatgtattttgccaagctcagatgactgtgcccatgtatccggactcagttacaatcactggaggagagtgctgaatcgctgagagcgagatgtttgaatgtccataaaggttgccgtacgtttactgatggactaggggatgcctcctatggaaatattgcattggccagcatacttgacacatttgaaggaggcctcaatgatccaatgagtgtggctttcggtgggcctgtattgaccaaattcacaatcgccttaagagaacttaggacatacatgggagtactgggcttccaagcatggcacatgttagatgacagattactgaattttgttgacagtgctttacatgatgtgatatgatgctcataagcgcttttacaagggtagcttataatatgacctgattcttgaaa

SEQ ID NO: 166271 - DNA, 765 bp, Zea mays
  Clone ID: MRT4577_83221C.1
cctcgaggccggccggacgcgaatcctccaatctgtccttgccgccgccgcccgatccgggtctgcagactgctcacttctccccacccaacgcggcggcactccttctccctcccccagtgcctgctgtgcgcctgtacttcacaccggcgtcgccccctcctccagaactccccaccggagccaccctcacccgtcacgcactcctccgctgagtgcagcaagtgctgatcagtgggtggacgggagatggtgctgaggcgggcggcaaccgaatgccccaagaaggttgcggggctgaaggatctggtgaacctgccgacccagctgcgagagttcgccggaggccggtcccaaatgtcacatatctccttcttcctcagtgtctggtcgtacatcaaggacaacaaacttcaggacccaacgaataagaacattgtgaagtgtgatgagaagctgaagaccgtattattgggcaggtctaaagtgcaattgtctgaactcccaatgattgttaagctccatttcccaaaattgccaaagtagtgacaacatagtattgtatattgaagttctgtgggaacatgataggatagacagaacactatatgtattgttttgctgaaatttccatttactgtctgtactggagcgatctatacatcgagcataccgattagattgcttgtcattttgatttatcaataacttcgctcatgtagaaaaaaaaaaaaaaaaagcatccaccctttgttccggggaacg

SEQ ID NO: 166272 - DNA, 873 bp, Zea mays
  Clone ID: MRT4577_83222C.1
cactcctaagggcaattgggatcctcgaggccggccgggacgcgaatcctccaatctgtccttgccgccgccgcccgatccaggtctgcagactgctcacttctccccacccaacgcggcggcactccttctccctcccccagtgcctgctgtgcgcctgtacttcacaccggcgtcgccccctcctccagaactccccaccggagccaccctcacccgtcacgcactcctccgctgagtgcagcaagtgctgatcagttcggttagcacactctcttacaaatccagagacacttcttcacagtgggtggacgggagatggtgctgaggcgggcggcaaccgaatgccccaagaaggttgcggggctgaaggatctggtgaacctgccaacccagctgcgagagttcgccggaggccggtcccaaatgtcacatatctccttcttcctcagtgtctggtcgtacatcaaggacaacaaacttcaggacccaacgaataagaacattgtgaagtgtgatgagaagctgaagaccgtattattgggcaggtccaaagtgcaactgtctgaactcccaatgattgttaagctccatttcccaaaattgccaaagtagtgacaacatagtattgtatattgaagttctgtgggaccccctacagtaacttttacttcaaaaaaaaaagttctgtgggaacatgataggatagatagaacactatatgtattgttttgctgaaatttccatttactgtctgtatgtactggagcgatctatacatcgagcataccgattagattgcttgtcattttgatagcatgtttgatttatcagtaactttgctcatggttactgaagagacagatgtgcagg

SEQ ID NO: 166273 - DNA, 158 bp, Zea mays
  unsure (1)..(158): unsure at all n locations
  Clone ID: MRT4577_83223C.1
aacanaacacccgaggctgccagttcgccattggcagccgagcaccaggggctccacaggcgggggctacgatggcgccaagaagtcctggccggaagtgttcgctctcagcctggaagaagccaagaggtttttcttgagccacatgcccggacgcc

SEQ ID NO: 166274 - DNA, 125 bp, Zea mays
  Clone ID: MRT4577_83224C.1
cgagctccagcgcaagctgttctagttctacgacactaaactgaacattaaaggcctattgaactcctgcgtgaagttcattccgtccatcttcgactaaccgccggaagccctgagccacataa

SEQ ID NO: 166275 - DNA, 288 bp, Zea mays
  Clone ID: MRT4577_83225C.1
tatcagcctcatccccttgcccacttctacagctcctcttctgcagcaagatggatagatgctagctcttatagcttgttagccatggccacctctgcctcgtctagcctcctcaagtcctccttcgctggctccctgctcccggccgccacgctgactacaccggcttcccccgttgtggccacctgctcgcgctgcgccggcgtggggcccatctgctcgtccatgtccatgtcctcctccaacccgccctacgacctgactgccttccggttcagccccatcaag

SEQ ID NO: 166276 - DNA, 643 bp, Zea mays
  unsure (1)..(643): unsure at all n locations
  Clone ID: MRT4577_83226C.1
ccgtgaaaaactcttgctcaacaacctcaccacacattggtagtatcacaaaatacacatggttccccaaaaaaaaacgtttagctcgcagcccacactgtcggacatgcatggcccccaacaagcctgaaatagtacgatcggtcgtgcatgacgatggttcattagtagttgacggccgagcacttgcggcggacctcgccctcgttcccggtgagcacctgcgcctcgccgaggcggcgcatggacttggcgaactggtgggcgaactcctggggcttctggtacgcgaacgacttgacgaacccggccgtccgggagtccgccagcagcgcctggtccgtgtccagcagccccttcccgtgcagcaggttcttgtagtactggttgtcgaacgccgtgggcgtctcgccgtccagctccacgtacgcctccgccgcgtcgccgccggcgcggcacttgcgctgcaggaagtcgccgtactgccggtccagcgtgcgtgccttccggcgcttgcacagccccggcctcacggatccgcacgtcgcgcgccccgatcgtgtgagctccggaaagcgcgacgagggtcttggatgttgagacccttcgntctcgaagaaggcgacgagctcggtgacgcgct

SEQ ID NO: 166277 - DNA, 520 bp, Zea mays
  unsure (1)..(520): unsure at all n locations
  Clone ID: MRT4577_83227C.1
ccgggtcgnacccacgccgttttttaaaaaaaacacaaaaaaaaaatgaggtggagggtgcgaaaaaaaaaaaaaaaaataaacagacatggacgaacaaacaccatagataataacctaaaaagcgcatcggcggcccgccttaaaaggcagccccggtgacttactcgggccaggggcgcataaccatgcgcaagactgctgccaagtcttcaagggggggcgcccggtaaaccatggtacggggccgaaaacctcctgggcctgggaccaatgtccggtcagcccacaaactacctgaccggggagttcccctgtgactacggctgggacaccgcggggttgcccaccgacccggagactttagccaaaaaccgccagctctaggtgatccactatcactgggccatgctgggctgcgctcggctgcgtgttcccgttactgttcgcccgcaacggcgtcaagttctgtgaggacgtgcggttcattgtcgggtcccagatcttcatttagggcgga

SEQ ID NO: 166278 - DNA, 317 bp, Zea mays
  unsure (1)..(317): unsure at all n locations
  Clone ID: MRT4577_83228C.1
ccgggtcgatcccgcgtccgcgccggccccggaccgcaggcagaccgtccgcagcaggcgacgggatactggtccccgtcaacctgcagcagccagacaccagcnctgtaagctcggtgatgcgcttctctccccagggtaaaggcagtgcgggcctcctcgcgttctccctgatctcgagagtcgtgctggtgccttcggcgctcccatgtccnggtcgagatcacaaagggaagcaaagtcatcctcgagccccacaagaaaactggactgattaacgttgatcggagtctttcctcatcagttgcgataccctc

SEQ ID NO: 166279 - DNA, 517 bp, Zea mays
  Clone ID: MRT4577_83229C.1
attatgaatcgcagaccaaggcaattccacctcggacctcaaatgcgctagggtacacgctcgagcttctagacctactccgccgcagacgactacagccgatgcccagcgcgcggcgacagcaagggaccgagacgacgccgaggacgaccaccgcctctccatgggtacacaagatatcgtccgggactaacggctacatcatcacgaaatccgtgtcctccggcaccaccgggaccggacgaacctgcacgggcagaccctccagcacaacattacggaagaccacgagtacgactagggtctccaaggagatgacatagctcgcagcgaacatcgcggacatcttgacaatgaacactgactgaaaacctaaggacgatggtgctagcattgagctacactcgacatggacaggagatacgatgatggcttgaagagctccactggacgaagtatgttgctacctggtgatgcagtatcgcagcctgagcaagataacaacttgtcgctctgg

SEQ ID NO: 166280 - DNA, 566 bp, Zea mays
  unsure (1)..(566): unsure at all n locations
  Clone ID: MRT4577_8322C.1
cagttgtcagggcgtcggcccctaggtagctggccctcgactacggagattgtagtctcggtccgtcttttccggcgaggttagtcacctctgccgcagacttgttggaaactggggagaggggattaactggtaacaaattgcttgattcttttctgctgccatgcggcttacaaatagccctagtgctaactaactcttcctaaaaactctcatctaatcttactctcctagacttaatctaatgctaactaactctccccaattctctcatctaaatcttattctctggacttatccaaaccagcttctaatcagcccctggctgtcggcgcccccttgtgtgcgtggcctgcacgctcggccgccctgcgcatgtngngggcgcgcctgcgcttgctgtaggtgcggncccacatgacattccctttgctgtttcgttgcagaaaaggaatgggttaggctctttcgaaagaactntgnaaggtccaaccaaaattcaagtgatagtattnacaccatgataaggccttcatttccaaaatggtattttgtgcatgaagttc

SEQ ID NO: 166281 - DNA, 656 bp, Zea mays
  unsure (1)..(656): unsure at all n locations
  Clone ID: MRT4577_83230C.1
actctcccctccctactgacacatttgagcttgagctagggtttctcaccaccggcggcgggatgggcatcctcgagcaccgccaaaattcctctccgcgacggcatgggcatcaggaaatgacctcactgcctatccccgacgacctcctgcctgaaatcttcctccgcctgcccaccccgtgcgacctcatccgagcctccgccgtctgcgcctccttccgccgcgtcgtcgtcgaccgccccttcctccggaggtaccacaagctccattccccgcccctcatcggcttcctcgattttcgccgagtcttccacccggccgaaccgcctcacccctccgcgtctgcagccaaagccgtcgccctcgccgctgacttcaccttgtccttcctccctaccccagccggtgactggaccatttcggacatctgcggcggtcttgtcctcctcaagaggcgcgactgtgcggagctggtggtgtgcgaccccttgcaccggcggcacctcctgcttcccccaatccctgaattcgacgagtgggttcattcagtggacaagccacgcacgtttgggtgtcagatcctcctggtgngcggtgacgaggaggcttcagaggaggcatttttcagagtgatatatgtggaattcacccta

SEQ ID NO: 166282 - DNA, 590 bp, Zea mays
  Clone ID: MRT4577_83231C.1
ggcagatatgggtagattacagcactaactttcatttaatcaaacttgtttctgctttatcattctatatgcttcaactgaagctttaactcttgtgctgctggaatttctgtgttctgcagatcatttagctcaaataattggtagtgggtcacgatacttgttttggtttgggatttctatggatgcttttgtctagcttatctatgttgttgtggttgcttttacatgtggttgtagggtaagtttggcaattaaaaatcctgtatttaaaactggggacaggtcaaaatgtcattccggttgtgttgatgcaaaatgaaaggtgggctggttttgtcctcctagatgcagaaggaaaggtctgctggttatggagagatcggatgaagggtggagatttgtttacgttcgttggttttgatttgttacatggatattcttatgtcaatcatggtggtgtgaagatagccacctgattaattagaagcttgatgattgtccttgattggaaaaatgatgtagaggcaacatatgtgatgttctggacgtagattgaagctttgactgaactaacttcatggcatgtt

SEQ ID NO: 166283 - DNA, 254 bp, Zea mays
  Clone ID: MRT4577_83232C.1
cccacgcgtccgcccacgcgtccggggatggttgcggctcccgcgtttggttggcgcgggacggcaccccgcgcggtgccatttatttttcgccgccggcatcgtcgactttgcttttttgctgggtcgatgatgattctttagcgaacaagagttcatgatgacgcgtactatgtgaaacgtgtcgagctgactgttgaggctattacacaacttgaataatcaaaacggggatgggattggattggatcaat

SEQ ID NO: 166284 - DNA, 177 bp, Zea mays
  Clone ID: MRT4577_83233C.1
tttacacgtacgttgaccaaacagcgggagggttaggtacggagaccgaactcctagctaatataacgactgcaatcgtctttgaaccgtataacaaggtgaagacgaaccctagtataatagaggtcatgcttttattctttctgagaaaggagctgcaataatatcctgagagga

SEQ ID NO: 166285 - DNA, 371 bp, Zea mays
  Clone ID: MRT4577_83234C.1
gttgtttaaaagcaaaacatagacaatttttcttgacacacttgattgtttgtaatgacattttttaaggtccaattacggttgggcacagtagcagcataaatagacttattttgtcggacggtttaaaatccagtcctgatcgccggccgagagcagaggaagcagcatcacaagtcgggcaggattcccagggccttgccgtactcgaccatgtcgtcgtatatgtcatccagcgtcctgtacctgaactcgaaaccttccttcaccagcttcgccgacgacaggcacactctcggcttttaagccgctcgccggaaagcaggttcgttttgacgccgtactgcgggtacttgttcgtcaggaaacgc

SEQ ID NO: 166286 - DNA, 2697 bp, Zea mays
  Clone ID: MRT4577_83235C.1
atggccagagttcgctctactgctcgggtcgatcgtgagggagacgagaccgaagctgctgacactgttcctatttcgaaagcaatgaagcgctctgggttggtaacaccggaggacatgtctgctgccgaagacatccctgctgccgaagacatccctgctgccgaaacagaacggactgctgttgaagaaactaattccgaagatgactacagtagcgcagtgccgagcaaacctagccacctggacttcggaaagtccaccatctctgaagctgattttcctaagatggtgaagttgggttatcttagtgaagcaaaaaaggaattgattcgttttggtggagaagaaactatcccgaagccaggaaaaaatgaagtggtggttttcaaaagtctttttaaagctggtttaagatttcctctgaacaagatgattgctggtgtgttgaagaaatatgggatctaccttcatcaactgacgcctaacgctatcgttaggctgagtgtttatatctgggccctccgaagccagggggtggaaccattctccgaagttgacgaagatgaagataaattggtccagagtccattagaactgaccttcggagaaacaagacccccatgcaacatgatacgggggagcccgagccagattgctttggctgaatttcgagtaattgcagatcatattggcactagagacttagtgcaggaatttttggccttcagagtatttcctactatgaaggaatgggaaatgccgaaactggagggggagaagaagaaaggggagcttattcggttgccttaccactacaagttcaaaaaacatttcaaagtaccctgccaagaatggctggatacaattgaagtaatgtgcaacgaaattcttggaaattactctaaaaaagaagatcaattgatgacagcggccttcggcacccgtccaaaacgaaggctaaacagggtaatggatgccataggatttgaatatcctgagtatgagcgactggacaagggtgctgaagggcaaaaaagaaaaagagtggccaacgctttgaataaagacgacgaagatcaatcaaaaaagaagaaacaaaaatctgaggcgaaagcatttgcttcgaagaaaagaaaagactcgtccccaaagcaaaaatcaattgatgaggaagagaagacttctgcgacatcttgtgttgctgaaatagagaaaatcctaaaggtaatgactgaaactttgcctatcaaactaagtccattggggcttcatctgacgaagctttttcataaggaaaaggagcccacagaaacaaagacacctaggccaaagaggcaaaggattgttactgtgacaaaagtgattgaaacaacaccgccaaaggcttcagctccgaaggcgcctgctattgaaagcgtaacagccaccgaagctgcaacttcggaggccgcagaagaagctgctggagccaccgaagatatcaatttggaaagtgtggctcttgatatagataaaattctgctagacatggccgcagaagaagctgttggggccaccgaagaggcttcggccccagaggccgagaaaaagaaagaaattgccgaagaaacactagaagatgaaaatttgaattttcaaaacttggttggtcaagaattaacaaaagccgaaaaagaaaaattgaaagaatatgccatttcctgcggctaccgaccaggggcacttctcttcggaggtgttgatgatgagaagctaggctgcatccgagatcagaccggagcaaaggttatcagtactctatcaaagagtatcggtttcccgaagctcgaagccgatattagccactatcgacaacaacacatcgtcggtagtttgttttattccaatttcaaggttattcgtgtacagagtatgctattaagcaaagctttgaggatgcaacaggatttggaagacaaaaagcacgaggttataattgagaatttagaaaataaaataaaagatcaaacaactgcctttgagaagaaagagttcgaactccggacaactgaaggtttactatcagaagccgaagctaaaataacagaactgaatacgaagcttctcggttccgaacaacaaaagctgaagcttaatggaaaacttgaggctgaaatccagaatggtttagctttgaaaaaatcattgatggaccttcaaaacaaatgcttgaaattcagcaatcaatgtgttcaacagctgaagaaggtgttttattcagtaggggccagtagtgaagaatttattccttcggttgaagatctgccaggagccttcgaacacatcgaaggtgagattgatgacctcgatgatgttattgctggacacgacgacttttgtgccctggtagcttctcggggcaccgctgctgcgttcctgaaatctggttgtgagcatggaaaaattatcaacagacccaatttgagcctatcaccagcaattttagatgatattcctaacctcgcccgaagcattgcgaataaatttataaaggtgatatggacgaagggtgggcgagagaaagctggtgacgaagcccgagatcaccttaagctgctaataatacttacatacaggttgaccaagccgaagctgaagctgcaaaatagaaggaagaagctccagagatgttgtcgaagctcgagtagtctgtag

SEQ ID NO: 166287 - DNA, 1991 bp, Zea mays
  Clone ID: MRT4577_83236C.1
atggccagagttcgctctactgctcgggtcgatcgtgagggagatgagaccgaagctactgagattgttcctatttcggaagcaatgaagcgctctgggttggtaacaccggaggacatccctgctaccgaagacatccctgctgccgaagcagaacgagctgctgttgaagaaactgattccgaagatgattacagcagcgcagtgccgagcaagcctagccacctggacttcggaaagtccaccatctccgaagctgattttcctaagatggtgaagttgggctatcttagtgaagcaaagaaggaattgattcgttttggtggagaagaaattatcccgaagccgggaaaaaatgaagtggtggttttcaaaagtttttttaaagctggtttaagattccctctaaacaagatgattgctagtgtgttgaagaaatatgggatctaccttcatcagctgacgcctaacgctatcgttaggctgagtgtttatatctgggccctccaaagccagggggtggaaccattcgccgaaggtttctgccgagtacacgaactgcactaccaaaccaaggctaggggagatggtttgcatgaaaattttggctgctacaactttgcttaccgcaaaactacaaagttcccagtgattagttaccgaagcaaatggtcagcaggatggaaatctgaatggttttatgtcaaaattgacgaagatgaagataaattggtccagagtccgttagaactgaccttcggagaaacaagacccccgtgcaacatggaacgggggagcccgagccagattgccttggctgaatttcgaagtatttccgactttgaaggagtgggaaatgccgaaactagagggggaaagaagaaaggggagcttattcggttgtcttaccactacaagttcaagaaacatttcaaagtaccctgccaagaatggctggatacaatcgaagtaatgtgcaatgaaattcttggaaattattctaaaaaagaagatcaattgatgacagcggccttcggcccccgtccgaaacgaaggctaaacagagtgatggatgctataggctttgaatatcctgactatgagcgactggacaagggtgccgaagggcaaaaaagaaaaagagtggctagtgctttgaataaagacgacgaagatcaatcaaagaagaagaaacaagaatctgaggcgaaagcagttgcttcgaagaaaagaaatgcctcgaccccaaagcaaaaatcaattgatgaggaaggggagacttctgcgacatcttctgctactgaaatagaggaaatcctaaaggtaatgactgaaactttgcctgtcaaactatgtccattggggcttcatccgacgaagctttttcataacgaaaaggagcccacaaaaacaaaggcacctaggccaaagaggcagaggattgttactgtgacagaagtgattgaagcaacaccaccaagggcttcagtccaaaggtgctggctattgaaagcacaacagctactgaagctgcaccttcggaggccacagatgtcgaagctactagagccgaagatatcaatttggaaagtatggctcttgatatagggaatacctgtcaggcatcattggataattgtgtaaataatgaagaaatatgctcaagttagtgtcctatgaataaagaaaagtggaatcatctctcccgatgattcccttgagaggatcgccaatcattttcctgggagttgcatgttgttcttgctctcgcaatctcggcgaccgctgcaaattgaggggcccatctgtgtataaaaaaatctcatctatgaggcccccccccaggctgaaactaattggcccggtgtcggactggtataccccatgtcagcagcatgggccctccaataaacccattcttgtttttaaaaaaaaaaaaaaaaaaaaaaaaaaaaaaaaaaaaaaaaaaaaaaaaaaaaaaacaccaaaac

SEQ ID NO: 166288 - DNA, 438 bp, Zea mays
  Clone ID: MRT4577_83237C.1
tttttttttttttttttttttttttttttttttggtttttttttttttttttttttttttttttttttaagaaaagcacaagccgggcaacattttaaaaccggggttaattcttcataccaaaaagtccccccaaagggggcccttttttataccaattaccctcacaaaaccccttttttttttaaagttgaggcgaggcgtccttttatttaggcgaatactacattaccggattactgatctaccaggccctgtgtaggtaaagcttccttgctagctctttctttggtgcgccaacaaccctgttcttgacgtccccctccctcataaacaagaatgttggcatggcccctacccttaattgctcaacaatggtgttcatttcatccacacaaacttttaagaaaacaacatttggggacttgttggccatat

SEQ ID NO: 166289 - DNA, 1803 bp, Zea mays
  unsure (1)..(1803): unsure at all n locations
  Clone ID: MRT4577_83238C.1
cattgggtacctcgaggccggccgggccgggcaatccgcctcgcccgcagcgcccctccacttcctctctctctctcacggcggcggcgagactgaaggtcacggtaatgaccggcgacgagcagatcgtcaccctcgacgtcgaccgcgacgaatccgtggaaaatctcaaggcgctactcgaagtggagactcgggtgccgctgcggcagcagcagattcacttcaatgggaaggagatgcagaacacggagaagctcagcgccgctggggtccaggacggcgaccttgtcatgatgttttccaccagcgaaaggccatctcaggatggcttaagggtaaatcctgatggaactgctgtgaatcctcaagcttttcaacaacatgctcgaggtgattcacaacttatggcacagctccttcagaatgatcctcaactagcacaagctatccttggggatgacaccactgagctacagaatatcctgcggtcccgccaccaacaaagaacagaactaaaacgtaaacaagaagaagagcttgctttattgtatgctgatccttttgatgtggaagcccagaagaaaattgaagctgcaatccggcagaaaggcatagatgaaaattgggaggctgcattagagcacaatcctgaagcatttgcccgagtggtaatgctatatgtggatatggaggtcaatggtgtacctttgaaggcttttgttgacagcggagcgcaatcgactatcatatcaaaaagttgcgctgaacgttgcgggttgctgaggcttcttgatcagcggttccgagggattgctgttggagtcggtcaatcagagatactaggaagaatacatgtagccccaataaagattgggaatatattctatccttgttctttcaccgtattggatgctcctaatatggaattcctattcggacttgacatgctgcgaaagcatcagtgcatgattgacctaaaggacaatgttctcagagtgggaggtggcgaagtttcagtgcccttcttacaagagaaagacatccccgcacacatacgcaatgaagagaaactgtctaagttagggtctctcagccaagcaactggagagtcatcaaggacacgtgagggtactcccaatgcgccacaacaaacccctcctccaggagctccagctgcaaaccctccacagggaggcgattttgaagcgaaagtcacgaagcttgtggagctcggttttgacagggcgtcggtgacacaagcgctcaagttgttcaacgggaatgaggagcaagctgctgcgttcttgtttggtggttagactggtgggagcagccgttcctggctttgtgttcgctcaaccctttccagggttgagtacttgaatatttgatacgaaagtgattaaagtatttggatactgtttgtccagtgaaaggacttacttttagaggttttatgttttctcttgtttctgagaacaaacatttgttttctgtacctgatacatagactgatagacaccagaatggagacagaactgtgaagattttttttttattaagagtgtttatttgagccaaaaaaaaaaaaaaaaaagcggcccgaaagggcgtctagccgagtttggtagccgagatagntagggtggtctgagtagactttttcattcctggggtttgttattttgagttatattttttttaagttattggggaacctggggctataggaaaagctgcttaagatgtgaatagaattcgaaagccatttaattagttgaacaactaatgggtttcttc

SEQ ID NO: 166290 - DNA, 355 bp, Zea mays
  Clone ID: MRT4577_83239C.1
gcacggattacggggagttcttcatgagctggtactcgcatatgctcctggagggacgggagcgcattacgctagtgatgaccgccccgtgctcggtttccaacctagtacgagaggaaccgttgattcacacaattggttatcgctcttggctgaaaagccagtggcgcgaatttaccgagtgccggattattactgaacgcctataagttagaatgcaagctagcaaccggcggctgtgctcgacgaccgccctctaccgacaataggtcgttcgcgccctacgggtccatgacattgtctcagccgggccggtcgatccgtcgagggggtccagctagaagctccttttcca

SEQ ID NO: 166291 - DNA, 521 bp, Zea mays
  Clone ID: MRT4577_8323C.1
ggttacaaaccaaacatatactttttttttctcaaccatttgtcctacattttttcttaatccctcgaaagctcctatcaatcaatccctcaaaaagatagagaggagcaagtgacattttctccctgaccctgtatccacctccttctgtcactggcatcggggtccccatgaaacgatgccgctgtcgccacgccggctccgcggcgttgcgcatcgccaccaccatcacgttgtcgttgttccgggggtacaacgagaccaactctgttccaaaccaaaccatatactatactccatcaacctggtgggctggtggtggaggagatgctgacgaccatcatatgggctggcatcgtggttggactggtctggagaccttactgctaggctggtatcgttgttgggctcgctccacataactgcatggactagcactcacaacatagagtgcataaaaataaacacgacacccaatagacaggctataaacctcaaaacgcaatcctgttcataaaact

SEQ ID NO: 166292 - DNA, 279 bp, Zea mays
  Clone ID: MRT4577_83240C.1
gataggatgaatggaccacaatagatacttctttaaaaaattgtgttcatgaatggtgatttagaatttagttcaaattaaatttagttaaaatgttcagatgtcgtttagcatcagaagtagattcagcagtccccttctgtcttttttgaatgccattaaatgccatttgaatgcattttaaatgccattaaatttgacccttatcctaatgaaaggtttactttctcttcttgtggatgccatttgtctagctagatgagtgtgtcacagttcaca

SEQ ID NO: 166293 - DNA, 864 bp, Zea mays
  unsure (1)..(864): unsure at all n locations
  Clone ID: MRT4577_83241C.1
ctatccgcctcgcccgcagcgcccctccacttcctctctctctctcacggcggcggcgagaccgcgagatgaaggtcacggtaatgaccggcgacgagcagatcgtcaccctcgacgtcgaccgcgacgaatccgtggaaaatctcaaggcgctactcgaagtggaggtgagcggggccgagagatgtgctaatatgcccaccccaacaatggggatctcaatttcccaattgagcttcccctctgaagctttgctgctactgctttgatctcacattgctggttttgggcgtgtgtgtgtatgtgtgcggccagactcgggtgccgctgcggcagcagcagattcacttcaatgggaaggagatgcagaacagggagaagctcagcgccgctggggtccaggacggcgaccttgtcatgatgttttccaccagcgaaaggccatctcaggatagcttaagggtaaatcctgatggaactgctgtgaatcctcaagcttttcaacaacatgctcgaggtgattcacaacttatggcacagctccttcagaatgaccctcaactagcacaagctatccttggggatgacaccactgagctacagaatatcctgcggtcccgccaccaacaaagaacagaactaaaacgtaaacaagaagaagagcttgctttattgtatgctgatccttttgatgtggaagcccagaagaaaattgaagctgcaatccggcagaaaggcatagatgaaaattgngaggctgcattagagccaatcctgaagcatttgcccgagtggtatgctatatgtggatatgggagtcaatggtgtaccttttgaagcttttgntgacagcggagcgcatcg

SEQ ID NO: 166294 - DNA, 718 bp, Zea mays
  unsure (1)..(718): unsure at all n locations
  Clone ID: MRT4577_83242C.1
ggccgctttttttttttttttttttgaagaaaccatagttgttcaactaataaatggctttcgaatctatcacatcttagcagcttttctatagccacagctcacaataacttaaaaaaatataactcaaataaacaaacccaggaactgaaaagtactactcagaccacctaactatctcggctaccaaactcggctagacgccctttcgctggctcaaataaacactcttaataaaaaaagatatcttcacagttctgtctccattctagtgtctatcagtctatgtatcaggtacagaaaaaaaatgtttgttctcagaaacaagagaaaacataaaacctctaaaagtaagtcctttcactggacaaacagtgtccaaatactttaatcactttcgtatcaaatattcaagtactcaaccctggaaagggttgagcgaacacaaagccaggaacggctgctcccaccagtctaaccaccaaacaagaacgcagcagcttgctcctcattcccgttgaacagcttgagcgcttgtgtcaccgacgccctgtcaaaaccgagctccacaagcttcgtgactttcgcttcaaaatcgcctccctgtggagggtttgcagctggagctcctggaggaggggttttgttgtggcgcattgggagtaccctcacgtgtccttgatgactctncagttgcttggctgagagaccctaactt

SEQ ID NO: 166295 - DNA, 466 bp, Zea mays
  Clone ID: MRT4577_83243C.1
cctcgaggccggccggggcttcctcttccaactgcctcagccccgtgcatctgaacgccaaggaaactggcccccactccaccatggcccgcccacgttgctcggacttcaagccccctgcagttcaactgcatagcagtcttggagtcgcgctcgccgccaagctacgcgttgccatgcccggagaaggctacgcccgtgattctccctcatcgagttcgtcgcaagattgcgatctgtttccaagcatcgaggaatcgacgatccagcttcagcgaccaaatgatccagttcttcgagttctacgagatcgaagaccctgatcatttgtttggtgaaggttgcctttggtgctatctatgctcaagtaaagaagaaggcgtcgaggcggatctccgggagtttcaggacttcggcgagtttgaggattaggctagcgacctcccccagtcagctgcctgtggtg

SEQ ID NO: 166296 - DNA, 489 bp, Zea mays
  Clone ID: MRT4577_83244C.1
ttcgtgctctctgttaagggggccatgaccctggccgacaagctacacatgttggaggtggaaggcgaggacatgcttaagatgcggtacggggagcttgagattcagcaggtgaagctgaacatgcatgagggagacaacaggagagccaggcaccgagatcgatgcccagcactagcaggtggtttaaaagatgagacaaatgcttcaatccaatctcctgtggcatggctttactatatattcatgatcctgatcgattgtgcatgaaatgattagctagcgctctgcgacccatctatcagccggcatgttcgtcgccttgccttggtgctataagctgatgcccttactttgaatcagagcgtaatgactggctcctttggcaagcctcagggcacctgtgctagggtggacattggtcaggtcctcctttctgttcgatgcaaggacaacaatgctgcacatgccagtgaagctctgcgtcgc

SEQ ID NO: 166297 - DNA, 1089 bp, Zea mays
  Clone ID: MRT4577_83245C.1
atggccgaagtacatgaagggatttatggtacccatcaatcggctccaaagatgaaatggttgttgcgaagatctagcttctattggcctaacatgatagctgactgttttaagtattacaaaggatgccaagtatgtcaaaaattcggcgacttacagttggtctctgcagccgaattacatcctatcatcaagccttggcctttcagaggatggagattagactttataggagaaattcatccttcatcatcaaaggggcatcggttcgtgctagttgccactgactactttaccaagtggactgaagtcgttgctctgaagaacatgacacataagaaggtaattgagttcataactgaacatattattcatagattcggcattccccagaccttgactacagatcaagggacttcttttatgtcaaaggaggtatgtgagtttgctgaattatatagaattaagttgctcaattcgtcttcatattatgctcatgccaatggacatgccgagtctagtaatagaacattggttaacttgataaaaaagaagatattcgacaatcctaagcattggcataagattttgtccgaagctttatgggctcacataatatctaaacacagtgctactaaggtatctccttttgagcttgtctatgggcaggaagcagtgttgcctgtggaaataagtttaaatgctgtcagattcgccagacaaaataatctaatcgtcgttgattattataattcaatgatggataatattgatgaggtgaccgacaagagggtgatagctttgagagcaataaaaaaggacaagatcatgatagccagggcctacaataaggtcaaagcaaagtcatttcaagtaggggacctggtgtggaagactatcctgcctctaagaaacgaagaccgaaagtttgggaaatggtcgtcaagctgggaaggtctatacaaagtaaagcaggtaatatctggtaatgcttatttattgcaaacattacaaggcaaagatttgcccaaagctttgaatgggcgtttcctcaagcagtaccatcctagcatgtggcaagatgcttaa

SEQ ID NO: 166298 - DNA, 1361 bp, Zea mays
  Clone ID: MRT4577_83246C.1
gcagaagagtgcaatgtatagaaggtgtgaatcaaccaaggttgattctgtaattacacatgcatcatgtcatacaactttaagttaaaccccctgcgtagctattttagtgtatgaatcatctaccttgttcatacatctttagtgaatagagtgtatctgttgcccttctcgatagatgaatcaacaagaagcccctacgggagttggagagtttctacgagattttggtgttccagtggtcctgtggcgactacttcaagaagtcggatataccgaagcacccaagtaccagtggccacgcacggttcttagaggacaaccatggtatgaggtagtagtgcatattccagaacgtgctagaaaccatcttggccacattggatgttccatgctgaaggaatgactccttgggaaggtgctcaggtagctgccttatgaggcgctaacaaccatttgttaccagtaatgggttgaaagacaagccctagagttgcaacttactcgagcagttgccttaagtgacccatttgtgtatcatcaccaggcccgattaatggaaagcattcctattgggcaggattctgttgaatcggcatctgctcgagttttgatggccgtgctagagttgcaacttactcgagggcacagtcgtcaaaagtggcagcagttgtacaccggaagttatgcagcatttaagatgatggaaatggccaagaatagggcttgtacccaggcacaagaacgacttgaggaaacaaaggttcaagcagaacaggttattggactaaagcatcaggtgatagaacttcagacgcaacaccaagctgatcagaatcgcattaaggcgcttgagcatcagctagctaatgctcattctaaatcaaaagttctgagtcagcaacaagaagaaattcgcttgggtgctattgctattagcgaagaccttaaggaaaccctaagcttcataagccatcaggatcaggcgatccaggaattgaatcgtgctcatccaatggaatttcaagtagcgcaacggcttgtcaaccatctgcagcaagcagtgcatatgctcaatgttgccttttatcctactccggcatcagcggactaagggttccttggaagaatggcaacaagtatctggcagatggtgtagctagagaagatgtaataggcaactgggagtgtagcgaagtagatcaatgtaataaggtaggtgtaagatagaccagcttggtaataaaaacatgttaaactttattggaaagagtctttcctgtttcccctgggtcatgtaacatatgagcttttctatgactgtggtgtaagaaacgactgccggtttcagaggcagcttt

SEQ ID NO: 166299 - DNA, 298 bp, Zea mays
  Clone ID: MRT4577_83247C.1
ggttccgggaacccttaggaggggattattagtgaaaacgtacagattaagctttacaatatgctatagcttggtacgcccactcacattgaaccacgttgaagaaatcgtccctactgcaaaaaaaactaagaccaaatggcccagaatactggtggattttaatcacaaaaaccttcgatataaacgaggctctaaagcatgctctaatctatataatgtcgaggctacagactggggatattacttgcaatgtggcctaaccaaaaaactggaggggacatctagacacactttc

SEQ ID NO: 166300 - DNA, 221 bp, Zea mays
  unsure (1)..(221): unsure at all n locations
  Clone ID: MRT4577_83248C.1
acaaccgctttttttttcccggcccaaggggcccacccagcggaggaatttaacgcncgccacgaaacagacccncagacgancaanaagaaagcccacgccncccaaacggaggccaaaggcagcagaggccaaccacgggnnacaagaaacccaaccanaaaaaaaagagcgaacaaaccaaaggaggggcaacgggcaacaacaaccgagcaagcggc

SEQ ID NO: 166301 - DNA, 313 bp, Zea mays
  unsure (1)..(313): unsure at all n locations
  Clone ID: MRT4577_83249C.1
ctggtattcttttttttattttttnggcagcaccaagaagcaccattttttccttaagattaacttaaaataaagcctggcgggggtaacagcatacatcgatccccagtccatgcttgttgaagcatgggtctgctgaaaccgttggataatacagggggttacaaccgacacagagggaccttgcaattaaaaacacacatgggcaacaacaaacacgacaccaacgaagataaaccctttggactagggtaaaaatcaccggtgcgaaaaagaaaaatttggcgcgcgggccccaccggttaattttttc

SEQ ID NO: 166302 - DNA, 337 bp, Zea mays
  Clone ID: MRT4577_8324C.1
ggccgcttttttttttttttttttggtttttttttttttttttttttttttttttttttttttctaattatctttttttttttttatttttgtttacaacaaagcgcgggcaaagcacaccccgaggaaaccacccggaggaagccaacccatcagaaaatcaagggcccaaaaaaaccccgggggcatcctgcccttggcccggccctgacggtaacgggagacggggcgaaggccctgccctatcgaaacacgcggaccggcaaagcggacccgcacaaaccaaacccccatgcgaaactgtgccctggccccaaccaaccccctgtggggaact

SEQ ID NO: 166303 - DNA, 323 bp, Zea mays
  Clone ID: MRT4577_83250C.1
gtcctctcaggagcaaaggtgcagttcgaacttcactaccaggaggtgaagttgaggaagctgggctcctatgagcacagatctatctgcaacctggacggctggccaaacacttagaggtagatgtgtgggttatcgaaccacagggactgagatttcttcatgttcccgacacatttgaaggccatttcgatggtgttccggtcatttctaaaggacaacagaaggcgcacgtctccttcaagcccacggtagcacagagagaatatgcctagctgcgggagatgcggtagatgggaacggtgtgctgtagcgtaaagaga

SEQ ID NO: 166304 - DNA, 287 bp, Zea mays
  Clone ID: MRT4577_83251C.1
cctcatcctctcatgatcttactacgacattcggatagagatcttgatctgtggccatgaaccagatcgacatgtgggcggatcccttccgcgactgcgtctaggacagcgtccgtctcttgaagctctgctacatgtcttaccggatggaatccactaacgtgtctatgccaacgatattcaggactatattctatggctaacaaggtttttcatctagatcatgggattgtcatcaacatcctcatcaatgccaatcgtccaggttaccatgtctacaatgctac

SEQ ID NO: 166305 - DNA, 428 bp, Zea mays
  Clone ID: MRT4577_83252C.1
ctttctctcttttttcttctttttccccccctttcttttttgggtttggtttttttttataaaataaaaaaggctcctcccacaacttcattttttaaaatgaatcctattttttcaaaaaaaaataaaataaattcccttgaaaaaaaaaaaccccctaaaaaaaaaaaggttgtaaaaccacccccattaaaaaaattattcaaaaagcaacatcggcttccaccattttccttcttaaaaaaaactaccgctccctgtttaccgaaaaactccttttcaccgaattaataaaaaacagggaataattaacccccggggcatacattcaatccgtctttggcttgcccccttcaacaaaacacttaattaatttattaaggccaacaccccaagcggggaggaatctattcctcccccccccccca

SEQ ID NO: 166306 - DNA, 323 bp, Zea mays
  Clone ID: MRT4577_83253C.1
agcccgagccatgttttttacatagatcaacaaaccctggcatttcgaattggcacgacctgagaaggtcaactgagtacctgtgaactagggtgagctccctttttctttggcgagcaattgcaacacccacctgggtttattggcccaagagggggctttcaagtgtacaaaaacaaatttgggctgactgaagaaggcctgggcccataccaatacacccctactccacgcttttttccaagcccgccaggatcgaagttctggaccaggagagggcaagggctgtgcttgttatttcccaaaccggtggggagtacccg

SEQ ID NO: 166307 - DNA, 737 bp, Zea mays
  Clone ID: MRT4577_83254C.1
ttcctgggtcgacccacgcgtccggcaactgagtggttcggcagccgagaccaaataacatttttaccttggtgatgactcggtaggagatgtaggcctgcacgccggtgcccatcttgacgggatccatgacagatatccacaggaatggcgcccccgccaccgtctgcgaccgcgggctctgtgacgaactcctctcctgcgagagccccgtatacagattcagcaccaatttacaaccgaccgaaccaatcgtcaaaagcgcggcatatgagatgatgcgggggagcggggcaagaattggaccaatctttctgtgatgcaccagcgcaaccagcttcaaaaatcatgaggcatttggaaaatgcactgattataacagggcaactctatcttgtaaacgccaatgtttctaattgcaagcaacgatggtagaaacatggaacaattggatctataccattaaaagatccaaactttagatatataccatggaccccacatgtcattgactcatgtggacccacatgtaagtgagatagtaatggtatggatccaaagtggtgatcttttaatggtatggatccaaatttccctagaaacattcatcttctaaattattaggccaagacaacacattagaaaaaaaaagagaggtcaagacaagatcaatcattaccccagtgcagcatatggactagttttgccatcctatggaaaacaaacttttaagacga

SEQ ID NO: 166308 - DNA, 364 bp, Zea mays
  unsure (1)..(364): unsure at all n locations
  Clone ID: MRT4577_83255C.1
ctataaaaaaaaacaaaaagacagagtacaagctaatttttttttttttttttttttattgttttttcttgcccggttggccgttcttttgggctttttctgggggtttccttcccactgggggcccttcgggcgtgcttttgggggggcgggtgttccttttggggggtcgtgtttcgtttgcctgggggctgtttttcgccctctgggctgtttgttccctggggttgcccctcttntttggctttgctggcttccgtttttgtngacttgggggttttgttgcgggggctgtgtttgttgttttttctggcgtttgtgcttccttgtttgggctttggccctccctgttcctgctcttttt

SEQ ID NO: 166309 - DNA, 362 bp, Zea mays
  Clone ID: MRT4577_83256C.1
agctcgcgtgacaagcatcctgaggaccatttcatgctgatcatcgacgccttcaaccactggtgcagatgcctagtgcacaggatgccaaggtgcctatggtgcttcttccacgtggtcaacatcgactacacgcactggctcatgtactctatcggcggcagaaaggcccacaccatcatcagccagggcaaccgctacattacgccgaccaaccttgcctcaaagcaggtcaccaagcatcatgacacgccggagtccgtgtcgaagaactgggtgtggcacttcgagaacgacctctttatggacggcacctacttcaccgtcaccggctgtcatatcaacagactttttaacatgaa

SEQ ID NO: 166310 - DNA, 727 bp, Zea mays
  Clone ID: MRT4577_83257C.1
ggcccgggcctgtggaaaaaaacccaccaaattctggccgaaacacaacggcgactgagcgtctacggcaactaacacccataaaaaaccgaaacccctacaaattccccatgacgactcgacaagaagtgggaggcagcgcgctcaccatacgtcggcgttgaggatgtcgcagatttcgaggttgacggcccagtcgggccccatgagcaggtggctcgtggccttctccacccgcgacgacgcgctcgggcggcgccgcgggcgccgcccccaccatggcccctgacgggtacatggccaagcgccgcccaccgctggcaggaagggctagggttccgaccggaggaggattgaagaggggcgagtgataattaccggctccgcccaccggctgcgtttaggacagaggtttgcaaaaaaatcaggggccgttaaggcagaggcagctctggcgaaagcagacttttccgatataggaaaatactatcaatatccaccggcgtgaagcgagtgcttagctgtcaagccctcgtgacatgtctcgctatcgacaggcgggccctgtcccgagacctagcgctttatagttggtcaaaactaggttccccaggctgaattacgtggtaagtacctcgctaacgctaatactccaattcggtggagacatcgaaacttgtgcataaaaatattcagccctctattttttatttatcactagtagttt

SEQ ID NO: 166311 - DNA, 193 bp, Zea mays
  Clone ID: MRT4577_83258C.1
gggaccctcgaggccggcctggccggtacgccattcacgtatctcttgtttaggccgggctcgagagagttgggctccgaatcctgggtgggtttggagttggagaatcgccttcgtcgctcgacccagaaagattcgttaccgcatcctcttttcccataccgaccttcaggaatcccactttttcttcttc

SEQ ID NO: 166312 - DNA, 2409 bp, Zea mays
  Clone ID: MRT4577_83259C.1
ccctcgagggccttccgcgaaaaaaaaaaaaaaaaaaaaaaaaaaaaaaaaaaaaaaaaaaggagctgccttaacggcccctgatttttttgcaaacctctgtcctaaacgcagccggtgggcggagccggtaactatcactcgcccctcttcaatcctcctccggtcggaaccctagcccttcctgccagcggtgggcggcgcttggccatgtacccgtcaggggccatggtgggggcggcgcccgcggcgcgcccgagcgcgtcgtcgcgggtggagaaggccacgagccacctgctcatggggcccgactgggccgtcaacctcgaaatctgcgacatcctcaacgccgacgtatggcaaacaaaggatgtggtgaaggcagtgaaaaagagattgcagaacaaggacccaaaggttcagttttttgctttaacgcttttggagacaatgatgaagaactgtggtgaatatgttcagtttgaagttgctgaacaacatgttctgcaagaaatggttaaaattatccagaagaagaatgatatgcaggtaagggacaaaatattattgcttttggactcctggcaagaggcatttggaggacctggaagtaaatacccacaatatcattgggcataccttgaagtaaagacgacaggtgtggtgttcccaaaacgtcctatggatgccccaccaatatttactcctccagctacacataattctgagacctatggttcacccagatattctgcgggaagtctaagtgacagaatgtcctcagatgttgagactctgagtttaggagatttgaataagattcgaaatgtgacagacctactgaatgatatggtgtatgctttaaacccatctgatcgaatggctattaacgatgaaattatcacagatcttgtgacccagtgtcgctcaaatcaacaaaagcttctgcagtttgtcagttcatcagggaacgaacagttactaaagcaaggactggagacaaatgatctcttacaaagcgtactttcaaagtatgatgctgtggcctctggtgctcctttggcggttgaagcatctgtgagagaggcaatcgaggctcctgcagtaaagtcatatgcaccccctgaacataatgataatgttaacgaagaggaagatgagtttgcccagctagctcaaaggaaaaacaaatccgtcgtaagtagtagcgacgatgcatcatccagcactttgggggaccttgcccttgtacccattgatcaagcagtttcagaatcgccatcttctgttgcaagcaatgcgctggttcttcttgatcctgctcccagtactagcactgaatcaaaagagctggacatgatcgaccttctaagcctcaccttgtgcagccctactcctgaaacttcaacagattcttcagcacaggatcaaaatggaccccagcaacctgcagttacacataatcaaaaagggcttcaggaacctacagttacaaatgggcaacaatatccttctagtgtgccacagtatccttcaaactaccagcctcacactgcaaaccaggcatatgctccacagaccagcaactatgtggcaccttgggcccagaccggagcatatccacctcagcctccggcatatgcatctggctatgcctaccctgcaccgccatgggtggcgcctacacatcctgttgattctaacccttttctttcggtcaattaccaagatccacgccctgctgccacttctgttgctcaaacagcaacatatgcacctcccccagcttcatatcccccttcaatatcttatgcacagtttgcaaccccccagtcaattcagcatagcaattctgtggcttcaccgagcaatggtcagattgcaaatcaagcacaaatgaatgtgaatcaacaaccaaaagattcttcggcagcatctagcagaccatactacatacctgataatctattcagtgatttgatcgatgcaaaaagttttggcggtggaaacaagatgggcgggcccactacaatgggtagctcaaatggtggccagcctatgattggtggaaagaaatagggttatttgtctatatatatacagctgatggtgatcggtagctgccttgttatttattatgattactttgtctggtgtacatttgtacttgtatatcgccattcccccttttgacagatttggctgcattggttgattcgtgggtgcaactgttaagtttaacagagatatggacaattgctcatgtacataaatgattagcatttgctccactgaggtggatggttgtgatgaaatctgttggtattgaaaaaaaaaaaaaaaaagggcggccgccgactagtgagctcgtcgacccgggaattaattccggaccggtacctgcaggcg

SEQ ID NO: 166313 - DNA, 150 bp, Zea mays
  Clone ID: MRT4577_8325C.1
gccagtgatgaataggatatactgcagaaatatctgccctctagcgtggtgcgcggggcgaggtgactcttgttattttctgagtaagcgcacagacatgcatccagcaaaactctcattatatgcaactatagactacatagagcactg

SEQ ID NO: 166314 - DNA, 360 bp, Zea mays
  Clone ID: MRT4577_83260C.1
gcggttctatgatgagggttatgcgagggcagaagcggggagcgaactacatgatgctggacaagctgagggacgacttggtgagggttcactcggccggagacgaagaccctagaagctgcgataggccacgaccgcccgaccggtagcaataaacaaaggtccttactgagctatactgctgatcgtgtcggtgatcgggatggagtcgaacacgtaccagcggcaagcaactaataacagtaggaaattaatgaatggatctctccactctaactaacaataatatgtgtaaattaaagacgcggacggcggcagctacaagcggtcgcattcgatgccgtcgaccccgtcgacgcc

SEQ ID NO: 166315 - DNA, 357 bp, Zea mays
  Clone ID: MRT4577_83261C.1
tcgcccacgcgtccgattgaatggtacttatttaaaaaaaaataaaaaaaaaaaaaaaaaaaagaaaaaaaataaaaaaaaaaaaaaaaagataaaaaaataaaaataaaaaaaataaaaaaataaaaataaaaaaaaaaaaaggccgttcattcaaaaagagtggagctcctttaagataggttatcaatggcaaaaccatttcctatccgaagacaattaaattccatggctaaggtttttaaaccgcttgcatgttaaaaactatgccttacgcaatcgaattgatttacagaaattaaccctttatggcgaatgtgactttccacaaagcccagtattaatcacgtttcccaa

SEQ ID NO: 166316 - DNA, 355 bp, Zea mays
  Clone ID: MRT4577_83262C.1
ctattacttgttcttgagaggctcctatcatgggatagttgttctttttgtggtttggaagctgaacacccacacagggcagtgcatcttctcaacaaaggaccccatccacccttccccaagagggtggacaaacccacacttttaaacgagaaagctgcttgctggtaccacgaccgcaaaattgacttgagccaaccagcccctgaagaaggaacaacaccatcccatggctaaagaaacgctatgttaaaccctgctctatggtaaacaccttacaagcacccattcttatgccccacccgggctaccgaactggaaacctgtatggagctgcagaacggacagcactgcg

SEQ ID NO: 166317 - DNA, 336 bp, Zea mays
  Clone ID: MRT4577_83263C.1
gcgattcttggtagatcgtcatccattgtcatcatcttctggatcggtcagcaaaacatgggagtggtctctattatcattatcaagcagctcgccgagccctcttcctgaaagaatgttgtacatattatcatttgaactctgtccagtatctacgaagaagttgggtgctgtttaattcaccaaatgtaacgtaaagggtaatggtcactgtttacactctattacagacggttacaaacttgaatagtccgctataaaaactcattatcgtatctgattaccgttgtactaaaacaaacataatgtatcgatatcacttacccatcaccctac

SEQ ID NO: 166318 - DNA, 409 bp, Zea mays
  Clone ID: MRT4577_83264C.1
catggcaaagttggctcttggtcaccagacgtgaggcctccgacgccggctgagtgcgtgccgtactcgccgagttcatcctcaccttcctattcttgttcggcggagttgggtccgacatggcaacaaggaagctggccggaggcggagaggacacagtggtgggcctgaccggggtggcgctggcgcacacgctggtggtggacgtcatggggtaaggggagctgaacgttttctgcgaccacataaacccggacgtgacgctgggccttgccggcacggaccgaattatactgttccattacgcgctctacgtgggcggacatctgcatggatccacgctcgactggctcctactcgctttactagcacctgacgaatgcggcgagcccctgcacgcgctgggcac

SEQ ID NO: 166319 - DNA, 599 bp, Zea mays
  Clone ID: MRT4577_83265C.1
tcagcaagatctaatctgctagcaacaagtcaggttttgagaacactaaggggaaggaggatcacatcgacccttcaatccaaagaacaccaaccatcctacattgatagaagttcttgatgatcttcatcagaagattgaagccaagtctactgccaatctaaaggctttcttaaagagttaatgattagtgagacaaggttactcaattcgtgagcctaacttcaataattctattgtttctacatctgctataccagaggtaaagattgatgaaaaggttctgtttcgggcgacccattggcttaggttttgggcatatttgcagagggttgaagaccaggagataatcaaggagacgtgtcgacggattgaagtcgcatctatgcaatttttttcttattttggttggagttttacgaacatgattacatattgaggttatagtatgtctgttgggtgtcgtgtttattttaatgtttgtggtgtaagattgcactctatgttgggagtgttgatcttttgatgttagtttgtttgtaaggctgtaccctcctttcatagaggacaaagccggaacctggtttccattatctaaa

SEQ ID NO: 166320 - DNA, 416 bp, Zea mays
  Clone ID: MRT4577_83266C.1
ggagggaggcgtgcggggggccatttgacagagttcttgaagaatataagggggactatagatgatgatgaatggggtcggggtattgggggtggtataaatgtgtattccaacaagcataaagaaagaccagatcggcttatctacatgctaatcaacaatcacaggggaggacttggttgtgttggctggggacgtctaaaaagggcattccaaatagccccacgaaggggaaggggcgctgatgttcaatatggtgcccatcagggattacatgcaaatgcattgacagggcttggtatgtgtgagcaatggctcacgcagtacatgtgataccatagatacttggtgagagagtgctcacggggagacagaaaaactaaagggcgtttgggtttaagagggaatctatttta

SEQ ID NO: 166321 - DNA, 263 bp, Zea mays
  Clone ID: MRT4577_83267C.1
ccaggatcaggaaagaaatctttgtgcagagctgtcctcactgaaatttttggcgattcatctttgaatgtctctcactatttgaagagctgcaatggccaggggtccatatctgtgcctattctcgtcccagtttcatccagcaataaccatgtggaactccacatgaggtttcaattgaagaacgcaatcaatgctttgatgactctagcaaatgaaatgtctgataagtgtaaaatcactgagccaattgtgagaaagag

SEQ ID NO: 166322 - DNA, 333 bp, Zea mays
  Clone ID: MRT4577_83268C.1
ggactagactatgtccataggcgtgagaattacaaaatatctatgtacttacttattggaggttatttgattgtgctaatgactacaaagttgtagttactgatctagagagtaatcatttgtgaaagtctccaattttttgtacaacggtgatatgatacatggtgatacatgagaagcatgctcatatagcatgaaagagaagatcatgtacacatgcttcgacgtgaacacgaggcacggaaccgtaatcgacacttgatcatgaacgacatgctgcatgttcaacacacattcaggcgctcatagacattgtacccatgctccagatac

SEQ ID NO: 166323 - DNA, 876 bp, Zea mays
  unsure (1)..(876): unsure at all n locations
  Clone ID: MRT4577_83269C.1
gggtaccntncgngagccggccgggaacccggtctctctggcctcccaaatcttgtcaccacaaggagataacttgtggtgcatgagtaaggctgtcaagtgcagttcgagtcacagcgaagattctgctatcaacagttttgtgtcaaggtttgctcctggtattttcagtttgaatcaggagttctcctctgagtccacttgcagaagttcagcgacctggccagaggaaatcctgccgtctcgctcgattcgtgcaattctggacgagtcgcagtacaagttcctaaggaactgtttccagagcacaccaaactcctggggtcaagtgatagtcactgcaggatgggatggcaagatcaggtcgttccagaactatggcttaccggcgcaccagtgaacaacagctggagcatctgctgaaactacaccggcagttttggcacctcacatggcgtgtggtttgttggtacaagacatcacatgctcagtgctcctcctgctgaattgtacatggaccagtgttgtacataatcaacctggtggtcctttgagatctccgcgtcagcggttgttcatggcaggacccgtggattgtacccttttgtagannnnnnnnnnnnntagatcagatctgnnnnnnnnnnnnnnnnnnnnnnnntcaattgctcattgatatatatactacagaaatgttagtctcagctgagtgtaagttcccctcccattgtattgcgggaacagccagatatatatatgtgccactcaagtnnnnnnnnnnnnnnnnnnnnnnnnnnnnnnnnnnnnnnnnnnnnnnnnnncaagttttcattttgtcgatcgaatttcagatacaaatgactaaaactcctgttt

SEQ ID NO: 166324 - DNA, 287 bp, Zea mays
  Clone ID: MRT4577_8326C.1
ggggtgcctatttattgccggatctgcatttcccgtcgtccaatcatttgcactgccctaattagggcatcctgcccctcgccttttaggctcaggacggaaggtcagttgccatggttaccgaggaccctggttactctggtgctgtcctgttttactggaccccgctcccagccccaggggtgcctgtgggggtccatttgggtacgtctgggcccccactttcaccagtttctgcggccttccaccgggcctgaaccacagcggaggagctccgctaagacctc

SEQ ID NO: 166325 - DNA, 317 bp, Zea mays
  Clone ID: MRT4577_83270C.1
aattcggcacgaggctggaaagtggttctggttgacaacaccgacttcgtcagggaactccagtgagaaccggaccggagcacccagtggtactccgatcctggcactgttcatacactgcaggagacagcgagtcggtgaaggcctcgcccctccgtccaaaaaaaaaaaaaacagagagagaagagaacggatgcaatctcatttcgggtggagtaaaataattttaggtttaaaaaaaaaaaaaaaaaaaaaaaaaaataaaggggaaaaacaaaaaccaaataaagccctataaagagagggattacacgggc

SEQ ID NO: 166326 - DNA, 341 bp, Zea mays
  Clone ID: MRT4577_83271C.1
gcctaatctcgccttccgaggaaacccacctgtttaccacagacccgagcggaagaagccatgtccgggcgcgcaaggggtggcaaggggctcgtcaagggcgggacgaagcgtcaccggaaggtgctgcgcaacagcatccagggcatcaccaagccggcgatccggcggctggcgaggaggggcggcgtcaagcgcatatatgggctcatctacgaggagacccgcggcgtgctcacgatctcactccagaacgtgatccgtgatgccgccacctacaatgagcacagtcgtcttatgaacggcacagccatggacgtcgactacgcgctcaagcacca

SEQ ID NO: 166327 - DNA, 1340 bp, Zea mays
  unsure (1)..(1340): unsure at all n locations
  Clone ID: MRT4577_83272C.1
atatcttgcagggagcagtggttggaaccattactggaaattgtcgattttatgatgcatcagataatctcctgaggtttgaaacacaagttgcagtcagtggcaagaaaaagtcttctcttaaaagaatcactgctttcgagttctcaccaagcaacccaagtaaattaatggttacctctgctgactcgaagatcaaaattcttgaaggaaccactgtgactcagaattatagcggactccgtactgggtcttgccagtcattggcaacattcactcctgatgggcagcatatagtttgtgcaagcgaagactccaatatttatgtatggaaccatgaaaaccaagacgaggcttcactgaaacacgcaaaaacgatatggtcctcagagcgcttctactccaacaatgcagccatcgcaataccatggaatggcccgaaacccagaaacccggtctctctggcctcccaaatcttgtcaccacaaggagataacttgtggtgcatgagtaaggctgtcaagtgcagttcgagtcagagcgaagattctgctatcaacagttttgtgtcaaggtttgctcctggtattttcaatttgaatcaggagttctcctctgagtccacttgcagaagttcagcgacctggccagaggaaatcctgccgtctcgctcgattcgtgcaattctggacgagtcgcagtacaagttcctaaggaactgtttccagagcacaccaaactcctggggtcaagtgatagtcactgcaggatgggatggcaagatcaggtcgttccagaactatggcttaccggcgcaccagtgatcaacagctggagcatctgctgaaactacaccggcagttttggcaacctcacatggcgtgaagagaagtgcccgagcacccagctacgctggtccagcgtgtggtttgttggtacaagacatcacatgctcagtgctcctcctgctgaattgtacatggaccagtgttgtacataatcaaacctggtggtcctttgagatctccgcgtcagcggttgttcatggcaggacccgtggattgtacctttttgtagaaaattttttgtgtgtagatcagatctctcactctccctttgccccccttatcaattgctcattgatatatatactacagaaatgttagtctcagctgagtgtaagttcccctccccattgtattgcgggaacagccagatatatatatgtgccactcaagtatacaaaattcgttcaaatttattttttgaacttttcacaagcaaaaaaaaaaaaaaaaaaaaaccnnttgtgtcgggcggtccgctgtataggatcttgc

SEQ ID NO: 166328 - DNA, 339 bp, Zea mays
  Clone ID: MRT4577_83273C.1
atggttatcgtgatgaccttcggcctggcgcactgggtgttcgcaacggagatggagcagaacaagggcagcctgggcactatcacgcacaaagccattagcttcatagcgagggccaacactcctgagggcagcaccttcgaccgaccgttcatgaaccccgccgtgtacttctgccacagcctggtcagcttggattggggctaccagcgggtgtactgggtcgggcccctcattggcggctgcctcaccggcgtcatctactagctggtgttcatctaccacacccacgagcagttcccctccaccgactactaaaaaggcaaaagcgaccgaccc

SEQ ID NO: 166329 - DNA, 500 bp, Zea mays
  Clone ID: MRT4577_83274C.1
gccggcggcttgagggctagttgttcgtttagtccacacgtgtttgtaaaccagacccaatccccatgaaaaaacttcaatccaggcctggaatcaaaccacagatcaacagccgtggaactcatccaggtcacggtgcgatggcggcgacgcgattcgtaggaattgatgacggctacgcaagacctcttccgtcgtcgcacaccctcttcatcagcgatcctgtggagtcgtctgagttgcctttggtttgatttttaatctaaatgcaagcactctattgtaatataataaaagacaactgaactgatcacaaggttgtgattttgatgcttcaagtttaatccgtttagctagcatgatatgtggggcatcagtctttttatatgcatgcaacaattgaatgtatccatgtggttttttatggatgttggattgcatctaatatttatcatgttgtgatgttgtgacatgaaaaaaaaaaaaaaaaaaggccccta

SEQ ID NO: 166330 - DNA, 226 bp, Zea mays
  Clone ID: MRT4577_83275C.1
gacgccctccggtggactccccgggactctgaactctgaccaggcgaggcagcatgctcaggcgggccgtctcgccatgcttgggctggtggccactggcatcgttggctgagccttcgtgcatgcggagcagacaggagaccatctagaccatccctatcagagccccgcctgggagctccggcctacatcccccttactctgaactatatccagcctacggact

SEQ ID NO: 166331 - DNA, 240 bp, Zea mays
  Clone ID: MRT4577_83276C.1
tttcaaacttataaaaaaagtacaaaatggggttccgaaactttatatgtgtttcgaaaaaacaacaactcatacaaatttactttcaataattcagcagctaactcaaacaaaaatttcaaaccatcttatgttaaaatcagaaactaaattaattaataatgtactcccttgaccataatcagaatcttatcaaaatcaccggataactacatcttcacatatcaatattaattaaaa

SEQ ID NO: 166332 - DNA, 467 bp, Zea mays
  Clone ID: MRT4577_83277C.1
aacggccggcatgtgctgggaatcggccttagaatctggggaagggggttatgacaaggtgcttgggtatgtgaaacccaatattcaaccctacaggatccaacaggcaattgtagatgtgttattacctttatcacccttgtatggtacaacaattataaggcttgattacagcagttaccttgggtgcgctaattggcacagaaacataagggcacaacagctacaacagcttgagctagcaaaccttgctgcctactctcaggaacagcagtttctttcattcaaccaactagatgtattgaactttgcttcttatttgtaacaacaagaactacgattcagccagctatatgatgcctaacagtagaaatttgttacattgaagcaactgacagcattgaactcgtatgattatttacagtaggtacaagtactaccatttagtcagatagatggagtgagcc

SEQ ID NO: 166333 - DNA, 614 bp, Zea mays
  Clone ID: MRT4577_83278C.1
cattgggtacctcgaggccggccgggaagaccttaacacgaattgttgctttgaatggacatctgattacttcttcccaggccagcttgtctgagataccggctttctgctactcttgctgcgttatgagcctaaatctctactgtggccgctagaatcaccctccgctgcgtgagatcatagcgctagcagcacccgtccgtcttctcttctgctctcctgggcggacgccgacctcgtgctcgtacacagcatccccaattaataagatccggctcaagaaattaggactgccttagaggcttccagatgttctccccaaaactactggatacagcgtatgctgcaagccacatctcatgctgagacatcgggatggccgtgctgatatcacgctcagttaccagcgtcacgtgcaatgcgctagaaagagatcatgttgctatatgtgccggctgacaaagatacttatgcattgcacgttactatgcacactgcgcctgtacaagtagtatgccattcagttcacacacaatatgagcacttgcacatgacaagatagtccatcaaatattgctgaacagtatattaccacgagctctgatcaatccatc

SEQ ID NO: 166334 - DNA, 271 bp, Zea mays
  unsure (1)..(271): unsure at all n locations
  Clone ID: MRT4577_83279C.1
cttaacaaagctagagaggcgctatgaggggcattaccgctttctttcccccccttanagaagccaatgtcatccttgatgcccgggcgtctcccactataaaacatactacgagcaaatttaaattcttatttcaagttcatgcttggcacattttgcatctaactatgttatatgatcatttcgttggttaattaatacccatttgatcatgaattggtattaatattaaccatctctacatcttagcgcaaattagaagttttcttca

SEQ ID NO: 166335 - DNA, 796 bp, Zea mays
  Clone ID: MRT4577_8327C.1
ggccgcgccggccgcgggttttttttttttttttttggaatcaaattgacttcattctaggttgctatgcttatcggttcccctctccaatgacattatcagatttcttagcatgctatgcgcaacgtcaaagcccaaaggaaagtggaaagtcagagtcttgatatacatcacacatctgtatggtctgttgcccatcaaagcagacggcaaaggtgaacgaggggggttggcttctcgtggccaagacttctgggtagaaagtaaaaaataacaaacaaacagaaaacgcaataaaagctatccacaggcagcaacgtcatcaaagcctatcccaggctctatgtttaaaaaagcagtttgtgactggtcgtatcgccacgtgctgaatcaaccttgaatttccccagtgcacctaattccgaaaaccgtaaaaggaggtgtttgcgtgtcaagcgagtccgaaccaatgataaaccacctcagagctgatgcgtgtattgggctcctgctctagagccccctccaaaaagcgatgtgataagagtgttgatacatcatgcacaggtcagtgcaggtcgaagtccgtcgtcaaagcggacgactcggggggatgcgtggctcttggtggctgctctcttggtcggggttcggccttttcggaggatcgtcttcggatcgggcgacggagatttaggagaagacgaaccggccggtgcagacgaggaagtcgacttcctaggcaggctatccacagacccggtcggattgtccatcgataccatgctgctgcttg

SEQ ID NO: 166336 - DNA, 276 bp, Zea mays
  Clone ID: MRT4577_83280C.1
ctgttctgatgcctgaaagggaaaagggctgggcatccccgcctccctaagaagaaaaaccggggggccgggttgcaaccgatttggaggacccttgggggggggggtaaccaaaattgtggccccctgccgggggaccaaccaccagaatggcccccgcgtgccggccttttctccccaagaacaccatggggccggtaggatctcctctttttttttacactagggttgttaggaggaatggaagctttggagcgcgctttttcatgggggggg

SEQ ID NO: 166337 - DNA, 487 bp, Zea mays
  Clone ID: MRT4577_83281C.1
ggtacccccgggtccggccggagatagatctttcccccgtcctccctcgccttcgcctcgccggcaggagattttcaccaccaccgccggaccaccccgaccctccttccctctcgcgctatggcccagactgtttccaagactggcaagaagacttcgttctgggaggctgaggccgtgacaagtgaatccgccacacctgccggcgccaccgcctgacaggttcgatgatctggaagtgcccagcaaaaaaatgtgaatgtatttagcttggatctgttacaaataattgcaaactgctagctcggtctgtacattttacagttgctatttgtatactgtgatgttctcgtatgtttgtgcaggcgataaaccaatatttgtatgatatatgtgtcgtgttccataaggtaaggttttgacggtatgctatcacctgaggtttcgtcgactgacttcagcatcaccagtctagaaattctcctcc

SEQ ID NO: 166338 - DNA, 289 bp, Zea mays
  unsure (1)..(289): unsure at all n locations
  Clone ID: MRT4577_83282C.1
aattcggcacgaggaccagccatgccgtcttccttggccggcgcggcggcgcctatcggcggccgcgttgcggggctgtcccgatggagacgtcaatccccacccgagagttcatggatcgccgataatgaatgcctcatggctgcagaggctggtgacgtcgactctgcgaggtgctcctctgccgagttatccaaacannatgcccatntnntgaaggnnagctggagaaggccccagagaatctgtatctgttcaaggctgacgagccagaccacgacacgccact

SEQ ID NO: 166339 - DNA, 886 bp, Zea mays
  Clone ID: MRT4577_83283C.1
ccggccgggcccacctgtcattcaggggaaaagaggacttggcctcgccttcccttgcgtgtttaccgacgccaccggccgcctgtatatcctcacccaactccgtccctctctcccggcccagatagatctttcccccgtcctccctcgccttcgccttcgccggcaggagatttccaccaccaccgccgaaccgccccgaccctcctcccctctcgcgctatggcccagactgttgtgctcaaggttggcatgtcctgtgagggctgtgttggagctgtcaagcgggtcctcggcaagatggaaggcgtcgagtcctacgacgtagacatcatggaacagaaggtcaccgtgaagggcaatgtgacacctgacgccgtcctgcaaactgtttccaagactggcaagaagacttcgttctgggaggctgaggccgtgacaagtgaatccgccacacctgccggtgccaccgcctgacaggttcgatgatctggaagtgcccggcaaggcggcaaagaaaaaaaatgtgaatgtatttagcttggatctgttacaaataattgcaaactgctagctcggtctgtacattttacagttgctattcgtgtactgtgatgttctcgtaagtttggggagatgataaaccaatatttgtatgatatatgtgtcgtgttccataaggtaaggttttgacggtgtgctatcatcacctgaggtgactttagcatcaccaggctacttcaaaaaaaaaaaaaaaaaaactgccgcccatgcctggtatgatggtcccgtccaattgccagatcctcgtctatccagcgaaagcatttctttgtgggaatgagaaaaattacattcttggaaaaaaaaaaaaaaaaaagcggcc

SEQ ID NO: 166340 - DNA, 656 bp, Zea mays
  Clone ID: MRT4577_83284C.1
cattgggtccctcgaggggggccgggcggcatagatctttcccccgtcctccctcgccttcgccttcgccggcaggagatttccaccaccaccgccgaaccgccccgaccctcctcccctctcgcgctatggcccagactgttgtgctcaaggttggcatgtcctgtgagggctgtgttggagctgtcaagcgggtcctgggcaagatggaaggcgtcgagtcctacgacgtagacatcatggaacagaaggtcaccgtgaagggcaatgtgacacctgacgccgtcctgcaaactgtttccaagactggcaagaagacttcgttctgggaggctgaggccgtgacaagtgaatccgccacacctgccggcgccaccgcctgacaggttcgatgatctggaagtgcccagcaaaaaaatgtgaatgcatttagcttggatctgttacaaataattgcaaactgctagctcggtctgtacattttacagttgctattcgtgtactgtgatgttctcgtaagtttggggagatgataaaccaatatttgtatgatatatgtgtcgtgttccataaaaaaaaaaaaaaaaaagcggccatcacctgaggtgactttagcatcaccaggctactccaaaaaaaaaaaaaaaaaagcggcc

SEQ ID NO: 166341 - DNA, 950 bp, Zea mays
  Clone ID: MRT4577_83285C.1
actccatagggcgattgggttcctcgaggccggccgggagctcagatatatctttcccccgtcctccctcgccttcgccttcgccttcaccggcaggagatttccaccaccaccgccggaccgccccgaccctcctcccctctcgcgctatggcccagactgttgtgctcaaggtggacatgtcctgggcaagatggaaggagtcaagtcctacaacgtacacatcatggaacagaaggtcaccatgaacgtcaatcctagagctgacgcggcgacgcaaactgtcgcctgtatttccctgaaaacactccgtccctctctcccagctcagatagatctttcccccgtcctccctcgccttcgccttcgccggcaggagattatcaccaccaccgccggaccgccccgaccctcctcccctctcgcgctatggcccagactgttgtgctcaaggttggcatgtcctgtgagggctgtgttggagctctaaagcgggtcctgggcaagatggaaggcgtcgagtcctacgacgtagacatcatggaacagaaggtcaccgtgaagggcaatgtgacacctgacgccgtcctgcaaactgtttccaagactggcaagaagacttcgttctgggaggctgaggccgtgacaagtgagtccgccacacctgccggtgccaccgcctgacagtttcgatgatctggaagtgcccggcaaaaaaaaaatgtgaatgtatttagcttggtctgttacaaataattgcaaactgctagctcggtctgtacatcttacaggtgctattcgtgtactgtgatgttctcgtatgtttgtggaggcgataaaccaatatttgtatgatatatgtgtcgtgttccataaggtaaggttttgacggtgtgctatcatcacctgaggttggaaaaaaaaaaaaaaaaagcggccctcgagctcca

SEQ ID NO: 166342 - DNA, 326 bp, Zea mays
  Clone ID: MRT4577_83286C.1
ctccggccgcccatcgtagcagcaccacccgccctctccctcccattgggtcacccaccagcgcctccggcatggagctccgcctctgcctccacctccacctccacccgcacgcccggcccgcttccgccccgacgccgcctccatgccccgcggccgtgctgcttcccgcgtcccgccccgtccgccgcctgcggattggtgggagctgcggggttgctcagcggcggagcacgaggcgttcgcattcagccatctgcggtgccgaaccggacggcgcgcagggcggggaggctgtcaaggagaggagcgtctcggtgatcctc

SEQ ID NO: 166343 - DNA, 1412 bp, Zea mays
  Clone ID: MRT4577_83287C.1
cactcgaggcctcgaggcggccggggacgccaccggccgcctgtatatcctcacccaactccgtccctctctcccggcccagatagatctttcccccgtcctccctcgccttcgccttcgccggcaggagatttccaccaccaccgccgaaccgccccgaccctcctcccctctcgcgctatggcccagactgttgtgctcaaggttggcatgtcctgtgagggctgtgttggagctgtcaagcgggtcctcggcaagatggaaggcgtcgagtcctacgacgtagacatcatggaacagaaggtcaccgtgaagggcaatgtgacacctgacgccgtcctgcaaactgtttccaagactggcaagaagacttcgttctgggaggctgaggccgtgacaagtgaatccgccacacctgccggtgccaccgcctgacaggttcgatgatctggaagtgcccggcaaggcggcaaagaaaaaaaatgtgaatgtatttagcttggatctgttacaaataattgcaaactgctagctcggtctgtacattttacagttgctattcgtgtactgtgatgttctcgtaagtttggggagatgataaaccaatatttgtatgatatatgtgtcgtgttccaaaaaaaaaaaaaaaaaaaaggccccccccctgcgggtgcccccgcctgacaggtttgatgatttggaagtgcccggcaagggggcaaaaaaaaaaaatgtgaatgtatttagcttggatttgttccaaataattgcaaactgctagctcggtctgtacattttacagttgctattcgtgtactgtgatgttctcgtaagtttggggagatgataaaccaatatttgtatgatatatgtgtcgtgttccataaggtaaggttttgacggtgtgctatcatcacctgaggtgaccttagcatcaccaggctacttcaaaaaaaaaaaaaaaaaaaaaaaaaaaaaaaaaaaaaaaaaaaaaaaaaaaaaaggcctgtggacgcgagtgagtgaacaccagccgtattgtcccgactcctgacccctaccgatcctcgcctgctgcagccatggggacctccggggggctttccaccgccgccaatcccacccagctttaccggtcccgcgcttcgttgggcaagccggtgaaggggcttggcctgagcatgggccgcgagcgcgcccagcggagcattgtgtgccaggcggggagcagaatctccgccgaccgcgtccccgacatggagaagcggaagctgatgaacctcctcctcctcggcgccatctcgttgcccaccgtcggcatgggtcgtcccctacggggccttcttcgtccctgccggttccgggaacgccggcggcgggacctacgcgaaggacagccgggcacgacatac

SEQ ID NO: 166344 - DNA, 497 bp, Zea mays
  unsure (1)..(497): unsure at all n locations
  Clone ID: MRT4577_83288C.1
catcatccaagnattcgagcgtggctagccccatcatgccaagcccatgcgccttactctcaacctcatcctcctcctcctcttcctccttgtcggacgcggagttctccccgatggaggaggagctgtcggacgacgccgccccgatcgacgaggcctccgacaccgcctccgcctcctcgtcttcctcgtcctcatcctctctcctcgccgccgcctcatcgccatgctcttcctcctcctcttcttggaccaagtacccgttggcgctccgcatcatcctgtccgcctcgtccggatccggcttgccgctccccgaccgccggaatccgccgtgcgccggccgcgccaccgccgtggacatgcccgcgacccaacccaagcaagtagcaaccaacctagggccgaatccgacgaccaggccggcagagcctccgccgcggcgtgcctcggaccggtcggcaggcacgcaggaggagtcgaggagagcagcggag

SEQ ID NO: 166345 - DNA, 1271 bp, Zea mays
  Clone ID: MRT4577_83289C.1
ctcgaggccggccgggaaaagaggtcttggcctcgccatcccttgcggttttaccgacgccaccggccgcctgtatttcctcacccaactccgtccctctctcccagcccagatagatctttcccccgtcctccctcgccttcgcctcgccggcaggagatttccaccaccaccgccggaccaccccgaccctccttccctctcgcgctatggcccagactgttgtgctcaaggttggcatgtcctgtgagggctgtgttggagctgtcaagcgggtcctgggcaagatggaaggcgtcgagtcctacgacgtagacatcatggaacagaaggtcaccgtgaagggcaatgtgacacctgacgccgtcctgcaaactgtttccaagactggcaagaagacttcgttctgggaggctgaggccgtgacaagtgaatccgccacacctgccggcgccaccgcctgacaggttcgatgatctggaagtgcccagcaaaaaaatgtgaatgtatttagcttggatctgttacaaataattgcaaactgctagctcggtctgtacattttacagttgctatttgtatactgtgatgttctcgtatgtttgtggaggcgataaaccaatatttgtatgatatatgtgtcgtgttccataaggtaaggttttgacggtatgctatcaaataaaaaaaaaaagagacaaaccagcgtagaagctggtaggacccgcttgaagggcagggcatcatccaaggattcgagcgtggccagccccatcatgccgagcccctgcgccttgctctcaacctcctcctcctcctccttgtcggacgcggagttctccccgatggaggaggagctgtcggacgacgccgccccgatcgacgaggcctccgacaccgcctcctcctcctcctcctctctcctcgccgccgcctcatcgccatgctcttcctcctcctcttcttggaccaagtacgcgttggcgctccgcatcatcctgtccgcctcgtccggatccggcttcccgctccccgaccgccggaatccgccgtgcgccggccgcgccaccgccgtggacatgcccgcgacccaaccaaccaaccaacctaaggacgaatccgacgacccggccggcagagcctccgccgcggcgtgcctcggaccggtcggcacgcaggaggagtcgaggagagcagcgaagcgagcgggcaggaaatctcggtgcgcgggcatgcgagagcggcggggaagggaaaggtgggagggagac

SEQ ID NO: 166346 - DNA, 281 bp, Zea mays
  Clone ID: MRT4577_8328C.1
gggggggggggggggaggggggggggggcgaatgggtacctcgaagccggccgggatcacactcttctcttctccctggccggaccggagtcaggcagccgaagcaagaaaagcaagcggctttggaagttgggatccatggcgtccacctcgtgcttcctccaccagtccaccgcccgcgtggacgcgccgtcgccgcgcctcgacgccccgacgagcagcgcgcaactgatcgactgcaaggcccagaagtagcaggccgccccggaggagagagacgt

SEQ ID NO: 166347 - DNA, 912 bp, Zea mays
  Clone ID: MRT4577_83290C.1
gcgggtcgatacaagcctctagaataaatcatatgacctcgcctggtcttgcgcggccggggacgccaccggccgcctgtatatcctcacccaactccgtccctctctcgcggcccagatagatctttcccccgtcctccctcgccttcgccttcgccggcaggagatttccaccaccaccgccgaaccgccccgaccctcctcccctctcgcgctatggcccagactgttgtgctcaaggttggcatgtcctgtgagggctgtgttggagctgtcaagcgggtcctcggcaagatggaaggcgtcgagtcctacgacgtagacatcatggaacagaaggtcaccgtgaagggcaatgtgacacctgacgccgtcctgcaaactgtttccaagactggcaagaagacttcgttctgggaggctgaggccgtgacaagtgaatccgccacacctgccggtgccaccgcctgacaggttcgatgatctggaagtgcccggcaaggcggcaaagaaaaaaaatgtgaatgtatttagcttggatctgttacaaataattgcaaactgctagctcggtctgtacattttacagttgctattcgtgtactgtgatgttctcgcaaaaaaaaagaaaaaaaaaaaaaaaaaagcggcccggtggggatcggtccggttccagctgccaggttccatgttgatgggcagggcatcgtccaaggactggagcagggcatcatgctgaggccttgtgcagttccttccaccacctcctcctcccgtcgctgccctccttgtcggacgcggagttctcgccgatggaggagctgtaggacgacgccgctccgatagacgaccgcctcagacagcgcctcctcctccctcccagtcgtcgccgcctcaccgccacgctcttcc

SEQ ID NO: 166348 - DNA, 102 bp, Zea mays
  Clone ID: MRT4577_83291C.1
atggcggggagcatccgagaggggccagaagcggagcaccacttgcgcgtggagaaggcccacaactctctacggagttactcgaccgagattgaaacttag

SEQ ID NO: 166349 - DNA, 569 bp, Zea mays
  unsure (1)..(569): unsure at all n locations
  Clone ID: MRT4577_83292C.1
cccagcgtccgccccgcgtccggncggctggtgttgccattaacaggataaagaattatttccgtagatatgatcacagcatgggctagagggaacagatttcgacagtgatcagccttttgttttggggggctcccccagaaaacggctgccaccggtgaggtcgctcgtggagcctgttaggccgctatgtgctgacgcgcaattgcttcgcctgctgaacctttcagccctttcagtgtcggttgtttgcttgttgctgtcagcgtcgctgaaatttcctgtattatatagtagcggctgtctgcgtcaaatgatgcgtgcctaatcgtatgttcgtggattgcttagcaagagataccgcgtccagcgcgtggccgtgcaagtggatctgagggttggggctaattcctgttccaacggatggatgatccggtgattgctactgttaggcagatgctgttgggttggttttgggccatgtgtctggttcggtggatgtttctgtaatgggaagaaggttcagcctaannaaaaaaaaaaaaaanaaaaaangggggcggccgctc

SEQ ID NO: 166350 - DNA, 2125 bp, Zea mays
  Clone ID: MRT4577_83293C.1
ccggccggggcccggccgcggacgccaccggccgcctgtatttccctcacccaactccgtccctctctcccagctcagatagatctttcccccgtcctccctcgccttcgccttcgccttcgccggcaggagatttccaccaccaccgccggaccgccccgaccctcctcccctctcgcgctatggcccagactgttgtgctcaaggttggcatgtcctgtgagggctgtgttggagctgtcaagcgggtcctgggcaagatggaaggcgtcgagtcctacgacgtagacatcatggaacagaaggtcaccgtgaagggcaatgtgacacctgacgccgtcctgcaaactgtttccaagactggcaagaagacttcgttctgggaggctgaggccgtgacaagtgaatccgccacacctgccggcgccaccgcctgacaggttcgatgatctggaagtgcccagcaaaaaaatgtgaatgtatttagcttggatctgttacaaataattcgaccatggagaaaaccggcctagcttgaccgcttgcaattcaaggaggctagctagatagcatgtatataagcccgtgcgcgtggtgcctcgccggccatcaccatcgcctggaaccacagaccacaaaggaggggacacacacacacacacaccgtctccgcccgcccgccgcgacgcgccatggctatggctcgctccgtcgcgcacctcttctttcccatcctccttatctccaccgcgcccgccgtgcgggccatcaccgacgccgccggcggccccggatacctccaggaggcgtgcaacaagacgctgttccccaaggtgtgcatgcacgcgctcaaggacaacccagagtgccaggcggagacggcggtcacgccgcgccggctggccgagctgctcgtgtacgtgtcggccgaggtgggcatgaccgtggccgcgttcgcgcaccacgagctcaacgccatcaaggacgacgacgtcctgtacaagtgcatcgacacctgctccgaggacatcgaggaggccgtggcgcacctcagcgccctctcccgcgacttctccgacgccaggttcctcgaggtcaagtcctggctcacctccacgctcggcggcaccgccacctgcgaggacgcctgcaaggacgcccccgtcagcgacatcaagaacgtctgcataaccaagagcttcgagttcgagaagctgctgcgcgtcacgctggacctcatcaccgaggcttccggctccatgtcggccgaggtcgcactgccgccgtcggacgcgccggcgccgttcggagggtacggctcgtcggctggcgcccccgcctacggcgctccgtctcctgatgccccagcttatggcgccagcgtaccagcaccgacctcggagcagagtactgcttcgactgcatgagtgatatcgtggcggcacacacgcatcttggtcactcctatgcatgcttcgaattaccgaccgaaaagtctggttcctcggccaatttctcgttcccggtcagctaggggaagcatttctcggcccggtatcacattttaaaaatatgaaagtcaattttttttgttcaaaacgaaatttcggaacagtgaagcgaaaaagtgaagcctgttccttactatgttcaaggatttttgctctctccatcccacaattttcgagcagtatgtcagtttagaattaggattatttggtgctgcatcattgatgcagattaatataatgaggccagaaaatggcacatgttacttttgacatgttgcagcagtaagccatcatcagttgtttttctccctaaaaattacaatacacttccattcgaattaaaactttaactgttacttacatagtaaatgtgtgtgtgtcttcaaacacttaaaatcatacttatatcatcaaactatatacttttgttcatagggcaaccattggttcaagattatgatcaaatttaaaatgtgtgtgtgtctctcccctctggtgactttgtgaatctcgagatctttcggttcagtccttcgaagatgttcatagggatatggtttatatgcatagtatatgtttataggggtcagtgtatgtacgtgttatggattcta

SEQ ID NO: 166351 - DNA, 177 bp, Zea mays
  unsure (1)..(177): unsure at all n locations
  Clone ID: MRT4577_83294C.1
aaccccgggccgacccacgcgggcggaggaaagcngcagaagcaaacaaggacaacttggcagcnncagacggcaccaacggggcaactcacggaggcnangaagaaggcanngaagagagcagcaagaacagccangaaaacggcggacaggncnacacggacggcgcgaacanga

SEQ ID NO: 166352 - DNA, 366 bp, Zea mays
  Clone ID: MRT4577_83295C.1
ggggagccaaaccaatggttggtaagttaccatgaatgaattgagcatgagtgaggctcctaaaaaataaatcggtatagaaaaaccaaaaggcatgggtctggcaatacaaacacaggcacgggcgcacggaacgtgttaaaacgctatgactgatggatgggtgggacccttatcagcgctcatggtgcatgctcaattcaaccccgagccaactactttgaatcgtggaagggcccatgcgggcaaaccctggttcgggtctgtttttgaaagacgtattttctcgggtgaaacatgtttaattggggcgctgtattcttcaccttgattgacacgggcttgacgtcccactctttgaggcac

SEQ ID NO: 166353 - DNA, 561 bp, Zea mays
  Clone ID: MRT4577_83296C.1
tttttttttttttttttttttttttattttttatttttatttttatatttgtttttttaatcaatttttattttggtttttttttatatttatgtgtttataaaataaaaagaaagggggggaaaaaagacaattaatttggggccacaaacccaaaaaaaggggaggggggccgggcacaaaaacaacaaaaaaaaggcccaggggggacttacaagggggccaacctagaaaaaaaccggggggaaagccaacccccaccaggggcaaggcaccgggcggggaggggggaaccagaaagaagggggccaaaaacggggggaaaaaaaggccaaaaacccggggtacccaccccataaccgggggggtgtttaacaatgaaaagggaatttaaaccaaaccaaagggaaatcaacttctttgggcccccggggggacccaaggggggaacccgggggtgaaccgggaaatcccgaacgggccccggggggggaccaagtttccccaaaggggagcccgacaaaagctgggggaaccatgggcacaggggggtcccggggg

SEQ ID NO: 166354 - DNA, 446 bp, Zea mays
  unsure (1)..(446): unsure at all n locations
  Clone ID: MRT4577_83297C.1
cctcgaagccggccgaggtggccaatcantagccgtctccgtccgccaccccggtgacaaagaccaaggcggcggcgacggcgagccccgggctgtgggacgcgctggcgttcagaggaccggctcccgagcgcatcaacggccggctcgccatggcgaggcttcgagtcagcacacaacgaccataagacaaagaagaagaagacaaaaaaaacaccaaaaaagaaacaaaacaaaaataaacaatattctgnagagagaagaaaaaaaaaaaaaaaaaaaaaaaaaacacaacaaagataaaaaaaaaacatacacaaacaaaaggagaacacaaaanaaaaaaaaaaaaaaaaaaacaaaaacaaatttttaagtcaatttccccccccccccacacaaaacaaagataaaccaaatccagtcaatcaccagagacaaccaag

SEQ ID NO: 166355 - DNA, 368 bp, Zea mays
  Clone ID: MRT4577_83298C.1
cggtctggactgcgccctactctctgcggtctgcgctcagtcgttctctgctcccctcggcagcagtcaccaactccccgcgaagaacttgctgcccgaccccaagctacagctcaccttctcgcgctctgatccctagtgtggacctcctcgccggaagctctagggccggccatgggtgcccagccgaccgtccctgctcgccatggccgtccctctctgttcgccgtggccgggtcgccttcgtcgttaagctcggcaatggcgtgttcggtcgcatactcgctgctatcctccgcgacaacggcgacaacggcgagcacgagtttatactctatcgcaaccccaacgtcgtgtaggtctgtcct

SEQ ID NO: 166356 - DNA, 603 bp, Zea mays
  Clone ID: MRT4577_83299C.1
gggccgacccacgcgtccactctatctttacctatggcggtgagacgtttcgtggaacaggacaacaccaagaaaccaatcttattagacgacctgacggaactcacatcacaaaactttgatttgtttagatcaaatgtcgactcggtgatcgatagaggtgcttgaaatggtgcgggccttgcaaagtgatggctccgaaattccaggagatgtctgagaagaacctggatgttgtgttcctgaagctcgactgcaaccaggacaacaagccgcttgcgaaggagctgggcataaaggttgtgccaacgttcaagatcctcaagggtgggaaggtcgtgaaggaggtgaccggcgccaagatcgacgagctagcgcaagccatcgacacagtcaagtcagactgacaaagaaagcaggtgatgcaactagctagtgtagacgatgaatgaatgatgtccccggtcggtcttttgtgggacagcaaggctgatagatacgtacgtacgtactcattaacaattaatgatggatgtaggcaatgcgaaatatacagtcaatgattcatatatgcatgcatggactgttttgtagctagcagcc

SEQ ID NO: 166357 - DNA, 362 bp, Zea mays
  unsure (1)..(362): unsure at all n locations
  Clone ID: MRT4577_8329C.1
aacagaaaacccccgtcgggtctggaattcttggatcacaaagaatattcctcccagggttttcgacgtaaagcaaaaaaaaaaacccccccnttcaaagacattcccttttccggttttnaagttgtattcagtttacaagggcttgtttcgattttgaaattcccccccttaacatttttgtaagggagcnaaaatttttttgttttgtcagaacaacccctcttatgtttgggcatgtgcctttttaaacaatagtggggagaactgggttaacaacgacttctttttgctcgatttctgggccaaaacaaattgatccatcctgccagtttacctgggcacctttggaactttgagtt

SEQ ID NO: 166358 - DNA, 562 bp, Zea mays
  Clone ID: MRT4577_832C.1
gagataaagcggaagactttacaaaacatattttacatttacaaagctcaagttttacaacataagaagaattgtaattattacaagtcctgatagtacccaaagtgcataacttattataataattggaagggtgaagcctttccataagagatacacataaacattctaagcttcaaggcctccacatgaagtaactaaccaaaagataagggaataaaacttctcctttgttgcagagaagaggtgctagatctctctacccaaccatcagttagatatctctatcctcttgatgagcaggcactggagtagacttcccttcagctaccacttcttcttttgggagctctgacagtccaagtttgcagtgggtgcatgaaactgctcgaggaagacataagttggctggtcgacgacgaaactaaacacggcgacgatttgcggtggcgtgactacattctggccactgtgaggtgaaggagccggtggctgtggtaactaaaagcagggagatagcgcgctatgcacaagggctgaccgagttggtggctgaggagac

SEQ ID NO: 166359 - DNA, 357 bp, Zea mays
  Clone ID: MRT4577_83300C.1
aagcaatcacacttcaatatccatttttagctctaacacgcattctaattttgggtccatcttattttatcacacatttttgagtccaatttatccaggataacgtatggtttggatatacttatagaacgtctattgtacaccacatgggttactaattttgccctgcgcttagcacttgatttcattctgaccatgtaagatattcaggaatgtcggaatatgtggcaccactcttgtaataggcgaataccatagacgcattatatttcattgactcaccaacaaaaaattcggagtccttcaatttgctttggagaaacttggttggactcctcacaccctttttgaaggcat

SEQ ID NO: 166360 - DNA, 854 bp, Zea mays
  Clone ID: MRT4577_83301C.1
gggtttattataacggacatgttattagtgtagtgctatatatgtatagtaataaaatggggggcagaaaatagatggaggcgtgaagggttcactgttattaattaaccttcaccatgcattgtcatgactaattaagattttctatgttgtgtggttgataaaatttatgtagatatgaaccatcggtttggtgaaccaagcacagacctattaggggggtgcttctcatttttttttccaaaaaacaaaaacagaaatttatggtgatgatctctaatgacaatagatctcacctcactagctagatgattgtgtacgtagaatctgagacagcagtgtgttcattaacaatatttgcaggtgcgggccttgcaaagtgatggctccgaaattccaggagatgtctgagaagaacctggatgttgtgttcctgaagctcgactgcaaccaggacaacaagccgcttgcgaaggagctgggcataaagattgtgccaacgttcaagatcctcaagggtgggaaggtcgtgaaggaggtgaccggcgccaagatcgacgagctagcgcaagccatcgacacagtcaagtcagactgacaaagaaagcaagtgatgcaactagctagtgtagacgatgaatgaatgagtccctggccggcaaggctgctagatacgtacgtacgtacgtactcatcaacaattaatgatggatgatggcaatggcaaatatacagtcaatgattcatatatgcatgcatggactgctatgctagctagcagccctttgtaaatatattgtttaaggaaatgattcatatattcagcccctaaaaaaaaaaaaaaaaaagcggcc

SEQ ID NO: 166361 - DNA, 289 bp, Zea mays
  Clone ID: MRT4577_83302C.1
ctcggctatagcggaggccttgactgtgagggcaatgaagtgccacgattggtatatcgctctagtaggcaacgacgaggctataaccatcatgagatagctcgtgctacgcatgcactggcccgtgtctctgctgtactaacaaatgctccatatctgttatacttccattgtgatcactacatctacaacagcagggctataatggcagcactgtgatttatgatggagccttgactaggtaagaaggtatgctatgtacagttcgctcaaagatttgatgggattg

SEQ ID NO: 166362 - DNA, 502 bp, Zea mays
  Clone ID: MRT4577_83303C.1
cctcgaggccggccggggtcttcctccgccgcgtgcacaggaccacgccctccctgctccatcttcccatcgctcgctcctcaagttcctagcgcccagctgaattcccctgcgcgcgccctatcttccaccatgtgccctgctcgcccatggcgccagccacagctcggagctccctctgcatccccaggcctgcgcctgctgcttgccccagcttggagctcgctcgacctccagctccggcgcccggctgagctccctggctgccgcgccctgctctcttttgctgctcaccggtgctccagctcgcggcgcccctgcttttctctctcctcctctactcccgccatggcgcgcgtctctgctccctcccccacggcgtgcccctcaagctcgtccaggccgcgacctcgtcgtggaccttcctcgccggcgctcctccctgctcagctctccagcgcgcggccccatctcgctgcgctcggcccccagctctgcccct

SEQ ID NO: 166363 - DNA, 383 bp, Zea mays
  Clone ID: MRT4577_83304C.1
gccttccttttttttttttataatttccatggaacaggcagagtacgacccagaaaacgtaccacttattaggcacacacctggacagcccaaactagaaggaggggggagcaccaaaaccagatgttaaatacatacttgcaggactgtgttccacaggccgccttactaaagacagcgatcttgctttttgttaccagagcaatgacgcgcaacgaacgactagtacaaaacggacttgaatgggaatggaacaaccacatttcggatgtacgccgacatgaagcaatcaatggcttatttccatagacgaaacatcgcgggccatctttcataaagctcaagtggaacaccaagatccccgcctatggagcacattttgg

SEQ ID NO: 166364 - DNA, 229 bp, Zea mays
  Clone ID: MRT4577_83305C.1
atttcttgtgcctgcttaattgctaattgctggcctatccaccccgctgtcggtatgagagcttgctacaggaggtgcgtccgtacatagatcgatccatcgatgagctagctagctgacatccatggacagcttcttgtttgccgggacgatcgggcctttcttgacggccatgcccgctcgagctttggtgacaaggagggtccaaaccgagcggacctgtatctgg

SEQ ID NO: 166365 - DNA, 741 bp, Zea mays
  Clone ID: MRT4577_83306C.1
attaactacgccatgtgtaggagggctttagcgatggacttgctcatgtgtggcgtcgcgctgctcgccggtgctgacggagactgcgctgagtaggccgtggggagcatcatcacccgggccatgatgcaaagcatgctgattcaccgcgaagacagagagtgccagggagacattctacacctacaacgccttgatcgaggtggtcatgaagtgctccggtttctgcaccaccggagactagtatacgcgtaggaggaagatctgcgccttcttcggacagacgacgcacaaaagcaccgtgggatgagagactgctccggatggaccgtttgactgtggatactgccggttgaatgaacagatacagacggagccaccctactatggactaggacccatacagctagactcataagtacgactacaggctctgcgggcaagtgctgaacctgaacctggtgagagagccggacctggtgtggagagaccccgtgctacacattaagacggccatctgattctgggagacgcctgagtcgcccaagacctcgtgccacgccgtgatgatgcgagagtggaggccctccgtcaccgaccgcggcgagttgaggctccccggatacagactgaccacgaacatcatcaacggagtcctatagtgagaagaggaccgctccaccgacggagacatagtcggcaaggagcggatctgatactacatcagcactgttctatgct

SEQ ID NO: 166366 - DNA, 559 bp, Zea mays
  Clone ID: MRT4577_83307C.1
ccccacgtgcgagagaaaagaggagatgctgatcgcgcttctgcttccttatccggagctctgccgaggagcgctgcacagggaaccggagcggcaactgccggatcgggatccttacgttgttgagcgtgttatcaaccatgctcagagccatcggcggctactgcaagggctacggcgccagcctccacaccaagccggagcaggatcaggaccacgctggacccgtcgtggcaccgaccgtggacatagacgagccacatggtgagcgaccccgccacgcactccggtgggcgctggggcggcttccacaacatcttccacgtcctctacccggactacttgttggactacttgttgaagtactacttcaagcaccgctacttccgcagcttcaaccggtacctcaacacctacgggttcacgaacgtggacacagaccggcacgagttcgtgcatgagtggcagctgcggctgctggcgctcctgctgccgctgatcaagcacgaagagaacaacgccggcgccggcgcccgcggactcggccaggacctgtacg

SEQ ID NO: 166367 - DNA, 377 bp, Zea mays
  Clone ID: MRT4577_83308C.1
ggggtcagctgaccccaaaataagggctggctccgcccctggaccaaggattcagaagtcatcggtaataaaaaggacgtctgtagccaaaagttcaagacgcatctgcaggagaaagaaaagaaagaaaaagaaattatcatccagagaatacgtgagaaataagcaggaatacataaccaagatatttgtcaggtcatcatgcaaatccttggagttggcggccacaaaataggagtttgttgtaatcttttcctattatttagaataagttagttttatatccaattagagacgggatatataagcactattgtaagctgcggagacgagagatcaacagttatcattttctttaatctactacatattccttt

SEQ ID NO: 166368 - DNA, 612 bp, Zea mays
  Clone ID: MRT4577_83309C.1
cattgggtacctcgaggccggccgggagactatcccccatcccgcagaagccacatactacctagccgctgccgcatgcgctcccccctcgtcgcttagatgccaccttgtgtgactactccgacgaccaacaccatcactctgcacgtgcagtcctcgaactccattgacatggtgaaggctaaaatccaggacaataggaaagccccccggatgctcaaggtctcatcttcgccggcaagcagctcgaggacttcgtaccctcgacaactacaacattcacaaggagaccacccgtcgcactggtgctccgatctccgctaccggctacaagaacttcacgaacaagactcacaccaagtgcctgaagatccagcacctatgcaataaagtgtagctctgcgtgatacggctctataaggaggatcatctctcaggtaaggtgaccctcctccgccaagggggacaccacaatgattgatgcgaggtcgacctcatggtcaagcacttcgatcgacactactgcggtgaaagtggactctactaatgctactaacataaggcttgattggatgccccgatttgctttatacgccaaacgatcaagcattc

SEQ ID NO: 166369 - DNA, 271 bp, Zea mays
  Clone ID: MRT4577_8330C.1
attcggctcgaggtcaaatgcagctgccaattttttgaactagattgaacaggcgcgcttgagactatcctttacgtacgcggcgaaccgggatacatgtgagctagtgctacttaacgtaatatgcctcacgaatggtgaaaacctccttaaggtatccgcgtaggcctacatgacggtggacttctacttatgaaggcacaggcaggaagggcgacttccgactatgcccgatcctgaggttcaagtacaaggtcgagacacctaaggc

SEQ ID NO: 166370 - DNA, 168 bp, Zea mays
  Clone ID: MRT4577_83310C.1
tacaaaattaataagaaatgcaaaatgaagaaaagggcacctaatctcacctctttctataccataaagaaccagagatttaaaccctttttttaaaagaaaaagaagtgtttagagatttatctacttactctagagatttatctacttactctagactaaagacta

SEQ ID NO: 166371 - DNA, 876 bp, Zea mays
  unsure (1)..(876): unsure at all n locations
  Clone ID: MRT4577_83311C.1
ccttgcactttccggttccggcccagaatcatcttcttgcgaaacactccgctcttctccgttttcctcttctcttcgcgttcgacactactcccgtcccgtcctgtcccccctccgtctctcttctgtagcagccgcctcgctctctcgctccatccgatctcctctcgcgacccgagaaagccgacgaggtagtccagcgcgtcggccatgggcgacagccagtactccttctccctcaccaccttcagcccgtcggggaagctggtgcagatcgagcacgcgctcacggccgtcggatcgggccaaacctcgcttggcatcaaagctgccaatggtgtagttatcgccaccgagaagaaattgccttctattttagtggacgaaacatctgtgcagaagattcagtcactgactccaaatattggagttgtctacagtgggatgggtccagatttccgcgttcttgtcagaaaaagtcggaagcaggcacagcagtattatcggttgtacaaggaaaccatcccagtgacccagcttgtccgagagactgctgctgttatgcaggagttcacacaatctggtggtgtaagaccatttggtgtatcactgttgattgctgggtacgatgacaatggtccgcagttgtatcaggttgacccatcaggatcttacttctcctggaaagcatcagcgatggggaaaaatgtgtcaaatgcgaagacttttcttgagaaaagatacacagaagatatggagcttgatgatgccatccatactgcaattttgactctgaaagaaggatatgaaggtcaaatctctgccaacaacattgaattggagttatcncggctgaccgtgaatcaagttttaact

SEQ ID NO: 166372 - DNA, 183 bp, Zea mays
  Clone ID: MRT4577_83312C.1
atattacccaacccccatcgacagccattattcctactaaccagcatacttgatccattttttccttagtgcgacagccttcaccctttattaaaacgccggacgacctatcccgtttttatcatgacactgaatgtactgtcaccgaataggctttctttttttttgacaaatcttcataat

SEQ ID NO: 166373 - DNA, 473 bp, Zea mays
  Clone ID: MRT4577_83313C.1
taatggagaataagaaggatgacgctgacattctgatcgacgacgacgtgatcggatgacttgaatcggcgacgctcgccgaacagggaaccgacacctactacagcgaatacactcagacaacatgaaacaggaaccaggacaagggaacactgatcacgaaggaaagcgacgcaatctggaacgaaggagacacgatgcggaaccatgtacacggacacctgaaacagatggaagaaaaaagaccccaaacccctgaaaaaccggggactccggaaccgacaagatagacaaccgatgaacgacaaacggaatgaaagagcacgatcaaactctccaagaaggaattcaacagcatccagagaccgcagagacaagaaaaatcgatagtggactacagaacaggggagaaaatatatacaatgcatgaatgagggaaagaaagaacggaactacgagacatacattgcaaa

SEQ ID NO: 166374 - DNA, 230 bp, Zea mays
  Clone ID: MRT4577_83314C.1
ccagagtgaaattggtatccaatcacacacacaaaccaaatccgaacgcgtaagcataaagggctaggccggctaaggatagagatagctcacactaacatgtaatgggctcactgtcactgtcccatttgcaaaacctaaaccgccagcgccattagtgtaaaggacaacgccaccgcagaggcagaggccgtatggggagcgcttgctcttcctctttcactgacact

SEQ ID NO: 166375 - DNA, 722 bp, Zea mays
  Clone ID: MRT4577_83315C.1
cattgggtacctcgaggccggccggcctttccgtctttccgtcacctcccttcagacgacggaaccctagcctgctccccactcccccaccagaccaccacctcgccggaaccccggcgcctcgcccggagcacgtggttatcgccccccgtcggccgcggctgcggtgtagcggagaaagatgatgaacggcggcggcggccagaagaggcggaactcgaaaatcattccctacgagtaccgcgttgagtccgaccccaagttcttcggcaagtcgtggcggaagctccatgatgccatccgtgagatctacaaccacaactccatgagcctctccttcgaggagctctacaggtgaggtggacatgggcgaggaatggcttggctccgtctccgacgctggtgacgcgtgcaagcttcgctggacacataagcagctcacgtactcacaaatggagcacgacaagtattttaaagtcgacgtgcatgcacagatgttgccatggctttcagtctctcgtgaaccatcgcggcctcgcggggacgcgacgcgtcagcgcccgacccaacacaacccaataatgcaatgctgctcacccaggcggcgggagggcctgtacaaatatatggacacgatggtgctcgctgggctctcagaaagaaacgttggatcgtcttccgctagcttcccgggcgatggcggggcaggggcagcgcctgaa

SEQ ID NO: 166376 - DNA, 655 bp, Zea mays
  Clone ID: MRT4577_83316C.1
cattgggtacctcgaggccggccggggaagctcatagctatattgtccgtccctctacagttcttatgtgtatgatccattttctccccttgtatcatccatcacctctattcgcttgcgcgacttcttctgatgcctcttggaatctaatgccgacactgttgcatgcaagatctacccgcagtatgctgctacctcccgcaatatctggttcatcggagtccccaactcgtccctgctacgctgcggaagcctctacctcctacactggcaagtatgggctcggataatgctacgtttgaccggcatagcacgtatttcagatgggaaaaagaggtatgacagatatacgctctatctcatccctacactgggaaattccccatgtgaatcgcagtggggatcaacatgtattgtgtattgcctgagagatggatttcgcgagtatttccttacttgcatgatggtgaaccatgattgatgatcttcgtagtcccaactgatagagactcgttgtggacaagatgaaagaaagactgaaaagcggacaagatcttggtgggactgaccagactgctaagatggatgaaatatctgctctgtgcaaggatgactatcccacataacttccttgaatgtgctaaacgtgccctaa

SEQ ID NO: 166377 - DNA, 601 bp, Zea mays
  unsure (1)..(601): unsure at all n locations
  Clone ID: MRT4577_83317C.1
gtgcggcgctcgaggcggccgggtgcanatagacaatcctcttcctcaagatctcctcaaacaaattcacagtcacagcgcgctaaactctcgcatatgtctgaccgaggtaatggcggaaaggttctgcctaaggaccgccgccaagcgccaccgcagggtgttgcgagacaacatccaggggatcacctggccgatgatccgcatgatgtcgaggatggctgccatcaattgcatctccgcaatcatctacgatgagacccgcggagtgctcaagatcttcctcgagaacgtcatcctcgacgacgtcacctacaccgagaacgtccgtcgcaagactgtgaccgacatggacgttgtctacgctctcaagcgccaagaccgcaccctctacgctgtcggagtgtaagacggccctctcacgcagaacaattacatgtcgttcgggtccgtcgtgttgtgttcttgaactatctaatctgcgttgtcattatcggagctggtatctgtggcgcatgtacagcatcgttctatgatctaccgcatgtgctgtaatatctcgctgctgcaagcaatggcatgtcatcatatctagtctctg

SEQ ID NO: 166378 - DNA, 374 bp, Zea mays
  unsure (1)..(374): unsure at all n locations
  Clone ID: MRT4577_83318C.1
gcgaccacgcgtccggcaaggagcggatgctgtgggcgtccacgcattgcgctcttctgcggcggcaagcgcgacggggcctggggggtggggcagctgggcgagtggctctgacgtgccgcgctaccgtcaccgcgggtgagcggggcgcccggggggccgcccgttaccgtgcgccgggtgcgcctgcgcgacggtcgccacctgacctacgaggagttcggcgtgcccaaggaggtggcgcgctacaggatcatcttttannnnnngcttcgccagctcgcgcttcgacagcctccgcgccncncatgaagatagcgatgagctatgcgtgtacatggtgggcttaaaccgcgccggctacggtgagagcg

SEQ ID NO: 166379 - DNA, 805 bp, Zea mays
  Clone ID: MRT4577_83319C.1
aaaaaaaaaaatagtgggttttttgagtatatagattcaggagatcgaagctagtatatgtacacatcaaagagcaaggaaaggtcaaaaaagcatcggatctccattttatatatatccagctagctatatgccaaccacagaagaaaagtaagcacgcacatggtaaaattaaaatagcctggcagctgctatggatgtatgcatcagatgcctaatatatatgcaagataataattaataagcagctcaagcaaagacagatcaagagttcgagacagcaggttggcaaaataaatacagatcatgaagtaaaaccttgagatacgaatgatgaagctgcatgggtaaagtaaacaaggaaaggatcggagggagcacccttcagtccaagcaaagacggtgcgagatcgaagcttttacctcccgcttcattcactcatctgcaaagctcgtttccatggccgtttgcttggcatgtgggtgaatgagtcggcagctaatccgaccctagcaccgcccctgagtggactgaaggacgctctcttccatccggccagcgaccatcgatcacaaccatgacgcccggcggcaaatatattgacaagaaatgaaatcaaaagagagaggaagaacaaacatgatgcgcagctgcgctagctagtgcttgatctgtctgaccacctcatggcgcgcagtgtttagttttctccctggatcttgcgaagaaggcgatggattttcgatggttgcaaggaggagcgaccgagaaagggtttatataatatgtcccgacccggccggc

SEQ ID NO: 166380 - DNA, 1537 bp, Zea mays
  Clone ID: MRT4577_8331C.1
ttcttgtggtccatccggcggttcgggaataccttgatttgctttcgcgcgtcctcctcgcgatcccatcttttttcttcccttacctttagtttctcctcctcctctctccgggtggcagacccggccttctctccgccctcttcgtcttccagttcgaagctgtagcggcagctagagctagccacgtgtagagcggcacgactgcagcgtgcgaagaacaaacaaaaccaggaaaagaagctctcactcactcacaagtagcaaaagatcaaagggaaatcaatcatataccatggtattttcttcggttcctgtgtaccttgatccacccaattggaaccagcatcagcaccagccacagcatgagcaacagcaagctcaccatggccagcttccaagtgacgccagaggaggtggaggcggtggcgtcgacgcgcatgcacaccatcatcagctaccgccgatgccaccttctgctcctggtggggctctcatggctcctcgccctgacatggcggctgtggtcgccgcgagcggtggcagcacgagcggcggcggtgggccgactggcggtggttcccctatccgtccgggctccatgaccgagcgggctaggctcgccaagatcccgcagccagagccggggctcaagtgcccgcgttgcgagtccaccaacaccaagttttgctacttcaacaactactcgctctcccagccgcgccacttctgcaagacgtgtcgccggtactggacgcgcggcggcacgctccggaacgtccccgttggcggcgggtgccgccgcaacaagcgcaccaagtcgtccaagtccaactcgtcgtcagccgcctccgcttccagcgcgggtgggacgtcgtcgtccacctcgtccaccgcgaccggtggcagcggcagcgccgccagcatcatgccgcctcaccaggggcacgggggacagccgcagttcctagcctcgttgcaccaccctctcgtcggcggggaccactacagcaccggcgcgtcaagattagggttccccgggctgagctcgctggaccccatggactaccaccagttcggcgccggtgccggaggtgccatcgggctggagcagtggcgcctaccgcagatacaacagttcccattcctaagcagccgccccgacgccgtgcaaccgccaatgtctggcatttacccgttcgaagtggaaggccacggcggggaaggttccggcttcgctggtcacatgcttggtgaccccaaggtgtccggctcagccggactgatcacgcagctggcgtcagtgaagatggaggacaacccaacgtccgcagcgatggcaagcagctcaccgagggagttccttggtctccctaggaacctccaattatggggcgctagcggcaacggcggtgcaagtggcaacaatggaggaggcaccggcaacgctgccggtggcggcgacactattcctccgggtagcagctgggtagacctgtcaggattcaactcgtcttcgtccgggaacgtgctgtga

SEQ ID NO: 166381 - DNA, 481 bp, Zea mays
  Clone ID: MRT4577_83320C.1
gttgccgtgcaacacatggatacccttgccgcgaccgcctataagagagatctgaggccacaccatggtgtggacacttcctcgagctcgatccaccgttgccctccgtcgatctaccgctcagcaccccgggaggccagccgagccatagaggatcctaactttgtgcccgacgagtagcgcgttcctacacccaagtcccctgtggtgccattgtgttgtagcagacgctatgcccgacgaggagcttgtagacgcgttctttgccaccattattttctagtttctattatcattttattagaatgtactaaataaaagccttgtatgtaatggcaccacttgagcatggtactggaatgtattctagtatatctatgcattttagtttcggtcattacaccgggacgcttcactatgctatgtattagactctgtggatgtcttggacatcttattgtaataaaagtacctttcccag

SEQ ID NO: 166382 - DNA, 661 bp, Zea mays
  Clone ID: MRT4577_83321C.1
aatgatctacctcagcgtatcgccattatcagcctgccatgccgaagaggaaacggcgtgcaaaagcctacatgttgggggcgcgtgatcgcatagttcatggcgttgccgtgaacaccatggctacccttgccgcgaccgcctataagagagatctgaggccacaccatggtgtggcacacttcctcgagctcgatccaccgttgccctccgtcgatctaccgctcagcaccccgggaggccagccgagccatagagccgatctcggaggacggccagctagagcctgctaaccaggagcctaacgtcgaggagtacgcgagtgaagcggatcctaactttgtgcccgacgagtagcgcgttcctacacccaagtcccctgtggtgccattgtgttgtagcagacgctatgcccgacgaggagcttgtagacgcgttcttcgccaccattattttctagtttctattatcattttattagaatgtactaaataaaagccttgtatgtaatggcaccacttgagcatggtactggaactctgtattctagtatatctatgcatgctagtttcggtcattataccgggacgcttcactatgctatgtattaaactatggggatgtcttggacatcttattgtaataaaagtaccttccagat

SEQ ID NO: 166383 - DNA, 531 bp, Zea mays
  Clone ID: MRT4577_83322C.1
aaaatcgggaaatgtgactttttttttttgggtggccccctccctcttccaaaaaactttttttttggtttccccctaataggcggtctaaaagagggcccccccaatgatgtgttgttggtgggaggcccctgggtctgtcaaagcctgttggacaaagggcaacaattgttgtagttgtaagagggttgcggggtttgccccaaactgctggttgaaaggcaccaactgttgctgggtcaaaaaagaatcacggtttgctgccgctagctggctaaatgggagtagtttttgctgctgccaataacccgcggggttcagtgcggccaattggttaaatggaaaaatttgttgttgctgggagttggccctccctagctggctgaatggtaatagttgttgccccttttaaccaccagggttcattgttaaccgttggttggttggaaaaaattgctgttgcctggcccttgggggaaaggtttccccaaccttcttggtttgtccccgggttgccgatttgcccgtgtt

SEQ ID NO: 166384 - DNA, 295 bp, Zea mays
  unsure (1)..(295): unsure at all n locations
  Clone ID: MRT4577_83323C.1
ccagcagacatgaattgcattcaaatcattcagcaccttgacgctacaacgccaaaaacgactgctacaagggtaatgaaatcgnatgacgccgagtgactccctccttctattactttcaattaacttatgttggaatctcccgcatgtcgcctctacgccgttccgcctgactttccccatttgacattctctactgactcccccgactgctgaatttgcgcattctcaagccaagcacgcgcttagctggtagtgaacaacatcctgaacacacgcttccacaaaggcgcct

SEQ ID NO: 166385 - DNA, 269 bp, Zea mays
  unsure (1)..(269): unsure at all n locations
  Clone ID: MRT4577_83324C.1
tgttaagatcgcgagcggtccntatttttgcatgcgactttatatcttatctatagggtaacgtaaacaagtatactagcacggagtctacaacttcaggattggcaaaaccctagctcttcccaactgaattttctcggacggcagacgcctttgaccagtttgcctaataggcaaaagaaagttacggaccttactttcgcaacagttgcgaagcttgtatggccaatggtacgggccctggaggggggcataaaacgcggcggctg

SEQ ID NO: 166386 - DNA, 1380 bp, Zea mays
  Clone ID: MRT4577_83325C.1
cgcctcggcgccggccccggggggccgcgtgggccacgcgtccgggtcgcccgcgcccgccgcgccccccgcccgggcgcgcggccggccgccccccgcggggtccggcgccgcgtgcagcttcgacctggccgacctgctgcgcgcgtcggcggaggtgctgggcaaagggagcgtggggacgtcgtacaaggcggtgctggaggaaggcacgacggtggtggtgaagcggctcaaggacgtggcggtgcagcggcgcgagttcgacgcgcacatggaggcggtcggcagggtggagcaccggaacgtgctccccgtccgcgcctactacttctccaaggacgagaagctgctcgtctacgactacctccccaacggcagcctctccgccatgctccacgggagccggggctcgggccggacgccgctggactgggaggcgcggatgcgggcggcgctgtccgccgcgcgcgggctggcgcacctgcacacggcgcacaacctggtgcacggcaacgtgaaggcgtcgaacgtgctgctccgcccggacgcggacgcggcggcgctctccgacttcggcctgcaccagctgttcgcggcgtcgacggcggcgcggggcggcgggtaccgcgccccggaggcggtggacacgcggcggctgacgtacaagtcggacgtgtactccctgggcgtgctgctgctggagctcctgacgggcaagtccccctcgcacgcgtcgctggagggcgacggcacgctggacctgccccgctgggtgcagtccgtggtgcgggaggagtggaccgccgaggtgttcgacgtcgagctggtgcgcctgggcgccagcgccgaggaggagatggtggcgctgctgcaggtggccatggcgtgcgtggccacggtccccgacgcgcgccccgacgcccccgacgtggtaaggatggtcgaggagatcggcgccggccacggcggccggaccacgacggaggagagcgagggcgtgcgcgccacgtcggaggaggagcggtcggggggcacgcctcccgccgccccgacgccgtgacgacgcagctagcggggtaaatgtccttggccggattcaattgcataggttcctggtgcctgcatgtcgatggacactggtattctgtttcttctttgtttattttttttttattttcgctcttttttttggtcttttcagggcattgttttgttggatcaaattttcgtttttccccccgtcatctccctctctctttcaggcttcattcatccaagcaaagaagtgtaatttttcttcagcttctctttagatccctatttgtgatgcacttatgccgtgatagtcttcacaaaaaaaaacaaaaaccaacacac

SEQ ID NO: 166387 - DNA, 630 bp, Zea mays
  Clone ID: MRT4577_83326C.1
cccctcctcgagtttttttttttttttttttttttttttttttttttttttttttttttttttttttttttttttttttttttttttgggaaagttaaaaagggggggaacttttttaagcttgctcgacccctcgttaatccccaacaaaggggggggctacataacttaagggaagcgttgacctgggggttttacccccatttttttaattaaacccgataccccccccgatcaggggggggagctccactggccggccctttaaaaaccgtttttgccgaaagagaagtcttccagggccgggtgtttttgggggggcgagttcataacaaaggggccgggctgccccacgggctcaccgaggggttgcccggggggaaggacaaaccttaacggccggggggacctgttccacaccctgaccccgtccccggaaccaaacacaaggcaagggggggccggggccccctcccccccaaataccccctcgccggggacaaagaaaaaaaaggggttccacccctccgggacaggctggggcaggggggacccaaggcgcatggggaagcccacccccctgatgggggggcccggggccccgggggacccccccccgggggccccccc

SEQ ID NO: 166388 - DNA, 303 bp, Zea mays
  Clone ID: MRT4577_83327C.1
cgaagattcgttctacttcttcaatgagatgcagaaggaccacgtccagcctagcgtggttaccatgtctgtgttgctgcgggcttgcgcagggctggctttgctggcgaaagggaaggagctgcattgcttcgcactgcgaagaagagcgtatgaccacgacatggttgttgcaacagccctaatcgacatgtactccaagtcaggaaacctggcaagtgcaacgcggatattcgaaaggattcaggaggagaagaatttggtgtcctggaatgcgatgctcaccgggctggcagcacatgg

SEQ ID NO: 166389 - DNA, 399 bp, Zea mays
  Clone ID: MRT4577_83328C.1
gcatccggcagagtagcctcagcttatttaagagcttcacgggattcgttgtaggaccgatagctccacagtgcacaggtgcatacacacgtacagctgcactgcaccaatggccgacgacgaggtccaggtcccgactgccgatcccgtcgaggaggagtgctgctgctgctgcatcgggaggggaggctgcccagctgagcggcggcgaaaccccgaacgaggagaccagtgctacggcggcgaagaccgaggtcgacaccgctaaggagccggtagaggccgacgccgagactgagtacaaggaggccgaggatgaggcctaagacgagctgcagctgagccgaccgaggcaaagcccaaggaagcagagaccgaggccgacgatgccggcagcag

SEQ ID NO: 166390 - DNA, 215 bp, Zea mays
  Clone ID: MRT4577_83329C.1
gccccggaaccgacagagcagagccagcagatagaccagcatcaacgaccggcggcctcagcatgaacccgagagccggaaagggcaccgccggagccagtgggcgcggactccaagtaaacgactctagacagagcacggggaggacagctgctcggagagaacggagtcacaggcacgccgtggaggcagtgccagtgcgaagacaagagggc

SEQ ID NO: 166391 - DNA, 124 bp, Zea mays
  Clone ID: MRT4577_8332C.1
ggggcttggaacacattctgatattattcaactataaagttcaagctatatgctctttgttcggattgcaagctaccatgcaaatgactgacaggaaaatgatcctagccacacgcatacaaaa

SEQ ID NO: 166392 - DNA, 395 bp, Zea mays
  Clone ID: MRT4577_83330C.1
ggcgcggaaaaatccccgggggcgacgcgctcttgtcgcggggggcgccctttttttttttttggtgtttttttattcatctttttgtttttctcagcaatgcccatacacaagccaaatcggaaaacttcactgggcgtgcaccaggaaaaacagccaggtcccgcaagagcaaacacatgggacccacctacaaccggggtccaccacaagaaaaagaaggccaacccaaaaacaacccagggtccaggaaaccttgacacgagagccgaatagtttcagggatgcgggtggaacggtgggctcttgaatactaaccagcggcgtgaatgggcctgcgattgacagcaccaaaaggatggcccccgccaggttttgagggaccaagttccttc

SEQ ID NO: 166393 - DNA, 246 bp, Zea mays
  Clone ID: MRT4577_83331C.1
gtcttcacactcctcgccgtcacgtgacaccagtgcaggccgaagcagcgcaatggcgagccgcaccatggccctctcctgcacagccttcggcggccaggcagtgaacgtgccgtcgtctggcttcggcgaggcacgcctgcacgatgcggcaagcacggcgagcgaaaggcaaaagaccggcagcgaaggtccggcagcccgtggtacagccccgaccgggtggtgtagctggggccggtgtcc

SEQ ID NO: 166394 - DNA, 198 bp, Zea mays
  Clone ID: MRT4577_83332C.1
atttatttaaagtataaaaaatgtaattgagatgcattgtaattgtaagtgatatgttttaacggttgaaacgagtaaattgttgaacacctatttcttggatttttatgtttactgtagtatgtagtatgaacaccaactattgttctagcttttgtaatatatatgtgtagccagctgaattatcacttatatttt

SEQ ID NO: 166395 - DNA, 279 bp, Zea mays
  Clone ID: MRT4577_83333C.1
ggggcaaaaaaagcccccatttttttctggcaagggatataattttaaaagcgcttcatccccaaaaccaacattttccgtctttttccaaaggggtttttatgctaccttttatcatattgtcccttcccccaagctggattactggaaaaaccaaagaagggggattaacccttaaaagggtttattggcaaaacattgcccggaagcctgattttaatttctaacaaccatgggggggccataacttccactttttgaactttccgccaccagaac

SEQ ID NO: 166396 - DNA, 660 bp, Zea mays
  Clone ID: MRT4577_83334C.1
aattcggcacgaggcacacgcggtcgcccgcctcctcgcctccacaagcctacgccgccgccctcgcctctttgccgtcgccccgctcgcctgctccgccaccggcccgaccagcctcgcttcctccctctgcctctccctcccaactcccgccgccgaagcgcgcagctccgccagccccgacgcggctctgccggctgccgcgccatccctccgccggctcccacgcgcacctcctcgactgcgcgaagcctccgcgccgccgccgccagggccgcctcctccgcgaccgcgcgccgcccctctccacctcctctgcggccgcgccacctcctctctgctacatcgaccaacagctcatgaagcaacgagcgttccagcggtatgacatgatcccacagaacgctttgagagtagcagaggaaggaggaacgaggaagggtttatagcttggattatatgattggatgatcggatggttagtagtttggattggaagattggatcacatcgcgtagtccacctctcctctccagtttccacgagaataaaagtactggcatattaatttcagattcttagtaccacttatgtcattaacattagcaatggtaaattcctcttattttgttaacgtatctctcaacatgcttatttata

SEQ ID NO: 166397 - DNA, 323 bp, Zea mays
  Clone ID: MRT4577_83335C.1
gggggacaccggggccaatattttaaaaggggggcccaaaaatttatttcaccctttccccctgggaacaaatttttcaccccctatggggattggggcgggaatttttccaattcaattaactggggtttttaaggcaacaaagttttggggggaacaacttgggggggggggcccctgaatttgcctttaaagaatccccaaattttcccaaaaaaaaagggaaaagggtgggtcccttttgggacccacccaaactttttaatgggatccaggggttttttccggggccttttaaacccgatgacctttcaggccacccc

SEQ ID NO: 166398 - DNA, 299 bp, Zea mays
  Clone ID: MRT4577_83336C.1
gggggggggggggggtttttttttttaatatttttttttatacctatacctaaaagaagaacagggaattctggaaagatacgtgggggagctcgaggtttccctattttgagtagaatgaaaggtgggcgggctcagggttataaggggcacctgtggtgcatgggggaacttttaattgtccccccaggacccgagccggaaggatctaggggaaaaaatggggggcccggtgagtgccccaactcaaataaattcccttaaggttactgcccggtttgggacatttaaaacggggg

SEQ ID NO: 166399 - DNA, 447 bp, Zea mays
  Clone ID: MRT4577_83337C.1
attcggctcgagcctagcacgcatttagtataacactgcctccaagaaggccaaagctgatcttcgggacggcgatgaagcagaaggttctaacaagtgaaaatctcgtgtcgaggatgatgagcatgatggtaatgaggacgcggatgtgtaaatagcacgatggggcacagcagcttggcaattgagtggaggctgctttacttatggttgtatgtgctgcacatgatgctgatacctgctgtagggaaaatctgatcatgatggttcctgagggtatggcatgctggagtacccccttcatgcctgtaaattctgacgacatcatgtgctgttgtatatttaggaatacctttgcatttcctgtttaaaaaaaaaatactctttcctattttttcaaatatggtcggaccgcggcctgtgagctctttttccctttagtaatct

SEQ ID NO: 166400 - DNA, 618 bp, Zea mays
  Clone ID: MRT4577_83338C.1
cagagtttgaggaaacatgggctcaaatgctctgtgaatttaagttgcaagataacaagtggcttaaaaaattgtataagctcaaacagaagtggtgtagtgctcttaacaactgcacctttgatggtgggatcgagtatgaaccacaatgtgacagtatgagcaacatgtttaataatgtttctgataagttgacttctctttgtgcaattgctgttgctgtggataaacagactgaagattggagggaaaaagaattagatgaggatgcacggtgtttccaaaggccacctgcttgcatcataaaatacagtgatattttgaatcatgcagcaaaggtttatacacatagaatctacaaactgtttgagacagattttcttgatgggtgtggagccacaaaattcaaagagcttccgtgtcaagataacaatacatatcaatttgagatgactatgcaagggcgaggatcaagagtttgcacagttcatttcaatatgtctatgatgcaattaagttgcagctgcagtaagtttgagacaatgggtttactttgcccacatgctttgaaagctcttagtataaaaaatatatgcaaaattccagaaagctacatac

SEQ ID NO: 166401 - DNA, 1014 bp, Zea mays
  unsure (1)..(1014): unsure at all n locations
  Clone ID: MRT4577_83339C.1
gaattcggcacgaggagtcctgactgtctgcctgcccatccgtacctgatttgggtcaccgaagcgcagcggaccaccaggccctgcctgtgctgtgcatgccttttcttccttccgtctacccactccttgacccccgcttcgcagcgtcatgcttctgctcctcctcatatacctccctcgaggccggccgggccgtgagataggacccaaatactctctccattgcttcccttccaaacaggtgtaggaagcaagatcgatcgatcgagagaacaaaacaaaagggtatctgcagttcctgcatatatagatatggcgccggcggcggctctggctctgagtctgctcctcgcgttcctggcgatcgggccctgcgccgccgccgacagcatcgacctgtggccgatgccgcagtcggtgtcgcacgggacgcagaagctctacgtcaagaaggacatcaccatgtcgatggtggggagcacgtactccgacgagaaatcgatcctcaaggacgcgttccagcggatgcttgacctgatcacgctgaaccacgtcgtcgacggaatcgacccaggctcttcggttctcacctgcgttaatgtggttgtgcgtacacctgaagacgagcttagcttcggggcagatgagtcgtataacctgactgttccaacgacaggagacccactgtatgcacagatccaggctcaaacagtgtttggagcacttcaagccttgcaggtaataagtacttcatgtggttcatagagttacaagcaacaagtgcaagaaagatgccccacaacgatgcagtccaacactagtttttttttcctaatcaatgcagacgtttggtcagttatgttacttcaatttcacatcgcggctcattgagctcaaactcgctccttggataataccgacagaccccagtttccctaccgnngactgnnctatggttangaccagcatttcaaccttnttatccgaaaaaaaaaaaaaaaaaggccccta

SEQ ID NO: 166402 - DNA, 1325 bp, Zea mays
  Clone ID: MRT4577_8333C.1
taaagtgtgactacataaccaacaacattgctgaggtatttaacaactggattaaagactacaaagacctaccagtttgtgaactagcggacaaaatcagatgtttggttatggatctcttttttaggaggaaaaggatcggggacaaattgggtggtaaaattcttccaatagtcatcaatctgttgaagactagaacgaggggtttgggccatttatctatacaaaaaggtgactactatcatgctgagatccgtgataacaacaacattcaatgcagacatgttgtgaaggcagaacagagatattgttcttgtcttgaatggcaacacacaggggaaaccctgccagcacggcctagtggtcattatagcgcaacaaatgcgagacgttggaatggagcactttgtggacgactacttttcggttgacaaatttaaaaaggcttacgcacgaaggattgaaagtgtaggcgacaagtccttttggccacaagtggccatagccaacgaagttaatgcacctattggtaagaggagtgttgggaggcaaaggaagaatcggatgaaaagttgcctagaaggtggcgctggtaagaagaaagagtccatacctcaggaggaaaaggagaagaaggtacttagaggcaaaattaaatgcccgaactgtggccaacttggacataggaaggctagcccaaaatgccctctaaatgggtccaaaaaaaggaaaaggaaacctcgaaaaaatgtcacaaaacaatggtttccaaaaaatatggccgaatcacctatacatcaagatgacaacccaccagacgttcccggacgaactgaagtgacagcacagggagttgatggtggtggggacgaactgtatttgacagcagagggagttgatgttgtgccgcaggagtccgagggagttgctgtcggccacttaacagccccaaggcttctgttgggcgccacaacttcagttcctgatgttggccacttaaccccaccaaggataaaaaaaagagcaataggaaagaagttgacgccgaagaagaaaaatgcttgaaagtaactgaactgaaactgaatgtgttcctgtatgtgtgagactttgtgtgttcctgtatgtgtgagactatgtgtgagactgtatttgtttctgtttgtgtgagacaaatcagttgtgttcctgtatgtgtgagactgtttttgtttctgtttgtggccagacaatgtgtgaactgctactagtttctgtttgtggccagacaatgtgtctgtttttgtttcagctgcctgttttcattggtgggaattgccagtttc

SEQ ID NO: 166403 - DNA, 366 bp, Zea mays
  Clone ID: MRT4577_83340C.1
gttgttgagtgtttttttttttaatccgccgactcgcttttactgatgccaaaagatgaacaggggggtaaatgtaaagcatctccgagatgaagcaacaccgtaaacagccatattttttctcaataacccggtggcaatgcaggggaattaacaactcttacaacatcaggtgttgtaaaccacacattacttcataacagacacacttaacacgttggcgggagcaactttcggcagatcacgggataagggcagcccactggcctgatgctgcgtcataagaaaacttttttaggactggtaaccctggtggccatcctggccctaatggaactaagcaccgccctccttgtagtccttttc

SEQ ID NO: 166404 - DNA, 499 bp, Zea mays
  Clone ID: MRT4577_83341C.1
ggggctaatggggtggctacctttgccaataacttggcaaccacatgccgcggggaaaaaaatccaccggggaaccaaaaaaacaaaggaaccccggggggggggcaaaaaacaaacccgaacatttaaagggccggcacaatggggaaaaagccccaagcccccagccccgggggggccaaacccagggccttaggaaccaaaaaaccctcctaaacaaataccgcaccccgaaccaaaaggcccgggggaacccccgtccgaccgcgggaccacgcacaacacccccccatgggccgggcaaaaccccgggggcccctggccacccaaacccccaggacccaaaagggcctacggggggaaacccctgccggcccccggggacccccgcgaaaacccgaccccggccccgagggggcccggcggaccccaaagggaggccggcaaaaacctggccgaaaccagggccaaacgggaacccgggggaaaatgcaaaccc

SEQ ID NO: 166405 - DNA, 202 bp, Zea mays
  Clone ID: MRT4577_83342C.1
gacacaaaagggggggcgtagagttaagattcttttcgatggagggggacccaacacagctgggcacatggctagcctgctaccgggctgatccaacacatcactactcaacacactgttggccgccaaaagcccccgagggggctggggggggctacgggacacgacccctccttcgggcttaatcatcatttgagactca

SEQ ID NO: 166406 - DNA, 564 bp, Zea mays
  unsure (1)..(564): unsure at all n locations
  Clone ID: MRT4577_83343C.1
taaggttatacttgaactccaattagataaaatcatcaacgaagcaaaacctcatgaaatttccctccaaaaattccatttttcccataggatttatatttttctgaggaaaaaaaactaattaccttgaaaaaatggggttttcaaattaggcctaagaatgaaccttcaagctggagtaagaacaacacccttggtgactgcattgaagatctccatataaccaacaacgccaaccaagacgtcatcctcgccgtcagttacccagatgtgcgtggtcctgtacgacagcatctgcgccatgacggcggcgagcgagctggtgctcctgcacctcagcgccgcgttcccgccatggctcgccatcatcatctggccgacgaggctggccttgaacgcggccttcccgccgccgagcctcaacgtcgacggcgcggcgacgtgcgcgtcgccatcctcatccggcgccggcacgccgngaccgtcgactcccgcggcgaagtttagggacgacaggctcgccatggagtccgcggcggccgcgtagtcgcggcgccacagcct

SEQ ID NO: 166407 - DNA, 348 bp, Zea mays
  Clone ID: MRT4577_83344C.1
gcaaaacattgatggcttgtgcacagtctgcgactcgtgtgaatgtgaacataatcgtctaaaaaccgtatctgtaaactaacgctatgcttaacttgtaaccaattctatgccttattggacagtgatgcgcattcttatatttgaaccaaattacattgtagatattgaagacagaacaaacctgcatatatgtgaaatggttgatgagtggtgtgagatatctgaccagtatatgattgctagtttgattaacatggttcctatactgaagcttacaatgatgccaaaaaacacatctctcattattgtccatgatggccaaggcggtttctgtttgtgggacat

SEQ ID NO: 166408 - DNA, 538 bp, Zea mays
  Clone ID: MRT4577_83345C.1
tttttttttttttttttttttttttttttttttttttttttttttttttttttttttttttttttttttttgggggcaaaccaaaatggccgcgtcaacagaagggcgttcccagcagcccccaccggcacgagaacaattggggggggagataccccttcgataacccaacccgccctattttatcaaattcccccacttcctctcatgccaacaaaaaatttacaaagaatgacatccccctcccccttccaaaccagcgccaccatcccaaaaaaaaaaactggcttttcgaaaacccctgggcccatcatacataattttagggcccaattcattgggccttttggtttatcttaaaaagagaagagtccgtgccaacccccacccagcaaagtccaacccccatgatgaacacccccagtactacctgataccagggcactttactcctggggatagacaaaaagcaggcccctgggaaaatataggccccaaacatggggagaaaagacccgaccagggacatgacaaggcc

SEQ ID NO: 166409 - DNA, 642 bp, Zea mays
  Clone ID: MRT4577_83346C.1
gccggccggggccggggaaaaaaaaaaaaaaagtagtcattcacagtgctctcatctcgaaaccctgaactcggagagcgaaagctggagccgttgcgactccaaccacacgtgggtcaccgaccgcggggcttccattgatcgagaacgccctgcgcactttgacgttcatccacgtcacgatacacacacacattgctcttgctttttgcaccctcatcaacggcctgtgcaacagaacgtatacaccaaaccagcgaacgatttcaaacgtcgaaccaggctccagccgcgcaaaatcagcttcggacacgcaagcgcgatcggatcgggcctgagtggagcaccatctcccaattcctcaacaacgacttccagcgattctcccactccatcgtctggatagcaaacatacgcccatgtccgcctacaaaggccagcgagggcccaacgtggcccagtacatcgcgaacctcaaccagctgtcgccacagcaggatctgcttgccgatccagaacccaccgaggacttctccgacttcctgaacggaaggatcctccacgtggacaacgcccgaaacgcccgggtcgaattcgcttttgccaggggtttgggccttggattttataccgagcaaaaca

SEQ ID NO: 166410 - DNA, 475 bp, Zea mays
  Clone ID: MRT4577_83347C.1
gccggcccggaacgaaataccggctcgaccagcccacttgcttgccgccggccgaccaaaaaatattggggggaattaaaaaaaaaagggggcggacacacaccccccccaaacacacgagagaaccccccacgcacaaggggccaaccagacccccaatgcccccgacgcccaccaccaaaacaccccccacggggcaaagcccccgaggaacccccccccaaacgggtgccgaacacacccccacaccccagcggggcgacgcccagcccccccgaaaaacaaaacccccagggcagggggggggaccccacagaaccaacaccccgcacaaaggcgccaaggcccacccacaaccaagcgcaaaggccccccaaaaaagggccaccccggggccacaccggaggccgccaaaacacccccccccgacgcccaaaacccggccaacccccccccgccccgcacccccccaccc

SEQ ID NO: 166411 - DNA, 1368 bp, Zea mays
  Clone ID: MRT4577_83348C.1
aattcagaagacaggcccagcgcacgaaacaggcactcgccggcgtacacgcggcatacctaaatccccgccgccgccgcgttttgtgggggcgcaattcttcccgtcccaccgtccggtcgccgtgagcgcgtgatcctttcacaaccatgatggtcccgctcgatccctcggacaagcccacctcgcaacgttgcattgcggacggcgacaccgtcgtggtgtacgagcgccacgatgcgatgcgcgccgtcgcggttcgcgccggcggtgtgctccagaaccggttcggtgtcttccgccacgacgactggatcggccgccccttcgggtccaaggtattcggaacaggttgcggcggcggcggaggcaagggcggaggcaaggcaggcagtgggttcgtgcacctcctggcgccgaccccggagctctggactctggtgctcagccaccggacccagatcctttacatcgctgacatcagcttcgtcgtggcttacctcgagcttgtacccggttgcgttgttctcgagtccggtacgggcagcggatcgctcaccacttcgctggcacgcgccgtcgcgccgtatggccgtgtccacaccttcgatttccacgagcagagggccgcctcggcaagggaagactttgagaagaatggcctgagcagcctcatcacagtcaatgtgagggatatacaaggtgaagggttcccagaggaatattgtggtgctgctgatgctgtcttcctggacttgccacagccttggcttgcaataccatctgtcggattgatgctaaagaaagacggtgttctgtgctccttttcgccttgtattgagcaagtgcagcgtgcttgtgaggccatgaagacttgtttcacagatattagaacctttgagatccttcttcgcacgtatgaagtacgagacgttgctctgaagagtgtcacctccgatgaggcttatgtggggcctcttccgcagaaaagaagaatgcccacaaccccaggtgaaaacacggactgcccacaaaggacttcctccattttggttaggccatgcagcagtgctagagggcacacggggtacttaacctttgcaaggctttgcgtgtgataggcaacagagtcgtaaaataggtgagtgtaaggattagttgatgacaaaagttgatagaaaattacactccattttttagagactgtatgttttgatacgttgttatatcctaggcatggccgaatgctgtccgcgcaaggtttgtgctcgttgtaacttaacatctctcttttctgagaaccctgaaaatttgcgagtcacagaatcactcttctttttctccaaaaaaaaaaaaaaaaaagcggcc

SEQ ID NO: 166412 - DNA, 682 bp, Zea mays
  Clone ID: MRT4577_83349C.1
cattgggtacctcgaggccggccgggacgtgtggtcgagaaccaacgagcgacggcaaaccaggcacagcagagccgctcaaagagccagctgaacggcatgctgctgcatctgcccgccggcggcagcaccgttgctcgcgctcccgtcccgccgctgccgcgccagctcgcgccccggctgacaacgcggtgcagcgcgaagaagaaggcagcgaacgaggccaaggacgaccggcgggcgggagacggcgccggcgtgctctcccggaccgtgatgcttcgggccggcgtcgcgctattcgccctcggcttcgtcgacgccggcggcgactggtcccgcatcggcgccatctccaaggacaccgaggagctgctcaagctgggcgcttacgccgtcgtgccgctctctctggccctcataatctggttacccgaaggcgacagcgaccgtgagtcgtaggatttgagaaagcagatcgcatttcttcttatctgagtagaaaagcgaagagcatcgggttctagactcggcgctggatcgttttctttgttatgggttggggtgggatcacgatgtagctagtacgtcggcgaattgaacgtgtggcttcaagtaaaaaaacgacaatgccaagctacatcgatgtaatacaagacaggtctaccaaaaaaaaaaaaaa

SEQ ID NO: 166413 - DNA, 377 bp, Zea mays
  Clone ID: MRT4577_8334C.1
ctcgtgacaacgataacgacaactcttatggctctggcaacaacaacaacagcagcagctacggctcatctggccgcgacaacagcgattcgtatggctctagcaacaacgattcatacggatccagcaacaatgactcttatggctcaagccgtcgtgacaatgataacgacaactcttatggctcgtccggtaactctggtctgagcggcggcaatgacagctacggctccagccgtcgtgacaatgacaacgacaactcctacagctccagcaacaaggacagcgattcttatggatccagcaacaatgactcttacagctccagccgccgtgacaacgattatgacaactcttatggcttcagcaacaccgac

SEQ ID NO: 166414 - DNA, 354 bp, Zea mays
  Clone ID: MRT4577_83350C.1
gcaaaacgctctacggccttcaccattccagcaagattcgtatcactccaagcgtcacagtagccttcgctgaggttctctagcttgatccctcgttcaaagtgagatgtagcgatggcgaaggcctagtagatcccctggcagaaagattttgccttgagttcctagaaccggcccacaaagcccttgaggcagaagaccagtgactcagacccaagggaagaaggtgctctgaagcgcctgctcatggcgcccacaccctccgacaggaagcgcctcttcttctccagcttctccacgcgacgttgcatctcgacaaagttccccttggcgacatcgaatttctatcatatg

SEQ ID NO: 166415 - DNA, 282 bp, Zea mays
  Clone ID: MRT4577_83351C.1
taacggcgcctggttttttttttgaagacagaaatattacacttacttgcagccagcagggtaatcctgcatctacgtgtatagagggactcttatgcatcaaccaactgttacgtcacaaggatatttaacaacacaaattcagaactgtcataacgagtggtattctagctgctgatagagctatgcaagtcaatcaggcttgtctatgctcgcaccacttgggacagcctctttacatgcgatcacagatctggcgtacatgtcgcaaagacatgaatg

SEQ ID NO: 166416 - DNA, 151 bp, Zea mays
  Clone ID: MRT4577_83352C.1
actccttcttctaggctgggctgaagggctacttcttcctagggaaggcctttccctgggggctgctccgggccctaggaggagactagaagctgcgactgcttagcaccagtgccccgctgagccacgttgaactcttaggcaaaaggga

SEQ ID NO: 166417 - DNA, 1020 bp, Zea mays
  unsure (1)..(1020): unsure at all n locations
  Clone ID: MRT4577_83353C.1
tgacccagcgtccggnagcggatttgactcgattttgtttataacaaaatcaggcaggcagctacctcgtgataatcaaagcttaattaatcccgagcgaaaatatgatgcgcacatggctgccccgccggacgagagatgattattacaagtaagcacgaggaaagggaagagaagaagaagaagagggctcgtctcgtctcgcaggccggaggctgcgtcgctggccccgccggcgccgccgtatgccagttctttgtcagtcccttcggcaggtcttcgtgggtccttcttcgccggcgtcgagcacccaccaaggacagcgggtacagcgctagttattgcttcaccttgcttatctctgctgcagcaactggaggccgaggcttttacaaggagctggggaagtatgggcagaagctgctatcgaatctgaagctttgcttggcacaccagcactggagagatgtataagaaccaactccaggagcttgctcagaggagctgcttcaatctgccgtcctattcctgcatccgggagggaccagatcatgcaccccggtttaaggctacagttaatttcaacggggagatgttcgagagcccagtgttttgttctactctgcggcaggcggagcatgcggcagctgaggtagcactcaatgagttatcaaagagggggccttcgtcgacgctggctgccaaagttctggatgaaaccgggatatacaagaatcttcttcaagaaactgctcatcgagctggtctaaaactccccatctatactactattagatctgggccaggtcatacacctgtgttcgcatgcacagtggagttggcaggaaaggcatttactggcaatcctggcaagaccaagaagcaagctcaaaagaatgctgcaatggctgcctggtctgaattgaagaaactgcccaggggtaggtgagccgtcatcctcatcttgtccacctgatcaggatgatgaagtgcaggaacagttcgtagttactcggactc

SEQ ID NO: 166418 - DNA, 791 bp, Zea mays
  Clone ID: MRT4577_83354C.1
ccggccggggtgagaaggtgtgcgtggtcgaagcggatttgactcgattttgtttataacaacatcaggcaggcagctacctcgtgataatcaaagcttaattaatcccgagcgaaaattatgatgcgcacatggctgccccgccggacgagagatgattattacaagtaagcacgaggaaagggaagagaagaagaagagggctcgtctcgtcttgcaggccggaggctgcgtcgctgccccgccggcgccgccgtatgccagttctttgtcagtcccttcggcaggtcttcgtgggtccttctccttcgccggcgacgagcacccaccaagcaactggaggccgaggcttttacaaggagctggggaagaatgggcagaagctgctatcgaatctgaagctttgcttggcacaccagcactggagagatgtataagaaccaactccaggagcttgctcagaggagctgcttcaatctgccgtcctattcctgcatccgggagggaccagatcatgcaccccggtttaaggctacagttaatttcaacggggagatgttcgagagcccagtgttttgttccactctgcggcaggcggagcatgcggcagctgaggtagcactcaatgagttatcaaagagggggccttcgtcgacgctggctgccaaagttctggatgaaaccgggatatacaagaatcttcttcaagaaactgctcatcgagctggtctaaaactccccatctatactactattagatctgggccaggtcatacgcctgtgttcgcatg

SEQ ID NO: 166419 - DNA, 364 bp, Zea mays
  Clone ID: MRT4577_83355C.1
cggacgcgtgggcggacgcgtgggttcagagccaccttcagaccctgcgaaatatactgctgctgatgttcgaattactgatcaaaaattacgcctctgtgacatatgtggagcatttctgagtgtatatgataatgatcgacgtcttgctgaccattttggtgggaaattacacctaggctacatgctgattcgtgagaaacagaaagaacttcaggtaaattcctgcatgctcaagcccgaaatacaagtaaggtactggagatttatgaaacagattaatgtaaatacataaatgaaacaaaatttacattctgtttgcccatcatcagaatatgataatcttgatttgttcccttacccc

SEQ ID NO: 166420 - DNA, 439 bp, Zea mays
  Clone ID: MRT4577_83356C.1
cctagcttcctctgccgagtccggctggagctccctccctgctcgtccgccctctactttctccatgcccgagtccgggatcctggccgcgccttcccttccctctgcttgacgtttcctcggtgctagatattttctacgctccctgctccagctctcttgccgcgcgagctcgccctagctcggatccggcgcccagctccgacctccctccctggctttcctcgaactcgcgcacaacctgctcgccggcgttcggaccgcgtgaatggatcctctgctcggctccctgcgcgcgttctacttccccaacgccgctctctcccacagcgcgtctctctgatgcccagcgacggccacaactttttttttgtcaagctccctcccatagcagccactcgttcgtctccctgatgctcgccacgcctaaccgaggtca

SEQ ID NO: 166421 - DNA, 2380 bp, Zea mays
  Clone ID: MRT4577_83357C.1
attgggtacctcgaggccggccgggactggctgccccgccggacgagagatgattattacaagtaagcacgaggaaagggaagagaagaagaagagggctcgtctcgtcttgcaggccggaggctgcgtcgctgccccgccggcgccgccgtatgccagttctttgtcagtcccttcggcaggtcttcgtgggtccttctccttcgccggcgacgagcacccaccaagagaaccttcctgcaaggctgcattgatctcgtcttgttgtttctggcccaacacttggtttattgctcaaccttaaccccggacttgttcttctacaggacagcgggtacagcgctagttattgcttcaccttccttatctttgctgcagcaactggaggccgaggcttttacaaggagctggggaagaatgggcagaagctgctatcgaatctgaagctttgcttggcacaccagcactggagagatgtataagaaccaactccaggagcttgctcagaggagctgcttcaatctgccgtcctattcctgcatccgggagggaccagatcatgcaccccggtttaaggctacagttaatttcaacggggagatgttcgagagcccagtgttttgttccactctgcggcaggcggagcatgcggcagctgaggtagcactcaatgagttatcaaagagggggccttcgtcgacgctggctgccaaagttctggatgaaaccgggatatacaagaatcttcttcaagaaactgctcatcgagctggtctaaaactccccatctatactactattagatctgggccaggtcatacgcctgtgttcgcatgcacagtggagttggcaggaaaggcatttactggcaatcctggcaagaccaagaagcaagctcaaaagaatgctgcaatggctgcctggtctgaattgaagaaactgcccagggtaggtgagccgtcatcctcatcttgtccacctgatcaggatgatgaagtgcaggaacaggtcgtagttactcggactcttgcaagcttgaaccaggcaaatagtggcaaggtgccacatcagaaggaaaaacagcaaagcaataaccgcccatcatcacggagatgttatcctaaaccaaatacaccattctaccgaccatttatgcaaaatcaggcttatcctagcgttccaccagatcaagctatgtaccatctgtggcatcggatgcaagtgacagccaacgcctcgctttccagtggtaccagctatgggcaatacaagtttttgcccaccagcagctatgctccccatgtaccctccttcacctcaagggcaattctccaatccggctaaccaggatgctctaggccttcttccatgttttcctgatgctgctcctgccatgctacggcacttctcaccttaccctgtctcctatgtgccaagaagtcctctgccggttactgttcacaatgttcatgagagaaggcatgaccatactgaaacagttgagcttcctgatgctgtggtgttctcccaatgcacgaccctagattcctttaggacatcagaatgtggcggtccaccactcaaggttcaagaaccaaccaaaaatcggaaagaaggctgtattgggtcccctgagaaagaacttgacactcttgccgtctcaagctctaccgcacaagcgtcgtcgcaaaagttggaagcaaatgaaggtaagcaaacagtgcaggcaggtttgaagcagacccatgaacagcagctgatgtcatcctcgtcttgtgttagttcttcagttgtggcacagagctcgcattacgctagctccatccagcatgatgagtctatacatagaaggaatcctcctcatactagttcgcctgcattgcctgatgtgtggtcttcccgctcgcaagctctgcccagatttggatcaccaagttgggtgttccagcagcgaccttggttggctgcacccgtcacagttcgaaccgctgttcctgtctgctcagccaggccaaacgtggtgaattctaccactggaacaagacctgctgcccagagccatgatggagagagagatctgaacagcgccgcagcagcgagttctggattcaataaactccaaatttaagctgcggttttggttctgctgagcttttcatctcagttttgtttgcttcttggcttgaggtttattttttagttagatataccagataggctcttaggttttcattttacatttaccagatgtccagttccttctgaagataaatggacgagaactgtaatataaaaaatgcagaggcctttctcatgcgattaattcagtttcagtatgcaatcgattagttccaacaaaaaaaaaaaaaaaaaagcggcc

SEQ ID NO: 166422 - DNA, 768 bp, Zea mays
  Clone ID: MRT4577_83358C.1
ggccgctttttttttttttttttccagaataaaccatagtatcatcattgtatttcatcatgttcattgattaaagtaaagcgctagcatgaagctaaccatagtaacccaaaaggtaatcaaggacaaggtaaatagaaagctagtcaattcttatgttgttcatagtatgcaggacagtgaattatacagtaaatgggacataatgggtcagaggacacttgccttcaccaaatagatgctcagggtcttcgatctcgtagaactcgaagagttcgatcacttggtcgccatgcttgatcgtcgattcctcgaagcttagaaacgaatcacggtctaatcgcaacacgaagcgaagatgaacatgcacaagcaaacaaacatatacatatgcataagaacattacaccatacaatataaaatgttataaaagcgagtaatataaaatagagagcgcatctacggttacacgaggaaaagaaccacgatagtcgaagctacggccgaggggttagcgtgtttacactaagcaaatattaattagaatatttaatccgatatttctatattaattgatattaatcaaatgtaaattaatactactaattagttttgactaacttactattttaatagttgatgattaaataaataactaattaattcacatgagtaattataagcgaacggtttaatctcgcgtgcggacaacgcgctatatgcgcgaacggcgcgcggcaactaagcggcgcgcgacaacgcgagcg

SEQ ID NO: 166423 - DNA, 736 bp, Zea mays
  Clone ID: MRT4577_83359C.1
tcagggacatatttctttccctttgcttctcaatctgtccccgtttaccggaggcgcgtcgagtgctggacctttagcaatgaatgcgcaaagagatggccagcaagctctccatctataccggcaactgaatatgcaggctaatgctgacgtgtccagtagttcatcatcaccaccgcagctatcaaggagcaagttatacggtctcgcggccgtcgtggagcactacgggaagtgtggaggagggcactacgcagtctacaggagagtcgcgtcgaatcctgaccctgatgatccaggcaaacctgttgcaggccttggcaagcggtggttttacatctcagacggctacgtgtcagaagttccagaggaggatgtcctgcgcgcggaggccacgctccttttctacgagagattgtagccgcttgttgagtagctaacgtgtgcatcgtaacaaaacctaggacagttttgttgtgaggagtctgatgttcttagcggtaccgtgagcttccaagtagacgaggaaactagctgtggcacaaaaaaacaaagcctctcggcatctcgacgtggactgcaggcgtgtcttaggcagtgtggcctactttttttttggtccttgcaaacgttaaaataattcttcatgcaatacttcagtgaggtcttcctcttgagaataaatcagatcaccattgttttgcgccattgtaaccaccacctggtggatcgtgtg

SEQ ID NO: 166424 - DNA, 409 bp, Zea mays
  Clone ID: MRT4577_8335C.1
tggaacgacccacccgtccgcgagggcatcgtcgcggccctgctgcgcgccggctccttttgttctcgtcgaacaggtgcgcggcctcctggggggggcgtcgctctactacatcatgcggttcgtgttctgcaaggagtacgacgagtaacacgtggtgaccgcattcgaccctgagaaagtggaggatctcttcccctacggtgcacgaggggtacgagcacatgggcatggagaaactgtgtgattacataccagggctcgtcttcctagacccacatggtgtggtctcacgatgctccgagcattatactgcgggtcaaacgcgtcttgcacggcgtcattcatgagcaccccgcaaggcctgaaccagatggagacgctccagattcagtagatacattgctat

SEQ ID NO: 166425 - DNA, 479 bp, Zea mays
  Clone ID: MRT4577_83360C.1
tttttttttttttttttttttttttttttttttttttttttttttttttttttttttttttttttttttttttttttttttttttttttaaacggggggggccccaattaacttgggggcctggcccaaccataattttacgggggggggaaggaagggttttttttttgcaaaaaaaaggggtaccaaaaagggttcccccatagaaaaaccaaacccggtcccgggggggcccccaaaggggccccctttccccccctcaatttcaaaaaaacctttccaaaaccccagtttttttggcccttttttaaaaaccccccctttttctttttttgaaaaagtttttttaagggccgccattttgggggtaaggggttggaacaatttaaaaacccgggcccttgacccatttggtgttgggcccaaggaaagaaaactaactgcctttggaaattgctaaaaccccccttttttttcct

SEQ ID NO: 166426 - DNA, 700 bp, Zea mays
  Clone ID: MRT4577_83361C.1
aagtcccgtcccgtccacggcgttgttgtttgcagagaagggagcgacaatcaccatggccagccgcctgaccgccatggagaagttggtcctcttccacaagctcgagagcgacctgttccaccgcctagtgcgcgacctcgcccaggacccggtgcccatgcgctgggtgatcgcgttctggctgtggctcgagtccgatggccaccacgacttcatccgccgcgtctccgcgctgccaggacccgtcgtgctgcggctcgtcgaggaggctatcgagtgcctccgccgcctcgccgccggccgcgagaggtgcctgctgccgccctgcccctgcacgaacgcgctcttggcgcccaacaagcgcatagacgatgcgggctgcttccaagggcaccgggaggttttggatggcgtcacctaccagtacaggagcgtatgcctcgccgtttgcgatgtgagcagcgcccgtgtgcttgccgccccgcccatggttggctcccctgtcctcgccgccccgacggcggtcgcatcctttccactgaacccgatggcgtcgccgtggatccgtttgcagagccctccgccggacgactaccggtccctattcgtcaccttctctagaggctaccccgttagcagggagaacatcgtggagttctttaactcggtgtacggcccgtgcgtggaggcggtgatg

SEQ ID NO: 166427 - DNA, 236 bp, Zea mays
  Clone ID: MRT4577_83362C.1
actgctcgggccacgacatgaacaattgcgctcgcacacgttgagttgttccaagagcagaatgacagagggcagggcatggggtccaggacccccccctatcatggcagacaacgcagatcgcgctcctgcaacatgcacacgaccgccagggaacctagggcgtacacaggagcgcatgaacgagctggcccacgcgcctgacacgggctgcctgtcactggcatcgtcaaccg

SEQ ID NO: 166428 - DNA, 612 bp, Zea mays
  Clone ID: MRT4577_83363C.1
agccggccgggcatttcttatccatccgaattccgtgcgatgtcctcttccctcgcctgctggtctctccctaggggatcgtcggagaggaatcttaaagagagacgtctcatccgatgtaaggaagacatggagcacaacgaggctgagtgacaggcccccgagggagccatcctctgcattaataactgtgtattcttctgaagagagctgaccatgaacatgcgctctaagtgccagaaggagatgataatcgaagcatgattaggccaagctggctgcctcctctatcgtacagcatcgggaacggcagcgactgcgccatggagtcggttgttgctggcagcaacacggcactagttgttgcccaagctgagtagctaacaatgaacgtgcagcagcccgctgatgctgtcggcatccagatagggggtggcgatcgatctgctgaggggggaaggcagggtctaaccggcgaacggcctgcaggaataggcttgggctcacgaaattcaactgccgctgcgcgaaattgaactgcgtgctccaccgctactccgacaagcacgactgccatgtcagactaccgatactgatgacagtgacgccatt

SEQ ID NO: 166429 - DNA, 579 bp, Zea mays
  Clone ID: MRT4577_83364C.1
tacccagcaaatcacaaacagctaaaacgatctcagccttcacacacacacatccatcgttctaggcttctagctagttggagatggccggaggggatgacctgaagctgctcggcgcatggccaagcccgtttgttaccagggtgaagctggcgctcgccctgaagggcctgagctacgaggacgtggaggaggacctgtacaagaagagcgagtttctcctcaagtccaacccggtgcacaagaagatacccgtgctcatccacaatggcgccccggtctgcgagtccatgatcatcgtgcaatacatcgacgaagtgttcgccggcaccggcccgtcccttctcccagcggacccctacgagcgcgccgttgctcgcttttgggtgccctacgttgacgacaagctggtagccccatggaggcagtggttgaggggcaagacagaggaggagaaatccgagggaaagaagcaggcgttcgccgcggtggaggtcctcgaaggggccctgagggagtgctccaagggagggggcttcttcgggggcgacagcgtcggtctcgtcgacgttgcgctgg

SEQ ID NO: 166430 - DNA, 383 bp, Zea mays
  Clone ID: MRT4577_83365C.1
cgaattccgttgctgtcggatcccccatgcgagcaaagcaaatcgcccccattgcctcacgccaaacagaacaaccctctagaggatctcgtgtcctgccgtccaacgaacccagggaatcatcaaaacgggaaccaatccaccgccaatcaaatgtaatgaagggggacaaaattgacactaaaaccctagaaatttcgtttcgggggttgaaccgaagtcgaagacaagacgatttgggcgactcctggatcgaatcgaagccctcgtctggataaattccacaaaacgcaaggttgagttatgatgcaagcttgtgaattagcaggggcttgtacctcggcgaatcagctgagaggaaggcacgcactccccgacagcaa

SEQ ID NO: 166431 - DNA, 291 bp, Zea mays
  Clone ID: MRT4577_83366C.1
cagattatcactttggttttttttattaaagcctaagattgttgcgcaaaaaagattttttttaaaaacagctcctccccccccgtttcgaaccaacggcctaagggtttttttgtaacccactaaagatcatacgtgtaccaaatgaacaaagggcggatttctgacttccttggccttgaagggttaataaccgtgacccaccccaccagcacttcttctgtgacctgcgccacacccaaaaaaagggtctaaaaccttttcccctggagcagcccgggcagactcttg

SEQ ID NO: 166432 - DNA, 308 bp, Zea mays
  unsure (1)..(308): unsure at all n locations
  Clone ID: MRT4577_83367C.1
gggaaaaagcctggtggactccggcgtcaagtccatcccgtccatcttccaccacccgccggaagccctgagcgacataatttctccggcgcctctgccgnccttcttttttctccctccnccnccnccatcccgggggggggggggttttncatcntttcnannaccnanncnancaagagaggaaggaggacgggacngnggcccccccccggccggngaaccacggngnggcggaagagccgangggcggcangcgccgcgaaaagcaccagaacaacgagggccccgnggaggcgagggaggcg

SEQ ID NO: 166433 - DNA, 398 bp, Zea mays
  Clone ID: MRT4577_83368C.1
gggacgcatcaccatactcttatgcggacgttttaacgccacacgaatggcccagagcacgaggatggtggccatctccctggtggaccttctggtggcggttactgcgcttctgcccacagacacctcgtacagagtgataccactactgctacgagcggtacgccaacggcaagaaggacgaccccgtctgcactaagatgtgcatccaggcgtgacggaccacctacatgggcgcctgcgactcagcgcctgcttagatcgacacccatctacatggacatcgcgcgctaagatcgatatcaggatcatatacaatcgctgattcttcgatcacgtcagcccatgcatgatctctacatcaggccgactgaatctgaaccttctactaaagtata

SEQ ID NO: 166434 - DNA, 274 bp, Zea mays
  Clone ID: MRT4577_83369C.1
tttgactacaactcggccttttacttgtggccgaacaaggttctggacgggcgcaatgacatctaggtgtactccttcccactctcccatgatgacgacttagcccacacgcagaacaatctgtggatactcgagatccccaagcatgtgtacgcgggcatgatgcatctaggacatatcatgatggtcaatctacacaaaaacttcctcgactacatcctgccctatttgcacaacgtcttctacaaataaatacataacttacttatcaaat

SEQ ID NO: 166435 - DNA, 2253 bp, Zea mays
  Clone ID: MRT4577_8336C.1
atgaagctcgataaagatccgttccctatcaatgtaattgatttcgagagcaaaagagtgttagttcggacagatcaggccgacactactaaaggcaagaatgtggttatctctgatgatctcaaactcaagatgataataccaaagagtccggaagttggtgtgtggaaagtaaacgagagaaaaagggttcagcctgtctttaaaccaacttctgaatttttgctcaacaaatatacttcacaatggaaaagaaatgagttccaacattttagaggtttcaagagacccaggtctccagaaggggcaggaggcggcctctttggacagaggggagggccactgaactggagaagtaggggagtctgtgctcatgcagaaagccgagatttgttctcacaacgtgaattcccgaagcgaccatatttggagacagagcgaaagcatggagtgtggagcaggctagggaggagtatggggagtcggcccagggctgttgccatatcaaaaggtcccgaggagttgcgctcgcagatgcaaaagaaatggtctcctcgcaacccagcggatgccagagagctgtgtatgggtgttgatgggcaaaatgagtcattgggcaaaagcgaaggtccccaggcagagatggctaagcagaatggtcaggtggttgtcacaaagaattacacaaagaacagcgaagaagtagcagccaagccaaacataggacagggacacataactgctgctgggtcaaacagattacaggagagcaggccgcaaaatggtggaggtcaagggatgagaagcaagcgtatgaagcttgatgtagtggttacacgacaaatgagtaatgttgctagctgggataggaaacacaggactgaaatgattgcgaatcagcgcgtagtcggtcccggtgttgtgatggatggccactataggggagagcatcacacgtgggccgaacaaccaggttgtagtaatcaacggacagcaagagtgtcgaatgcaggtcctgttagtcgagcttcaattggtggtgtactggacgggaggggcagaaaaaatcgtggttcagttgcgcccggtacaaaaccaacaccgagatggtgtccacctaggttaagccgtacgcaaaagcgccatgtccagcggttgaggactatggaaatgacagagaagatgagagaggaggagcgtgacaggtggttttacgaggataggccaatggttatccctaagaaaacgtggagggagaaacgattggccagggaggaaaaagatgatgacagcagcagtggttccgataaagaagaaagcgctgaagcacaaggggacatggatataaacatggtgtttgttttacctactgagttcagagcaggagagggagatgtggctgagctaacattgggggctgagtgtgctgtgtttgaaaaaacaaatgagcagggatctcatctaaaaccattatatgttcgtggtcacattgatgggaagccaatggggggggcatgttggtcgatgggggagcaggggagccattacaagcaaaagggattatgtctgttgaactcacagtgggcatatgaaagggaggtggaggtgattgaaggagataccgctatgtgtgtcgcactcatggaaacaccaatggaatggcagcacgggctgagtagggagttggttgagcataggctaccaattaagcatgggtttaggccacataagcagccacctagacgatttaaccacgacatccatgaccgagttaaggaacaagttgatcggctattgaaagcaaatttcataaggccatgcaggtatgcggagtgggtctccaatatactgccagttgagaagaaaaatacagggaagattaggatctgtgtggattttaaagatttgaacagagccacctcgaaagatgaatacccgatgcctatagcggacgaacttgttaatcaggcttcagggaataaaattattagttttttggatggtaatgtagggtataaccagatttttatggccgaagaggatgtatctaagacaacctttcgttgccctaggtttgtggggctatttgaatgggttgtgatgacatttggattaaggaacgctggtgcaacatatcaacgggtcatgaaccatatttttcatgatcttttaggcatcatcttggagatttatattgatgatgttgtggtgaaatcgactcgtttcaatgatcatgtagctgatttacggtag

SEQ ID NO: 166436 - DNA, 1000 bp, Zea mays
  Clone ID: MRT4577_83370C.1
gttttttttttttttttttgaagacatgcgtccatataaatactcagacttggagtacatgcataagctaacagctatatgtaagtacttgtttacttaattattggtggtacatactagaataataacttaatctgagaagacatttaaattaatgcagcaatgcgaacctatcagtagtgttgactgagtttttgttgcagatttaaattagtagccgccgtccccttcaccagcgcctcttcttctgagaatgaccatgtctcccgcatggccgccatggcctgctgctgctgctacacatgatctgtctgtactacccttcactgttctgtacatctgcaggtggctcttgacgtgcgctagtgtaagatccttcacgttcatcagttccagtactgacttcggtgttgctctctcgtggccgcccaggagctcgacggcgtgcacgaagtgcgcgtgcagcgcgggggtccacctcatccgcggcgccctggagcttctcctcccgccgccggcagcggtgcccgacgagctcttcttgaacccgtgggccgtctggctcggctggtgcaactgcagccggagccgctgcgcgtgaaggttgtgctcccgcgccgccgcggccgcgtcgtcgtcgtcgtccaccttcttcgtcgccacggcggcgtcgtcgtcgtcgagctccagccccggccccggccccagccccagccccagcagcagcctcggctccggcagcacctcgacgccgccggccggtggcgacggagggcttatgtggagtgagagatcaggaaccgccgccgccgtcgtctgcacacccacgccgccgccggtggaaacgccccagcagcagcctcggctcatggtagctcccaacgggtttgcagacggtgagctgagcttcttggtggttccaaagttagaggaaaggatggaaaggagaacctgcagcaggaagaggtagtagtgggctggggtagagttattaggtcat

SEQ ID NO: 166437 - DNA, 593 bp, Zea mays
  Clone ID: MRT4577_83371C.1
cccacgcgtccgcccacgcgtccgcccacgcgtccggaagaaagagaccgagatctcgccgatagctagcatcatggcgtccaaggcgctcctcgtggtagcgctcctgctcgccgccaccttcctcgccgcctccgctaacgagcaagcccaggcggccaaagaggagaagaaggcggaggtccaagactggcacggcggcggcggctacccggggcacggcggcggcggcagcggaggctacccggggcacggcggcggcggcggcggcggctacccgcactgccggtggggctgctgcaaccgcgggtaccatggcggctgccggtgctgctcgcaccctgatcagataccagagcccatgtaccgtcctgagctcgtcgaggtccacaactaaatagtaatgagatgcgctgctactatatatacgggtacgtatgcccgatgggaagcagagcacacgcgtagtacgctcgtcgtagtagtcaataaaagtttggttccatcaccacgtcatgaaataaaagtaaggaggttgcaagctttgtgtgcgtgcttggaaacgtcgactgtatctcatgcatcgaataaat

SEQ ID NO: 166438 - DNA, 955 bp, Zea mays
  Clone ID: MRT4577_83372C.1
acacaaaacatgtgtgcacaccaccatcgtgttttgtcgagtatgtacggaaatacagtacgaaaacagcacacgatattacgtatagtatggtgttcgtggttcatgacgttttactatctatgtatagtatagtatggtgtccgtgcttatgacgttttactatctacgtacgtgtgtacatcgtattgtgatgatatcctggtgggctactgtttattcggtgccgtgcatgcgcacaccgtacacatgcacatatgcatgcaactcggtcggtcatagctcgaaggtggccccttttacccagacctgaagcttcgcacgggcgtccttgggcgctccgatgagtacggggaggcgcccaaactcggtcaggttttaataactcagattaagaaggataaacccaggtacttgtgggttgccaggaaggtaaatccttttctgcagttcatacgatggacctgggatgcgttgtagacgttgtagtgattgtgcaggagttcagagctcgtaactgatgatggcactggcttgccatagggaacgataacatccctccacttcacacactctgaccgtctgatgacagtggcacagtttgcctaagcctttggtcgaatcgaatgcttccctcttcgagatttgtccatgtactacagcaacaagcatcaatggcaaactgggtgagcagcaggagctcctccactccgaaggagcgtgcggcggcgagcgtgtcgagcgcgaggtcgacgacggcgtagtgtgcgtgcctgcatgcgcgctcaccgccgcccgggtgccgccggactggtagcgcgggctgaggcagtccaacagcagcgcgccgggcccgacgtcggcctggtcggcgacgacgaagctggcgaatcgggtttaaggatcagagagagagggaggagtggagaccggagaggcgctcgagaggaacagc

SEQ ID NO: 166439 - DNA, 943 bp, Zea mays
  unsure (1)..(943): unsure at all n locations
  Clone ID: MRT4577_83373C.1
cactcgcaaccgcagttttttacagttcacgagataacaaaagaccgagatctcgccgttagctagcatcatggcgtacaaggcgctcctcgtgctaacgctcctgctcgccgccaccttcctcgccgcctccgctaacgagcaagccagtgagttcaccgttcagtttcacgcactgcagctaatactgataacttgcaggcttattagctttcctagctcattcaagcaaagcaacaaattaatcaaaagctagccatgatccgaccgaattaataagtatccatctcatactatgcacgtgttgggtcgttgtggcagaggcggccaaagaggagaagaaggcggaggtccaagactggcacggcggcggcggctacccgcactgccggtggggctgctgcaaccgcgggtaccatggcggctgccggtgctgctcgcaccctgatcagataccagagcccatgtaccgtcctgagctcgttgagacccacgcgtccgatagtatacgggtacgtatgccccgatgggaatgaatgggaagcaagagcacacgcgtagtacgctcgtcgtagtagtcaataaaagtttggttccatcaccgtcatgaaataaaagtaaggaggttgcacgctttgtgtgcgtgcttggaaacgtcgactgtatctcatgcatcgaataaatagatgttaatgaatatcattgggacaactttttacggaacataaaatcaaaaccnaaaaaaaaaaaaaaaaaaaaaaaaaaaaaaaaaaaaaaaaaaaaaaaaaaaaaaaaaaaaaaaaaaaaaaaaaaaaaaaaaaaaaaaaaaaaaaaaaaaaaaaaaaaaaaaaaaaaaaaaaaaaaaannggggggggggcctttttaaagaaacaaattttttttccgggggttgggagggtttaattttttttatgggggacc

SEQ ID NO: 166440 - DNA, 661 bp, Zea mays
  Clone ID: MRT4577_83374C.1
ggccggccgtgcctcgctcacgacgatgaccgcgtcggcgcgcgcagcgccaccgcggccgcccggccactactcccgaggtgatgggcgtgagctccttgccatcttctgcggatgatggagtgtcccccccatggcatgcgcagacaaggtgaggattactatactatgcgcgcagacactgatgtcagagccacaccaggtgactgtggatgactatgcatcaggaagacgagcttaccgaatcgattgttcatatggtaaccgcgaggccgatgttcctatcgcgatatgaaagagaaacagccgtctgtgacatgccgcgcgaatgtactaatgacgctgtagagagatgagactccttcgtttgcctggaagcgctcataatgtatagttgctctctgggcctgaatgcatgcctgaccatacatatgagcttcgaggacgatgacttggatgatgtactcatggacactgatgtgcatcagatatgtacctgatctcatccactatcctgagaccagtgtcgagattgcctttctcggctgctccgaactactgaggtacactccattatcacgtgatcctccacagagatgtaacgactggggacctcccgccctacactgacggtattccggagaaatgagacgtcttcatc

SEQ ID NO: 166441 - DNA, 1850 bp, Zea mays
  Clone ID: MRT4577_83375C.1
agcccacgcgtccgcccacgcgtccgcggacgcgtgggcgcgcccccgctccggaactacttcctcggtgatcgccacaaccggttcctctgcccgcgccgcacgcccgtcaggcaccgcgcctcggacgccgacagggtcgcgtgcctcgcgtgtgatctcgacgagatctactccgcggccttcaacggggaccgcacgccatacagccccgccaagtttctatatagttggtggcagcatgcatcaaaccttgcaagttacgagcaacaggatgctcatgaattctttatttccatccttgatcatatccatgaaaatataaaggatgatcaacaaaagtcatatgcccaaggccatggggattgttgcattgctcacagagtgttttctggtatcctgaggtcagatgtcacctgcacaagctgtgggttcacatccacaacttttgagccctgtatggacatttccttagacatggatgcaggagataacagttcttttggtgttgcaaacacaaagtcgcatgtgcgcaatggagagcgaggcttggctggcgtgaattccaaggtattaactctaatgaggtgtttggagaggtttacaaggtctgagagacttgatgccgagcagaagttcttctgtgaacactgcaacgagaggcaagagtccctgaagcaaatgtccattcgcaggcttccattagtttcctgctttcacataaagagatttgagcattcgtcagtcaaaaaggtgtcgaggaaagtcgatcactgtttgcagtttcccttttcccttgacatggcaccttacctgtcgtcatctattctcaggagtagatatggtaaccgtatatttcctgcagaagctagtgacgcggacgcagtttcagaagtgtcgtcagaattcgaaatatttgcggtgatcacacatagcggtaagctagaagctggccattatgtgacatatctgaggctaaacaatcattggtacaaatgtgatgatgcctgggtaaccagagttgaggagcataccgtcaggacttctcaggcatacatgctcttctacgtgcagaagacgttttactacaaagcttgtgaaagagcagccacagtctgatctgaagcaaacattgatgacacaactccagaccaccataaatttatttgtcaccgaatcagatacacatgtagtaagtagttcgtcaatcaagagggaaaacgggcgccgtatccacagcagcacagccatggcctgtcaaatcttttcgttctccactgacctatagttccaatcagagagaagctttttcggcggattttttctttacagacagacatctgcccaagcgaagatgcttgaatttatgcattgagttatattgtgctggctaatggatatgttgtggcgatttgcttaatactcaggtgcttcaccgtttggtacctgtggcggtgactggcgaggatgctcttaaccagttgcgcttgtgttcaatacaaggtcgagcaaggaagatgagtataaaacgtggaaagaaaacataaagggaaccgattttttttaatgtgttcctttcagcaattgcattcttgttctactgaaggtagagggtttcttgctgataccgattgttgtgtatttgctcccttgccttttttcgcttggtctttgtcttaatggatgagctgaaatctatagcagttgtcatagtgcccactaccccccaaaatgtagggcattacagtgctgagatgagcaggaacatgcagatgtcatgcgggtcgcgttttgccatctcttgtcgcttgaaaatctgattggagctctggtatgagttggcgtgaact

SEQ ID NO: 166442 - DNA, 1357 bp, Zea mays
  Clone ID: MRT4577_83376C.1
gcccgggccgtccggggacttacgtcgcagctagcttttcacgtacacagttgcagttcagagagaagagaaagagaccgagatctcgccgatagctagcatcatggcgtccaaggcgctcctcgtggtagcgctcctgctcgccgccaccttcctcgccgcctccgctaacgagcaagccaaggcggccaaagaggagaataaggcggaggtccaagactggcacggcggcggcggcggctacccgggcggcggcggcggctggcacggcgggggcggcggctacccgcactgccggtggggctgctgcaaccgcgggtaccatggcggctgccggtgctgctcgcaccctgatcagataccagagcccatgtaccgtcctgagctcgtcgaggtccacaactaaacaactaaataacgagctgcgctgctacgtatatatacgtacgtatgcccgaggggaagaacgaagaagcaagagcacacgtagtacgctcgtcgtagtagtagtcaataaaagtttggttccatcaccgtcatgaaataaaaagtaaggaggttgcacgctttgtgtgcgtgcttggaaacgtcgactgtatctcatgtatcgaataaatagattttgtccacgagttttttttccataaaaaactagacatggtcatggaccccgaatggaaaatgaatgatgtcaacttctttatcgacaagggcacgaatatgtacttcgatcatagagcgcaggttgtttacatagcttgtagcaacctcctggcccatcaatggctcctgaatagctcatttctaaaagtttgcccaatttgagcagtcgccaagggtcgcacgcgcgctggctgaagctccgtggagtgcggggaggcgcccaaactcggtcaggttttaataactcagattaagaaggataaacccaggtacttgtgggttgccaggaaggtaaatccttttctgcagttcatacgatggacctgggatgcgttgtagacgttgtagtgattgtgcaggagttcagagctcgtaactgatgatggcactggcttgccatagggaacgataacatccctccacttcacacactctgaccgtctgatgacagtggcacagtttgcctaagcctttggtcgaatcgaatgcttccctcttcgagatttgtccatgtactgggtgagcagcaggagctcctccactccgaaggagcgtgcggcggcgagcgtgtcgagcgcgaggtcgacgacggcgtagtgtgcgtgcctgcatgcgcgctcaccgccgcccgggtgccgctgtataggaaccagatcagtagcaggaagacctcgtagctgacggagttgacagg

SEQ ID NO: 166443 - DNA, 1254 bp, Zea mays
  Clone ID: MRT4577_83377C.1
agtccaagcacgctcagggtaccaataacaaattgtcttgatggtcttaacagggatgtgcttgtataagattgttgacaaacctgcaagtagtatatgaatcgtttacaaagttaccctacacaaaacatgtgtgcacaccaccatcgtgttttgtcgagtatgtacggaacagtacgaaaacagcactcgatattacgtatagtatggtgttcgtggttcatgacgttttactatctacgtatagtatagtatggtgtccgtgcttataacgttttactatctacgtacgtgtgtacatcgtattgtgatgatatcctggtgggctactgtttattcggtgccgtgcatgcgcacaccgatcggctagagctcggcggagggcggccgggccgggactcagagagaagaaagagaccgagatctcgccgatagctagcatcatggcgtccaaggcgctcctcgtgctaacgctcctgctcgccgccaccttcctcgccgcctccgctaacgagcaagccaaggcggccaaagaggagaagaaggtggaggtccaagactggcacggcggcggcggctacccgggtcacggcggcggcggcggcggctacccgggtcacggcggcggcggcggcggcggctacccgcactgccggtggggctgctgcaaccgcgggtaccatggcggctgccggtgctgctcgcaccctgatcagataccagagcccatgtaccgtcctgagctcgtcgaggtccacaactaaatagtatacgggtacgtatgccccgatgggaatgaatgggaagcaagagcacacgcgtagtacgctcgtcgtagtagtcaataaaagtttggttccatcaccgtcatgaaataaaagtaaggaggttgcacgctttgtgtgcgtgcttggaaacgtcgactgtatctcatgcatcgaataaatagatgttaatgaatatcattgggacaactttttacggaacataaaaaaaaaaaaaaaaaaaagaaaaaaaaaacaaaaaaaaaaactcgaaactagttctctctctctctctctcatcgtgcgacccagtctgtgccagccccccccccccctctttaattcagttgatcccccagccaaaaagccctccctttttctgcagcccccaaaaccccggtgtgttttttctagtgtatgtattcaaagttcgtcggtaaaaaaaaaaaaaaaaaaaaaaaaaaaaaaaaaaaaaaaaaaaccccccccc

SEQ ID NO: 166444 - DNA, 317 bp, Zea mays
  Clone ID: MRT4577_83378C.1
ggccgcagggccacggttctgccttggtcgctcacaccaacagcgaacatgatgccatgccttgcgagaagcagaaatgacaaccttattttcaccaccctacaagcgagctgcacccttctcctgatcagagaaaagaccatgatactcagcaacatattgagtgtcaaccgaacccctgggagcttcaaggagtccatgggccaaacgcagtagcctcctctccaccaaagagaagggtactggagttcttcaccttgacctgagggtgcttccactggccatgcacaggcacatactagaacatgtatgccatg

SEQ ID NO: 166445 - DNA, 210 bp, Zea mays
  unsure (1)..(210): unsure at all n locations
  Clone ID: MRT4577_83379C.1
aatatggaccagttggtttggaacccttttgtcttcaccagncgatggtgtctttcattgagtgggtgaagggattttacaacatttttgctttttcaaaagaaaagcactgtgaataatattagatacattattttttaacttcaccagcagaaaccataccccatgggaaaaggggggtaacctatatcccacccctcccggggccct

SEQ ID NO: 166446 - DNA, 812 bp, Zea mays
  unsure (1)..(812): unsure at all n locations
  Clone ID: MRT4577_8337C.1
gacgcctgcaggttccggtccggaattcccgggtcgacccacgcgtccgctggggacacaggctgtgggaagacccacgtatccctcagctgctattggagcgctatgtgactgagggtcgaggtgcccgctgcaatgtgatcatcacacaacctcgccggatctcagctgtgtctgtggcacagcgggtcagccatgaactgggcccctccttgcgccggaatgtgggcttccaggtacgcttggaaagtaagcccccagcccgaggtggggcgctgctcttctgcactgtgggtatcctgcttcggaagctgcagagcaaccccagcctggagggtgtgagccatgtcattgtggatgaggtccatgagcgggatgtgaacacagacttcctgctgattctgctcaagggcctgcagcggctcaacccagctcttcggctggtgctcatgagtgctacaggagataatgagcgcttttcccgatactttgggggctgccctgttatcaaggtacctggcttcatgtatcccgtcaaggaacactacctggaggacatcttggccaagctgggtaaacatcagtacccacaccggcattggcaccatgagtcggaagatgaatgtgcacttgatttggaccttgtgactgacctgnttctgcatatcgatgcccgtggngaaccaggtgggatcctgtgctttctacctggctgggcagaaatcannaggagtgcacaacggctccagggagcccctggcatgcatgannagcagtacctcatcttaccagtgcactccaatatccccatg

SEQ ID NO: 166447 - DNA, 221 bp, Zea mays
  unsure (1)..(221): unsure at all n locations
  Clone ID: MRT4577_83380C.1
cccacgcgtncgcccacgcgttcgaatttctctgtcttaagcacctgatcgttcgcttgtcattaggaacaaccattacccaggcatttgactatttctctttggtttctttccttgatgcgtctccttccttggagacttttatattaaatgtaaggtgttggcactgtcaattcattcggtcctgtaaattcatcttaccattctgtccatttagctta

SEQ ID NO: 166448 - DNA, 776 bp, Zea mays
  Clone ID: MRT4577_83381C.1
ctccactcccgcccgcgtgcatgcatgcaaaagatccgttgcctgtgatttgagacccacgcgcgctcgccgtccggggttttcaaccataaaacgcttcgtcgtcccgagaggccgaggcccacgcgcgttgcctctcgtctgcaccttctgactgccgagcgccgcccctgagctctccacttcgccgagggccgaccgcaccgagccatggattcgtcatctggagcaagacatgtgcggtctccttcgtctccagcgcgcagctcgccgtccccagccatagtttcgtcgccaggtgcatctcgtcgtccacagtcgccgacgcgtggctcgcctcacagcgacgagtcagacccgacgtggtactggcgtaacccagccaggcgcgaagagcgtgcggcggcgcgtcaggcgcgcgcggcggcttctcggcgcgtccgacagcgtccataccggcgtccttcacgtcaaagaggtgtaaggctgcgtattccatctgacgaagatgaagaggtggctgggccgaccaatgttgaagaacgggtgacggaagttgagaagaaggaggaggcgacaaaggaggaagtttgatggtgatcttctaaaatcagaatctagtactgctagtattacatttgctgcattgttaaaactagaataagagtactgctatgcctaaatgttccatgcagcaagtttctccctggcttcatgaaccattctgcatcacaacgaatttgtaatggcaatgctcctagtctttcagtgtgcgc

SEQ ID NO: 166449 - DNA, 393 bp, Zea mays
  Clone ID: MRT4577_83382C.1
cgccagggtcgcaagcttatagcagtcaacaaatactagtgcccattaccgccggatcgatcggaagccggccggcggcaaggaaggagtatcccagcgcagcaccgactccacgacttggccatcaatcatcatccatcgcagtatcgcaccgcagcaacagacaccgaccgaggatggttgttgccgtcgccgcgcggtcgtcgtcgtccgcgaccagcagcagcagcgagctggggtcgctgttcgcggcgttcgacgcggacgcggacgggcggatctcggcggccgagctgcgggagtgcgtgcgggcgacgctggggcccgacgccgcggcggtgtcgtctgaggaggcatacgcgctgtttgcgttatcgtgcccttgctgagagg

SEQ ID NO: 166450 - DNA, 785 bp, Zea mays
  Clone ID: MRT4577_83383C.1
tgctgctgccgttcgtcgggaggacggtggtcgacgtggtggacaagtggcacgacatggccgccgcggcgtccggcgaggtcgagatcgacgtgtccgagtggttccaggtggtgacggaggacgccatcacccgtacggcgttcggccggagctacgaggacggcaaggccgttttcaagctccagacccagctcatggccttcgcctccgaggcgtttcgcaaggtcttcatccctggatacaggttcctgccgaccaagaagaacacgacctcgtggaagctggacaaggagatcaggaagaacctggcgacgctgatcggccggcggcaggaagccgcggacgacgagaagctcagcggctgtgccaaggacctcctcggcctcctgatcaacgcgggcagcaacggcggcaaggtgagccccatcaccgtgaacgacatagtggaggagtgcaagacgttcttcttcgcgggcaagcagaccacgtcgaacctcctgacatggaccacagtcctgctcgccatgcaccccgagtggcaggagctcgcccggcaggaggtgctccaagtctgcggggcgcgtgacatcccctcccgcgagcagctcaccaagctcaagacactcgggatgatcctgaacgagacgctgcggctgtacccgccggcggtggcgacggtgcgtcgcgccaaggcggacgtggagctgggcgggtgcctgatcccgcgcggcacggagctgctgatcccgatcatggccgtgcaccacgacgcgcggctgtgg

SEQ ID NO: 166451 - DNA, 344 bp, Zea mays
  Clone ID: MRT4577_83384C.1
cgaccgagagcatcaggtgccagcacctcagcggaagtcgtgttccgcgacctgctccccacgggccatatctctgagatggggcaggacagagacatgatcagcaggaagctcgatcgctcgactggcccgcagcagacgagataggaacacgggcggccacccctcccgcgccttggaggacccccgccgggcggtcacataggaggccccacgaatccccgcgagcaccaccgacgacgagccttgcgtcggcagcaggtcggcctttcgcaccccccccccatgacatctgccagagaggcctgttccctcggctcccacggcctccatgccggaggtag

SEQ ID NO: 166452 - DNA, 343 bp, Zea mays
  Clone ID: MRT4577_83385C.1
tggctctggaactttgggctggtttatgtgcttggcgctctcgtagtttctactagtggcgttgtcttcgttggaggttgttattgtgaataagtctttgttgcggtctctttctgctggtagtgctgctgttctccttattggcattgtggttattagtaagaagtggaagtgggatggtagtagtggtgatgatgatgattgcggtgaggctgcggatgggactgagtctaaccctgatgttgtgttgtcgtttttcgagcggtaatgtcgttctgatactaagctggggtagacttatcatcataatatgaggatgaagaagtggatgcgtaaggatttt

SEQ ID NO: 166453 - DNA, 364 bp, Zea mays
  Clone ID: MRT4577_83386C.1
gacactgtacacggacagtggaagcaccatgaagacaaggtgaaggactccaaatcccttctctttggtgagaaggaggttgctgtgtgtatggctgcacgaaccctgaggagatcccgggggttctggttggcgctgaatatgtcgatgactctactggtgttttcactgaccaggagaaggctgcagctcacttgaagggtggcgccaataatgctgtcactctctgctcctagtttggatgcccccatcgcttgtcgttggtggaacgagaagggtacctgcccagctcgggcgtctgtgccaaacaaggtctcatcagtagctattaataaaatgaaagctcccgcgctcctctgacctt

SEQ ID NO: 166454 - DNA, 386 bp, Zea mays
  Clone ID: MRT4577_83387C.1
ccacgcgggcgaagccagaatcgctctcgagatttaatgtagagagacgggggacgacgacagcgtttgggcccgctaactgcatcgctcgacggtagctgacgtcactcatacccgtggaattttcaagcttagatggtggctcatctgcctgatccgagctctgctgctttttcttaggccgccgcactgtatcacaactatcacagcacctacgtgttcacaagtctacgcatttagactaccaatacactacattggactatgcacaactaggacgcatccatcaaaccggcacatggatccatactactcgaactatagaaaccacgtgccttacccatactatgctcctgccagatggcaaatcccatccgggcatgcac

SEQ ID NO: 166455 - DNA, 137 bp, Zea mays
  Clone ID: MRT4577_83388C.1
gtgcgtggtgacccaccccgtgagcgtgaggccgctcgcgaaagtcccgtccgccgtgaacatgcgcgtggctgatgcaagggagcacgatgcagatcaccatgaccaccgggacgcctagcgcgacggtgacatct

SEQ ID NO: 166456 - DNA, 639 bp, Zea mays
  unsure (1)..(639): unsure at all n locations
  Clone ID: MRT4577_83389C.1
acaagctttctttttctatgttttatgttctgctacggacgaccattttccctcagtgctcacaagctcctatagcttcccttcttcccccatacctctcaccagtggtgtcttcggtatgggaaaacccaattcttcaagccccacagagaaccaacaggcaatcgcagatggcatcttacctttatcacccttgctcctccaacaatcataaggcgcctattacagcagctacctttggtgcattaattggcacacaacatcatggcacaacaactacaacaactcacgctagcaaagnnnnnnnnnnnnnttntgccgtgcggggccgccccccctttgngnngaaccttgaagactactctaagcaacacccctttcttccattaaaacaacaaacctccgtgaactcttgatatgaaatagcacccccaccacctcccatcaaaccaggtaggtgttgcttacccccgcaagaaacaacaataccaaccaactgccagcttggaactttcatgctaaattacgggggcaacaacaactaccatttagccagctagctggtgtgagcccctgctgccttcttgacaaaccccagttgttgccggtcaaccaaaaactgcgcctaaagctggcacc

SEQ ID NO: 166457 - DNA, 555 bp, Zea mays
  Clone ID: MRT4577_8338C.1
gaccggcccggaaggcccgggacgacccacgcggcctccctcgcgaccgaagaagcacgcagaacgggggggtgaccggaggaaacgcacatacccaaaagacggcccaaatcaggagaggaacgaccgccagcaagcaaacgagacacccctggaggaagccacaaagcaccacacgcagcccacaaacgagaaagcagaacaagccaagaggcaggccgaagcaccggaagaggcaccggatgacgaagaacccgaagcagacaagccgcccgaggaccccaagcccagcgaggacagcggggagaaaggaaaggaccgaccagaaaaagagggggcaaccccaaggagcaaggcccaccgggaagacaaacaggaccgacccagagaacccaaggaacaacaaaaagcccgaagcggcacaggcaaagaccggcgaaagggccacgcaaaaccgcaacaggagaagagaacaaccgaaaaccgcgggcgcgcgagaacaacagaaagaaccagccaaccgaacaacacccggaccaagagaccgaccgaccg

SEQ ID NO: 166458 - DNA, 224 bp, Zea mays
  Clone ID: MRT4577_83390C.1
tttcacgaggtgctcccctgggtaaggatatccaagacttcatgatagtgaccagctatgcatacttaatccagggctatagtttaacaaaaacaactagacctaacactgtcttatatatctactacatgaccctagtcagaatcactggcatacctgccacctacaccataaattctctgaaaaaattacccgagatgggctatgatccactcggaatccct

SEQ ID NO: 166459 - DNA, 318 bp, Zea mays
  Clone ID: MRT4577_83391C.1
cccacgcgtccgcaggagttggttttggctacctgacaacgtttggagcaaatggtcaggttgttttttacctaggctcgcgggtggcaatctagtcttaggattgatttctactagagttattaggttgttagtcttctttagactgtgtgcatctagcgcgatgtagaagttttgttgtcaagaaagttgtgacttatggttatcttgatgcaataaattttctcttctcgaaaaaaatgatgatgccgctgggaatgtaataaacttatataggaacagtttttacaattgaaaatgtcaattaccaattcttgt

SEQ ID NO: 166460 - DNA, 187 bp, Zea mays
  Clone ID: MRT4577_83392C.1
gcgttgggggtctgggcccattttaaaattttttcccgtttgcccaaacagtttccaaatttggttttagtagcccttttaagggaacaacttatggcccctgcctgaaacagggtgtgggggggctttattaaattggttgaagtccccctcggcccaaatttttggggggcccaatttttgaact

SEQ ID NO: 166461 - DNA, 585 bp, Zea mays
  Clone ID: MRT4577_83393C.1
gcctacgctcgcgcgcgccgcaggcttggtggtcgagggagacggtggccgtggtgaccggcgcgaaccgcggcatcggccacgcgctcgccgcgcgcctggccgagcacggcctcaccgtggtgctcaccgcgcgggacggcgagcgcggggaggccgccgcggccccgctcctggcgcgcgggctcgccgtcgtcttccgcaggctcgacgtctccgacgccgcctccgtcgccgagttcgccgcctggctccgcgacgccgtcgggggcctcgacatcctggtaaattaaggcgtaaagccccccctctcgtgctcgtgacccgctgattatgttcggatggaacggaacgtagggatttcgccatagctttctgatgaaatttcagtctccgctccccggctccccaaaacggcttcatttgtgttcagttcaccgtacagccggcacgcgcgtccactggcccgtcgatacgtgtcgcagcccattaacagatgtgcagcaccagcacgcagcagcattattgcctgcgcctcccccgcagcagcgaacgacggccccacgctctcctggcccgccgcgc

SEQ ID NO: 166462 - DNA, 377 bp, Zea mays
  unsure (1)..(377): unsure at all n locations
  Clone ID: MRT4577_83394C.1
gtacaaccagacacacaatctagctatacacttcatgatcaagactagactgctgtgtggcacctagcttgtctctcttagacactaacaacacttctagttgcctgttcataccatgcacactgtcgcctaacgttggcaccctcttacaactgcaacaattgctgccattcgaccaacttactttgacaaacccaccagtgttctaccaacaacccatcattggtggtgccctcttttagattgcttatgagttatagttcaataataaagttttttttgctgataaaaaaaaaaaaaaaaaaaaaaaaaggaaaagaaaaaaaaaaaaaaaatatttaaaaaaaattaaaaaaaaaaaaaaaaaantnaaaagt

SEQ ID NO: 166463 - DNA, 2126 bp, Zea mays
  unsure (1)..(2126): unsure at all n locations
  Clone ID: MRT4577_83395C.1
gagggatgaatccaggtcctgtcgtcctgacatggagttcgatagtacgtgttcttctcccgtccgatctcgtggcggacgtcccaccggatttcgagcccgagccgcgcgggttcctgccccacgtccacagccccgaggcgcgggcgtgggcgctggaggtgcacgcgctgtggaagcgcctggcgcggcgggtggcgcccgacgtcgcggcgcggccggaccggcacacgctgatgccgctgcccggcagggccgtcgtgccgggatccaggttccgggaggtatactactgggactcctattgggtcatcagaggattgctggtgagcaaaatgtacgacacggcaaagactattgtgcttaaccttgtatacctgttggaaaaatatggtttcgttccaaatggtgcaagatcctactacactaaccgaagccaaccaccacttttgagctccatggttttagaaatatacagggcaactggtgatgtggagtttgttaggacagtattccactctctgcttaaagagcatagcttctggatgtcagagattcataatgttgctatagcagacaatcatggtcgggtccataatttatctcggtatcaggccaggtggaacaaacctaggcctgaaagtgcgacaattgatgaggaactggcttcgaagttgaattctatggcagctaaggaaaaactgtactgcgaaattgcttcaacggcagaatcgggatgggatttcagctctcgatggatgaggtttggatgtttgttatccttaaaaaggaactgacgagctaacagttctgctgctttcgcactggttaaaacaagtactgcaatagaagacaccaagctccccgaccattacgaatttatttttgcaccgtgtaccacacacaggttgtttctgactacttttactgttttattcaggaattctactgacatgacaacattggcaaccacttacataatacctgtggacttgaacacatttctttttaagatggagctggatattggtgccttggctaaagtcgtaggagataatgcgacttcagaattttttttaaatgcttcgaaagcacgtcatattgcaattgactctattttgtggaactctgagatggaacagtggcttgactattggcttcctggtgatgcagactgtcaggaagtacacgaatggaagcctaactcacagaaccgcaacatatttgcttccaacttcgttccgctgtggctaaatgcataccattccgaaacagagtcatggcgagcctcaaggcatctggattacttcatgccgcagggatagcaacttccctgacaaacacgagccaacaatgggatttcccgaatggatgggccccactgcagcatcttatagctgaggggctgctgcattctggatcagaggccaaaaaactagctgaggacattgctacgaggtgggtgagaacgaactacgccgcttacaaagcaacgggtgcgatgcatgagaagtacgatgttgaggcttgtggagaatctggaggcggtggagaatacaagccccagactggttttggctggtccaatggcgtggtgttgtcattcttggaagaattcgggtggccagagggcaaggaaatagcttgttgagcggcgaagcgctcacgacagggtggatctggtcttgccggagagcaatctggttaggcatcgttcatgtcacacatgtctagctacgagagtggcgcattgccttctgcagttcgtcaagtgcgtttgtgtgttcttgtttgcttttagttgcgactaggctgtagatccttcttgtatcacaacaatatatgtactgctactgtaccggccccggcctcttgtttaatctgaaatgctcattgtatatcctcttacgaaacgcaaacacgtgctttggcacgttcgtcgtcgaaaagagaagagaatataccattttgctcttttgaatacccacgaaaaagcaaaaaaaacagaaaatccccccgttcgtttctttggcccacaaaacaacccnattcccccccacctctcngcaccggggcgttttccgcggggcgggcgctcctgttgggggtctttttttgtggngttt

SEQ ID NO: 166464 - DNA, 1728 bp, Zea mays
  unsure (1)..(1728): unsure at all n locations
  Clone ID: MRT4577_83396C.1
ccaggtcctgtcgtcctgacatggagttcgatagtacgtgttcttctcccgctagttgtcgctgctgcggtcccacataggattgctggtgagcaaaatgtacgacacggcaaagactattgtgcttaaccttgtatacctgttggnnnnntatggtttcgttccgcacgaggcaagatcctactacactaaccgaagccaaccaccacttttgagctccatggttttagaaatatacagggcaactggtgatgtggagtttgttaggacagtattccactctctgcttaaagagcatagcttctggatgtcagagattcataatgttgctatagcagacaatcatggtcgggtccataatttatctcggtatcaggccaggtggaacaaacctaggcctgaaagtgcgacaattgatgaggaactggcttcgaagttgaattctatggcagctaaggaaaaactgtactgcgaaattgcttcaacggcagaatcgggatgggatttcagctctcgatggatgaggaattctactgacatgacaacattggcaaccacttacataatacctgtggacttgaacacatttctttttaagatggagctggatattggtgccttggctaaagtcgtaggagataatgcgacttcagaattttttttaaatgcttcgaaagcacgtcatattgcaattgactctattttgtggaactctgagatggaacagtggcttgactattggcttcctggtgatgcagactgtcaggaagtacacgaatggaagcctaactcacagaaccgcaacatatttgcttccaacttcgttccgctgtggctaaatgcataccattccgaattcgtacgctttgctgatgaggcaaaatcaaacagagtcatggcgagcctcaaggcatctggattacttcatgccgcagggatagcaacttccctgacaaacacgagccaacaatgggatttcccgaatggatgggccccactgcagcatcttatagctgaggggctgctgcattctggatcagaggccaaaaaactagctgaggacattgctacgaggtgggtgagaacgaactacgccgcttacaaagcaacgggtgcgatgcatgagaagtacgatgttgaggcttgtggagaatctggaggcggtggagaatacaagccccagactggttttggctggtccaatggcgtggtgttgtcattcttggaagaattcgggtggccagagggcaaggaaatagcttgttgagcggcgaagcgctcacgacagggtggatctggtcttgccggagagcaatctggttaggcatcgttcatgtcacacatgtctagctacgagagtggcgcattgccttctgcagttcgtcaagtgcgtttgtgtgttcttgtttgcttttagttgcgactaggctgtagatccttcttgtatcacaacaatatatgtactgctactgtaccggccccggcctcttgtttaatctgaaatgctcattgtatatcctcttacgaaacgcaaacacgtgctttggcacgttcgtcgtcgaaaagagaagagaatataccattttgctctcttgaataaaaaaaaaaaaaaaaaaaaaaaaaaataaaaaaaaaaaaaaaaaaaaaaaaaaaaaatataaaaaaaaagaaaaagaaaataaaaatattatttgttataaaaaataagaaaaaaaaaaaaaagggggg

SEQ ID NO: 166465 - DNA, 884 bp, Zea mays
  unsure (1)..(884): unsure at all n locations
  Clone ID: MRT4577_83397C.1
agccccaggtatggtgaaaagccctttcaaattttttgtctcaagattgatatgatgatcagcagtctggccattcctgatgactggcaatctcattcgattttctgccttggtatcttctagtaattacagtctctgctgatctgtgggactttgttaaccattaaaacgagagatgtaacttctgttctgacttctgacttgagccccttttttttttttttttttttttttnngtcccctaaatgctcgatgctttgctgatagcaaaatcaaacgtcatggcgagcctcaaggcatttggattatcagcagggatagcaacttccaaagagccaacaatgggatttcccgaatggatgggcccccctgcagcatttttgaggggctgcgcattttggatcagaggccaaaaaactagctgcattcggtgggtgagaacgaacgcttacaaaacgggtgcgatgcatgaaaagacgatgtggcttgtggagaatttggaggcggtggagaatacaagccccagactggttttggctggtccaatggcgtggtgttgtcattcttggaaaaattcgggtggccaaagggcaaggaaatagcttgttgagcggcgaagcgctcacgacagggtggatctggtcttgccggagagcaatctggttaggcatcgttcatgtcacacatgtctagctacgagagtggcgcattgccttttgcagttcgtcaagtgcgtttgtgtgttcttgtttgcttttagttgcgactaggctgtagatccttcttgtatcccaacaatatatgtactgctactgtaccggccccggcctcttgtttaaaaaaaaaaaaaaaaaaaaaaaaaaaaaaaaaaaagaatttaaaaa

SEQ ID NO: 166466 - DNA, 672 bp, Zea mays
  unsure (1)..(672): unsure at all n locations
  Clone ID: MRT4577_83398C.1
aaaaaangaaccgaccgacgcgtacggctgatctntaatacttttttaaccattatttcgagagttgtactttttttttggccccactgcagcatcttatagctgaggggctgctgcattctggatcagaggccaaaaaactagctgaggacattgctacgaggtgggtgagaacgaactacgccgcttacaaagcaacgggtgcgatgcatgagaagtacgatgttgaggcttgtggagaatctggaggcggtggagaatacaagccccagactggttttggctggtccaatggcgtggtgttgtcattcttggaagaattcgggtggccagagggcaaggaaatagcttgttgagcggcgaagcgctcacgacagggtggatctggtctcgcggagagcaatctggttaggcatcgttcatgtcacacttgtagctacgagagtggcgcattgccttctgcagacatgcaagttttgcattgccttctgcagttcgtcaagtgcgtttgtgtgttctattgtttgcttttagttgcgactaggctgtaggagatccttcttgtatcacaacaatatatgtactgctactgtaccggccccggcctcttgtttaatctgaattgctcattgtatatcctttttataaaataattatatttttttttttttt

SEQ ID NO: 166467 - DNA, 699 bp, Zea mays
  unsure (1)..(699): unsure at all n locations
  Clone ID: MRT4577_83399C.1
ttgggaccctcgaggccggccgggataaaatatcgtcaatcagataatcatacatcaaaggagacaatgcacaatggatataatatggtctttatattggtttgcttatatgaacaaagatatggaaaatcactatgcattgatatgatcaagctaggaatatgaagatggagattgaagtaaatgagaagaagtgccaatctaaaatcctaggatataaggaactgtgaattggtttgaccatattgatgttggttcatatatgcttctatgagaatcaaactagagcttgattgatcttagcatttttatctagatgacattcagggtgaagatagcaaggaaagggcttcgagggactaggcgaaggtgaaggccaagcggcggattgtggactgaggtgccatggctaaggtgaagaagagagtacttgcactaagtcgatgaactaactagctttgaagagttatattgtgttgatgcatcagtaaggtgacttgaagccatgatttgaactcatatatggtgaaatgattcaagtcataggattgatttgtgttttcttcaaaaggtgagacaaatatgtttgtgatccttgtgaagcaacgccatggacaaatcacacatgacacaccaatgactcaaggagtttacttaattatattttatttaattanaaaaaaaaaaaaaaaagcggcc

SEQ ID NO: 166468 - DNA, 539 bp, Zea mays
  Clone ID: MRT4577_8339C.1
ggggtgggtttttttttttttttttttttttttttttttttttttttttttttttttttttttttttttggaggaactttggcttctataggaacacaatttgaagaaagcaaccagctttagggggtccaggggacaaccgtacaagggtttttccttaagccgagcacaagcgcccgaggatttttttacatttacagacgtcctccaatttgaaaacacgaaacatggaatactagcagggccgtccaacttttaaaaatcctgcaaaaaaacaaactggaatgaaaaatgggcaaccagttccttttttttcttccccggatccaatccaatggagcacctcggatgaattaaacgaccgggggcatgtccttaaaccaggcgtcaagcggtttgccgatggagtaaaccatgaaaccgatctcccttaacttttccgggtcgaccatgttgcggccgtcaaaaacaaggggggcttttgcatgttggcgaaaatcttttggtagtccaagggcttgaactcgtcccactcgggc

SEQ ID NO: 166469 - DNA, 268 bp, Zea mays
  Clone ID: MRT4577_833C.1
tatttttattttaaactgttattaataacgatagcattaaaagtacctattgtatgattacattgcgtaaattatagagttatggatgacatataacataaaacattttttagtcttatcatattattatcatatatagttatgactatagttgtattatcatgagcagaaacatttatctttttaaggacatatttacctcattctaacaacttcaaaaatttctataataaatatcaaattttcaaatactcactgattttaaatt

SEQ ID NO: 166470 - DNA, 127 bp, Zea mays
  Clone ID: MRT4577_83400C.1
accctagaggccacaactgccaacttgccaatggctgtcgtccgacagcgccggcagctgtcgaaccttaccctcccgctggaccacttcgccctgcgcgtgccatcgcagtcttagaccaccgtcg

SEQ ID NO: 166471 - DNA, 156 bp, Zea mays
  Clone ID: MRT4577_83401C.1
gcgagctctgctctttctcctcagaatgagaagagtgccgattagtgactaaatacctactctttctagttcccctgtactgagatctccgcggcacgagcaagaagatactgagggcgctaataggagttcatcacatccgtcgtgctgcttact

SEQ ID NO: 166472 - DNA, 1676 bp, Zea mays
  unsure (1)..(1676): unsure at all n locations
  Clone ID: MRT4577_83402C.1
tacctcgagggccggccgggccgggnattttcaagcacgacgacaaaacatcgagcgtcaccgtcacgctcacgacttcgcccaaacttctccccggggagacgagaaaggaaccgaggatctcgttcccgcggcgcggcggacagaggcctcgccgtgggagatggccggccggcgcgagtcgcccctgatgcgcggtggcggggcggggccaccgctgtcccgagggtcccgcatcgccgcggcggtcgtggtcggcgtcgcgctcggctgcctgtgcgcgtttctctacccagacggcctcttccaccgtgcccctgactccgccatccattggccgcgacgggttgaatcagttgcctgtgatacatctcgggaagttgccaaactaaagtcacgtctggtattgttggaaaggaaaaatgctgaattcaagaagcagatcaatgaattgtcaatgaagcttcaattggccggacaagggaaaaatgaggccctgtataaggctggtccatttggtacagtgaaagctctgagaacaaatccaacagttactcctgatttatccatcaatcccagattggccaacatattggaacaggttgctgtgaagaaagaactgatagttgcattggcaaattctaatgtgaaagagatgcttgagatgtggttcactaacataaaacgagctgggatttcaaattatttagtagttgcattggatgacagcatagagaacttctgcaagtccaatgatgtcccagtttaccgacgcgatccagatgatggcatcgacaatattggcaagacaggcggaaaccacgctgtttctggactcaagttccgcatattgagggagtttttgcagctcggatacagtgttctgctctctgatattgatatcattttcttccaaaatccatttgattatctttacagagattctgacgtagaatcaatgagtgatggccacaacaacatgacagcttatggattcaacgatgtgttcgatgagccttcaatgggctgggcaagatatgcacatacaatgcgcatatgggtttataattctggattcttcttcataaggccgacgattccttcgattgagcttcttgacagggttgcttatcgcctttctcacgagcccaaatcatgggaccaagcagttttcaatgaggagctgttttttccctcacatcctggttatgaaggtcttcatgcatccaaaagaaccatggatatctacctcttcatgaacagtaaagttctcttcaagacggtgaggaaagatgcttatctgcggaatttgaagccggtggttgtgcatttgaactaccatccagataagtcggatcgcatgaaagcagtgattgaattttatgttaacgggaaacagaatgcccttgaacgcttccctgatggatcagaatgataggcaccagcttttgtagaacagaaaaatgataacctagtatctagtcgtcttgaaactgtgcgcgattatattgacttatacatgcattgtcattataaatcctgtgtgcttgagatgcaaacattcactgagcatgaaaactcgtataattctctacttaggccatgtttatttccctcttagattatataagttagattatggtgnnnnntaagctaccaatattagcttattttaa

SEQ ID NO: 166473 - DNA, 626 bp, Zea mays
  unsure (1)..(626): unsure at all n locations
  Clone ID: MRT4577_83403C.1
acgcctaccccacgcgtccgcccacgcgtccggcgaaataccatgaaatatatataaaaaaatagcgtgttcactgggattcaaaccgtggtctctaggaacaaagcactcgtctctaaccactacagttcatgtcggtttgtgttatgcaacgaaaccatatatgatatatagaaaccatagtgatgcacgagcaactaactagtaagggcatgtttgggagtgaagtacttttgtagtttataggcaataccatagtttaaaggaatactgtagtattttatactatgaggtgtttggttgttttcctagaaactgttttttaaaaaccaaggtattctagataccatggtattttgggagtattggaaactccactccaacccaaagtttttatggcatggctagcttttgcctaagtaccatggtttacattgttgtatccaaacaatggttctcaaaaccatggtatttttggagctgaagaaaaccgtagtattgcctcggcaattgcaaagtatagcattgtaaaaactatgattttgaaaaacaccgttgccaaacaggccctatatgataatacaacacctccatcgatcgctgntagctaatagatatccaaaaca

SEQ ID NO: 166474 - DNA, 764 bp, Zea mays
  Clone ID: MRT4577_83404C.1
ctcaattcggcattcggcctccccctctcatcagacatcagagcccttcttcctccgcctccccttcacccccatctcgccatacgcttatcgcccatcccctgatcaccagccgccgccgccaccgcctcgatcccgtccgatccaatccggttttttccttgataatgcgcgtggcaaccttgtcagttcaatccgtccgtgaagaacttatccttattttcgtttgcatcgcatcgcttctgcgtttgggggaaaaagggccgcgtccttgatgtctactatcgcgaccccgccgccgccatcggcggcgcaagagaaggccgccagccggaataagcgaaagtaccgtgccgagacaccatccacggagttgggcccattcgggctggagtacccactgacgacggactgcgtgggattcgagtttatgtcgcccgagaaggttgccatggcagccgcggtagccgccgctgagggtgtcagccttgacctcctccagaactcgtgcgaaaactgcaaggatctccaccctactgcggaggacttgttggagtgccagcgatatgtgaattggggtgacccaaatgagatgcagctggaggagatccttctcaagagtctggacaccacctttgacaatagtgtgagtctgatcaccacaatgggctactctgaggcggccgcacgtgctgctattatgcggacagctgcgcaatacgactggagggagagccttgctgggtttgagagggcgcgttgag

SEQ ID NO: 166475 - DNA, 275 bp, Zea mays
  Clone ID: MRT4577_83405C.1
aattcggcacgaggcgccggagttcgtgccgcggggcccgccaccaccgacgccggcggttgtgctgccgcctccgccgcaggtgatccgcatgttcgccacgcctcccccgccgacgcgtgggggcttcttctccgtgccgacgacccgggcgttggagtactatgcgcctatggggaacgcagtggatttgctgtgaaggagcatcaggctggcgcagccggaagcggagatgctcggggccgtcggagggaagacagagctggtggatttgg

SEQ ID NO: 166476 - DNA, 460 bp, Zea mays
  Clone ID: MRT4577_83406C.1
ggacctttgggctgatttatgtgcttgtggatgtgcggggcctaataccacgtccattaacccaaaaacagagtctatacatccgtacgtacccacgccgccttcaccgaaagaacagacaacaaaataaggtcacgaaacgacaggggtaacacggcttacccgtccgcgaggcgagaaacaaaagaacgaaaaacacagaccagcgtcgcccctcgaacctacccgacgaaatcggcgccgcctcccgaaccgcccaaaaatgagcgtcacccttcgaatatcactctaaatcagcgccgccctacggaccttttttccgctggagaagaactcctaccccaactatcgactccattacccagaactcaaaatccgactacgcagcgctctattcactagcctctaccacgtctcctcccccacgtcctagagcccacaccgtcaaacacgagcaaag

SEQ ID NO: 166477 - DNA, 615 bp, Zea mays
  Clone ID: MRT4577_83407C.1
atcatagcttcatgtcgtggaggcaatagtacaagcagaaaaaacttgagttcgtgtgcagctaccttgcggatttgagcttgctggattatgactgcataagctacctaccctcagtagttgctgctgcctgcttgtttgtagctagattcacaatccagccaaagactcgtccttggaacttgacacttgaacaaaacacggggtagagtctttgatctgcagaaatccatttatgtcatacatgaactgcagttgacaataaggtgctcagatcaggaagtccccaggaagaagtagaaggaccccaagtttgggtgcgtgtcgacaatggtttcaccacgagaaatccctacatctttccttgaagattgccataagtgaagtctggacttggagaaaggtttttgcagtaatggtgctggcgatgtagaaaatagcttgatggtaggatagttggtataatacgtgctagttcacattagaatagtaagactgaattaagcttacctgttgagtctgagatcttgaacaagccatacagtcaaggttttgctcagtaacctagttcacggttctctctttagtagtaatggatgagacatttttacacct

SEQ ID NO: 166478 - DNA, 326 bp, Zea mays
  Clone ID: MRT4577_83408C.1
aaaaaccaaaatttatgcttttttttgcttttttttatcattttacccagctgttgactcgttgtacactgggtagtgtctggtcaacaatcacacttggttgggggggaaattaaaggcaggaaattgttgtggaaattcaaacgtgtcattgggggtgcttatttaacgactcttggtttgggggaaccaatgactacacgctgtttttgatcaggctttgggttatttacaggtcacgcctccggttgttcttgtgcggggggggggctattatttatggggtggaggggggattctattcccggtttgggggggtgtggttt

SEQ ID NO: 166479 - DNA, 371 bp, Zea mays
  unsure (1)..(371): unsure at all n locations
  Clone ID: MRT4577_83409C.1
aggcggccgaccgggnggttatagaannnanggggncggggagaaccaacaccctncggcncggcggaagcngccatncgagcgncagcgcaccgggcaaaaggcgaagcgggnggggncacaggcagaggggnaacagccccagngaanggcnccggagcaagggnaccgacggcgganggaaccnncncgcaagggagggagaggaccagcggaagccgcgggagaggccgggcangcggggnngaaagagcgggngaggananccangggggagacacagganggaaaacgaganccaccgcgacaaacggagcgagcggcggcaggcnacaaggacgccgagagagaccgcgaagaaggcaggaaaa

SEQ ID NO: 166480 - DNA, 1078 bp, Zea mays
  Clone ID: MRT4577_8340C.1
cccacgcgtccgatcccaccaaaaatgagcaccgaatctctcgtcttcaagggcagcctcgtcggccacaaggatggcatcaccgcgatcgccacctcgtcggagaaccccgacatgatccttaccgcttcccgcgacaagaccatcattatgtggaccctcactcgtgacgattcgtcgttcggataccccaagcgtatcctccacggacacaaccacttcgtctctgacgttgttgtttcgtctgacggtcaattcgctctctcctcctcgtgggacaagaccctccgtctttgggacctcaacacgggacttaccacccgtcgcttcgttggacacacttcggacgttctctccgtctccttctctgctgacaaccgtcaaatcgtttccggttcccgtgaccgaaccatcaagctctggaacaccctcggagagtgcaagttcaacattcaagaggatggtcactccgaatgggtttcctgcgtcaggttctcacccaaccccatgaaccccgttatcgtttccgctggatgggataaggttgtcaaggtttgggaactctccaagtgcaagctccgtaccaaccactttggtcacaccggttacattaccaccgttactgtttcccccgatggttcgctttgcgcttcaggaggaaaggatggtatcaccatgctttgggacttgaacgagggcaaacacctttactcgttggaagctggagacacaatcaacgcgctcgtcttctctcccaatcgctattggttatgcgccgccacgcaatcatgcatcaagatcttcgaccttgagtccaagtcgatcgttgacgagctccgacctgacttcaacatcactgccaaggctcgtgagcccgagtgcacctccctcgcctggtcctctgacggatcctccctcttcgctggttactccgactcggttgtccgtgtcttctccgttgtcgcctaaacgaaactggatccttgtggagcaagagattcgaaaaaattgtcgtacttgtagtctcattcgtgccgggaatttgcttgtcgatgaaatcacagcagtctcgcgggct

SEQ ID NO: 166481 - DNA, 2736 bp, Zea mays
  Clone ID: MRT4577_83410C.1
aaaagggagaattcggcacgaggtagtttacttactgcggaaagtcgttcaagagattgagcgccgtctctgtattcaagcagagcacataagaagtcaaaatgttatcatgaagagaagagaacaaaagtactgttcaaaaattaaagtacttgaaatgttgggcaatggcacacatgaagaaaaccagatggcaataaacaggcttcagatagtcaagaatgagaagtcaaaaatcgaagagaaaaaagaactctgtgagaaagatgttcaacgattaatgaaagagaaagaatattccaaaagcatcataatgaacctaacaaaagatatggaagccatgaatagattgcatgagcagcaacttgagcaaattggaagaaaggcaaaggaaatggaggaacaattaaccaccagggtaaaagaagtagagtatctcttgctacaatcgaataagaaagttgaagaacttgagattgcttctaggctaaaatcacagttatgggatcagaaagagaacatttttcagagttacatggataatcaacaattagttatcaaggacataagaatattgtcacagtcatatgaaaatgatatgtatgcacttcaaatgcagtggagaaatgaaatctctaacttaggatctgggttaaaatgtttggttgatgccgctgaaaattatcataaagtcctgacagagaaccaaaagttatttaatgaagtgcaagaactaaaaggtaatataagagtatattgtcgtgtgaggccatttctttcgggtcaagataaaaagtctactacaattgactacatggggggaaaatggtgagcttcttatatcaaatccatttaaacaagggaaggacggacacagattgttcaagtttaataaagtgtttagtccatttgcttctcaagctgaggttttttctgacatacaaccactaatccgatcagtcctggatggattcaacgtttgtatttttgcatatggtcagactggttctggcaaaacttacaccatgagtgggcctagcacatcgaagcaagattggggtgtcaattatcgggctttaaatgatttgtttgatatttcactaagtaggagaaatgccttctcatatgaggtgggggtacaaatggttgagatatacaatgaacaagtccgtgatctgctatcaaatgatattgcacaaagaagacttgggatttggaacacttctcaacccaatgggcttgttgttccagatgcaagcttgcactcagttaagtcgacatctgatgtattagacttgatggagattggacaagcaaatagagcagttggttcaacagcgctaaatgaacgaagtagtcggtcacacagtattctaactgtacatgttcgagggatggatttgaagaatggatcaacctctaggggttgtttgcatcttattgatcttgctggtagtgagagggtagagaagtctgaagtaaccggcgatagattaaaagaagctcaatacattaacaaatcactctctgcgttaggtgatgttatttttgctttgtcacagaaaagtgcccatgtgccttatagaaacagcaagttaacacaagttcttcaaagttctttaggtggacaagcaaaaactctaatgtttgttcagataaatcctgatgttgagtcatattcagaaactataagtactttaaagtttgctgaaagggtgtctggagtagagttaggtgctgctagaagtaacaaggagggaaaagatataaaagagctattggaacaggttgcgtctttcgaaagacacaattttgcgcaaagatatggaaatagagcagatccaggtcatcaaagacaaagtaaaatccccaaatttgttgttagatagaaatgtgcctggcttgacgaagactacagcaaaccaacctagccaactattatcaggcgaacgaatgcttaagtctagtgacagagttctatcggatcgtcagagttacggcgaggtgaatgtagatcctaaccaccatgtgatggatactgcaccagtgagcatagatgaagcaggatatgagaacaatgcatcggatgatggtttatcgggtgaaaccgagaatgataattcaagctgctgagatgacagcggaacggctgcatagatttccatcaagaataagcaggttcactctcacaaaaaacgggcagccatctatgtctagatcgaaaccaaaggatgctaagactccaagcaatacgaaagctccatcgagccggttgacaggaggctcttcagccaggtctaaaagacggcagtagagcaccgatcatgttgctcgttttgatgtgcattgtagttgaaatgtgaatttgatgggtagttgtaggaccgttttatgattgtaactttagaaaatgtcagacactgatggcagaatatttgaggcatttgtttgatcatttgcttatgccgagcaaaacagcaaacaatgctcgattgtatgtgaaacactctgacctgtgaccatttgaatgtcggtgcgcctccggaagtccggagttgtgtatataccaccaaattgccggcctaaaaaaaataaaaaaaaaaaaaaaaaaaaaaagaaatctaacgacaagttccttcaaagttctttaggtggacaagcaaaaactctgatgtttcgttcaaataaatcctgatgttgagtcatatccagaaactataagcactttaaagtttg

SEQ ID NO: 166482 - DNA, 388 bp, Zea mays
  Clone ID: MRT4577_83411C.1
catgccgtatgagttctttggttcccaaaaaaaaaaataaaaataaaggggaggggaaaaattaagagaaataacaaaaataataaacttaaacaaaaaactagactgggcggggtttcttggggatccaattttccgtccccgtgcatgcgcttattatattttttttttagggccccctttaattcatttcactgttccttggtggggcctctttttgactggccaatccctggccctccccaacttaatgatttttttcttttttcgcccctctcaaaggtggctttagccctgattggccccccctgggctgcctttaccaccggttgttcccccctattgtctcttggggcaccccccttttttccgctttttgcctggtgcc

SEQ ID NO: 166483 - DNA, 251 bp, Zea mays
  Clone ID: MRT4577_83412C.1
ccctcgcctgctgcctagaggtggaagtccccatcctggcctacgagtacatccatgacggcacgctgtccaaccttatgcacggcaaccacaaggcatcgggtctcactgaacacccgtcttaggatctggtaccagtccgccgaggtgctggactacctcaattggtgcacgtacacgacgttcctccaaggtgacatgaagtccaccaccatgcttctagacggtgactactcgcgccaaggcgttcg

SEQ ID NO: 166484 - DNA, 330 bp, Zea mays
  Clone ID: MRT4577_83413C.1
ataatctctttttcccctctcacttttttttttgtatggtttttttttaattttcggtaaaaaccccaccaagcgtttcaataaaaatgaatggaccctaacaaattgtgaccaaaaaatcacaaggtaaaaacataggttaccacaaatattccacccttaataaaaaagggaaaaaaactgctgcccaaaaacccgcacaaaaattttttttccctaataaaaaaaccgcaactaaaaccggggcaaaaaaagcttacaggtaaaacaaatcccccaaagttttcaaccaaacgttcgcccaccgcgtcgaaaaccccttgtactacc

SEQ ID NO: 166485 - DNA, 440 bp, Zea mays
  unsure (1)..(440): unsure at all n locations
  Clone ID: MRT4577_83414C.1
catcacaaaacatcctcaagaggaccatcttttcattcacttagaggggggcgcggggcaaatctgcaacatcaattatggggctccaaaaaccatgaagctggtgcttgnggggcgggctcggcgtcgggcccggggtcgccgctcccctcgccgccgttgctcnggggcgngctcgccttcgtgctcccncctntctggggggggcgggggctcaatttttttttttcctncntcccgccctnccncctcgtggtggtgccggacggtggcccgcccccccccctcaaggtccccgtgggcttcggctccgggctctacagccgcaacggcttcggccggatcctcgggcccggggccgccggcgtgtcctgcggggcctccgcctgccgctgcttgggcttcctggccctccggcgggggggcctctgccccttcgg

SEQ ID NO: 166486 - DNA, 156 bp, Zea mays
  Clone ID: MRT4577_83415C.1
gccgaaggcctattctgctgccaaggctgagccgaatgctgcccgtgtcaaacataagccagctgccaagaaagccggacatggcggcaaggatatcaagacttcaggcatggacactactagaaagctagtttcgcccgccaagatagaccgctg

SEQ ID NO: 166487 - DNA, 199 bp, Zea mays
  Clone ID: MRT4577_83416C.1
gttttatgtagctgcacccccccaataggaagggggggctttttaaaaaggtggggggttttaacacttttacaactgcacccaatcgtttatggccacgctggaggacatttacacacagaagttttccataaaacagctatctaccaaatcaattaattacaaaatatgcacaaaaaacttatactctagtcgtgaa

SEQ ID NO: 166488 - DNA, 167 bp, Zea mays
  Clone ID: MRT4577_83417C.1
cttccttttaccttttcaccaacaaaacttatattccatctcattctcaattcattataccattctccacattcttcaaatcttaaacacccactttcaaccttatctacaacacaattcactacttttacacaccaattccattcaacaacatctttctacattac

SEQ ID NO: 166489 - DNA, 352 bp, Zea mays
  Clone ID: MRT4577_83418C.1
ttgctggagcgtccgctagatgcgatggcatactgtgcagaattaccgctcttcccggcggaggccgacagacaccatcgggggctaactgggagggggtgaaggtcacacacggtgggcattcctggggcagggtatctcgaaacacgttacagctccccatcgtgtcggtgcgctgccaaccagaccgagacaggtggtggaccttaccgactgcgagctgagcttgactctggatagccacccgtggctatcctacgcccgccgtgggagccgcggcgggtcgctgtgcgccgccggcggacggacggtgttactctgctgtgggatttggctgaggggaagaggctgt

SEQ ID NO: 166490 - DNA, 689 bp, Zea mays
  Clone ID: MRT4577_83419C.1
cctttgccaaattcccttcactgccgacctgccgggggtactgctcaccgggccgtttatgccggagtctgtacggcaaaagttaaaggtcagtgcccagaataatcctgacctcactatcctgccctatttttctgaaccgaccatgttgatgtgggcggcggaacgggtaatcacgatggggggctacaacaccacctgcgaaattctgtccttccaaaaaccagcgctgattattccccgcattaaaccccgccaagaacaatggctgagggccacccgtttaaaacaactggggctggtagatgtgcttcatcccgatcaggtaaatgcccaaaatttgacagcttggctccactctgcgccgaccaaccaatataacaaaccagttctaaatctccgggccacccaacaacttcccctcgttctgggtcaattgctcagcacccgtaactgttttatgtcccaagcctgctagtcaattccgttgtaaattttccatggccatcgcctacgttgttaaacgctatccccgttattcggaaacgttcattgttaatgaaattcttgcccacgaagcagcgggtttagacatcaaaatttttgccctccgtcctccggtagatagctatttccaagacaaaattgcccgggtgaagcccccgttacctgtatccaaaaacccagcc

SEQ ID NO: 166491 - DNA, 252 bp, Zea mays
  Clone ID: MRT4577_8341C.1
cgcatcgcacgagctacggatctgcggcccgacgactacgacgacggcgatgtatcggacgaatcattgcaagcaacgacgtcagaactaacgtcgacgatccatcctgcagcatccgatcctatccgatgacatggtcttacgtcgcgtgcctgctgcagctcctactgatcacggtggtgaacgtcctcccttagctcatcgatctcatcatcatcaaggtgtatccgctatactgatcggagtaccgga

SEQ ID NO: 166492 - DNA, 348 bp, Zea mays
  unsure (1)..(348): unsure at all n locations
  Clone ID: MRT4577_83420C.1
ggggggggggnngggggggggggggggggggggnggngngggggnnggnnnngggggngggcctcatgagcctctcaagccgaccgagnacgaatcgacgccgcgagatttttccgacctaaccttccttgccaactccgccaccgcgcccctccgttatagggccgtcgacgaccacggcttgcgcgtccccgcctcattcgcgcgatcatggacgcggacacggcacaccaccaccgccaccgcctcccgcctccatcccgcggccggagcgcgcgccggcgtacgctcattggccgcccggggggccgagagcctcgtcacctgcctcttccccacgccgcgcac

SEQ ID NO: 166493 - DNA, 240 bp, Zea mays
  Clone ID: MRT4577_83421C.1
agacgaccgagcagagtgtacactcgatagcaaacaggacctgccggatctgtctcccacccacgcctgttcggcaacggcatctgctgcaacgatcgccaccacatacctgctcttcaatctgcgaaacttcttatagctgtgctcataccacacaaggatgaacaacagcgacgtgcggagacttgactccgacgccgcctctgagcgcagaagacataagtttctcgctcttacatc

SEQ ID NO: 166494 - DNA, 1247 bp, Zea mays
  Clone ID: MRT4577_83423C.1
cggcgggccgtatggtgatcacgacggcgggtcgtcctcatccggcccagccggagatgggcacggtggcagcggcggtaacggggagatggtagcccgccggccccgtgggcgcccagcgggctcgaagaataagccgaagcccccggtgatcatcacgcgggagagcgccaacacgctgcgcgcccacatcctggaggtggcgagcggctgcgacgtgttcgagagtgtctccacgtacgcgcgccggcggcagcgcggcgtctgcgtgctgagcggcagcggcgaggtcaccaacgtgacgctgcggcagccgtcggcgcccacgggcgccgttgtgacgctgcacgggaggttcgagatcctgtcgctgtcgggttccttccttccgccgccggctccccccggcgccaccagcctcaccatcttcctcgcgggggggcaggggcaggtggtcggtgggaacgtcgtgggtgcgctctacgccgccggccccgtcatcgtcatcgccgcgtccttcgccaacgtcgcctacgagcgcctccccctggaggaggaagaggcggctcagcaggcagcgccacccggcctccagatgcagccacccagcagtggtgtcgacggcgctggaggcatgggcggtgggccgttccctcccgacccgtcggctgccgggctgccgttcttcaacctgccgctcaacaacatgactggtggcggatcacagatcccgccgggcgccgacggccatggttgggccggtgcacggccaccattctgacaagtccatgatgcgccggtggtgtaattcatcaggtttgggagaacaggaaggtgtcaagaagaaagcataaaaaaagcaatgaacggcacaagggttaagggcagcttgcaaaaggttagcgcacgtatgcttgcaattgcaaggattatcttttctacttctatctcgatctctgtacaacttccgtagtgtttcgtttgctcggtctgtctgatttcgtgcttttagtttcttcttcctcctttttctttttcctcctctcgcgtgtgcctcttgaaacttgatatgtgttgtaaccttgtcttaatttttaatctggtgtttaataagtcgtcttcaaaagttgttctctaggactcgatcgatcggtgcgcaagtgtgtgctgatcaatgtttccatgcatgcatgggcttctgcttgttgttattgttcattcttatggatgagataagatctccaacc

SEQ ID NO: 166495 - DNA, 215 bp, Zea mays
  Clone ID: MRT4577_83424C.1
atggcgatgcaaccataatatacactgaggcctggatggagctaaaaataaagacactgtgctgaatgataaaaatgcaggctaacattgtcaccagcttatgtaagacgtcaagtatgtttgggcaccccacagtattcgcctccccacaagggccaagggctacactcacatgggccaaatgcccctgagagagaacctatgctcattgctgg

SEQ ID NO: 166496 - DNA, 176 bp, Zea mays
  Clone ID: MRT4577_83425C.1
cacggatattctttaatatttacactacctgatccatacattaccacggcgggaggcgcacattacattgcctaatctctgccactcactcaccctgtaacggtatcctcaaccgtaactaacatctacagctgcgcccatacctttacactgaaatcatccactccaccaaagac

SEQ ID NO: 166497 - DNA, 136 bp, Zea mays
  Clone ID: MRT4577_83426C.1
gtaggtgatgaagctcaggccaaggagaggcatcctggcactgaagtacccgattgaagcataggcattgtgcagacaactagggagtgacatggacgaaacatctggcatcacacctatctacaacgagcctccg

SEQ ID NO: 166498 - DNA, 279 bp, Zea mays
  Clone ID: MRT4577_83427C.1
ctgagctgggcctgaccctaagagtggcctggtgggtgcaggtaggaaggtgtccacctgccaagggcacggctggggtggggcaggggcgtgctgtggagatggggatattgcatctgtttctaacccacgtagccactggccacgtgactacgtaactgaggagtggaatttgtagtttgatttaactgatgtaaagacgcacttgtgggtggtggcttcatctggatggggcctgcttgtgttcactctcttggcttgccagactagggtctgagg

SEQ ID NO: 166499 - DNA, 375 bp, Zea mays
  Clone ID: MRT4577_83428C.1
aacacatttttgcttaaccgaggaaaatatagttttcattcaaaaacacaccaagcggaggtgactatactcattctatcaacacctgcttacaacacattatacattcttgctcttattgccctttttgtcattccaccacatccattcattattccacaatgctcacttcctcctaatgccattattccacactttcttcctcaatttactacaatgatctttataacacccagctgtgcaaacctattgccttcaacaatctctatacgtcaacttcttaaaactaccatattcccaattacaacaacaatccttgacacatttaaccatacaaaccatcgcaacgcatcatcaactatcactcttccacct

SEQ ID NO: 166500 - DNA, 2474 bp, Zea mays
  Clone ID: MRT4577_83429C.1
aattcggcacgagggcgttgctgtcggtgattctgtagcctgggctggctgtacgataatgtacttactgggacagcagcagcacttcgagctttttgatttctcctatcaatttctcaatgtggcagaagtagaaagtgcgacagtatcacactatcaatcttcagagaggactaaaagttcaaatttcttgcaaggctacgagggcatcctggaagcgatgaggaaggctaggaggctcaataaccatgttttctccatgttgagggcacgatgtccccttgaggacaaggttgcatgtgctatcaagccaagtggggcaccgcttcaccggatgaagtttatgaacaccgtttctgcattcgagacattgccacaaagagtcacctaaccagcttccaggcaatgtgcagaatgtacgcgattatgcggacatgtattttgtcaaacctttgcgattcgacgcgattttcaagttaaggagagtaatggttttagggaggacaattgatctaagaagcataattactcagagaatgaacaaaatattcagggaaaatattgactttctacttgagcgctttgaaaatggagatctttgtggtgttgtggaactgcaacaactgctggatattttggagcttacacaccaatcaatatcaagatttcttgaattggattcttactctcttatgcttagcgagatgcaagaaaatctgtcattggtttcttattcaagtcgcatctcttctcagatatggagtgagatgcagacagatttcttgccgaatttcatcttatgtaataccacacagcggtttgtccggtccgcaaaaggaactcaccactcttctcatagatcaagtgcttctactgggaaaccttacttctattgtggatcacatgatttgaccatggcataccagggtcttgctgggctgtaccgtgacttttttggagtccctcatatgtttgcagttgttaaacttcttggttccagatcattacctgcaatcatccgtgctttactggatcatatatcaagtaagattacaggtttgctaccgaaaataaatgcactgcaagaagcattaccaaaatctattgggcttctttcatttgatggtggtatagcaggttgccaaaagatagttcatgaaattttgacatgggaagcaaaatctgaagttaaaactgaagttcttcatgaccttaaggaaattggaagtgctttgtattggatgagcattctggacattgtgttgagacaaatcgacactacacagttcatgcagtcagctccgtggataggattggttccaggaaatgatgggcaagtgaagcatgcctactctgatagtactccatataccacaattttgacagccgcaggtaaggacggtacagcaagccctacacgcccgaatccatccacgcgtccgatgtcaaagcaagctgaagctgcgactctgctgtacaaatcaaacgtccgctctggtagtgtgctggagtatgctcttgcattcacaagtgctgccctggatagacactatagcaaatggagcgcaactccaaaaacaggctttattgacattactacttcaaaggatttctatcgcatttttagcggtcttcagtatagttacttagaagatagcattaacaatccttcgaagaaacaagaaatgctgggtgattctgtagcctgggctggctgtacgataatgtacttactgggacagcagcagcacttcgagctttttgatttctcctatcaatttctcaatgtggcagaagtagaaagtgcgacagtatcacactatcaatcttcagagaggactaaaagttcaaatttcttgcaaggctacgagggcatcctggaagcgatgaggaaggctaggaggctcaataaccatgttttctccatgttgagggcacgatgcccccttgaggacaaggttgcatgtgctatcaagccaagtggggcaccgcttcaccggatgaagtttatgaacaccgtttctgcattcgagacattgccacaaagagtcacctaaccagcttccaggcaatgtgcagaatgtactcttgtatgcggggttatatgttatgttgtaaggtaaatgtatattatgtaacaaccatcaaccgtggatcctggacctgaacaggagaatgtgtttgcttgctatatgtgaaaattaggtgggtatgttgaagttgaccctgagttcgcaagtttagctttcaactttgagactatctcgctgaaccaaatatgtataccagctggagagttgagccagaggacacgtgctagttagctgttcttctcgtgtctgtatttctcagtctgctctcaaagtatatttaatgtatgacgattcaggttagcttaaaaagttgtgttatctgagaactcaaaaaaaaaaaaaaaaaaaaaaaaaaaataaaaaaaaaaataaaaaaaataa

SEQ ID NO: 166501 - DNA, 783 bp, Zea mays
  Clone ID: MRT4577_8342C.1
ctcgcgtctgtcttactagggcccgcccgccacgggccgacccgccgcgcccgcccacgccacccgccgcggctgcccctgccccggccccggctaggtagctcctcttcttcggctcagccgtcatgccccctcgcgcgtccatgctgcagcagcagccgcctcctcccccgcacccgcatctgcacagcatcgggggagtaaaaaagtccatgtccatcagcagcactcaacttacagccagcaaagcccggactagctagctagaagcatttgcaggtcaattgtttaacttctgaaacgtctcatcttctttcatcgataacttacataaggatagtggtcagccataatattttggaatatcatcttccttataaaaacaggtccaagggatacacgtcccggtgcccccacctcccgtttattatccttggtcttcacctccacctacacctacatctccatctaccgaacatcagacccctccaactaccttgccgacacatgaacgagaagatgggttaggctttgtcgaaaccctcttcgctagtggaggtatcgaccatcactcgtcactgtaacccgatggtgatcggcgaccgtgagcttccatgttattgtgttctgatacttgagacttttattatgactatgtataagatattatctcttattagtattggatgatgagatgtatcttattatgactatggatgagacttttgtgatgtaattgatgagactatggattcgaaaaaaaaaaaaaaaaaatttgcggcc

SEQ ID NO: 166502 - DNA, 295 bp, Zea mays
  Clone ID: MRT4577_83430C.1
ccttcttatcctgtccttgaatgttattaattggtttcccttaaccttttaattttctttgctttgtgatatgaggcctgtccctggcgtgcatcgggccatatagacaaaaaaaaagaacgggctaggctcagagaacaaaatctgcaggtcatgagccgcggcaaactgaagccgacgccccagtcacgccgctaaatgctacagcagcttgtgggctcaagtgctactcttactagactcgaagcaggcgagaagcagaagcggctacaaatcagcaacaggagatctgttt

SEQ ID NO: 166503 - DNA, 728 bp, Zea mays
  unsure (1)..(728): unsure at all n locations
  Clone ID: MRT4577_83431C.1
atgttcgcggcggtcgacgccgtgccagcaaatttaatctccttctcttgatctcttccccttccgtgagttcccggctgacccgagttaagtttcaacgcctcctgagcagctgcttccccccgtcacgaccaagcaacctcgctcgtcgacgactcgattcggctctgttcctccggtccggccggatggcattggacgtgctcctcaggctgctgatcctcgcggccgtcgcgagcgccatgccggtgccgggccccacggaccccgccgccgccgggctcgccatcgggttctacaacaagacgtgcccgaaagcggaggagctggtgctggaggagatgcgggacatcgtccacgaggaccggaccctcggcccggcgctgctgcggcttctcttccacgactgcttcgtcagggggtgcgacgggtcgatcatgctgaaatcgaggagcaagaagggggagagggacgccatgccgatgagctacagcctccgcggcttcgatgaggtcgagaggatcaaggcgaagctggaggacgagtgcccgctcaccgtgtcctgcgcagacatcatcatcgtggccgcgcgngacgccgtgtacctgagcaacgggccacggttcccggtggagaccgggcgccgggacggcaaggtgtccctgtgcatcgacgccgagaacgacctggcgccgccgcacgccaacatcgtggacctgaaaacctac

SEQ ID NO: 166504 - DNA, 492 bp, Zea mays
  Clone ID: MRT4577_83432C.1
cttgctcgctgaaccggcgcctccgacatcgtcccttcgacaccaccaccgctcgaaatccgacggagtagagatgccctttctatcatgatctcctatctgctcgactacttcctgtgcgcattgcattcacctacaaagaggtcgagaatcgcgccctcgcgacaactacacgaagagtgttcctgccctcgcgctcgaaggtgtggacatgggatggcgatccattcctaccatgatgggagacgactcaaacgagcttctgatgaagtagtgcattgcgatatgtatatcttcaaaatcccagagaaacaaaagcacgtgcttgtggaaaagacaagttgtactactgaaagctatgatgacttttcagcctctctcccagagaaagactgacgatatgcgctggatgaatttgattttgttactggggacaatgtgctacaaagcaagatttcttcattgcctgtgttccatcgacatcccgcatac

SEQ ID NO: 166505 - DNA, 311 bp, Zea mays
  Clone ID: MRT4577_83433C.1
gccggccgttccgagctcttcatcactcattctaatatggatctctcttgagtacactgttttacagcttttgttatcagatatttcttaatgcaagtgtttgttgaagtttcctgtgatgcaattatatctgccttttgataaaatgttcttctaacaagcgaagggcactgtttttattgtctctagacccacagatgcctgttgaagaatttatgctcatttcttcttttcttaaataagcatgcactaagaacatgaatcgtatgcatgccatgagaaagacttttgaaagtcaaaaaagaccctct

SEQ ID NO: 166506 - DNA, 289 bp, Zea mays
  Clone ID: MRT4577_83434C.1
tcgccctttgaagtgtccggaagggcaggttcaaactgttctttctgacaggtgtacaaaactttttttttttttattttttaatttttttatattttttttttttttttttttttaaatttttttaattttttttttttttttttttttttttttttcaaaaccctttttttggggggggggggccccctttactcaaatctgggataacaaaggggggggggggggggacccacccggggtgccaccagaaaaaacctgcgggaaatccaacatattccccagccgg

SEQ ID NO: 166507 - DNA, 622 bp, Zea mays
  Clone ID: MRT4577_83435C.1
ggccgggggacattcctcaagcatctacaacttactcgccatgcgaaagcaacacagcgcagagtagatatgagcagcagcattggcgggggggatggtactctccatgattgcctcgtgagctcaggcggagatatctcatgacctgacaccgctcaagacgatgtgcatcctccttagcagccgtctgctccaagaagaagataaagatagacaattcctacgcgactgctcgagggctgaccgccgactcccaagcctaagggagaaaggccaaggcgcaaggtcagcgcaccaggtcgtcgacaaccacgacgagaacgacgacgaatacagacaaatctatcaacgacggatgagtgggctcccaccggcgacttctactgcccgcggaaccactgccgctttctgatctggcgtcaacacccttcgatggggatcctactttgacgacgaccatcctcgtctgaaacaacaccgacctctccgggtaacgatagccaatgcatgcatcttctatgcgagtcatgatcgaaaagcagagggtgtgtctataatatagactccatggatagctcaaccgttcaacatgaaacaagaataagggctacccttaccttac

SEQ ID NO: 166508 - DNA, 289 bp, Zea mays
  Clone ID: MRT4577_83436C.1
acagccccgccacgcgttcgcccacgaacgcacacaggctctggcgatagatgaagagcgcacatggggctaacgagcgctctcgccgtcatgagcgattccgggtgagcgaaacctacagactccagatttcctccctgtgctctagggcgtctaaggagccagagcactacattctccctagccatggactgagcctgctgccggtggaccagactctgtatctgacccacagcaactgcgcctacctgtgggcacgggctaacacgacaagtcgcacgcgaggacg

SEQ ID NO: 166509 - DNA, 359 bp, Zea mays
  Clone ID: MRT4577_83437C.1
acacagatacatggggggggatttaagttttaccatgattattctcaaatcacacagcatataaaaatccaaaaaaacgacggaagttaagaaaaacaaaccaggaaactcaactacgacacaagacgatgatcacaattcacaacatacaagccctgcacatgcagattgaactgctacacattgccagccagttcgtcacacgcgctagcttgcggcctcaagaacgggcgtgaagaagtagggggcgccgagcttctatggcatctgaaacgccacgaggcagaaaaagaaaagcggatgcattgaaggaagaaaatacagaaacacctaaaagtgatgctgtggatcctccaaag

SEQ ID NO: 166510 - DNA, 467 bp, Zea mays
  Clone ID: MRT4577_83438C.1
actgcccacacgtccggcaaagcggtagggggtacagtggatcgtcgaacagaacaacatgaagatgggcatcgctctcgtagtgcgcctggctctgccagctgccagcgcctctgcaatgcacatgccctgcccctgcgcggggctgcagggcttgtacggcgctggcgccggcctgacgaccatgatgggcgccggcgggctgtacccctacgcggagtacctgaggcagccgcagcgcattccgctggtggcggtgccctactacgccgggtgtgggcagccgagcgccatgttccagccgctccggcaacagtgctgccagcaacagatcaggaagatggacgtggagtccgtaacgccgcagctgcaaacgatgatgcacctttgagcgtggcctttgccgccagcagcagacttgtcgagctagttatgatgcaccagcaaactgagctgctggcaaccca

SEQ ID NO: 166511 - DNA, 732 bp, Zea mays
  Clone ID: MRT4577_83439C.1
gtggcggcccgctcgaaggccggcccgggcctgggcacacatacaacaacacacttcaaaccgaaactaccatcatcatgcgtttctctaccgttgctttcgccgctacctttgcctttgctgctgctcaggacttgagccaggttcccagctgcgctatcccctgcttcgctaccgccatccagggctccggctgcggtctctccgacatcaagtgccagcgcaccaccggcgctgagaagatcgccgcgtcgctcgccacatgcgctccccagaagtgcagcgagtctgagattgccaagctcgagcccgccgtcaagggtctctgcagcgctgccggcgtcgatgtcagcattcccgccaacgtcgccacctctgctgccgctaagccctctggttccgctgcttctgcctctgccaccagcaacgcgaccatgagccgccctgcttcttcctctgctaccgttgctcagtccactggcgctgcgtctgccaacggcgttgcgttcggtgctgtcgctatgggtcttgctgctttcgctttgtaaacgtgggcattcgagattgaaggttggtttggaggaggatcttggatattgtcgctacaggatatagagcggatgggtgcttgaattgatgcgatgcatttgcaagcattgctgtaagactacatctcttttgcgagttgcatgcgagagtttatataccaaaaataccatcttttgtacgcat

SEQ ID NO: 166512 - DNA, 364 bp, Zea mays
  Clone ID: MRT4577_8343C.1
ctcttttattttggtccgggacttcaaaaactaataggaaatcctatattgagatgcattggggaaaaaattttccctttgaacttgggtattcccaaatcccaagactcaaggtcaaaacactggatcaaccactcgcggtagcaacggttctaaaagattggtctgagtgtttactgtgacaactatcccatactcatctgccgtctctttggatccgacctgtccgacagtcgcatattccgctttacccaataacacgacatacagccccgagatgatcgttaccccacctacgacgcttccaacatggtactgatcatgcaggaagagcgcggacagtgtccccaagatcactgggctt

SEQ ID NO: 166513 - DNA, 447 bp, Zea mays
  Clone ID: MRT4577_83440C.1
aaggggcacaagccttccaaccagagaacatacctaacgagggggcattggatacaaaattctcattcgagggggacccaaaaaaaaaccgggtcccccttattggatatcggcccttgggggaattacccataataattgacatttaaacaaaaaaatagggtacgggctaccatacttgacgggatccaaacaacgggaaaaaaaagggaaatcggaaacaaaaacaaacacaggccgatccggccgggggaataaaaatgttccatttaataaccccgggaaaaaccttggccccggccttaactggaattaaacgctaaaaaacatttaacttaacccctgcccggaaacttaagggagggggccccatgccaggggacctacctgtgccttgaacggggtccaaaaaccccaaacaccccttcttgaaaacggagcgggggg

SEQ ID NO: 166514 - DNA, 480 bp, Zea mays
  Clone ID: MRT4577_83441C.1
gggaaaaaaaaaaactctatcatcatccaatccagatcagcaaagcggcagtgcgtagagaggatcgtcgaacagaacagcatgaagatggtcatcgttctcgtcgtgtgcctggctctgtcagctgccagcgcctctgcaatgcagatgccctgcccctgcgcggggctgcagggcttgtacggcgctggcgccggcctgacgacgatgatgggcgccggggggctgtacccctacgcggagtacctgaggcagccgcagtgcagcccgctggcggcggcgccctactacgccgggtgtgggcagccgagcgccatgttccagccgctccagcaacagtgctgacaacagaagatgatgatgaataacatgcagtacgctcagagaaatgtcaatatttggatgtcagcatgtctgctttactggcgcatctatcgtatcgcaaaatcgaacaaggatattaaagctttgggagagacc

SEQ ID NO: 166515 - DNA, 401 bp, Zea mays
  Clone ID: MRT4577_83442C.1
ggggaagggaacaataaccaaaacctaattggagaaaaaaattgaacaacccaacaaaattccaaaacccccgaccccgggggcaaccccgaaaatcccgacccgaacccgcaggccaaccaactttccctaaaaggaggcgaaaaaaaacctggccaaaaaaagggcaaaactggttcccggggaaaaatggtatccccccaaaaatccaaaaaaaaaacaaacccgaaacaaaaaaggtaaaacccggggggcccaaagggggacccaacccacaaaaaatgcgggggccccaccgccccctttccaaggggaaaacccggcgggccaaccgaaaaaaaaaaacccccacccccccgggagagggcgcttgggtaatcggcccccgggggggttttctt

SEQ ID NO: 166516 - DNA, 296 bp, Zea mays
  Clone ID: MRT4577_83443C.1
gagctcactattcggcggccggcctttttttttttttttgggttttttttattataagaacggtggggatttctagtataacaaaaaagaaaacggcttattgttaacatcatcggggatgaacgaatataacgaaagtcaagaatcgatacccaggtttgacaacgaacatgcaagtcacagggcgcagggacaagctatatatcagcactgataattgatagtggcattcaaactaactaaaccgttatagacaattcgtaggactgaacatggctccctaacttggaggacgc

SEQ ID NO: 166517 - DNA, 809 bp, Zea mays
  Clone ID: MRT4577_83444C.1
tagttctaataggttgagcaagatggaagctcccattacgatttggtggttcatgactgggtctggatggcggcatcagccattgcccattatatttgcaggcttatacaaatacttaaatacgagacgggagaaaactcacgacgatctcgtcgtctactcgtgaattctaatatccaacctccattgtccattccatccatgattctgccgcatgcgcagtcagtagaaccaactggcgttggatcccgtggacttgtgcggctgctgcaacccgccgcctcccgccacgtccaggcctgagccgaacctcagccccggtgacgcggcggcgatgtcgcctccgaactgcgcgtcgtcgtcacggacgtagaccgccgccgcgctctgctgtatcacattgctgatgatgtcgccaaatcggtacggcgtcgggaacggaccgggcagctgcacttcggggccgggggcggccgtgtccacgttgcccacgttggcctcgtacatgtccatcagctccccgagcgacctctggccgtccaggggcaaatccaagtccaagccgccgagcgccgccgtctggccgacgctgttgttgaacatgcacgagtactggtgcgcgttgcgcgcgttgcggtccatgaacccgtgcgcgctgctgctgtgcgagcactgcacgttgccgcatgtgtaggcgcggcggaagctgccgcccagcatcagctccggctccacggcggcggccggcgcgcttcttttctggaagaacacggcgtcggcggcctcctgcttaatcggcggcctcgtgc

SEQ ID NO: 166518 - DNA, 203 bp, Zea mays
  Clone ID: MRT4577_83445C.1
acggtgttggcttctactgccctttcggttctgtttctggttcgtgaggatatccggtgatcggtttcgtgggcgagctgatcgagatggccattttagatggtgattaccgctgcttgctcacagactcgcctgtgccacctacgaccactggctacacaacgccttcatcacctacggctaggcactcgagtccaagatca

SEQ ID NO: 166519 - DNA, 263 bp, Zea mays
  unsure (1)..(263): unsure at all n locations
  Clone ID: MRT4577_83446C.1
cgagcagatggggctggcaaaancatttttttttgccgccaacacaacgaaccgggatagaccgttcttttttctctaacaacacacccacttcctcctaacccctacaccacctttaacctacggatggaagaaaataaagaaatcccgttggatcacttctttttcatcgaccatattcatactcgagccaaacttattatgcgttccacactagaactagaaccctctctactgctttactactctacgccccattcctc

SEQ ID NO: 166520 - DNA, 168 bp, Zea mays
  Clone ID: MRT4577_83447C.1
atgaaccaactgcaccaggagaagaacctcttcatcgggagtctcgccgacggaggaaccgacgctgaaatattcggcgacatcacgaggccggagaacgggatccggcgcagcccgtattgcgagacaaggtctcagaagtgggagaatgtaacacccactttgtaa

SEQ ID NO: 166521 - DNA, 328 bp, Zea mays
  Clone ID: MRT4577_83448C.1
cccacgcgtccgaggacgcgtgggtgtccacctcctcgctgctgctgtccacgcagctggccttcacgctcgtgctggccgccatcatcgtgcgccacccgctcaccttctacaacctcaatgccgtggtgctcctcacgctcagctccgtgctggtggcgctccggtcgtacgactcgggcgagcgcccccacggggggagccgggccaggtacttcgcgggcttcgcggtcaccctcggcgccgcggggctgttcggggtctacctgccggtgatggagcttgtgtacccgaaggcggtgtcccgcgggttccccatggcggggga

SEQ ID NO: 166522 - DNA, 235 bp, Zea mays
  Clone ID: MRT4577_83449C.1
caacctacaccaacctcaacaggcttgtgtcccaggttatctgatcccttactgcctccctgaggttcgatggtgctctgaacgtggatgttaacgagttccagaccaacctggtaccctacccgaggatccacttcatgctttcttcgacgctcagtcatctctgtgaaaggctaccacgagcactctctgtggctagtcacacagcgcttgagcacttcatgatggcagtgga

SEQ ID NO: 166523 - DNA, 467 bp, Zea mays
  Clone ID: MRT4577_8344C.1
aacaaccggaaaaagggaaacctcaacagcttaaaacaaaacaattaaatccccccccaaatgggaaattaaaaccatgcaaaaaaaaaagccgcagcttattcattggcaaggcccccagctagcacaaattaaacaagccccccgggggtctgaaagctttggtgcccacacaaacccacacacccccccccccacacaaaaggggggggggagggcaccccttaaacccccaaaaacccaaggagggggggaacaaaaattggttgcccccccccccggccaagggcctggggggcccgtcggcccgcctggccccatggccgggcatgaacaagaggggggaaaaggcccccaccacccccgggggaaacaggccccaaagggacattgccccaaaccaccccgggacggggagggacccttcgccttgccgccccccctgcaccaaggccctgggccaattt

SEQ ID NO: 166524 - DNA, 115 bp, Zea mays
  Clone ID: MRT4577_83450C.1
ttcatatgtatataaaactacttaaagcacacaggtagtggtgattaatacaggtaccaggacacttatgcattctgctttgggctccagagagcctgttccgaggcagcatgat

SEQ ID NO: 166525 - DNA, 851 bp, Zea mays
  Clone ID: MRT4577_83451C.1
gggacacgtgggcagtggttatgatccgcatttcgaatcgaaagtcgaaaagccctccattttcctcgtcttcagtactcaccctacgaacccaacgtcccccccgttcgatcgcaacactccccagccgtgtagggtttcggctcgatactccgagccctccctcccaatggctaatgtcaagcggtcgactccagtgactgtgcccgctcccgctcccgcgcctgcgcccttggacccgggggctacagccgccatggccaagaagtcggcgtccaccggggcagcgattacggccacgaaaagccccgcggcggcgtcaccgctgattgtgatcgaaatcccgtcgtcacctgatgcctccacgggtggccgccgctcgacgacgaaagcgcggaagaggcccgcgctgtggccgctcgtccttgacgacgagatcgagatgtggacaccgcgggagaagcggcgcctcgacgaggactgtcagatcctcgccggagaccctctcgcctccaacatcgaggtggcccccgccgccgccagtgacgaaatcgcggtcgttgcggagcgaggaaagattgcgtgcagagattacccacatccgaggtctgcttgtgcaaagcacccatttagtagaacccctcatgaacgctattgtgaccagtgtttctgctatgtctgcgacatcgctgccccatgtgtgttctggaagggggctggagggcactgcgacgcttcggacagggacaaacagtggaaagcttttgagcgcatgatgcaagtcacaaaagcaaaggctagttgattttgcccccgatgctaggtctggcaatcggccattttggagtctc

SEQ ID NO: 166526 - DNA, 404 bp, Zea mays
  Clone ID: MRT4577_83452C.1
gacaggggagtccaagcttcagatggccagcgtcggtggagcagtggccgggggcgtgggggcgccgacgccgcacgtcctcgcggtggacgacagctccgtcgaccgcgccatcatcgccgccatactccggagctcccggtttcgtgtgactgcggtggaaagtgggaagagggccctggaactgttaggagccgaacgtgagtatgataatcaccgattactgcatgccagagatgacgggatacgagctgctcaagaaggtcaaggagtcgtccaagctgaagcagatcccggtggtgatcatgtcctcggagaacgtctcgaccagaatcagaagatgcctggaggaaggagcagaggatttcctggtgaagcccgtccgcgcgtcggacgtgtcgcgc

SEQ ID NO: 166527 - DNA, 339 bp, Zea mays
  Clone ID: MRT4577_83453C.1
atgaccagtggaggcaccctcgtggggccgatagcggaatgtggtggcactaggcagtgcgccctcgccgatgacaaggaggggagcaccttcactaccgccgctaccgtagagttggagttcgttgcccgtgggacacgcaccatgctcgcgcttagagacagcgggccaatgcggttgctaatggccgtccgacagggcgaggtcgcgcccccgtgtgccgaggtcaaccgccaccaaggttgcctcgagcatctatcggcgcacccagtggcggacgcaaggggtggtcaatggggccacggccccaccttggtttttataaactcttatacataa

SEQ ID NO: 166528 - DNA, 681 bp, Zea mays
  Clone ID: MRT4577_83454C.1
gctgggggtggggggggtttttttttccagggcaaagacagaaaacatgtggatagagcggatcacatccattacatttttttcagagctgggaatcataatcctccgtgaacatcagcgcatagcgagaggcgtacctcttggaaacaacagggcgggggggtaacacaaccatggcgggcgaaactaagcacctccatcagtggggagggggggccggaaccgaaccggctaggcgcgctcgcgcgggatgcggggcgcgagctggatgtccttgggcatgggggggacccgctttgggtgggtgggacagaggggggggggctccaagagggccaccaggggggggctgggggggctcctgcggggcgggggactgggggaggagtgggaccggggggtgcgggttgaagagctgggcgatgtggggggccagagcgtgggacgggagggtgggggggaacgactgcgggggtgtagtgggggtggggggggtgtgggggagggcggacagggccggaggggggaggagtggcaggttggagggcccgggggagagggccataagatggggggggcggggggcggaggggggggggagggggggaggggagggggggcgggggcgaggggggggggggaggggaggggggtgggcggggggagggggggggggggggg

SEQ ID NO: 166529 - DNA, 644 bp, Zea mays
  unsure (1)..(644): unsure at all n locations
  Clone ID: MRT4577_83455C.1
ccgggnnatgtgctcatggnnagggcctgttcaagtggtnnctgggtaagnaaccaggcaggcaaaattcaccaatgcagctacttaaggcaggctgaaagcttggactggacttttgaatgctttttgcaccagtggcttgacctcgaactgggcacttatccacaaagttaaaacacactgctcttaagaagaaaaactggttaaacttttccggaaatcataaaaacactgtatgaccaaaatgtcctagctagaagatactatattcctttggactcccgaaaggttcaaacccaaaaagggaggccatcttttgtgaaaactcttgagccgcttgacaaatggcttgatgaggatcatgaggaacaataaactcttgatttggaaattagccgcaagtgacgaattatggtgctcgaaaaattacctttttttttattgctaaactatgaaaggggaggaggtatagctgctgctagttattgtcgactactttactggcgatagataatgttatgctgtttaggcactaggatctcagctgctagatggtgctgtcaaggtggtgaaacttttgttttcattactgaactggatcataatgtgacgtcgaagcactatgggtattgtacatcactact

SEQ ID NO: 166530 - DNA, 268 bp, Zea mays
  Clone ID: MRT4577_83456C.1
cccccaaaatgatcacatggggtaaacgcaggaacacgggtcctcgaccggccctttaaatccatctttgggaaagttaagggattaagccttaaaaaccccagggggggtcccccaggaggtgaggccttgtgacaatttaacatggaaacgggggggtgttcccactgcattttcgcctatatcctcgaaaacaaaaggcctacaactccacccaagctaaaaggctttgggggccttttcaaccccaaaaggggcgtgtttttat

SEQ ID NO: 166531 - DNA, 578 bp, Zea mays
  Clone ID: MRT4577_83457C.1
attagacctgcccgctacattgagtcttgccagtttgacctacaatgccgcccttaaaacactatttggcgctcctatatcaagagcgtccaaaggtgtaatagcgaccgactgctgggatcatcattatgccactgtatatgccacacttaagcttcaactcgtcaacagctgccgtcgctgttccatcataggtcaagagatcgcacttaattagtaacacgctgctgcctgcaaaacacctgcaccgaaggtacaaccttgattatcccacgtacactggctattacacaccttatttatcaccccgcacatggggcagtacaacctgtattataccttgcgcagccaaaattgactccctaccaaaagtactactaagcagaacaagcgctgggtgccttatttataccaagcacaccaacactagacgaggggactatactaccctctccatttatgttattgcaagatgctgctgacggagccatagggatgaacatgccaaattgtctcccacacaggtctgccatcaaagcacagtgagttgagggaagcatccttcttcccggagcagg

SEQ ID NO: 166532 - DNA, 263 bp, Zea mays
  Clone ID: MRT4577_83458C.1
tggcatcgttaattgttagtagttcacgtcatccatacatgtgtcaccaaataagtaaggggatgtttatatgatattataatctacgtagattatataattcaacatactttaaattaagttagtttaaagtttattgtattatataatctggatagattataaacctaaacaagtgatataatagtaaagagaaaactcaatgtcgtcattacgtcatgtggtccgtggatatatatacacaagccaggtctggccttgtc

SEQ ID NO: 166533 - DNA, 629 bp, Zea mays
  Clone ID: MRT4577_83459C.1
ccggccgggctcgcgccatgcgcatgccccggcgggcgctgcgcaagacgtggccccctcagcgcacctgccgctgccgtgcctggaggagctgctgccgtgcacggcgtacctcaagaccaccaaacacccctctcccacgtgctgcacggccatgcacaacgccgcggcggccgagatgccgtgcatgtgccgcctcttcgccgacccggagcttctcgccaccttcaacgtcaccagggagcagatgttcaagctccccgcccgctgcggcctgcccgtcggctgccgtaccggggcctcccacgagcctgtcgtggaagcgccgccgccgcccgccccggcacagcagcaccatcatggtgcctcgtcgaggggtgtccagttcagtagcatctggagcctggtggcgtcgttcgttttgggccagatgatccccatggctgcaccattttaatttagtctgttctgcatcgttctgttttatcgcctcagttagctataatggacagcgacagaatacatttcagatgtagtagtgataggcactgcatgacagcatgagtgctgcttgttaatactaataatacagtattaactgaacaaaaaaaaaaaaaaaaggggcggcc

SEQ ID NO: 166534 - DNA, 447 bp, Zea mays
  unsure (1)..(447): unsure at all n locations
  Clone ID: MRT4577_8345C.1
gttggaacctttgggctgatttatgtgcttgttagcccttggcagtacattattacgggttctcgtacacttgcgctctctcggaaggagagagtctcatngtgttgatggtagtagttggctggcgtagcgctgtgctgcttacgaggccgttggtgcggagagcggcgatcgtgagcgtgggaatccgggaagtgatgttgatgtgtcgggggcagagtagaaggtggtggtcttggtggttacggatgcgaaaattggcggagcggagggaatcgttgtcgttgcgctgggcggtatcttcgcgtggttgacacggtagaggagggcgtcgacgggtgctaagcgttagtcgttgtggcctagtgggacggcatctcatgatgagagtggttggttggcgcgtatcggtgcctgggatagagtctgcgattaggagaaatacgt

SEQ ID NO: 166535 - DNA, 346 bp, Zea mays
  Clone ID: MRT4577_83460C.1
ggaacggaccagaaacaaaagaatttttatcaaggtgggggctgcataagacattcacaaagcaaaaaataagaaacaacctcttcgctttgaaagacaagggattgggccaggcttagagaattcaactacgcagtggcctccccaacgaccaggtacattaaatataggggtggtacccataaaccaaccgcatgaaacgcagggcacgctaaattaccttctaaaaacgctgggagagggaacggttactttgggggaaaactccagggcacctaaaaacctgtttgcaggataaaccaacggccgggcctccacaagcttgctataaaaaagggaagggccc

SEQ ID NO: 166536 - DNA, 1794 bp, Zea mays
  unsure (1)..(1794): unsure at all n locations
  Clone ID: MRT4577_83461C.1
cttattcaatggacaatattatttacatcatccatcatctctgcattntgtgtgacctcgtcgctcccagccctctcccccacacccgttgtttcctcccctntgcgtcgccgtcaccatcaacctcttcattcgtgccaccgccgccgccgtcgacctctccctctgaatagggaaacaaccttttgggtcgagggttgctaccgctgtacctatttcttgtgacgagaggtgacgacgagtgaggagtctgtgtgaccagtgctcggcgtcgtcccctgcctctgctagccgctaggcgacgggcccttcgccgggcgacgagcacaccggccctggtacgttccttctctctccttcctgctgtttgctgttcgaaacagagcaccccagagaccctaatgtgatctattagtattcggatctgacctaatttcaagcgtatacatgtcgcactgatctgatccatcggccccagctccgactcggttagattccgctctcctttcccactgaggcgaggtcgttctcagttgacgccattggagttgggactggggacgcaacacgcgggtggtgcatttcattttgttcgccgaatcgggtttgggctgaattcggattgagatcccaacgttaccatggcagcgatgaatactggtatgggaggtttaggtggcaggccgatacatccacaagcaaatccttttggacctgctttgcagggtgctggaccaggattgatccgtactgggctagaaacatatggcggaaggattttagattcaagttctgagtttatgcagagcaatataacacaatatttgtccgaccctcagtactactttcaagtcaacagccagtatgtgaggaacaaactgaaggtcatcttgttccctttcttgcacaggggccactggacaagaataactgaaccagtaggaggaaggctatcctacaaacctccagtccaggatatcaatgcaccggacttgtacatccctttgatggcatttggcacctacattgtagctgctgggtatgccttgggtgttcttggaaggtttacccctgaggcactgaccctacagttttctaaagggatacttgggtggtttctgcaagtcgtcctcatcaaaggtctgctgtactcccttggggaagcggtgaagctcccttgctggacatcgtggcgtatgctgtatgctgcttcgctggcacttcccttgcaatggtggcccgcatcttctggagctacctgtattacttcatcatgccatggttctgccttctgcacgggagtcttccttgtgaagaacatgaagagggttcttctgggcgggccaaggagctacgagagacaccccggccggaaccactacttcctgatcttcttggcggtcgtgcaattccccatgctgttctggctcggcaacatatgtggctgacctttgatcctattggtcgggccacagacctgtttcttcttcttcttcagaataggcatgtgctacttctggcttgctgatgaaacttaggtttatcgtggagatggtacagaactattagctatagatatctgggcaatcgaattataaactgtttttgtttctgttagctatagaggcgaaaagtaaaaacgatcgtttgggataggataaagatgaactgcttcgtgtgtacccttttgtgtcacgagcggctagccacgaccctgcaatctgacttgttttttaatgatcactgctacttgatctttcagctttggacgtatcacttctatgtgatcttatt

SEQ ID NO: 166537 - DNA, 448 bp, Zea mays
  Clone ID: MRT4577_83462C.1
cacggcatgatatggcagcccacatggcggcgatctgccacctcgacacctccaactggcagaaggctcacccagccttcgagatggtgcacacccagcccggtggcgtgccggtgtgccacttcatgtcttatggtaatctgctgtttggggagaaggcagtggcggccactcgctaagaatgtatcaacggtgcttgtcagtattgtatgtaagtgagcacaagataaataagcacacacggtgcggtgatgatgtgtgagtaatggcacacgatgtgtctactactatgctcatgtggtctggtaaagcaaatgttatatgtgtgagtgccgcggcgtagtaacgccgatcatatcgattgtatactttgttgtgaatctatgcaatggtgttgctgtatatatgaaccattttgtccaaaaaaaaaaaaaaaaaagggcggcca

SEQ ID NO: 166538 - DNA, 2656 bp, Zea mays
  Clone ID: MRT4577_83463C.1
gccaattcatgaagaagaatgccaaccatcaacctctgagaaagaagacgacaataatacacattctgcgtctgcaatttcagctaaaaaatgccgagcaaatgaagaaaaaagaatatcaaagaaattgcctggagttcagcaccaatgtctaatattcaagttggaaggtggcataacatccccaaaattaatgcttggcattgccttttgtatcagaaatgatccaatcgagggcttttatttctgagtcagctgcagtttctttcttacattatgttgcctatcatgattacggtcttgtacttgctttttattcagtgaaattaatactctattgtgccattttgccatgtactcaacttgttcacttcttttttttttcctcatttcttttgtgttggtagtacaagattttcaaactaatttttagtttccatgtcattaactcgcccaaggtgtttcattaccaatgccggttgctaggccggagccgcaggagccccgggtgatcgcccatgtcgacatggactgcttctatgttcaaggtcgtaacttcggacgaaatggttgtgcttattctgtattcaggtccatgcgcggagatgaggccaagagggtttgtcctggtattaatcttgttcaggtcccagtggcgcgtggcaaggctgaccttaatctttacagaagtgctggtgctgaggttgttgcaatccttgcaagcaaagggaagtgcgagcgggcatccatcgacgaagtttatcttgaccttactgatgcagcaaatgaaatggtcttacaagctcccccagattcaccagaggggatttttatggaggcggcaaagtcaaatatcttgggccttccggctgatgccagcgagaaggaaaagaatgtgagggcatggctttgtcaatcagaagctgattaccaggacaagttactggcatgtggagctataattgttgcacagttacgagtcagagttctggaggaaacccaattcacatgctctgctgggattgctcacaataagatgttagctaaacttgtcagtggaatgcacaagcctgctcagcaaacagttgtcccttcttcatcagttcaagacttactagcatcactacctgtgaagaagatgaaacagcttggtggtaagcttggaagttccttgcaggatgatcttggggttgagaccattggtgatctcctaagttttacagaggaaaaattacaagagcagtatggagtaaatactggaacttggttatggaagactgccaggggcattagcggggaagaagttgaggaccgtcttctcccaaagagtcacgggtgtggaaagacatttcctggcccaagagcactgaagtacagtgcttctgtcaaaggctggctggatcaactatgtgaagaattaagtgaacgtatccagtctgacctgaaccagaacaagagaattgctcaaacgctaactcttcatgccagagcatttaagaaaaatgaacatgattcaatgaagaaattcccttccaaatcctgtcctttgcgctatgggactgggaaaattcaggaggatgcaatgaggctatttgaatctggccttcatgagtttttagaatctcagaacactggatggagcataacatctctttctgtcactgcaagcaaaatatttgatatacctagtggaacaagctcaatcctgagatacattaaaggtccaagttctgctgcagctctgactatacctgattctccaagttctgctgcagctctggctatacctgattcttcatttgtacctgaggatccatctcttgataatgatgtatttgtggagccaattcatgaagaagaatgccaaccatcaacctctgagaaagaagacgacaataatacacattctgcgtctgcattttcagctaaaaaatgccgagcaaatgaagaaaaaagaatatcaaagaaattgcctggagttcagggaacttcctcgatattgaagtttctttcacggggccaatctaccttacatgagaaaagaaaatctgatggactaatttgcagtcatcaaggtaccgggagttcttcggaagcatacaaagctggagcacacaatgtgcccgcggaagctgaggataggaacaacaccaacagttgtgctgaaccctctggcagtaacacatggacgttcaaccttcaagacattgatccagcggtggtagaggagctgccaccagagatccaaagagaaatacaggggtggcttgacgggacctctgagaatggagaaatacgccgcttcttaaatcctaaatcatacggacctttcatctttcttcgcaaggacttcgtaaaatcgcttaaatcaacatgagtccgtccatcgaagcacccgatcacgaaaaaacgtggttctacaattttttcaaactttccacccccgaggttttaaaaacgttgaaatgttagttcttgattgaaaattctttatttacccaacagaacggccccgctttgtgtattgtaattgtaaaatgtttaggtagccctatatgtgattaacggcttgacgggacctctaaaaatggtaagtttatttacgtggggtatggaaacatgaacattaatgaatgtgcaaatgggttgaggtcct

SEQ ID NO: 166539 - DNA, 711 bp, Zea mays
  unsure (1)..(711): unsure at all n locations
  Clone ID: MRT4577_83464C.1
ggccgcttttttttttttttccataccccacgtaaataaacttaccattctcagaggtcccgtcaagccgttaatcacatatagggctacctaaacatcttacaattacaatacacagagcgaggccgttgtgtgtagaaaataaagaatatacaatcaagaactaacatatcaacgtatctaagacctcgcgggtggaaagtatgaagaaattgtagaaccacgtctcttcgtgatcgggtgcttcgatggacggacccacccctgtatttctctttggatctctggtggcagctcctctaccaccgctggatcaatgtcttgaaggttgaacgtccatttgttactgccagagggttcagcacaactgttggtgttgttcctatcctcagcttccgcgggcacattgtgtgctccagctttgtatgcttccgaagaactcccgggaccttgctgactgcaaattagtccatcagattttcttttctcatgtaaggtagattggccccgtgaaagaaacttcaatatcgaggaagttccctgaactccaggcaatttctttgatattcttttttcttcaattgcttggcattgtttagctgaaatagcagacgccacatgtgtattattgtcttttgggngttgttcctatnctcagcttccgcgggcactttgagtgcttcagctttgtatgctttcgaagaactcccg

SEQ ID NO: 166540 - DNA, 612 bp, Zea mays
  unsure (1)..(612): unsure at all n locations
  Clone ID: MRT4577_83465C.1
tttttttttttttnnnnnnnnnnntaacggctgattaatttttctttggcgccgagcgatggcaaatatttggcttgaacaaaacaaacccttacggccatacccgtggagcctgtcctttctgcgactgcgagcatgaaagcatgcacagcggagcaggcggctggcatgggcagggcagggcagggctttttattaattgaagccgacgaatccacagtcgccaactattcggagggacagagcgagcaggttttccaggatcatagtaacttccgaaccctgtcggcgctcggcggcagcagcaatggccttctgtcctgctgcagtcgtccttctccgtagtgaatgccaactgggcacttggatggacgccgttgtggttgcgttgccccagtcccctcccctgtgcctggctgcagcagctcagctgcgcaggcgtaaattccatgcgaggacaattcctgaggcgtagcattgttcccagtggcgcacaagcaaattcatggcccgctttgctgccctgaaccctgaagcgccttcatttcgtagcaacggcgtgcctggctagtgcaggacgtcaattgagacgagagccttcatggacggcct

SEQ ID NO: 166541 - DNA, 285 bp, Zea mays
  unsure (1)..(285): unsure at all n locations
  Clone ID: MRT4577_83466C.1
ttggaaggcgggagcaagacccaggggctaacctccgagcggcgaggatgaggggcggcggcgggaagatagacgaagaagagcgggggggccacgcggagatcccgaccagctncggccccgagctgcgcgcccgcctccgatgccgcctcgncaatttttacgaccaggggcccttctccgctggcgccgctcccctcccccctcctcacgcctagggcgggggggtaggggcaccagcctcccgccgaagggagggtgcgaggactgggggtttcgtttctc

SEQ ID NO: 166542 - DNA, 900 bp, Zea mays
  unsure (1)..(900): unsure at all n locations
  Clone ID: MRT4577_83467C.1
ccgagnagtagcgagctttagcgcttacggttacgagatgccaaaagccaaagccaaagccaaagccgcactgagcatgaagctttacatcgacaggaaggcgcagcggttgctgtttgcggaggcgagcaaggacgtcgtggacttcctcttcgccatcctcgcgctgcccgtcgccacggcggttgaagtggtcgggaaggaggccatggtcggctgtgttggcaacctctacgccagcgtcgagaagctcgactccacctacctgcaggccggcgtcgctaaggttgatctcctctgcccgatcgttgtctcgtcgtgtgcgaacaccagcagatccctcctctgtctgccgccgcccaagaacctgtatcgatgcggcaaggctgtcgctggatccacgaactgcgtacctgtcgtcggaggcggttcccagcaactgctccgcccaggtggcggcgccgcagagcgcggcaggagggattgtgcagggcgtagtgacgtacatggtgctggacgacctgacggtgacgcccatggccggcgtctccagcgttgctaccgtgctcaacagtttcgccgtgagggacatcggcgacctccaggagaagaccgtggagctgggctgcaaagagggtttggctattctcaaggcgtcgctgaagtccaagtccgtcctcactgacgttttcgtccacgccaacaacagttcggtcgcttgagaatgaaactgaaaggcgcccattctaccgctcatcatcttatggatgacatcaacgggcaagattaataatgtaggttcgggtggcttttgtgatgcttcaacatctgtttctacttcaatgttagtacctctgttattggatatttgtggctctgttattggatatttgtggctgc

SEQ ID NO: 166543 - DNA, 231 bp, Zea mays
  Clone ID: MRT4577_83468C.1
cgcgaaaccaactaagaacatcaaaaggacgccggcgaccgaacaatgaatggcaacatagggtagttgctgatactgcttgctcattctgcaagtcttcgtactgctatcagtgctcgacaatgccaacacgagcgtatcgatctcctgcttgccccatacctcctaccagcacatcctgctatgggtgaatacccaattggtgaacagtacagcatccaacaggcattc

SEQ ID NO: 166544 - DNA, 491 bp, Zea mays
  Clone ID: MRT4577_83469C.1
aaaaaaaccttatcaaaaaaaaagcaaatggggttaccccccaaacaggcccggggggcaaaaccaccaaggggggggtggtttacccccttggcagccttgggccaggccccaacatatttgccctcattatccccccttggggggggggggggacaaacccctggccaattggggacccccccttttatccttttgctagggggcaaaaaccccttgggcttcccccccccaagccaagcttggggtatacttgccccccatgaaaaccgggcaggggccaaacccgtgtttccccccccccttatgaaaggcaaccgggggggacccccccccgagcatttttactgaaagggtcccccccctgtttttaaagggttatggaaaacaaggtttgccccacgaaatcaattcaaaggggcgggagctccatataaacttttgggcactcgggacaaaaacccccccctccccggacccctgggcggacc

SEQ ID NO: 166545 - DNA, 383 bp, Zea mays
  unsure (1)..(383): unsure at all n locations
  Clone ID: MRT4577_8346C.1
cattgggacctcgagccggccgggacactgagagcgacacagacaccacgcatcagatcacgacatatctccgcacgctaacgatctacctaccgctgcgctgcgcacatgtacgcaccaaccatggccgaataaagcggccactctgatgatcctcagaactcctcttctatcgcacttcgccgcacgcatgcgattgcaggcgcaaaggatcgtggccaactgcactggctcgagcatgggattcaggctgatggccagatgcccggtgacaagaccattggggggggtgatgatgctttcnacaccttcttcngtgaaactggcgctgggaagcacgtcccccgtgctggttatggtgacaatgatatttttgtcacccc

SEQ ID NO: 166546 - DNA, 621 bp, Zea mays
  Clone ID: MRT4577_83470C.1
ccaaaccaccgcaccgacaccgactccgagccccgccgcgccgcgctccgctcctctcatcgcccctccggcgtggaggccgaagcgaaggcgagcatgcatcacgaccccaaccccttcgacgagggcagcgccgaggacaaccccttctcaaatggaggagccggaggcggcaagcagcagtacggcttccggccgactgagcccgtcgggttcggcggcgctagcaggggcgacgccgtctggagatggaggtcagagagcactccctagtgatgggcgcgatcgagccgatggacctctagaggcgatgctacaggatgattggaggggtcctaatggagaggaccattagggaggtgatgtctgccgtgaagcgcaacaaggagggtctggaataggtgattgaccgaatgcacgaggcgctggagaggaagaataaggatatagccgagtttgagctcaagtacaagatcaggatccggaaggctgatagcgactctgaggatgaaggctgaaagaaggattgtactgagcatggagctgttgttggtcctgccgtacatgtatctaagttgattatatagatctgcgggctacaaacttattatgcttgggaca

SEQ ID NO: 166547 - DNA, 1412 bp, Zea mays
  Clone ID: MRT4577_83471C.1
attcttttgttcattgtttttagtttatcttatatatttgtgaagcactaatagcatgtgtgtttccatttattgtgttcattttgttacattctgtcactgcaaacaggtcactacttttcctttttcttctgtaaaatgtaactggttgctccctgtggttccactctcactttgcaggcgacaattagaaagtaatagctcacatggagatgatggttcagaccgcctggttgggaagggtgatctgagactgaaactcatgaggaaaggcttgttgccgaggagcaatggtagtgcagaacagaatgacatagatctccgtgaaaagctttctcgaaaccataagttaccaaattatgattctagaggtcatgctgcagaatcaagggctagttatgatatgagagatgagcctccagagttaagttccagatattcttcgagggaggatgtcctagggtcgaggcactcttctgttgtaagtcgagttccttatgcaagaagtgtggatgatttgttaaagttggattattcaagaaaatcctacccgtcatggacagatgatggtttgaggcacagatcacctgaaaggatgttaaaagttcggagcgatatgtatccacggatagcttatgatcagattaggcccatgccaccccttaggtctgctggttcctcgagacctcaaagttttattacaagagatgctcctgacacgtcaaggagccaaccatatgctggcaaatccaccatttctattgatacagtacagaggactaatggaatcactccatctactgcagctctgcctaaggcccctgttatggatgaagccccgcttacagttactggattgctgaactcgttgggtcttgagaagtatgttgttctctttcaggctgaggaggtggatttgtctgcattgaggcaaatgggagagagcgacctcaaagacatgggggtaccaatgggcccgaggaagaagattctccttgcagttggccctcagtccaaataacgccaaagatgagcaaacagggtgtgggtctaagaacatttgttggcaaccgaaaatattggtgtaagaactccagatataagatattgtatacccaattatccatagtggcggtcttaatccacccttttgttgccgatgacgtttcgtgccgtagttgacatgtaagtctgttcggtcagctgttaatccaggttctatcgttctcggtctgtccggtgcctgccttactgtttttttctttttctttttttaaacagcctgccttactgttattattgcttcgaaatgggacgatacgccatatgcttggtgtacccattgatagttggcttgggaattgatgatccattcagttcttgtgtcagaaatcacaaggcgacgatacttt

SEQ ID NO: 166548 - DNA, 700 bp, Zea mays
  Clone ID: MRT4577_83472C.1
cgggagaaagaagaagaaaaaaatgttttcctctgaaagcctcggtagttaaagtccagcatatattctgacgtggttttgatattactagcactaaataaactcgttgacatttggacatactaaacatttgctgcagtcaactatgcgcggcggcagtactatcactacctgctgctactacaacccagctagccaaccagaaatcagagtcagcttgcacgacgggacaccgacggccaagattccacagacgtgcagctaggcgcctacgcctatagcgactggcgatggcgtcccctcggcctccgccccactatttgcatccagcgcataggtttcgctccgttacggtaatccatataggttagagtagagtaatttgtatacataggtttttaagctaaattctataccgactcatctcaacccacccttgataaaaacaagctgaaatagaccccatcagcggagagtgagacgaaacatgattttgacaggtgtttgactctcaacctcggttcgttagcaactcgattatgatagcactgtttaatttggtaaggagtcaggacgctgggtggtactacgggactactcctacgtgcgaggatgagtacgaaagcaaagcctttgataccacaagttttcttggaaaacgaaacaggctgcggtcaacccccggttttggcagaggccc

SEQ ID NO: 166549 - DNA, 652 bp, Zea mays
  Clone ID: MRT4577_83473C.1
cgggcttatatatttgtgaagcactaatagcatgtgtgtttccatttattgtgttcattttgttacattctgtcactgcaaacaggtcactacttttcctttttcttctgtaaaatgtaactggttgcttatccctgtggttccactctcactttgcaggcgacaattagaaagtaatagctcacatggagatgatggttcaggtgatgataaaccttaacttgtcaattctctagggcttgaactgaagatatctggcactacttactctgttgaattggcgtgcaaaatatttgaagaccgcctggttgggaagggtgatctgagactgaaactcatgaggaaaggcttgttgccgaggagcaatggtagtgcagaacagaatgacatagatctccgtgaaaagctttctcgaaaccataagttaccaaattatgattctagaggtcatgctgcagaatcaagggctagttatgatatgagagatgagcctccagagttaagttccagatattcttcgagggaggatgtcctagggtcgaggcactcttctgttgtaagtcgagttccttatgcaagaagtgtggatgatttgttaaagttggattattcaagaaatcctacccgtcatggacagatgatggtttgaggc

SEQ ID NO: 166550 - DNA, 209 bp, Zea mays
  unsure (1)..(209): unsure at all n locations
  Clone ID: MRT4577_83474C.1
tntactctttcgatacaacttattattttatctggtttgttgttgtctaacgtaggggggctgttgattgagagggtgaacttcatgtgcgctggagcctaccaatttctggtgtatttttaggaccagatcttaattgggagtgcatgagccatccaggtgctgctgtagttttagatccagaacttgagtgtgccagggaccaacca

SEQ ID NO: 166551 - DNA, 360 bp, Zea mays
  Clone ID: MRT4577_83475C.1
cgcttcagctcggcgtcttcacaaccgccggcgcaaactctcgcccgagcccgacaagatcttcaattccccattccgcccaccgatcgaccttcacgccagtctcggtctcttccgaaggggtcgcgcgcggctgtttaagattccatgaatcaatagacgacgcttcttctcccccgcctctactatgaatatgtgcctctggagccatccatctctgaggagatcatgcgctctggccaacataagtaccatcgccatactacctcgacaactacaacaaggcactgcagcatgtagacccttcctacttgaggaacacgcctccacttgcgtgcaactccaaggtgccatcaattt

SEQ ID NO: 166552 - DNA, 221 bp, Zea mays
  Clone ID: MRT4577_83476C.1
acaaggacggccttcctactgacctggaggggactaacttggccagccaacggattatagacgatctcacgctggctaaatacaagatgctgaaggacggaaccctacatttggagtgggaccttacgggaggcacgcaaataaatgtcaagacctttaatgggacgagaaccaccttggagatgagggaataggacagcaaagacagtgttaacggaaag

SEQ ID NO: 166553 - DNA, 839 bp, Zea mays
  unsure (1)..(839): unsure at all n locations
  Clone ID: MRT4577_83477C.1
gcgccgccgctccactcccccgcaaaaccctagcctttccccgcgccgcccccgccgccgccccgtcgtccccaggtaaggaggagggcgagatggtgaagcacaacaacgtcatccccaacggccacttcaagaagcactggcagaactatgtcaagacgtggttcaaccagcccgcccgcaagcagaggcgccgcatcgctcgccagaagaaggctgtgaagatcttcccccgtcctacctctggacctcttcgccccattgtgcaatgccagacccgcaagtacaacatgaaggccagggctggcaggggatttacccttgaggagcttaagtccgctggcatcccaaagaagctcgctccgaccattggcatttctgtggaccaccgccgcaagaacaggtcgcttgagggtatgcagtccaacatccagaggctcaagacctacaaggccaagcttgtcatcttcccaaggcgtgctcgcaaggtcaaggctggtgactctactccggaggagcttgccaatgccacacaggtccagggcgactacatgcccattgcccgtggcgagaagcgctcagtcgaggtcatgaaggtcacagaggagatgaaggagttcaaggcctatggcaagccccgcgtcgagaggatgaaccagcgccagttgggagccaggcagaagaaggctgccgaggcggagaaggaggagaagaagtgatgagatatgcttaaggcagctagtggngttctgttgttatcaagtgctagtttctaanatttgtggntttggccttctcggacatcttggttgatacctgatatancttatttgcatgat

SEQ ID NO: 166554 - DNA, 272 bp, Zea mays
  Clone ID: MRT4577_83478C.1
gtgaacaagtgtttagcttaactgattgatgattacagcatggttaagttcatttgacatgatttgagacccgaaagcatcatacaatatgtgctatcttctatctacacatgtatccagtatggtgaatattcatactttaaggtcaggtacttctaataatactaatactaaccactggatgctattgtaagtgcaaactggttgccaacattcatatatggcggagtgagacttttttactgtatggcgcaagcattcaaaaacctcct

SEQ ID NO: 166555 - DNA, 240 bp, Zea mays
  Clone ID: MRT4577_83479C.1
ccgccccagagacgacagggagtatgggcagtggtagcctcctcctccacctcgtgttggacgtggtggagacggtggcggcgcatgtcgtggtggaagtggaggctaccaccgcgccagagacgacagggagtatgggcatgaagcggcaccggttccacttccaccagcacgacgacgcggacgaggagtcgaatatggcggcgacgaagcggctccgcgacgctgatgagcatgacg

SEQ ID NO: 166556 - DNA, 398 bp, Zea mays
  Clone ID: MRT4577_8347C.1
tttttcttcttgtcttttgccgctcccggatttgggggtttgcattatgaccatgaagctacccatgaatgctatgcatcgtacataaagacttgaactctatatcacaaactccactggccgattctttaaaaacacattgacactttagcttcttgtgtgcattgagtgcaaagtctggcttctttggaggcacgacacttcaggacatgatatgaacatatggggctcatactaacaacgggtcatgaccgagtaatacggtgagcactcctttcggcgttagcttctcatagtgaggactttggcttatcaaaaaacatacaaccgcgtaggtaagaaaataagcccttagcaacattttaaccactttatgaactgggcatcgcttacttcca

SEQ ID NO: 166557 - DNA, 256 bp, Zea mays
  Clone ID: MRT4577_83480C.1
caagaagctccctcacagcctcacgtcacctgctccacgccgaggcatcagttgcagcaggcgctcagctccttgcagcaggcaagcccggcggccagttccttccccagccagcttcaaacttcttcctcctggcgtagctcctaccccttgcacgcgtcgtgtgtcctttcctgtcgtgttcgcccaggtctggtctgttcccaatcagcacagcgccgtcctgtcctcttgaagctcgacgtcgcaaagtcca

SEQ ID NO: 166558 - DNA, 238 bp, Zea mays
  Clone ID: MRT4577_83481C.1
gcatatgcaccgacgtagctcgaattcgctcagccgccccaagcaatgcaagccgtaagaccccgatgctggcgcattgggctcactacctggctgatcccgtcctatcagaacttgcgctgtctgccggcacgtgactacgacattctggaggaccgcagcccgcacctcacctgaaggcgcatacagtctgaagaacagcttacgctgatctgaggtgcggcacgggcctcgttgt

SEQ ID NO: 166559 - DNA, 463 bp, Zea mays
  Clone ID: MRT4577_83482C.1
cccacgcgtccgggagaaataatgcaaaaggagccatatatggatgcaggacataaagccacgtttccacctaacacttgggtgcgtaagggttgatcgggtgcggcggatagcgtgtccaactggcttgttcgtttcaccgtcccgtggattaataaatgaacaaactatcgacaatcaaaaaaaaaaaaaaaaaaaaaaaaaaaaaaaaaaaaaaaaaaaaaaaaaaaaaaaaaaaaaaaaaaaaaaaaaaaaaaaaaataaaaaaaaaaaaacaaaaaaaaaaaaaaaattatattataaaaacacaaaaaaattaattttactcgccgtggtttaacaacctgattgctgaaaaaaaaactgttgtcaaccaaaataattttgttgaagaaaacccttttttctcctggtgtggtaaaatagaggacccccccgcatgaccgttcttaccaaaaaagga

SEQ ID NO: 166560 - DNA, 416 bp, Zea mays
  Clone ID: MRT4577_83483C.1
ggcttggaacctttgggctgatttatgtgcttgtttatgtgcttggtggtggtgtcggcggcgatggtgattgattcgcgtttatttaaggataaggggcgtaagttgttgtaggagtatcctgattctagtacgtttgtgccttcttagactgtgtaggagaaggttggtactgcgtttactcttcactgtagggcggtacgtgtaaagtagggtggtacttggcatattactattgggaataagcatcctaatacggcgatgactattaatgcgggtggtgttggtgatactgtggtggcgctggcgaaggggagtaagtgtgctaagcggatggagacgaagtgtaatcgggggtaagcgcggtagattgaggaggattctattcgtgagctgtcgatgccttgggcgacgat

SEQ ID NO: 166561 - DNA, 511 bp, Zea mays
  unsure (1)..(511): unsure at all n locations
  Clone ID: MRT4577_83484C.1
ggtccggnnaattcccggggtcgaacccacacttcccaggccagtacaccacactactaccagcagtcgtacgtcagtgtcaagcgacctaacggtggacatggctcgcacgcaatctgccgtagcggtcgccgcggcggccgcggggctgctgctggcagcggcagctactacctcaggggccgccatcacctgcgggcaggtgagctccggcatcgcgccctgcctctactacgcccgaggcacggggtccggcccctcacagggtcctaggtggagcggcctgaggtaacctcaggagcgccgacggcaccgccagcaacaggcgcgcctactgcatgtgcttgatgaacgccgacaggggcgtaaaaggactcaacgccggcaacgcctgctgacttccctcacaatcgctgcgttaaggtcccaatacagcatctgcacctccacccactgattgagggtgtactaaagcctggaccacactctactgctgccgtctgcatgatcg

SEQ ID NO: 166562 - DNA, 325 bp, Zea mays
  Clone ID: MRT4577_83485C.1
agggagacaagagacagaactacatcagccggtggtagcacgttaaactagctacagcatctaactcaggcgctatgactgacaattacagtcccacatgtatcgaaactaatcactatgctcgctacatacgtaaacgtaacaactgtccgggtcaacaaacacgccctacaaacaaagagtgcatactttttgttgcactcttgacagatgatctcaccttcagctgtttgctcagctccggctgctgtaaaagtgcactcagtacacccgtcatgctgtgatcgggtacccgtgatccgctgtgacaggcgagtatatactg

SEQ ID NO: 166563 - DNA, 527 bp, Zea mays
  Clone ID: MRT4577_83486C.1
cgttcattctttctgtgcatgacggttacccttccttgatcattaaaaacaaccgaagggttcatttttaaattttctataacacaaaccgggctttgattctcagaattacacaatttaaaaatattgtttttattttggaaaagatggggacgacaaatcccttttttaaacaaaaaaaaaaccccctgctttatgacaaccaaaaatttttacaaggcgccgctgaaaaaaattttatttctttttaaaaaagaattatatttttgggggctaggagggaccccatatttttttatttttttctccaccgccccaaagggggcgcatctttttggcctgtgccatttcgggggggcgggggggggggggttacaattatacccaacctccatccaagggaaaatggcctccccacgatttacaaaaaaaggggggaaagccccccccttttttttttttttcttaaagggggataggccttttttggcggggtggcgtacctgggagggacctttttacaaaaa

SEQ ID NO: 166564 - DNA, 439 bp, Zea mays
  Clone ID: MRT4577_83487C.1
aataactttggacagtacagtgtacacttgctttatttgatattttccttggcactgattcacattggatataataagatcagttggtaacaaaaatatctctttatgctaatgcagctcaatctgaggaacttggaatgcagcacattgagtttctcaacaagctttgatgcctgaatatgctctgatgtttggaagtgcagaagacttcaatgtacaatgttgagcggcatgaccacgagggtgtatttgtactagagcagttctttattagatgtatgatgatgaccttaggttttgccaagtagatcttttagaatgcagatgctgtaacttgtaaccacaaccgaaactgaggctggaccgagtgtagcgtttaacaatcgagttggtgctcatgcctcgttttgcaatcacaatcagcaggcacgtttgtcag

SEQ ID NO: 166565 - DNA, 705 bp, Zea mays
  Clone ID: MRT4577_83488C.1
aataactttggacagtacagtgtacacctgctttatttgatattttccttggccctgattcacattggatataataagatcagttggtaacaaaaatatctctttatgctaatgcaggagatggcgccttgctcctactgctccaaatagaggctgttatccatacacagacaaggatcctttttgttgaaagttgcccgcacgtctactttgttgggaatcaagataaatatgaaactcgactgttggaagggcaagaaaaacagaaagtgaggctaatctccatcccaaggttctcggagagtggagtcgctgtaatgctcaatctgaggaacttggaatgcagcacattgagtttctcaacaagctttgatgcctgaatatgctctgatgtttgtaagtgcagaagacttcaatgtagcatgttgagcggcatgagcacgagggaactacgtgaaccctttgtggggtgtgggggtgggggcatggaaggatgtatttgtaccagaacagttctttattagatgtatgatgatgaccttaggttttgccaaatagatcttttagaatgcagatgctgtaacttgtaaccacaaccgaaactgaggctggaccgagtgtagcgtgtaacaaccgaattggtgctcatgcctcgttttgcaatcacaatcagcaagcacgtttgtcagatgcgcttttatcatc

SEQ ID NO: 166566 - DNA, 240 bp, Zea mays
  Clone ID: MRT4577_83489C.1
gctagagcgtagcggagaagcaggcagccaggcaacgatggagatgcgggttggtcatctgctttgccaggtgatatgtatgcaggcggcggtcatcggcgccgtcgccgccgccgacgaggctcggccaccggcgatgtacgtgttcgggtcgtcgatactggacgtgggcaacaacaactagctgcgggggccggccgtcggcagggccaacagtccctacaacggcgtcgacttccc

SEQ ID NO: 166567 - DNA, 329 bp, Zea mays
  Clone ID: MRT4577_8348C.1
taaaaaaaaaaaaaaaaaaaaaaaaattttaaaaaaaaaaaaaaaaaaaaaaaaacaagcagtgattaataaaaaaggccggagtgctctttcattccactctttcgtactcttacattcaaccttatatttatttcatagcccaacctaattcaaattcactacccgtataaaccacaacttttcaacacttaaaacccttactttacataacttattcaccttgtaacacattcccctttcgcccttttacttattaccttccaggcccttacccatcgccatttccaacattatctcaccctttattgtcaacattaacccccctt

SEQ ID NO: 166568 - DNA, 1796 bp, Zea mays
  Clone ID: MRT4577_83490C.1
agtttctctggccggggctgtcaatcgccgccgcactgccgagtgccgacggccggtcggccgccagggcgcgccgctcgagctaccatacgatttcggctgataaatttggacgcgcgggcgggagaaggggagaaaacgcggagccacaccccgtgtcgaaaccccagggcgccaagcttcccgcgggccaccgccgctgccgatgccggtgccgaagccgatggagaggaagcaagccgcctacagcaacctcgatgagaggtacgcgatccagggggagaagtaccaggggcagcagtacagccatatctacttcacgcgcctccaccacatgcggaatctcctccacgccctcgtcccctcctggaagccgcaactccctgtcactacagtgttaggacttgaagaaggaaaggattgcataattgttggaactttatataagcacatgaagttgaagccttcaattcttgatgaatatgccaaagagaggtctgcaattccccttgtcaaaccacataatttcatgcatcctgatgatcatctcattctggaagatgaaagcggaagagttacacttgcaggagccatacctccagcagcattcgtgactggggttgtagtggctctccatgggaaggaaacaagtgctggcaattttcttgtggaagatgttcttgaggctggtcttccaccccaaactgcattgtctagcgcagaagaagacaagtatgtagtattcatatcagggctaagtgtaggaagtgacacattcaatcctctacagttccaacttcttattgaccatgtcacaggacatctgggtgacgagaatgagcaatccatagcatcaaatatagtacgcattgtggttgttgggaattcagtgcatatttcaccaaggtttgtcaatggtcagacggtaccatcaaaagatcaatcaaggatagcagaacctattaaggaactggatataatgcttacccagctcgtggcttcgttgcctgtagatatgatgccggggtgtcatgatccggcaaatttttctttgcctcagcagcctctgcacagatgccttttctctggggcatccacctacaacactttttcgtcttgttcaaatccccatcaattcgagcttgacagtgtccagtttcttggaacatctggtcagaacatagatgacctgtacaagtactctgatgctaaagacaagctggaattcatggaaagaacactgagatggcgccatcttgctcctactgctccaaatagcctaggctgttatccatacacagacaaggatcctttccttgttgaaagttgcccgcacgtctactttgttgggaatcaagataaatatgaaactcgactgttggaagggcaagaaaaacagaaagtgaggctaatctccatcccaaggttctcggagagtggagttgctgtaatgctcaatctgaggaacttggaatgcagcacattgagtttctcaacaagctttgatgcctgaatatgctctgatgtttggaagtgcagaagacttcaatgtacaatgttgagcggcatgaccacgagggtgtatttgtactagagcagttctttattagatgtatgatgatgaccttaggttttgccaagtagatcttttagaatgcagatgctgtaacttgtaaccacaaccgaaactgaggctggaccgagtgtagcgtttaacaatcgagttggtgctcatgcctcgttttgcaatcacaatcagcaggcacgtttgtcaaaaaaaaaaaaaaaaagcggcc

SEQ ID NO: 166569 - DNA, 1623 bp, Zea mays
  Clone ID: MRT4577_83491C.1
aggacctaccgtcgtttgagtcaccataaaaaagcaatgtttagtattcaaattcaacgcgcgctggcgcgcgccattgactagtatttatatagtgggctctccgtaagtttctttgagccgggtagctacacagtacgcacacctatcccggctgcagcgcggttccagccactggtgccacgtggtttgtgctcttgtgggcacactggcctccacccatctctctcacgtctccccatccgcagcaaaggcacacagtacagattcggcccatcgttttatagccacaccatggctaggaagtgctcacactgtggcaactgcggccacaactccaggacctgcgggagagaaaccatgctctgcgaagctggcgacgccaggaacggcggcggcggcctaaggctcttcggagtgcaggtccgtatcggcggcggcgtcggcgcaggctcggcgtccatgaagaagagctacagcatggactgcctgcagctcgcggctcctatcggttgttccgcctcgtcatgccagtcgccgtcgacgtccctcctcgtcgtcgtcgctgctgctgatgtcgattgaggagggatcggagaggggggcgccaaatgggtacctttctgacggacctcatggcagagctgtgcaggagaggaaaaaaggagttccatggagcgaggaggagcacaggcagttcctttccggcctggagaagctgggcaagggcgactggcgaggcatctccaggagctacgtgccgacgaggaccccgacgcaggtcgccagccatgcacagaagttcttcctcaggcagagcagcttggggaagaagaagcgccgctccagcctctttgacatggtgccgatttgcgagaacagtgcgagcatctccgatccgctgagcagcgaaggggcctcaacctctctgtcgctgaacgtgccacgccacggcgtcacctccgtctccgagagggcggccttggacctgaattcgacggaggaagacgacagcggggcggacgcgtcgtcggcatcggcatcaggtgcagggaccagaccaccgttcccggcagcgcagacggagccgctgcagccttcgtcgcttggccgtggacgcggtcaccactgctctccgttggacctggagctgggcatgtcgctgcctgccccatccatcggaacatgacgcgccgccgccgccgtacttatcgccatggaatcccacgcaggtcgcgccagaattcgtcagcgcaaggccgtggccgtgcgtgactactgtctccctcagctgtgtcagccagatggagatgatgcgctagccaatacagtactgttcgtgatcgtgaaaacggtgtgcaaacactagcacagcggcactaaactaggatgtcgctcctcgcaccattgggtactgtaaccgcgttgatccacgtcatctctatctcttcagcaccgttggatcataggctgtcagtttcatctatccgtccatgtgtcatactcattcgcaatacggtgacttagcgagtgtttgggatgggatggctccagattccagcttcagtgtggagctgtagtttataatcccaatttaaatagttttcaacctactttcaatcg

SEQ ID NO: 166570 - DNA, 1881 bp, Zea mays
  unsure (1)..(1881): unsure at all n locations
  Clone ID: MRT4577_83492C.1
ctgaagctgggtagctcctgctcctatcccggctgctggcgcgccgtggttttgtgctcttgtggacacactggcctccacccatccctctcacgtctctggccatccgcagccaaggcgcgcggcccatcgtcgatttatagccacaccatggccaggaagtgctcccactgtggcaactacggccacaactccaggacctgcggactaggactaggactaggacacagagaaataatgctctgcgaaggtggcgacgacaataatggccgcagcggcctaaggctcttcggagtgcaggtccgtatcggcggcggcggtggcgcagggtcggcgtccatgaagaagagctacagcatggactgcctgcagctcgcggctcctcatgcttgttcgtccctcgtctcgtccccgtcgtcgtcgtcgttgtgctcgtcctcgtccccgtcgtcgctgctgctgtcgattgatgatgggttgcagagaggggcggccgatggatacctgtctgatggacctcatggcagagctgtgcaggagaggaagaaaggtacgtcaagaaatttttttcccttcctgatgaaaagacaaaagaggaagatttgttctttggaaattcagaaacttcaccttacacgaatttcttttcttattggtaatacgtactgtccatcagtcgtctgacctaaaaaaaaagttgcattatgctctacttttttttggcctaaaaaaagagagtaatatagctntatcttccactgatgctgcaacccttcaactgcaagtaacaatgaagcagctgagactgagagatactagtgcttccctgcacattattgagtccttgttgggttggtcggtagcagctgatgtttctaaacaaaaacaatactctggatatataccgacgacggcaggagttccatggagcgaggaggagcacaggcagttccttgccggcctggacaagctgggcaagggcgactggcgaggcatcgccaggagctacgtgccgacgaggaccccgacgcaggtcgccagccacgcgcagaagttcttcctccggcagagcagcatggggaagaagaagcgccggtccagcctcttcgacatggtatgcgcatgcaggcaccaacatctctctcttttttttctgtacgtaattgcttgagttttgataaccgggtccagcggcaggtgccgatctgcgagaacagtgcgagcatctccgatccgctggacgtggcacgccatggcgtcgcctcggcagactccgagagggcggccgtggacgtggacctgatgaattcgacgacggagggtgacgacggcaggagcagggacgtcgtgtcgtcggcgtcaggtgcagggaccgcactgcggttcccggcagcggcagctcagacggagccgctgcatccttcgtcatcgcatggccatgggcgcggccaccactgctctccgttggacctggagctgggcatgtccctgcccgccccatccgtcggaacgtgatggagatgaggcgaggccgaggccgtgcgtgactgctgtctccctcagctgtgtgtgtcagccagatggagatgatgcgctagccaatacagtactgttcgtgatcgtgaaaacggtgtgcaaacactagcacagcggcactaaactaggatgtcgctcctcgcaccatattgtgtactgtaaccacgttgatccacatcatctctatctcttcaccaccgttggatcataggctgtcagtttcatctatccgtccatgtgtcatactcattcacgatgcggtggcttaatgatccagcagtaatttttcttctttcgtgacttaagggtatatacggtggtatttaatgtagaggcttttgatgt

SEQ ID NO: 166571 - DNA, 112 bp, Zea mays
  Clone ID: MRT4577_83493C.1
ctctactctgagcacaacatactggagtgcaaattcactttgaaatatacagcgcggaatacatctgaacgagactacatccatgacccataccacgtcctggaccatctat

SEQ ID NO: 166572 - DNA, 427 bp, Zea mays
  unsure (1)..(427): unsure at all n locations
  Clone ID: MRT4577_83494C.1
ctggccggctcctgcgaccggaaccggaccgccccctgcgactgcgaatatccacccgccgcccggtcgcctccgcaagcacaggcagcacaccgcatcgctgccctccctccatccctcccccagaaacccaaccggccagcccaacccctccgcttccagatccctccaccacctgccgccccagatcccgatccgtcggcccgccgccgcccgcgggcgggggggccgatcccctactctcgctcctcgcgggcgcgttgctagtcgcggcgctcgccccggcggcggcggcaccgtcgtgcccgcacaccaatctgacggccaacttctccgccgacttcaccatgctgcagcaccagctccgcgggacggggggggtggccgncgaaggcaagtgttctcttgagctcacccgcttcgatct

SEQ ID NO: 166573 - DNA, 252 bp, Zea mays
  Clone ID: MRT4577_83495C.1
acccacgcgtccgcgacgcactcgtccgtacgcctgcgcgaacacctcagctggtttcacatctgttcttcagagcccactcatctgctacccttgatactctatcgagtttccacaacattatgtcttactccatcgttagaaacaccccaggacaccactaccataacgatcggttacgccataatatacattccatcattcattctcaccaatgttcaagacaatactaatatctcttaaatgctgatc

SEQ ID NO: 166574 - DNA, 292 bp, Zea mays
  unsure (1)..(292): unsure at all n locations
  Clone ID: MRT4577_83496C.1
gggcggcgcgccttgggcccgccgcgggggggggcggggcgccggccancngacccgacccacgagggagccgcagacgaagaccaacccgggccccggccgggacgacacccacgccnacgcaagcgcggacgagagcaccaagaaggcagcggccgcngaccccgnggaaccggagaaggcncgcggggggggcggcgaggncngcgcccacggcgaccgcgnncncaccacccancaccacngggaacangccggcggcaacgagaagaagaggcngcaggcgccaggg

SEQ ID NO: 166575 - DNA, 410 bp, Zea mays
  unsure (1)..(410): unsure at all n locations
  Clone ID: MRT4577_83497C.1
gtgagcctgttgcaaatgctgcagcagccagaaattatggtcaagtttaacatgcacaacatgagggtgctcctactacagagaatgtcattagctgaagcctgaacactgcatccgctgcattctatacttatggtgcagctggtcaagattttccagtcgcaactcagaggagagacatacaagctggaggttctaatccgatttctccatcttccatgaagatggatgataactcaatatttcatacgggttcattggttagagggagaacagccatggattatggcgggcgtgattggtatgatgctgcgggacctggtgggctttgctctggacgggtgctaacggcgtctctgaattgaggagtcacatcataatcgntcaatcctagccagtccactattgtg

SEQ ID NO: 166576 - DNA, 314 bp, Zea mays
  Clone ID: MRT4577_83498C.1
ctccggaagtgaatctacggacatgacaagggcttaaaagcacgtgctccccaccgagacaagatactgtccgatgctctcgtcatggccgacaataatcccgaagtgaacaaggctctactgaacaaaggttacagtaatcttatgacccaaatgggccgcaggacatatattccattcaaggtctaaggatatgctacccttcacgtcgaccattacacattttcacacaacatcattgaccatatgataacagcttcctttactatcagccattccaattcgcggttcttaaactgatactaaagctttaa

SEQ ID NO: 166577 - DNA, 679 bp, Zea mays
  unsure (1)..(679): unsure at all n locations
  Clone ID: MRT4577_83499C.1
agttccgacttgaggcatcactcagccacagtacttgcatcatcatcagcgtacctgcccggtggtcagcttcgatcccaatggagcttcctcagctggcgtccttcctcggcgtggtgctcgccacggtgctcttcctcaaggctgtcctccgccgccgccgccgccagtacaacctcccgccgggccccaagccttggccgatcatcggcaacctcaacctcatcggcacgctcccgcaccgctccatccaggctctctccaagaagtacggccccctcatgcaactgcagttcggctccttccccgtcgtcgtcggctcctccgtcgagatggccaagttcttcctcaagacccacgacgtggtgttcaccgatcgccccaagaccgccgccggcaggtacaccacctacaactacagcgacatcacctggtccccctacggngcctactggngccaggcccgcaagatgtgtctcaccgagctcttcagcgccaaggggctcgagtcgtacgagtacctcctcagggaggaggtgctcgtcctgctcgaccacctgcatcgcgttgtttggtccccctttttctcctccttcctcccttcatcgtttctttgcctacctttttcntatatttgcccccttccccccgtttcttccgttatccccatccattcccc

SEQ ID NO: 166578 - DNA, 162 bp, Zea mays
  unsure (1)..(162): unsure at all n locations
  Clone ID: MRT4577_8349C.1
cgtcattgtatgccctttcaagtctccatatcccacttcttttaatccagaagtagacataggcgatgaaactggaaaaaggatctacatagnaatgaaactaattcaaaaattggaactaacagattaacattgggtattcattgcgctctggatggcaag

SEQ ID NO: 166579 - DNA, 372 bp, Zea mays
  Clone ID: MRT4577_834C.1
gatgatacagcatccagggggggtttttggaaccgttacatgtgtttttttagacggatatcaagccagtaccaattacaggatagcactggcttgctatgcttggatggaagcaagaactgtgacacgccagcaccccacttccaggtgcacgacaacagtgacgtgtgtctcagttgagcaccgtgtaagacacatatgatgacattgcccttagtaggcaatagcggatgggtattaggtaccatgcattccacgaatttgcttttatttgaggtgcatacctaaagactggaaggtggagccgcgccaaccgtagaccgagcgcttcgagtaatcgaacttgaggtagaaatgtgacttgggaacaga

SEQ ID NO: 166580 - DNA, 180 bp, Zea mays
  Clone ID: MRT4577_83500C.1
gcacatgtaaagagactgacgatgaaggggacgcaaccacgagatagccggcgggctggcacgatacaagcagttagcaatgcccaagagcggacacacagtcttggagctggcccagacggacatgtacgggcagagcggggcggccacgccaggttacgcgcactcgctgccaacttt

SEQ ID NO: 166581 - DNA, 2084 bp, Zea mays
  Clone ID: MRT4577_83501C.1
tttaagtcactggtaaatatgctctttaaaaatattgattccatattgtttacctgtggagagtggctgtgaaccgaggcctcaatatctcattcagatttcaagtgtgcataccattttgctaagctcttgctttttggcagggaatagaaacattactctgaaggttgttgaattgttgttacctatagtagttgcattttgattttcttacctctcagtgaatacaaattggtcatttaaccattcatgtaggcataacagataactaccccagctggcacgtttaatttgtaattggttatatgtacacatattgcatgttgctggttcaatactgtctgttgagtctttacactggaaaacaaactgaactgaaatgagacagtcaaatgctcgaataaatgtgcagggacttgcagctttacacattccatatattgctgtatatgtctggtcataaagcatagattgctcactgagaatcatgctatttcagttcagttgcctcatcttcttcttcttgtgtttctgtatcaaaatggaatctgttcatcctttgataactcaccatgtcctttttcttgttttttttttggtgctgacagatagcagaagctgaaattcttgaagaccagcttttggtagctctaggacacaggattcttgaactggtggataagttggaagactttgatttgatattgcttcctagctttgaactagagaggcccttgcagttggctaaagaagctataggcatcagatatctgtctccctacgaggttggtacctgcccgatttgccgtgaggagaaactaggttctcagatgatcaaggcaggttgttctcacacatattgctataattgcctgactgggtatgttgaagagaagctgctgacctcgaagctgcctataaggtgtccacaattaaggtgtaaatacattatttccgctagtgagtgcaagtcgttccttccagttagcagctatgattccttggagagagcatttgcagaagctggcacctcaggaatggaaagattttattgtccctttccaaactgttcagtgctgttagaccttagtcagcacttctctagggcaagttcatcaagccagtcagatctcagttgtgtcgagtgcccagaatgccatagagatatatgtatcaactgtggagtgccgtggcacatcatgatgggctgtgatgagtaccagagcttgcccgctgaggaaagagatgctggagacctatctttgcatcggcttgcacagaacaataggtggaggcgttgccagagatgtcgacgtatgattgaactgacacagggctgcttccatatgacttgctggtgtgggcacgagttctgctactcctgcggtgctgactacgctagcggcgttcaaacatgccaatgcgtgttctgggacgacgaagccatggagccctcctccgccgcacggtccacccaagcagcgtccgagatctgggcgtgggacacatttgactgcatgccgaccgccgtggagggatactcggagcaggagagagcgcagctggcactcatccagaggttcctcgccggggggttcagcctgggtgagaacccctgccagtcgccgccccgctgcgccgactcctacatcgtcgacaccatgaaggacctccaccagctcccatggctcgagcggttcgtgtcggtgatcagcgacacgtacaacgatgactacatgcagtgaagagagggagggagggagagacagttatagatagcagtaaaagaaacggcacatactgagtcctccattcagaataatttgtttccatgcccccctgtaggcaattggcgcagggaaaaatgatatgctttcatcatgaatacactggtgttgtttcctccattgtatggtaaccttcggcttcggtgttagttgtgcatgggcacaagagttctccattttatatgattatgtccttatttctttaaagtgagtgtaatctctctctctatatgtatatcttcagagctttctgaaattactcgttttgaatcaaatcagcagcatgagcaactgcct

SEQ ID NO: 166582 - DNA, 1076 bp, Zea mays
  unsure (1)..(1076): unsure at all n locations
  Clone ID: MRT4577_83502C.1
agcgtcgcggcggcagccacatatcagaagcttccngaaaggccaagctgttagatgctctccgccactcacaaacacgtgctagggaagctgagatagctgccaagaaagcctacgacgagnaaagaccatgtcatcaagctattgttccgtcaggcctcgcacctttttgcatgcaagcagtggttgaaaatgttgcagctggaaaacatatgccttcagctcaggttcagagagcaccagatagcgaccatgttcccagagcttccatggatggtgacgaaagaaaaggtagcaccttctcaagagcacagtgacaggaagaaaggcagaaggctgaacaggaaaggtggcctacgcgatgccgttgcatttgctgttggtgttggtattgttggtgctggattgcttcttggctggactcttgggtggctactgccctaactggaagtttcattgtcgtagatgacaggacagatgccacctgtgcacgctgaattgaatggcaataggtaagctccaagtgcgtgctttcgtgaagagtgaaaaaggggcagatttttagagttcttccatggtagtctgttgatatggtgatgatagcttgatctcttatgttggttccgtatacataggaaggatctggtgtacatacttccagaaactggatataccttatgttggatgcgatccttagctgtgtgctgtacatatgggccagtgagggtctggtggaagatgaaatcagccgacttcaacaacgtatgcgctagtactgtaaatctatagattttatttgctttaatgtagcaggaattgtgataatccgtttgctgtaatgtgtgctagacttactagtttaaaataagttagattatataatctagacagattataattccaaacaaacagacccttatatgcatatgcatagcttgttttagacagattataatcccaaacaaacagatccttatgtatctctttttcgatgttcatccacatgaggccttactttgttattcatgtctcactggattgaacaagattagaaagaattaggagagattttgact

SEQ ID NO: 166583 - DNA, 590 bp, Zea mays
  Clone ID: MRT4577_83503C.1
gggtcgacgcattcggactgctggataatatatgaaacaaacatctcgtcttaccccttaacttgtaatagcctgtgcagtgtaaaaataagtattagagaaaccattaataagcatgtttgctttgtgaccctagaaaccagctaggcacaagcagcacctcggccccctcctcggcgagacgtctactttctcgaggcgtacagtgaccgctcacctctcgggcgtgcctagctcgtcatcggtctccaatgccacgttcgtgctactactccaatcgttgctgacccgtgtgatctccactgacttccgcaaggagtgcgggcaccttcggtcccatccgatgttaaggcttacctcgcttatggtgttccacagagtgacatgaaactgtaatcacttatgcaaaagttgctagaccagcggcagagcatgaacatatggcgctttgtacatacaatgaatactgttgggaccatgcttcgtcgccgaaggtcctgcaaaaagaaacagcttcggctgaaggtgcttgaacatgctgccgaagacacagttcacgaagcttcggaactacaacatatccaaagacg

SEQ ID NO: 166584 - DNA, 311 bp, Zea mays
  unsure (1)..(311): unsure at all n locations
  Clone ID: MRT4577_83504C.1
atatattgatagctttttnangagaaggccaaaccccaatttttttttaccggaaccacaggaaaaaccaaaaagcaaccaaacatgattaaaaagattactggttataaannccttaaaatgggaaaaaaaaagagatacaaactgaaaaaaatgtttaaaaggcacattaaagaacttctcgtaaataccaccaaaaaaggccagtgtcacaacagaggggggtacaaaccttttccagtaaggggggcacccctacaaggtgcgccccccaacattcaaaagaaggaaacatttaaaccccccccaaa

SEQ ID NO: 166585 - DNA, 209 bp, Zea mays
  unsure (1)..(209): unsure at all n locations
  Clone ID: MRT4577_83505C.1
gaaccaggggcgacccacgcgcccgttctcactcgcgccgagcgggatcgggggggggcgctggggcggggagggggggcgccgccagcccgcccaacttccataccaaaccgcggctctcttagatctccggtcgccgaccgcacgacggtctcatggccaggcacgacgccatntgcaaggccggacggcagagatcggcaaacgcc

SEQ ID NO: 166586 - DNA, 285 bp, Zea mays
  Clone ID: MRT4577_83506C.1
atctggatagaggctgaccattcacctgttattattcagcacaacgccaacaaacgaggggtgatccattcacaggtgaaccttacaagttggatccaatcacaggaggagaaagaagaagaaactacgatcgaagagcctcaggaagagagtgctgaccacattaagcggagcgatatactacatgagaccctgaaacataggtagatgtggattactatttgcttgcgtctgcaatgagctgcttcagtttcgtgatggtaggatacagatcatcacttgcct

SEQ ID NO: 166587 - DNA, 714 bp, Zea mays
  Clone ID: MRT4577_83507C.1
atcttaaagagaaagataacggcaggtctccagaatcttcaccattgaaagacaaaacaacagcagacgatgattcgtaccaatgtttgcttggttctgcaagcgatgtgccgggtccaataactactccggtgtggttcttgttaatttctttgcctaaccagaaagaagatccacaactgcctcagttatcaaagagttacatgagaatcaaagaccgcagtttgcagatttcttctgtacagaggtacatcatgaagaagctggatctagctaatgaaaacgaggtggagatcatctgccacggcgagccaatctgcccctcgagcacgctgcatgggctgatggaactgtggcatcgtagacagccggcagagcccgtggaggcattggtgggtgcgccagccaaggagttcgtcatagagctgggcttccgtcgccgccgccacccttatttggcgcccggcaccgtcgcggtgcctccggagccctcctgatcagcttgcaagggtggctccgctccgctgtggagcctgagctgcactcttccgtccgtcgtccgctcttgtcctcggtcctccatccccaaccagtttagccgtgtatgataaaacagttttcttttactcatttcagacttttcttttactcattttatgtatacaagcgaggcggcttttgttctacaaaaaaaaaaaaaaaaaatttgcggcc

SEQ ID NO: 166588 - DNA, 1518 bp, Zea mays
  Clone ID: MRT4577_83508C.1
gtctggaggttggaacaaatagggaaggacgggtcattccataagaggctgaacaaatctggactatctacagttgaggatttcccccagaaattgcgcagtgtaagttcgtatgtgggtgtgttattaacttactattattatactttcatttttatgtgtttcagtttatgactattaatgctcttctgtgatagatacttggaagtggtatgtccaacaaaatgtgggatgcccttgtggaacatgcaaagacttgtgtcttaagtgggaaatattacatatactattctgatgagagcagaagtattggtgctattttcaacaacatctatgcattctgtgggttgatttctggcgaacagttctattcatccgagagtcttgatgatagccaaaagctgtttgctgatgcattggtaaagaaagcatatgataactggatgtatgtcattgaatatgatggcaaaggtctattgaaccttaaaccaaagaaaaaggctgcatccactggtcaagctgagacgcatgcttctgcgggtggttcgacttcgtatcaacaacacctctcctcaacgagcatgccagggtcatcaccatcaggtggaactgattccgtagggtatggtgtcgaccaatcagcaacacatctatctcaactccagagttcatccaccaatctccagacgccatacgatgacacattttcgttcttaccacctaacctgctgacagggtctgcaaacgatgccatgggtctggaactgggccagttgcaccaagtaatttctcagggccagccaattcagccagcaaacgtgggatacgttgattggcccaggaaccgcgacagtcagtacgccgacgacttcacagaggacattcgcgtgaagagccaccagatgctcgagagcgaggacatgcagcagctgctgagggtcttcagcatgggtggagcctccgggagtttgtcagacgacacgttcaacttccagccctacatgccctctcccttgcccaaccccgggttcgaaagcgagcgcagccattcatccggcaaagctgtcgtcggctggctcaagatcaaggcggcaatgaggtgggggatcttcgtcaggaagaaagctgccgagagacgggcgcagctcgtcgagctggaggattagcgtcgtcgtggctttacaatggtcaaggctgcgttgtaaattactagtagttatctggcccccacataccctcctgataccccattgaaacaggtttctgaaactgttctgaaatgtacaacgagtagttctgctatcttgtacagattacagaattctccttgcttgcttgtgttagtggtgtaacattgctctgctaagtttgacacatgactggacccgcttgtgtatctttattttttcccttccctagctcttcagtgcagaatataccgttacaatgcgaattaatccaaagattatgtgtacatgttgctttttcaaaaaaaaaaaaaaaaaagcccctagggcc

SEQ ID NO: 166589 - DNA, 350 bp, Zea mays
  Clone ID: MRT4577_83509C.1
cgcgggtcgatacaagcatctagagtgagtcataatacgttaataggagatactcggagtcgccagtacgacacattcctaatctgcactcgtgagtcagaactcgaccaacaatgtcgcggatacgccgtggatgcgcattcgacgccttcacacgtgagctctgggacaccttctagggctttcacgtcggatcaggtagcaggagtagcagcagacagtgctcctcgttcggatgcagcaccagctctgagacagtggtcttaggtggggttcgcgtataatggtacgatacgactgaagcgcaagtgtgcaagagtgaagtgccggtgctaaataaggaggatgtg

SEQ ID NO: 166590 - DNA, 1537 bp, Zea mays
  Clone ID: MRT4577_8350C.1
cacagccatctcatttggtgacatcttgacttaagaggccattgtagtgacttctattgattattgcataccagccaactgcaatgatagtctttttttatcactgttatagtgtgtttattaaagcatccaaacaaaatatagttgccttttatttagaaccactcttggttttattgctggcctggtagctgctaatggtgtcgctctaatatgttaacacttttaatgtgtttcccaaatttcatttgcactatatattactatcctagagtgtctaaagatttaacaatgtgattaactttgtaactatagtgtgggaatgcagtgctgtttgcagtctatgaagtatgaactagtatgtaactatgtagttgcttacttgattttatataacttttagccattgggcaaaattgttgccttactgctatagggttctgctgaaactatctcagggcatctgattttttatgttctctgaggtgcttgctcactaaaaggtcaaattgggtttctcttcttttttggctaaattgttttgtccaggttatagactttctgtcaactatcatcgataatcaagatgtgaccaccattcttcttcagccattgataaaagtgggtttgatcaaccatactatcagtttgttagcaagtgagattgagaagctatcaaatgagggtaacggggacaggtcagattcccttgatttgatccttaatttcgttgaagaattatctgccatagacagctgttcaggagttatgtcagaaagtgatcagctgattcaagtgcttgaaagcatagttaagttacctgataaatttgaggttacaacctattgtgcttctgtggttatcgtattagcaaatattttggcagatggaaagcatattgtgcctaggctctctcatgatttacccttcatggagggcctctttgacattcttgcactggtctctgatgataaccaagcccggaacgctctctggtgtatcttaccatgtttgctggcacaagcacaacagatggatatgaactcttcatctctcgagcagtttgtatctctattgcttggcaggttcacacacattaaagatgatcttgaaagccacagagttgacaaaaaagaggagttgacagctgaggacgcttacttgaagcatggggtatccgcatctctcagggcgatctgctgtgtcatggagaggtggatcgtggagaagtcctccctgggcgaagacgaagacgacgccccaccgactgaaagcaccgttgaagatgctagacatcttctgaactactgccagaattatgacctgtagcttgcttactgcaactttagtggacatagctgacctgtgagtgtgcggttgcaacccgcggctgcctaaccgtagaaagtcgtttaaatactaatgttgctgtagaggacaacactgctacggagtactcagttgccatagaggacataaggcaatttgcatttctgttgcctccagcgtgggatataggggttataccctgccccca

SEQ ID NO: 166591 - DNA, 688 bp, Zea mays
  unsure (1)..(688): unsure at all n locations
  Clone ID: MRT4577_83510C.1
aaccttacctgctcgcccaacggcagccgaaatgcggcaacccgaacccctccactgtctcctcctcctcacggccgcctcgctctgcgggctagcgcgcacggtggcggcgggcgacgacggcggcatgccgctggtcaccgcgatcaccaaggacgcggccacctcgctctacaccgcgccgctccggtacacccgcccgctcgtcctcgacctctccggccccatggtctggaccacctgcgacgggccctcccatgacacgctcgactgcagcagcgacgcctgcacgcgcgcgcaccggttccagccgcccaactgcccgcagaccggctacggcgagcacgacgcccgcaaccgctgcaagtgcaccgcgcacccgcacaaccccgtctccggctacaccgcgtcgggggacgtgacgcgcgtcacgctctccgccaacgccaccgacgggaagaaccctctgtatgaggtgtcgttcaccgccgtggcatcctgcgcgccggcgttgctcctggccaagctgccggcgggggcggccggcgtcgcggggctcgcgcgctcgggcgtcgcgctcccggcgcaggtcgcggacacgcagagggtcggtaacaagttcgcgctctgccttcccagcgccggctccggcgccggcgtggccatcttcggcggnggcccgctcttc

SEQ ID NO: 166592 - DNA, 404 bp, Zea mays
  Clone ID: MRT4577_83511C.1
gagctcactagtcggtggccgcccttttttttttttttttttgttttgtttttttttttttttttttggtgttttttttttttttttttttttttttttttaaaagcctggatttgggaatgatttaattaaggagaagttgggaatcggccacttaaggtggatttacatatttttttgggggggggatttattttttagcaattagcacaagaaagggggcctgaactacaataaaaacaggggggtggggattccccaaaaatttctcggtttgggggttatttttactttacagggggaaggtttggacatataaaaagtatttagcctgatagggggggcaaaaagcttgattaaaacccccaaatagacgggctctcgatctaggtttaggaacatta

SEQ ID NO: 166593 - DNA, 1236 bp, Zea mays
  Clone ID: MRT4577_83512C.1
cggacgcgtccgctactcacgccgtactgtctgattggcaacacctcgtgtacacgtaggcccggagatatggcatcgccggtggccatcggcacggcggtgttccagcgggggccgctccgcgtggaggcgaggcacgtcgactacagccaggtccccagcgtgcccaagccgctcatggtggtcgcccccaccgacgccggcgtgtaccccgtggccgtcttcctgcacggctgcaacacggtcaacagctggtatgagagcctcctgtcgcacgtcgcgtcccacgggttcatcgccgtggcgccccagctctactgcgtgacgctcaacatgaacgacttgaaggacatcgacgccaccaggcaggtcaccgcctggctcgccgacaagcagcaaggcctggcgcacgtgctcgccaacatcctccagctccacggcgtgaggccggacctctccaggctggcgctggccggccacagccgcggcggcgacacggccttcgccgtggcactcgggctcggacccgccgcctcggacgacgacgacaacaacgcagacgcaggcacatcgccggcggcgttgccactcaagttctccgcgctgatcggcgtggaccccgtggcggggctatccaagcaggcgcaggtggagccgaaggtgctgaccttccggccccggtccctcgacccggggatgccggcgctggtcgtcggcacggggctcggccccaagcacgtgggcgggccgccgtgcgcccccgcgggcgtcaaccacgccgagttctacgacgagtgcgcgccgccgcggtaccacgtcgtgctgagggactacgggcacatggacatgctggacgacgacggcgtgccctacgtcatcaacaactgcatgtgcatgaggaacaccaaggacaccaaggacctcgccaggagggccatcgggggagccgtggtggcgttcctcagggccacgctggaggacgacgacgaggatctcaaggtcgtgctcgagaaccgccctggcctctcgccggcggtgctggacccagttgggcatgacttggcttgaatagcaaggctggcggagtgtgctacattgtcggcgctccttatttacacacacataccacatgtttcttttccattttgtcctcgatcgtgtcatgtcccacttgccacaactgtccagtccgctggtgtccaatgaatagcaaggatgtgacactattcgcgcgct

SEQ ID NO: 166594 - DNA, 270 bp, Zea mays
  Clone ID: MRT4577_83513C.1
gtccctaagcggcgccttttttttttttttttttgtgaaaacaacctactttgatggagttgaacatcgaataaaatatcacggtttaggccgaaaagttcaccaaccaggcaccctctgtatacatttcttgatcagcttgtttggcaacgtgctctaccttgagatggcagctatgaaatcttgtggagtggccatattcgcaccaggaattgtctggctgttgcgtcacctctcattatgctggtaccggctgctcttaaaattgct

SEQ ID NO: 166595 - DNA, 417 bp, Zea mays
  Clone ID: MRT4577_83514C.1
cgtacgctggaatgtactatctacgcacacgagctgctgctgatgcaatcaagtttaccgtcgatagcacacttctaaaggagaatgggaatgggatgaatgatggaaagcccacagaggacgacgtagaagctaaaatggcacaaatggtctgttcttttaacaaccgggaagagtgtctggcgtgtggaagctagattggagctccatctggacactgcacttatttgtgaccacaggccacagcattatatgccgccggctgatgactggagtccaataaccagaacgaaatctgatgtaggatgaggtagaaactccattcccttcccataatgggaacaataccttgtctctcaaatactgttaggactaagtttggtaactctatttttttcaagaagattcatatttttt

SEQ ID NO: 166596 - DNA, 331 bp, Zea mays
  unsure (1)..(331): unsure at all n locations
  Clone ID: MRT4577_83515C.1
attataaaaaaatcccggggatgatgatttggggccaatgaggggggccacagggaacccaacccactgaagaaaaacccctacaaaaccccccacccccggaggggtttcccaaccccctagattgggggggggcccccttccccccccctggtttatttccgacaattaaatcccaacgagcatagccccgaccgaaccgacccatnggatgcctaagggggccccccccccctagagggggcaaccccggtctacaactaaaaaacccaaaccaacttcaaatcccccgacccaaaggtgggaggggacccatttttattcccccggc

SEQ ID NO: 166597 - DNA, 504 bp, Zea mays
  Clone ID: MRT4577_83516C.1
ttaacttagtttttcttcctttagcataatgttattaaatcctgagtgaacctgcccgcagacatatcccctcacgcgacctgagacgtggtctcccattccggttatggtgggtacaagtgcggtcacttgcaaggataaaaactcgattcgaatcgtctgcttctcgcagctaatgagactgcttgatccattgtaatcgggtaagtctagctgagtattagtatactcagccttgcttgtggcataatttttacaggttctctggaggacatggttgctggagtgacttggccgtccatcttgccaccgggttggactgtcgagtgggaccctgcctcggctgaggaggagcatgaggagtgatgggacaggcttccccatctctctgtttaattaccgttagttttattccgctgcacttcgaacaatgatgactacttttgcaaaactccgatggtgatgtaataatttaatactcttacacgtatggttttatgcttt

SEQ ID NO: 166598 - DNA, 2573 bp, Zea mays
  Clone ID: MRT4577_83517C.1
caaaaatttccagccgccactctcttctccttctctcccacgcaccttcttcatccttgcgtagggcggcagcagccaccagcgagccctgctccacgcgccccagccatggcgcccttcttccccagcgcagggagctcggctcccttcctcccagggcgctggcctctctcccatggtcggccctctgctccggcgctcggcatccctgcagcaggcgcccttcttcctccctggctcccacggcagcaagcagccagcagggagcaaggccagcccccatggcgcccttcctcctcggctcaatggtgtggccgagcagcagcctcttctctctgtttcctatgcgtgcgcaggggcagaaactccatggccgccgagctccattcccccaaggagcagctccctccatggcgccatttctcccagccgacgccctcattcctccctgcgcagcgccccttttcttctacctcttgccggcgcccagaaattccagcagcgagcagcgcacgtcctgctgtccatggcgtgcagcaaacgtggagctcagctccacctctccccatggctgcgagctcccttccctagctgctcggctccccctcccatggaaaccagcagcctcatctcctctccccaaccgatgcccttttttttccacctccggcagcaagctgcgaactccatttctccatggccgcgagcttttccttgctgcgactgtctcccaaggacagcgcgcagcagcctccccgtggccatggtctgcaacaagaagtcgcgcgctacatgttcgatgttttgcgcagcagctccgatgtctccgcgcggctcgctgttttgtgttgcgcagtgagcagcacgccgtgatgcccgtcggtggtttgctgtttttgcgcagccccgtcgtcgtcgttgttcacccccggtgaggccacgtaaatccttgttcgattccgcatcggtattaatttcctatgattaattgtgtgtgtgtgctgttttgttgtgtttggtggaggagagaaaccccgtgttttgcgaggagaaggcaagccgctcaacgctcgtcgatggcgaagctatgcacaaatcggaatcaccgtcgttcttgcaaacgccgtttgggtttgtttatggtgagccgatgcaggaccgagaggtgacgaccgtgcaagtgatgtggtgccacccacaagatgcagtcggtggacgacccaaggaaggatggacataactagtggatgctcgccaagcgagtgccacccaacaaacactatttaagtgttaaattaaaggcaaaagccccggttttatgcataatcgtttatatatgctattttactacacttaatgtttgtaggcttgtactgtgcacttaagtgtaggagttgcctgaaaccctagttgcatgaactcaggattcccttttgagatggatactagtatgctaggtcgagtagctgctttactaattaaggatctcggtaaaagtcgagtgatttttttagcactcgcgcgaggtcaggaattggttgtatccattttgatatcaaactgatggtggtctgtggacaacggtccatggggatgcgttgtctacgagatgaaattggaataaggattaacgtgcggatacctgtgtcaagcgtttgaacgtactaaacacatgtcgagaaatatggtaaatcggtaagcctagtacctgagtgaacctgcccgcagattgccctcctcacacgacctgagacgtggtctcccattccggttatggtgggtacaagtgcggtcactgcacgacgacagtcggggtcagtgaggcattgtacgccaaggcggtgagcccctttctgttgccagggaatcgatggggacggttgacgtgtgtggggacggagtgcccctgcatgtcgtgtgtttaggtttaccttgcaaggataaaaactcgattcgaatcgtctgcttctcgcagctaatgagactgcttgatccattgtactgcattgagtaacaagtggaaatatgatgagttgatataagatgttgattgctaataatgtttgctactatgtatgagtagatagtacacttttagccttaagagagtcacacttaatttgacaaagttaaaaacttgatttagaaactcagctagtgcttttggcaaccaaaccccacagccaaacagctgcatgtctagaggtagaggagtagactcctcacaccgggtaagtctagctgagtattagtatactcagccttgcttgtggcataatttttcaggatctctggaggacatggttgctggagtgacttggccgtccatcttgccaccgggttggactgtcgagtgggaccctacctcggctgaggaggagcatgaggagtgatgggacaggcttccccatctctctgtttatttaccgttagttttattccactgcacttcgaacaatgatgactacttttgcaaaactccgatggtgatgtaataatttaatactcttacatgcatggttttatgctttattgtatttgctctgtgactcaccatcgagtgagattgtggt

SEQ ID NO: 166599 - DNA, 331 bp, Zea mays
  Clone ID: MRT4577_83518C.1
ctcttctcttatttcttattttgggggggttttttttctaattttcattgtttttattttttggaagcacacaaagccggtttataaaagagggtacttgatcacccaatataccccctttggaaacatattaaattacagcggggggaactaaaaaatttcgacttaccccagggttttggacctactaatgaaagctaggggcctagataatacccccgacttgggtgacaaccggggaccgtggttgagacgtccttcttttcacctgggggccggggccaccaacttgtttaaccccacccctaccgatatgggttggaagacgccc

SEQ ID NO: 166600 - DNA, 417 bp, Zea mays
  Clone ID: MRT4577_83519C.1
attcggctcgagacccaacccatcaccttttgtttgtgacggcccgatccaagcatggtgggggggcgccatttctgataggcaggggattgcccatgtgcggacgcctggcaagagacggctccgtcctgtgcacacaatccggttcggacactcaacagctacccgatgacatccgtgatatacagaccatacgttttctgcaccctgaccattatccgaccatgtggcaaatcggtcacccgtggaaggaaggtctggctactcatctcggggcttgcaagatagcggtgcgatggaacatcaaccgccgcttcaaatatgcactgctgatacacggtctgatggttaagacgcgtccatagctgctgcctcttaagagcgggacccaacatgctgtagctagtgattcttctc

SEQ ID NO: 166601 - DNA, 448 bp, Zea mays
  Clone ID: MRT4577_8351C.1
aggccgcgggggggacccccaaaaaaaaccttattgggggggaaaaaaaagagcgagcaaacccttgggcctcaaatttggaaaactgggctacgcgcgcaaatgaaagtcccttcaccgggcccttggcttttttaattaaaaaaaaataaagggccggaaaaataaaaacccaggggggggttaaaaacccttggcctgtgaaaggggttttaaagggggggaggttttaaaggggggaaaaacattggggaaaaaggggagggccccctgaaaaactccttttggaaaggttttcccaaaaaaaccggtggaggccaaattcaaaccttctcaaaagggggaagagaaaaacaagcttttcttttggggcccccaaaattaattcaaggggcggcggtttacaacggcggggaggggaaaaacctgggggtccccaaataaaaac

SEQ ID NO: 166602 - DNA, 555 bp, Zea mays
  unsure (1)..(555): unsure at all n locations
  Clone ID: MRT4577_83520C.1
cgaggccggccgggattctccacctgtgtttatgtccccctgcatttccttgtccggtgccacctcacgtctcctcacctagcaaagtagcggtcattttaatagtagcatttccacatcaagctctctaatctgcgcttctcttaattaatttattcgcccacaggcggttgctggatcctttggcgttccccatccggccaagaatcctgcaagagcctgcttggagttggagccggccaaacctgctgccgtcgacgtctcgggcgaggcagccttcagcatcagtctccttgacgaggcaagcaggccatgatgagcttcaagggacacgaggggttcggtcaggtgtccggagccgggatgagccaggcctcccatggcgccgcgcctgccggagccccgctgccgtgggtgggcgggggcccagctgctgtccggcgagccggcgccctggtcccccggaggaggngccccgnnacgcccagnnccaggncgggccgggggcctctcagggcacgccggatccagcgccggccaaaggagggacacctg

SEQ ID NO: 166603 - DNA, 712 bp, Zea mays
  unsure (1)..(712): unsure at all n locations
  Clone ID: MRT4577_83521C.1
cctcgaggccggccgggaaaataggaaccgagcaaaggtctgggcgagctaccaataaactaccatctccacaaacaggccagcacgtagctatatgccagaactgacctagctagtagaggatcgatcgcagatggtgtttcctgccatcctccccaaggtggccgcacgatggctcttcacgttctaccgcgccgccagaaagctcaggcgccacgccttccagctctactaccgcaacactaccgccgccaagccgtcgtccgccgccgccgccgccgtctcgcagcaacagaccggggccgccgccactgccgccttgaagaccggggccgccatccctgacgccgccggccggaccgttgtgtgcgagatgcacggcgccctgctgcgctccaccgcgctcttcccctacttcatgctcagccgcctgtccgagctgatcgcgcccatcaagacggtgcggctgacgcgcgaccgcgcgcgggacgccgagaccatgccagtgggcctggcgcagggnaaacctcgcggtctgccccgagggaaccacctgccgcgagccttacctcctgcgtttcagcccggctgttcgcggagctcgcggacgacatggagccccgtggcgctggacgctcaggtgacgacgctctacggcaccacggcgagcggacacaagtggtcgaaccctgtggcgttcttcgccaacccg

SEQ ID NO: 166604 - DNA, 1765 bp, Zea mays
  Clone ID: MRT4577_83522C.1
cccagtctcttcatctgcagcgacaaaaataggaaccgagcaaaggtctggcgagctaccaataaactaccatctccacaaacaggccagcacgtagctatatgccagaactgacctagctagtagaggatcgatcgcagatggtgtttcctgccatcctccccaaggtggccgcacgatggctcttcacgttctaccgcgccgccagaaagctcaggcgccacgccttccagctctactaccgcaacactaccgccggcgtccgggtgatggcgttcgtcaccttcgcggggctcaggcccagggacgtggacctcgtggcccgcgccgtcctgcccaagcactacatggagcagctcaacgcgctggtgtacggcagcctctggctcccggccaggaggaaggtggcggtgaccagcgcgccgcgggtcatattttatacccgagtggttcctcaaggagtacatggccgccgacgcggtggtcggtctcgagctgcagcacgtcaacgtcggccgccgccggtacttcactgggttgctgtcgtcgtccggtcacgcgacgggaccggagctgaggcagaaggcgatcagggaggcgttgttaggcgccgaggacgaccccattgccgtcgtgggcatcatcaacgactccagcccgctcgacgacgagctcttcgtcccctactgcaaggaagtttacgtcgtgagcagagagagcgcaaagaacgacaagctctcgcgggtcaaatacccgaagccgctcatcttccacgacgggcgccttgccttcctgcccacccccgccgccatgcttgccttcttcctcttccttccgctcggcgtcatcctctccgtcatccgcattaacatcggcatcgttctcccttacaaggtcaacttcgtggccgccgcgatcttcggcgtccgcttccgcgcctctggcctccgcgccccgccggcggacggcgagcagcgcaggggcgtcctctacgtgtgcacgcaccggacgctggtcgaccccatcatgctcaccacggcgctgcagaagcccgtgcccgccttgacgtacagcctcagccggctgtccgagctgatcgcgcccatcaagacggtgcggctgacgcgtgaccgcgcgcgggacgccgacaccatgtccaggctgctgaagcagggcgacctcgcggtctgccccgagggaaccacctgccgcgagccttacctcctgcgcttcagcccgctgttcgcggagctcgcggacgacatggagcccgtggcgctggacgctcaggtgacgacgctctacggcaccacggcgagcggacacaagtggctcgaccctgtggcgttcttcgccaacccggtgccctcgtaccgggtggagtttctgggtgccgttccgcgggagtggacgcgcgccgggggcaggacaggcgtcgaggtggctaactgggtgcagcggcggctgggccaggctctggacttcgagtgcaccgggctgtctcgccgcgacaagtacatgatgctcgccggtaacgatggcgtggtcgccaagtagagagagcgcccggcgcgcgctgcaacagctgggtgtgtttttattatgcatacatgctgggtaaattattgtcgaaagctagttcgttactgtaatttgcatggcagtaatggatcttttggttccgctgtgtagagaaaatttgattagctgcaaaactaatcaaatactagatgcttggatttaaattcaaatcaaaatagtatat

SEQ ID NO: 166605 - DNA, 2184 bp, Zea mays
  Clone ID: MRT4577_83523C.1
gatgttaatgcggatgacgaagaggatgacgccgagcggaaggaagaggaagaacattggtacgacgccgggccggccgggatgccctccactgcagcctgcaccacacggcccctggcactgccaacctcgtcgcccacccaagtctcttcatttgcagcgacaaaaataggaacggagcaaaggtccggcgagccagagcaatagttaacaaccatctccacaaacaggccaccacgtagctacgtatatgccggaactgaactgagctgagaaagctcaggcgtgaactgaactagatggtgtttcctgccatcctccccaaggtggccgcgcgatggctcttcacgttctaccgcgccgccaggaagctcaggcgccacgccttccagctctacaaccgtaggaccgccgccaagccgccgtcgttctccgtctcccagcagcaggccggtgccgccaccttcaagaccgacgccgccatccctgacgccgccggccggaccgtcgtctgtgacgtgcacggagccctgctgcgctcctccgcgctcttcccctacttcatggtcgtggcctacgagggcggcagccttctgcgcgccatgctgctgctctgcgccttccctctcgtctgggcactcggggagcgccgcggcggcgctggcgccgtccgggtgatggcgttcgtcaccttcgcggggctcaggcccagggacatggacctcgtggcccgcgccgtcctgcccaagcactacatggagcagctcaacgcgctggtgtacggcagcctgtggctcccggccaggaggaaggtggcggtgaccggcgcgccgcgggtgatgtccgagtggttcctcaaggagtacctggccgccgacgcagtggtcggcctcgagctgcagctcgtcacggtcggccgctgccggtacttcacgggattgctgtcaggccccgcgacggggccggagctgaggcacacacaagtggctcgaccctgtggcgttcttcgccaacccggtgccctcgtaccgggtggagtttctgggtgccgttccgcgggagtgcacgcgcgccgggggcaggacaggcgtcgaggtggctaactgggtgcagcggcggctgggccaggctctggacttcgagtgcaccgggctgtctcgggcgccttgctacactgcccacccccgccgccatgcttgccttcttcctcttccttccgctcggcgtcatcctctccgtcatccgcattaacatcggcatcgttctcccttacaaggtcaacttcgtggccggcgcgagtcttcggcgtccgcttccgcgcctctgggctccgcgccccgccgtctgacggcgagcagcgcaggggcgtcctctacgtgtgcacgcaccggacgctggtcgaccctatcatgctcaccacggccctgcagaagcccgtgcccgccttgacgtacagcctcagccggctgtccgagctgatcgcgcccatcaagacggtgcggctgacgcgcgaccgcgcgcgggacgccgacaccatgtccaggctgctgaagcaaggcgacctcgcggtctgccccgagggcaccacctgccgcgagccgtacctgctgcgcttcagcccgctgttcgcggagctcgcggacgacatggagcccgtggccctggacgctcaggtgacgatgctctacggcacgacggcgagtggccacaagtggctggatcccgtcgcgttcttcgccaacccggtgccatcgtaccgggtggagttcctggggaccgtgccgcgggagtggacgcgcgccgggggcaggaccggcgtggaggtggccaactgggtgcagcggcgactgggcgaggcactggagttcgagtgcaccgagctcactcgccgtgacaagtacatgatgctggcgggcaacgacggcgtggtcgccaagtagagagcgcctgccgtgcatgcgctgcaacagttgggtgtggtttttattatgcatatacatgctgggtatattattgtcaaaagctagttactgtattttgcatggcagcaatggatcctttggttccgttgtgtaaagaaaatttgattagctgcaaaactaaacaaatactagatgcttgaatttaacttcaaatcaaaatagtatatatattttgtccaaaaaaaaaaaaaaaaaagcggcc

SEQ ID NO: 166606 - DNA, 611 bp, Zea mays
  Clone ID: MRT4577_83524C.1
ggaccctcgaggccggccgggggaccctatattactcttaatcgccaccgctctctccaacgagttcaacaaggagctcctgcagcgggagagcccggctccccagcccgtgctgtagtggccgctgtgcgagctctggcccgactagtgcgcagttgccccccgcacttgccagcgccgcttctcctgggtgtggtacgatgcgaccgccatgcgaggtaccccgaacaacctctgcgccggctaccttcctctcccgcaagggacgcctggcgactgtcaccgccacgagatctgtaagcgcctccagaggatatggatctcctacgcatccgctaccgcctcaagctctgcttgctccactaacgccgaagaacccagacgcactgcctgcgggtccactcaccttgacgtcctgtcccaggctgcgatcaacatacattgtccgcatccatgtgacatgggatactgaggtcatcgaactctgattgtttgatgtacacctgagcgttgctactctgaagcttgtcaagaacgtcgcactggagcttctgatgatacgccccgatctcacaagcacaatggacaagctcgtgacatataagatgata

SEQ ID NO: 166607 - DNA, 778 bp, Zea mays
  unsure (1)..(778): unsure at all n locations
  Clone ID: MRT4577_83525C.1
gccggccggcctcggggagactgcaccacacggcacctggcactgccagcctcgtcgcgcacggcctatatatccccagtctcttcatctgcagcgacaaaaataggaaccgagcaaaggtctggcgagctaccaataaactaccatctccacaaacaggccagcacgtagctatatgccagaactgacctagctagtagaggatcgatcgcagatggtgtttcctgccatcctccccaaggtggccgcacgatggctcttcacgttctaccgcgccgccagaaagctcaggcgccacgccttccagctctactaccgcaacactaccgccgccaagccgtcgtccgccgccgccgccgccgtctcgcagcaacagaccggggccgccgccactgccgccttgaagaccggggccgccatccctgacgccgccggccggaccgttgtgtgcgagatgcacggcgccctgctgcgctccaccgcgctcttcccctacttcatgctcgtggcctgcgagggcggcagcctcgtccgcgccatgctgctgctctgcgccttccccctcgtctgggcgctcggggagcgccgcggcgccggcgtccggggtgatggcgttcgtcaccttcgcggggctcaggcccagggacgtggacctcgtggcccgcgccgtcctgcccaagcactacatggagcagctcagcgcgctggcgtacggcagcctctggctccgnnncagagggaangtggcggtgaccagcgcgccgcgggtcatgtccga

SEQ ID NO: 166608 - DNA, 1879 bp, Zea mays
  Clone ID: MRT4577_83526C.1
caggcacccccggtgctcgcgacgtcgcgatcccattgcccatccccagatctcaacccgaacctcccagccgcgccgccctgatggcctacaccacctcgccgtcgacatcgacgtcgacggcagcggcggtggcctgggccttcgctgccgccacctgcgtgaaactcctcctcgtccccacctaccgttccaccgacttcgacgttcaccggtactggctcgccctcacgcacgcgctccccgtgcggcagtggtacaccgacacctcctctcagtggacgctcgattacccgcccttcttcgcttacttctcccgcctcctctccctccctgcgccgctcgtcgacgccaccctcgtttcaatccccgtgcgtgacgcgacgcccttcgcgcatctcatctacctccgcctcactgttgctttctccgacctcctcctcctcggatccgtcctcttactggcgagggacgcgcagcggaaacagcggccgttcctcgctctcgctcttgtcgtatggtcgccggcgctgttagctgtcgaccacgtccactttcagtacaatggattcctcatcgggttgctgctgctttcgctgcacttcctcgagcaggggtgggatcttattgggggagtcgtgttcgcatgcttgctgtgctcgaagcacctgttcctcgtggcagcgccggtgtactttatgtatttgttccggcattattgctgtggccggggtgtcgtgaaggggctgggaaggctcgtgctgatgggttctggagtggctgctgtttttgccgcagcatttgtgcccttcgtgtactatggtcagatgcaacaactaattagccgattgtttccctttgggcgaggcctatgccatgcttactgggcgccaaacttttgggtattctatattatacttgacaagattcttgcatttcttcttagaagactaggctttaatattgccatacctgaagcttcgtttactgggggacttgttggtgattcgtctccttttgctgttcttccaaaggtcaccccaattgctacattcttattggtcattcttgccatggctccttgccttatcaaagcattctctaatcctcaaccaaagcatattattagatgggtctcgtatgcatgcacatgtgggtttatgtttggatggcatgtacatgagaaggcatcacttcatttcactatcccacttgccctaatcgccatggatagcttgaacgatgccaggcattactttttgttgtccatagtttcatgctactctctattcccgttgctgtttgagaaccaagagtacctgataaaggtgctgctgctgctgacctacgctgccctcatgtgggtaggctttacggtccattttgctgcaaagtctgacctggaaggaaagaaaataagtcggtcaggcagcacagtgaagaagaatggcatcattggatggattggtttaagctatcttttgggaattgcaggcatagaattatggtctcaagtatttcaccatcatgtattcggcgataggctccccttcctacctcttataatggtgtcattctattgtggccttggaatgatgtactcctgggtgtggcagcttgtacatatagtccgacacacatgatttgattaccggtcatcagtggaagcattctcttgcctttcttgggttgaggctaatcgcgatgacaatgctgcctggaccgatgcagcggccaacacagtcatgtctgggcacagcattttctttttagctgtcgaagtcattgtctgtgtgcaagaaatttttagagatgtgtgaccgtgttatgatgtaattaatgtcagtttatataagtaacagaaaatctgcttgtatca

SEQ ID NO: 166609 - DNA, 323 bp, Zea mays
  Clone ID: MRT4577_83527C.1
ttttacacgtacggcctctgttgctggtatcgggggctgtataggagttatggactcatataatgcaagcatcaccagagcattaggggagtgggactcgatgataactagtggtatgtatcgtcgacgcgactactaggtatgctcactgccagaagctgctgaacgtcacatgctctacacatagaccacgtgctaaatgtgcactagcaggtaactaatggactaggtatgatatcctgatatattgctgcctcttataactgaatgataagatgctacaggacagtgcgttactccattgaaagtatatcgatggctat

SEQ ID NO: 166610 - DNA, 318 bp, Zea mays
  Clone ID: MRT4577_83528C.1
tttcttctttttttcccaaaaaaggggtttttaataccttattttgggggggaaaaaccatttgttgaatctcatacacatagccgggtgtacccctgttcttaacaataattaaaaaatatttttttttttattgaaagccttgtggggggccttggggggacccgtattttggtattgagtattgggggcacccccaccacacatttcactttattcataagctgggatgggggcttaaacctgagacttcgagtccaaaaggagatgaaatgtggtcggggagtacgagttcaatttaccccccttttttttgcc

SEQ ID NO: 166611 - DNA, 984 bp, Zea mays
  Clone ID: MRT4577_83529C.1
ttgggtacctcgaggccggccggggtcagtttcccggctccctcgctcacgcgccgcggcatcactccggccggctggccagtcgcccactcttcccacccacaccgccgctgcctttccttccacggcgaactctccgcgggcgacgtccagactggcaacggcattccaataaaagaatgcgcccctgctctggccaactctctccacctgcattccccgttccgctaaaccctagccgcctccggcgcgtagtagattcgccatcagagacgacgctcggcggccctgaggagggatgacctacgtcaacccagacccccagccgctcgccgccgctacggcggatgattccgcaacccagcatcaagctgcggtgaccgccgcgccgcagtcgacgcgaggcgctctcgggttttttgcgacggcggagccgaagcagggcgcgaccatggtggcgccatcgtccccgcagggcgttcccgggctcgcgccacagcaaggtgctccggtgatggcgccgccgcagggtgtaaccatgatggctccgcaacagcagcatttcgcgcctgcgatggtgcctggctcccagcaagttatgcagatgctccttcaagccctccaagcccaagcccaagcccaagcccaggccatggttgctcaccaacccgctcaaggcatggcgccatcgcaatgtttgcccatgtgccatccgtccacgatggagatgcagcaagctcaagctggacacgtgacggcaccaccacctgtgccactcggcccttcattgatgatgcagcagcagcagcagcaaccttcacaagctgatacagtgataatggcacaaccgcctctgccactcgaccctccattgatgcagcagcagcagcagccttcacaagctgatacagtgataatggcacaaccgcctctgcctcttggctctgcgatgcttcagcaacagccttcacaggggggcacgat

SEQ ID NO: 166612 - DNA, 105 bp, Zea mays
  Clone ID: MRT4577_8352C.1
gagaacaattggcagggttaccatagtggcaccttcggaattgcacatgattcacggactcgctaacatctacgtcaatatgacgggcaccggaatgatgggcag

SEQ ID NO: 166613 - DNA, 334 bp, Zea mays
  Clone ID: MRT4577_83530C.1
ttttactaaccataaagggaggaagaaggcggttacaatcctccataccgggttgtccaagaaactgaaaaaacgctaccatgcacgttccggtgtgtttcagcaagagtggctgaatgagcatccaagcagagcttgcctctgctccttacaaaaaaacaagtggtcttttacagatggccaatttccacatcaccaccactcttacagagtaccaaccttccaatcgggctatgtatggtgtgttcattgtatcagtttgtttaagcttttgctgcatgctgaatttagattccgcttgtataaaacgtaccctaaataagcatacaagttt

SEQ ID NO: 166614 - DNA, 417 bp, Zea mays
  Clone ID: MRT4577_83531C.1
aaagcacaacaaggggatcgatgagggttattcactctttaattatcattattattattcatagccaagcacgggcatccaatacacacattctggtcagtacagtagtcttaccctactacctttgttatttctgcacagagtgctcggaaacaatacatgcacgcttgatcacttaatcatcgttctccaaatgtgcaaacaaaacgtgcccttttgatcggtttagctaccagtttttcattcacaagaaaggggaagccccacctgtcccgaaaggaatgggcgggcagatcgggttggtgccggcgcctgaaagtatgtaccttatatctctcagacattatcataaattctcctaacccgccaacatgttcgcggacttgtccaaggactatttgatcataccactatctt

SEQ ID NO: 166615 - DNA, 295 bp, Zea mays
  Clone ID: MRT4577_83532C.1
ggataacatgcccacccttccacattgggtatggcatatatattctgtaccaagtactggagaaaaagcatcaagttcttagcccttgtagcttctactctagtttcccatcctctctctgtggaggccaaaccaactctttgccagcagccacaacatgcattgacagcggcacagtgagatataactgatgggctttgaacctggttggccagggaagctgtaggggtggatagagctggctttccttctgggctgtctccatctgaccctaccccttccatgtcccacccca

SEQ ID NO: 166616 - DNA, 601 bp, Zea mays
  Clone ID: MRT4577_83533C.1
gccggcgccgtcggcccgctccccaccaccacagaccggtcgcacgcgccggagtagagcaccctcccgtcggcccctagagcgagcgcgttgaccgccgacctgtggcgctccatcgtctgcacgagcacgagcacgtggctgtgcctgtgcctccgctccgggtgccgcctccacgccttgatcttgttgtcggccgagcccgtgtacacgtggccgtcgggcgacaccgccagcgcgttgatggcgtcgtcgtgcgcgggcgcgacggactccacgcaccggaaccccggcagccgccacaccctgaggctccggtcccacgacgccgagtacaggagcgcgccgtccggggacaccgcgagcgcggcgaccgcgtccacgtggtgcacccaggtgcgccaccggtgccgccggacctgcacgtagctccaggggagcaggaaggtccgcagccggtccacgcaggtcggcagcacggcgcgcaggacgaggctcggggtcccgtccttcctgccgctcccggtccgccacgccatgatcttgccgtcctggtgggagctgaggaggagaccgtgtccgttgctgcccgccgtggcga

SEQ ID NO: 166617 - DNA, 315 bp, Zea mays
  unsure (1)..(315): unsure at all n locations
  Clone ID: MRT4577_83534C.1
tccgtcctngtctacttaatgtcnnncttgtttggcttcaaatananntctggtccttgtgccgccctgggtgtnnaaaaaaaaaaggaaagaggggcggctctgctcnttagagganntccatagctttatcgtatcgcgtgtctatgcgatctgtcatnnngctcttctaatagtgtcancctannaattcaattcaaactggccgnntcgttttacaaacccgtcgtgacctntnggaaaactctctggcgttactctcaacttannatcgcctttgcagcacaaatcccnnccttttgcccagggctggcg

SEQ ID NO: 166618 - DNA, 593 bp, Zea mays
  Clone ID: MRT4577_83535C.1
ccggccgggcgtatctctcctctgctgccatgaccgccccttccttcatggccgtgcccgctcgcataacggaaagaacagtaggctctcacaccgagagggcctctctccgcaaagatcactgtcaccaactgcaccgagcacagtcaccagaaacctgcttaccatgggatcacccctggtccaatacgtgttgctgttgctgcctcaaggatgtctctgattcgaggccagacataccacctgaatgacggaatacgccataaccgacagaaacaccaccggctaactacactacctactggtcaaggaagaacaatcgacaatatgaagccatccctgctagatatctaataatgagaaacaaaacgccccatacaagatcgactcctatcacccgcaccgattcgtggatatacaatttcatactgctagacgaacacaagagcaactatgttcggtaactatcacagtcaactaaagctaggtatctcattccatgcatctcgatctgtatgtactccgcccaatcgatggatgatgcatccatctctactagctgtcctcacgtgtacaacaattaatgcctcaca

SEQ ID NO: 166619 - DNA, 204 bp, Zea mays
  Clone ID: MRT4577_83536C.1
acacgcacgtatgctagtcctctaagcttccgccctctcctttttaaatattcatatatttatatatattttttttaaacaaacaaagccaaaaaatatcattttaaatccatctaaaattatccaaattataacatattatctctaattcaaacattataccataaatgaaaaatcaacatagtgctatattaaaataatgga

SEQ ID NO: 166620 - DNA, 202 bp, Zea mays
  Clone ID: MRT4577_83537C.1
ttgggtacctcgagggcggccgggacatttctccgtaaaagtacctagagtgctattgagcgacgaattatcactggctgacgtccgtgtgtacgctgatgagagaacgctacacttgagcgagcacagagcgcccgttcctatccacctttcatgtgttgcgtgttcgcggcacatgcgacgggtgtctcgctgtctgagg

SEQ ID NO: 166621 - DNA, 1693 bp, Zea mays
  Clone ID: MRT4577_83538C.1
attgggtacctcgaggccggccgggacaccaaccaccttccccatcatcagcaatctctctctctcactctctcacggtcgattgattagtccaaagctggacggagaccttgaggaatccatcccgaactgaacggcattattctttctcgccactgttattgttctctctctctctccaccttccaacagaattcacaggaaggtggttggggttgggcggaccagcaaaggcacatgggccgctccttcagtacagcggcgcctgttcggcctgctgcgctcgcggcgccgcccctcctcctcttcctcctctcgctcggcctcctggaagctgcggctgccaatgtcggggactcctgctccacgagcgcggactgcggcgccggccagtggtgcttcgactgcgagcccgagctctccggctcccactgcgtccgctccgccgccaccaaccccttccagctcattaacaactcgctgccgttcaacaagtacgcctacctcacgacgcacaacgcgtacgccatcgtcggggagccctcgcacaccgggatcccgcgcgtcaccttcgacaaccaggaggacacggtcaccgaccagctgaataacggagtccgggcgctgatgctcgacacgtacgacttcaagggagacgtgtggctgtgccattcgagcggagggaaatgcaacgacttcaccgcgttcgaacctgcactggacactttcaaggagatcgaggcgttccttgcagcaaacccgtccgaaatcgtcacgctgatcctagaggactacgtccacgcgccgaacgggctgacgaacgtgttcaacgcgtctggcctgctcaagtactgggttcccggtgtcgaggatgccgccgagcggccaggactggcctctcgtcagcgacatggtcgcgaccaaccagcgcctcctcgtgttcacctccgtcagctccaaacagagcgcggaaggcatcgcttaccagtggaacttcatggtcgagaataactacggtgatgacgggatggatgccgggaaatgctcgaaccgtgccgagtcggctcctctcaacgacaacaccaagtcgctggtcctcatgaactacttcccctcggtccctgccaagtttacagcgtgcctgcagcactcccagagcctcgttgacatggtgagtacgtgctacggcgcggcggggaaccgatgggctaattttgtcgcggttgattactacaagagaagcgacggaggcggggccttccaggccacggacttgctcaatggtagactgttatgcgggtgccaggacatcagggcatgctcgcaaggttccggtgtagtatgttctgcataagtccataagaaatagagatcaatttgattggagtggcgaaagaagtcagagaggacagagggattgaaagctgtgagctccttaagccggcgtctacgtctttgtataggacagggatcaccgactcaccgttgccttggttcgcaagcttaaagataaagaagtcttgatttagttgttatattttttttatctttgtctaaaccaaatcagtatatctcttatctttagaaagtacagctagtacagctaatgttatgtatacagagagaataccatgtgtcattggaatctaaactatactattttactgcgaaaaaaaaaaaaaaaaaagcggcc

SEQ ID NO: 166622 - DNA, 526 bp, Zea mays
  Clone ID: MRT4577_83539C.1
ccggccggagacacacaaagcagcatcttttagtaacacagttgtatcgacgtacgatgggatccctcgctaataacatcatggtcgtgggcgccgtccttgcggcgcttgtcgtcggagggtcatgagatgcccccgaaggtgccgccaggccccaacatcaataccaaatacatacggttagctggtcaccaccagccgaacctggtattccccagcatacgggggcggccgctcctgactagtgcgatgcgtgcggaatcaacaaaaggaacctgacaccctacaccaggatgacgccaagaggcaatgttgacatcttcaaagaccatcaaggatgtggttcatggtaacaggtgagatgtgaagaaaaacctgaatgctcccgtaatccaagaacggcggttatctcacacatgaactaccaggctatcgctccctaacacttctgaattgaaaggctaagacttcggatacctggcaaaacccgggctcaaccatcaacatccccactgtggaattatgg

SEQ ID NO: 166623 - DNA, 373 bp, Zea mays
  Clone ID: MRT4577_8353C.1
catacattcctgcacgcgaagccttcgcgcgtggtcacgatctccctagaacactagagcgtcggagggtccttgtggtgagtgtccaacgcctatagtctaacgaagtactgaatcctgcttgccaagatgcctaatagcgttggctactgccctctgctgaatgacactgatcatggcctaaccatatgcctgctaggcttcacctcgaacagagtcaaagagtgtcagtcatgggaacgcgtgccactggaactacgttcatggtgaaccaataccgatatcatgaacttactaggacgcacatgcacctgccgaatatagtgtccatatgtgcgtttgaaaggccaggcgcttgatctgatacgctttt

SEQ ID NO: 166624 - DNA, 292 bp, Zea mays
  Clone ID: MRT4577_83540C.1
aaaaacccggccaatctccatcatattaatggttcgctgaaactttcagagaattttattttttaacaggcacatgccataagcatccgaatggtcaagggaaaaaacaactcaaaatgttgtttttaccggaccattttctttggggaaccccggccctgaccccctagggtcattatttttgagggcatggggcatttggcaaagaaacttttgtttggaaacccccgtcacaaataccttttaacaattgttttaccatattcccaacttgggggtcaacccgggggtt

SEQ ID NO: 166625 - DNA, 662 bp, Zea mays
  unsure (1)..(662): unsure at all n locations
  Clone ID: MRT4577_83541C.1
catcagtgttccaggataagcttctaggcggattgctgtccgcggcattcgacgaatcctcctgccagagccgctacaaatcgaacctgtaccggaagccatccccgttcccgctgtccccctacctggtgcagaagctgaggaagtacgaggcaaggcacaagaagtgcggcccgaggacgaagcggtaccggcgggccgtcaagcttctcaaggccgggcgcaacacggacgactcggagtgcaagtacgtggtgtggttcccctgcaacggcctcggcaaccgcatgctcaccatcgcctccaccttcctctacgcgctgctcaccgaccgggtgctcctcgtgcacgtcccggcggagcaggagggcctcttctgcgagccgttcccggtcagctcgtgggtgctcccgggcagcttcccgcagaacaatccccacaagctccacatcggcgcgccggagagctacgcgaacatgctcaagaacaacatcgtcgctgcctccgtacgtctacctnccacctggagcagttccangctgaagctgtccgacaacgtcttnctgcgacgaggaccaggtcacgctcagcaagttcaactggatgctgctcaagtccgacagctacttcgnccccggcgctgttcctgacgcccatgttcg

SEQ ID NO: 166626 - DNA, 122 bp, Zea mays
  Clone ID: MRT4577_83542C.1
atcgagcgctcgaggactcggggctcgagcgaacgacacgaaacttacatgagcgtgccaaaggagtgccctgaacgctctcatcttccgcacaggcgaccagtttaaggacatcgtccttg

SEQ ID NO: 166627 - DNA, 1613 bp, Zea mays
  Clone ID: MRT4577_83543C.1
cgggaagcccggccggggattgctgtccgcggcattcgacgaatcctcctgccagagccgctacaaatcgaacctgtaccggaagccatccccgttcccgctgtccccctacctggtgcagaagctgaggaagtacgaggcgaggcacaagaagtgcggcccgaggacgaagcggtaccggcgggccgtcaagcttctcaaggccgggcgcaacacggacgactcggagtgcaagtacttggtgtggttcccctgcaacggcctcggcaaccgcatgctcaccatcgcctccaccttcctctacgcgctgctcaccgaccgggtgctcctcgtgcacgtcccggcggagcaggagggcctcttctgcgagccgttcccgggcagctcgtgggtgctcccgggcagcttcccgcagaacaatccccacaagctccacatcggcgcgccggagagctacgcgaacatgctcaagaacaacatcgtccgcaacgacgacggccccggcgcgccggcgtcgtcgtcgctgcctccgtacgtgtacctccacctggagcagttccagctgaagctgtccgacaacgtcttctgcgacgaggaccaggtcacgctcagcaagttcaactggatgctgctcaagtccgacagctacttcgccccggcgctgttcctgacgcccatgttcgaggccgagctggccaagatgttcccgcggagggaggccgtgttccaccacctgggacggtacctcttccacccgaccaaccgagtctgggggatcgtcaggaggtactacgaggcgtaccttgccagggtcgacgagaagatcgggttccagatccggatcttcccggagaagccgatcaagttcgagaacatgtatgagcagctgatgcggtgcgtcagggagcagcggctgctgccggagctcggccccgccgagccgccgacgaacgcgacggctgacgctggcgacgggaaggtgaaggcggtgctgatcgcgtcgctctactcggggtactacgagaagatccgcggcatgtactacgagagccccaccaagagtggggagatcgtggcggtgttccagcccagccacgaggagcagcagcagtacacgtccaacgaccacaaccagaaggcgctggccgagatctacctgctcagctactgcgacaagatcacgatgagcgcctggtccaccttcggctacgtcgcgtacagcttcgccggcgtgaagccgtggatcctgatccggccggactggaacagggagacctccgacgtcgcgtgcgtccggtccacgtccgtggagccgtgcctgcactcgccgccgatcctcgggtgcagggccaagacggacgtcgacgtcgccgctgtcaagccgtacgtccggcactgcgaggacgtcggcttcggcctcaagttgttcgatagctaactctctcagtggacgtacagctcgacgatccaactcttttctgaactgcgtgtctggcctgtggtctgtggagttaggcatttcgagattcgttgtattcgtttaagcggtaccttgtagtcgtgtacaggtgcgaattaagttaagttacaaaaatgttttgagtactgtttcc

SEQ ID NO: 166628 - DNA, 232 bp, Zea mays
  Clone ID: MRT4577_83544C.1
gtgtgggtgtgggtgtgcctccgacggcgtctcggtgccagtgtcgaggttctttctgcttagctacccggagcctactacggaggaggacacctgagtttacgtctcttccatctgctgctcacctcagctgcctgggtccccgacgagagccaggtgacacttaactccgccatctgcgttttgagcactgttctcataatgaagttccggattgggggaagcatttgtt

SEQ ID NO: 166629 - DNA, 325 bp, Zea mays
  Clone ID: MRT4577_83545C.1
ggccggggactcgtcattgccctactgcctcctgtggaacgttcgctccgtcgggccggccgagctccctcttcggctcacatggcccaaggaacaatagtggtcaagcggccagtggccggaccaggataaccaacctactgtgcttaataatctatgtgggcagatgcacctgcactcgatcatctgtggaggggtgccggcccataacaaactcccatctgtctcatattatgaaaggagatttggcatacagaactacatgacccacatcctttggggcccttgaatgcatgggagctgaagcattaaagtcccaccgatg

SEQ ID NO: 166630 - DNA, 498 bp, Zea mays
  Clone ID: MRT4577_83546C.1
ggggaagggccccctcaaaaaaaacgggggggaaaagggaaaaaggcaggggacaacgtttaaaggggtttcccaaccaaaccaaacgggtttccagcccccccccccaaaaaagggggggaaccccggggctttcccaggaaatttcctttagggggggccccaaatttttaggggcaaaggtaaaaaccgggttaaaggggggcccccaaaaaaaccgggtccaaaacaaattgggaaaggggttttcaaagggaaaaaaccttttttttttttttttaggcaaaaaaagccggttttacggcccctaattagagccccgttggggcccccccttaattttttaaagggggccctccaaaatggaaagggcccatggggcaaatttttcaaaaaggggctggttaaaaaaagggctgcctttggagaacccccccttaagggggcccatttccaaaagggcctcgaaaaaaccctgttttgaaaaactgggggccc

SEQ ID NO: 166631 - DNA, 583 bp, Zea mays
  Clone ID: MRT4577_83547C.1
ctcgaggccggccgggccgggatacctgaggaaccgatcagagagagagagagagagcatactaccatccatgaagggtgagcaagaacgaattgtccgacgcgttgcggcgcatactgctgcatctgcacctcatgacagttccacagagggtcatggatcgaccgctcgccgcacggaatcgagccggatagactccctctgcacaactgccataggcgacaatgttgtcttccacgttgcgctacaatggcgcagagatgaaaatacattgggtggctcactcgtgcttgctcctgtaactatagagatcggcgatgctacatcatatttactcgtggtgcttgatgacattccacgaactgacaactcttacatgaaagctgcgaccgaccaccacgttgtctctcgtggagcttctcgttcaagtgataggtgttgcaaggcatccatggatgcttgatgcactatcgatcatgcgcataataaattagccacgtgcaggctaagctcgcatcaaggaaggtgtgggactattgacctgttctggagatctaatatcaggtaaatatatgttggatga

SEQ ID NO: 166632 - DNA, 175 bp, Zea mays
  Clone ID: MRT4577_83548C.1
cggtacgagttttgcacgatctattgagtatagccttagggcatatactggctatttttttattactactgtcaccatgagtggagggaaaacaatgatgtgttgttacataaaaacagacagacgtagatatttaagtgttaaatatgaaaaaaaaaaaaaaaaagggaggacg

SEQ ID NO: 166633 - DNA, 637 bp, Zea mays
  unsure (1)..(637): unsure at all n locations
  Clone ID: MRT4577_83549C.1
cctcgaggccggccgcggattgctatgtcctcaatatggtgacggcaccctgttcagatggagaagaggatgatggcaggatgtggcaccgaaagttccatgacccgaagcacagatccctctgttttcttcccagaaagcgctcctcccgacaccgcggtattgcgaagccattccccagtgatgacccccaaaaagctggtcatctcactgccattctcttggctacaagggttgctatgactctcatttgtacgagagggagaaaaggcagaatccaaactccataagaacgaaacgtgcgagaggtgctccatcattgaaataccctcctcttgtcattgctaggatcgtggatatgtgtatactcctcggggactccgcacaatcaatatctgtttgggccccacatcttaaccaacaaccgaggacaactctctacaagaacatggcgtcataatcacaagaaggctttcacaaagcatgttctcgaatatgaaaatgatgctggcaagaaggaagatcagctgcatattctgagaagatcgaagnacatactgcttactgttatcgcggctgttgctcatacgcacaataagaacatgaacgatgtcatacataaaaacgatcacctgat

SEQ ID NO: 166634 - DNA, 398 bp, Zea mays
  Clone ID: MRT4577_8354C.1
ctccaccaccctcccgtcgctggccgctgacgatctgccgtcaaactagctgtccttgctcctccactgggaacacgtgggtgggagctgggcgcaagctcagaccagagagaccagagtgggctgtcaaacctcagaaagccattgagacggggaagaaaccctcgtggatctgtacgcaaggggatcgtaccggaaaagatcggataccaggccaagcagaccaactctgctatccttaattgtgctccaagtcacctgctgaacaacgcgaagaagactgccgacattgtgccgaacgacggctgcttgaactacatcatagaaaacgatgaggcgctgatcgccgaggacgagtctcaaagggtaatcgccgtgggagatgttaaccagagggc

SEQ ID NO: 166635 - DNA, 421 bp, Zea mays
  Clone ID: MRT4577_83550C.1
tcgcatatcagcttgactaaaaggttgttccatgtactaccaggcgttagtagtaagaataagctcaatctgctgacaccatgaagaagggcgtaaacgatcgcacatcgtccaagccgcccatgcatgcccgtaaacgctagcttgtgagcttttaccgtgcccaacatggtgttcacattagatggtgaaatgcccggagaccctaccattgagaggaggagaagaagctttcaacaccttgataacggagagaggtgcaggcaagcacgcatctaggacaggaagtagttggccatgaaccaatatgaattccaggaggtgatgacaaggacgctaaaactagcagttccttccatgcgctgcagtatcttatgaggagggagcgcatgcaacacaacatactgggtacgcgtgggac

SEQ ID NO: 166636 - DNA, 431 bp, Zea mays
  Clone ID: MRT4577_83551C.1
ggggttaaaacttttttattggctaaaaatcaaacccaaaccggctgaattaaccaacaacaaaaaggtttttggggggcaaaccgaaaaaaaaatgagtgtttgcaaggaaaaaatggggcctgggttggggtttaatccttatggacccataccaatttgggacggtttgggggggcatccattgttttttttaggggagctttcacctcatgaggggcgtcgggggcctcgaaaaaatggatgccaaggttttccaaaccagttttgcttcctaagggctccacatttttttcactgaggcccgccctataaaaaagtagtttgggaaggttcacaagtaccccccaccagtctgcaaaatccgggacaatttttcccgggaccacaagttttccaagggcaactggcccctggccatttaacttggt

SEQ ID NO: 166637 - DNA, 546 bp, Zea mays
  Clone ID: MRT4577_83552C.1
tcgacaatggtgccctcataccggcatgcgcttcctagaaataatcaatatattgattgagatttatctcgaaaaaaaaaaaaaaaaaaaaaaaaaaaaaaaaaaaaaaaaaaaaaaaaaaaaaaaaaaaaaaaaaaaaaaaaaaaaaaaaaaaaaaaaaaaaaaaaaaaaaaaccaaaaaaaaaaaaaaaaaagtcccccccccggcggcccctaaaggggaaaatcccacaacctggggggcggttaaaagggaacccaacccgggaccaaacttggggaaaaaaggggaaaaagtggttcccggggaaaaatggtatcccgtaaaaaatcccaaaaaaaaaaaaaccggaaaaaaaaaggggaaaacccggggggcccaaaggggggcccaacccccattaatggggggggcccaaacgcccctttttaaaaggaaaaaaccggggggcccagtgaaataaaaaaaccccccaacccccgggaaaaggggtttggtaattggggccttttcccctttcctggtaaaaaaaacggggggctggg

SEQ ID NO: 166638 - DNA, 663 bp, Zea mays
  Clone ID: MRT4577_83553C.1
gacagtctttcctggtcatctgaacacttggcgttttctagagtgaattgtactgagctgtctctagaacacaagtcaatttaccgagcagttctagattattttcacaatgtgcaataagctcactagttttttggttaaggaatacgaaaataaattagttaactcatgaactccacctagtttccttggaataacttgatgctattggacattcactgactgaaccagaaaaaaactgcaggggctgaaaattacactgccgttaaccaacctgcctatgcattcaccaatattctattttcatcagggaccacaggatgctaaggtaacaatgcttggactggtacccagcatcgttcgtacttggaagaatacggactgtacagctggactagactggtcctccatccgatgctttagctcctctggggaggcatccagtgtggatgattatttatggctgatgggaagagctggttacaagccagtaatcgagtactgtggaggcacagagattggtggtggatttgttactggatcgatgctacaacctcaagcgttgtctgcattcagcacacctgccatgggttgtaacctgttcattcttgatagcagtgggaatcctttgccacaagactctgtcggcattggtgaacttgc

SEQ ID NO: 166639 - DNA, 284 bp, Zea mays
  Clone ID: MRT4577_83554C.1
agggggataaatggccccttgggggaaaccaaggaaatagctgttcccggggaaaaattgaaatcgggtacaattccaaaaaaaatacgacccggaagcaaaaggggaaaagctgggggggccaaaggagggagctaactcaaattaattgggttgggctaacggccagttttcgagtcgaaaaacctgacgtgccgggggcattaatgaatgggccaacaccggggaagaggggtttggcgtatgggggggttttccgcttccaggttaatggaaagggtgcg

SEQ ID NO: 166640 - DNA, 2632 bp, Zea mays
  Clone ID: MRT4577_83555C.1
taccttcgtattattctatttacgttgctctcgagtttggtgtaccggtccgagaaatcttcttctgttctgctgctgctatatactccgtactttttattctattcagcaaaggaattctgccttcttctctcatcttcctgctcaacatcagtagcagctttagctgtagcagcgccaccggccaccgccacgccatggccaccacgttgcacaagcccctgggggcgatcaccgttgacgacctcgccgcggcggcgcctgggtcggacgccaccgcgctccacgcagcgctccggcgcgcgctcgactcgcacggacccaccgaagtgtggggcgagctctgccggtccgtgctctgtccgtctgtccccttcgccgtccaccggatgctctactacggttgcttcgccgggttcccgtcccccacgccgccggcctggacgcccgaccccaaggaggctgtcttgaccaatgtcggccgtgtcctcgaggcgcgtggtagggacttcatcggcgacgcgtacaaggatcccatcaccagcttcccagacctccacaagttctccaacgagaacccagaggcgtactggaagatggtatttgaggatatgggtatccaattcagcgtagagccatcctgcatctggagagagaacactgcatatcctggtggcgagtggctaccaggcgccgagctcaacgctgctgctaattgcttgactgctaaacccgggaggagctccgacggtccggccattgtatggagggatgaagggaaggactctgatcctcttaacttcatgtctctggaggaattgaggaagaaagtttgcctcgtggccaatgcaattgatgccctggaactgccgaagggatctgcaattgctattgacatgcctatggatgtcaatgctgttgtgatctaccttgcgatcgtgttggcgggatatgtggttgtctcaattgcagacagttttgctgcacctgcaatatcaatgaggttgaagttatcagaagcgaaggcaatttttactcaggattacatccttcgtgatgacaaagaactaccattgtacagtagagttgtggaggctaaggcccctatggcaattgtgattcctgtaagggggtctttgctaataaagggactacgtgttgatgacctttcctggcaagatttccttggaagggttaattataccgaggctgaaaattacactgctgttaaccaacctgcctatgcattcaccaatattctattttcatcagggaccacaggggagcccaaagcaattccatggacacatataacacccctaaaggcagctgccgatggatggtgtcacatggatattcgtaaaggagatgttgttgcttggccaacgaatcttggttggatgatgggcccttggcttgtttatgcctccttgctgaatggagcttccatggctctgtataatggctccccaaatagttcaggctttgcgaagtttgtacaggatgctaaggtaacaatgcttggactggtacccagcatcgttcgtacttggaagaatacggactgtacagctggactagactggtcctccatccgatgctttactctggggaggcatccagtgtggatgattatttatggctgatgggaagagctggttacaagccagtaatcgagtactgtggaggcacagagattggtggtggatttgttactggatcgatgctacaacctcaagcgttgtctgcattcagcacacctgccatgggttgtaacctgttcattcttgatagcagtgggaatcctttgccacaagactctgtcggcattggtgaacttgcacttgatccaactttatttggatcatcaacaacacttctaaacgctgatcatcaggaggtttacttcaacggaatgccagaatggcacgggaaaatcctccgcaggcatggagatgaattcgagcgtacttctgacgggtattatagagctcatgggcgtgcagatgatacaatgaaccttggtggaattaaggttagttccattgagatcgagaggatctgcaacagagtacatgacgccatccttgaaacagcagctatcggggttccacctgtagggggtggccccgaacaactaaccatagccgtcgtgttgaaggaccagagctctcaaatagaggacttgaaccagctgaaactagcatgcaacatggctctgaagaaactgaaccctctcttcaaggtttcctccgtcgtcatcgtcccgtccctccctaggaccgcctctaacaaggtcatgaggagagtccttcgcaaggagttcagccaggccgcccaggcaaagcattcaaaaatataggtagttattagaaataattagtgttttctgctgcaaatgcacctgcagaaagagttaaacaacaaactgtgcatatcgggaaatcctgttgtttaccaccagaacggagaattgagatgtacttagatttcgggaaataagggagctgtattcctgccaacgttcagcactcacttgatgtgatgccctaataaaacactaatgcaatcacttgcattctaatgcaaccaaaaaaaaaaaaaaaaaaaaaaaaaaaaaaaaaaaaaaaaa

SEQ ID NO: 166641 - DNA, 824 bp, Zea mays
  Clone ID: MRT4577_83556C.1
ggccggccgggcccgggaaaaaaaaggaattctgccttcttctctcatcttcctgctcaacatcagtagcagctttagctgtagcagcgccaccggccaccgccacgccatggccaccacgttgcacaagcccctgggggcgatcaccgttgacgacctcgccgagctgaacgctgctgctaattgcttgactgctaaacccgggaggagctccgacggtccggccattgtatggaggaatgaagggaaggactctgatcctcttaacttcatgtctctggaggaattgaggaagaaagtttgcctcgtggccaatgcaattgatgccctggaactgccgaagggatctgcaattgctattgacatgcctatggatgtcaatgctgttgtgatctaccttgcgatcgtgttggcgggatatgtggttgtctcaattgcagacagttttgctgcacctgcaatatcaatgaggttgaagttatcagaagcgaaggcaatttttactcaggattacatccttcgtgatgacaaagaactaccattgtacagtagagttgtggaggctaaggcccctatggcaattgtgattcctgtaacggggtctttgctaataaagggactacgtgttgatgacctttcctggcaagatttcccttggaagggttaattataccgaggctgaaaattacactgctgttaaccaacctgccgatgcattcaccaatattctattttcatcagggaccacaggggagcccaaagcaattccatggacacatataacaccccctaaggcagctgccggatggatggtgtcacatgga

SEQ ID NO: 166642 - DNA, 217 bp, Zea mays
  Clone ID: MRT4577_83557C.1
ccaacataaatcaggagaaaagggggccccccaatttaatgtcccatacatacataaatagtgttggcgcatggtttttgcccaagggaaggtggtaatccaaacctgttattggttgaccccccatgtttaggttttacgcaaaccactataccccccttttcttggctgtttaaaccaaaccaaactttttaaggacgcaatataaaattttttt

SEQ ID NO: 166643 - DNA, 737 bp, Zea mays
  unsure (1)..(737): unsure at all n locations
  Clone ID: MRT4577_83558C.1
ccccacgcgtgcgacgacctagtgcacaagccagcaggacgacaaggaagctgtttattgaataacaggtcaagtaacttgcagcccgccgggatatatctctacgctccctccctcgagaccaagctagcgacagagcaagcaaggagcggctgtggcagtttgtcagtgcaacgcgcagaggcagctgctacattattacatccatggatcatccaaacaagatcccccacggcaacgacgagaagaagaaggagcacgagaagcaggtcgagcaaagcaagaccgacaggacgcgcgagaagaacccaatcaaggagccggagcccaagccgaagaacgaattcgaagtcccaaaacccatcccgagaatgagccgccaaggcatgagggagtaatctcctcaaccctcattcgtctcggtctccgcgatcaatgcatccattgttcgatcgatatatatagatcatatataggccacggtcgaggttatgcgtcctgctagctatactccgtgattttatgacgttagtgtcctagcagctataccctcggtcgtttgtatgtgtgtaacagatcttattttactagtactagtggtttgcatgtgttactattactgaatattgtaataatgttactgttaataatggagacttttttttggagcctctaaaaaannnnnnnnnnnnnnnnnnnnnnnnnnnnnnngtaaaaaaaaaaaaaaaaaagcggcc

SEQ ID NO: 166644 - DNA, 393 bp, Zea mays
  unsure (1)..(393): unsure at all n locations
  Clone ID: MRT4577_83559C.1
ttgctaggtcggngttgccgccaccggccaccgctcgctacctccttcgcgggcgcggcagatcctgctggcagatagcctttccaacttcatctcctgcggggcacggcaccgccggcgtatactagctgccgcgtcggaaggtcgccgccgccgccgccgcgccgtaccgatctgccacggcggaaggtcaccgccgacgcttcctcctcgnatcaggtctcactctgttgctcgagatgcggacggtggctagcctcaccgacgacctccttgtcgagatcctctcccgtctccccgtcaagtcgctccgccgctgcatgtgcgtctccaggacctggcggggcatcatctcgcacccgcacaaccgcaggcagctgccccagaccctcg

SEQ ID NO: 166645 - DNA, 230 bp, Zea mays
  Clone ID: MRT4577_8355C.1
ctcctatttcactttcactccgttccgctgccgatcgccgtcccgaccgagcgcaggactgaggatgagtgaagaggagaacgccgatgtgtctactaactcctgtaggattcattcaactataaggagctcgagaacggcgtattgtgataggtcgagggaaagcgggccacccaaggtccagatgacgagaaaattgaagcaaataaatacgacaagaaagaagagga

SEQ ID NO: 166646 - DNA, 400 bp, Zea mays
  Clone ID: MRT4577_83560C.1
ctcccgggtcgatacacgcctctacagtaactcgtagtagtatgtgttattagaggtcatcggtccgtgagtgctaatctctcattggcacagtgttacatatcggtgcagctccagctagcacagaagtaggcactacatcagctggcagaatatatctagattgcgggactttttccataaactgtctcaagattacagccatctacttgctgatcatgatggacaacgcaagaaggtgctccgcagcaacctctctgcgcggttgatatggtaatacttccatgtacggcacaactacggcctcctcctagcctaactacatctgcgctagccagactcaggcatagatcattacaatcgtcagggggtggaagactacgaatcctgaagatattac

SEQ ID NO: 166647 - DNA, 331 bp, Zea mays
  Clone ID: MRT4577_83561C.1
cacacgcgtgctcgacatcgctcacaaaatcttcccatttcagcacgatctcatctaaatgggcgtcttccacatgtgcgcgaactatctcatggataggaatcacttcaaagaccatgcatccgccaatgacctgaccgactataagactctccagatgctccattacgtctaatcgaacatcctcatacgcttgcatgactcaatgatataccaaacgatcaaactgacgaccacccacacatggctagagaaagccaagctctagatcacatcccataaggagaccttccttaggctatagctcttgagaaccaacgtcattacgact

SEQ ID NO: 166648 - DNA, 468 bp, Zea mays
  unsure (1)..(468): unsure at all n locations
  Clone ID: MRT4577_83562C.1
tcttgttggtacgctgggctggggccggcgcgtcggctgtaggctctgtagcgtagcttgcttgcttgccgtagtggttgccgtggcacgcaggccccatcggcctcgcatcctcccctccccgggaccgggacaccccgcgcccgcacccgcgaaccatcgggcgggcgtcaaccacccaccaaactcgtttctggttgcgctgcccgccgcggggtcgccatcggcggacgcgagcgagcccaatccctcccggcctcggcctgccttccattaataccctctccaccgtcgctactgcagttcgcgtcgcttccagatccagcgggcggagaggggnttggcggtgcggcccgtgaccatgaagcagccgaggggccggcaggagccgcgccgggtgggcaaacgccgcatggtcgtcacatggtcgtctcctctgcgtcttacgtacatcaggcgcgatactgc

SEQ ID NO: 166649 - DNA, 2492 bp, Zea mays
  unsure (1)..(2492): unsure at all n locations
  Clone ID: MRT4577_83563C.1
cctcgagccggcgggaaagatcgtgccttcttctctcatcttcctgctcacatcagtagcagctttagctgtagcagcgccaccggccaccgccacgccatggccaccacgttgcacaagcccctgggaggcgatcaccgttgacgacctcgccgcggcggcgcctgggtcggacgccaccgcgctccacgcagcgctccggcgcgcgctcgactcgcacggacccaccgaagtgtggggcgagctctgccggtccgtagctctgtccgtctgtccccttcgccgtccaccggagctctactacggttgcttcgccgggttcccgtctcccacgccgccggcctggacgcccgaccccaaagaggctgtcttgaccaatgtcggccgagtcctcgaggcgcgaggtagggacttcatcggcgacgcgtacaaggatcccatcaccagcttcccagacctccacaagttctccaacgagaacccagaggtgatataagctactactactgtacttttgattccgtttgttgcttacccacgcgtccgagcaaggagcggctgtggcagtttgtcagtgcaacgcgcagaggcagctgctacattattacatccatggatcatccaaacaagatcccccacggcaacgacgagaagaagaaggagcacgagaagcaggtcgagcaaagcaagacccacaggacgcgcgagaagaacccaatcaaggagccggagcccaagccgaagaacgaattcgaagtcccaaaacccatcccgagaatgagccgccaaggcacgtcgagggggtagtaatctcctcaaccctcattcgtctcggtctcggcgatcaatgcatccattgttcgatcgatatatatagatcatatataggcccacggttgaggtcatcggggccggcagctatccgccgtccccttacgtactgagaagatggtatttgaggatatgggtatccaattcagcgtagagccatcctgcatctggagagagaacactacatatcctggtggcgagtggctaccagacgccaagctcaacgctgctgctaattgcttgactgctcaacccgggagaagcccagggaccacaggtaagatgatgtttgataattttctgacatgtctcgcccatatgcaattatcagggagaccaaagcaattccatggacacatataacacccctaaaggcagctgccgatggatggtgtcacatggatattcgtaaaggagatgttgttgcttggccaacgaatcttggttggatgatgggcccttggcttgtttatgcctccttgctgaatggagcttccatggctctgtataatggctccccaaatagttcaggctttgtgaagtttgtacaggatgctaaggtaacaatgcttggactggtacccagcatcgttcgtacttggaagaatacggactgtacagctggactagactggtcctccatccgatgctttagctcctctggggaggcatccagtgtggatgattatttatggctgatgggaagagcgagttacaagccagtaatcgagtactgtggaggcacagagattggtggntggatttgttactggatcgatgctacaacctcaagcgttgtctgcattcagcacacctgccatgggttgtaacctgttcattcttgatagcagtgggaatcctttgccacaagactctgtcggcattggtgaacttgcacttgatccaactttatttggatcatcaacaacacttctaaacgctgatcatcaggaggtttacttcaacggaatgccagaatggcacgggaaaatcctccgcaggcatggagatgaatttgagcgtacttctgacgggtattatagagctcatgggcgtgcagatgatacaatgaaccttggtggaattaaggttagttccattgagatcgagaggatctgcaacagagtacacgacgccatccttgaaacagcagctacggggttccacctgtagggggtggccccgaacaactaacccatagccgtcgtgttgaaggaccagagctctcaaatagaggacttgaaccagctgaaactagcatgcaacatggctctgaagaaactgaaccctctcttcaaggtttcctccgtcgtcatcgtcccgtccctccctaggaccgcctctaacaaggtcatgaggagagtccttcgcaaggagttcagccaggcagcccaggcaaagcattcaaaaatataggtagttattggaaataattagtgttttctgctgcaaatgcacctccagaaggagttaaacagcaaactgtgcatatcgggaagtcctgttgtttaccaccaaaacggataaatgagatgtacttagatttcgggaaataagggagctgtattcctgccaacgttcagcactcacttgatgtgagttcacagatgagggcatgaggcactaataaaacactaatgcaaccacttgcattagatcac

SEQ ID NO: 166650 - DNA, 726 bp, Zea mays
  Clone ID: MRT4577_83564C.1
cccttccacaagagagattgctaggccggcggctccgccaccggccaccgctcgctacctccctcgcgggcgcggcagatcctgctggcagatagccgttccaacttcatctcctgcacggcacggcaccgccggcgtatcttgactagctgccgcgtcggaaggtcgccgccgccgtgccgtgccgatctgccgcggcggaaggtcaccgccgccgcttcctcctcgtatcaggtctcgctcttctgctcgagatgcggacggtggctagcctcaccgacgacctcctcgtcgagatcctctcccgtctccccgtcaagtcgctccgccgctgcatgtgcgtctccaggacctggcagggcaccatctcgcacccgcacaaccgcaggcagctgccccagaccctcgagggtttcttctacgtgcccgtgagcaagcccgcgccagctcccagtttcaccaacgtcaccgggacaggccgccctttggtctctcctctcttcgatttcctgccgcagcaccagagcatcttcctgctgtcctgctgcaacggcctcctcctctgccgctgctgggaaggccaggatgacttccattacgtcgtgtgcaatccagcgacggaggggtgggtccggttgcccggttccgtcgatgccggcaccaagtgcatggcacgtctaggttttgacccggtcgtgtcgcatcaatccatgcgtttgagttctc

SEQ ID NO: 166651 - DNA, 262 bp, Zea mays
  Clone ID: MRT4577_83565C.1
taaagttggaatcctttatctttcaacagcatcaacaatggccgaccagggaatgtttccactccttatgttcgcttgctcttatctgcatgtgattgctatactctacaatttttccctcaatgcttcacaatcctcctatatctttcccttcttctctccatacctttccatcaattatagctacatgtattacaaaacccaactcttcatccctatagtctccaacatgcaatcttatcatgcaacatacctttatcac

SEQ ID NO: 166652 - DNA, 379 bp, Zea mays
  Clone ID: MRT4577_83566C.1
tcgttccgtaatattgtaaatggggagcatgaggcataacatacacctgacgggtcctgtcataacaactcaaatgatgcgactcatgcatgatgggcatcagaacgccgaagaaatgctgcccgaaatgctgcgcttgctaattctaggatcaatgcgctgcatgaccacttgaagatggccctggattgtttctttgccgtatgggttgttgttggaaacgtgtggatatttggtggacgttcttctgctgatgatgcacctaacttgaacaggtggcgcattgagttcctcactatgagatgcattgagtatgccacgccaggcatactatgtgcaatgagaggctgttgtcttccctgcattatatgtagcatgg

SEQ ID NO: 166653 - DNA, 373 bp, Zea mays
  Clone ID: MRT4577_83567C.1
gcctctgctttttttttttttttttttttttttttttttttttttggtttttttttttttttttttggtttttctttttttttgtcacggaggaatccaccccagagggttttttatttacccgcagggtccctcccgggggtccaaaaaacgggggatttcacaccaacaaatggggggccgggagctggttaaaccaaaaaacggggaaaaacagcgggacacaacccaggagggggggggggggccccccgaaaaaagggggccggacagcctgaactttgacccagggcacatacaaaggcccccggggcctaaacgtgttgggcgaaaaaataaaggccatccagttcaaggcaccaagggggggggg

SEQ ID NO: 166654 - DNA, 252 bp, Zea mays
  Clone ID: MRT4577_83568C.1
acgaagggagattctcaataaatatagtaagggattgtttgcgaacaacatttttccaagagatttcatttttcttttgggaaaatgaactaatttcactttttaaaataaaatatcccttggaaaaatggtgttaccaaactatgccctatataatattaatacaggccctaggaagatgggttttgaaatttacatagcccagactaattgccaatttgaggtctaaaaaacgctaaaacccattttggc

SEQ ID NO: 166655 - DNA, 1044 bp, Zea mays
  Clone ID: MRT4577_83569C.1
cggacgcgtgggagcgaattcacagcagcaaacagtgtgaatcctgcaatctccaaacccaagcccggcggcgagatccgcgcggcaggcggacggggccgctcgaccgccttcgtgccgtgcgcgcctccccacctcttccgttctccgctccccgcgcccgcgaaggcgaattgctgaattgagggtggtggctcgtgcttgattttgattttgggggtcggtttcagttccaattcatgacggtgcggccggggtgggtggtgagggtggcgcatgggctcggcagcaggagagacgcctgaccggttcgtattaagctggaaattgtgtggatctagtcttgtagcagtagcttattgcttgcccttccctcttcatgtacctacagaaaaaaaaaaaaaaaaaaaaaaaaaaaaaaaaaaaaaaaaaaaaaaaaaaaaaaaaaaaaaaaaaaaaaaaaaaaaaaaaaaaaaaaaaaggctccttttcctttcccagcgcataagggaggcggcaattcgcgggggggagggcgtccgcggaaacaatggcaacggaaaagctggccataaagggggagcgcaacccgcccgagccccgcctttccgagctgggggtccgccaggggcccaagggggggggcaaaaaaagcaagttcccggggacctactccgccaaggaaacgtgctacctgctgcagggaaaggggaaggggtcccccgaaggccacggggaggagttcggggaaatcggcgcggaaaaccttgtcgttttccccaagggcatgagctgcacctgggacgtcgccgaggccgtcaacaagcactacaacttcgagtagccgccgccgccaactagccctgcggggctcgaggtaaactggctgggctcttggactctgaaccaccggtaaaaaagctccggataggggactacaaactggactatctgtttaagaccccgttcggtaagctgggattaaaacccgaaactttccaactgacaagtttaatacaaaaaaactagggaacattttagggg

SEQ ID NO: 166656 - DNA, 185 bp, Zea mays
  Clone ID: MRT4577_8356C.1
cgaatcgtctcgctcgtggctgctctactagtgctgcttgcactcgtcgccgtttcctccacgagcagcgcactatcaggagtccgtggctgactactcagggatgtaggcaggcggcatcaaggacgtgccggcgaacgagaacgacctcgagctccaggagctctcgtgcttcgccgtcaatg

SEQ ID NO: 166657 - DNA, 430 bp, Zea mays
  Clone ID: MRT4577_83570C.1
cgggcggaccaggcttccgtttttaaaccgcaaccgccttaatcttgtttctttcttggaaccaaccaagcccttaatcggggggtcaacttaaacccaagttagcggttaatccttatttcctaaaaaccttgaccggattaattttttaaattaattaaataaacagttgttttgacctactttccaagttttagtttaaaaatcttttaaaggaaacaacttaagttccagttaaccgaattccgcccagaacatcccgtcctattgcttaattttgaacctttccagtcttttcttactttattttccttattttaaaacattttttttcttccatttttcttttaaaataatcccttttcctgtaaacctaattttttttttttaattgcctttcctttttttttcctagttttttgggtccctt

SEQ ID NO: 166658 - DNA, 755 bp, Zea mays
  Clone ID: MRT4577_83571C.1
cattgggtacctcgaggccggccgggactgccttccgaaccccgctctcggttcccccgtcctcctcaagaggctcacgcgctgcgctgcggatggcccctgttatcgtgcgtgtggcgtgcgccgccatggccgaccgaaagccatctaccctagcgccgcacctgatgccttcctccccacgaagagcacaactacacacctccgcctcctccaccctcaaatctgtccccaccatggcgtaccagggatcctccgacttccacgaagtcgatgacgacccggaagaccccctccacgacgtgacaggtgcctaccacatggattccagccccgcgaaagacgacctcaggagcaccgcctaccggatccacgaacggatccctgtaatgataaacgtgtctcggcccctctatgcaaatagcctcgatcaataatccaggcatgagcccgggagtacctaccgatcactctcttggcagactccaatagattgcgcgcttggcttatctctggggctgaatggcctgctattcatgaaaagaggggtgctaccgtgcagagcctatccggctgtggaacgatatcagtctgagctgaaattgtttgaacgtactgtcacaagcgcactatctagatcccacaactcgactgggacaaatctccctacagtcatcaccctgtgctggattgtgccgctcgtgccagcgatattatgatcctgcgacatgcatgcctcacttcacatgactcca

SEQ ID NO: 166659 - DNA, 468 bp, Zea mays
  Clone ID: MRT4577_83572C.1
actggttgccatattccagaccatcgtttaaaccgaacaacatggcagccctgcacgcaaaactttaattcatatgggggcgtcctttgtacagaatggatgatgatctagacgaacagctaaaatagacaagcaaaaaagatatgttttacttttttacatataataaccatattacacagacatacaagtaatacatgcttcattcaggaaaaaaatatcactatgctcttgacacatttcacaattataaggatataaatacgcatgatagtagcaactgcaaaacttatatatattttaaaaacaccatttattatgacctagagcacatacaaaattaacaaaccggttagtacggcttccaaaataggattagcagaataatcatcggccacatataaagctgtcaacactggccccaaaaccttcaactacatcaaatcatatcctgtatactattaaaaa

SEQ ID NO: 166660 - DNA, 240 bp, Zea mays
  Clone ID: MRT4577_83573C.1
atcctcagccccgaatgcgtgcctagtcaacttgcaccatgctcacggtaccataacctggcaccgttctctttaaattccactacctaagaccgatttacaatgttcgagcagaggctacacgatcacacacaccctggccatctctacaggtgctcttgcttctacaatactattgatcccctcgctatcgctaccaatccggagaaccttcaacgtttcaacgactctaaactctac

SEQ ID NO: 166661 - DNA, 2774 bp, Zea mays
  Clone ID: MRT4577_83574C.1
agacgccgtcacagctaacagctgaaggcctgaagcaccctcactttccccactccggagctgcacgggcacgcacgcagtttatccaacgccactgggcctcaacaacaacaatctcccaacgccgccgcttccgccgcatcaagcgctagaactaggaacccctcccaaaggatctcaagaagacaaggacaccgtcgagtcgccgccagtcgctcgatggggtgcgggcagtcaaagatcgatcaagaggaggcggtgtttcgatgccgggagcggaagcggctgatggctgacgccgtggcctcgcggaacggttttgccgccgcccacactggctacactgtccgcctgaagagcaccggcggcgcgctatccgatttcgcccaaggcgaggcgccggaccctagcctggtgtcctcccatacccaccacgctccggctgtggcgacgtcatctgtctcgactccgccaggcccctccgcagcttccgtcaacagcccctccccgccgccgccgccattcgccgacttctctcattctagcctccaaagatcctcatccacccccaacattcctatgccggagccgagggccgcagccaaaaaccgccctcctgccgatgcttctatccgagaggaggatgaggatgaggatgaggaggaacaggatggacatatcaagatcgatagcgatgacgacagtgacgacgacagtgacgaagacgacgatcaccatgagcatgacgatgttagtgtggatgacatggtgcatggacaacaatcaaagcggattttgatgagtagtgtgggatcttctccagtaacaccacctccgcctccaaggttgaaccacaccccaccaacgcttgccacagcaacgccaccgcccccggtgctggagtcacagatggctacctgggactacatctttggcccaactcccaccccaccacccaccctagagcagcctgctgctgatactttgtggatggaaaggcgtgataaggagccagtggctgaggtgaaggcacctgtggcaaaaacagttgttagtaagccagctgctactgaggaaaggccaccagagacggccgtagagaaggataaagcaattgaggagatgatggctaatctaccgccatcaaaacctattgtgaggaagccacccaaagcacctggcccatcacaagaagcagcacactaccagcatgcctcttcgatgggtgcagttgaaattcggaaggggaaggtaatggtggcatcaggaactgccagcttgctacagattgttacacggcttgatgataactttcttagagcttcagagagtgcgcatgatgtgtcaaaaaaactggaggccacccggatgcattatcactccaaccatgctgacagccgaggacatatcgaccactctacaaaaattatgcacgttatcacatggaaccgctccttcaagaacttacctgaccatgaggacctgaacgataattttgagattgatgatagatttgaaactcatgctgcagttctagatagaatgcttgcttgggagaaaaaactgtatgacgaagtgaaggctggggagcttatgaaaaccgattatcagaagaaggtgtctctattgcagaagcaaaagaaacggggtgttaaacttgaaaccttggagaagacaaaagctgctgttagccaattgcacacaaggtacattgtagacatgcaatccatggattcaacagtttcagaaataaatcggcttcgggatagacagttattcccaaagttaatggaccttgttgatggaatggccaagatgtggagttctatgtaccgccatcatagaagtcagttcctgatcatttctggaataagaggtttcgagattcctcctattccaagggagacaactgattctcattacatccagacttgtgagctacgtgacattgttagggagtggcatacgcagtttgagaaattgatggacaatcagaaagcatacatcagagcactcaatgcatggctgaagctcaatctcatcccaattgagagcaacataaaggagaaggtctcctcccctccaaggctggtggatccacccatcaagcacctgctgcatgcctggcatgacgagctcgaaaggcttccgattgagcttgcaaaaactgccatcaaaacctttgctgaagtcataagcactatcgtgcatcttcaggaagaggaagtaaacctaaggaggcggtgtgatgaaactcgtagggatctgaaccgaaagaaggcacagtttgaggactggcatcaaaagtacttggagagacagacagcagaaactcaaaacatagatcctgtcgaggataggaaacgcaccatcgaggaactagagattcggctgagagaggaggaggggcaccatcttaggcatgccaggcaggtgcgggagaaatcacttgcaaacctccggacacacctgccagaacttttcaggaacatgtccgattttgcttacttttgcaaagacatgtacaacaatcttagaaaaactgctgcgctgtccaaagatgaagtctaaggctgatgatatttgtgcgtgtgtatgtatactcgacaagcagtagaatgtttgctggtaacttgtcctgatgccgtctagaatacataatagtcggcattaattatgtttgtaaattggaatggacattccggactccccattgtttatttccatgctatgtactgcattggtgcgtggataaaaaaaaaaaaaaaaaaaaa

SEQ ID NO: 166662 - DNA, 243 bp, Zea mays
  Clone ID: MRT4577_83575C.1
atcatcaacagagtctaggtcgtcagatgtagatccgttgctgaaggggcttaccgagaagcagtcgagctttaagcggtaccaggtgttattaggagccgatgtcaaggatctctgggggaagcttgttttccaggagcacctgttagggagggaaactacaactctatagcatgtggagacaaaagcatggaccgtggaaaaggaagtaggcaagccgctgaaacgcctacacgaccgggg

SEQ ID NO: 166663 - DNA, 1526 bp, Zea mays
  Clone ID: MRT4577_83576C.1
gtccaacaccaccacgtcactccaaagcctcgtcgccgaagtgtcgcagtggcgggaaatccacctgggcggcggcgcggcggcggcgcatggcgtccggccgagcaccgtcgtggcgtgggcgctctccttcctggccgcgtccgtgtcgagcgccggcggcgtgggcggcgggtcgctgttcctgcccatcctgaacctggtggcggggctgagcctgaagcgcgccactgcctactcgtccttcatggtcaccggcggcgcggcctcgaacgtgctctacaacctcgcctgcacgggcggcggcgggagagggaggctgatcgactacgacatcgcgctactgttccagccgtgcctgctcctgggcgtgagcatcggggtggtgtgcaacgtcatgttcccggagtggctcatcaccctgctcttctccctgttcctcgccttctgcacagccaagacgtgccgcgcgggggtcaagatctggcggtccgagagcagcgggtgcgggtcccgggctaggtcctcgcgcggtggacacagccacagcaaggagcccctgctgccccgcggcaccagcgacggcgacgccgagggcggcggcggaaatggcgcggggttcccgtggggagacgtggctctgcttgtcatcatctggctctgcttcttcgccctccatgtcctcattggcgataagcacgggaagggcgtgatcaggattaggccctgcggcgtcgcgtactggctgatcaccttcttccagctacctgccgctgtggctttcacagggtatattgtatacgccaagaggaagaaacgcgctgttcatagcgaaagccaagaggacggcagcaaggcagaccttgcggacgcaggagtggaagccttgccactacctacactacctctcgccgctttcgtcaccggggctctgagcggcctcttcggcatcggaggagggctgcttctgaaccctgtccttcttcagatcggaattcccccgcagaccgcggcagcgacgtcttcgttcatggtcctgttctgtgcgtccatgtccatggtccagttcatcctgctgggcgtggaaggcgtcgggcaggcctgcgtttacgccggggtatgcttcgccggctcggtcgcgggggtcgtcgtgatcgagcgagccgtcaggaagtctggccgggtctcgctcatcgtgttcctcgtcaccgccatcatggcgctcagcgctgtcatcgtcacctgcttcggagcgttagacgtctggatgcagtacaccaccggggaatacatgggcttcaagctaccttgctgacatcttgcttggtgttatgggcttcgttttggttttgcgtttgtgctcttcaccttgtaataatgtctgcaaagaggccggagtaggactggttgtgcatgggcactcattgtaatttccaattttcaggttttatatagtgtgaattgtcatcttcacttgtttatttactcccacggggaaaaatatatatgttcatgagtgcatccac

SEQ ID NO: 166664 - DNA, 710 bp, Zea mays
  Clone ID: MRT4577_83577C.1
ggtaccctcgggtcctgccgggatctagttgtgaagagtctgttattcagagagagagttcaggaagcgggtttgtttcctagatggatagattagatggagaaagcatcgtgtttgtttagattagatggagaaagcactgggtgtatatatacccaggatttcctcctcctgtttccctgtttttttcatctgaactgaacgttcctgttcatcttcaagccctcgccggcttgttgaactcagtcgatcctgcatctttctccaacaccgtcgcacgcgaaaaatggcagaatccgtcctccgaccccgacacaccgaggcggcggacgccgatgaggatgtgttggacgcgctggaagccttgtcacgccgaatggcagaattcgtcctccaggacacggaggccgatgaggctgccctggacgcaccggaagccgtcgcacgcagagcggcggaatacgtcctccaggacacggacgcggcggatacccaagcatcggaggacaacttcttcttcgaactcgcggaaaccttcatgcaggagacggaggcggaggaagccgccgtggaagctatggtgttcaatgcggcggaggaagcgggtgaagccgcctcggaagcactgaaagccgccggggaagctaataagctattagtgttcaattgcggcggaggaaagcggatgaagcccgcccgcggtgacaccc

SEQ ID NO: 166665 - DNA, 277 bp, Zea mays
  unsure (1)..(277): unsure at all n locations
  Clone ID: MRT4577_83578C.1
tcgcccacagcgttcgcccacgtcgtacgaccacgcgtnntgttgacgcttgggcggacgcataaccggtggaaaagctggaagcgaggggaagagatttaacaaaaatacatctattataccatcaacctatcattgttggtggactaattaatatatacaaagagttatagattataaacacacatgacaagttggagtgttggtgtttgcctaaaaatnataatattgatccctaaaaaaaaaatatgttgcttcttgtgaataacaggactaa

SEQ ID NO: 166666 - DNA, 655 bp, Zea mays
  Clone ID: MRT4577_83579C.1
aattcggcacgaggctttcgctagctcccttccgttcccttcccacgaaaaccggagagggagtgagaagaagcaacaagaagcggagagccaacgcgcaagcaacgccctgagatggcggcgccggcgccggcgccgaagcaggaggagctgcagccgcacgccgtcagggaccagctgccatccgtctcctactgcctgacaagcccgcccccatggccggaggccgtcctcctcggcttccagcactacctcgtcatgctcggcaccaccgtcatcatccccaccgcgctcgtgccccagatgggcggcggcaatgaggagaaggcgcgggtggtgcagacgctgctgttcgtggccgggatcaacacgctggtccagagcttcctcggcacgcgcctccccgccgtcatgggggcctcctacaccttcgtcgcgcccaccatctccatcgtcctcgccggccgctacagcggcattgccgacccccacgagaaattcgtgcgcatcatgcgggggacgcgaggcgcgttcattgtggcctccacactccaaatcatcatgggcttcagtggcctttggcgcattgtccacaagctgctgagtccgctggctgctgctcccttgagcgctctcggccgaattggactctgtg

SEQ ID NO: 166667 - DNA, 705 bp, Zea mays
  Clone ID: MRT4577_8357C.1
ttgggaccctcgaggccggccgaggtctctctcggcagcccgccactcatgtgacgactgctcaggagcctgatcttttcttccggtcttcctcccactccagcgcatcaccgttgctagcgcgtttttcgtcggtcacaatcccccctgccacttccagctccatgtggatgtgatccctcgccactgccacgcatctggaacaacatcatccgccacgagcaccttctccaagcgccgggacggcttgctgctcatcgaccacgacatctccgtgctctgcgacaccaaggacgtgctcatctgtcttcgtccactactgggaagctctactactgactctagacattccagactggatcgaagtcgtgaatgccaacggcgacactcccttcgatattccacagtacctgacccttatgtttcacaccatgaaagtcgctgacactgatatgtacgtctaggatcccttctttggtgctctgtcaaagaacacaacggcttcttctacgacaacgatttccgtcactgactgtacaaatctctgccagagactgtaactgacgactggacagatctttatgatcctatgtaggctgatgaacgaagcagatcatgatattattctactaccaggctgtcaaggacatggtgagcacttgcagctcaaaaccgtgtcctcgcagagttcatgattgcgcactg

SEQ ID NO: 166668 - DNA, 365 bp, Zea mays
  unsure (1)..(365): unsure at all n locations
  Clone ID: MRT4577_83580C.1
gcgccaaccgcaacacgcaaccccagccaaccgacacggccgcccagggcaccgaggaaaaggactacaaagaaccacccccgccgccccnnctcgggtctgaaaagctnacaacattttccttctaccgnnccgnnatcgccganctcntngccaccttcctggtcctgtacatcagcatcctcactgtgatgggcgtgagcaaatcctccagcaacagcgccaccgtgggcatccaaggcatcacgtggtccttccgcggcatgatgttcgcgctggtgtactgcacggcgggcatctccggcgggcacatcaacccggccgtcaccttcagcctcttcctggcgcccaaactgtcgttcacg

SEQ ID NO: 166669 - DNA, 2045 bp, Zea mays
  Clone ID: MRT4577_83581C.1
acctcgaggccggccgggccgggaaacacgggtcgcgaggaaaagttagctcccttccgttcccttcaaaaccggagagggaactcgaagaagagggggggagaggagtgagaagaagcaacaagagcgaacgcgccaaggacggtgcaagccctgagatggcggcgccggcgccgaagcaggaggagctgcagccgcacgccgtcagggaccagctgccttccgtctcctactgcctcacaagcccgcccccatggccggaggccgtcctcctcggcttccagcactacctcgtcatgctcggcaccaccgtcatcatccccaccgcgctcgtgccccagatgggcggcggcaatggggagaaggcgcgggtggtgcagacgctgatgttcgtggccgggatcaacacgctgatccagagcttcctcggcacgcgcctccccgccgtcatgggtggctcctacaccttcgtcgcgcccaccatctccatcatcctcgccggccgctacagcggcattgccgatccccacgagaaattcgtgcgcatcatgcggggcacgcaaggcgcgctcattgtggcctccaccctccaaatcatcattggcttcagtggcctttggcgcattgtcgtcaggctgctgagcccgctgtctgctgctcccttggtcgctctcgtcggattcggcctctatgaactggggtttccaagtgttgccaaatgtgtagagatcggtcttccacagattttactgctggtggcactttctcagtacgtaccacatctggtccccttgctgagtactgcctttgagcggtttgctgtcataatgtccgtcgtcctcatctggctttacgccttcttcctgacggttggcggtgcctataagaatgctgctcccaagacccaattccactgccgcactgatcgatctgggcttgttgggggcgctccatggataagtgtaccctatccgtttcagtggggagctccaacctttgatgctggtgaagcctttgctatgatggcagcttcttttgttgctcttgtggagtccaccggtgcatttatcgccgtttcacggtatgccagcgcaacaccatgccctccttccgtcatgagccgtggcatcgggtggcagggagttggcattttgctgggtggattatttggaactgctaatggaacctctgtatctgtcgaaaatgctgggctgctcgctttgacacgcgttggtagtagacgtgttgtgcagatttctgctggatttatgatattcttctcgatccttggtaaattcggggccgttttcgcatcaattcctggcccgattatcgcggctatatactgtcttctcttcgcatatgttggtacggcgggtgttggtttcctgcagttctgcaacctgaacagcttccgaacaaaattcatcctggggttctctttgtttatgggtttgtcggtgccacagtatttcaacgagtacacttccgtcgcaggctttggcccggtacacacgcgtgcaagatggttcaacgatatggtcaacgtggtattctcctcgaaggcgttcgtcggcggggctgtggcgtatttcctggacaataccctgcagcggcgagatggcgccgtgaggaaggaccgggggcaccatttctgggacaggttcaggtccttcaagacagacccgcgcagcgaggagttctactccctcccattcaacctcaacaagttcttcccgtccttctgatcctgatggctggtaactgaaaatgctgttcggtcaggtggttgtgaattatgattttggcaaaatgccacgcccaaacggctgtttcctctcctgcttctattgtaaccactcgttgagttctgaatcttgtagagctcagcctgaaccatccagaagtagtggaggagaatttggctggtatttttggatgtaaattgggcctgtgttctcccatagatcgataaaatggaaagagaactttctgtagattacacactccagtgcgatacttaaactaatgctagtgcatgggca

SEQ ID NO: 166670 - DNA, 376 bp, Zea mays
  Clone ID: MRT4577_83582C.1
ggactcaacgggatcgattatgtaccgccgagaattttaaaacgatcatcttccctactgaacttgccactccacacagtcatccaagtcgaggctgttggagcactccagcagggcgtcctgctgctgctcgtaccggcagatgcagttcaggccaacgagcagattgcagagcaccgtctccgtggtctcccggacagcgaaatacagggtctgcagcatcattacgttccccttcataacgatctgctgctgctcgaagttcctctcggcctgccaccggaccgtgttgtgcgccattggagccagccacgccagtgtcttctccagcgccttccgacagttgtgcgccaggaacgcgtcgtatatcgccacg

SEQ ID NO: 166671 - DNA, 454 bp, Zea mays
  Clone ID: MRT4577_83583C.1
aggaaagctttttatgatttcattttggcttttgtctggcaccgtccgaaggcattgaaacaaagattgcaagacctgttgttaaggccctcctccctcttacataagccgtcaagggaaatgatacagcaggtctaacaggcttcctcctgttgtgaaacaccaagccatgtcctgccacaagacagcaacacaacatgtccagccatgttattatctgtgaagccctgacatcctacaaatgagcggtctgttacatctcatgccagtgaataatcggaggaaaaaaatctctatgcttggaccacatacagatgaagaaacttccattacgcgagaccggcttacattcctggatcctgaacaagctgggcttcatatatatgcccctggagtaagacctatcatgggaggagactggcattacatgaacttgtcggatctgcacagcccc

SEQ ID NO: 166672 - DNA, 582 bp, Zea mays
  Clone ID: MRT4577_83584C.1
tcccctccctccctctctccacctgagtcgagtcgctttccactccacttcgcttgccccgcacacctgctctgccctgccctgccgcgccgccctcgcccactccccctaccacctccccaagtcccgaggagtcaaggaaccaaggaggccacccacacccccacccccacgcacgagccgtgactgacagacgcccagccagccatggccgcgccgccgccgaagcaggaggagctgcagccgcacgccgtccgggaccagctgccggccgtctcctactgcctcaccagcccgccgccatggccggaggccatcctgctgggcttccagcactacctcgtcatgctgggcaccaccgtcatcatccccaccgcgctcgtcccgcagatgggcggcggcaacgaggagaaggcgcgggtggtgcagacgctgctcttcgtcgccgggatcaacacgctgctgcagagcttcctcggcacgcgcctccccgccgtcatcgggggctcctacaccttcgtcgcgcccaccatctccatcgtcctcgccgcgcgctacagcggcatcaccgacccgcacgag

SEQ ID NO: 166673 - DNA, 413 bp, Zea mays
  Clone ID: MRT4577_83585C.1
cagcaactgttgcatcagttacttgactgggtatgcagctacgtttgccaaagcaagtgggttggatgcaagcagctgttgttgcaggtaggcgatagggctcaccgaaggtaggtgggtcattacatgctgttacatcacagagatggttggcatggttagatatgatatggattgagaatgtgacagtaaataatttgaatgagtcgatggctcatgatctacggtatagcgcaagtccgtgatcggtcgcttcaatcatgataagacacgttttgtttcgttgctgtctacacgatcatgcggacttggtattaatttcacaactgcaaatactgtgatcatatatgatatagattataacccacatgctgatatacaggcgatgaacaaggcacacaaaattggacaat

SEQ ID NO: 166674 - DNA, 2088 bp, Zea mays
  Clone ID: MRT4577_83586C.1
gcgggagctcgcactccccgctagaaaaaaaaaacatcagttcccgtcaagcggagagagaagatagagatagagagagagagagagagagagaggagggagaaggagcaacaagagcgaacgcaaaagtacggtacagctcctgagatggcggcgccggcgccgaagcaggaggagctgcagccgcacgccgtcagggaccagctgccttccgtctcctactgcctcaccagcccgcccccatggccggaggccgtcctcctcggcttccagcactacctcgtcatgctcggcaccaccgtcatcatccccaccgcgctcgtcccccagatgggcggtggcaatggggagaaggcgcgggtggtgcagacgctgatgttcgtggccgggatcaacacgctcatccaaagcttcctcggcacgcgcctccccgccgtcatgggtggctcctacaccttcgtcgcgcccaccatctccatcatcctcgccggtcgctacagcggcattgccgatccccacgagaaattcgtgcgcatcatgcggggcacgcaaggcgcgctcattgtggcctccaccctccaaatcatcattggcttcagtggcctttggcgcattgtcgtcaggctgcggagcccgctgtctgctgctcccttggtcgcccttgtcggattcggcctctatgaactggggtttccaagtgttgccaaatgtgtagtgatcggtcttccacagattttactgctgggggcactttctcagtacgtaccacatctggtccccttgctgagtactggctttgagcggttgctgtcataatgtccgtcgtcctcatctggctttacgccttcttcctgacggtcggcggtgcctataagaatgctgctcccaagacccaattccactgccgcactgatcgatctgggcttgttgggggcgctccatggataagtgtaccctatccgtttcagtggggagctccaacctttgatgctggtgaagcctttgctatgatggcagcttcttttgttgctcttgtggagtccaccggtgcatttatcgctgtttcacggtatgccagcgcaacaccatgccctccttccgtcatgagccgtggcatcgggtggcagggagttggcattttgctgggtggattatttggaactgccaatggaaccactgtatctgtcgaaaatgctgggctgctcgctttgacacgcgttggtagtagacgtgttgtgcagatttctgctggatttatgatattcttctcaatccttggtaaattcggggctgttttcgcatcaattcccggcccagttatcgcagctgtatactgtcttctcttcgcatatgttggtatggcaggtgttgggttcctacagttctgcaacctgaacagcttccgaacaaagttcatcctgggattctccttgtttatgggtctgtcggtgccacagtatttcaacgaatacacttccgtcgcgggctttggtccagtgcacacgcgtgcaagatggttcaacgatatgatcaacgtggtgttttcctcgaaggcgcttgttggcggggcggtggcgtattttctggacaacaccctgcacaggcgcgatggcgtcgcgaggaaggaccggggccaccatttctgggacaggttcaggtccttcaagaccgacccgcgcagcgaggagttctactccctcccgttcaacctcaacaaattcttcccgtccttctgatccttgctggtggtgctggtaactgagagcagaaaaatggttgtggttaggttggttgtggactgtgattttggcaatgccacgccgcccaagagggctgtttctcctacttctgttgtggtgagctttgaatcttgcagagctcagcgtaaactatttcgaaaggagtggagaaattgcttggtattgctggatgtaaattgggttgggaaccgggatagattgataaaatgaaaacagaactgcgccagtactctttctgtagattataaactattgagctccagtgctattttagagtaaactaatgctggttgatgtgcaatcattgcatactctgcagtgagatact

SEQ ID NO: 166675 - DNA, 840 bp, Zea mays
  Clone ID: MRT4577_83587C.1
gccggccgggccggggaaccaagtcctgctagcggtgtccggtccggcgcccccctatttcctctcgcagcctcttctccccaaaccctaatcttgctcctgcctatctctgctccaatccgtcggtggagcggcggcgatggaggggaaggaggaaggtcggatcttcgtgggcggcctgtcgtggcaaacggacgagcgcaagcttcaggacgcctttggtcgcttcggcaaggtcgtcgatgttcaggtctctgttctcttggccattctttgtttgccgaggctgaatgagcggcaaatttccagatatggaacacaacgcgacacttgttgctttcccgagctgaattgctgatgaggtttaccacagttagatgcctgatttgagcactttgtctgaaattggattaaataaatggagaacagccattggttctactgtttctggtgttctgctatttcttagttcaattttgtggtctgatgaaagagaggggatgttactaatgatttctttggtagaattggatgaacaacacctgtcatgcctccttagtttctgatctgtgggaattctgctcggccagcacaagagttgtgtgcacctgtacagaacaacaacagggacaatgctcatgacacagattgatagatgaagttggaggtcattgccagatctgcactgtagtgggttgaactgatttgagtggcttataagatgcaacagaaagcaccatttcattattagtgtttggttgtgttcactgccctggccatgttttcagttgggttcattggcatccttgctgcagatagaatcatgactgcagttggctt

SEQ ID NO: 166676 - DNA, 408 bp, Zea mays
  Clone ID: MRT4577_83588C.1
cggaggagtgcgtgcgtggtcggctgccgctcgcgcacggtgtaggaggcggtgccgaggccacgtggcgggtcttggggacgagctccgttagcttgaagcggtgctcgggaagatggcgccggccaatggccgtaccgtgctgatcttccgtgtgccgtgcgggtgcccataagagaggatggaggtctggggcgctaagaaaaggtgcgccggatgaagacgtatggaggccatgaaaaacaaacagctgatggctccttatctattatctaatgacagacatcctaaacaactcatagctgagttactttcgcatagcgttactaggagatgactactaactactagggcggtggctgtttggagaaattgctctcattcatatagccctattggactagtgga

SEQ ID NO: 166677 - DNA, 419 bp, Zea mays
  Clone ID: MRT4577_83589C.1
ggggggctgtaaagggggaagggactgctttggatgatgaggggcctcgggcattgtctgcgaagccaaccggcccgcacgggtgggcgcgggaactggccccaggggcaggcgggcgtacccttgtggctttgaggggacctgatgaaagctgggggaaatggggggcttctcccagtccggcaggaaaagggctcccgatgaaacctccgtaaaccctacggtgcccaatgagatagggaactccctggggggcctactcgctgaccgtactctcattaattggggaacggtgactgccagctttcttgctggaaaacccagcgggccgggtgtggcaattaatcttcccgcccgccgggggagggctttttcctctggggcgccggggtacattttattttcccccaccgtacggg

SEQ ID NO: 166678 - DNA, 500 bp, Zea mays
  unsure (1)..(500): unsure at all n locations
  Clone ID: MRT4577_8358C.1
accaaccaaccnccnncgccngccgcnnctctttcggcgggcgggcacgggggcaaggacgggaggaggacanccgcnnccagacggcgccngcggaggancggaggaaccagnagcggaggcnncgannnncggcgggcgcaanaaannnccggcagggcncggagggccgcgnccncgcncgncncccgcngccnccgggcgaggggggcggccggcgctttttttttgcccccncngcgcngcgcaggacagngccngcagaggggangcacaggcccggccgcggggnccnncagaggnncagcacngcagcagcagnagagagcccacacaaaaaaaaccaagngaacnacacaaagcnccncannaagggcaacnnngnngannccgcanccggcaagacccccccaacccnggacccncgnacaggggaggnganngcncangnggcngagggngacgcagaggacannaaccgngcagcagcngcggcccgc

SEQ ID NO: 166679 - DNA, 453 bp, Zea mays
  Clone ID: MRT4577_83590C.1
gccggccgggcctggaaaaaggacacttgatctacctccctctctgcctgagcagataggatcaacgcaagtagctatgatgatgacgacctccagcggcctgaggagctgcaatgatgtgctcgtgacctctctggtgggggcgtcatgccgtgccggccgtctggcgccgttcttcctcaatgccaccacctctgtccgagaaaacaagtacgaccgagtggatgctacgggcattcacggcctgctgacctcgaacgttcatctccaggggacttagggttagatccgctgcgtgctaccgatcgtgccacgagaacttcgacgaacgtcaaggagatacaggcgtactactgccgctgtgacatgcttgccatccccgagatcctggtgccggaaactactgggcttgtgaactgggtcaacacccacgattggatgctcggccccggc

SEQ ID NO: 166680 - DNA, 369 bp, Zea mays
  unsure (1)..(369): unsure at all n locations
  Clone ID: MRT4577_83591C.1
ggggggccaagagaaaaggcgcgcgccgganaagacgacaacacacgggactacgagaaccncggggncnccaaggacgcgncccaggaggaccncaagaaagccnaccgcaaggccgccancaagaaccaccccnacaaggggggccgcccgggggagnncaaggagcnagcncaggcnnangaggnccacagngaacccgaaaagcgggagaaaaangaacaananggngaggangcccncaaggagggaangggaggnggnggagggaagcacgaacccnnngacanannccagncanncnnnggnggnggaagcccnnnnggaggnggnggcagcagnaggggcagaaggcagcgaaggggagag

SEQ ID NO: 166681 - DNA, 162 bp, Zea mays
  Clone ID: MRT4577_83592C.1
ctttcacgtcggaccatcggtgcacggcgcgcggcatgttcaaaccctttaagctgaatctaaacctgcaaaggtcgctcaggaccctgatgtgcattatgggcgtgaactgtaatatatccctcaggacaacattagtcacgaatcgactgctcctgcctt

SEQ ID NO: 166682 - DNA, 417 bp, Zea mays
  Clone ID: MRT4577_83593C.1
tttttttttttttgtttttttttttttgttttgttttttttatgggtcggtacagacagatcaataaaaaacaaatggaaaaaaggaaacaccattcatggacacaaaagacaaaacgaagaaaacaaacacaaaccaagaaaaagcacgcagaagcaggaaaacaaacaaaagaacgaacgacaaacaacccaacccccaaccccaagaacagccccacccccaagaatgcgaagaggctggacaagaaaaaaaaacaggcacacagctgaaccgacatggacacaacagcaaaaacccccggacgagacaaaccccacactaaagcaaggggtacgcccaaaggcccgacaccggacgcgaacaacaagaggtagaacagacgcccgggcgaagccggccccctcacccgggacc

SEQ ID NO: 166683 - DNA, 443 bp, Zea mays
  Clone ID: MRT4577_83594C.1
caaaacaaaaatgtgaatgtttcttattgataattaagtataaaatataaaaatagataaacagtgatgatgatgatgatgtctcgtttcaaaaaaaaaaaaaaaaaaaaaaaaaaaaaaaaaaaaaagaaaacacggggggggggggggtgacaacaagacgagatattttaagcttccacgcggtaaccaccaggcaagcccagtaccagccagatagatcatttcttcttgggggcagcctgggtcaccttggctccagctggggccttcttctccacactcttgttgactccggccgccaccggttgcctcatgtcgcgggccgcccttcgaccaagtggaggatactgtggaaaaggcctccacccccctgggccttagtgggcaaccatcttcaccataccaggttggccgttcttgagaaatttgggctccttttc

SEQ ID NO: 166684 - DNA, 266 bp, Zea mays
  Clone ID: MRT4577_83595C.1
acgcgtacgtcctgtcgttcgcacacgacattactcgcctcgttgatctcatcttaggacacctacattagctcttgcacatattccggccgagccaggctccccacctgacaatgtcttccgtccggatcggcccggctagtcctttccttgtaaccaaaacgacgctcggtgccccgcttgcgacccactgaataagtcccataccgttaaaagtagtgatatttcacttgcgcccttacgctcccacttatcctacacctctc

SEQ ID NO: 166685 - DNA, 2743 bp, Zea mays
  Clone ID: MRT4577_83596C.1
cgcgtccgtgtacgtccacacttatttactgtgacctgcacactgcactgtctgtcagtagacaacgcagcacagtagaacgaagcccaacagtctccgcgcaccgcctcgcgtcgcgccccctctgccagccagccagctcgatatatacgcgtgccgagcatagctcacctggcgccgcgacacacgtacacactgcagccatcaaaagccatggaaggccgcgcgcgcctctccctcgtccacgccgccgccgcgctggtggtcctgctgcagctgcatggcggcgccgtcgtggttgcgtctgagccgccctacacctgcggcgccggagcgccgcccaacatcccgttctgcgacgcggggctgcccatcgaccggcgcgtcgacgacctcgtctcgcggatgacggtggcggagaagatctcgcagctcggggaccagtccccggccatcccgcggctcggcgtgccggcgtacaagtggtggtccgaggcgctgcacgggatctccaaccagggccgcggcatccacctcgacggcccgctccgcgccgccaccagcttcccgcaggtcatcctcaccgccgcgtccttcaacccgcacctctggtaccgcatcggccaggtgatcggcgtcgaggcgagggcggtgtacaacaacgggcaggcggaggggctcaccttctgggcgcccaacatcaacgtgttccgggacccgcggtggggccgcgggcaggagacccccggcgaggacccgacgatgaccggcaagtacgccgccgtcttcgtccgcggcgtgcagggctacggcctcgccggccccgtcaactccacgggcctcgaggcctccgcctgctgcaagcacttcaccgcctacgacctcgagaactggaagggcgtcacccgatacgtgttcgacgccaaggtgacggcgcaggatctggcggacacgtacaaccctccgttcaagagctgcgtggaggacggccatgccagcggcatcatgtgctcctacaaccgcgtcaatggcgtgccgacgtgcgccgactacaacctgctctccacgacggcgaggcaggactgggggttttacgggtatatcacctcggactgcgacgctgtggccatcatccatgatgcgcaaggctacgccaagacggcagaagatgcagttgcagatgtgctcaaagctggaatggacgtgaactgcggcagctacgtgcaggaccacggtgcctctgcgctgcagcaagggaagatcacggagcaggacatcaacagggcgctgcacaacctgttcgccgtcaggatgaggctggggctcttcaacggcgaccccaggcgcaacctgtacggcgacatcgggcccgatcaggtgtgcacgcaggagcaccaggacctcgccctggaagcggcgcaggacggcatcgtcttgctcaagaacgacggcggcgccggcgcgctcccgctgtccaagcccaacgtcgcgtccctcgccgtgatcgggttcaacgcgaacgacgccatcaggctgcgcggcaactacttcggcccgccgtgcgtgacggtgacgccgctccaggtgctgcagggctacgtgaaggacacgagcttcgtcgccggctgcaactcggccgcctgcaacgtcacgacgatccccgaggcggtccaggcggcgagctcggcggactccgtcgtcttgttcatggggctggaccaggaccaggagagggaggaggttgaccggctggacctgacgctcccgggacagcagcagaccctcatcgagagcgtcgcgaacgcggcgaagaagccggtgatcctggtgctgctctgcggtgggcccgtggatgtgagctttgcgaagaccaaccccaagattggggccatcctgtgggctggctaccccggcgaggccggcggcattgccatcgcacaggtcctcttcggagagcacaaccctggtggaaggctgcccgtgacatggtatccccaagatttcacgagagtgcccatgacggacatgcggatgcgcgccgacccggccacgggctaccccggccggacgtaccggttctaccgcggcccgacagtgttcaacttcggctacggcctcagctactccaagtactcccaccgcttcgccacgaagccgcctcccacgagcaacgtcgcccggcctgaaggcggtggaggcaacggcgggcggcatggcgagctacgacgtggaggcgatcgggtcggagacgtgcgaccggctcaagttcccggcggtggtgcgggtgcagaaccacgggcccatggacgggaagcactcggtgctggtgttcatgcgctggcccaacgcgacggacggcagcggccggccggccagccagctgatcgggttccagagcctgcacctgagggcgacgcagacggcgcacgtggagttcgaggtgagcccctgcaagcacttcagccgggcgacggaggatggcaggaaggtgatcgatcagggctcgcacttcgtgatggtcggcgaggatgagttcgagatgagcttcatggcgtgatcccggttgtgttggaagcctcgagtgtttcctcagaatttccgatgctctctaacttattcaaacgagaaaaaaaggtaaattcagcaagattatggcatcattgatgccagaagttcattgacaaacgcttcccctctccttttgttctttaacaagctaagggaagtagaaattatcttgatt

SEQ ID NO: 166686 - DNA, 181 bp, Zea mays
  unsure (1)..(181): unsure at all n locations
  Clone ID: MRT4577_83597C.1
gnnntggaagcaatggtgacagcnccggctgnggatggacaacaacagntgtnctcctcacggaagttgtntctgaagtgctatcggctctagtttgttcctacggaatgttggtctgcaagctactccaagaaaagttncacaatatttctgcaaaggttcaagaatttcaggatcaatt

SEQ ID NO: 166687 - DNA, 422 bp, Zea mays
  Clone ID: MRT4577_83598C.1
ccatccagaaattccagtccatgaggatggtggtgacactgtccgatatgtggcaaaaccgcatcacaaagggaagaagcaccctgtgcatagtttgaaggaagagtatgagaaaaaacgtgctgaggaggagaaggctaaggaagagcgtgatgcaatggttcaggcaaagagggagcatcgggagaagtctgaggcgaagcggaaagaactgagggagaagatgttcaagaagacaagatctggccaacctgtgatgagataccggatcgagcatctcttggagactgcactgagcaagtaacgcgataccaaccatttgtagctccgtgcaaccatttgtttactgtaaccgtcttttgtcgcttcatcgttgtgtatatctttggatttgttgatcatatcactcaagagttctctgc

SEQ ID NO: 166688 - DNA, 796 bp, Zea mays
  Clone ID: MRT4577_83599C.1
cagcaaggtctctatggcttggattctgggactggggccaagccttggccttgtcagggtccctgggataggctttgtgtacacggagctggcaagtggcgtcccgcacatcttctctcatttcatcaccaacctccctgccatccactcagttgttgtcttcgtttgcgtcaagtacctcccggtatatacagtgccagccgaggaacggttcatcatgaagcggattgggccaaagaactaccacatgttccgttgcgtcgcgagatatggatacaaggacatccacaagaaagatgacaactttgagaagatgctcctcgacaggctcctgatatttgtcagactggagagcatgatggatggctactctgactccgaggacttcaccattatggagcagaaggccgagagatccagcagatcacttcagctgatcgagaaggctgggggcaacacactgagctccatcggtgacctgagctactcatcacaggactccatcgttccagccaagtcgcccctgacagggaacagcctgacaaggtactcaagccagacattcggcgacgagctggagttcctgaaccggtgcaaggacgcaggcgtcgtgcacatccttgggaacacggtcgtgcaggcgcgcagggactcggggttcgtgaagaaggttgctgtgaattatgtgtatgccttccttaggaagctgtgcagagagaacagtgtgatcttcaatgtcccacatgaaagcctcctgaatgtagggcagatatactatatatgaactttttgtttc

SEQ ID NO: 166689 - DNA, 305 bp, Zea mays
  Clone ID: MRT4577_8359C.1
tcccagccgtgtgctggcagatagggttgtattatttcttcttaccccatgcctgaccaagggaggtcaaaaggagaaaagtataggctgtggacaataactgatgaatatagggcccagatggaccaagtggggccggggagggatgaataaacaccctaccccgtgccctgtctttggtgagcagcagccctggggtcacagacatggaagggaccaccctggggctgactgcttttctgtgctgttggttcccaaaactagaaagaaggaagcagggagcggtgccccaagcatggctcctg
